United States Patent Application Publication US 2019/0048337 A1 - sequence listing, part 4

SEQ ID NO: 99525 - RNA, 22 nt, Artificial Sequence
  Synthetic
uuugaguguucaaaaauaauuc

SEQ ID NO: 99526 - RNA, 24 nt, Artificial Sequence
  Synthetic
aguuugaguguucaaaaauaauuc

SEQ ID NO: 99527 - RNA, 18 nt, Artificial Sequence
  Synthetic
aauauuuugccuuaauuc

SEQ ID NO: 99528 - RNA, 20 nt, Artificial Sequence
  Synthetic
agaauauuuugccuuaauuc

SEQ ID NO: 99529 - RNA, 22 nt, Artificial Sequence
  Synthetic
ugagaauauuuugccuuaauuc

SEQ ID NO: 99530 - RNA, 23 nt, Artificial Sequence
  Synthetic
cugagaauauuuugccuuaauuc

SEQ ID NO: 99531 - RNA, 24 nt, Artificial Sequence
  Synthetic
ucugagaauauuuugccuuaauuc

SEQ ID NO: 99532 - RNA, 18 nt, Artificial Sequence
  Synthetic
aaaagagaaauuuaauuc

SEQ ID NO: 99533 - RNA, 19 nt, Artificial Sequence
  Synthetic
caaaagagaaauuuaauuc

SEQ ID NO: 99534 - RNA, 20 nt, Artificial Sequence
  Synthetic
ucaaaagagaaauuuaauuc

SEQ ID NO: 99535 - RNA, 21 nt, Artificial Sequence
  Synthetic
uucaaaagagaaauuuaauuc

SEQ ID NO: 99536 - RNA, 22 nt, Artificial Sequence
  Synthetic
uuucaaaagagaaauuuaauuc

SEQ ID NO: 99537 - RNA, 23 nt, Artificial Sequence
  Synthetic
uuuucaaaagagaaauuuaauuc

SEQ ID NO: 99538 - RNA, 24 nt, Artificial Sequence
  Synthetic
auuuucaaaagagaaauuuaauuc

SEQ ID NO: 99539 - RNA, 18 nt, Artificial Sequence
  Synthetic
uauguugugauuuaauuc

SEQ ID NO: 99540 - RNA, 19 nt, Artificial Sequence
  Synthetic
auauguugugauuuaauuc

SEQ ID NO: 99541 - RNA, 21 nt, Artificial Sequence
  Synthetic
agauauguugugauuuaauuc

SEQ ID NO: 99542 - RNA, 22 nt, Artificial Sequence
  Synthetic
aagauauguugugauuuaauuc

SEQ ID NO: 99543 - RNA, 19 nt, Artificial Sequence
  Synthetic
uggucaugcuauuuaauuc

SEQ ID NO: 99544 - RNA, 20 nt, Artificial Sequence
  Synthetic
cuggucaugcuauuuaauuc

SEQ ID NO: 99545 - RNA, 21 nt, Artificial Sequence
  Synthetic
ucuggucaugcuauuuaauuc

SEQ ID NO: 99546 - RNA, 22 nt, Artificial Sequence
  Synthetic
aucuggucaugcuauuuaauuc

SEQ ID NO: 99547 - RNA, 23 nt, Artificial Sequence
  Synthetic
aaucuggucaugcuauuuaauuc

SEQ ID NO: 99548 - RNA, 18 nt, Artificial Sequence
  Synthetic
uucuuaaaagucacauuc

SEQ ID NO: 99549 - RNA, 19 nt, Artificial Sequence
  Synthetic
cuucuuaaaagucacauuc

SEQ ID NO: 99550 - RNA, 20 nt, Artificial Sequence
  Synthetic
ucuucuuaaaagucacauuc

SEQ ID NO: 99551 - RNA, 21 nt, Artificial Sequence
  Synthetic
cucuucuuaaaagucacauuc

SEQ ID NO: 99552 - RNA, 23 nt, Artificial Sequence
  Synthetic
agcucuucuuaaaagucacauuc

SEQ ID NO: 99553 - RNA, 24 nt, Artificial Sequence
  Synthetic
uagcucuucuuaaaagucacauuc

SEQ ID NO: 99554 - RNA, 18 nt, Artificial Sequence
  Synthetic
aaauaagcugucacauuc

SEQ ID NO: 99555 - RNA, 20 nt, Artificial Sequence
  Synthetic
agaaauaagcugucacauuc

SEQ ID NO: 99556 - RNA, 21 nt, Artificial Sequence
  Synthetic
cagaaauaagcugucacauuc

SEQ ID NO: 99557 - RNA, 22 nt, Artificial Sequence
  Synthetic
acagaaauaagcugucacauuc

SEQ ID NO: 99558 - RNA, 23 nt, Artificial Sequence
  Synthetic
aacagaaauaagcugucacauuc

SEQ ID NO: 99559 - RNA, 21 nt, Artificial Sequence
  Synthetic
aaggcucaaauggagacauuc

SEQ ID NO: 99560 - RNA, 22 nt, Artificial Sequence
  Synthetic
aaaggcucaaauggagacauuc

SEQ ID NO: 99561 - RNA, 23 nt, Artificial Sequence
  Synthetic
uaaaggcucaaauggagacauuc

SEQ ID NO: 99562 - RNA, 24 nt, Artificial Sequence
  Synthetic
uuaaaggcucaaauggagacauuc

SEQ ID NO: 99563 - RNA, 18 nt, Artificial Sequence
  Synthetic
aggcuccuuuagacauuc

SEQ ID NO: 99564 - RNA, 19 nt, Artificial Sequence
  Synthetic
aaggcuccuuuagacauuc

SEQ ID NO: 99565 - RNA, 20 nt, Artificial Sequence
  Synthetic
caaggcuccuuuagacauuc

SEQ ID NO: 99566 - RNA, 21 nt, Artificial Sequence
  Synthetic
ucaaggcuccuuuagacauuc

SEQ ID NO: 99567 - RNA, 22 nt, Artificial Sequence
  Synthetic
uucaaggcuccuuuagacauuc

SEQ ID NO: 99568 - RNA, 23 nt, Artificial Sequence
  Synthetic
uuucaaggcuccuuuagacauuc

SEQ ID NO: 99569 - RNA, 24 nt, Artificial Sequence
  Synthetic
cuuucaaggcuccuuuagacauuc

SEQ ID NO: 99570 - RNA, 18 nt, Artificial Sequence
  Synthetic
aagaccuggccuccauuc

SEQ ID NO: 99571 - RNA, 19 nt, Artificial Sequence
  Synthetic
aaagaccuggccuccauuc

SEQ ID NO: 99572 - RNA, 20 nt, Artificial Sequence
  Synthetic
aaaagaccuggccuccauuc

SEQ ID NO: 99573 - RNA, 24 nt, Artificial Sequence
  Synthetic
agggaaaagaccuggccuccauuc

SEQ ID NO: 99574 - RNA, 18 nt, Artificial Sequence
  Synthetic
cccugaaagacagcauuc

SEQ ID NO: 99575 - RNA, 19 nt, Artificial Sequence
  Synthetic
acccugaaagacagcauuc

SEQ ID NO: 99576 - RNA, 20 nt, Artificial Sequence
  Synthetic
cacccugaaagacagcauuc

SEQ ID NO: 99577 - RNA, 22 nt, Artificial Sequence
  Synthetic
agcacccugaaagacagcauuc

SEQ ID NO: 99578 - RNA, 23 nt, Artificial Sequence
  Synthetic
aagcacccugaaagacagcauuc

SEQ ID NO: 99579 - RNA, 24 nt, Artificial Sequence
  Synthetic
aaagcacccugaaagacagcauuc

SEQ ID NO: 99580 - RNA, 18 nt, Artificial Sequence
  Synthetic
aaauuccuaucagcauuc

SEQ ID NO: 99581 - RNA, 19 nt, Artificial Sequence
  Synthetic
aaaauuccuaucagcauuc

SEQ ID NO: 99582 - RNA, 20 nt, Artificial Sequence
  Synthetic
uaaaauuccuaucagcauuc

SEQ ID NO: 99583 - RNA, 21 nt, Artificial Sequence
  Synthetic
auaaaauuccuaucagcauuc

SEQ ID NO: 99584 - RNA, 22 nt, Artificial Sequence
  Synthetic
uauaaaauuccuaucagcauuc

SEQ ID NO: 99585 - RNA, 23 nt, Artificial Sequence
  Synthetic
uuauaaaauuccuaucagcauuc

SEQ ID NO: 99586 - RNA, 18 nt, Artificial Sequence
  Synthetic
uaguuaggucacgcauuc

SEQ ID NO: 99587 - RNA, 19 nt, Artificial Sequence
  Synthetic
auaguuaggucacgcauuc

SEQ ID NO: 99588 - RNA, 20 nt, Artificial Sequence
  Synthetic
aauaguuaggucacgcauuc

SEQ ID NO: 99589 - RNA, 21 nt, Artificial Sequence
  Synthetic
uaauaguuaggucacgcauuc

SEQ ID NO: 99590 - RNA, 23 nt, Artificial Sequence
  Synthetic
uguaauaguuaggucacgcauuc

SEQ ID NO: 99591 - RNA, 18 nt, Artificial Sequence
  Synthetic
cauucagaaagggcauuc

SEQ ID NO: 99592 - RNA, 20 nt, Artificial Sequence
  Synthetic
agcauucagaaagggcauuc

SEQ ID NO: 99593 - RNA, 21 nt, Artificial Sequence
  Synthetic
aagcauucagaaagggcauuc

SEQ ID NO: 99594 - RNA, 22 nt, Artificial Sequence
  Synthetic
aaagcauucagaaagggcauuc

SEQ ID NO: 99595 - RNA, 24 nt, Artificial Sequence
  Synthetic
agaaagcauucagaaagggcauuc

SEQ ID NO: 99596 - RNA, 18 nt, Artificial Sequence
  Synthetic
cuaaauaauaauucauuc

SEQ ID NO: 99597 - RNA, 19 nt, Artificial Sequence
  Synthetic
acuaaauaauaauucauuc

SEQ ID NO: 99598 - RNA, 21 nt, Artificial Sequence
  Synthetic
agacuaaauaauaauucauuc

SEQ ID NO: 99599 - RNA, 22 nt, Artificial Sequence
  Synthetic
uagacuaaauaauaauucauuc

SEQ ID NO: 99600 - RNA, 23 nt, Artificial Sequence
  Synthetic
cuagacuaaauaauaauucauuc

SEQ ID NO: 99601 - RNA, 24 nt, Artificial Sequence
  Synthetic
acuagacuaaauaauaauucauuc

SEQ ID NO: 99602 - RNA, 18 nt, Artificial Sequence
  Synthetic
caagaaacuuauucauuc

SEQ ID NO: 99603 - RNA, 19 nt, Artificial Sequence
  Synthetic
ucaagaaacuuauucauuc

SEQ ID NO: 99604 - RNA, 20 nt, Artificial Sequence
  Synthetic
cucaagaaacuuauucauuc

SEQ ID NO: 99605 - RNA, 21 nt, Artificial Sequence
  Synthetic
ucucaagaaacuuauucauuc

SEQ ID NO: 99606 - RNA, 22 nt, Artificial Sequence
  Synthetic
uucucaagaaacuuauucauuc

SEQ ID NO: 99607 - RNA, 23 nt, Artificial Sequence
  Synthetic
uuucucaagaaacuuauucauuc

SEQ ID NO: 99608 - RNA, 18 nt, Artificial Sequence
  Synthetic
aguccucuaccuucauuc

SEQ ID NO: 99609 - RNA, 19 nt, Artificial Sequence
  Synthetic
caguccucuaccuucauuc

SEQ ID NO: 99610 - RNA, 20 nt, Artificial Sequence
  Synthetic
ucaguccucuaccuucauuc

SEQ ID NO: 99611 - RNA, 21 nt, Artificial Sequence
  Synthetic
uucaguccucuaccuucauuc

SEQ ID NO: 99612 - RNA, 22 nt, Artificial Sequence
  Synthetic
uuucaguccucuaccuucauuc

SEQ ID NO: 99613 - RNA, 23 nt, Artificial Sequence
  Synthetic
uuuucaguccucuaccuucauuc

SEQ ID NO: 99614 - RNA, 24 nt, Artificial Sequence
  Synthetic
cuuuucaguccucuaccuucauuc

SEQ ID NO: 99615 - RNA, 19 nt, Artificial Sequence
  Synthetic
agaacuuguuucuucauuc

SEQ ID NO: 99616 - RNA, 21 nt, Artificial Sequence
  Synthetic
agagaacuuguuucuucauuc

SEQ ID NO: 99617 - RNA, 22 nt, Artificial Sequence
  Synthetic
cagagaacuuguuucuucauuc

SEQ ID NO: 99618 - RNA, 23 nt, Artificial Sequence
  Synthetic
acagagaacuuguuucuucauuc

SEQ ID NO: 99619 - RNA, 24 nt, Artificial Sequence
  Synthetic
uacagagaacuuguuucuucauuc

SEQ ID NO: 99620 - RNA, 18 nt, Artificial Sequence
  Synthetic
auuuggguaguuucauuc

SEQ ID NO: 99621 - RNA, 19 nt, Artificial Sequence
  Synthetic
aauuuggguaguuucauuc

SEQ ID NO: 99622 - RNA, 20 nt, Artificial Sequence
  Synthetic
aaauuuggguaguuucauuc

SEQ ID NO: 99623 - RNA, 21 nt, Artificial Sequence
  Synthetic
caaauuuggguaguuucauuc

SEQ ID NO: 99624 - RNA, 22 nt, Artificial Sequence
  Synthetic
ucaaauuuggguaguuucauuc

SEQ ID NO: 99625 - RNA, 23 nt, Artificial Sequence
  Synthetic
uucaaauuuggguaguuucauuc

SEQ ID NO: 99626 - RNA, 21 nt, Artificial Sequence
  Synthetic
aaagaaaauucuuaaagauuc

SEQ ID NO: 99627 - RNA, 22 nt, Artificial Sequence
  Synthetic
caaagaaaauucuuaaagauuc

SEQ ID NO: 99628 - RNA, 24 nt, Artificial Sequence
  Synthetic
agcaaagaaaauucuuaaagauuc

SEQ ID NO: 99629 - RNA, 21 nt, Artificial Sequence
  Synthetic
uccuucuccucucccagauuc

SEQ ID NO: 99630 - RNA, 22 nt, Artificial Sequence
  Synthetic
auccuucuccucucccagauuc

SEQ ID NO: 99631 - RNA, 23 nt, Artificial Sequence
  Synthetic
cauccuucuccucucccagauuc

SEQ ID NO: 99632 - RNA, 24 nt, Artificial Sequence
  Synthetic
ucauccuucuccucucccagauuc

SEQ ID NO: 99633 - RNA, 18 nt, Artificial Sequence
  Synthetic
uucuuugucaugagauuc

SEQ ID NO: 99634 - RNA, 20 nt, Artificial Sequence
  Synthetic
uguucuuugucaugagauuc

SEQ ID NO: 99635 - RNA, 21 nt, Artificial Sequence
  Synthetic
auguucuuugucaugagauuc

SEQ ID NO: 99636 - RNA, 22 nt, Artificial Sequence
  Synthetic
cauguucuuugucaugagauuc

SEQ ID NO: 99637 - RNA, 23 nt, Artificial Sequence
  Synthetic
ucauguucuuugucaugagauuc

SEQ ID NO: 99638 - RNA, 18 nt, Artificial Sequence
  Synthetic
cauccugccucuagauuc

SEQ ID NO: 99639 - RNA, 20 nt, Artificial Sequence
  Synthetic
ugcauccugccucuagauuc

SEQ ID NO: 99640 - RNA, 21 nt, Artificial Sequence
  Synthetic
cugcauccugccucuagauuc

SEQ ID NO: 99641 - RNA, 22 nt, Artificial Sequence
  Synthetic
acugcauccugccucuagauuc

SEQ ID NO: 99642 - RNA, 23 nt, Artificial Sequence
  Synthetic
aacugcauccugccucuagauuc

SEQ ID NO: 99643 - RNA, 24 nt, Artificial Sequence
  Synthetic
uaacugcauccugccucuagauuc

SEQ ID NO: 99644 - RNA, 18 nt, Artificial Sequence
  Synthetic
cugaaucagcuuagauuc

SEQ ID NO: 99645 - RNA, 19 nt, Artificial Sequence
  Synthetic
acugaaucagcuuagauuc

SEQ ID NO: 99646 - RNA, 21 nt, Artificial Sequence
  Synthetic
agacugaaucagcuuagauuc

SEQ ID NO: 99647 - RNA, 23 nt, Artificial Sequence
  Synthetic
agagacugaaucagcuuagauuc

SEQ ID NO: 99648 - RNA, 24 nt, Artificial Sequence
  Synthetic
uagagacugaaucagcuuagauuc

SEQ ID NO: 99649 - RNA, 18 nt, Artificial Sequence
  Synthetic
aaaucucuccaaggauuc

SEQ ID NO: 99650 - RNA, 19 nt, Artificial Sequence
  Synthetic
uaaaucucuccaaggauuc

SEQ ID NO: 99651 - RNA, 20 nt, Artificial Sequence
  Synthetic
cuaaaucucuccaaggauuc

SEQ ID NO: 99652 - RNA, 21 nt, Artificial Sequence
  Synthetic
ucuaaaucucuccaaggauuc

SEQ ID NO: 99653 - RNA, 22 nt, Artificial Sequence
  Synthetic
uucuaaaucucuccaaggauuc

SEQ ID NO: 99654 - RNA, 23 nt, Artificial Sequence
  Synthetic
cuucuaaaucucuccaaggauuc

SEQ ID NO: 99655 - RNA, 19 nt, Artificial Sequence
  Synthetic
agguaacccuggaggauuc

SEQ ID NO: 99656 - RNA, 20 nt, Artificial Sequence
  Synthetic
aagguaacccuggaggauuc

SEQ ID NO: 99657 - RNA, 21 nt, Artificial Sequence
  Synthetic
caagguaacccuggaggauuc

SEQ ID NO: 99658 - RNA, 22 nt, Artificial Sequence
  Synthetic
acaagguaacccuggaggauuc

SEQ ID NO: 99659 - RNA, 23 nt, Artificial Sequence
  Synthetic
aacaagguaacccuggaggauuc

SEQ ID NO: 99660 - RNA, 24 nt, Artificial Sequence
  Synthetic
aaacaagguaacccuggaggauuc

SEQ ID NO: 99661 - RNA, 18 nt, Artificial Sequence
  Synthetic
uaaauaggauguugauuc

SEQ ID NO: 99662 - RNA, 19 nt, Artificial Sequence
  Synthetic
auaaauaggauguugauuc

SEQ ID NO: 99663 - RNA, 20 nt, Artificial Sequence
  Synthetic
cauaaauaggauguugauuc

SEQ ID NO: 99664 - RNA, 22 nt, Artificial Sequence
  Synthetic
agcauaaauaggauguugauuc

SEQ ID NO: 99665 - RNA, 23 nt, Artificial Sequence
  Synthetic
aagcauaaauaggauguugauuc

SEQ ID NO: 99666 - RNA, 24 nt, Artificial Sequence
  Synthetic
caagcauaaauaggauguugauuc

SEQ ID NO: 99667 - RNA, 18 nt, Artificial Sequence
  Synthetic
cuuauuaugauuugauuc

SEQ ID NO: 99668 - RNA, 20 nt, Artificial Sequence
  Synthetic
ugcuuauuaugauuugauuc

SEQ ID NO: 99669 - RNA, 21 nt, Artificial Sequence
  Synthetic
cugcuuauuaugauuugauuc

SEQ ID NO: 99670 - RNA, 22 nt, Artificial Sequence
  Synthetic
ucugcuuauuaugauuugauuc

SEQ ID NO: 99671 - RNA, 23 nt, Artificial Sequence
  Synthetic
uucugcuuauuaugauuugauuc

SEQ ID NO: 99672 - RNA, 24 nt, Artificial Sequence
  Synthetic
cuucugcuuauuaugauuugauuc

SEQ ID NO: 99673 - RNA, 21 nt, Artificial Sequence
  Synthetic
uuaaaaaaugauaaaauauuc

SEQ ID NO: 99674 - RNA, 23 nt, Artificial Sequence
  Synthetic
uguuaaaaaaugauaaaauauuc

SEQ ID NO: 99675 - RNA, 24 nt, Artificial Sequence
  Synthetic
uuguuaaaaaaugauaaaauauuc

SEQ ID NO: 99676 - RNA, 18 nt, Artificial Sequence
  Synthetic
uagagcagauccauauuc

SEQ ID NO: 99677 - RNA, 19 nt, Artificial Sequence
  Synthetic
uuagagcagauccauauuc

SEQ ID NO: 99678 - RNA, 20 nt, Artificial Sequence
  Synthetic
uuuagagcagauccauauuc

SEQ ID NO: 99679 - RNA, 21 nt, Artificial Sequence
  Synthetic
auuuagagcagauccauauuc

SEQ ID NO: 99680 - RNA, 22 nt, Artificial Sequence
  Synthetic
cauuuagagcagauccauauuc

SEQ ID NO: 99681 - RNA, 23 nt, Artificial Sequence
  Synthetic
acauuuagagcagauccauauuc

SEQ ID NO: 99682 - RNA, 18 nt, Artificial Sequence
  Synthetic
cugaaauguuucauauuc

SEQ ID NO: 99683 - RNA, 19 nt, Artificial Sequence
  Synthetic
ucugaaauguuucauauuc

SEQ ID NO: 99684 - RNA, 21 nt, Artificial Sequence
  Synthetic
ugucugaaauguuucauauuc

SEQ ID NO: 99685 - RNA, 22 nt, Artificial Sequence
  Synthetic
uugucugaaauguuucauauuc

SEQ ID NO: 99686 - RNA, 23 nt, Artificial Sequence
  Synthetic
auugucugaaauguuucauauuc

SEQ ID NO: 99687 - RNA, 24 nt, Artificial Sequence
  Synthetic
aauugucugaaauguuucauauuc

SEQ ID NO: 99688 - RNA, 18 nt, Artificial Sequence
  Synthetic
uauuuuugcuggauauuc

SEQ ID NO: 99689 - RNA, 19 nt, Artificial Sequence
  Synthetic
cuauuuuugcuggauauuc

SEQ ID NO: 99690 - RNA, 20 nt, Artificial Sequence
  Synthetic
acuauuuuugcuggauauuc

SEQ ID NO: 99691 - RNA, 21 nt, Artificial Sequence
  Synthetic
uacuauuuuugcuggauauuc

SEQ ID NO: 99692 - RNA, 22 nt, Artificial Sequence
  Synthetic
auacuauuuuugcuggauauuc

SEQ ID NO: 99693 - RNA, 23 nt, Artificial Sequence
  Synthetic
uauacuauuuuugcuggauauuc

SEQ ID NO: 99694 - RNA, 24 nt, Artificial Sequence
  Synthetic
cuauacuauuuuugcuggauauuc

SEQ ID NO: 99695 - RNA, 18 nt, Artificial Sequence
  Synthetic
ugaggauuugauauauuc

SEQ ID NO: 99696 - RNA, 19 nt, Artificial Sequence
  Synthetic
cugaggauuugauauauuc

SEQ ID NO: 99697 - RNA, 20 nt, Artificial Sequence
  Synthetic
ucugaggauuugauauauuc

SEQ ID NO: 99698 - RNA, 21 nt, Artificial Sequence
  Synthetic
cucugaggauuugauauauuc

SEQ ID NO: 99699 - RNA, 22 nt, Artificial Sequence
  Synthetic
ucucugaggauuugauauauuc

SEQ ID NO: 99700 - RNA, 23 nt, Artificial Sequence
  Synthetic
cucucugaggauuugauauauuc

SEQ ID NO: 99701 - RNA, 24 nt, Artificial Sequence
  Synthetic
acucucugaggauuugauauauuc

SEQ ID NO: 99702 - RNA, 18 nt, Artificial Sequence
  Synthetic
aguaaucugaguauauuc

SEQ ID NO: 99703 - RNA, 19 nt, Artificial Sequence
  Synthetic
caguaaucugaguauauuc

SEQ ID NO: 99704 - RNA, 20 nt, Artificial Sequence
  Synthetic
ucaguaaucugaguauauuc

SEQ ID NO: 99705 - RNA, 21 nt, Artificial Sequence
  Synthetic
cucaguaaucugaguauauuc

SEQ ID NO: 99706 - RNA, 22 nt, Artificial Sequence
  Synthetic
ucucaguaaucugaguauauuc

SEQ ID NO: 99707 - RNA, 23 nt, Artificial Sequence
  Synthetic
uucucaguaaucugaguauauuc

SEQ ID NO: 99708 - RNA, 24 nt, Artificial Sequence
  Synthetic
auucucaguaaucugaguauauuc

SEQ ID NO: 99709 - RNA, 21 nt, Artificial Sequence
  Synthetic
uagaauacagaaauuauauuc

SEQ ID NO: 99710 - RNA, 23 nt, Artificial Sequence
  Synthetic
uguagaauacagaaauuauauuc

SEQ ID NO: 99711 - RNA, 24 nt, Artificial Sequence
  Synthetic
uuguagaauacagaaauuauauuc

SEQ ID NO: 99712 - RNA, 21 nt, Artificial Sequence
  Synthetic
uaucagcauuucugacuauuc

SEQ ID NO: 99713 - RNA, 22 nt, Artificial Sequence
  Synthetic
cuaucagcauuucugacuauuc

SEQ ID NO: 99714 - RNA, 23 nt, Artificial Sequence
  Synthetic
acuaucagcauuucugacuauuc

SEQ ID NO: 99715 - RNA, 24 nt, Artificial Sequence
  Synthetic
aacuaucagcauuucugacuauuc

SEQ ID NO: 99716 - RNA, 18 nt, Artificial Sequence
  Synthetic
cacagucuaaaucuauuc

SEQ ID NO: 99717 - RNA, 20 nt, Artificial Sequence
  Synthetic
agcacagucuaaaucuauuc

SEQ ID NO: 99718 - RNA, 21 nt, Artificial Sequence
  Synthetic
uagcacagucuaaaucuauuc

SEQ ID NO: 99719 - RNA, 22 nt, Artificial Sequence
  Synthetic
auagcacagucuaaaucuauuc

SEQ ID NO: 99720 - RNA, 23 nt, Artificial Sequence
  Synthetic
aauagcacagucuaaaucuauuc

SEQ ID NO: 99721 - RNA, 24 nt, Artificial Sequence
  Synthetic
uaauagcacagucuaaaucuauuc

SEQ ID NO: 99722 - RNA, 18 nt, Artificial Sequence
  Synthetic
cugggcacccaucuauuc

SEQ ID NO: 99723 - RNA, 19 nt, Artificial Sequence
  Synthetic
ucugggcacccaucuauuc

SEQ ID NO: 99724 - RNA, 20 nt, Artificial Sequence
  Synthetic
aucugggcacccaucuauuc

SEQ ID NO: 99725 - RNA, 21 nt, Artificial Sequence
  Synthetic
caucugggcacccaucuauuc

SEQ ID NO: 99726 - RNA, 22 nt, Artificial Sequence
  Synthetic
ccaucugggcacccaucuauuc

SEQ ID NO: 99727 - RNA, 23 nt, Artificial Sequence
  Synthetic
accaucugggcacccaucuauuc

SEQ ID NO: 99728 - RNA, 24 nt, Artificial Sequence
  Synthetic
caccaucugggcacccaucuauuc

SEQ ID NO: 99729 - RNA, 18 nt, Artificial Sequence
  Synthetic
uaaauaauuugaguauuc

SEQ ID NO: 99730 - RNA, 19 nt, Artificial Sequence
  Synthetic
auaaauaauuugaguauuc

SEQ ID NO: 99731 - RNA, 20 nt, Artificial Sequence
  Synthetic
uauaaauaauuugaguauuc

SEQ ID NO: 99732 - RNA, 21 nt, Artificial Sequence
  Synthetic
auauaaauaauuugaguauuc

SEQ ID NO: 99733 - RNA, 22 nt, Artificial Sequence
  Synthetic
uauauaaauaauuugaguauuc

SEQ ID NO: 99734 - RNA, 23 nt, Artificial Sequence
  Synthetic
uuauauaaauaauuugaguauuc

SEQ ID NO: 99735 - RNA, 24 nt, Artificial Sequence
  Synthetic
uuuauauaaauaauuugaguauuc

SEQ ID NO: 99736 - RNA, 18 nt, Artificial Sequence
  Synthetic
ugaugauuuaugguauuc

SEQ ID NO: 99737 - RNA, 19 nt, Artificial Sequence
  Synthetic
uugaugauuuaugguauuc

SEQ ID NO: 99738 - RNA, 20 nt, Artificial Sequence
  Synthetic
uuugaugauuuaugguauuc

SEQ ID NO: 99739 - RNA, 21 nt, Artificial Sequence
  Synthetic
cuuugaugauuuaugguauuc

SEQ ID NO: 99740 - RNA, 22 nt, Artificial Sequence
  Synthetic
ccuuugaugauuuaugguauuc

SEQ ID NO: 99741 - RNA, 24 nt, Artificial Sequence
  Synthetic
ugccuuugaugauuuaugguauuc

SEQ ID NO: 99742 - RNA, 20 nt, Artificial Sequence
  Synthetic
uggaaacaacguugguauuc

SEQ ID NO: 99743 - RNA, 22 nt, Artificial Sequence
  Synthetic
uguggaaacaacguugguauuc

SEQ ID NO: 99744 - RNA, 24 nt, Artificial Sequence
  Synthetic
aguguggaaacaacguugguauuc

SEQ ID NO: 99745 - RNA, 18 nt, Artificial Sequence
  Synthetic
cuggccuggccuguauuc

SEQ ID NO: 99746 - RNA, 19 nt, Artificial Sequence
  Synthetic
ccuggccuggccuguauuc

SEQ ID NO: 99747 - RNA, 20 nt, Artificial Sequence
  Synthetic
accuggccuggccuguauuc

SEQ ID NO: 99748 - RNA, 21 nt, Artificial Sequence
  Synthetic
caccuggccuggccuguauuc

SEQ ID NO: 99749 - RNA, 23 nt, Artificial Sequence
  Synthetic
ugcaccuggccuggccuguauuc

SEQ ID NO: 99750 - RNA, 24 nt, Artificial Sequence
  Synthetic
cugcaccuggccuggccuguauuc

SEQ ID NO: 99751 - RNA, 18 nt, Artificial Sequence
  Synthetic
cugaacauuuguguauuc

SEQ ID NO: 99752 - RNA, 19 nt, Artificial Sequence
  Synthetic
acugaacauuuguguauuc

SEQ ID NO: 99753 - RNA, 20 nt, Artificial Sequence
  Synthetic
uacugaacauuuguguauuc

SEQ ID NO: 99754 - RNA, 22 nt, Artificial Sequence
  Synthetic
uguacugaacauuuguguauuc

SEQ ID NO: 99755 - RNA, 23 nt, Artificial Sequence
  Synthetic
cuguacugaacauuuguguauuc

SEQ ID NO: 99756 - RNA, 18 nt, Artificial Sequence
  Synthetic
agaccuuuauuuguauuc

SEQ ID NO: 99757 - RNA, 19 nt, Artificial Sequence
  Synthetic
aagaccuuuauuuguauuc

SEQ ID NO: 99758 - RNA, 20 nt, Artificial Sequence
  Synthetic
uaagaccuuuauuuguauuc

SEQ ID NO: 99759 - RNA, 21 nt, Artificial Sequence
  Synthetic
uuaagaccuuuauuuguauuc

SEQ ID NO: 99760 - RNA, 22 nt, Artificial Sequence
  Synthetic
auuaagaccuuuauuuguauuc

SEQ ID NO: 99761 - RNA, 23 nt, Artificial Sequence
  Synthetic
aauuaagaccuuuauuuguauuc

SEQ ID NO: 99762 - RNA, 24 nt, Artificial Sequence
  Synthetic
uaauuaagaccuuuauuuguauuc

SEQ ID NO: 99763 - RNA, 18 nt, Artificial Sequence
  Synthetic
uauucacuaaucuuauuc

SEQ ID NO: 99764 - RNA, 19 nt, Artificial Sequence
  Synthetic
uuauucacuaaucuuauuc

SEQ ID NO: 99765 - RNA, 20 nt, Artificial Sequence
  Synthetic
cuuauucacuaaucuuauuc

SEQ ID NO: 99766 - RNA, 21 nt, Artificial Sequence
  Synthetic
ucuuauucacuaaucuuauuc

SEQ ID NO: 99767 - RNA, 22 nt, Artificial Sequence
  Synthetic
aucuuauucacuaaucuuauuc

SEQ ID NO: 99768 - RNA, 23 nt, Artificial Sequence
  Synthetic
uaucuuauucacuaaucuuauuc

SEQ ID NO: 99769 - RNA, 21 nt, Artificial Sequence
  Synthetic
uuuuucuggauuuuuuuauuc

SEQ ID NO: 99770 - RNA, 22 nt, Artificial Sequence
  Synthetic
uuuuuucuggauuuuuuuauuc

SEQ ID NO: 99771 - RNA, 23 nt, Artificial Sequence
  Synthetic
uuuuuuucuggauuuuuuuauuc

SEQ ID NO: 99772 - RNA, 24 nt, Artificial Sequence
  Synthetic
auuuuuuucuggauuuuuuuauuc

SEQ ID NO: 99773 - RNA, 18 nt, Artificial Sequence
  Synthetic
cucacucacuaaaacuuc

SEQ ID NO: 99774 - RNA, 20 nt, Artificial Sequence
  Synthetic
ugcucacucacuaaaacuuc

SEQ ID NO: 99775 - RNA, 21 nt, Artificial Sequence
  Synthetic
uugcucacucacuaaaacuuc

SEQ ID NO: 99776 - RNA, 24 nt, Artificial Sequence
  Synthetic
agguugcucacucacuaaaacuuc

SEQ ID NO: 99777 - RNA, 19 nt, Artificial Sequence
  Synthetic
ugccuuggcugcaaacuuc

SEQ ID NO: 99778 - RNA, 20 nt, Artificial Sequence
  Synthetic
cugccuuggcugcaaacuuc

SEQ ID NO: 99779 - RNA, 21 nt, Artificial Sequence
  Synthetic
ucugccuuggcugcaaacuuc

SEQ ID NO: 99780 - RNA, 22 nt, Artificial Sequence
  Synthetic
aucugccuuggcugcaaacuuc

SEQ ID NO: 99781 - RNA, 23 nt, Artificial Sequence
  Synthetic
uaucugccuuggcugcaaacuuc

SEQ ID NO: 99782 - RNA, 24 nt, Artificial Sequence
  Synthetic
auaucugccuuggcugcaaacuuc

SEQ ID NO: 99783 - RNA, 18 nt, Artificial Sequence
  Synthetic
aaggaagaggacaacuuc

SEQ ID NO: 99784 - RNA, 19 nt, Artificial Sequence
  Synthetic
caaggaagaggacaacuuc

SEQ ID NO: 99785 - RNA, 20 nt, Artificial Sequence
  Synthetic
ccaaggaagaggacaacuuc

SEQ ID NO: 99786 - RNA, 22 nt, Artificial Sequence
  Synthetic
agccaaggaagaggacaacuuc

SEQ ID NO: 99787 - RNA, 23 nt, Artificial Sequence
  Synthetic
aagccaaggaagaggacaacuuc

SEQ ID NO: 99788 - RNA, 24 nt, Artificial Sequence
  Synthetic
aaagccaaggaagaggacaacuuc

SEQ ID NO: 99789 - RNA, 18 nt, Artificial Sequence
  Synthetic
cucuggaaauacaacuuc

SEQ ID NO: 99790 - RNA, 19 nt, Artificial Sequence
  Synthetic
ucucuggaaauacaacuuc

SEQ ID NO: 99791 - RNA, 20 nt, Artificial Sequence
  Synthetic
cucucuggaaauacaacuuc

SEQ ID NO: 99792 - RNA, 21 nt, Artificial Sequence
  Synthetic
ucucucuggaaauacaacuuc

SEQ ID NO: 99793 - RNA, 22 nt, Artificial Sequence
  Synthetic
aucucucuggaaauacaacuuc

SEQ ID NO: 99794 - RNA, 24 nt, Artificial Sequence
  Synthetic
agaucucucuggaaauacaacuuc

SEQ ID NO: 99795 - RNA, 19 nt, Artificial Sequence
  Synthetic
ugggauuauuuacaacuuc

SEQ ID NO: 99796 - RNA, 20 nt, Artificial Sequence
  Synthetic
uugggauuauuuacaacuuc

SEQ ID NO: 99797 - RNA, 22 nt, Artificial Sequence
  Synthetic
aguugggauuauuuacaacuuc

SEQ ID NO: 99798 - RNA, 23 nt, Artificial Sequence
  Synthetic
caguugggauuauuuacaacuuc

SEQ ID NO: 99799 - RNA, 24 nt, Artificial Sequence
  Synthetic
ucaguugggauuauuuacaacuuc

SEQ ID NO: 99800 - RNA, 18 nt, Artificial Sequence
  Synthetic
aauaauuacaagaacuuc

SEQ ID NO: 99801 - RNA, 19 nt, Artificial Sequence
  Synthetic
caauaauuacaagaacuuc

SEQ ID NO: 99802 - RNA, 20 nt, Artificial Sequence
  Synthetic
acaauaauuacaagaacuuc

SEQ ID NO: 99803 - RNA, 21 nt, Artificial Sequence
  Synthetic
uacaauaauuacaagaacuuc

SEQ ID NO: 99804 - RNA, 22 nt, Artificial Sequence
  Synthetic
auacaauaauuacaagaacuuc

SEQ ID NO: 99805 - RNA, 23 nt, Artificial Sequence
  Synthetic
aauacaauaauuacaagaacuuc

SEQ ID NO: 99806 - RNA, 24 nt, Artificial Sequence
  Synthetic
uaauacaauaauuacaagaacuuc

SEQ ID NO: 99807 - RNA, 19 nt, Artificial Sequence
  Synthetic
aggguggcaacugaacuuc

SEQ ID NO: 99808 - RNA, 20 nt, Artificial Sequence
  Synthetic
caggguggcaacugaacuuc

SEQ ID NO: 99809 - RNA, 21 nt, Artificial Sequence
  Synthetic
ccaggguggcaacugaacuuc

SEQ ID NO: 99810 - RNA, 22 nt, Artificial Sequence
  Synthetic
uccaggguggcaacugaacuuc

SEQ ID NO: 99811 - RNA, 23 nt, Artificial Sequence
  Synthetic
cuccaggguggcaacugaacuuc

SEQ ID NO: 99812 - RNA, 24 nt, Artificial Sequence
  Synthetic
ccuccaggguggcaacugaacuuc

SEQ ID NO: 99813 - RNA, 18 nt, Artificial Sequence
  Synthetic
uaucugauuaaacacuuc

SEQ ID NO: 99814 - RNA, 19 nt, Artificial Sequence
  Synthetic
uuaucugauuaaacacuuc

SEQ ID NO: 99815 - RNA, 20 nt, Artificial Sequence
  Synthetic
auuaucugauuaaacacuuc

SEQ ID NO: 99816 - RNA, 21 nt, Artificial Sequence
  Synthetic
uauuaucugauuaaacacuuc

SEQ ID NO: 99817 - RNA, 22 nt, Artificial Sequence
  Synthetic
uuauuaucugauuaaacacuuc

SEQ ID NO: 99818 - RNA, 23 nt, Artificial Sequence
  Synthetic
uuuauuaucugauuaaacacuuc

SEQ ID NO: 99819 - RNA, 24 nt, Artificial Sequence
  Synthetic
uuuuauuaucugauuaaacacuuc

SEQ ID NO: 99820 - RNA, 19 nt, Artificial Sequence
  Synthetic
aggggcucauagccacuuc

SEQ ID NO: 99821 - RNA, 20 nt, Artificial Sequence
  Synthetic
aaggggcucauagccacuuc

SEQ ID NO: 99822 - RNA, 21 nt, Artificial Sequence
  Synthetic
uaaggggcucauagccacuuc

SEQ ID NO: 99823 - RNA, 22 nt, Artificial Sequence
  Synthetic
auaaggggcucauagccacuuc

SEQ ID NO: 99824 - RNA, 23 nt, Artificial Sequence
  Synthetic
uauaaggggcucauagccacuuc

SEQ ID NO: 99825 - RNA, 18 nt, Artificial Sequence
  Synthetic
aaugucaaauaucacuuc

SEQ ID NO: 99826 - RNA, 19 nt, Artificial Sequence
  Synthetic
uaaugucaaauaucacuuc

SEQ ID NO: 99827 - RNA, 20 nt, Artificial Sequence
  Synthetic
cuaaugucaaauaucacuuc

SEQ ID NO: 99828 - RNA, 21 nt, Artificial Sequence
  Synthetic
ucuaaugucaaauaucacuuc

SEQ ID NO: 99829 - RNA, 22 nt, Artificial Sequence
  Synthetic
uucuaaugucaaauaucacuuc

SEQ ID NO: 99830 - RNA, 23 nt, Artificial Sequence
  Synthetic
uuucuaaugucaaauaucacuuc

SEQ ID NO: 99831 - RNA, 24 nt, Artificial Sequence
  Synthetic
cuuucuaaugucaaauaucacuuc

SEQ ID NO: 99832 - RNA, 18 nt, Artificial Sequence
  Synthetic
ccucgucagucagacuuc

SEQ ID NO: 99833 - RNA, 19 nt, Artificial Sequence
  Synthetic
accucgucagucagacuuc

SEQ ID NO: 99834 - RNA, 20 nt, Artificial Sequence
  Synthetic
aaccucgucagucagacuuc

SEQ ID NO: 99835 - RNA, 22 nt, Artificial Sequence
  Synthetic
agaaccucgucagucagacuuc

SEQ ID NO: 99836 - RNA, 23 nt, Artificial Sequence
  Synthetic
uagaaccucgucagucagacuuc

SEQ ID NO: 99837 - RNA, 24 nt, Artificial Sequence
  Synthetic
uuagaaccucgucagucagacuuc

SEQ ID NO: 99838 - RNA, 19 nt, Artificial Sequence
  Synthetic
aguguagcacauagacuuc

SEQ ID NO: 99839 - RNA, 20 nt, Artificial Sequence
  Synthetic
caguguagcacauagacuuc

SEQ ID NO: 99840 - RNA, 21 nt, Artificial Sequence
  Synthetic
ccaguguagcacauagacuuc

SEQ ID NO: 99841 - RNA, 22 nt, Artificial Sequence
  Synthetic
accaguguagcacauagacuuc

SEQ ID NO: 99842 - RNA, 23 nt, Artificial Sequence
  Synthetic
aaccaguguagcacauagacuuc

SEQ ID NO: 99843 - RNA, 24 nt, Artificial Sequence
  Synthetic
uaaccaguguagcacauagacuuc

SEQ ID NO: 99844 - RNA, 18 nt, Artificial Sequence
  Synthetic
acgcagcaggcauacuuc

SEQ ID NO: 99845 - RNA, 19 nt, Artificial Sequence
  Synthetic
uacgcagcaggcauacuuc

SEQ ID NO: 99846 - RNA, 20 nt, Artificial Sequence
  Synthetic
cuacgcagcaggcauacuuc

SEQ ID NO: 99847 - RNA, 21 nt, Artificial Sequence
  Synthetic
acuacgcagcaggcauacuuc

SEQ ID NO: 99848 - RNA, 22 nt, Artificial Sequence
  Synthetic
uacuacgcagcaggcauacuuc

SEQ ID NO: 99849 - RNA, 23 nt, Artificial Sequence
  Synthetic
uuacuacgcagcaggcauacuuc

SEQ ID NO: 99850 - RNA, 24 nt, Artificial Sequence
  Synthetic
uuuacuacgcagcaggcauacuuc

SEQ ID NO: 99851 - RNA, 18 nt, Artificial Sequence
  Synthetic
uguuaagauaauuacuuc

SEQ ID NO: 99852 - RNA, 19 nt, Artificial Sequence
  Synthetic
auguuaagauaauuacuuc

SEQ ID NO: 99853 - RNA, 21 nt, Artificial Sequence
  Synthetic
agauguuaagauaauuacuuc

SEQ ID NO: 99854 - RNA, 22 nt, Artificial Sequence
  Synthetic
cagauguuaagauaauuacuuc

SEQ ID NO: 99855 - RNA, 23 nt, Artificial Sequence
  Synthetic
ucagauguuaagauaauuacuuc

SEQ ID NO: 99856 - RNA, 24 nt, Artificial Sequence
  Synthetic
uucagauguuaagauaauuacuuc

SEQ ID NO: 99857 - RNA, 18 nt, Artificial Sequence
  Synthetic
caacauagacuaaccuuc

SEQ ID NO: 99858 - RNA, 19 nt, Artificial Sequence
  Synthetic
ccaacauagacuaaccuuc

SEQ ID NO: 99859 - RNA, 20 nt, Artificial Sequence
  Synthetic
uccaacauagacuaaccuuc

SEQ ID NO: 99860 - RNA, 21 nt, Artificial Sequence
  Synthetic
uuccaacauagacuaaccuuc

SEQ ID NO: 99861 - RNA, 22 nt, Artificial Sequence
  Synthetic
cuuccaacauagacuaaccuuc

SEQ ID NO: 99862 - RNA, 24 nt, Artificial Sequence
  Synthetic
ugcuuccaacauagacuaaccuuc

SEQ ID NO: 99863 - RNA, 19 nt, Artificial Sequence
  Synthetic
aggucagaggaauaccuuc

SEQ ID NO: 99864 - RNA, 20 nt, Artificial Sequence
  Synthetic
aaggucagaggaauaccuuc

SEQ ID NO: 99865 - RNA, 21 nt, Artificial Sequence
  Synthetic
caaggucagaggaauaccuuc

SEQ ID NO: 99866 - RNA, 22 nt, Artificial Sequence
  Synthetic
acaaggucagaggaauaccuuc

SEQ ID NO: 99867 - RNA, 23 nt, Artificial Sequence
  Synthetic
uacaaggucagaggaauaccuuc

SEQ ID NO: 99868 - RNA, 24 nt, Artificial Sequence
  Synthetic
uuacaaggucagaggaauaccuuc

SEQ ID NO: 99869 - RNA, 18 nt, Artificial Sequence
  Synthetic
uuuuguguaauccccuuc

SEQ ID NO: 99870 - RNA, 19 nt, Artificial Sequence
  Synthetic
auuuuguguaauccccuuc

SEQ ID NO: 99871 - RNA, 20 nt, Artificial Sequence
  Synthetic
uauuuuguguaauccccuuc

SEQ ID NO: 99872 - RNA, 21 nt, Artificial Sequence
  Synthetic
cuauuuuguguaauccccuuc

SEQ ID NO: 99873 - RNA, 22 nt, Artificial Sequence
  Synthetic
ucuauuuuguguaauccccuuc

SEQ ID NO: 99874 - RNA, 23 nt, Artificial Sequence
  Synthetic
cucuauuuuguguaauccccuuc

SEQ ID NO: 99875 - RNA, 18 nt, Artificial Sequence
  Synthetic
uggcucaaguuccccuuc

SEQ ID NO: 99876 - RNA, 19 nt, Artificial Sequence
  Synthetic
uuggcucaaguuccccuuc

SEQ ID NO: 99877 - RNA, 20 nt, Artificial Sequence
  Synthetic
uuuggcucaaguuccccuuc

SEQ ID NO: 99878 - RNA, 21 nt, Artificial Sequence
  Synthetic
cuuuggcucaaguuccccuuc

SEQ ID NO: 99879 - RNA, 22 nt, Artificial Sequence
  Synthetic
ucuuuggcucaaguuccccuuc

SEQ ID NO: 99880 - RNA, 23 nt, Artificial Sequence
  Synthetic
cucuuuggcucaaguuccccuuc

SEQ ID NO: 99881 - RNA, 24 nt, Artificial Sequence
  Synthetic
ccucuuuggcucaaguuccccuuc

SEQ ID NO: 99882 - RNA, 18 nt, Artificial Sequence
  Synthetic
cccuauauucaagccuuc

SEQ ID NO: 99883 - RNA, 19 nt, Artificial Sequence
  Synthetic
acccuauauucaagccuuc

SEQ ID NO: 99884 - RNA, 20 nt, Artificial Sequence
  Synthetic
aacccuauauucaagccuuc

SEQ ID NO: 99885 - RNA, 21 nt, Artificial Sequence
  Synthetic
uaacccuauauucaagccuuc

SEQ ID NO: 99886 - RNA, 22 nt, Artificial Sequence
  Synthetic
uuaacccuauauucaagccuuc

SEQ ID NO: 99887 - RNA, 23 nt, Artificial Sequence
  Synthetic
cuuaacccuauauucaagccuuc

SEQ ID NO: 99888 - RNA, 24 nt, Artificial Sequence
  Synthetic
acuuaacccuauauucaagccuuc

SEQ ID NO: 99889 - RNA, 18 nt, Artificial Sequence
  Synthetic
auauuuccuucugccuuc

SEQ ID NO: 99890 - RNA, 19 nt, Artificial Sequence
  Synthetic
uauauuuccuucugccuuc

SEQ ID NO: 99891 - RNA, 20 nt, Artificial Sequence
  Synthetic
cuauauuuccuucugccuuc

SEQ ID NO: 99892 - RNA, 21 nt, Artificial Sequence
  Synthetic
acuauauuuccuucugccuuc

SEQ ID NO: 99893 - RNA, 22 nt, Artificial Sequence
  Synthetic
uacuauauuuccuucugccuuc

SEQ ID NO: 99894 - RNA, 23 nt, Artificial Sequence
  Synthetic
uuacuauauuuccuucugccuuc

SEQ ID NO: 99895 - RNA, 24 nt, Artificial Sequence
  Synthetic
auuacuauauuuccuucugccuuc

SEQ ID NO: 99896 - RNA, 19 nt, Artificial Sequence
  Synthetic
aggcuaggguauugccuuc

SEQ ID NO: 99897 - RNA, 20 nt, Artificial Sequence
  Synthetic
aaggcuaggguauugccuuc

SEQ ID NO: 99898 - RNA, 21 nt, Artificial Sequence
  Synthetic
aaaggcuaggguauugccuuc

SEQ ID NO: 99899 - RNA, 24 nt, Artificial Sequence
  Synthetic
aggaaaggcuaggguauugccuuc

SEQ ID NO: 99900 - RNA, 18 nt, Artificial Sequence
  Synthetic
cugcaaugauaauccuuc

SEQ ID NO: 99901 - RNA, 19 nt, Artificial Sequence
  Synthetic
acugcaaugauaauccuuc

SEQ ID NO: 99902 - RNA, 21 nt, Artificial Sequence
  Synthetic
agacugcaaugauaauccuuc

SEQ ID NO: 99903 - RNA, 22 nt, Artificial Sequence
  Synthetic
aagacugcaaugauaauccuuc

SEQ ID NO: 99904 - RNA, 23 nt, Artificial Sequence
  Synthetic
uaagacugcaaugauaauccuuc

SEQ ID NO: 99905 - RNA, 24 nt, Artificial Sequence
  Synthetic
cuaagacugcaaugauaauccuuc

SEQ ID NO: 99906 - RNA, 18 nt, Artificial Sequence
  Synthetic
aauauggaagauuccuuc

SEQ ID NO: 99907 - RNA, 19 nt, Artificial Sequence
  Synthetic
uaauauggaagauuccuuc

SEQ ID NO: 99908 - RNA, 20 nt, Artificial Sequence
  Synthetic
uuaauauggaagauuccuuc

SEQ ID NO: 99909 - RNA, 21 nt, Artificial Sequence
  Synthetic
auuaauauggaagauuccuuc

SEQ ID NO: 99910 - RNA, 23 nt, Artificial Sequence
  Synthetic
ugauuaauauggaagauuccuuc

SEQ ID NO: 99911 - RNA, 24 nt, Artificial Sequence
  Synthetic
uugauuaauauggaagauuccuuc

SEQ ID NO: 99912 - RNA, 18 nt, Artificial Sequence
  Synthetic
aguaaaagauauuccuuc

SEQ ID NO: 99913 - RNA, 20 nt, Artificial Sequence
  Synthetic
ugaguaaaagauauuccuuc

SEQ ID NO: 99914 - RNA, 21 nt, Artificial Sequence
  Synthetic
uugaguaaaagauauuccuuc

SEQ ID NO: 99915 - RNA, 22 nt, Artificial Sequence
  Synthetic
auugaguaaaagauauuccuuc

SEQ ID NO: 99916 - RNA, 23 nt, Artificial Sequence
  Synthetic
cauugaguaaaagauauuccuuc

SEQ ID NO: 99917 - RNA, 24 nt, Artificial Sequence
  Synthetic
ucauugaguaaaagauauuccuuc

SEQ ID NO: 99918 - RNA, 20 nt, Artificial Sequence
  Synthetic
uggcucuuauuuguuccuuc

SEQ ID NO: 99919 - RNA, 21 nt, Artificial Sequence
  Synthetic
auggcucuuauuuguuccuuc

SEQ ID NO: 99920 - RNA, 22 nt, Artificial Sequence
  Synthetic
cauggcucuuauuuguuccuuc

SEQ ID NO: 99921 - RNA, 23 nt, Artificial Sequence
  Synthetic
ccauggcucuuauuuguuccuuc

SEQ ID NO: 99922 - RNA, 24 nt, Artificial Sequence
  Synthetic
accauggcucuuauuuguuccuuc

SEQ ID NO: 99923 - RNA, 18 nt, Artificial Sequence
  Synthetic
acucauccauuuuccuuc

SEQ ID NO: 99924 - RNA, 19 nt, Artificial Sequence
  Synthetic
cacucauccauuuuccuuc

SEQ ID NO: 99925 - RNA, 20 nt, Artificial Sequence
  Synthetic
ucacucauccauuuuccuuc

SEQ ID NO: 99926 - RNA, 21 nt, Artificial Sequence
  Synthetic
uucacucauccauuuuccuuc

SEQ ID NO: 99927 - RNA, 22 nt, Artificial Sequence
  Synthetic
uuucacucauccauuuuccuuc

SEQ ID NO: 99928 - RNA, 23 nt, Artificial Sequence
  Synthetic
auuucacucauccauuuuccuuc

SEQ ID NO: 99929 - RNA, 24 nt, Artificial Sequence
  Synthetic
cauuucacucauccauuuuccuuc

SEQ ID NO: 99930 - RNA, 18 nt, Artificial Sequence
  Synthetic
uugugaauaaacagcuuc

SEQ ID NO: 99931 - RNA, 19 nt, Artificial Sequence
  Synthetic
uuugugaauaaacagcuuc

SEQ ID NO: 99932 - RNA, 20 nt, Artificial Sequence
  Synthetic
cuuugugaauaaacagcuuc

SEQ ID NO: 99933 - RNA, 21 nt, Artificial Sequence
  Synthetic
acuuugugaauaaacagcuuc

SEQ ID NO: 99934 - RNA, 23 nt, Artificial Sequence
  Synthetic
cgacuuugugaauaaacagcuuc

SEQ ID NO: 99935 - RNA, 24 nt, Artificial Sequence
  Synthetic
acgacuuugugaauaaacagcuuc

SEQ ID NO: 99936 - RNA, 21 nt, Artificial Sequence
  Synthetic
uuuuuguuuuuuuagagcuuc

SEQ ID NO: 99937 - RNA, 22 nt, Artificial Sequence
  Synthetic
uuuuuuguuuuuuuagagcuuc

SEQ ID NO: 99938 - RNA, 24 nt, Artificial Sequence
  Synthetic
uguuuuuuguuuuuuuagagcuuc

SEQ ID NO: 99939 - RNA, 18 nt, Artificial Sequence
  Synthetic
ugugaaaagucuagcuuc

SEQ ID NO: 99940 - RNA, 19 nt, Artificial Sequence
  Synthetic
uugugaaaagucuagcuuc

SEQ ID NO: 99941 - RNA, 22 nt, Artificial Sequence
  Synthetic
agguugugaaaagucuagcuuc

SEQ ID NO: 99942 - RNA, 24 nt, Artificial Sequence
  Synthetic
ugagguugugaaaagucuagcuuc

SEQ ID NO: 99943 - RNA, 18 nt, Artificial Sequence
  Synthetic
augaguuguucuagcuuc

SEQ ID NO: 99944 - RNA, 19 nt, Artificial Sequence
  Synthetic
aaugaguuguucuagcuuc

SEQ ID NO: 99945 - RNA, 20 nt, Artificial Sequence
  Synthetic
caaugaguuguucuagcuuc

SEQ ID NO: 99946 - RNA, 21 nt, Artificial Sequence
  Synthetic
ucaaugaguuguucuagcuuc

SEQ ID NO: 99947 - RNA, 22 nt, Artificial Sequence
  Synthetic
aucaaugaguuguucuagcuuc

SEQ ID NO: 99948 - RNA, 23 nt, Artificial Sequence
  Synthetic
caucaaugaguuguucuagcuuc

SEQ ID NO: 99949 - RNA, 24 nt, Artificial Sequence
  Synthetic
ucaucaaugaguuguucuagcuuc

SEQ ID NO: 99950 - RNA, 19 nt, Artificial Sequence
  Synthetic
agagaagcaggcaggcuuc

SEQ ID NO: 99951 - RNA, 20 nt, Artificial Sequence
  Synthetic
cagagaagcaggcaggcuuc

SEQ ID NO: 99952 - RNA, 23 nt, Artificial Sequence
  Synthetic
aggcagagaagcaggcaggcuuc

SEQ ID NO: 99953 - RNA, 24 nt, Artificial Sequence
  Synthetic
aaggcagagaagcaggcaggcuuc

SEQ ID NO: 99954 - RNA, 18 nt, Artificial Sequence
  Synthetic
agugcuuggcugggcuuc

SEQ ID NO: 99955 - RNA, 19 nt, Artificial Sequence
  Synthetic
aagugcuuggcugggcuuc

SEQ ID NO: 99956 - RNA, 20 nt, Artificial Sequence
  Synthetic
caagugcuuggcugggcuuc

SEQ ID NO: 99957 - RNA, 21 nt, Artificial Sequence
  Synthetic
ccaagugcuuggcugggcuuc

SEQ ID NO: 99958 - RNA, 22 nt, Artificial Sequence
  Synthetic
accaagugcuuggcugggcuuc

SEQ ID NO: 99959 - RNA, 23 nt, Artificial Sequence
  Synthetic
caccaagugcuuggcugggcuuc

SEQ ID NO: 99960 - RNA, 24 nt, Artificial Sequence
  Synthetic
acaccaagugcuuggcugggcuuc

SEQ ID NO: 99961 - RNA, 21 nt, Artificial Sequence
  Synthetic
cugguacauggcaggugcuuc

SEQ ID NO: 99962 - RNA, 22 nt, Artificial Sequence
  Synthetic
ucugguacauggcaggugcuuc

SEQ ID NO: 99963 - RNA, 23 nt, Artificial Sequence
  Synthetic
aucugguacauggcaggugcuuc

SEQ ID NO: 99964 - RNA, 24 nt, Artificial Sequence
  Synthetic
caucugguacauggcaggugcuuc

SEQ ID NO: 99965 - RNA, 18 nt, Artificial Sequence
  Synthetic
ucugcuucucauugcuuc

SEQ ID NO: 99966 - RNA, 19 nt, Artificial Sequence
  Synthetic
uucugcuucucauugcuuc

SEQ ID NO: 99967 - RNA, 20 nt, Artificial Sequence
  Synthetic
uuucugcuucucauugcuuc

SEQ ID NO: 99968 - RNA, 21 nt, Artificial Sequence
  Synthetic
auuucugcuucucauugcuuc

SEQ ID NO: 99969 - RNA, 22 nt, Artificial Sequence
  Synthetic
aauuucugcuucucauugcuuc

SEQ ID NO: 99970 - RNA, 23 nt, Artificial Sequence
  Synthetic
caauuucugcuucucauugcuuc

SEQ ID NO: 99971 - RNA, 24 nt, Artificial Sequence
  Synthetic
acaauuucugcuucucauugcuuc

SEQ ID NO: 99972 - RNA, 18 nt, Artificial Sequence
  Synthetic
agcaaagcucguugcuuc

SEQ ID NO: 99973 - RNA, 19 nt, Artificial Sequence
  Synthetic
uagcaaagcucguugcuuc

SEQ ID NO: 99974 - RNA, 20 nt, Artificial Sequence
  Synthetic
auagcaaagcucguugcuuc

SEQ ID NO: 99975 - RNA, 21 nt, Artificial Sequence
  Synthetic
uauagcaaagcucguugcuuc

SEQ ID NO: 99976 - RNA, 22 nt, Artificial Sequence
  Synthetic
cuauagcaaagcucguugcuuc

SEQ ID NO: 99977 - RNA, 23 nt, Artificial Sequence
  Synthetic
ccuauagcaaagcucguugcuuc

SEQ ID NO: 99978 - RNA, 24 nt, Artificial Sequence
  Synthetic
accuauagcaaagcucguugcuuc

SEQ ID NO: 99979 - RNA, 18 nt, Artificial Sequence
  Synthetic
cuuucacuuuguugcuuc

SEQ ID NO: 99980 - RNA, 19 nt, Artificial Sequence
  Synthetic
ucuuucacuuuguugcuuc

SEQ ID NO: 99981 - RNA, 20 nt, Artificial Sequence
  Synthetic
aucuuucacuuuguugcuuc

SEQ ID NO: 99982 - RNA, 21 nt, Artificial Sequence
  Synthetic
uaucuuucacuuuguugcuuc

SEQ ID NO: 99983 - RNA, 22 nt, Artificial Sequence
  Synthetic
uuaucuuucacuuuguugcuuc

SEQ ID NO: 99984 - RNA, 23 nt, Artificial Sequence
  Synthetic
auuaucuuucacuuuguugcuuc

SEQ ID NO: 99985 - RNA, 24 nt, Artificial Sequence
  Synthetic
aauuaucuuucacuuuguugcuuc

SEQ ID NO: 99986 - RNA, 18 nt, Artificial Sequence
  Synthetic
aauucauccaauaucuuc

SEQ ID NO: 99987 - RNA, 19 nt, Artificial Sequence
  Synthetic
aaauucauccaauaucuuc

SEQ ID NO: 99988 - RNA, 20 nt, Artificial Sequence
  Synthetic
aaaauucauccaauaucuuc

SEQ ID NO: 99989 - RNA, 21 nt, Artificial Sequence
  Synthetic
aaaaauucauccaauaucuuc

SEQ ID NO: 99990 - RNA, 22 nt, Artificial Sequence
  Synthetic
aaaaaauucauccaauaucuuc

SEQ ID NO: 99991 - RNA, 23 nt, Artificial Sequence
  Synthetic
aaaaaaauucauccaauaucuuc

SEQ ID NO: 99992 - RNA, 24 nt, Artificial Sequence
  Synthetic
aaaaaaaauucauccaauaucuuc

SEQ ID NO: 99993 - RNA, 18 nt, Artificial Sequence
  Synthetic
caucuaaaguauaucuuc

SEQ ID NO: 99994 - RNA, 19 nt, Artificial Sequence
  Synthetic
acaucuaaaguauaucuuc

SEQ ID NO: 99995 - RNA, 20 nt, Artificial Sequence
  Synthetic
aacaucuaaaguauaucuuc

SEQ ID NO: 99996 - RNA, 22 nt, Artificial Sequence
  Synthetic
agaacaucuaaaguauaucuuc

SEQ ID NO: 99997 - RNA, 23 nt, Artificial Sequence
  Synthetic
cagaacaucuaaaguauaucuuc

SEQ ID NO: 99998 - RNA, 24 nt, Artificial Sequence
  Synthetic
ccagaacaucuaaaguauaucuuc

SEQ ID NO: 99999 - RNA, 18 nt, Artificial Sequence
  Synthetic
aauccaaaggguaucuuc

SEQ ID NO: 100000 - RNA, 20 nt, Artificial Sequence
  Synthetic
agaauccaaaggguaucuuc

SEQ ID NO: 100001 - RNA, 21 nt, Artificial Sequence
  Synthetic
uagaauccaaaggguaucuuc

SEQ ID NO: 100002 - RNA, 22 nt, Artificial Sequence
  Synthetic
cuagaauccaaaggguaucuuc

SEQ ID NO: 100003 - RNA, 23 nt, Artificial Sequence
  Synthetic
acuagaauccaaaggguaucuuc

SEQ ID NO: 100004 - RNA, 24 nt, Artificial Sequence
  Synthetic
uacuagaauccaaaggguaucuuc

SEQ ID NO: 100005 - RNA, 18 nt, Artificial Sequence
  Synthetic
uucaucaagauccucuuc

SEQ ID NO: 100006 - RNA, 19 nt, Artificial Sequence
  Synthetic
cuucaucaagauccucuuc

SEQ ID NO: 100007 - RNA, 21 nt, Artificial Sequence
  Synthetic
ugcuucaucaagauccucuuc

SEQ ID NO: 100008 - RNA, 22 nt, Artificial Sequence
  Synthetic
augcuucaucaagauccucuuc

SEQ ID NO: 100009 - RNA, 23 nt, Artificial Sequence
  Synthetic
aaugcuucaucaagauccucuuc

SEQ ID NO: 100010 - RNA, 24 nt, Artificial Sequence
  Synthetic
uaaugcuucaucaagauccucuuc

SEQ ID NO: 100011 - RNA, 18 nt, Artificial Sequence
  Synthetic
auagaggcacagcucuuc

SEQ ID NO: 100012 - RNA, 19 nt, Artificial Sequence
  Synthetic
aauagaggcacagcucuuc

SEQ ID NO: 100013 - RNA, 20 nt, Artificial Sequence
  Synthetic
uaauagaggcacagcucuuc

SEQ ID NO: 100014 - RNA, 21 nt, Artificial Sequence
  Synthetic
uuaauagaggcacagcucuuc

SEQ ID NO: 100015 - RNA, 22 nt, Artificial Sequence
  Synthetic
uuuaauagaggcacagcucuuc

SEQ ID NO: 100016 - RNA, 23 nt, Artificial Sequence
  Synthetic
uuuuaauagaggcacagcucuuc

SEQ ID NO: 100017 - RNA, 24 nt, Artificial Sequence
  Synthetic
uuuuuaauagaggcacagcucuuc

SEQ ID NO: 100018 - RNA, 19 nt, Artificial Sequence
  Synthetic
uggugacaagcugcucuuc

SEQ ID NO: 100019 - RNA, 20 nt, Artificial Sequence
  Synthetic
uuggugacaagcugcucuuc

SEQ ID NO: 100020 - RNA, 21 nt, Artificial Sequence
  Synthetic
uuuggugacaagcugcucuuc

SEQ ID NO: 100021 - RNA, 23 nt, Artificial Sequence
  Synthetic
uguuuggugacaagcugcucuuc

SEQ ID NO: 100022 - RNA, 24 nt, Artificial Sequence
  Synthetic
cuguuuggugacaagcugcucuuc

SEQ ID NO: 100023 - RNA, 18 nt, Artificial Sequence
  Synthetic
aaaaauauguaagucuuc

SEQ ID NO: 100024 - RNA, 19 nt, Artificial Sequence
  Synthetic
aaaaaauauguaagucuuc

SEQ ID NO: 100025 - RNA, 20 nt, Artificial Sequence
  Synthetic
aaaaaaauauguaagucuuc

SEQ ID NO: 100026 - RNA, 21 nt, Artificial Sequence
  Synthetic
aaaaaaaauauguaagucuuc

SEQ ID NO: 100027 - RNA, 23 nt, Artificial Sequence
  Synthetic
agaaaaaaaauauguaagucuuc

SEQ ID NO: 100028 - RNA, 24 nt, Artificial Sequence
  Synthetic
uagaaaaaaaauauguaagucuuc

SEQ ID NO: 100029 - RNA, 18 nt, Artificial Sequence
  Synthetic
uuggcaaaaaucgucuuc

SEQ ID NO: 100030 - RNA, 19 nt, Artificial Sequence
  Synthetic
uuuggcaaaaaucgucuuc

SEQ ID NO: 100031 - RNA, 20 nt, Artificial Sequence
  Synthetic
uuuuggcaaaaaucgucuuc

SEQ ID NO: 100032 - RNA, 21 nt, Artificial Sequence
  Synthetic
cuuuuggcaaaaaucgucuuc

SEQ ID NO: 100033 - RNA, 23 nt, Artificial Sequence
  Synthetic
ugcuuuuggcaaaaaucgucuuc

SEQ ID NO: 100034 - RNA, 24 nt, Artificial Sequence
  Synthetic
augcuuuuggcaaaaaucgucuuc

SEQ ID NO: 100035 - RNA, 18 nt, Artificial Sequence
  Synthetic
uguuucccuacugucuuc

SEQ ID NO: 100036 - RNA, 19 nt, Artificial Sequence
  Synthetic
auguuucccuacugucuuc

SEQ ID NO: 100037 - RNA, 20 nt, Artificial Sequence
  Synthetic
aauguuucccuacugucuuc

SEQ ID NO: 100038 - RNA, 21 nt, Artificial Sequence
  Synthetic
caauguuucccuacugucuuc

SEQ ID NO: 100039 - RNA, 22 nt, Artificial Sequence
  Synthetic
ucaauguuucccuacugucuuc

SEQ ID NO: 100040 - RNA, 23 nt, Artificial Sequence
  Synthetic
uucaauguuucccuacugucuuc

SEQ ID NO: 100041 - RNA, 24 nt, Artificial Sequence
  Synthetic
cuucaauguuucccuacugucuuc

SEQ ID NO: 100042 - RNA, 18 nt, Artificial Sequence
  Synthetic
uuaaguaagucugucuuc

SEQ ID NO: 100043 - RNA, 19 nt, Artificial Sequence
  Synthetic
cuuaaguaagucugucuuc

SEQ ID NO: 100044 - RNA, 20 nt, Artificial Sequence
  Synthetic
ccuuaaguaagucugucuuc

SEQ ID NO: 100045 - RNA, 21 nt, Artificial Sequence
  Synthetic
accuuaaguaagucugucuuc

SEQ ID NO: 100046 - RNA, 23 nt, Artificial Sequence
  Synthetic
ugaccuuaaguaagucugucuuc

SEQ ID NO: 100047 - RNA, 24 nt, Artificial Sequence
  Synthetic
augaccuuaaguaagucugucuuc

SEQ ID NO: 100048 - RNA, 18 nt, Artificial Sequence
  Synthetic
cauucuacaauauucuuc

SEQ ID NO: 100049 - RNA, 19 nt, Artificial Sequence
  Synthetic
acauucuacaauauucuuc

SEQ ID NO: 100050 - RNA, 20 nt, Artificial Sequence
  Synthetic
uacauucuacaauauucuuc

SEQ ID NO: 100051 - RNA, 21 nt, Artificial Sequence
  Synthetic
auacauucuacaauauucuuc

SEQ ID NO: 100052 - RNA, 22 nt, Artificial Sequence
  Synthetic
aauacauucuacaauauucuuc

SEQ ID NO: 100053 - RNA, 23 nt, Artificial Sequence
  Synthetic
aaauacauucuacaauauucuuc

SEQ ID NO: 100054 - RNA, 24 nt, Artificial Sequence
  Synthetic
caaauacauucuacaauauucuuc

SEQ ID NO: 100055 - RNA, 18 nt, Artificial Sequence
  Synthetic
uagaggacuaccuucuuc

SEQ ID NO: 100056 - RNA, 19 nt, Artificial Sequence
  Synthetic
auagaggacuaccuucuuc

SEQ ID NO: 100057 - RNA, 20 nt, Artificial Sequence
  Synthetic
aauagaggacuaccuucuuc

SEQ ID NO: 100058 - RNA, 21 nt, Artificial Sequence
  Synthetic
aaauagaggacuaccuucuuc

SEQ ID NO: 100059 - RNA, 22 nt, Artificial Sequence
  Synthetic
caaauagaggacuaccuucuuc

SEQ ID NO: 100060 - RNA, 23 nt, Artificial Sequence
  Synthetic
acaaauagaggacuaccuucuuc

SEQ ID NO: 100061 - RNA, 24 nt, Artificial Sequence
  Synthetic
aacaaauagaggacuaccuucuuc

SEQ ID NO: 100062 - RNA, 18 nt, Artificial Sequence
  Synthetic
uuaaguuuuuccuucuuc

SEQ ID NO: 100063 - RNA, 19 nt, Artificial Sequence
  Synthetic
cuuaaguuuuuccuucuuc

SEQ ID NO: 100064 - RNA, 22 nt, Artificial Sequence
  Synthetic
uggcuuaaguuuuuccuucuuc

SEQ ID NO: 100065 - RNA, 23 nt, Artificial Sequence
  Synthetic
cuggcuuaaguuuuuccuucuuc

SEQ ID NO: 100066 - RNA, 24 nt, Artificial Sequence
  Synthetic
ccuggcuuaaguuuuuccuucuuc

SEQ ID NO: 100067 - RNA, 18 nt, Artificial Sequence
  Synthetic
acugauuuuagcuucuuc

SEQ ID NO: 100068 - RNA, 19 nt, Artificial Sequence
  Synthetic
uacugauuuuagcuucuuc

SEQ ID NO: 100069 - RNA, 20 nt, Artificial Sequence
  Synthetic
auacugauuuuagcuucuuc

SEQ ID NO: 100070 - RNA, 21 nt, Artificial Sequence
  Synthetic
uauacugauuuuagcuucuuc

SEQ ID NO: 100071 - RNA, 22 nt, Artificial Sequence
  Synthetic
auauacugauuuuagcuucuuc

SEQ ID NO: 100072 - RNA, 24 nt, Artificial Sequence
  Synthetic
agauauacugauuuuagcuucuuc

SEQ ID NO: 100073 - RNA, 18 nt, Artificial Sequence
  Synthetic
aaccagauggucuucuuc

SEQ ID NO: 100074 - RNA, 19 nt, Artificial Sequence
  Synthetic
aaaccagauggucuucuuc

SEQ ID NO: 100075 - RNA, 20 nt, Artificial Sequence
  Synthetic
uaaaccagauggucuucuuc

SEQ ID NO: 100076 - RNA, 21 nt, Artificial Sequence
  Synthetic
auaaaccagauggucuucuuc

SEQ ID NO: 100077 - RNA, 22 nt, Artificial Sequence
  Synthetic
cauaaaccagauggucuucuuc

SEQ ID NO: 100078 - RNA, 23 nt, Artificial Sequence
  Synthetic
acauaaaccagauggucuucuuc

SEQ ID NO: 100079 - RNA, 21 nt, Artificial Sequence
  Synthetic
auuggggucauuaaaaaguuc

SEQ ID NO: 100080 - RNA, 23 nt, Artificial Sequence
  Synthetic
ugauuggggucauuaaaaaguuc

SEQ ID NO: 100081 - RNA, 24 nt, Artificial Sequence
  Synthetic
augauuggggucauuaaaaaguuc

SEQ ID NO: 100082 - RNA, 18 nt, Artificial Sequence
  Synthetic
aaaguggaagccaaguuc

SEQ ID NO: 100083 - RNA, 19 nt, Artificial Sequence
  Synthetic
uaaaguggaagccaaguuc

SEQ ID NO: 100084 - RNA, 20 nt, Artificial Sequence
  Synthetic
cuaaaguggaagccaaguuc

SEQ ID NO: 100085 - RNA, 21 nt, Artificial Sequence
  Synthetic
ccuaaaguggaagccaaguuc

SEQ ID NO: 100086 - RNA, 22 nt, Artificial Sequence
  Synthetic
uccuaaaguggaagccaaguuc

SEQ ID NO: 100087 - RNA, 23 nt, Artificial Sequence
  Synthetic
uuccuaaaguggaagccaaguuc

SEQ ID NO: 100088 - RNA, 24 nt, Artificial Sequence
  Synthetic
cuuccuaaaguggaagccaaguuc

SEQ ID NO: 100089 - RNA, 21 nt, Artificial Sequence
  Synthetic
uuguuuucagucagcaaguuc

SEQ ID NO: 100090 - RNA, 23 nt, Artificial Sequence
  Synthetic
uguuguuuucagucagcaaguuc

SEQ ID NO: 100091 - RNA, 24 nt, Artificial Sequence
  Synthetic
cuguuguuuucagucagcaaguuc

SEQ ID NO: 100092 - RNA, 18 nt, Artificial Sequence
  Synthetic
cugggauuuaagaaguuc

SEQ ID NO: 100093 - RNA, 19 nt, Artificial Sequence
  Synthetic
acugggauuuaagaaguuc

SEQ ID NO: 100094 - RNA, 20 nt, Artificial Sequence
  Synthetic
aacugggauuuaagaaguuc

SEQ ID NO: 100095 - RNA, 21 nt, Artificial Sequence
  Synthetic
uaacugggauuuaagaaguuc

SEQ ID NO: 100096 - RNA, 24 nt, Artificial Sequence
  Synthetic
agguaacugggauuuaagaaguuc

SEQ ID NO: 100097 - RNA, 18 nt, Artificial Sequence
  Synthetic
ccugucaaaggacaguuc

SEQ ID NO: 100098 - RNA, 19 nt, Artificial Sequence
  Synthetic
accugucaaaggacaguuc

SEQ ID NO: 100099 - RNA, 21 nt, Artificial Sequence
  Synthetic
agaccugucaaaggacaguuc

SEQ ID NO: 100100 - RNA, 24 nt, Artificial Sequence
  Synthetic
aggagaccugucaaaggacaguuc

SEQ ID NO: 100101 - RNA, 21 nt, Artificial Sequence
  Synthetic
auucacugcuuccuccaguuc

SEQ ID NO: 100102 - RNA, 22 nt, Artificial Sequence
  Synthetic
cauucacugcuuccuccaguuc

SEQ ID NO: 100103 - RNA, 23 nt, Artificial Sequence
  Synthetic
ucauucacugcuuccuccaguuc

SEQ ID NO: 100104 - RNA, 19 nt, Artificial Sequence
  Synthetic
ugugggagcagggcaguuc

SEQ ID NO: 100105 - RNA, 20 nt, Artificial Sequence
  Synthetic
cugugggagcagggcaguuc

SEQ ID NO: 100106 - RNA, 21 nt, Artificial Sequence
  Synthetic
acugugggagcagggcaguuc

SEQ ID NO: 100107 - RNA, 22 nt, Artificial Sequence
  Synthetic
aacugugggagcagggcaguuc

SEQ ID NO: 100108 - RNA, 23 nt, Artificial Sequence
  Synthetic
uaacugugggagcagggcaguuc

SEQ ID NO: 100109 - RNA, 18 nt, Artificial Sequence
  Synthetic
aucucacugucucaguuc

SEQ ID NO: 100110 - RNA, 19 nt, Artificial Sequence
  Synthetic
aaucucacugucucaguuc

SEQ ID NO: 100111 - RNA, 20 nt, Artificial Sequence
  Synthetic
aaaucucacugucucaguuc

SEQ ID NO: 100112 - RNA, 21 nt, Artificial Sequence
  Synthetic
caaaucucacugucucaguuc

SEQ ID NO: 100113 - RNA, 22 nt, Artificial Sequence
  Synthetic
ccaaaucucacugucucaguuc

SEQ ID NO: 100114 - RNA, 23 nt, Artificial Sequence
  Synthetic
cccaaaucucacugucucaguuc

SEQ ID NO: 100115 - RNA, 24 nt, Artificial Sequence
  Synthetic
ccccaaaucucacugucucaguuc

SEQ ID NO: 100116 - RNA, 19 nt, Artificial Sequence
  Synthetic
agagguugcuacagaguuc

SEQ ID NO: 100117 - RNA, 20 nt, Artificial Sequence
  Synthetic
aagagguugcuacagaguuc

SEQ ID NO: 100118 - RNA, 21 nt, Artificial Sequence
  Synthetic
aaagagguugcuacagaguuc

SEQ ID NO: 100119 - RNA, 22 nt, Artificial Sequence
  Synthetic
aaaagagguugcuacagaguuc

SEQ ID NO: 100120 - RNA, 23 nt, Artificial Sequence
  Synthetic
caaaagagguugcuacagaguuc

SEQ ID NO: 100121 - RNA, 24 nt, Artificial Sequence
  Synthetic
ucaaaagagguugcuacagaguuc

SEQ ID NO: 100122 - RNA, 21 nt, Artificial Sequence
  Synthetic
aaacaaauaaaaagauaguuc

SEQ ID NO: 100123 - RNA, 22 nt, Artificial Sequence
  Synthetic
aaaacaaauaaaaagauaguuc

SEQ ID NO: 100124 - RNA, 23 nt, Artificial Sequence
  Synthetic
uaaaacaaauaaaaagauaguuc

SEQ ID NO: 100125 - RNA, 24 nt, Artificial Sequence
  Synthetic
uuaaaacaaauaaaaagauaguuc

SEQ ID NO: 100126 - RNA, 18 nt, Artificial Sequence
  Synthetic
uuagcucucucuacguuc

SEQ ID NO: 100127 - RNA, 20 nt, Artificial Sequence
  Synthetic
uguuagcucucucuacguuc

SEQ ID NO: 100128 - RNA, 21 nt, Artificial Sequence
  Synthetic
auguuagcucucucuacguuc

SEQ ID NO: 100129 - RNA, 22 nt, Artificial Sequence
  Synthetic
aauguuagcucucucuacguuc

SEQ ID NO: 100130 - RNA, 23 nt, Artificial Sequence
  Synthetic
aaauguuagcucucucuacguuc

SEQ ID NO: 100131 - RNA, 24 nt, Artificial Sequence
  Synthetic
uaaauguuagcucucucuacguuc

SEQ ID NO: 100132 - RNA, 18 nt, Artificial Sequence
  Synthetic
aaaaccagcagaagguuc

SEQ ID NO: 100133 - RNA, 19 nt, Artificial Sequence
  Synthetic
aaaaaccagcagaagguuc

SEQ ID NO: 100134 - RNA, 20 nt, Artificial Sequence
  Synthetic
uaaaaaccagcagaagguuc

SEQ ID NO: 100135 - RNA, 21 nt, Artificial Sequence
  Synthetic
uuaaaaaccagcagaagguuc

SEQ ID NO: 100136 - RNA, 22 nt, Artificial Sequence
  Synthetic
uuuaaaaaccagcagaagguuc

SEQ ID NO: 100137 - RNA, 23 nt, Artificial Sequence
  Synthetic
uuuuaaaaaccagcagaagguuc

SEQ ID NO: 100138 - RNA, 24 nt, Artificial Sequence
  Synthetic
cuuuuaaaaaccagcagaagguuc

SEQ ID NO: 100139 - RNA, 18 nt, Artificial Sequence
  Synthetic
ucaacauuaugaagguuc

SEQ ID NO: 100140 - RNA, 19 nt, Artificial Sequence
  Synthetic
aucaacauuaugaagguuc

SEQ ID NO: 100141 - RNA, 21 nt, Artificial Sequence
  Synthetic
agaucaacauuaugaagguuc

SEQ ID NO: 100142 - RNA, 22 nt, Artificial Sequence
  Synthetic
uagaucaacauuaugaagguuc

SEQ ID NO: 100143 - RNA, 23 nt, Artificial Sequence
  Synthetic
cuagaucaacauuaugaagguuc

SEQ ID NO: 100144 - RNA, 24 nt, Artificial Sequence
  Synthetic
acuagaucaacauuaugaagguuc

SEQ ID NO: 100145 - RNA, 18 nt, Artificial Sequence
  Synthetic
aaaauguguuucagguuc

SEQ ID NO: 100146 - RNA, 19 nt, Artificial Sequence
  Synthetic
aaaaauguguuucagguuc

SEQ ID NO: 100147 - RNA, 20 nt, Artificial Sequence
  Synthetic
aaaaaauguguuucagguuc

SEQ ID NO: 100148 - RNA, 22 nt, Artificial Sequence
  Synthetic
ugaaaaaauguguuucagguuc

SEQ ID NO: 100149 - RNA, 23 nt, Artificial Sequence
  Synthetic
uugaaaaaauguguuucagguuc

SEQ ID NO: 100150 - RNA, 24 nt, Artificial Sequence
  Synthetic
uuugaaaaaauguguuucagguuc

SEQ ID NO: 100151 - RNA, 18 nt, Artificial Sequence
  Synthetic
aagagaaaccugagguuc

SEQ ID NO: 100152 - RNA, 20 nt, Artificial Sequence
  Synthetic
ugaagagaaaccugagguuc

SEQ ID NO: 100153 - RNA, 21 nt, Artificial Sequence
  Synthetic
cugaagagaaaccugagguuc

SEQ ID NO: 100154 - RNA, 22 nt, Artificial Sequence
  Synthetic
ucugaagagaaaccugagguuc

SEQ ID NO: 100155 - RNA, 23 nt, Artificial Sequence
  Synthetic
uucugaagagaaaccugagguuc

SEQ ID NO: 100156 - RNA, 24 nt, Artificial Sequence
  Synthetic
uuucugaagagaaaccugagguuc

SEQ ID NO: 100157 - RNA, 18 nt, Artificial Sequence
  Synthetic
aaaggaaauaauagguuc

SEQ ID NO: 100158 - RNA, 19 nt, Artificial Sequence
  Synthetic
aaaaggaaauaauagguuc

SEQ ID NO: 100159 - RNA, 20 nt, Artificial Sequence
  Synthetic
caaaaggaaauaauagguuc

SEQ ID NO: 100160 - RNA, 21 nt, Artificial Sequence
  Synthetic
acaaaaggaaauaauagguuc

SEQ ID NO: 100161 - RNA, 22 nt, Artificial Sequence
  Synthetic
uacaaaaggaaauaauagguuc

SEQ ID NO: 100162 - RNA, 23 nt, Artificial Sequence
  Synthetic
uuacaaaaggaaauaauagguuc

SEQ ID NO: 100163 - RNA, 24 nt, Artificial Sequence
  Synthetic
uuuacaaaaggaaauaauagguuc

SEQ ID NO: 100164 - RNA, 18 nt, Artificial Sequence
  Synthetic
uguauuuuacaaggguuc

SEQ ID NO: 100165 - RNA, 19 nt, Artificial Sequence
  Synthetic
auguauuuuacaaggguuc

SEQ ID NO: 100166 - RNA, 20 nt, Artificial Sequence
  Synthetic
cauguauuuuacaaggguuc

SEQ ID NO: 100167 - RNA, 23 nt, Artificial Sequence
  Synthetic
aggcauguauuuuacaaggguuc

SEQ ID NO: 100168 - RNA, 18 nt, Artificial Sequence
  Synthetic
uuaaagauucaaggguuc

SEQ ID NO: 100169 - RNA, 19 nt, Artificial Sequence
  Synthetic
cuuaaagauucaaggguuc

SEQ ID NO: 100170 - RNA, 20 nt, Artificial Sequence
  Synthetic
ucuuaaagauucaaggguuc

SEQ ID NO: 100171 - RNA, 21 nt, Artificial Sequence
  Synthetic
uucuuaaagauucaaggguuc

SEQ ID NO: 100172 - RNA, 22 nt, Artificial Sequence
  Synthetic
auucuuaaagauucaaggguuc

SEQ ID NO: 100173 - RNA, 23 nt, Artificial Sequence
  Synthetic
aauucuuaaagauucaaggguuc

SEQ ID NO: 100174 - RNA, 24 nt, Artificial Sequence
  Synthetic
aaauucuuaaagauucaaggguuc

SEQ ID NO: 100175 - RNA, 21 nt, Artificial Sequence
  Synthetic
agauggaaggagcuuggguuc

SEQ ID NO: 100176 - RNA, 22 nt, Artificial Sequence
  Synthetic
aagauggaaggagcuuggguuc

SEQ ID NO: 100177 - RNA, 23 nt, Artificial Sequence
  Synthetic
aaagauggaaggagcuuggguuc

SEQ ID NO: 100178 - RNA, 24 nt, Artificial Sequence
  Synthetic
aaaagauggaaggagcuuggguuc

SEQ ID NO: 100179 - RNA, 18 nt, Artificial Sequence
  Synthetic
ccuguggaacugugguuc

SEQ ID NO: 100180 - RNA, 19 nt, Artificial Sequence
  Synthetic
accuguggaacugugguuc

SEQ ID NO: 100181 - RNA, 21 nt, Artificial Sequence
  Synthetic
ugaccuguggaacugugguuc

SEQ ID NO: 100182 - RNA, 22 nt, Artificial Sequence
  Synthetic
augaccuguggaacugugguuc

SEQ ID NO: 100183 - RNA, 23 nt, Artificial Sequence
  Synthetic
aaugaccuguggaacugugguuc

SEQ ID NO: 100184 - RNA, 24 nt, Artificial Sequence
  Synthetic
uaaugaccuguggaacugugguuc

SEQ ID NO: 100185 - RNA, 18 nt, Artificial Sequence
  Synthetic
uauucuuguccuugguuc

SEQ ID NO: 100186 - RNA, 19 nt, Artificial Sequence
  Synthetic
cuauucuuguccuugguuc

SEQ ID NO: 100187 - RNA, 20 nt, Artificial Sequence
  Synthetic
ucuauucuuguccuugguuc

SEQ ID NO: 100188 - RNA, 19 nt, Artificial Sequence
  Synthetic
agccaggcugaaaauguuc

SEQ ID NO: 100189 - RNA, 20 nt, Artificial Sequence
  Synthetic
aagccaggcugaaaauguuc

SEQ ID NO: 100190 - RNA, 21 nt, Artificial Sequence
  Synthetic
aaagccaggcugaaaauguuc

SEQ ID NO: 100191 - RNA, 22 nt, Artificial Sequence
  Synthetic
aaaagccaggcugaaaauguuc

SEQ ID NO: 100192 - RNA, 23 nt, Artificial Sequence
  Synthetic
uaaaagccaggcugaaaauguuc

SEQ ID NO: 100193 - RNA, 20 nt, Artificial Sequence
  Synthetic
ugggcaauuauaaaauguuc

SEQ ID NO: 100194 - RNA, 21 nt, Artificial Sequence
  Synthetic
cugggcaauuauaaaauguuc

SEQ ID NO: 100195 - RNA, 22 nt, Artificial Sequence
  Synthetic
acugggcaauuauaaaauguuc

SEQ ID NO: 100196 - RNA, 23 nt, Artificial Sequence
  Synthetic
uacugggcaauuauaaaauguuc

SEQ ID NO: 100197 - RNA, 22 nt, Artificial Sequence
  Synthetic
ugcaauuacaaaagaaauguuc

SEQ ID NO: 100198 - RNA, 23 nt, Artificial Sequence
  Synthetic
uugcaauuacaaaagaaauguuc

SEQ ID NO: 100199 - RNA, 24 nt, Artificial Sequence
  Synthetic
uuugcaauuacaaaagaaauguuc

SEQ ID NO: 100200 - RNA, 18 nt, Artificial Sequence
  Synthetic
auccgguuugggauguuc

SEQ ID NO: 100201 - RNA, 20 nt, Artificial Sequence
  Synthetic
agauccgguuugggauguuc

SEQ ID NO: 100202 - RNA, 23 nt, Artificial Sequence
  Synthetic
aggagauccgguuugggauguuc

SEQ ID NO: 100203 - RNA, 24 nt, Artificial Sequence
  Synthetic
caggagauccgguuugggauguuc

SEQ ID NO: 100204 - RNA, 18 nt, Artificial Sequence
  Synthetic
uaaccuagaaauauguuc

SEQ ID NO: 100205 - RNA, 19 nt, Artificial Sequence
  Synthetic
uuaaccuagaaauauguuc

SEQ ID NO: 100206 - RNA, 20 nt, Artificial Sequence
  Synthetic
auuaaccuagaaauauguuc

SEQ ID NO: 100207 - RNA, 21 nt, Artificial Sequence
  Synthetic
uauuaaccuagaaauauguuc

SEQ ID NO: 100208 - RNA, 22 nt, Artificial Sequence
  Synthetic
auauuaaccuagaaauauguuc

SEQ ID NO: 100209 - RNA, 24 nt, Artificial Sequence
  Synthetic
agauauuaaccuagaaauauguuc

SEQ ID NO: 100210 - RNA, 19 nt, Artificial Sequence
  Synthetic
agguaucaccaaccuguuc

SEQ ID NO: 100211 - RNA, 20 nt, Artificial Sequence
  Synthetic
aagguaucaccaaccuguuc

SEQ ID NO: 100212 - RNA, 21 nt, Artificial Sequence
  Synthetic
caagguaucaccaaccuguuc

SEQ ID NO: 100213 - RNA, 22 nt, Artificial Sequence
  Synthetic
ccaagguaucaccaaccuguuc

SEQ ID NO: 100214 - RNA, 23 nt, Artificial Sequence
  Synthetic
accaagguaucaccaaccuguuc

SEQ ID NO: 100215 - RNA, 24 nt, Artificial Sequence
  Synthetic
caccaagguaucaccaaccuguuc

SEQ ID NO: 100216 - RNA, 18 nt, Artificial Sequence
  Synthetic
uugucuuacauucuguuc

SEQ ID NO: 100217 - RNA, 19 nt, Artificial Sequence
  Synthetic
cuugucuuacauucuguuc

SEQ ID NO: 100218 - RNA, 20 nt, Artificial Sequence
  Synthetic
ucuugucuuacauucuguuc

SEQ ID NO: 100219 - RNA, 21 nt, Artificial Sequence
  Synthetic
uucuugucuuacauucuguuc

SEQ ID NO: 100220 - RNA, 22 nt, Artificial Sequence
  Synthetic
uuucuugucuuacauucuguuc

SEQ ID NO: 100221 - RNA, 23 nt, Artificial Sequence
  Synthetic
auuucuugucuuacauucuguuc

SEQ ID NO: 100222 - RNA, 24 nt, Artificial Sequence
  Synthetic
aauuucuugucuuacauucuguuc

SEQ ID NO: 100223 - RNA, 19 nt, Artificial Sequence
  Synthetic
agguuguucuguucuguuc

SEQ ID NO: 100224 - RNA, 20 nt, Artificial Sequence
  Synthetic
uagguuguucuguucuguuc

SEQ ID NO: 100225 - RNA, 22 nt, Artificial Sequence
  Synthetic
aguagguuguucuguucuguuc

SEQ ID NO: 100226 - RNA, 23 nt, Artificial Sequence
  Synthetic
aaguagguuguucuguucuguuc

SEQ ID NO: 100227 - RNA, 24 nt, Artificial Sequence
  Synthetic
caaguagguuguucuguucuguuc

SEQ ID NO: 100228 - RNA, 18 nt, Artificial Sequence
  Synthetic
agacugaguucauuguuc

SEQ ID NO: 100229 - RNA, 19 nt, Artificial Sequence
  Synthetic
aagacugaguucauuguuc

SEQ ID NO: 100230 - RNA, 20 nt, Artificial Sequence
  Synthetic
aaagacugaguucauuguuc

SEQ ID NO: 100231 - RNA, 21 nt, Artificial Sequence
  Synthetic
aaaagacugaguucauuguuc

SEQ ID NO: 100232 - RNA, 23 nt, Artificial Sequence
  Synthetic
agaaaagacugaguucauuguuc

SEQ ID NO: 100233 - RNA, 24 nt, Artificial Sequence
  Synthetic
aagaaaagacugaguucauuguuc

SEQ ID NO: 100234 - RNA, 18 nt, Artificial Sequence
  Synthetic
uuacuuguaauuuuguuc

SEQ ID NO: 100235 - RNA, 19 nt, Artificial Sequence
  Synthetic
uuuacuuguaauuuuguuc

SEQ ID NO: 100236 - RNA, 20 nt, Artificial Sequence
  Synthetic
auuuacuuguaauuuuguuc

SEQ ID NO: 100237 - RNA, 22 nt, Artificial Sequence
  Synthetic
agauuuacuuguaauuuuguuc

SEQ ID NO: 100238 - RNA, 24 nt, Artificial Sequence
  Synthetic
ugagauuuacuuguaauuuuguuc

SEQ ID NO: 100239 - RNA, 18 nt, Artificial Sequence
  Synthetic
caaguucaccucaauuuc

SEQ ID NO: 100240 - RNA, 19 nt, Artificial Sequence
  Synthetic
ucaaguucaccucaauuuc

SEQ ID NO: 100241 - RNA, 20 nt, Artificial Sequence
  Synthetic
aucaaguucaccucaauuuc

SEQ ID NO: 100242 - RNA, 22 nt, Artificial Sequence
  Synthetic
agaagggaucaaggucaauuuc

SEQ ID NO: 100243 - RNA, 23 nt, Artificial Sequence
  Synthetic
uagaagggaucaaggucaauuuc

SEQ ID NO: 100244 - RNA, 24 nt, Artificial Sequence
  Synthetic
cuagaagggaucaaggucaauuuc

SEQ ID NO: 100245 - RNA, 18 nt, Artificial Sequence
  Synthetic
cucuuaggaaauaauuuc

SEQ ID NO: 100246 - RNA, 19 nt, Artificial Sequence
  Synthetic
ucucuuaggaaauaauuuc

SEQ ID NO: 100247 - RNA, 20 nt, Artificial Sequence
  Synthetic
cucucuuaggaaauaauuuc

SEQ ID NO: 100248 - RNA, 21 nt, Artificial Sequence
  Synthetic
acucucuuaggaaauaauuuc

SEQ ID NO: 100249 - RNA, 22 nt, Artificial Sequence
  Synthetic
uacucucuuaggaaauaauuuc

SEQ ID NO: 100250 - RNA, 23 nt, Artificial Sequence
  Synthetic
uuacucucuuaggaaauaauuuc

SEQ ID NO: 100251 - RNA, 24 nt, Artificial Sequence
  Synthetic
uuuacucucuuaggaaauaauuuc

SEQ ID NO: 100252 - RNA, 20 nt, Artificial Sequence
  Synthetic
aggacauguucaguaauuuc

SEQ ID NO: 100253 - RNA, 21 nt, Artificial Sequence
  Synthetic
uaggacauguucaguaauuuc

SEQ ID NO: 100254 - RNA, 23 nt, Artificial Sequence
  Synthetic
uguaggacauguucaguaauuuc

SEQ ID NO: 100255 - RNA, 24 nt, Artificial Sequence
  Synthetic
uuguaggacauguucaguaauuuc

SEQ ID NO: 100256 - RNA, 18 nt, Artificial Sequence
  Synthetic
acaaccugaauuaauuuc

SEQ ID NO: 100257 - RNA, 20 nt, Artificial Sequence
  Synthetic
agacaaccugaauuaauuuc

SEQ ID NO: 100258 - RNA, 22 nt, Artificial Sequence
  Synthetic
ugagacaaccugaauuaauuuc

SEQ ID NO: 100259 - RNA, 23 nt, Artificial Sequence
  Synthetic
augagacaaccugaauuaauuuc

SEQ ID NO: 100260 - RNA, 24 nt, Artificial Sequence
  Synthetic
uaugagacaaccugaauuaauuuc

SEQ ID NO: 100261 - RNA, 18 nt, Artificial Sequence
  Synthetic
cucuacauaucccauuuc

SEQ ID NO: 100262 - RNA, 19 nt, Artificial Sequence
  Synthetic
acucuacauaucccauuuc

SEQ ID NO: 100263 - RNA, 21 nt, Artificial Sequence
  Synthetic
agacucuacauaucccauuuc

SEQ ID NO: 100264 - RNA, 22 nt, Artificial Sequence
  Synthetic
aagacucuacauaucccauuuc

SEQ ID NO: 100265 - RNA, 23 nt, Artificial Sequence
  Synthetic
uaagacucuacauaucccauuuc

SEQ ID NO: 100266 - RNA, 24 nt, Artificial Sequence
  Synthetic
auaagacucuacauaucccauuuc

SEQ ID NO: 100267 - RNA, 18 nt, Artificial Sequence
  Synthetic
ucuuccuuuaagcauuuc

SEQ ID NO: 100268 - RNA, 19 nt, Artificial Sequence
  Synthetic
aucuuccuuuaagcauuuc

SEQ ID NO: 100269 - RNA, 20 nt, Artificial Sequence
  Synthetic
caucuuccuuuaagcauuuc

SEQ ID NO: 100270 - RNA, 21 nt, Artificial Sequence
  Synthetic
ucaucuuccuuuaagcauuuc

SEQ ID NO: 100271 - RNA, 22 nt, Artificial Sequence
  Synthetic
cucaucuuccuuuaagcauuuc

SEQ ID NO: 100272 - RNA, 23 nt, Artificial Sequence
  Synthetic
ucucaucuuccuuuaagcauuuc

SEQ ID NO: 100273 - RNA, 24 nt, Artificial Sequence
  Synthetic
cucucaucuuccuuuaagcauuuc

SEQ ID NO: 100274 - RNA, 18 nt, Artificial Sequence
  Synthetic
agauuaaucuugcauuuc

SEQ ID NO: 100275 - RNA, 20 nt, Artificial Sequence
  Synthetic
ugagauuaaucuugcauuuc

SEQ ID NO: 100276 - RNA, 21 nt, Artificial Sequence
  Synthetic
augagauuaaucuugcauuuc

SEQ ID NO: 100277 - RNA, 23 nt, Artificial Sequence
  Synthetic
agaugagauuaaucuugcauuuc

SEQ ID NO: 100278 - RNA, 24 nt, Artificial Sequence
  Synthetic
aagaugagauuaaucuugcauuuc

SEQ ID NO: 100279 - RNA, 18 nt, Artificial Sequence
  Synthetic
ccaaaacuauaagauuuc

SEQ ID NO: 100280 - RNA, 19 nt, Artificial Sequence
  Synthetic
cccaaaacuauaagauuuc

SEQ ID NO: 100281 - RNA, 20 nt, Artificial Sequence
  Synthetic
ucccaaaacuauaagauuuc

SEQ ID NO: 100282 - RNA, 21 nt, Artificial Sequence
  Synthetic
aucccaaaacuauaagauuuc

SEQ ID NO: 100283 - RNA, 24 nt, Artificial Sequence
  Synthetic
aggaucccaaaacuauaagauuuc

SEQ ID NO: 100284 - RNA, 18 nt, Artificial Sequence
  Synthetic
uaauggcaaucagauuuc

SEQ ID NO: 100285 - RNA, 19 nt, Artificial Sequence
  Synthetic
auaauggcaaucagauuuc

SEQ ID NO: 100286 - RNA, 20 nt, Artificial Sequence
  Synthetic
aauaauggcaaucagauuuc

SEQ ID NO: 100287 - RNA, 21 nt, Artificial Sequence
  Synthetic
uaauaauggcaaucagauuuc

SEQ ID NO: 100288 - RNA, 24 nt, Artificial Sequence
  Synthetic
cgguaauaauggcaaucagauuuc

SEQ ID NO: 100289 - RNA, 18 nt, Artificial Sequence
  Synthetic
caucauugguuagauuuc

SEQ ID NO: 100290 - RNA, 19 nt, Artificial Sequence
  Synthetic
ccaucauugguuagauuuc

SEQ ID NO: 100291 - RNA, 21 nt, Artificial Sequence
  Synthetic
ugccaucauugguuagauuuc

SEQ ID NO: 100292 - RNA, 22 nt, Artificial Sequence
  Synthetic
augccaucauugguuagauuuc

SEQ ID NO: 100293 - RNA, 23 nt, Artificial Sequence
  Synthetic
aaugccaucauugguuagauuuc

SEQ ID NO: 100294 - RNA, 24 nt, Artificial Sequence
  Synthetic
aaaugccaucauugguuagauuuc

SEQ ID NO: 100295 - RNA, 18 nt, Artificial Sequence
  Synthetic
ugcuauuugcaggauuuc

SEQ ID NO: 100296 - RNA, 19 nt, Artificial Sequence
  Synthetic
uugcuauuugcaggauuuc

SEQ ID NO: 100297 - RNA, 20 nt, Artificial Sequence
  Synthetic
auugcuauuugcaggauuuc

SEQ ID NO: 100298 - RNA, 21 nt, Artificial Sequence
  Synthetic
uauugcuauuugcaggauuuc

SEQ ID NO: 100299 - RNA, 22 nt, Artificial Sequence
  Synthetic
auauugcuauuugcaggauuuc

SEQ ID NO: 100300 - RNA, 23 nt, Artificial Sequence
  Synthetic
aauauugcuauuugcaggauuuc

SEQ ID NO: 100301 - RNA, 21 nt, Artificial Sequence
  Synthetic
cucugugcuugacaugauuuc

SEQ ID NO: 100302 - RNA, 22 nt, Artificial Sequence
  Synthetic
acucugugcuugacaugauuuc

SEQ ID NO: 100303 - RNA, 23 nt, Artificial Sequence
  Synthetic
cacucugugcuugacaugauuuc

SEQ ID NO: 100304 - RNA, 21 nt, Artificial Sequence
  Synthetic
uaggcauuugggacugauuuc

SEQ ID NO: 100305 - RNA, 22 nt, Artificial Sequence
  Synthetic
cuaggcauuugggacugauuuc

SEQ ID NO: 100306 - RNA, 23 nt, Artificial Sequence
  Synthetic
ccuaggcauuugggacugauuuc

SEQ ID NO: 100307 - RNA, 24 nt, Artificial Sequence
  Synthetic
cccuaggcauuugggacugauuuc

SEQ ID NO: 100308 - RNA, 21 nt, Artificial Sequence
  Synthetic
ucucuaauuucaaaauauuuc

SEQ ID NO: 100309 - RNA, 22 nt, Artificial Sequence
  Synthetic
aucucuaauuucaaaauauuuc

SEQ ID NO: 100310 - RNA, 23 nt, Artificial Sequence
  Synthetic
uaucucuaauuucaaaauauuuc

SEQ ID NO: 100311 - RNA, 24 nt, Artificial Sequence
  Synthetic
cuaucucuaauuucaaaauauuuc

SEQ ID NO: 100312 - RNA, 18 nt, Artificial Sequence
  Synthetic
aaguaauuucaauauuuc

SEQ ID NO: 100313 - RNA, 19 nt, Artificial Sequence
  Synthetic
aaaguaauuucaauauuuc

SEQ ID NO: 100314 - RNA, 20 nt, Artificial Sequence
  Synthetic
caaaguaauuucaauauuuc

SEQ ID NO: 100315 - RNA, 21 nt, Artificial Sequence
  Synthetic
acaaaguaauuucaauauuuc

SEQ ID NO: 100316 - RNA, 22 nt, Artificial Sequence
  Synthetic
aacaaaguaauuucaauauuuc

SEQ ID NO: 100317 - RNA, 24 nt, Artificial Sequence
  Synthetic
ugaacaaaguaauuucaauauuuc

SEQ ID NO: 100318 - RNA, 18 nt, Artificial Sequence
  Synthetic
ccugaauaggaauauuuc

SEQ ID NO: 100319 - RNA, 19 nt, Artificial Sequence
  Synthetic
uccugaauaggaauauuuc

SEQ ID NO: 100320 - RNA, 20 nt, Artificial Sequence
  Synthetic
uuccugaauaggaauauuuc

SEQ ID NO: 100321 - RNA, 21 nt, Artificial Sequence
  Synthetic
uuuccugaauaggaauauuuc

SEQ ID NO: 100322 - RNA, 22 nt, Artificial Sequence
  Synthetic
auuuccugaauaggaauauuuc

SEQ ID NO: 100323 - RNA, 18 nt, Artificial Sequence
  Synthetic
aguacuuuguaauauuuc

SEQ ID NO: 100324 - RNA, 19 nt, Artificial Sequence
  Synthetic
uaguacuuuguaauauuuc

SEQ ID NO: 100325 - RNA, 20 nt, Artificial Sequence
  Synthetic
uuaguacuuuguaauauuuc

SEQ ID NO: 100326 - RNA, 21 nt, Artificial Sequence
  Synthetic
cuuaguacuuuguaauauuuc

SEQ ID NO: 100327 - RNA, 23 nt, Artificial Sequence
  Synthetic
agcuuaguacuuuguaauauuuc

SEQ ID NO: 100328 - RNA, 23 nt, Artificial Sequence
  Synthetic
agguaauaaauaaaucauauuuc

SEQ ID NO: 100329 - RNA, 24 nt, Artificial Sequence
  Synthetic
aagguaauaaauaaaucauauuuc

SEQ ID NO: 100330 - RNA, 18 nt, Artificial Sequence
  Synthetic
uuucucuagggauauuuc

SEQ ID NO: 100331 - RNA, 19 nt, Artificial Sequence
  Synthetic
cuuucucuagggauauuuc

SEQ ID NO: 100332 - RNA, 21 nt, Artificial Sequence
  Synthetic
ugcuuucucuagggauauuuc

SEQ ID NO: 100333 - RNA, 22 nt, Artificial Sequence
  Synthetic
uugcuuucucuagggauauuuc

SEQ ID NO: 100334 - RNA, 23 nt, Artificial Sequence
  Synthetic
cuugcuuucucuagggauauuuc

SEQ ID NO: 100335 - RNA, 24 nt, Artificial Sequence
  Synthetic
ucuugcuuucucuagggauauuuc

SEQ ID NO: 100336 - RNA, 18 nt, Artificial Sequence
  Synthetic
ccuaaaguuauauauuuc

SEQ ID NO: 100337 - RNA, 21 nt, Artificial Sequence
  Synthetic
aggccuaaaguuauauauuuc

SEQ ID NO: 100338 - RNA, 22 nt, Artificial Sequence
  Synthetic
uaggccuaaaguuauauauuuc

SEQ ID NO: 100339 - RNA, 23 nt, Artificial Sequence
  Synthetic
uuaggccuaaaguuauauauuuc

SEQ ID NO: 100340 - RNA, 24 nt, Artificial Sequence
  Synthetic
uuuaggccuaaaguuauauauuuc

SEQ ID NO: 100341 - RNA, 18 nt, Artificial Sequence
  Synthetic
acuuucaucaaguauuuc

SEQ ID NO: 100342 - RNA, 19 nt, Artificial Sequence
  Synthetic
cacuuucaucaaguauuuc

SEQ ID NO: 100343 - RNA, 20 nt, Artificial Sequence
  Synthetic
ccacuuucaucaaguauuuc

SEQ ID NO: 100344 - RNA, 21 nt, Artificial Sequence
  Synthetic
uccacuuucaucaaguauuuc

SEQ ID NO: 100345 - RNA, 22 nt, Artificial Sequence
  Synthetic
uuccacuuucaucaaguauuuc

SEQ ID NO: 100346 - RNA, 24 nt, Artificial Sequence
  Synthetic
uguuccacuuucaucaaguauuuc

SEQ ID NO: 100347 - RNA, 18 nt, Artificial Sequence
  Synthetic
ucgaaaagcucuuauuuc

SEQ ID NO: 100348 - RNA, 19 nt, Artificial Sequence
  Synthetic
cucgaaaagcucuuauuuc

SEQ ID NO: 100349 - RNA, 21 nt, Artificial Sequence
  Synthetic
agcucgaaaagcucuuauuuc

SEQ ID NO: 100350 - RNA, 22 nt, Artificial Sequence
  Synthetic
aagcucgaaaagcucuuauuuc

SEQ ID NO: 100351 - RNA, 23 nt, Artificial Sequence
  Synthetic
aaagcucgaaaagcucuuauuuc

SEQ ID NO: 100352 - RNA, 24 nt, Artificial Sequence
  Synthetic
aaaagcucgaaaagcucuuauuuc

SEQ ID NO: 100353 - RNA, 18 nt, Artificial Sequence
  Synthetic
uuuugaaaucaaacuuuc

SEQ ID NO: 100354 - RNA, 19 nt, Artificial Sequence
  Synthetic
cuuuugaaaucaaacuuuc

SEQ ID NO: 100355 - RNA, 20 nt, Artificial Sequence
  Synthetic
acuuuugaaaucaaacuuuc

SEQ ID NO: 100356 - RNA, 22 nt, Artificial Sequence
  Synthetic
agacuuuugaaaucaaacuuuc

SEQ ID NO: 100357 - RNA, 23 nt, Artificial Sequence
  Synthetic
aagacuuuugaaaucaaacuuuc

SEQ ID NO: 100358 - RNA, 18 nt, Artificial Sequence
  Synthetic
uauaagccugaaacuuuc

SEQ ID NO: 100359 - RNA, 19 nt, Artificial Sequence
  Synthetic
auauaagccugaaacuuuc

SEQ ID NO: 100360 - RNA, 21 nt, Artificial Sequence
  Synthetic
agauauaagccugaaacuuuc

SEQ ID NO: 100361 - RNA, 22 nt, Artificial Sequence
  Synthetic
cagauauaagccugaaacuuuc

SEQ ID NO: 100362 - RNA, 23 nt, Artificial Sequence
  Synthetic
ccagauauaagccugaaacuuuc

SEQ ID NO: 100363 - RNA, 24 nt, Artificial Sequence
  Synthetic
uccagauauaagccugaaacuuuc

SEQ ID NO: 100364 - RNA, 18 nt, Artificial Sequence
  Synthetic
augaggaaauaaacuuuc

SEQ ID NO: 100365 - RNA, 19 nt, Artificial Sequence
  Synthetic
uaugaggaaauaaacuuuc

SEQ ID NO: 100366 - RNA, 21 nt, Artificial Sequence
  Synthetic
aguaugaggaaauaaacuuuc

SEQ ID NO: 100367 - RNA, 22 nt, Artificial Sequence
  Synthetic
aaguaugaggaaauaaacuuuc

SEQ ID NO: 100368 - RNA, 23 nt, Artificial Sequence
  Synthetic
uaaguaugaggaaauaaacuuuc

SEQ ID NO: 100369 - RNA, 24 nt, Artificial Sequence
  Synthetic
cuaaguaugaggaaauaaacuuuc

SEQ ID NO: 100370 - RNA, 20 nt, Artificial Sequence
  Synthetic
aggcaccuugcagaacuuuc

SEQ ID NO: 100371 - RNA, 22 nt, Artificial Sequence
  Synthetic
ugaggcaccuugcagaacuuuc

SEQ ID NO: 100372 - RNA, 23 nt, Artificial Sequence
  Synthetic
cugaggcaccuugcagaacuuuc

SEQ ID NO: 100373 - RNA, 24 nt, Artificial Sequence
  Synthetic
ucugaggcaccuugcagaacuuuc

SEQ ID NO: 100374 - RNA, 18 nt, Artificial Sequence
  Synthetic
uacuacacaaacacuuuc

SEQ ID NO: 100375 - RNA, 19 nt, Artificial Sequence
  Synthetic
uuacuacacaaacacuuuc

SEQ ID NO: 100376 - RNA, 20 nt, Artificial Sequence
  Synthetic
auuacuacacaaacacuuuc

SEQ ID NO: 100377 - RNA, 21 nt, Artificial Sequence
  Synthetic
uauuacuacacaaacacuuuc

SEQ ID NO: 100378 - RNA, 22 nt, Artificial Sequence
  Synthetic
cuauuacuacacaaacacuuuc

SEQ ID NO: 100379 - RNA, 23 nt, Artificial Sequence
  Synthetic
ucuauuacuacacaaacacuuuc

SEQ ID NO: 100380 - RNA, 24 nt, Artificial Sequence
  Synthetic
uucuauuacuacacaaacacuuuc

SEQ ID NO: 100381 - RNA, 19 nt, Artificial Sequence
  Synthetic
aguucccccaaguacuuuc

SEQ ID NO: 100382 - RNA, 20 nt, Artificial Sequence
  Synthetic
uaguucccccaaguacuuuc

SEQ ID NO: 100383 - RNA, 21 nt, Artificial Sequence
  Synthetic
uuaguucccccaaguacuuuc

SEQ ID NO: 100384 - RNA, 22 nt, Artificial Sequence
  Synthetic
auuaguucccccaaguacuuuc

SEQ ID NO: 100385 - RNA, 23 nt, Artificial Sequence
  Synthetic
cauuaguucccccaaguacuuuc

SEQ ID NO: 100386 - RNA, 24 nt, Artificial Sequence
  Synthetic
ucauuaguucccccaaguacuuuc

SEQ ID NO: 100387 - RNA, 20 nt, Artificial Sequence
  Synthetic
aggccagauccaguacuuuc

SEQ ID NO: 100388 - RNA, 21 nt, Artificial Sequence
  Synthetic
uaggccagauccaguacuuuc

SEQ ID NO: 100389 - RNA, 22 nt, Artificial Sequence
  Synthetic
cuaggccagauccaguacuuuc

SEQ ID NO: 100390 - RNA, 23 nt, Artificial Sequence
  Synthetic
ccuaggccagauccaguacuuuc

SEQ ID NO: 100391 - RNA, 24 nt, Artificial Sequence
  Synthetic
uccuaggccagauccaguacuuuc

SEQ ID NO: 100392 - RNA, 18 nt, Artificial Sequence
  Synthetic
cauccauagaacccuuuc

SEQ ID NO: 100393 - RNA, 19 nt, Artificial Sequence
  Synthetic
ucauccauagaacccuuuc

SEQ ID NO: 100394 - RNA, 20 nt, Artificial Sequence
  Synthetic
uucauccauagaacccuuuc

SEQ ID NO: 100395 - RNA, 21 nt, Artificial Sequence
  Synthetic
uuucauccauagaacccuuuc

SEQ ID NO: 100396 - RNA, 22 nt, Artificial Sequence
  Synthetic
uuuucauccauagaacccuuuc

SEQ ID NO: 100397 - RNA, 23 nt, Artificial Sequence
  Synthetic
uuuuucauccauagaacccuuuc

SEQ ID NO: 100398 - RNA, 24 nt, Artificial Sequence
  Synthetic
uuuuuucauccauagaacccuuuc

SEQ ID NO: 100399 - RNA, 18 nt, Artificial Sequence
  Synthetic
ucuuucguauauccuuuc

SEQ ID NO: 100400 - RNA, 20 nt, Artificial Sequence
  Synthetic
ugucuuucguauauccuuuc

SEQ ID NO: 100401 - RNA, 21 nt, Artificial Sequence
  Synthetic
augucuuucguauauccuuuc

SEQ ID NO: 100402 - RNA, 22 nt, Artificial Sequence
  Synthetic
aaugucuuucguauauccuuuc

SEQ ID NO: 100403 - RNA, 24 nt, Artificial Sequence
  Synthetic
ugaaugucuuucguauauccuuuc

SEQ ID NO: 100404 - RNA, 18 nt, Artificial Sequence
  Synthetic
aauaugacuagagcuuuc

SEQ ID NO: 100405 - RNA, 20 nt, Artificial Sequence
  Synthetic
cgaauaugacuagagcuuuc

SEQ ID NO: 100406 - RNA, 21 nt, Artificial Sequence
  Synthetic
acgaauaugacuagagcuuuc

SEQ ID NO: 100407 - RNA, 22 nt, Artificial Sequence
  Synthetic
cacgaauaugacuagagcuuuc

SEQ ID NO: 100408 - RNA, 23 nt, Artificial Sequence
  Synthetic
ucacgaauaugacuagagcuuuc

SEQ ID NO: 100409 - RNA, 24 nt, Artificial Sequence
  Synthetic
cucacgaauaugacuagagcuuuc

SEQ ID NO: 100410 - RNA, 21 nt, Artificial Sequence
  Synthetic
uauuucccacaaaaggcuuuc

SEQ ID NO: 100411 - RNA, 23 nt, Artificial Sequence
  Synthetic
aguauuucccacaaaaggcuuuc

SEQ ID NO: 100412 - RNA, 24 nt, Artificial Sequence
  Synthetic
caguauuucccacaaaaggcuuuc

SEQ ID NO: 100413 - RNA, 18 nt, Artificial Sequence
  Synthetic
ugcacuagacuggcuuuc

SEQ ID NO: 100414 - RNA, 19 nt, Artificial Sequence
  Synthetic
cugcacuagacuggcuuuc

SEQ ID NO: 100415 - RNA, 20 nt, Artificial Sequence
  Synthetic
ccugcacuagacuggcuuuc

SEQ ID NO: 100416 - RNA, 21 nt, Artificial Sequence
  Synthetic
cccugcacuagacuggcuuuc

SEQ ID NO: 100417 - RNA, 22 nt, Artificial Sequence
  Synthetic
ucccugcacuagacuggcuuuc

SEQ ID NO: 100418 - RNA, 23 nt, Artificial Sequence
  Synthetic
cucccugcacuagacuggcuuuc

SEQ ID NO: 100419 - RNA, 24 nt, Artificial Sequence
  Synthetic
ucucccugcacuagacuggcuuuc

SEQ ID NO: 100420 - RNA, 18 nt, Artificial Sequence
  Synthetic
aaagggcaguaugcuuuc

SEQ ID NO: 100421 - RNA, 21 nt, Artificial Sequence
  Synthetic
aggaaagggcaguaugcuuuc

SEQ ID NO: 100422 - RNA, 23 nt, Artificial Sequence
  Synthetic
agaggaaagggcaguaugcuuuc

SEQ ID NO: 100423 - RNA, 24 nt, Artificial Sequence
  Synthetic
aagaggaaagggcaguaugcuuuc

SEQ ID NO: 100424 - RNA, 19 nt, Artificial Sequence
  Synthetic
agggaaacuuguugcuuuc

SEQ ID NO: 100425 - RNA, 20 nt, Artificial Sequence
  Synthetic
aagggaaacuuguugcuuuc

SEQ ID NO: 100426 - RNA, 23 nt, Artificial Sequence
  Synthetic
aggaagggaaacuuguugcuuuc

SEQ ID NO: 100427 - RNA, 24 nt, Artificial Sequence
  Synthetic
aaggaagggaaacuuguugcuuuc

SEQ ID NO: 100428 - RNA, 19 nt, Artificial Sequence
  Synthetic
aguuucagagcagucuuuc

SEQ ID NO: 100429 - RNA, 20 nt, Artificial Sequence
  Synthetic
caguuucagagcagucuuuc

SEQ ID NO: 100430 - RNA, 21 nt, Artificial Sequence
  Synthetic
ucaguuucagagcagucuuuc

SEQ ID NO: 100431 - RNA, 23 nt, Artificial Sequence
  Synthetic
agucaguuucagagcagucuuuc

SEQ ID NO: 100432 - RNA, 24 nt, Artificial Sequence
  Synthetic
cagucaguuucagagcagucuuuc

SEQ ID NO: 100433 - RNA, 18 nt, Artificial Sequence
  Synthetic
agguaaggagcgucuuuc

SEQ ID NO: 100434 - RNA, 22 nt, Artificial Sequence
  Synthetic
ugggagguaaggagcgucuuuc

SEQ ID NO: 100435 - RNA, 23 nt, Artificial Sequence
  Synthetic
uugggagguaaggagcgucuuuc

SEQ ID NO: 100436 - RNA, 24 nt, Artificial Sequence
  Synthetic
uuugggagguaaggagcgucuuuc

SEQ ID NO: 100437 - RNA, 18 nt, Artificial Sequence
  Synthetic
ugacuagccaugucuuuc

SEQ ID NO: 100438 - RNA, 19 nt, Artificial Sequence
  Synthetic
cugacuagccaugucuuuc

SEQ ID NO: 100439 - RNA, 20 nt, Artificial Sequence
  Synthetic
acugacuagccaugucuuuc

SEQ ID NO: 100440 - RNA, 22 nt, Artificial Sequence
  Synthetic
ugacugacuagccaugucuuuc

SEQ ID NO: 100441 - RNA, 23 nt, Artificial Sequence
  Synthetic
cugacugacuagccaugucuuuc

SEQ ID NO: 100442 - RNA, 21 nt, Artificial Sequence
  Synthetic
uuuuuccccagguuuucuuuc

SEQ ID NO: 100443 - RNA, 22 nt, Artificial Sequence
  Synthetic
cuuuuuccccagguuuucuuuc

SEQ ID NO: 100444 - RNA, 23 nt, Artificial Sequence
  Synthetic
acuuuuuccccagguuuucuuuc

SEQ ID NO: 100445 - RNA, 24 nt, Artificial Sequence
  Synthetic
cacuuuuuccccagguuuucuuuc

SEQ ID NO: 100446 - RNA, 22 nt, Artificial Sequence
  Synthetic
aguaauguuuuucaaaaguuuc

SEQ ID NO: 100447 - RNA, 24 nt, Artificial Sequence
  Synthetic
ugaguaauguuuuucaaaaguuuc

SEQ ID NO: 100448 - RNA, 18 nt, Artificial Sequence
  Synthetic
auacgcagauccaguuuc

SEQ ID NO: 100449 - RNA, 20 nt, Artificial Sequence
  Synthetic
ugauacgcagauccaguuuc

SEQ ID NO: 100450 - RNA, 21 nt, Artificial Sequence
  Synthetic
cugauacgcagauccaguuuc

SEQ ID NO: 100451 - RNA, 22 nt, Artificial Sequence
  Synthetic
ucugauacgcagauccaguuuc

SEQ ID NO: 100452 - RNA, 23 nt, Artificial Sequence
  Synthetic
aucugauacgcagauccaguuuc

SEQ ID NO: 100453 - RNA, 18 nt, Artificial Sequence
  Synthetic
ugauuuccuaauaguuuc

SEQ ID NO: 100454 - RNA, 20 nt, Artificial Sequence
  Synthetic
agugauuuccuaauaguuuc

SEQ ID NO: 100455 - RNA, 21 nt, Artificial Sequence
  Synthetic
cagugauuuccuaauaguuuc

SEQ ID NO: 100456 - RNA, 22 nt, Artificial Sequence
  Synthetic
ucagugauuuccuaauaguuuc

SEQ ID NO: 100457 - RNA, 23 nt, Artificial Sequence
  Synthetic
cucagugauuuccuaauaguuuc

SEQ ID NO: 100458 - RNA, 18 nt, Artificial Sequence
  Synthetic
cuaugagaugauaguuuc

SEQ ID NO: 100459 - RNA, 19 nt, Artificial Sequence
  Synthetic
ccuaugagaugauaguuuc

SEQ ID NO: 100460 - RNA, 20 nt, Artificial Sequence
  Synthetic
uccuaugagaugauaguuuc

SEQ ID NO: 100461 - RNA, 21 nt, Artificial Sequence
  Synthetic
auccuaugagaugauaguuuc

SEQ ID NO: 100462 - RNA, 22 nt, Artificial Sequence
  Synthetic
uauccuaugagaugauaguuuc

SEQ ID NO: 100463 - RNA, 23 nt, Artificial Sequence
  Synthetic
uuauccuaugagaugauaguuuc

SEQ ID NO: 100464 - RNA, 18 nt, Artificial Sequence
  Synthetic
cacauauuacuuaguuuc

SEQ ID NO: 100465 - RNA, 19 nt, Artificial Sequence
  Synthetic
acacauauuacuuaguuuc

SEQ ID NO: 100466 - RNA, 20 nt, Artificial Sequence
  Synthetic
aacacauauuacuuaguuuc

SEQ ID NO: 100467 - RNA, 21 nt, Artificial Sequence
  Synthetic
aaacacauauuacuuaguuuc

SEQ ID NO: 100468 - RNA, 23 nt, Artificial Sequence
  Synthetic
agaaacacauauuacuuaguuuc

SEQ ID NO: 100469 - RNA, 24 nt, Artificial Sequence
  Synthetic
cagaaacacauauuacuuaguuuc

SEQ ID NO: 100470 - RNA, 18 nt, Artificial Sequence
  Synthetic
caagcaagacaagguuuc

SEQ ID NO: 100471 - RNA, 21 nt, Artificial Sequence
  Synthetic
aggcaagcaagacaagguuuc

SEQ ID NO: 100472 - RNA, 22 nt, Artificial Sequence
  Synthetic
aaggcaagcaagacaagguuuc

SEQ ID NO: 100473 - RNA, 23 nt, Artificial Sequence
  Synthetic
aaaggcaagcaagacaagguuuc

SEQ ID NO: 100474 - RNA, 24 nt, Artificial Sequence
  Synthetic
uaaaggcaagcaagacaagguuuc

SEQ ID NO: 100475 - RNA, 18 nt, Artificial Sequence
  Synthetic
auguucccuugagguuuc

SEQ ID NO: 100476 - RNA, 19 nt, Artificial Sequence
  Synthetic
cauguucccuugagguuuc

SEQ ID NO: 100477 - RNA, 20 nt, Artificial Sequence
  Synthetic
ucauguucccuugagguuuc

SEQ ID NO: 100478 - RNA, 21 nt, Artificial Sequence
  Synthetic
cucauguucccuugagguuuc

SEQ ID NO: 100479 - RNA, 22 nt, Artificial Sequence
  Synthetic
ucucauguucccuugagguuuc

SEQ ID NO: 100480 - RNA, 23 nt, Artificial Sequence
  Synthetic
uucucauguucccuugagguuuc

SEQ ID NO: 100481 - RNA, 24 nt, Artificial Sequence
  Synthetic
uuucucauguucccuugagguuuc

SEQ ID NO: 100482 - RNA, 18 nt, Artificial Sequence
  Synthetic
uaccauuuggaugguuuc

SEQ ID NO: 100483 - RNA, 19 nt, Artificial Sequence
  Synthetic
auaccauuuggaugguuuc

SEQ ID NO: 100484 - RNA, 20 nt, Artificial Sequence
  Synthetic
uauaccauuuggaugguuuc

SEQ ID NO: 100485 - RNA, 21 nt, Artificial Sequence
  Synthetic
uuauaccauuuggaugguuuc

SEQ ID NO: 100486 - RNA, 24 nt, Artificial Sequence
  Synthetic
agguuauaccauuuggaugguuuc

SEQ ID NO: 100487 - RNA, 19 nt, Artificial Sequence
  Synthetic
ugaaaauuuaauugguuuc

SEQ ID NO: 100488 - RNA, 20 nt, Artificial Sequence
  Synthetic
cugaaaauuuaauugguuuc

SEQ ID NO: 100489 - RNA, 21 nt, Artificial Sequence
  Synthetic
ucugaaaauuuaauugguuuc

SEQ ID NO: 100490 - RNA, 23 nt, Artificial Sequence
  Synthetic
agucugaaaauuuaauugguuuc

SEQ ID NO: 100491 - RNA, 24 nt, Artificial Sequence
  Synthetic
uagucugaaaauuuaauugguuuc

SEQ ID NO: 100492 - RNA, 18 nt, Artificial Sequence
  Synthetic
ugaacaaggagauguuuc

SEQ ID NO: 100493 - RNA, 19 nt, Artificial Sequence
  Synthetic
uugaacaaggagauguuuc

SEQ ID NO: 100494 - RNA, 20 nt, Artificial Sequence
  Synthetic
auugaacaaggagauguuuc

SEQ ID NO: 100495 - RNA, 21 nt, Artificial Sequence
  Synthetic
cauugaacaaggagauguuuc

SEQ ID NO: 100496 - RNA, 22 nt, Artificial Sequence
  Synthetic
ucauugaacaaggagauguuuc

SEQ ID NO: 100497 - RNA, 23 nt, Artificial Sequence
  Synthetic
uucauugaacaaggagauguuuc

SEQ ID NO: 100498 - RNA, 24 nt, Artificial Sequence
  Synthetic
cuucauugaacaaggagauguuuc

SEQ ID NO: 100499 - RNA, 18 nt, Artificial Sequence
  Synthetic
uucuauuaccuauguuuc

SEQ ID NO: 100500 - RNA, 19 nt, Artificial Sequence
  Synthetic
uuucuauuaccuauguuuc

SEQ ID NO: 100501 - RNA, 20 nt, Artificial Sequence
  Synthetic
cuuucuauuaccuauguuuc

SEQ ID NO: 100502 - RNA, 24 nt, Artificial Sequence
  Synthetic
ugggcuuucuauuaccuauguuuc

SEQ ID NO: 100503 - RNA, 21 nt, Artificial Sequence
  Synthetic
uuuauuuuguagauuuguuuc

SEQ ID NO: 100504 - RNA, 22 nt, Artificial Sequence
  Synthetic
auuuauuuuguagauuuguuuc

SEQ ID NO: 100505 - RNA, 23 nt, Artificial Sequence
  Synthetic
aauuuauuuuguagauuuguuuc

SEQ ID NO: 100506 - RNA, 18 nt, Artificial Sequence
  Synthetic
aaugacuuaaaaauuuuc

SEQ ID NO: 100507 - RNA, 19 nt, Artificial Sequence
  Synthetic
aaaugacuuaaaaauuuuc

SEQ ID NO: 100508 - RNA, 21 nt, Artificial Sequence
  Synthetic
agaaaugacuuaaaaauuuuc

SEQ ID NO: 100509 - RNA, 22 nt, Artificial Sequence
  Synthetic
uagaaaugacuuaaaaauuuuc

SEQ ID NO: 100510 - RNA, 23 nt, Artificial Sequence
  Synthetic
auagaaaugacuuaaaaauuuuc

SEQ ID NO: 100511 - RNA, 24 nt, Artificial Sequence
  Synthetic
aauagaaaugacuuaaaaauuuuc

SEQ ID NO: 100512 - RNA, 19 nt, Artificial Sequence
  Synthetic
uggcucaugacaaauuuuc

SEQ ID NO: 100513 - RNA, 21 nt, Artificial Sequence
  Synthetic
cguggcucaugacaaauuuuc

SEQ ID NO: 100514 - RNA, 24 nt, Artificial Sequence
  Synthetic
aggcguggcucaugacaaauuuuc

SEQ ID NO: 100515 - RNA, 18 nt, Artificial Sequence
  Synthetic
cauacacuucacauuuuc

SEQ ID NO: 100516 - RNA, 19 nt, Artificial Sequence
  Synthetic
ucauacacuucacauuuuc

SEQ ID NO: 100517 - RNA, 20 nt, Artificial Sequence
  Synthetic
cucauacacuucacauuuuc

SEQ ID NO: 100518 - RNA, 21 nt, Artificial Sequence
  Synthetic
ucucauacacuucacauuuuc

SEQ ID NO: 100519 - RNA, 22 nt, Artificial Sequence
  Synthetic
uucucauacacuucacauuuuc

SEQ ID NO: 100520 - RNA, 23 nt, Artificial Sequence
  Synthetic
auucucauacacuucacauuuuc

SEQ ID NO: 100521 - RNA, 24 nt, Artificial Sequence
  Synthetic
cauucucauacacuucacauuuuc

SEQ ID NO: 100522 - RNA, 18 nt, Artificial Sequence
  Synthetic
acgaauaaauacauuuuc

SEQ ID NO: 100523 - RNA, 19 nt, Artificial Sequence
  Synthetic
aacgaauaaauacauuuuc

SEQ ID NO: 100524 - RNA, 20 nt, Artificial Sequence
  Synthetic
aaacgaauaaauacauuuuc

SEQ ID NO: 100525 - RNA, 21 nt, Artificial Sequence
  Synthetic
aaaacgaauaaauacauuuuc

SEQ ID NO: 100526 - RNA, 22 nt, Artificial Sequence
  Synthetic
aaaaacgaauaaauacauuuuc

SEQ ID NO: 100527 - RNA, 23 nt, Artificial Sequence
  Synthetic
caaaaacgaauaaauacauuuuc

SEQ ID NO: 100528 - RNA, 24 nt, Artificial Sequence
  Synthetic
acaaaaacgaauaaauacauuuuc

SEQ ID NO: 100529 - RNA, 18 nt, Artificial Sequence
  Synthetic
cuuuauuacuacauuuuc

SEQ ID NO: 100530 - RNA, 19 nt, Artificial Sequence
  Synthetic
ccuuuauuacuacauuuuc

SEQ ID NO: 100531 - RNA, 21 nt, Artificial Sequence
  Synthetic
agccuuuauuacuacauuuuc

SEQ ID NO: 100532 - RNA, 22 nt, Artificial Sequence
  Synthetic
aagccuuuauuacuacauuuuc

SEQ ID NO: 100533 - RNA, 24 nt, Artificial Sequence
  Synthetic
agaagccuuuauuacuacauuuuc

SEQ ID NO: 100534 - RNA, 18 nt, Artificial Sequence
  Synthetic
ugaaacuuugccauuuuc

SEQ ID NO: 100535 - RNA, 19 nt, Artificial Sequence
  Synthetic
cugaaacuuugccauuuuc

SEQ ID NO: 100536 - RNA, 20 nt, Artificial Sequence
  Synthetic
ccugaaacuuugccauuuuc

SEQ ID NO: 100537 - RNA, 21 nt, Artificial Sequence
  Synthetic
cccugaaacuuugccauuuuc

SEQ ID NO: 100538 - RNA, 22 nt, Artificial Sequence
  Synthetic
ccccugaaacuuugccauuuuc

SEQ ID NO: 100539 - RNA, 23 nt, Artificial Sequence
  Synthetic
accccugaaacuuugccauuuuc

SEQ ID NO: 100540 - RNA, 24 nt, Artificial Sequence
  Synthetic
uaccccugaaacuuugccauuuuc

SEQ ID NO: 100541 - RNA, 21 nt, Artificial Sequence
  Synthetic
uuucaacuuuuucucauuuuc

SEQ ID NO: 100542 - RNA, 22 nt, Artificial Sequence
  Synthetic
uuuucaacuuuuucucauuuuc

SEQ ID NO: 100543 - RNA, 23 nt, Artificial Sequence
  Synthetic
cuuuucaacuuuuucucauuuuc

SEQ ID NO: 100544 - RNA, 24 nt, Artificial Sequence
  Synthetic
acuuuucaacuuuuucucauuuuc

SEQ ID NO: 100545 - RNA, 18 nt, Artificial Sequence
  Synthetic
auguauagaaagauuuuc

SEQ ID NO: 100546 - RNA, 20 nt, Artificial Sequence
  Synthetic
cgauguauagaaagauuuuc

SEQ ID NO: 100547 - RNA, 22 nt, Artificial Sequence
  Synthetic
ugcgauguauagaaagauuuuc

SEQ ID NO: 100548 - RNA, 23 nt, Artificial Sequence
  Synthetic
augcgauguauagaaagauuuuc

SEQ ID NO: 100549 - RNA, 24 nt, Artificial Sequence
  Synthetic
uaugcgauguauagaaagauuuuc

SEQ ID NO: 100550 - RNA, 18 nt, Artificial Sequence
  Synthetic
cuguauuagaugauuuuc

SEQ ID NO: 100551 - RNA, 19 nt, Artificial Sequence
  Synthetic
ccuguauuagaugauuuuc

SEQ ID NO: 100552 - RNA, 20 nt, Artificial Sequence
  Synthetic
uccuguauuagaugauuuuc

SEQ ID NO: 100553 - RNA, 21 nt, Artificial Sequence
  Synthetic
uuccuguauuagaugauuuuc

SEQ ID NO: 100554 - RNA, 22 nt, Artificial Sequence
  Synthetic
auuccuguauuagaugauuuuc

SEQ ID NO: 100555 - RNA, 18 nt, Artificial Sequence
  Synthetic
ugcccuauuuuuauuuuc

SEQ ID NO: 100556 - RNA, 19 nt, Artificial Sequence
  Synthetic
uugcccuauuuuuauuuuc

SEQ ID NO: 100557 - RNA, 21 nt, Artificial Sequence
  Synthetic
aguugcccuauuuuuauuuuc

SEQ ID NO: 100558 - RNA, 22 nt, Artificial Sequence
  Synthetic
caguugcccuauuuuuauuuuc

SEQ ID NO: 100559 - RNA, 24 nt, Artificial Sequence
  Synthetic
agcaguugcccuauuuuuauuuuc

SEQ ID NO: 100560 - RNA, 18 nt, Artificial Sequence
  Synthetic
ugauagcauauacuuuuc

SEQ ID NO: 100561 - RNA, 19 nt, Artificial Sequence
  Synthetic
augauagcauauacuuuuc

SEQ ID NO: 100562 - RNA, 20 nt, Artificial Sequence
  Synthetic
aaugauagcauauacuuuuc

SEQ ID NO: 100563 - RNA, 23 nt, Artificial Sequence
  Synthetic
uggaaugauagcauauacuuuuc

SEQ ID NO: 100564 - RNA, 18 nt, Artificial Sequence
  Synthetic
ugcccuugaaagcuuuuc

SEQ ID NO: 100565 - RNA, 19 nt, Artificial Sequence
  Synthetic
augcccuugaaagcuuuuc

SEQ ID NO: 100566 - RNA, 20 nt, Artificial Sequence
  Synthetic
aaugcccuugaaagcuuuuc

SEQ ID NO: 100567 - RNA, 22 nt, Artificial Sequence
  Synthetic
ugaaugcccuugaaagcuuuuc

SEQ ID NO: 100568 - RNA, 23 nt, Artificial Sequence
  Synthetic
augaaugcccuugaaagcuuuuc

SEQ ID NO: 100569 - RNA, 24 nt, Artificial Sequence
  Synthetic
uaugaaugcccuugaaagcuuuuc

SEQ ID NO: 100570 - RNA, 18 nt, Artificial Sequence
  Synthetic
acaguauauauucuuuuc

SEQ ID NO: 100571 - RNA, 19 nt, Artificial Sequence
  Synthetic
uacaguauauauucuuuuc

SEQ ID NO: 100572 - RNA, 20 nt, Artificial Sequence
  Synthetic
auacaguauauauucuuuuc

SEQ ID NO: 100573 - RNA, 21 nt, Artificial Sequence
  Synthetic
aauacaguauauauucuuuuc

SEQ ID NO: 100574 - RNA, 22 nt, Artificial Sequence
  Synthetic
uaauacaguauauauucuuuuc

SEQ ID NO: 100575 - RNA, 23 nt, Artificial Sequence
  Synthetic
auaauacaguauauauucuuuuc

SEQ ID NO: 100576 - RNA, 24 nt, Artificial Sequence
  Synthetic
aauaauacaguauauauucuuuuc

SEQ ID NO: 100577 - RNA, 18 nt, Artificial Sequence
  Synthetic
caacaaucauuucuuuuc

SEQ ID NO: 100578 - RNA, 20 nt, Artificial Sequence
  Synthetic
ugcaacaaucauuucuuuuc

SEQ ID NO: 100579 - RNA, 21 nt, Artificial Sequence
  Synthetic
augcaacaaucauuucuuuuc

SEQ ID NO: 100580 - RNA, 22 nt, Artificial Sequence
  Synthetic
uaugcaacaaucauuucuuuuc

SEQ ID NO: 100581 - RNA, 23 nt, Artificial Sequence
  Synthetic
uuaugcaacaaucauuucuuuuc

SEQ ID NO: 100582 - RNA, 24 nt, Artificial Sequence
  Synthetic
uuuaugcaacaaucauuucuuuuc

SEQ ID NO: 100583 - RNA, 18 nt, Artificial Sequence
  Synthetic
caaguuaccggaguuuuc

SEQ ID NO: 100584 - RNA, 19 nt, Artificial Sequence
  Synthetic
acaaguuaccggaguuuuc

SEQ ID NO: 100585 - RNA, 20 nt, Artificial Sequence
  Synthetic
aacaaguuaccggaguuuuc

SEQ ID NO: 100586 - RNA, 22 nt, Artificial Sequence
  Synthetic
ugaacaaguuaccggaguuuuc

SEQ ID NO: 100587 - RNA, 24 nt, Artificial Sequence
  Synthetic
agugaacaaguuaccggaguuuuc

SEQ ID NO: 100588 - RNA, 18 nt, Artificial Sequence
  Synthetic
ccugcaucauacguuuuc

SEQ ID NO: 100589 - RNA, 19 nt, Artificial Sequence
  Synthetic
accugcaucauacguuuuc

SEQ ID NO: 100590 - RNA, 20 nt, Artificial Sequence
  Synthetic
caccugcaucauacguuuuc

SEQ ID NO: 100591 - RNA, 21 nt, Artificial Sequence
  Synthetic
ucaccugcaucauacguuuuc

SEQ ID NO: 100592 - RNA, 22 nt, Artificial Sequence
  Synthetic
cucaccugcaucauacguuuuc

SEQ ID NO: 100593 - RNA, 23 nt, Artificial Sequence
  Synthetic
ucucaccugcaucauacguuuuc

SEQ ID NO: 100594 - RNA, 24 nt, Artificial Sequence
  Synthetic
cucucaccugcaucauacguuuuc

SEQ ID NO: 100595 - RNA, 20 nt, Artificial Sequence
  Synthetic
aggugaaagcgaguguuuuc

SEQ ID NO: 100596 - RNA, 21 nt, Artificial Sequence
  Synthetic
caggugaaagcgaguguuuuc

SEQ ID NO: 100597 - RNA, 22 nt, Artificial Sequence
  Synthetic
acaggugaaagcgaguguuuuc

SEQ ID NO: 100598 - RNA, 23 nt, Artificial Sequence
  Synthetic
aacaggugaaagcgaguguuuuc

SEQ ID NO: 100599 - RNA, 24 nt, Artificial Sequence
  Synthetic
aaacaggugaaagcgaguguuuuc

SEQ ID NO: 100600 - RNA, 18 nt, Artificial Sequence
  Synthetic
ugaaucauggguguuuuc

SEQ ID NO: 100601 - RNA, 19 nt, Artificial Sequence
  Synthetic
augaaucauggguguuuuc

SEQ ID NO: 100602 - RNA, 21 nt, Artificial Sequence
  Synthetic
agaugaaucauggguguuuuc

SEQ ID NO: 100603 - RNA, 22 nt, Artificial Sequence
  Synthetic
aagaugaaucauggguguuuuc

SEQ ID NO: 100604 - RNA, 23 nt, Artificial Sequence
  Synthetic
aaagaugaaucauggguguuuuc

SEQ ID NO: 100605 - RNA, 24 nt, Artificial Sequence
  Synthetic
aaaagaugaaucauggguguuuuc

SEQ ID NO: 100606 - RNA, 18 nt, Artificial Sequence
  Synthetic
agcgcggcauaauuuuuc

SEQ ID NO: 100607 - RNA, 19 nt, Artificial Sequence
  Synthetic
aagcgcggcauaauuuuuc

SEQ ID NO: 100608 - RNA, 20 nt, Artificial Sequence
  Synthetic
aaagcgcggcauaauuuuuc

SEQ ID NO: 100609 - RNA, 21 nt, Artificial Sequence
  Synthetic
uaaagcgcggcauaauuuuuc

SEQ ID NO: 100610 - RNA, 22 nt, Artificial Sequence
  Synthetic
cuaaagcgcggcauaauuuuuc

SEQ ID NO: 100611 - RNA, 23 nt, Artificial Sequence
  Synthetic
ucuaaagcgcggcauaauuuuuc

SEQ ID NO: 100612 - RNA, 24 nt, Artificial Sequence
  Synthetic
cucuaaagcgcggcauaauuuuuc

SEQ ID NO: 100613 - RNA, 18 nt, Artificial Sequence
  Synthetic
caaucuugcuacuuuuuc

SEQ ID NO: 100614 - RNA, 19 nt, Artificial Sequence
  Synthetic
acaaucuugcuacuuuuuc

SEQ ID NO: 100615 - RNA, 20 nt, Artificial Sequence
  Synthetic
aacaaucuugcuacuuuuuc

SEQ ID NO: 100616 - RNA, 21 nt, Artificial Sequence
  Synthetic
aaacaaucuugcuacuuuuuc

SEQ ID NO: 100617 - RNA, 22 nt, Artificial Sequence
  Synthetic
aaaacaaucuugcuacuuuuuc

SEQ ID NO: 100618 - RNA, 23 nt, Artificial Sequence
  Synthetic
aaaaacaaucuugcuacuuuuuc

SEQ ID NO: 100619 - RNA, 24 nt, Artificial Sequence
  Synthetic
caaaaacaaucuugcuacuuuuuc

SEQ ID NO: 100620 - RNA, 18 nt, Artificial Sequence
  Synthetic
ucaauccacaaguuuuuc

SEQ ID NO: 100621 - RNA, 19 nt, Artificial Sequence
  Synthetic
uucaauccacaaguuuuuc

SEQ ID NO: 100622 - RNA, 20 nt, Artificial Sequence
  Synthetic
cuucaauccacaaguuuuuc

SEQ ID NO: 100623 - RNA, 21 nt, Artificial Sequence
  Synthetic
ucuucaauccacaaguuuuuc

SEQ ID NO: 100624 - RNA, 23 nt, Artificial Sequence
  Synthetic
cgucuucaauccacaaguuuuuc

SEQ ID NO: 100625 - RNA, 18 nt, Artificial Sequence
  Synthetic
auuacaaccuuguuuuuc

SEQ ID NO: 100626 - RNA, 19 nt, Artificial Sequence
  Synthetic
aauuacaaccuuguuuuuc

SEQ ID NO: 100627 - RNA, 20 nt, Artificial Sequence
  Synthetic
uaauuacaaccuuguuuuuc

SEQ ID NO: 100628 - RNA, 21 nt, Artificial Sequence
  Synthetic
auaauuacaaccuuguuuuuc

SEQ ID NO: 100629 - RNA, 24 nt, Artificial Sequence
  Synthetic
uggauaauuacaaccuuguuuuuc

SEQ ID NO: 100630 - RNA, 21 nt, Artificial Sequence
  Synthetic
uaaauauuguuuacuuuuuuc

SEQ ID NO: 100631 - RNA, 22 nt, Artificial Sequence
  Synthetic
uuaaauauuguuuacuuuuuuc

SEQ ID NO: 100632 - RNA, 23 nt, Artificial Sequence
  Synthetic
cuuaaauauuguuuacuuuuuuc

SEQ ID NO: 100633 - RNA, 21 nt, Artificial Sequence
  Synthetic
auucauaugucuauuuuuuuc

SEQ ID NO: 100634 - RNA, 22 nt, Artificial Sequence
  Synthetic
uauucauaugucuauuuuuuuc

SEQ ID NO: 100635 - RNA, 23 nt, Artificial Sequence
  Synthetic
cuauucauaugucuauuuuuuuc

SEQ ID NO: 100636 - RNA, 24 nt, Artificial Sequence
  Synthetic
ucuauucauaugucuauuuuuuuc

SEQ ID NO: 100637 - RNA, 21 nt, Artificial Sequence
  Synthetic
auuuuacagcauuuuuuuuuc

SEQ ID NO: 100638 - RNA, 22 nt, Artificial Sequence
  Synthetic
uauuuuacagcauuuuuuuuuc

SEQ ID NO: 100639 - RNA, 23 nt, Artificial Sequence
  Synthetic
auauuuuacagcauuuuuuuuuc

SEQ ID NO: 100640 - RNA, 24 nt, Artificial Sequence
  Synthetic
uauauuuuacagcauuuuuuuuuc

SEQ ID NO: 100641 - RNA, 18 nt, Artificial Sequence
  Synthetic
aaaugaccuuaaaaaaag

SEQ ID NO: 100642 - RNA, 19 nt, Artificial Sequence
  Synthetic
caaaugaccuuaaaaaaag

SEQ ID NO: 100643 - RNA, 20 nt, Artificial Sequence
  Synthetic
acaaaugaccuuaaaaaaag

SEQ ID NO: 100644 - RNA, 21 nt, Artificial Sequence
  Synthetic
uacaaaugaccuuaaaaaaag

SEQ ID NO: 100645 - RNA, 22 nt, Artificial Sequence
  Synthetic
auacaaaugaccuuaaaaaaag

SEQ ID NO: 100646 - RNA, 23 nt, Artificial Sequence
  Synthetic
aauacaaaugaccuuaaaaaaag

SEQ ID NO: 100647 - RNA, 18 nt, Artificial Sequence
  Synthetic
cuuuguauaugaaaaaag

SEQ ID NO: 100648 - RNA, 19 nt, Artificial Sequence
  Synthetic
ccuuuguauaugaaaaaag

SEQ ID NO: 100649 - RNA, 20 nt, Artificial Sequence
  Synthetic
accuuuguauaugaaaaaag

SEQ ID NO: 100650 - RNA, 22 nt, Artificial Sequence
  Synthetic
agaccuuuguauaugaaaaaag

SEQ ID NO: 100651 - RNA, 23 nt, Artificial Sequence
  Synthetic
aagaccuuuguauaugaaaaaag

SEQ ID NO: 100652 - RNA, 24 nt, Artificial Sequence
  Synthetic
uaagaccuuuguauaugaaaaaag

SEQ ID NO: 100653 - RNA, 21 nt, Artificial Sequence
  Synthetic
cuugcaaacaaaauaaaaaag

SEQ ID NO: 100654 - RNA, 22 nt, Artificial Sequence
  Synthetic
ucuugcaaacaaaauaaaaaag

SEQ ID NO: 100655 - RNA, 23 nt, Artificial Sequence
  Synthetic
uucuugcaaacaaaauaaaaaag

SEQ ID NO: 100656 - RNA, 24 nt, Artificial Sequence
  Synthetic
uuucuugcaaacaaaauaaaaaag

SEQ ID NO: 100657 - RNA, 18 nt, Artificial Sequence
  Synthetic
auucuaacucccaaaaag

SEQ ID NO: 100658 - RNA, 19 nt, Artificial Sequence
  Synthetic
aauucuaacucccaaaaag

SEQ ID NO: 100659 - RNA, 21 nt, Artificial Sequence
  Synthetic
agaauucuaacucccaaaaag

SEQ ID NO: 100660 - RNA, 22 nt, Artificial Sequence
  Synthetic
cagaauucuaacucccaaaaag

SEQ ID NO: 100661 - RNA, 23 nt, Artificial Sequence
  Synthetic
ucagaauucuaacucccaaaaag

SEQ ID NO: 100662 - RNA, 24 nt, Artificial Sequence
  Synthetic
uucagaauucuaacucccaaaaag

SEQ ID NO: 100663 - RNA, 21 nt, Artificial Sequence
  Synthetic
cuucuccagaaaagcaaaaag

SEQ ID NO: 100664 - RNA, 23 nt, Artificial Sequence
  Synthetic
ugcuucuccagaaaagcaaaaag

SEQ ID NO: 100665 - RNA, 24 nt, Artificial Sequence
  Synthetic
augcuucuccagaaaagcaaaaag

SEQ ID NO: 100666 - RNA, 18 nt, Artificial Sequence
  Synthetic
acuauuucauucaaaaag

SEQ ID NO: 100667 - RNA, 19 nt, Artificial Sequence
  Synthetic
uacuauuucauucaaaaag

SEQ ID NO: 100668 - RNA, 21 nt, Artificial Sequence
  Synthetic
uguacuauuucauucaaaaag

SEQ ID NO: 100669 - RNA, 22 nt, Artificial Sequence
  Synthetic
uuguacuauuucauucaaaaag

SEQ ID NO: 100670 - RNA, 23 nt, Artificial Sequence
  Synthetic
uuuguacuauuucauucaaaaag

SEQ ID NO: 100671 - RNA, 24 nt, Artificial Sequence
  Synthetic
auuuguacuauuucauucaaaaag

SEQ ID NO: 100672 - RNA, 20 nt, Artificial Sequence
  Synthetic
aggaugguaagccuaaaaag

SEQ ID NO: 100673 - RNA, 22 nt, Artificial Sequence
  Synthetic
ugaggaugguaagccuaaaaag

SEQ ID NO: 100674 - RNA, 23 nt, Artificial Sequence
  Synthetic
cugaggaugguaagccuaaaaag

SEQ ID NO: 100675 - RNA, 24 nt, Artificial Sequence
  Synthetic
acugaggaugguaagccuaaaaag

SEQ ID NO: 100676 - RNA, 18 nt, Artificial Sequence
  Synthetic
uugacuugaaguaaaaag

SEQ ID NO: 100677 - RNA, 20 nt, Artificial Sequence
  Synthetic
uguugacuugaaguaaaaag

SEQ ID NO: 100678 - RNA, 21 nt, Artificial Sequence
  Synthetic
cuguugacuugaaguaaaaag

SEQ ID NO: 100679 - RNA, 22 nt, Artificial Sequence
  Synthetic
ucuguugacuugaaguaaaaag

SEQ ID NO: 100680 - RNA, 23 nt, Artificial Sequence
  Synthetic
aucuguugacuugaaguaaaaag

SEQ ID NO: 100681 - RNA, 24 nt, Artificial Sequence
  Synthetic
uaucuguugacuugaaguaaaaag

SEQ ID NO: 100682 - RNA, 18 nt, Artificial Sequence
  Synthetic
agcaguuguacccaaaag

SEQ ID NO: 100683 - RNA, 19 nt, Artificial Sequence
  Synthetic
aagcaguuguacccaaaag

SEQ ID NO: 100684 - RNA, 21 nt, Artificial Sequence
  Synthetic
cgaagcaguuguacccaaaag

SEQ ID NO: 100685 - RNA, 22 nt, Artificial Sequence
  Synthetic
acgaagcaguuguacccaaaag

SEQ ID NO: 100686 - RNA, 23 nt, Artificial Sequence
  Synthetic
aacgaagcaguuguacccaaaag

SEQ ID NO: 100687 - RNA, 24 nt, Artificial Sequence
  Synthetic
aaacgaagcaguuguacccaaaag

SEQ ID NO: 100688 - RNA, 18 nt, Artificial Sequence
  Synthetic
ugaaaccauacucaaaag

SEQ ID NO: 100689 - RNA, 19 nt, Artificial Sequence
  Synthetic
augaaaccauacucaaaag

SEQ ID NO: 100690 - RNA, 20 nt, Artificial Sequence
  Synthetic
aaugaaaccauacucaaaag

SEQ ID NO: 100691 - RNA, 21 nt, Artificial Sequence
  Synthetic
aaaugaaaccauacucaaaag

SEQ ID NO: 100692 - RNA, 22 nt, Artificial Sequence
  Synthetic
uaaaugaaaccauacucaaaag

SEQ ID NO: 100693 - RNA, 23 nt, Artificial Sequence
  Synthetic
cuaaaugaaaccauacucaaaag

SEQ ID NO: 100694 - RNA, 24 nt, Artificial Sequence
  Synthetic
ucuaaaugaaaccauacucaaaag

SEQ ID NO: 100695 - RNA, 21 nt, Artificial Sequence
  Synthetic
uuguuauuuaaaaaagaaaag

SEQ ID NO: 100696 - RNA, 22 nt, Artificial Sequence
  Synthetic
uuuguuauuuaaaaaagaaaag

SEQ ID NO: 100697 - RNA, 23 nt, Artificial Sequence
  Synthetic
auuuguuauuuaaaaaagaaaag

SEQ ID NO: 100698 - RNA, 24 nt, Artificial Sequence
  Synthetic
uauuuguuauuuaaaaaagaaaag

SEQ ID NO: 100699 - RNA, 21 nt, Artificial Sequence
  Synthetic
aaagcaaaagccagagaaaag

SEQ ID NO: 100700 - RNA, 23 nt, Artificial Sequence
  Synthetic
agaaagcaaaagccagagaaaag

SEQ ID NO: 100701 - RNA, 24 nt, Artificial Sequence
  Synthetic
uagaaagcaaaagccagagaaaag

SEQ ID NO: 100702 - RNA, 21 nt, Artificial Sequence
  Synthetic
caagcucaaaggcaggaaaag

SEQ ID NO: 100703 - RNA, 22 nt, Artificial Sequence
  Synthetic
ucaagcucaaaggcaggaaaag

SEQ ID NO: 100704 - RNA, 23 nt, Artificial Sequence
  Synthetic
uucaagcucaaaggcaggaaaag

SEQ ID NO: 100705 - RNA, 24 nt, Artificial Sequence
  Synthetic
auucaagcucaaaggcaggaaaag

SEQ ID NO: 100706 - RNA, 18 nt, Artificial Sequence
  Synthetic
uuuacuacuucugaaaag

SEQ ID NO: 100707 - RNA, 19 nt, Artificial Sequence
  Synthetic
auuuacuacuucugaaaag

SEQ ID NO: 100708 - RNA, 20 nt, Artificial Sequence
  Synthetic
uauuuacuacuucugaaaag

SEQ ID NO: 100709 - RNA, 21 nt, Artificial Sequence
  Synthetic
uuauuuacuacuucugaaaag

SEQ ID NO: 100710 - RNA, 24 nt, Artificial Sequence
  Synthetic
ugguuauuuacuacuucugaaaag

SEQ ID NO: 100711 - RNA, 18 nt, Artificial Sequence
  Synthetic
caugcgcucagugaaaag

SEQ ID NO: 100712 - RNA, 19 nt, Artificial Sequence
  Synthetic
acaugcgcucagugaaaag

SEQ ID NO: 100713 - RNA, 20 nt, Artificial Sequence
  Synthetic
uacaugcgcucagugaaaag

SEQ ID NO: 100714 - RNA, 21 nt, Artificial Sequence
  Synthetic
cuacaugcgcucagugaaaag

SEQ ID NO: 100715 - RNA, 22 nt, Artificial Sequence
  Synthetic
ucuacaugcgcucagugaaaag

SEQ ID NO: 100716 - RNA, 23 nt, Artificial Sequence
  Synthetic
aucuacaugcgcucagugaaaag

SEQ ID NO: 100717 - RNA, 24 nt, Artificial Sequence
  Synthetic
caucuacaugcgcucagugaaaag

SEQ ID NO: 100718 - RNA, 21 nt, Artificial Sequence
  Synthetic
aaaaauagcucaauugaaaag

SEQ ID NO: 100719 - RNA, 23 nt, Artificial Sequence
  Synthetic
agaaaaauagcucaauugaaaag

SEQ ID NO: 100720 - RNA, 24 nt, Artificial Sequence
  Synthetic
cagaaaaauagcucaauugaaaag

SEQ ID NO: 100721 - RNA, 18 nt, Artificial Sequence
  Synthetic
acuaauauuuuugaaaag

SEQ ID NO: 100722 - RNA, 19 nt, Artificial Sequence
  Synthetic
cacuaauauuuuugaaaag

SEQ ID NO: 100723 - RNA, 20 nt, Artificial Sequence
  Synthetic
ucacuaauauuuuugaaaag

SEQ ID NO: 100724 - RNA, 22 nt, Artificial Sequence
  Synthetic
agucacuaauauuuuugaaaag

SEQ ID NO: 100725 - RNA, 23 nt, Artificial Sequence
  Synthetic
uagucacuaauauuuuugaaaag

SEQ ID NO: 100726 - RNA, 22 nt, Artificial Sequence
  Synthetic
agacaaagcaaggcaauaaaag

SEQ ID NO: 100727 - RNA, 24 nt, Artificial Sequence
  Synthetic
agagacaaagcaaggcaauaaaag

SEQ ID NO: 100728 - RNA, 18 nt, Artificial Sequence
  Synthetic
auguucuuauaauaaaag

SEQ ID NO: 100729 - RNA, 19 nt, Artificial Sequence
  Synthetic
aauguucuuauaauaaaag

SEQ ID NO: 100730 - RNA, 20 nt, Artificial Sequence
  Synthetic
caauguucuuauaauaaaag

SEQ ID NO: 100731 - RNA, 21 nt, Artificial Sequence
  Synthetic
ccaauguucuuauaauaaaag

SEQ ID NO: 100732 - RNA, 22 nt, Artificial Sequence
  Synthetic
uccaauguucuuauaauaaaag

SEQ ID NO: 100733 - RNA, 23 nt, Artificial Sequence
  Synthetic
cuccaauguucuuauaauaaaag

SEQ ID NO: 100734 - RNA, 24 nt, Artificial Sequence
  Synthetic
acuccaauguucuuauaauaaaag

SEQ ID NO: 100735 - RNA, 18 nt, Artificial Sequence
  Synthetic
ccaauguuauaauaaaag

SEQ ID NO: 100736 - RNA, 19 nt, Artificial Sequence
  Synthetic
cccaauguuauaauaaaag

SEQ ID NO: 100737 - RNA, 20 nt, Artificial Sequence
  Synthetic
ucccaauguuauaauaaaag

SEQ ID NO: 100738 - RNA, 21 nt, Artificial Sequence
  Synthetic
cucccaauguuauaauaaaag

SEQ ID NO: 100739 - RNA, 22 nt, Artificial Sequence
  Synthetic
ucucccaauguuauaauaaaag

SEQ ID NO: 100740 - RNA, 24 nt, Artificial Sequence
  Synthetic
ugucucccaauguuauaauaaaag

SEQ ID NO: 100741 - RNA, 21 nt, Artificial Sequence
  Synthetic
aauaaaaacaaacuauaaaag

SEQ ID NO: 100742 - RNA, 23 nt, Artificial Sequence
  Synthetic
agaauaaaaacaaacuauaaaag

SEQ ID NO: 100743 - RNA, 24 nt, Artificial Sequence
  Synthetic
cagaauaaaaacaaacuauaaaag

SEQ ID NO: 100744 - RNA, 21 nt, Artificial Sequence
  Synthetic
uuguaaauagaaaaguaaaag

SEQ ID NO: 100745 - RNA, 22 nt, Artificial Sequence
  Synthetic
uuuguaaauagaaaaguaaaag

SEQ ID NO: 100746 - RNA, 23 nt, Artificial Sequence
  Synthetic
uuuuguaaauagaaaaguaaaag

SEQ ID NO: 100747 - RNA, 24 nt, Artificial Sequence
  Synthetic
uuuuuguaaauagaaaaguaaaag

SEQ ID NO: 100748 - RNA, 18 nt, Artificial Sequence
  Synthetic
uucaaucugacguaaaag

SEQ ID NO: 100749 - RNA, 19 nt, Artificial Sequence
  Synthetic
auucaaucugacguaaaag

SEQ ID NO: 100750 - RNA, 20 nt, Artificial Sequence
  Synthetic
cauucaaucugacguaaaag

SEQ ID NO: 100751 - RNA, 21 nt, Artificial Sequence
  Synthetic
ccauucaaucugacguaaaag

SEQ ID NO: 100752 - RNA, 22 nt, Artificial Sequence
  Synthetic
cccauucaaucugacguaaaag

SEQ ID NO: 100753 - RNA, 23 nt, Artificial Sequence
  Synthetic
ucccauucaaucugacguaaaag

SEQ ID NO: 100754 - RNA, 24 nt, Artificial Sequence
  Synthetic
uucccauucaaucugacguaaaag

SEQ ID NO: 100755 - RNA, 18 nt, Artificial Sequence
  Synthetic
acagggcagcuguaaaag

SEQ ID NO: 100756 - RNA, 19 nt, Artificial Sequence
  Synthetic
uacagggcagcuguaaaag

SEQ ID NO: 100757 - RNA, 21 nt, Artificial Sequence
  Synthetic
aguacagggcagcuguaaaag

SEQ ID NO: 100758 - RNA, 22 nt, Artificial Sequence
  Synthetic
aaguacagggcagcuguaaaag

SEQ ID NO: 100759 - RNA, 24 nt, Artificial Sequence
  Synthetic
ugaaguacagggcagcuguaaaag

SEQ ID NO: 100760 - RNA, 18 nt, Artificial Sequence
  Synthetic
cuccuguaaaauuaaaag

SEQ ID NO: 100761 - RNA, 19 nt, Artificial Sequence
  Synthetic
ccuccuguaaaauuaaaag

SEQ ID NO: 100762 - RNA, 20 nt, Artificial Sequence
  Synthetic
cccuccuguaaaauuaaaag

SEQ ID NO: 100763 - RNA, 22 nt, Artificial Sequence
  Synthetic
ugcccuccuguaaaauuaaaag

SEQ ID NO: 100764 - RNA, 23 nt, Artificial Sequence
  Synthetic
uugcccuccuguaaaauuaaaag

SEQ ID NO: 100765 - RNA, 18 nt, Artificial Sequence
  Synthetic
auguauuuaccuuaaaag

SEQ ID NO: 100766 - RNA, 19 nt, Artificial Sequence
  Synthetic
cauguauuuaccuuaaaag

SEQ ID NO: 100767 - RNA, 20 nt, Artificial Sequence
  Synthetic
ucauguauuuaccuuaaaag

SEQ ID NO: 100768 - RNA, 21 nt, Artificial Sequence
  Synthetic
uucauguauuuaccuuaaaag

SEQ ID NO: 100769 - RNA, 22 nt, Artificial Sequence
  Synthetic
uuucauguauuuaccuuaaaag

SEQ ID NO: 100770 - RNA, 23 nt, Artificial Sequence
  Synthetic
uuuucauguauuuaccuuaaaag

SEQ ID NO: 100771 - RNA, 24 nt, Artificial Sequence
  Synthetic
uuuuucauguauuuaccuuaaaag

SEQ ID NO: 100772 - RNA, 21 nt, Artificial Sequence
  Synthetic
agcaauauagcagaaacaaag

SEQ ID NO: 100773 - RNA, 24 nt, Artificial Sequence
  Synthetic
aggagcaauauagcagaaacaaag

SEQ ID NO: 100774 - RNA, 18 nt, Artificial Sequence
  Synthetic
acugaaccccacacaaag

SEQ ID NO: 100775 - RNA, 20 nt, Artificial Sequence
  Synthetic
agacugaaccccacacaaag

SEQ ID NO: 100776 - RNA, 21 nt, Artificial Sequence
  Synthetic
uagacugaaccccacacaaag

SEQ ID NO: 100777 - RNA, 22 nt, Artificial Sequence
  Synthetic
cuagacugaaccccacacaaag

SEQ ID NO: 100778 - RNA, 23 nt, Artificial Sequence
  Synthetic
acuagacugaaccccacacaaag

SEQ ID NO: 100779 - RNA, 24 nt, Artificial Sequence
  Synthetic
uacuagacugaaccccacacaaag

SEQ ID NO: 100780 - RNA, 18 nt, Artificial Sequence
  Synthetic
aguguggcagucacaaag

SEQ ID NO: 100781 - RNA, 19 nt, Artificial Sequence
  Synthetic
aaguguggcagucacaaag

SEQ ID NO: 100782 - RNA, 22 nt, Artificial Sequence
  Synthetic
aggaaguguggcagucacaaag

SEQ ID NO: 100783 - RNA, 23 nt, Artificial Sequence
  Synthetic
aaggaaguguggcagucacaaag

SEQ ID NO: 100784 - RNA, 24 nt, Artificial Sequence
  Synthetic
uaaggaaguguggcagucacaaag

SEQ ID NO: 100785 - RNA, 19 nt, Artificial Sequence
  Synthetic
agauaagcucuucacaaag

SEQ ID NO: 100786 - RNA, 20 nt, Artificial Sequence
  Synthetic
aagauaagcucuucacaaag

SEQ ID NO: 100787 - RNA, 21 nt, Artificial Sequence
  Synthetic
caagauaagcucuucacaaag

SEQ ID NO: 100788 - RNA, 22 nt, Artificial Sequence
  Synthetic
ccaagauaagcucuucacaaag

SEQ ID NO: 100789 - RNA, 23 nt, Artificial Sequence
  Synthetic
accaagauaagcucuucacaaag

SEQ ID NO: 100790 - RNA, 24 nt, Artificial Sequence
  Synthetic
uaccaagauaagcucuucacaaag

SEQ ID NO: 100791 - RNA, 18 nt, Artificial Sequence
  Synthetic
aauggaagcuagacaaag

SEQ ID NO: 100792 - RNA, 21 nt, Artificial Sequence
  Synthetic
aggaauggaagcuagacaaag

SEQ ID NO: 100793 - RNA, 22 nt, Artificial Sequence
  Synthetic
aaggaauggaagcuagacaaag

SEQ ID NO: 100794 - RNA, 23 nt, Artificial Sequence
  Synthetic
aaaggaauggaagcuagacaaag

SEQ ID NO: 100795 - RNA, 21 nt, Artificial Sequence
  Synthetic
ccugaaacuggaaauacaaag

SEQ ID NO: 100796 - RNA, 22 nt, Artificial Sequence
  Synthetic
accugaaacuggaaauacaaag

SEQ ID NO: 100797 - RNA, 23 nt, Artificial Sequence
  Synthetic
uaccugaaacuggaaauacaaag

SEQ ID NO: 100798 - RNA, 18 nt, Artificial Sequence
  Synthetic
aacauaagagauacaaag

SEQ ID NO: 100799 - RNA, 19 nt, Artificial Sequence
  Synthetic
uaacauaagagauacaaag

SEQ ID NO: 100800 - RNA, 20 nt, Artificial Sequence
  Synthetic
uuaacauaagagauacaaag

SEQ ID NO: 100801 - RNA, 21 nt, Artificial Sequence
  Synthetic
cuuaacauaagagauacaaag

SEQ ID NO: 100802 - RNA, 22 nt, Artificial Sequence
  Synthetic
ccuuaacauaagagauacaaag

SEQ ID NO: 100803 - RNA, 18 nt, Artificial Sequence
  Synthetic
cuuggaguucuuacaaag

SEQ ID NO: 100804 - RNA, 19 nt, Artificial Sequence
  Synthetic
acuuggaguucuuacaaag

SEQ ID NO: 100805 - RNA, 20 nt, Artificial Sequence
  Synthetic
cacuuggaguucuuacaaag

SEQ ID NO: 100806 - RNA, 21 nt, Artificial Sequence
  Synthetic
ccacuuggaguucuuacaaag

SEQ ID NO: 100807 - RNA, 22 nt, Artificial Sequence
  Synthetic
uccacuuggaguucuuacaaag

SEQ ID NO: 100808 - RNA, 23 nt, Artificial Sequence
  Synthetic
auccacuuggaguucuuacaaag

SEQ ID NO: 100809 - RNA, 24 nt, Artificial Sequence
  Synthetic
cauccacuuggaguucuuacaaag

SEQ ID NO: 100810 - RNA, 18 nt, Artificial Sequence
  Synthetic
uuuagggcuguuacaaag

SEQ ID NO: 100811 - RNA, 19 nt, Artificial Sequence
  Synthetic
cuuuagggcuguuacaaag

SEQ ID NO: 100812 - RNA, 20 nt, Artificial Sequence
  Synthetic
acuuuagggcuguuacaaag

SEQ ID NO: 100813 - RNA, 21 nt, Artificial Sequence
  Synthetic
uacuuuagggcuguuacaaag

SEQ ID NO: 100814 - RNA, 22 nt, Artificial Sequence
  Synthetic
auacuuuagggcuguuacaaag

SEQ ID NO: 100815 - RNA, 23 nt, Artificial Sequence
  Synthetic
cauacuuuagggcuguuacaaag

SEQ ID NO: 100816 - RNA, 18 nt, Artificial Sequence
  Synthetic
ucacagagcuaaccaaag

SEQ ID NO: 100817 - RNA, 19 nt, Artificial Sequence
  Synthetic
uucacagagcuaaccaaag

SEQ ID NO: 100818 - RNA, 20 nt, Artificial Sequence
  Synthetic
auucacagagcuaaccaaag

SEQ ID NO: 100819 - RNA, 21 nt, Artificial Sequence
  Synthetic
aauucacagagcuaaccaaag

SEQ ID NO: 100820 - RNA, 22 nt, Artificial Sequence
  Synthetic
uaauucacagagcuaaccaaag

SEQ ID NO: 100821 - RNA, 23 nt, Artificial Sequence
  Synthetic
auaauucacagagcuaaccaaag

SEQ ID NO: 100822 - RNA, 24 nt, Artificial Sequence
  Synthetic
aauaauucacagagcuaaccaaag

SEQ ID NO: 100823 - RNA, 18 nt, Artificial Sequence
  Synthetic
uggccagauugaccaaag

SEQ ID NO: 100824 - RNA, 19 nt, Artificial Sequence
  Synthetic
uuggccagauugaccaaag

SEQ ID NO: 100825 - RNA, 22 nt, Artificial Sequence
  Synthetic
agguuggccagauugaccaaag

SEQ ID NO: 100826 - RNA, 23 nt, Artificial Sequence
  Synthetic
aagguuggccagauugaccaaag

SEQ ID NO: 100827 - RNA, 24 nt, Artificial Sequence
  Synthetic
aaagguuggccagauugaccaaag

SEQ ID NO: 100828 - RNA, 18 nt, Artificial Sequence
  Synthetic
cauguuccagauccaaag

SEQ ID NO: 100829 - RNA, 19 nt, Artificial Sequence
  Synthetic
ucauguuccagauccaaag

SEQ ID NO: 100830 - RNA, 20 nt, Artificial Sequence
  Synthetic
cucauguuccagauccaaag

SEQ ID NO: 100831 - RNA, 21 nt, Artificial Sequence
  Synthetic
acucauguuccagauccaaag

SEQ ID NO: 100832 - RNA, 22 nt, Artificial Sequence
  Synthetic
uacucauguuccagauccaaag

SEQ ID NO: 100833 - RNA, 23 nt, Artificial Sequence
  Synthetic
cuacucauguuccagauccaaag

SEQ ID NO: 100834 - RNA, 24 nt, Artificial Sequence
  Synthetic
ucuacucauguuccagauccaaag

SEQ ID NO: 100835 - RNA, 20 nt, Artificial Sequence
  Synthetic
uggauguggagacuccaaag

SEQ ID NO: 100836 - RNA, 21 nt, Artificial Sequence
  Synthetic
uuggauguggagacuccaaag

SEQ ID NO: 100837 - RNA, 22 nt, Artificial Sequence
  Synthetic
auuggauguggagacuccaaag

SEQ ID NO: 100838 - RNA, 23 nt, Artificial Sequence
  Synthetic
cauuggauguggagacuccaaag

SEQ ID NO: 100839 - RNA, 24 nt, Artificial Sequence
  Synthetic
acauuggauguggagacuccaaag

SEQ ID NO: 100840 - RNA, 18 nt, Artificial Sequence
  Synthetic
cugagucauaaagcaaag

SEQ ID NO: 100841 - RNA, 19 nt, Artificial Sequence
  Synthetic
ccugagucauaaagcaaag

SEQ ID NO: 100842 - RNA, 20 nt, Artificial Sequence
  Synthetic
uccugagucauaaagcaaag

SEQ ID NO: 100843 - RNA, 21 nt, Artificial Sequence
  Synthetic
auccugagucauaaagcaaag

SEQ ID NO: 100844 - RNA, 22 nt, Artificial Sequence
  Synthetic
aauccugagucauaaagcaaag

SEQ ID NO: 100845 - RNA, 23 nt, Artificial Sequence
  Synthetic
aaauccugagucauaaagcaaag

SEQ ID NO: 100846 - RNA, 24 nt, Artificial Sequence
  Synthetic
uaaauccugagucauaaagcaaag

SEQ ID NO: 100847 - RNA, 21 nt, Artificial Sequence
  Synthetic
aucaagguucucuaagcaaag

SEQ ID NO: 100848 - RNA, 22 nt, Artificial Sequence
  Synthetic
aaucaagguucucuaagcaaag

SEQ ID NO: 100849 - RNA, 23 nt, Artificial Sequence
  Synthetic
caaucaagguucucuaagcaaag

SEQ ID NO: 100850 - RNA, 24 nt, Artificial Sequence
  Synthetic
acaaucaagguucucuaagcaaag

SEQ ID NO: 100851 - RNA, 18 nt, Artificial Sequence
  Synthetic
ugaaauuuaagagcaaag

SEQ ID NO: 100852 - RNA, 19 nt, Artificial Sequence
  Synthetic
augaaauuuaagagcaaag

SEQ ID NO: 100853 - RNA, 20 nt, Artificial Sequence
  Synthetic
aaugaaauuuaagagcaaag

SEQ ID NO: 100854 - RNA, 21 nt, Artificial Sequence
  Synthetic
agagauuggaagaaggcaaag

SEQ ID NO: 100855 - RNA, 22 nt, Artificial Sequence
  Synthetic
aagagauuggaagaaggcaaag

SEQ ID NO: 100856 - RNA, 23 nt, Artificial Sequence
  Synthetic
aaagagauuggaagaaggcaaag

SEQ ID NO: 100857 - RNA, 18 nt, Artificial Sequence
  Synthetic
cucacaauuugugcaaag

SEQ ID NO: 100858 - RNA, 19 nt, Artificial Sequence
  Synthetic
acucacaauuugugcaaag

SEQ ID NO: 100859 - RNA, 20 nt, Artificial Sequence
  Synthetic
aacucacaauuugugcaaag

SEQ ID NO: 100860 - RNA, 21 nt, Artificial Sequence
  Synthetic
caacucacaauuugugcaaag

SEQ ID NO: 100861 - RNA, 22 nt, Artificial Sequence
  Synthetic
acaacucacaauuugugcaaag

SEQ ID NO: 100862 - RNA, 23 nt, Artificial Sequence
  Synthetic
aacaacucacaauuugugcaaag

SEQ ID NO: 100863 - RNA, 24 nt, Artificial Sequence
  Synthetic
uaacaacucacaauuugugcaaag

SEQ ID NO: 100864 - RNA, 18 nt, Artificial Sequence
  Synthetic
uucacacugugaucaaag

SEQ ID NO: 100865 - RNA, 19 nt, Artificial Sequence
  Synthetic
auucacacugugaucaaag

SEQ ID NO: 100866 - RNA, 20 nt, Artificial Sequence
  Synthetic
aauucacacugugaucaaag

SEQ ID NO: 100867 - RNA, 22 nt, Artificial Sequence
  Synthetic
agaauucacacugugaucaaag

SEQ ID NO: 100868 - RNA, 23 nt, Artificial Sequence
  Synthetic
aagaauucacacugugaucaaag

SEQ ID NO: 100869 - RNA, 24 nt, Artificial Sequence
  Synthetic
aaagaauucacacugugaucaaag

SEQ ID NO: 100870 - RNA, 18 nt, Artificial Sequence
  Synthetic
ugacacuauugcucaaag

SEQ ID NO: 100871 - RNA, 19 nt, Artificial Sequence
  Synthetic
cugacacuauugcucaaag

SEQ ID NO: 100872 - RNA, 20 nt, Artificial Sequence
  Synthetic
acugacacuauugcucaaag

SEQ ID NO: 100873 - RNA, 21 nt, Artificial Sequence
  Synthetic
cacugacacuauugcucaaag

SEQ ID NO: 100874 - RNA, 22 nt, Artificial Sequence
  Synthetic
ccacugacacuauugcucaaag

SEQ ID NO: 100875 - RNA, 23 nt, Artificial Sequence
  Synthetic
cccacugacacuauugcucaaag

SEQ ID NO: 100876 - RNA, 24 nt, Artificial Sequence
  Synthetic
ucccacugacacuauugcucaaag

SEQ ID NO: 100877 - RNA, 23 nt, Artificial Sequence
  Synthetic
uggaggagaaaguggggucaaag

SEQ ID NO: 100878 - RNA, 24 nt, Artificial Sequence
  Synthetic
uuggaggagaaaguggggucaaag

SEQ ID NO: 100879 - RNA, 18 nt, Artificial Sequence
  Synthetic
agugaauacaauucaaag

SEQ ID NO: 100880 - RNA, 19 nt, Artificial Sequence
  Synthetic
aagugaauacaauucaaag

SEQ ID NO: 100881 - RNA, 20 nt, Artificial Sequence
  Synthetic
aaagugaauacaauucaaag

SEQ ID NO: 100882 - RNA, 23 nt, Artificial Sequence
  Synthetic
aggaaagugaauacaauucaaag

SEQ ID NO: 100883 - RNA, 18 nt, Artificial Sequence
  Synthetic
uaaauaguucauucaaag

SEQ ID NO: 100884 - RNA, 19 nt, Artificial Sequence
  Synthetic
auaaauaguucauucaaag

SEQ ID NO: 100885 - RNA, 20 nt, Artificial Sequence
  Synthetic
aauaaauaguucauucaaag

SEQ ID NO: 100886 - RNA, 21 nt, Artificial Sequence
  Synthetic
caauaaauaguucauucaaag

SEQ ID NO: 100887 - RNA, 23 nt, Artificial Sequence
  Synthetic
ugcaauaaauaguucauucaaag

SEQ ID NO: 100888 - RNA, 24 nt, Artificial Sequence
  Synthetic
uugcaauaaauaguucauucaaag

SEQ ID NO: 100889 - RNA, 18 nt, Artificial Sequence
  Synthetic
uaggcuguccuaagaaag

SEQ ID NO: 100890 - RNA, 21 nt, Artificial Sequence
  Synthetic
ugguaggcuguccuaagaaag

SEQ ID NO: 100891 - RNA, 22 nt, Artificial Sequence
  Synthetic
augguaggcuguccuaagaaag

SEQ ID NO: 100892 - RNA, 23 nt, Artificial Sequence
  Synthetic
aaugguaggcuguccuaagaaag

SEQ ID NO: 100893 - RNA, 24 nt, Artificial Sequence
  Synthetic
aaaugguaggcuguccuaagaaag

SEQ ID NO: 100894 - RNA, 18 nt, Artificial Sequence
  Synthetic
aaaauugaucacagaaag

SEQ ID NO: 100895 - RNA, 19 nt, Artificial Sequence
  Synthetic
aaaaauugaucacagaaag

SEQ ID NO: 100896 - RNA, 20 nt, Artificial Sequence
  Synthetic
uaaaaauugaucacagaaag

SEQ ID NO: 100897 - RNA, 21 nt, Artificial Sequence
  Synthetic
uuaaaaauugaucacagaaag

SEQ ID NO: 100898 - RNA, 22 nt, Artificial Sequence
  Synthetic
auuaaaaauugaucacagaaag

SEQ ID NO: 100899 - RNA, 23 nt, Artificial Sequence
  Synthetic
uauuaaaaauugaucacagaaag

SEQ ID NO: 100900 - RNA, 24 nt, Artificial Sequence
  Synthetic
auauuaaaaauugaucacagaaag

SEQ ID NO: 100901 - RNA, 21 nt, Artificial Sequence
  Synthetic
aaacucuuuagagacagaaag

SEQ ID NO: 100902 - RNA, 22 nt, Artificial Sequence
  Synthetic
uaaacucuuuagagacagaaag

SEQ ID NO: 100903 - RNA, 23 nt, Artificial Sequence
  Synthetic
uuaaacucuuuagagacagaaag

SEQ ID NO: 100904 - RNA, 18 nt, Artificial Sequence
  Synthetic
uugaacagaagcagaaag

SEQ ID NO: 100905 - RNA, 19 nt, Artificial Sequence
  Synthetic
uuugaacagaagcagaaag

SEQ ID NO: 100906 - RNA, 20 nt, Artificial Sequence
  Synthetic
uuuugaacagaagcagaaag

SEQ ID NO: 100907 - RNA, 18 nt, Artificial Sequence
  Synthetic
uagcucugaaucagaaag

SEQ ID NO: 100908 - RNA, 19 nt, Artificial Sequence
  Synthetic
auagcucugaaucagaaag

SEQ ID NO: 100909 - RNA, 20 nt, Artificial Sequence
  Synthetic
aauagcucugaaucagaaag

SEQ ID NO: 100910 - RNA, 21 nt, Artificial Sequence
  Synthetic
aaauagcucugaaucagaaag

SEQ ID NO: 100911 - RNA, 24 nt, Artificial Sequence
  Synthetic
aggaaauagcucugaaucagaaag

SEQ ID NO: 100912 - RNA, 21 nt, Artificial Sequence
  Synthetic
uuggcaggcaaauucagaaag

SEQ ID NO: 100913 - RNA, 22 nt, Artificial Sequence
  Synthetic
cuuggcaggcaaauucagaaag

SEQ ID NO: 100914 - RNA, 23 nt, Artificial Sequence
  Synthetic
acuuggcaggcaaauucagaaag

SEQ ID NO: 100915 - RNA, 24 nt, Artificial Sequence
  Synthetic
uacuuggcaggcaaauucagaaag

SEQ ID NO: 100916 - RNA, 18 nt, Artificial Sequence
  Synthetic
caauuuccaaagagaaag

SEQ ID NO: 100917 - RNA, 19 nt, Artificial Sequence
  Synthetic
ccaauuuccaaagagaaag

SEQ ID NO: 100918 - RNA, 20 nt, Artificial Sequence
  Synthetic
accaauuuccaaagagaaag

SEQ ID NO: 100919 - RNA, 22 nt, Artificial Sequence
  Synthetic
agaccaauuuccaaagagaaag

SEQ ID NO: 100920 - RNA, 23 nt, Artificial Sequence
  Synthetic
aagaccaauuuccaaagagaaag

SEQ ID NO: 100921 - RNA, 24 nt, Artificial Sequence
  Synthetic
aaagaccaauuuccaaagagaaag

SEQ ID NO: 100922 - RNA, 19 nt, Artificial Sequence
  Synthetic
cgcauuuuggaggagaaag

SEQ ID NO: 100923 - RNA, 20 nt, Artificial Sequence
  Synthetic
acgcauuuuggaggagaaag

SEQ ID NO: 100924 - RNA, 21 nt, Artificial Sequence
  Synthetic
cacgcauuuuggaggagaaag

SEQ ID NO: 100925 - RNA, 22 nt, Artificial Sequence
  Synthetic
acacgcauuuuggaggagaaag

SEQ ID NO: 100926 - RNA, 23 nt, Artificial Sequence
  Synthetic
aacacgcauuuuggaggagaaag

SEQ ID NO: 100927 - RNA, 24 nt, Artificial Sequence
  Synthetic
caacacgcauuuuggaggagaaag

SEQ ID NO: 100928 - RNA, 18 nt, Artificial Sequence
  Synthetic
cuucuagccuggagaaag

SEQ ID NO: 100929 - RNA, 19 nt, Artificial Sequence
  Synthetic
ucuucuagccuggagaaag

SEQ ID NO: 100930 - RNA, 20 nt, Artificial Sequence
  Synthetic
uucuucuagccuggagaaag

SEQ ID NO: 100931 - RNA, 22 nt, Artificial Sequence
  Synthetic
uguucuucuagccuggagaaag

SEQ ID NO: 100932 - RNA, 23 nt, Artificial Sequence
  Synthetic
uuguucuucuagccuggagaaag

SEQ ID NO: 100933 - RNA, 24 nt, Artificial Sequence
  Synthetic
uuuguucuucuagccuggagaaag

SEQ ID NO: 100934 - RNA, 19 nt, Artificial Sequence
  Synthetic
aggauaaacaaguagaaag

SEQ ID NO: 100935 - RNA, 20 nt, Artificial Sequence
  Synthetic
uaggauaaacaaguagaaag

SEQ ID NO: 100936 - RNA, 21 nt, Artificial Sequence
  Synthetic
auaggauaaacaaguagaaag

SEQ ID NO: 100937 - RNA, 22 nt, Artificial Sequence
  Synthetic
cauaggauaaacaaguagaaag

SEQ ID NO: 100938 - RNA, 23 nt, Artificial Sequence
  Synthetic
acauaggauaaacaaguagaaag

SEQ ID NO: 100939 - RNA, 24 nt, Artificial Sequence
  Synthetic
uacauaggauaaacaaguagaaag

SEQ ID NO: 100940 - RNA, 19 nt, Artificial Sequence
  Synthetic
ugucacccuuucucgaaag

SEQ ID NO: 100941 - RNA, 20 nt, Artificial Sequence
  Synthetic
uugucacccuuucucgaaag

SEQ ID NO: 100942 - RNA, 21 nt, Artificial Sequence
  Synthetic
auugucacccuuucucgaaag

SEQ ID NO: 100943 - RNA, 21 nt, Artificial Sequence
  Synthetic
aauaucccaaaaaaaggaaag

SEQ ID NO: 100944 - RNA, 23 nt, Artificial Sequence
  Synthetic
ugaauaucccaaaaaaaggaaag

SEQ ID NO: 100945 - RNA, 24 nt, Artificial Sequence
  Synthetic
uugaauaucccaaaaaaaggaaag

SEQ ID NO: 100946 - RNA, 18 nt, Artificial Sequence
  Synthetic
uuaaaauguaaaggaaag

SEQ ID NO: 100947 - RNA, 19 nt, Artificial Sequence
  Synthetic
uuuaaaauguaaaggaaag

SEQ ID NO: 100948 - RNA, 20 nt, Artificial Sequence
  Synthetic
cuuuaaaauguaaaggaaag

SEQ ID NO: 100949 - RNA, 21 nt, Artificial Sequence
  Synthetic
acuuuaaaauguaaaggaaag

SEQ ID NO: 100950 - RNA, 23 nt, Artificial Sequence
  Synthetic
ugacuuuaaaauguaaaggaaag

SEQ ID NO: 100951 - RNA, 24 nt, Artificial Sequence
  Synthetic
uugacuuuaaaauguaaaggaaag

SEQ ID NO: 100952 - RNA, 18 nt, Artificial Sequence
  Synthetic
auauaucuucggggaaag

SEQ ID NO: 100953 - RNA, 19 nt, Artificial Sequence
  Synthetic
aauauaucuucggggaaag

SEQ ID NO: 100954 - RNA, 20 nt, Artificial Sequence
  Synthetic
uaauauaucuucggggaaag

SEQ ID NO: 100955 - RNA, 21 nt, Artificial Sequence
  Synthetic
uuaauauaucuucggggaaag

SEQ ID NO: 100956 - RNA, 22 nt, Artificial Sequence
  Synthetic
auuaauauaucuucggggaaag

SEQ ID NO: 100957 - RNA, 23 nt, Artificial Sequence
  Synthetic
aauuaauauaucuucggggaaag

SEQ ID NO: 100958 - RNA, 24 nt, Artificial Sequence
  Synthetic
uaauuaauauaucuucggggaaag

SEQ ID NO: 100959 - RNA, 18 nt, Artificial Sequence
  Synthetic
auauguaacuggggaaag

SEQ ID NO: 100960 - RNA, 19 nt, Artificial Sequence
  Synthetic
aauauguaacuggggaaag

SEQ ID NO: 100961 - RNA, 20 nt, Artificial Sequence
  Synthetic
uaauauguaacuggggaaag

SEQ ID NO: 100962 - RNA, 21 nt, Artificial Sequence
  Synthetic
uuaauauguaacuggggaaag

SEQ ID NO: 100963 - RNA, 24 nt, Artificial Sequence
  Synthetic
ugguuaauauguaacuggggaaag

SEQ ID NO: 100964 - RNA, 18 nt, Artificial Sequence
  Synthetic
cuuauguggcugggaaag

SEQ ID NO: 100965 - RNA, 19 nt, Artificial Sequence
  Synthetic
ucuuauguggcugggaaag

SEQ ID NO: 100966 - RNA, 20 nt, Artificial Sequence
  Synthetic
uucuuauguggcugggaaag

SEQ ID NO: 100967 - RNA, 21 nt, Artificial Sequence
  Synthetic
auucuuauguggcugggaaag

SEQ ID NO: 100968 - RNA, 24 nt, Artificial Sequence
  Synthetic
aggauucuuauguggcugggaaag

SEQ ID NO: 100969 - RNA, 21 nt, Artificial Sequence
  Synthetic
aaagaauugggguugggaaag

SEQ ID NO: 100970 - RNA, 23 nt, Artificial Sequence
  Synthetic
agaaagaauugggguugggaaag

SEQ ID NO: 100971 - RNA, 24 nt, Artificial Sequence
  Synthetic
aagaaagaauugggguugggaaag

SEQ ID NO: 100972 - RNA, 21 nt, Artificial Sequence
  Synthetic
aaacaaugugaagaaugaaag

SEQ ID NO: 100973 - RNA, 22 nt, Artificial Sequence
  Synthetic
aaaacaaugugaagaaugaaag

SEQ ID NO: 100974 - RNA, 21 nt, Artificial Sequence
  Synthetic
cuuucaggucauggaugaaag

SEQ ID NO: 100975 - RNA, 22 nt, Artificial Sequence
  Synthetic
ucuuucaggucauggaugaaag

SEQ ID NO: 100976 - RNA, 23 nt, Artificial Sequence
  Synthetic
uucuuucaggucauggaugaaag

SEQ ID NO: 100977 - RNA, 24 nt, Artificial Sequence
  Synthetic
uuucuuucaggucauggaugaaag

SEQ ID NO: 100978 - RNA, 18 nt, Artificial Sequence
  Synthetic
agggcagugcuaugaaag

SEQ ID NO: 100979 - RNA, 19 nt, Artificial Sequence
  Synthetic
uagggcagugcuaugaaag

SEQ ID NO: 100980 - RNA, 21 nt, Artificial Sequence
  Synthetic
aguagggcagugcuaugaaag

SEQ ID NO: 100981 - RNA, 22 nt, Artificial Sequence
  Synthetic
aaguagggcagugcuaugaaag

SEQ ID NO: 100982 - RNA, 18 nt, Artificial Sequence
  Synthetic
ucaucuaguuugugaaag

SEQ ID NO: 100983 - RNA, 19 nt, Artificial Sequence
  Synthetic
aucaucuaguuugugaaag

SEQ ID NO: 100984 - RNA, 20 nt, Artificial Sequence
  Synthetic
aaucaucuaguuugugaaag

SEQ ID NO: 100985 - RNA, 21 nt, Artificial Sequence
  Synthetic
caaucaucuaguuugugaaag

SEQ ID NO: 100986 - RNA, 23 nt, Artificial Sequence
  Synthetic
ugcaaucaucuaguuugugaaag

SEQ ID NO: 100987 - RNA, 24 nt, Artificial Sequence
  Synthetic
cugcaaucaucuaguuugugaaag

SEQ ID NO: 100988 - RNA, 22 nt, Artificial Sequence
  Synthetic
aguaagugcuaauguuugaaag

SEQ ID NO: 100989 - RNA, 24 nt, Artificial Sequence
  Synthetic
agaguaagugcuaauguuugaaag

SEQ ID NO: 100990 - RNA, 18 nt, Artificial Sequence
  Synthetic
cuguaaaccuuuugaaag

SEQ ID NO: 100991 - RNA, 19 nt, Artificial Sequence
  Synthetic
ucuguaaaccuuuugaaag

SEQ ID NO: 100992 - RNA, 20 nt, Artificial Sequence
  Synthetic
uucuguaaaccuuuugaaag

SEQ ID NO: 100993 - RNA, 22 nt, Artificial Sequence
  Synthetic
aguucuguaaaccuuuugaaag

SEQ ID NO: 100994 - RNA, 23 nt, Artificial Sequence
  Synthetic
uaguucuguaaaccuuuugaaag

SEQ ID NO: 100995 - RNA, 24 nt, Artificial Sequence
  Synthetic
cuaguucuguaaaccuuuugaaag

SEQ ID NO: 100996 - RNA, 18 nt, Artificial Sequence
  Synthetic
aacacaggggaaauaaag

SEQ ID NO: 100997 - RNA, 19 nt, Artificial Sequence
  Synthetic
aaacacaggggaaauaaag

SEQ ID NO: 100998 - RNA, 20 nt, Artificial Sequence
  Synthetic
caaacacaggggaaauaaag

SEQ ID NO: 100999 - RNA, 22 nt, Artificial Sequence
  Synthetic
agcaaacacaggggaaauaaag

SEQ ID NO: 101000 - RNA, 23 nt, Artificial Sequence
  Synthetic
cagcaaacacaggggaaauaaag

SEQ ID NO: 101001 - RNA, 24 nt, Artificial Sequence
  Synthetic
ucagcaaacacaggggaaauaaag

SEQ ID NO: 101002 - RNA, 18 nt, Artificial Sequence
  Synthetic
uagcauuguuaaauaaag

SEQ ID NO: 101003 - RNA, 19 nt, Artificial Sequence
  Synthetic
auagcauuguuaaauaaag

SEQ ID NO: 101004 - RNA, 20 nt, Artificial Sequence
  Synthetic
aauagcauuguuaaauaaag

SEQ ID NO: 101005 - RNA, 21 nt, Artificial Sequence
  Synthetic
caauagcauuguuaaauaaag

SEQ ID NO: 101006 - RNA, 22 nt, Artificial Sequence
  Synthetic
ucaauagcauuguuaaauaaag

SEQ ID NO: 101007 - RNA, 23 nt, Artificial Sequence
  Synthetic
cucaauagcauuguuaaauaaag

SEQ ID NO: 101008 - RNA, 24 nt, Artificial Sequence
  Synthetic
acucaauagcauuguuaaauaaag

SEQ ID NO: 101009 - RNA, 18 nt, Artificial Sequence
  Synthetic
auuucuuugagaauaaag

SEQ ID NO: 101010 - RNA, 19 nt, Artificial Sequence
  Synthetic
cauuucuuugagaauaaag

SEQ ID NO: 101011 - RNA, 20 nt, Artificial Sequence
  Synthetic
acauuucuuugagaauaaag

SEQ ID NO: 101012 - RNA, 21 nt, Artificial Sequence
  Synthetic
uacauuucuuugagaauaaag

SEQ ID NO: 101013 - RNA, 22 nt, Artificial Sequence
  Synthetic
auacauuucuuugagaauaaag

SEQ ID NO: 101014 - RNA, 23 nt, Artificial Sequence
  Synthetic
cauacauuucuuugagaauaaag

SEQ ID NO: 101015 - RNA, 24 nt, Artificial Sequence
  Synthetic
ucauacauuucuuugagaauaaag

SEQ ID NO: 101016 - RNA, 21 nt, Artificial Sequence
  Synthetic
aaaauaauaaaauuaauaaag

SEQ ID NO: 101017 - RNA, 24 nt, Artificial Sequence
  Synthetic
uggaaaauaauaaaauuaauaaag

SEQ ID NO: 101018 - RNA, 18 nt, Artificial Sequence
  Synthetic
ccuagaaauacgauaaag

SEQ ID NO: 101019 - RNA, 21 nt, Artificial Sequence
  Synthetic
aggccuagaaauacgauaaag

SEQ ID NO: 101020 - RNA, 22 nt, Artificial Sequence
  Synthetic
aaggccuagaaauacgauaaag

SEQ ID NO: 101021 - RNA, 18 nt, Artificial Sequence
  Synthetic
aguagaacagugauaaag

SEQ ID NO: 101022 - RNA, 19 nt, Artificial Sequence
  Synthetic
aaguagaacagugauaaag

SEQ ID NO: 101023 - RNA, 20 nt, Artificial Sequence
  Synthetic
uaaguagaacagugauaaag

SEQ ID NO: 101024 - RNA, 21 nt, Artificial Sequence
  Synthetic
uuaaguagaacagugauaaag

SEQ ID NO: 101025 - RNA, 22 nt, Artificial Sequence
  Synthetic
uuuaaguagaacagugauaaag

SEQ ID NO: 101026 - RNA, 23 nt, Artificial Sequence
  Synthetic
uuuuaaguagaacagugauaaag

SEQ ID NO: 101027 - RNA, 24 nt, Artificial Sequence
  Synthetic
auuuuaaguagaacagugauaaag

SEQ ID NO: 101028 - RNA, 18 nt, Artificial Sequence
  Synthetic
uguccguuucaucuaaag

SEQ ID NO: 101029 - RNA, 20 nt, Artificial Sequence
  Synthetic
aguguccguuucaucuaaag

SEQ ID NO: 101030 - RNA, 22 nt, Artificial Sequence
  Synthetic
agaguguccguuucaucuaaag

SEQ ID NO: 101031 - RNA, 23 nt, Artificial Sequence
  Synthetic
uagaguguccguuucaucuaaag

SEQ ID NO: 101032 - RNA, 24 nt, Artificial Sequence
  Synthetic
uuagaguguccguuucaucuaaag

SEQ ID NO: 101033 - RNA, 18 nt, Artificial Sequence
  Synthetic
ugcauugauuaucuaaag

SEQ ID NO: 101034 - RNA, 19 nt, Artificial Sequence
  Synthetic
cugcauugauuaucuaaag

SEQ ID NO: 101035 - RNA, 21 nt, Artificial Sequence
  Synthetic
ugcugcauugauuaucuaaag

SEQ ID NO: 101036 - RNA, 22 nt, Artificial Sequence
  Synthetic
augcugcauugauuaucuaaag

SEQ ID NO: 101037 - RNA, 24 nt, Artificial Sequence
  Synthetic
ugaugcugcauugauuaucuaaag

SEQ ID NO: 101038 - RNA, 18 nt, Artificial Sequence
  Synthetic
aaucucaacagucuaaag

SEQ ID NO: 101039 - RNA, 19 nt, Artificial Sequence
  Synthetic
aaaucucaacagucuaaag

SEQ ID NO: 101040 - RNA, 20 nt, Artificial Sequence
  Synthetic
aaaaucucaacagucuaaag

SEQ ID NO: 101041 - RNA, 21 nt, Artificial Sequence
  Synthetic
aaaaaucucaacagucuaaag

SEQ ID NO: 101042 - RNA, 22 nt, Artificial Sequence
  Synthetic
aaaaaaucucaacagucuaaag

SEQ ID NO: 101043 - RNA, 23 nt, Artificial Sequence
  Synthetic
aaaaaaaucucaacagucuaaag

SEQ ID NO: 101044 - RNA, 24 nt, Artificial Sequence
  Synthetic
aaaaaaaaucucaacagucuaaag

SEQ ID NO: 101045 - RNA, 21 nt, Artificial Sequence
  Synthetic
uauauauuuuaucuucuaaag

SEQ ID NO: 101046 - RNA, 22 nt, Artificial Sequence
  Synthetic
cuauauauuuuaucuucuaaag

SEQ ID NO: 101047 - RNA, 23 nt, Artificial Sequence
  Synthetic
ucuauauauuuuaucuucuaaag

SEQ ID NO: 101048 - RNA, 24 nt, Artificial Sequence
  Synthetic
cucuauauauuuuaucuucuaaag

SEQ ID NO: 101049 - RNA, 18 nt, Artificial Sequence
  Synthetic
auagauagauaaguaaag

SEQ ID NO: 101050 - RNA, 20 nt, Artificial Sequence
  Synthetic
cgauagauagauaaguaaag

SEQ ID NO: 101051 - RNA, 21 nt, Artificial Sequence
  Synthetic
ucgauagauagauaaguaaag

SEQ ID NO: 101052 - RNA, 22 nt, Artificial Sequence
  Synthetic
aucgauagauagauaaguaaag

SEQ ID NO: 101053 - RNA, 23 nt, Artificial Sequence
  Synthetic
caucgauagauagauaaguaaag

SEQ ID NO: 101054 - RNA, 24 nt, Artificial Sequence
  Synthetic
ccaucgauagauagauaaguaaag

SEQ ID NO: 101055 - RNA, 18 nt, Artificial Sequence
  Synthetic
uuguagaguucaguaaag

SEQ ID NO: 101056 - RNA, 19 nt, Artificial Sequence
  Synthetic
auuguagaguucaguaaag

SEQ ID NO: 101057 - RNA, 21 nt, Artificial Sequence
  Synthetic
ugauuguagaguucaguaaag

SEQ ID NO: 101058 - RNA, 22 nt, Artificial Sequence
  Synthetic
uugauuguagaguucaguaaag

SEQ ID NO: 101059 - RNA, 23 nt, Artificial Sequence
  Synthetic
uuugauuguagaguucaguaaag

SEQ ID NO: 101060 - RNA, 24 nt, Artificial Sequence
  Synthetic
auuugauuguagaguucaguaaag

SEQ ID NO: 101061 - RNA, 18 nt, Artificial Sequence
  Synthetic
ucaucuagaauaguaaag

SEQ ID NO: 101062 - RNA, 21 nt, Artificial Sequence
  Synthetic
aggucaucuagaauaguaaag

SEQ ID NO: 101063 - RNA, 22 nt, Artificial Sequence
  Synthetic
aaggucaucuagaauaguaaag

SEQ ID NO: 101064 - RNA, 23 nt, Artificial Sequence
  Synthetic
uaaggucaucuagaauaguaaag

SEQ ID NO: 101065 - RNA, 24 nt, Artificial Sequence
  Synthetic
uuaaggucaucuagaauaguaaag

SEQ ID NO: 101066 - RNA, 18 nt, Artificial Sequence
  Synthetic
uuagugaaagugguaaag

SEQ ID NO: 101067 - RNA, 21 nt, Artificial Sequence
  Synthetic
agguuagugaaagugguaaag

SEQ ID NO: 101068 - RNA, 22 nt, Artificial Sequence
  Synthetic
aagguuagugaaagugguaaag

SEQ ID NO: 101069 - RNA, 23 nt, Artificial Sequence
  Synthetic
uaagguuagugaaagugguaaag

SEQ ID NO: 101070 - RNA, 24 nt, Artificial Sequence
  Synthetic
uuaagguuagugaaagugguaaag

SEQ ID NO: 101071 - RNA, 18 nt, Artificial Sequence
  Synthetic
ucuggcaaaaaauuaaag

SEQ ID NO: 101072 - RNA, 19 nt, Artificial Sequence
  Synthetic
uucuggcaaaaaauuaaag

SEQ ID NO: 101073 - RNA, 20 nt, Artificial Sequence
  Synthetic
uuucuggcaaaaaauuaaag

SEQ ID NO: 101074 - RNA, 21 nt, Artificial Sequence
  Synthetic
auuucuggcaaaaaauuaaag

SEQ ID NO: 101075 - RNA, 22 nt, Artificial Sequence
  Synthetic
aauuucuggcaaaaaauuaaag

SEQ ID NO: 101076 - RNA, 23 nt, Artificial Sequence
  Synthetic
uaauuucuggcaaaaaauuaaag

SEQ ID NO: 101077 - RNA, 24 nt, Artificial Sequence
  Synthetic
auaauuucuggcaaaaaauuaaag

SEQ ID NO: 101078 - RNA, 22 nt, Artificial Sequence
  Synthetic
agaauauuuggaagaauuaaag

SEQ ID NO: 101079 - RNA, 23 nt, Artificial Sequence
  Synthetic
aagaauauuuggaagaauuaaag

SEQ ID NO: 101080 - RNA, 24 nt, Artificial Sequence
  Synthetic
aaagaauauuuggaagaauuaaag

SEQ ID NO: 101081 - RNA, 18 nt, Artificial Sequence
  Synthetic
ucuaaugaacaguuaaag

SEQ ID NO: 101082 - RNA, 19 nt, Artificial Sequence
  Synthetic
aucuaaugaacaguuaaag

SEQ ID NO: 101083 - RNA, 20 nt, Artificial Sequence
  Synthetic
aaucuaaugaacaguuaaag

SEQ ID NO: 101084 - RNA, 21 nt, Artificial Sequence
  Synthetic
aaaucuaaugaacaguuaaag

SEQ ID NO: 101085 - RNA, 23 nt, Artificial Sequence
  Synthetic
ugaaaucuaaugaacaguuaaag

SEQ ID NO: 101086 - RNA, 18 nt, Artificial Sequence
  Synthetic
uuuagaagagaguuaaag

SEQ ID NO: 101087 - RNA, 19 nt, Artificial Sequence
  Synthetic
uuuuagaagagaguuaaag

SEQ ID NO: 101088 - RNA, 20 nt, Artificial Sequence
  Synthetic
uuuuuagaagagaguuaaag

SEQ ID NO: 101089 - RNA, 21 nt, Artificial Sequence
  Synthetic
auuuuuagaagagaguuaaag

SEQ ID NO: 101090 - RNA, 22 nt, Artificial Sequence
  Synthetic
aauuuuuagaagagaguuaaag

SEQ ID NO: 101091 - RNA, 23 nt, Artificial Sequence
  Synthetic
uaauuuuuagaagagaguuaaag

SEQ ID NO: 101092 - RNA, 24 nt, Artificial Sequence
  Synthetic
auaauuuuuagaagagaguuaaag

SEQ ID NO: 101093 - RNA, 18 nt, Artificial Sequence
  Synthetic
uuggucaggauuuuaaag

SEQ ID NO: 101094 - RNA, 19 nt, Artificial Sequence
  Synthetic
uuuggucaggauuuuaaag

SEQ ID NO: 101095 - RNA, 20 nt, Artificial Sequence
  Synthetic
cuuuggucaggauuuuaaag

SEQ ID NO: 101096 - RNA, 21 nt, Artificial Sequence
  Synthetic
ucuuuggucaggauuuuaaag

SEQ ID NO: 101097 - RNA, 22 nt, Artificial Sequence
  Synthetic
uucuuuggucaggauuuuaaag

SEQ ID NO: 101098 - RNA, 23 nt, Artificial Sequence
  Synthetic
cuucuuuggucaggauuuuaaag

SEQ ID NO: 101099 - RNA, 24 nt, Artificial Sequence
  Synthetic
acuucuuuggucaggauuuuaaag

SEQ ID NO: 101100 - RNA, 18 nt, Artificial Sequence
  Synthetic
uuagucauaacaaacaag

SEQ ID NO: 101101 - RNA, 19 nt, Artificial Sequence
  Synthetic
uuuagucauaacaaacaag

SEQ ID NO: 101102 - RNA, 20 nt, Artificial Sequence
  Synthetic
cuuuagucauaacaaacaag

SEQ ID NO: 101103 - RNA, 22 nt, Artificial Sequence
  Synthetic
agcuuuagucauaacaaacaag

SEQ ID NO: 101104 - RNA, 23 nt, Artificial Sequence
  Synthetic
uagcuuuagucauaacaaacaag

SEQ ID NO: 101105 - RNA, 24 nt, Artificial Sequence
  Synthetic
cuagcuuuagucauaacaaacaag

SEQ ID NO: 101106 - RNA, 18 nt, Artificial Sequence
  Synthetic
uuauugcagcauaacaag

SEQ ID NO: 101107 - RNA, 19 nt, Artificial Sequence
  Synthetic
auuauugcagcauaacaag

SEQ ID NO: 101108 - RNA, 20 nt, Artificial Sequence
  Synthetic
uauuauugcagcauaacaag

SEQ ID NO: 101109 - RNA, 21 nt, Artificial Sequence
  Synthetic
uuauuauugcagcauaacaag

SEQ ID NO: 101110 - RNA, 22 nt, Artificial Sequence
  Synthetic
cuuauuauugcagcauaacaag

SEQ ID NO: 101111 - RNA, 24 nt, Artificial Sequence
  Synthetic
ugcuuauuauugcagcauaacaag

SEQ ID NO: 101112 - RNA, 19 nt, Artificial Sequence
  Synthetic
ugggagcaacuauaacaag

SEQ ID NO: 101113 - RNA, 20 nt, Artificial Sequence
  Synthetic
augggagcaacuauaacaag

SEQ ID NO: 101114 - RNA, 21 nt, Artificial Sequence
  Synthetic
aaugggagcaacuauaacaag

SEQ ID NO: 101115 - RNA, 22 nt, Artificial Sequence
  Synthetic
caaugggagcaacuauaacaag

SEQ ID NO: 101116 - RNA, 23 nt, Artificial Sequence
  Synthetic
acaaugggagcaacuauaacaag

SEQ ID NO: 101117 - RNA, 24 nt, Artificial Sequence
  Synthetic
uacaaugggagcaacuauaacaag

SEQ ID NO: 101118 - RNA, 18 nt, Artificial Sequence
  Synthetic
cacauacugucuaacaag

SEQ ID NO: 101119 - RNA, 19 nt, Artificial Sequence
  Synthetic
ccacauacugucuaacaag

SEQ ID NO: 101120 - RNA, 21 nt, Artificial Sequence
  Synthetic
agccacauacugucuaacaag

SEQ ID NO: 101121 - RNA, 23 nt, Artificial Sequence
  Synthetic
ugagccacauacugucuaacaag

SEQ ID NO: 101122 - RNA, 24 nt, Artificial Sequence
  Synthetic
augagccacauacugucuaacaag

SEQ ID NO: 101123 - RNA, 18 nt, Artificial Sequence
  Synthetic
aauuuagaccuuaacaag

SEQ ID NO: 101124 - RNA, 19 nt, Artificial Sequence
  Synthetic
aaauuuagaccuuaacaag

SEQ ID NO: 101125 - RNA, 20 nt, Artificial Sequence
  Synthetic
aaaauuuagaccuuaacaag

SEQ ID NO: 101126 - RNA, 21 nt, Artificial Sequence
  Synthetic
aaaaauuuagaccuuaacaag

SEQ ID NO: 101127 - RNA, 22 nt, Artificial Sequence
  Synthetic
aaaaaauuuagaccuuaacaag

SEQ ID NO: 101128 - RNA, 23 nt, Artificial Sequence
  Synthetic
aaaaaaauuuagaccuuaacaag

SEQ ID NO: 101129 - RNA, 24 nt, Artificial Sequence
  Synthetic
aaaaaaaauuuagaccuuaacaag

SEQ ID NO: 101130 - RNA, 18 nt, Artificial Sequence
  Synthetic
aauuuuggcacagacaag

SEQ ID NO: 101131 - RNA, 20 nt, Artificial Sequence
  Synthetic
agaauuuuggcacagacaag

SEQ ID NO: 101132 - RNA, 21 nt, Artificial Sequence
  Synthetic
aagaauuuuggcacagacaag

SEQ ID NO: 101133 - RNA, 23 nt, Artificial Sequence
  Synthetic
ugaagaauuuuggcacagacaag

SEQ ID NO: 101134 - RNA, 24 nt, Artificial Sequence
  Synthetic
augaagaauuuuggcacagacaag

SEQ ID NO: 101135 - RNA, 18 nt, Artificial Sequence
  Synthetic
ugacuugcuucugacaag

SEQ ID NO: 101136 - RNA, 19 nt, Artificial Sequence
  Synthetic
uugacuugcuucugacaag

SEQ ID NO: 101137 - RNA, 20 nt, Artificial Sequence
  Synthetic
uuugacuugcuucugacaag

SEQ ID NO: 101138 - RNA, 20 nt, Artificial Sequence
  Synthetic
ugguuuccgagcauuacaag

SEQ ID NO: 101139 - RNA, 21 nt, Artificial Sequence
  Synthetic
augguuuccgagcauuacaag

SEQ ID NO: 101140 - RNA, 22 nt, Artificial Sequence
  Synthetic
aaugguuuccgagcauuacaag

SEQ ID NO: 101141 - RNA, 23 nt, Artificial Sequence
  Synthetic
aaaugguuuccgagcauuacaag

SEQ ID NO: 101142 - RNA, 24 nt, Artificial Sequence
  Synthetic
aaaaugguuuccgagcauuacaag

SEQ ID NO: 101143 - RNA, 18 nt, Artificial Sequence
  Synthetic
ccaacugcuuaaaccaag

SEQ ID NO: 101144 - RNA, 19 nt, Artificial Sequence
  Synthetic
accaacugcuuaaaccaag

SEQ ID NO: 101145 - RNA, 21 nt, Artificial Sequence
  Synthetic
agaccaacugcuuaaaccaag

SEQ ID NO: 101146 - RNA, 22 nt, Artificial Sequence
  Synthetic
cagaccaacugcuuaaaccaag

SEQ ID NO: 101147 - RNA, 24 nt, Artificial Sequence
  Synthetic
ugcagaccaacugcuuaaaccaag

SEQ ID NO: 101148 - RNA, 18 nt, Artificial Sequence
  Synthetic
auuguucugggaaccaag

SEQ ID NO: 101149 - RNA, 19 nt, Artificial Sequence
  Synthetic
uauuguucugggaaccaag

SEQ ID NO: 101150 - RNA, 20 nt, Artificial Sequence
  Synthetic
auauuguucugggaaccaag

SEQ ID NO: 101151 - RNA, 21 nt, Artificial Sequence
  Synthetic
aauauuguucugggaaccaag

SEQ ID NO: 101152 - RNA, 22 nt, Artificial Sequence
  Synthetic
uaauauuguucugggaaccaag

SEQ ID NO: 101153 - RNA, 23 nt, Artificial Sequence
  Synthetic
auaauauuguucugggaaccaag

SEQ ID NO: 101154 - RNA, 19 nt, Artificial Sequence
  Synthetic
cgaugaaccaagccccaag

SEQ ID NO: 101155 - RNA, 20 nt, Artificial Sequence
  Synthetic
ucgaugaaccaagccccaag

SEQ ID NO: 101156 - RNA, 21 nt, Artificial Sequence
  Synthetic
cucgaugaaccaagccccaag

SEQ ID NO: 101157 - RNA, 22 nt, Artificial Sequence
  Synthetic
ccucgaugaaccaagccccaag

SEQ ID NO: 101158 - RNA, 24 nt, Artificial Sequence
  Synthetic
cgccucgaugaaccaagccccaag

SEQ ID NO: 101159 - RNA, 18 nt, Artificial Sequence
  Synthetic
cugauuguggcagccaag

SEQ ID NO: 101160 - RNA, 19 nt, Artificial Sequence
  Synthetic
ucugauuguggcagccaag

SEQ ID NO: 101161 - RNA, 20 nt, Artificial Sequence
  Synthetic
uucugauuguggcagccaag

SEQ ID NO: 101162 - RNA, 21 nt, Artificial Sequence
  Synthetic
uuucugauuguggcagccaag

SEQ ID NO: 101163 - RNA, 22 nt, Artificial Sequence
  Synthetic
cuuucugauuguggcagccaag

SEQ ID NO: 101164 - RNA, 24 nt, Artificial Sequence
  Synthetic
ugcuuucugauuguggcagccaag

SEQ ID NO: 101165 - RNA, 19 nt, Artificial Sequence
  Synthetic
aggauaacaggaggccaag

SEQ ID NO: 101166 - RNA, 21 nt, Artificial Sequence
  Synthetic
ugaggauaacaggaggccaag

SEQ ID NO: 101167 - RNA, 22 nt, Artificial Sequence
  Synthetic
cugaggauaacaggaggccaag

SEQ ID NO: 101168 - RNA, 18 nt, Artificial Sequence
  Synthetic
caauguagaauggccaag

SEQ ID NO: 101169 - RNA, 19 nt, Artificial Sequence
  Synthetic
ucaauguagaauggccaag

SEQ ID NO: 101170 - RNA, 21 nt, Artificial Sequence
  Synthetic
ugucaauguagaauggccaag

SEQ ID NO: 101171 - RNA, 22 nt, Artificial Sequence
  Synthetic
augucaauguagaauggccaag

SEQ ID NO: 101172 - RNA, 24 nt, Artificial Sequence
  Synthetic
agaugucaauguagaauggccaag

SEQ ID NO: 101173 - RNA, 18 nt, Artificial Sequence
  Synthetic
agggaacugguguccaag

SEQ ID NO: 101174 - RNA, 20 nt, Artificial Sequence
  Synthetic
agagggaacugguguccaag

SEQ ID NO: 101175 - RNA, 22 nt, Artificial Sequence
  Synthetic
ugagagggaacugguguccaag

SEQ ID NO: 101176 - RNA, 24 nt, Artificial Sequence
  Synthetic
agugagagggaacugguguccaag

SEQ ID NO: 101177 - RNA, 18 nt, Artificial Sequence
  Synthetic
ucagaauaccuuuccaag

SEQ ID NO: 101178 - RNA, 19 nt, Artificial Sequence
  Synthetic
uucagaauaccuuuccaag

SEQ ID NO: 101179 - RNA, 20 nt, Artificial Sequence
  Synthetic
auucagaauaccuuuccaag

SEQ ID NO: 101180 - RNA, 23 nt, Artificial Sequence
  Synthetic
uggauucagaauaccuuuccaag

SEQ ID NO: 101181 - RNA, 24 nt, Artificial Sequence
  Synthetic
auggauucagaauaccuuuccaag

SEQ ID NO: 101182 - RNA, 18 nt, Artificial Sequence
  Synthetic
ucucaccugauaagcaag

SEQ ID NO: 101183 - RNA, 19 nt, Artificial Sequence
  Synthetic
uucucaccugauaagcaag

SEQ ID NO: 101184 - RNA, 20 nt, Artificial Sequence
  Synthetic
uuucucaccugauaagcaag

SEQ ID NO: 101185 - RNA, 21 nt, Artificial Sequence
  Synthetic
uuuucucaccugauaagcaag

SEQ ID NO: 101186 - RNA, 23 nt, Artificial Sequence
  Synthetic
aguuuucucaccugauaagcaag

SEQ ID NO: 101187 - RNA, 24 nt, Artificial Sequence
  Synthetic
caguuuucucaccugauaagcaag

SEQ ID NO: 101188 - RNA, 18 nt, Artificial Sequence
  Synthetic
ucacauuuaaugagcaag

SEQ ID NO: 101189 - RNA, 21 nt, Artificial Sequence
  Synthetic
cggucacauuuaaugagcaag

SEQ ID NO: 101190 - RNA, 22 nt, Artificial Sequence
  Synthetic
acggucacauuuaaugagcaag

SEQ ID NO: 101191 - RNA, 23 nt, Artificial Sequence
  Synthetic
uacggucacauuuaaugagcaag

SEQ ID NO: 101192 - RNA, 24 nt, Artificial Sequence
  Synthetic
cuacggucacauuuaaugagcaag

SEQ ID NO: 101193 - RNA, 18 nt, Artificial Sequence
  Synthetic
cacauagcugguagcaag

SEQ ID NO: 101194 - RNA, 19 nt, Artificial Sequence
  Synthetic
ucacauagcugguagcaag

SEQ ID NO: 101195 - RNA, 20 nt, Artificial Sequence
  Synthetic
aucacauagcugguagcaag

SEQ ID NO: 101196 - RNA, 22 nt, Artificial Sequence
  Synthetic
agaucacauagcugguagcaag

SEQ ID NO: 101197 - RNA, 23 nt, Artificial Sequence
  Synthetic
aagaucacauagcugguagcaag

SEQ ID NO: 101198 - RNA, 24 nt, Artificial Sequence
  Synthetic
uaagaucacauagcugguagcaag

SEQ ID NO: 101199 - RNA, 18 nt, Artificial Sequence
  Synthetic
aacauauagggaggcaag

SEQ ID NO: 101200 - RNA, 19 nt, Artificial Sequence
  Synthetic
uaacauauagggaggcaag

SEQ ID NO: 101201 - RNA, 20 nt, Artificial Sequence
  Synthetic
auaacauauagggaggcaag

SEQ ID NO: 101202 - RNA, 23 nt, Artificial Sequence
  Synthetic
aggauaacauauagggaggcaag

SEQ ID NO: 101203 - RNA, 24 nt, Artificial Sequence
  Synthetic
aaggauaacauauagggaggcaag

SEQ ID NO: 101204 - RNA, 18 nt, Artificial Sequence
  Synthetic
uaaauggaaaucugcaag

SEQ ID NO: 101205 - RNA, 19 nt, Artificial Sequence
  Synthetic
uuaaauggaaaucugcaag

SEQ ID NO: 101206 - RNA, 20 nt, Artificial Sequence
  Synthetic
uuuaaauggaaaucugcaag

SEQ ID NO: 101207 - RNA, 21 nt, Artificial Sequence
  Synthetic
auuuaaauggaaaucugcaag

SEQ ID NO: 101208 - RNA, 22 nt, Artificial Sequence
  Synthetic
aauuuaaauggaaaucugcaag

SEQ ID NO: 101209 - RNA, 23 nt, Artificial Sequence
  Synthetic
uaauuuaaauggaaaucugcaag

SEQ ID NO: 101210 - RNA, 24 nt, Artificial Sequence
  Synthetic
uuaauuuaaauggaaaucugcaag

SEQ ID NO: 101211 - RNA, 19 nt, Artificial Sequence
  Synthetic
uguuagaggauggugcaag

SEQ ID NO: 101212 - RNA, 20 nt, Artificial Sequence
  Synthetic
auguuagaggauggugcaag

SEQ ID NO: 101213 - RNA, 21 nt, Artificial Sequence
  Synthetic
aauguuagaggauggugcaag

SEQ ID NO: 101214 - RNA, 22 nt, Artificial Sequence
  Synthetic
uaauguuagaggauggugcaag

SEQ ID NO: 101215 - RNA, 23 nt, Artificial Sequence
  Synthetic
auaauguuagaggauggugcaag

SEQ ID NO: 101216 - RNA, 24 nt, Artificial Sequence
  Synthetic
aauaauguuagaggauggugcaag

SEQ ID NO: 101217 - RNA, 18 nt, Artificial Sequence
  Synthetic
aaaacuucccacaucaag

SEQ ID NO: 101218 - RNA, 19 nt, Artificial Sequence
  Synthetic
uaaaacuucccacaucaag

SEQ ID NO: 101219 - RNA, 20 nt, Artificial Sequence
  Synthetic
uuaaaacuucccacaucaag

SEQ ID NO: 101220 - RNA, 21 nt, Artificial Sequence
  Synthetic
auuaaaacuucccacaucaag

SEQ ID NO: 101221 - RNA, 22 nt, Artificial Sequence
  Synthetic
uauuaaaacuucccacaucaag

SEQ ID NO: 101222 - RNA, 24 nt, Artificial Sequence
  Synthetic
uguauuaaaacuucccacaucaag

SEQ ID NO: 101223 - RNA, 19 nt, Artificial Sequence
  Synthetic
cgaacuuccacuuaucaag

SEQ ID NO: 101224 - RNA, 20 nt, Artificial Sequence
  Synthetic
ucgaacuuccacuuaucaag

SEQ ID NO: 101225 - RNA, 21 nt, Artificial Sequence
  Synthetic
uucgaacuuccacuuaucaag

SEQ ID NO: 101226 - RNA, 22 nt, Artificial Sequence
  Synthetic
cuucgaacuuccacuuaucaag

SEQ ID NO: 101227 - RNA, 23 nt, Artificial Sequence
  Synthetic
ccuucgaacuuccacuuaucaag

SEQ ID NO: 101228 - RNA, 24 nt, Artificial Sequence
  Synthetic
uccuucgaacuuccacuuaucaag

SEQ ID NO: 101229 - RNA, 18 nt, Artificial Sequence
  Synthetic
uuauucaaguuuaucaag

SEQ ID NO: 101230 - RNA, 19 nt, Artificial Sequence
  Synthetic
uuuauucaaguuuaucaag

SEQ ID NO: 101231 - RNA, 20 nt, Artificial Sequence
  Synthetic
auuuauucaaguuuaucaag

SEQ ID NO: 101232 - RNA, 21 nt, Artificial Sequence
  Synthetic
uauuuauucaaguuuaucaag

SEQ ID NO: 101233 - RNA, 22 nt, Artificial Sequence
  Synthetic
cuauuuauucaaguuuaucaag

SEQ ID NO: 101234 - RNA, 23 nt, Artificial Sequence
  Synthetic
acuauuuauucaaguuuaucaag

SEQ ID NO: 101235 - RNA, 24 nt, Artificial Sequence
  Synthetic
uacuauuuauucaaguuuaucaag

SEQ ID NO: 101236 - RNA, 18 nt, Artificial Sequence
  Synthetic
ccacauauaucacucaag

SEQ ID NO: 101237 - RNA, 20 nt, Artificial Sequence
  Synthetic
ugccacauauaucacucaag

SEQ ID NO: 101238 - RNA, 21 nt, Artificial Sequence
  Synthetic
cugccacauauaucacucaag

SEQ ID NO: 101239 - RNA, 22 nt, Artificial Sequence
  Synthetic
ucugccacauauaucacucaag

SEQ ID NO: 101240 - RNA, 23 nt, Artificial Sequence
  Synthetic
uucugccacauauaucacucaag

SEQ ID NO: 101241 - RNA, 24 nt, Artificial Sequence
  Synthetic
uuucugccacauauaucacucaag

SEQ ID NO: 101242 - RNA, 18 nt, Artificial Sequence
  Synthetic
ccgggucugggccucaag

SEQ ID NO: 101243 - RNA, 20 nt, Artificial Sequence
  Synthetic
ugccgggucugggccucaag

SEQ ID NO: 101244 - RNA, 21 nt, Artificial Sequence
  Synthetic
augccgggucugggccucaag

SEQ ID NO: 101245 - RNA, 24 nt, Artificial Sequence
  Synthetic
uggaugccgggucugggccucaag

SEQ ID NO: 101246 - RNA, 19 nt, Artificial Sequence
  Synthetic
agugcauggccugcucaag

SEQ ID NO: 101247 - RNA, 20 nt, Artificial Sequence
  Synthetic
cagugcauggccugcucaag

SEQ ID NO: 101248 - RNA, 21 nt, Artificial Sequence
  Synthetic
acagugcauggccugcucaag

SEQ ID NO: 101249 - RNA, 22 nt, Artificial Sequence
  Synthetic
uacagugcauggccugcucaag

SEQ ID NO: 101250 - RNA, 23 nt, Artificial Sequence
  Synthetic
uuacagugcauggccugcucaag

SEQ ID NO: 101251 - RNA, 24 nt, Artificial Sequence
  Synthetic
uuuacagugcauggccugcucaag

SEQ ID NO: 101252 - RNA, 18 nt, Artificial Sequence
  Synthetic
cuccuugaaagggucaag

SEQ ID NO: 101253 - RNA, 19 nt, Artificial Sequence
  Synthetic
ucuccuugaaagggucaag

SEQ ID NO: 101254 - RNA, 20 nt, Artificial Sequence
  Synthetic
aucuccuugaaagggucaag

SEQ ID NO: 101255 - RNA, 22 nt, Artificial Sequence
  Synthetic
agaucuccuugaaagggucaag

SEQ ID NO: 101256 - RNA, 23 nt, Artificial Sequence
  Synthetic
cagaucuccuugaaagggucaag

SEQ ID NO: 101257 - RNA, 24 nt, Artificial Sequence
  Synthetic
ccagaucuccuugaaagggucaag

SEQ ID NO: 101258 - RNA, 18 nt, Artificial Sequence
  Synthetic
uguuucuuguaugucaag

SEQ ID NO: 101259 - RNA, 19 nt, Artificial Sequence
  Synthetic
uuguuucuuguaugucaag

SEQ ID NO: 101260 - RNA, 20 nt, Artificial Sequence
  Synthetic
uuuguuucuuguaugucaag

SEQ ID NO: 101261 - RNA, 24 nt, Artificial Sequence
  Synthetic
uggguuuguuucuuguaugucaag

SEQ ID NO: 101262 - RNA, 18 nt, Artificial Sequence
  Synthetic
cuugucugcucugucaag

SEQ ID NO: 101263 - RNA, 20 nt, Artificial Sequence
  Synthetic
ugcuugucugcucugucaag

SEQ ID NO: 101264 - RNA, 21 nt, Artificial Sequence
  Synthetic
uugcuugucugcucugucaag

SEQ ID NO: 101265 - RNA, 22 nt, Artificial Sequence
  Synthetic
uuugcuugucugcucugucaag

SEQ ID NO: 101266 - RNA, 23 nt, Artificial Sequence
  Synthetic
uuuugcuugucugcucugucaag

SEQ ID NO: 101267 - RNA, 24 nt, Artificial Sequence
  Synthetic
cuuuugcuugucugcucugucaag

SEQ ID NO: 101268 - RNA, 18 nt, Artificial Sequence
  Synthetic
ugaagacagagugucaag

SEQ ID NO: 101269 - RNA, 19 nt, Artificial Sequence
  Synthetic
augaagacagagugucaag

SEQ ID NO: 101270 - RNA, 21 nt, Artificial Sequence
  Synthetic
ugaugaagacagagugucaag

SEQ ID NO: 101271 - RNA, 22 nt, Artificial Sequence
  Synthetic
uugaugaagacagagugucaag

SEQ ID NO: 101272 - RNA, 24 nt, Artificial Sequence
  Synthetic
uguugaugaagacagagugucaag

SEQ ID NO: 101273 - RNA, 19 nt, Artificial Sequence
  Synthetic
uguggaagaagaauucaag

SEQ ID NO: 101274 - RNA, 20 nt, Artificial Sequence
  Synthetic
cuguggaagaagaauucaag

SEQ ID NO: 101275 - RNA, 21 nt, Artificial Sequence
  Synthetic
ucuguggaagaagaauucaag

SEQ ID NO: 101276 - RNA, 22 nt, Artificial Sequence
  Synthetic
uucuguggaagaagaauucaag

SEQ ID NO: 101277 - RNA, 24 nt, Artificial Sequence
  Synthetic
uguucuguggaagaagaauucaag

SEQ ID NO: 101278 - RNA, 18 nt, Artificial Sequence
  Synthetic
uuuuccagaauuuucaag

SEQ ID NO: 101279 - RNA, 19 nt, Artificial Sequence
  Synthetic
auuuuccagaauuuucaag

SEQ ID NO: 101280 - RNA, 20 nt, Artificial Sequence
  Synthetic
cauuuuccagaauuuucaag

SEQ ID NO: 101281 - RNA, 21 nt, Artificial Sequence
  Synthetic
acauuuuccagaauuuucaag

SEQ ID NO: 101282 - RNA, 22 nt, Artificial Sequence
  Synthetic
uacauuuuccagaauuuucaag

SEQ ID NO: 101283 - RNA, 23 nt, Artificial Sequence
  Synthetic
cuacauuuuccagaauuuucaag

SEQ ID NO: 101284 - RNA, 24 nt, Artificial Sequence
  Synthetic
acuacauuuuccagaauuuucaag

SEQ ID NO: 101285 - RNA, 21 nt, Artificial Sequence
  Synthetic
uuauuauguuuaauuuucaag

SEQ ID NO: 101286 - RNA, 22 nt, Artificial Sequence
  Synthetic
uuuauuauguuuaauuuucaag

SEQ ID NO: 101287 - RNA, 24 nt, Artificial Sequence
  Synthetic
uguuuauuauguuuaauuuucaag

SEQ ID NO: 101288 - RNA, 18 nt, Artificial Sequence
  Synthetic
ugugaggugauuuucaag

SEQ ID NO: 101289 - RNA, 19 nt, Artificial Sequence
  Synthetic
cugugaggugauuuucaag

SEQ ID NO: 101290 - RNA, 20 nt, Artificial Sequence
  Synthetic
ucugugaggugauuuucaag

SEQ ID NO: 101291 - RNA, 21 nt, Artificial Sequence
  Synthetic
uucugugaggugauuuucaag

SEQ ID NO: 101292 - RNA, 18 nt, Artificial Sequence
  Synthetic
aacacugauauuuucaag

SEQ ID NO: 101293 - RNA, 20 nt, Artificial Sequence
  Synthetic
agaacacugauauuuucaag

SEQ ID NO: 101294 - RNA, 22 nt, Artificial Sequence
  Synthetic
ugagaacacugauauuuucaag

SEQ ID NO: 101295 - RNA, 23 nt, Artificial Sequence
  Synthetic
uugagaacacugauauuuucaag

SEQ ID NO: 101296 - RNA, 24 nt, Artificial Sequence
  Synthetic
cuugagaacacugauauuuucaag

SEQ ID NO: 101297 - RNA, 20 nt, Artificial Sequence
  Synthetic
agguagaauugucaaagaag

SEQ ID NO: 101298 - RNA, 21 nt, Artificial Sequence
  Synthetic
uagguagaauugucaaagaag

SEQ ID NO: 101299 - RNA, 22 nt, Artificial Sequence
  Synthetic
cuagguagaauugucaaagaag

SEQ ID NO: 101300 - RNA, 23 nt, Artificial Sequence
  Synthetic
ucuagguagaauugucaaagaag

SEQ ID NO: 101301 - RNA, 24 nt, Artificial Sequence
  Synthetic
aucuagguagaauugucaaagaag

SEQ ID NO: 101302 - RNA, 18 nt, Artificial Sequence
  Synthetic
agagagaagguaaagaag

SEQ ID NO: 101303 - RNA, 19 nt, Artificial Sequence
  Synthetic
cagagagaagguaaagaag

SEQ ID NO: 101304 - RNA, 20 nt, Artificial Sequence
  Synthetic
ucagagagaagguaaagaag

SEQ ID NO: 101305 - RNA, 21 nt, Artificial Sequence
  Synthetic
aucagagagaagguaaagaag

SEQ ID NO: 101306 - RNA, 22 nt, Artificial Sequence
  Synthetic
aaucagagagaagguaaagaag

SEQ ID NO: 101307 - RNA, 24 nt, Artificial Sequence
  Synthetic
agaaucagagagaagguaaagaag

SEQ ID NO: 101308 - RNA, 19 nt, Artificial Sequence
  Synthetic
agauuccuucuacaagaag

SEQ ID NO: 101309 - RNA, 20 nt, Artificial Sequence
  Synthetic
cagauuccuucuacaagaag

SEQ ID NO: 101310 - RNA, 23 nt, Artificial Sequence
  Synthetic
uggcagauuccuucuacaagaag

SEQ ID NO: 101311 - RNA, 24 nt, Artificial Sequence
  Synthetic
cuggcagauuccuucuacaagaag

SEQ ID NO: 101312 - RNA, 18 nt, Artificial Sequence
  Synthetic
aggagaacccccaagaag

SEQ ID NO: 101313 - RNA, 19 nt, Artificial Sequence
  Synthetic
aaggagaacccccaagaag

SEQ ID NO: 101314 - RNA, 20 nt, Artificial Sequence
  Synthetic
aaaggagaacccccaagaag

SEQ ID NO: 101315 - RNA, 21 nt, Artificial Sequence
  Synthetic
uaaaggagaacccccaagaag

SEQ ID NO: 101316 - RNA, 22 nt, Artificial Sequence
  Synthetic
uuaaaggagaacccccaagaag

SEQ ID NO: 101317 - RNA, 23 nt, Artificial Sequence
  Synthetic
uuuaaaggagaacccccaagaag

SEQ ID NO: 101318 - RNA, 24 nt, Artificial Sequence
  Synthetic
uuuuaaaggagaacccccaagaag

SEQ ID NO: 101319 - RNA, 19 nt, Artificial Sequence
  Synthetic
ugauagaaucuccaagaag

SEQ ID NO: 101320 - RNA, 20 nt, Artificial Sequence
  Synthetic
augauagaaucuccaagaag

SEQ ID NO: 101321 - RNA, 21 nt, Artificial Sequence
  Synthetic
caugauagaaucuccaagaag

SEQ ID NO: 101322 - RNA, 22 nt, Artificial Sequence
  Synthetic
acaugauagaaucuccaagaag

SEQ ID NO: 101323 - RNA, 24 nt, Artificial Sequence
  Synthetic
ugacaugauagaaucuccaagaag

SEQ ID NO: 101324 - RNA, 18 nt, Artificial Sequence
  Synthetic
uccucauuagagaagaag

SEQ ID NO: 101325 - RNA, 19 nt, Artificial Sequence
  Synthetic
cuccucauuagagaagaag

SEQ ID NO: 101326 - RNA, 20 nt, Artificial Sequence
  Synthetic
ucuccucauuagagaagaag

SEQ ID NO: 101327 - RNA, 22 nt, Artificial Sequence
  Synthetic
ugucuccucauuagagaagaag

SEQ ID NO: 101328 - RNA, 23 nt, Artificial Sequence
  Synthetic
uugucuccucauuagagaagaag

SEQ ID NO: 101329 - RNA, 21 nt, Artificial Sequence
  Synthetic
cccaguggguucaggaagaag

SEQ ID NO: 101330 - RNA, 22 nt, Artificial Sequence
  Synthetic
acccaguggguucaggaagaag

SEQ ID NO: 101331 - RNA, 23 nt, Artificial Sequence
  Synthetic
uacccaguggguucaggaagaag

SEQ ID NO: 101332 - RNA, 24 nt, Artificial Sequence
  Synthetic
uuacccaguggguucaggaagaag

SEQ ID NO: 101333 - RNA, 20 nt, Artificial Sequence
  Synthetic
uggauuggaauuggaagaag

SEQ ID NO: 101334 - RNA, 21 nt, Artificial Sequence
  Synthetic
uuggauuggaauuggaagaag

SEQ ID NO: 101335 - RNA, 22 nt, Artificial Sequence
  Synthetic
uuuggauuggaauuggaagaag

SEQ ID NO: 101336 - RNA, 24 nt, Artificial Sequence
  Synthetic
aguuuggauuggaauuggaagaag

SEQ ID NO: 101337 - RNA, 18 nt, Artificial Sequence
  Synthetic
caaaugguaggccagaag

SEQ ID NO: 101338 - RNA, 19 nt, Artificial Sequence
  Synthetic
acaaaugguaggccagaag

SEQ ID NO: 101339 - RNA, 20 nt, Artificial Sequence
  Synthetic
aacaaaugguaggccagaag

SEQ ID NO: 101340 - RNA, 21 nt, Artificial Sequence
  Synthetic
caacaaaugguaggccagaag

SEQ ID NO: 101341 - RNA, 22 nt, Artificial Sequence
  Synthetic
ucaacaaaugguaggccagaag

SEQ ID NO: 101342 - RNA, 23 nt, Artificial Sequence
  Synthetic
aucaacaaaugguaggccagaag

SEQ ID NO: 101343 - RNA, 19 nt, Artificial Sequence
  Synthetic
uguuguuauguggcagaag

SEQ ID NO: 101344 - RNA, 20 nt, Artificial Sequence
  Synthetic
uuguuguuauguggcagaag

SEQ ID NO: 101345 - RNA, 22 nt, Artificial Sequence
  Synthetic
aguuguuguuauguggcagaag

SEQ ID NO: 101346 - RNA, 24 nt, Artificial Sequence
  Synthetic
agaguuguuguuauguggcagaag

SEQ ID NO: 101347 - RNA, 19 nt, Artificial Sequence
  Synthetic
uggaggauuaaaagagaag

SEQ ID NO: 101348 - RNA, 20 nt, Artificial Sequence
  Synthetic
auggaggauuaaaagagaag

SEQ ID NO: 101349 - RNA, 22 nt, Artificial Sequence
  Synthetic
agauggaggauuaaaagagaag

SEQ ID NO: 101350 - RNA, 23 nt, Artificial Sequence
  Synthetic
aagauggaggauuaaaagagaag

SEQ ID NO: 101351 - RNA, 18 nt, Artificial Sequence
  Synthetic
agccagguuuaagagaag

SEQ ID NO: 101352 - RNA, 19 nt, Artificial Sequence
  Synthetic
cagccagguuuaagagaag

SEQ ID NO: 101353 - RNA, 20 nt, Artificial Sequence
  Synthetic
ucagccagguuuaagagaag

SEQ ID NO: 101354 - RNA, 21 nt, Artificial Sequence
  Synthetic
uucagccagguuuaagagaag

SEQ ID NO: 101355 - RNA, 22 nt, Artificial Sequence
  Synthetic
cuucagccagguuuaagagaag

SEQ ID NO: 101356 - RNA, 23 nt, Artificial Sequence
  Synthetic
ccuucagccagguuuaagagaag

SEQ ID NO: 101357 - RNA, 18 nt, Artificial Sequence
  Synthetic
aucaaacaauuagagaag

SEQ ID NO: 101358 - RNA, 19 nt, Artificial Sequence
  Synthetic
aaucaaacaauuagagaag

SEQ ID NO: 101359 - RNA, 20 nt, Artificial Sequence
  Synthetic
aaaucaaacaauuagagaag

SEQ ID NO: 101360 - RNA, 21 nt, Artificial Sequence
  Synthetic
aaaaucaaacaauuagagaag

SEQ ID NO: 101361 - RNA, 22 nt, Artificial Sequence
  Synthetic
aaaaaucaaacaauuagagaag

SEQ ID NO: 101362 - RNA, 23 nt, Artificial Sequence
  Synthetic
uaaaaaucaaacaauuagagaag

SEQ ID NO: 101363 - RNA, 22 nt, Artificial Sequence
  Synthetic
aggagaaaauuacaaggagaag

SEQ ID NO: 101364 - RNA, 23 nt, Artificial Sequence
  Synthetic
aaggagaaaauuacaaggagaag

SEQ ID NO: 101365 - RNA, 24 nt, Artificial Sequence
  Synthetic
aaaggagaaaauuacaaggagaag

SEQ ID NO: 101366 - RNA, 21 nt, Artificial Sequence
  Synthetic
cagggagccagggaggagaag

SEQ ID NO: 101367 - RNA, 22 nt, Artificial Sequence
  Synthetic
ucagggagccagggaggagaag

SEQ ID NO: 101368 - RNA, 23 nt, Artificial Sequence
  Synthetic
aucagggagccagggaggagaag

SEQ ID NO: 101369 - RNA, 24 nt, Artificial Sequence
  Synthetic
aaucagggagccagggaggagaag

SEQ ID NO: 101370 - RNA, 18 nt, Artificial Sequence
  Synthetic
aauccauauuaugagaag

SEQ ID NO: 101371 - RNA, 19 nt, Artificial Sequence
  Synthetic
caauccauauuaugagaag

SEQ ID NO: 101372 - RNA, 21 nt, Artificial Sequence
  Synthetic
ugcaauccauauuaugagaag

SEQ ID NO: 101373 - RNA, 22 nt, Artificial Sequence
  Synthetic
augcaauccauauuaugagaag

SEQ ID NO: 101374 - RNA, 23 nt, Artificial Sequence
  Synthetic
aaugcaauccauauuaugagaag

SEQ ID NO: 101375 - RNA, 24 nt, Artificial Sequence
  Synthetic
aaaugcaauccauauuaugagaag

SEQ ID NO: 101376 - RNA, 18 nt, Artificial Sequence
  Synthetic
aaaucagauuuugagaag

SEQ ID NO: 101377 - RNA, 20 nt, Artificial Sequence
  Synthetic
ugaaaucagauuuugagaag

SEQ ID NO: 101378 - RNA, 21 nt, Artificial Sequence
  Synthetic
uugaaaucagauuuugagaag

SEQ ID NO: 101379 - RNA, 23 nt, Artificial Sequence
  Synthetic
aguugaaaucagauuuugagaag

SEQ ID NO: 101380 - RNA, 24 nt, Artificial Sequence
  Synthetic
caguugaaaucagauuuugagaag

SEQ ID NO: 101381 - RNA, 18 nt, Artificial Sequence
  Synthetic
aaauuuaaaacauagaag

SEQ ID NO: 101382 - RNA, 19 nt, Artificial Sequence
  Synthetic
uaaauuuaaaacauagaag

SEQ ID NO: 101383 - RNA, 20 nt, Artificial Sequence
  Synthetic
uuaaauuuaaaacauagaag

SEQ ID NO: 101384 - RNA, 21 nt, Artificial Sequence
  Synthetic
uuuaaauuuaaaacauagaag

SEQ ID NO: 101385 - RNA, 22 nt, Artificial Sequence
  Synthetic
auuuaaauuuaaaacauagaag

SEQ ID NO: 101386 - RNA, 23 nt, Artificial Sequence
  Synthetic
cauuuaaauuuaaaacauagaag

SEQ ID NO: 101387 - RNA, 19 nt, Artificial Sequence
  Synthetic
agaaaauuaacacuagaag

SEQ ID NO: 101388 - RNA, 23 nt, Artificial Sequence
  Synthetic
agggagaaaauuaacacuagaag

SEQ ID NO: 101389 - RNA, 24 nt, Artificial Sequence
  Synthetic
aagggagaaaauuaacacuagaag

SEQ ID NO: 101390 - RNA, 18 nt, Artificial Sequence
  Synthetic
aaggagccaggcuagaag

SEQ ID NO: 101391 - RNA, 19 nt, Artificial Sequence
  Synthetic
aaaggagccaggcuagaag

SEQ ID NO: 101392 - RNA, 20 nt, Artificial Sequence
  Synthetic
aaaaggagccaggcuagaag

SEQ ID NO: 101393 - RNA, 21 nt, Artificial Sequence
  Synthetic
caaaaggagccaggcuagaag

SEQ ID NO: 101394 - RNA, 22 nt, Artificial Sequence
  Synthetic
acaaaaggagccaggcuagaag

SEQ ID NO: 101395 - RNA, 23 nt, Artificial Sequence
  Synthetic
uacaaaaggagccaggcuagaag

SEQ ID NO: 101396 - RNA, 24 nt, Artificial Sequence
  Synthetic
uuacaaaaggagccaggcuagaag

SEQ ID NO: 101397 - RNA, 18 nt, Artificial Sequence
  Synthetic
accuacuuaguaacgaag

SEQ ID NO: 101398 - RNA, 19 nt, Artificial Sequence
  Synthetic
uaccuacuuaguaacgaag

SEQ ID NO: 101399 - RNA, 20 nt, Artificial Sequence
  Synthetic
auaccuacuuaguaacgaag

SEQ ID NO: 101400 - RNA, 21 nt, Artificial Sequence
  Synthetic
uauaccuacuuaguaacgaag

SEQ ID NO: 101401 - RNA, 22 nt, Artificial Sequence
  Synthetic
uuauaccuacuuaguaacgaag

SEQ ID NO: 101402 - RNA, 23 nt, Artificial Sequence
  Synthetic
uuuauaccuacuuaguaacgaag

SEQ ID NO: 101403 - RNA, 18 nt, Artificial Sequence
  Synthetic
uucuuuugauacacgaag

SEQ ID NO: 101404 - RNA, 19 nt, Artificial Sequence
  Synthetic
uuucuuuugauacacgaag

SEQ ID NO: 101405 - RNA, 20 nt, Artificial Sequence
  Synthetic
uuuucuuuugauacacgaag

SEQ ID NO: 101406 - RNA, 22 nt, Artificial Sequence
  Synthetic
uguuuucuuuugauacacgaag

SEQ ID NO: 101407 - RNA, 23 nt, Artificial Sequence
  Synthetic
cuguuuucuuuugauacacgaag

SEQ ID NO: 101408 - RNA, 24 nt, Artificial Sequence
  Synthetic
ucuguuuucuuuugauacacgaag

SEQ ID NO: 101409 - RNA, 21 nt, Artificial Sequence
  Synthetic
cauaauuuuauuuaaaggaag

SEQ ID NO: 101410 - RNA, 24 nt, Artificial Sequence
  Synthetic
aggcauaauuuuauuuaaaggaag

SEQ ID NO: 101411 - RNA, 21 nt, Artificial Sequence
  Synthetic
auaccacaugaauacaggaag

SEQ ID NO: 101412 - RNA, 22 nt, Artificial Sequence
  Synthetic
cauaccacaugaauacaggaag

SEQ ID NO: 101413 - RNA, 23 nt, Artificial Sequence
  Synthetic
acauaccacaugaauacaggaag

SEQ ID NO: 101414 - RNA, 24 nt, Artificial Sequence
  Synthetic
uacauaccacaugaauacaggaag

SEQ ID NO: 101415 - RNA, 18 nt, Artificial Sequence
  Synthetic
cuacaggacagcaggaag

SEQ ID NO: 101416 - RNA, 19 nt, Artificial Sequence
  Synthetic
ccuacaggacagcaggaag

SEQ ID NO: 101417 - RNA, 20 nt, Artificial Sequence
  Synthetic
uccuacaggacagcaggaag

SEQ ID NO: 101418 - RNA, 23 nt, Artificial Sequence
  Synthetic
agguccuacaggacagcaggaag

SEQ ID NO: 101419 - RNA, 18 nt, Artificial Sequence
  Synthetic
uuuuucacuugcaggaag

SEQ ID NO: 101420 - RNA, 19 nt, Artificial Sequence
  Synthetic
auuuuucacuugcaggaag

SEQ ID NO: 101421 - RNA, 20 nt, Artificial Sequence
  Synthetic
uauuuuucacuugcaggaag

SEQ ID NO: 101422 - RNA, 21 nt, Artificial Sequence
  Synthetic
auauuuuucacuugcaggaag

SEQ ID NO: 101423 - RNA, 22 nt, Artificial Sequence
  Synthetic
cauauuuuucacuugcaggaag

SEQ ID NO: 101424 - RNA, 23 nt, Artificial Sequence
  Synthetic
ccauauuuuucacuugcaggaag

SEQ ID NO: 101425 - RNA, 24 nt, Artificial Sequence
  Synthetic
uccauauuuuucacuugcaggaag

SEQ ID NO: 101426 - RNA, 18 nt, Artificial Sequence
  Synthetic
ugcuagugauucaggaag

SEQ ID NO: 101427 - RNA, 19 nt, Artificial Sequence
  Synthetic
uugcuagugauucaggaag

SEQ ID NO: 101428 - RNA, 24 nt, Artificial Sequence
  Synthetic
agggguugcuagugauucaggaag

SEQ ID NO: 101429 - RNA, 21 nt, Artificial Sequence
  Synthetic
ccuuucuuaugaaggaggaag

SEQ ID NO: 101430 - RNA, 22 nt, Artificial Sequence
  Synthetic
uccuuucuuaugaaggaggaag

SEQ ID NO: 101431 - RNA, 23 nt, Artificial Sequence
  Synthetic
uuccuuucuuaugaaggaggaag

SEQ ID NO: 101432 - RNA, 24 nt, Artificial Sequence
  Synthetic
uuuccuuucuuaugaaggaggaag

SEQ ID NO: 101433 - RNA, 18 nt, Artificial Sequence
  Synthetic
ugauguuguuugaggaag

SEQ ID NO: 101434 - RNA, 19 nt, Artificial Sequence
  Synthetic
augauguuguuugaggaag

SEQ ID NO: 101435 - RNA, 21 nt, Artificial Sequence
  Synthetic
cgaugauguuguuugaggaag

SEQ ID NO: 101436 - RNA, 23 nt, Artificial Sequence
  Synthetic
agcgaugauguuguuugaggaag

SEQ ID NO: 101437 - RNA, 18 nt, Artificial Sequence
  Synthetic
acuuaacuuucagggaag

SEQ ID NO: 101438 - RNA, 19 nt, Artificial Sequence
  Synthetic
aacuuaacuuucagggaag

SEQ ID NO: 101439 - RNA, 22 nt, Artificial Sequence
  Synthetic
aggaacuuaacuuucagggaag

SEQ ID NO: 101440 - RNA, 24 nt, Artificial Sequence
  Synthetic
ugaggaacuuaacuuucagggaag

SEQ ID NO: 101441 - RNA, 18 nt, Artificial Sequence
  Synthetic
uagcuaugugaggggaag

SEQ ID NO: 101442 - RNA, 19 nt, Artificial Sequence
  Synthetic
auagcuaugugaggggaag

SEQ ID NO: 101443 - RNA, 20 nt, Artificial Sequence
  Synthetic
uauagcuaugugaggggaag

SEQ ID NO: 101444 - RNA, 21 nt, Artificial Sequence
  Synthetic
auauagcuaugugaggggaag

SEQ ID NO: 101445 - RNA, 23 nt, Artificial Sequence
  Synthetic
ugauauagcuaugugaggggaag

SEQ ID NO: 101446 - RNA, 24 nt, Artificial Sequence
  Synthetic
uugauauagcuaugugaggggaag

SEQ ID NO: 101447 - RNA, 18 nt, Artificial Sequence
  Synthetic
uucguugaggaugggaag

SEQ ID NO: 101448 - RNA, 19 nt, Artificial Sequence
  Synthetic
auucguugaggaugggaag

SEQ ID NO: 101449 - RNA, 20 nt, Artificial Sequence
  Synthetic
aauucguugaggaugggaag

SEQ ID NO: 101450 - RNA, 22 nt, Artificial Sequence
  Synthetic
agaauucguugaggaugggaag

SEQ ID NO: 101451 - RNA, 23 nt, Artificial Sequence
  Synthetic
aagaauucguugaggaugggaag

SEQ ID NO: 101452 - RNA, 24 nt, Artificial Sequence
  Synthetic
uaagaauucguugaggaugggaag

SEQ ID NO: 101453 - RNA, 18 nt, Artificial Sequence
  Synthetic
ccuuaucugacugggaag

SEQ ID NO: 101454 - RNA, 20 nt, Artificial Sequence
  Synthetic
ugccuuaucugacugggaag

SEQ ID NO: 101455 - RNA, 21 nt, Artificial Sequence
  Synthetic
cugccuuaucugacugggaag

SEQ ID NO: 101456 - RNA, 22 nt, Artificial Sequence
  Synthetic
ucugccuuaucugacugggaag

SEQ ID NO: 101457 - RNA, 23 nt, Artificial Sequence
  Synthetic
uucugccuuaucugacugggaag

SEQ ID NO: 101458 - RNA, 24 nt, Artificial Sequence
  Synthetic
cuucugccuuaucugacugggaag

SEQ ID NO: 101459 - RNA, 18 nt, Artificial Sequence
  Synthetic
aaguauauuccugggaag

SEQ ID NO: 101460 - RNA, 19 nt, Artificial Sequence
  Synthetic
caaguauauuccugggaag

SEQ ID NO: 101461 - RNA, 20 nt, Artificial Sequence
  Synthetic
acaaguauauuccugggaag

SEQ ID NO: 101462 - RNA, 21 nt, Artificial Sequence
  Synthetic
cacaaguauauuccugggaag

SEQ ID NO: 101463 - RNA, 22 nt, Artificial Sequence
  Synthetic
acacaaguauauuccugggaag

SEQ ID NO: 101464 - RNA, 23 nt, Artificial Sequence
  Synthetic
uacacaaguauauuccugggaag

SEQ ID NO: 101465 - RNA, 18 nt, Artificial Sequence
  Synthetic
uggugugugcucuggaag

SEQ ID NO: 101466 - RNA, 19 nt, Artificial Sequence
  Synthetic
uuggugugugcucuggaag

SEQ ID NO: 101467 - RNA, 20 nt, Artificial Sequence
  Synthetic
uuuggugugugcucuggaag

SEQ ID NO: 101468 - RNA, 21 nt, Artificial Sequence
  Synthetic
auuuggugugugcucuggaag

SEQ ID NO: 101469 - RNA, 23 nt, Artificial Sequence
  Synthetic
agauuuggugugugcucuggaag

SEQ ID NO: 101470 - RNA, 24 nt, Artificial Sequence
  Synthetic
aagauuuggugugugcucuggaag

SEQ ID NO: 101471 - RNA, 18 nt, Artificial Sequence
  Synthetic
cagaauguucuguggaag

SEQ ID NO: 101472 - RNA, 20 nt, Artificial Sequence
  Synthetic
ugcagaauguucuguggaag

SEQ ID NO: 101473 - RNA, 21 nt, Artificial Sequence
  Synthetic
augcagaauguucuguggaag

SEQ ID NO: 101474 - RNA, 22 nt, Artificial Sequence
  Synthetic
aaugcagaauguucuguggaag

SEQ ID NO: 101475 - RNA, 23 nt, Artificial Sequence
  Synthetic
uaaugcagaauguucuguggaag

SEQ ID NO: 101476 - RNA, 24 nt, Artificial Sequence
  Synthetic
uuaaugcagaauguucuguggaag

SEQ ID NO: 101477 - RNA, 20 nt, Artificial Sequence
  Synthetic
uggcagaagauuuguggaag

SEQ ID NO: 101478 - RNA, 21 nt, Artificial Sequence
  Synthetic
auggcagaagauuuguggaag

SEQ ID NO: 101479 - RNA, 22 nt, Artificial Sequence
  Synthetic
aauggcagaagauuuguggaag

SEQ ID NO: 101480 - RNA, 23 nt, Artificial Sequence
  Synthetic
aaauggcagaagauuuguggaag

SEQ ID NO: 101481 - RNA, 18 nt, Artificial Sequence
  Synthetic
ccauacugaucaaugaag

SEQ ID NO: 101482 - RNA, 19 nt, Artificial Sequence
  Synthetic
uccauacugaucaaugaag

SEQ ID NO: 101483 - RNA, 20 nt, Artificial Sequence
  Synthetic
uuccauacugaucaaugaag

SEQ ID NO: 101484 - RNA, 21 nt, Artificial Sequence
  Synthetic
uuuccauacugaucaaugaag

SEQ ID NO: 101485 - RNA, 22 nt, Artificial Sequence
  Synthetic
uuuuccauacugaucaaugaag

SEQ ID NO: 101486 - RNA, 23 nt, Artificial Sequence
  Synthetic
cuuuuccauacugaucaaugaag

SEQ ID NO: 101487 - RNA, 24 nt, Artificial Sequence
  Synthetic
ccuuuuccauacugaucaaugaag

SEQ ID NO: 101488 - RNA, 23 nt, Artificial Sequence
  Synthetic
ugguuggagccccuugaaugaag

SEQ ID NO: 101489 - RNA, 24 nt, Artificial Sequence
  Synthetic
augguuggagccccuugaaugaag

SEQ ID NO: 101490 - RNA, 21 nt, Artificial Sequence
  Synthetic
cuuuaaauauauuuaaugaag

SEQ ID NO: 101491 - RNA, 22 nt, Artificial Sequence
  Synthetic
acuuuaaauauauuuaaugaag

SEQ ID NO: 101492 - RNA, 23 nt, Artificial Sequence
  Synthetic
uacuuuaaauauauuuaaugaag

SEQ ID NO: 101493 - RNA, 24 nt, Artificial Sequence
  Synthetic
auacuuuaaauauauuuaaugaag

SEQ ID NO: 101494 - RNA, 18 nt, Artificial Sequence
  Synthetic
acuggagaagacaugaag

SEQ ID NO: 101495 - RNA, 20 nt, Artificial Sequence
  Synthetic
ugacuggagaagacaugaag

SEQ ID NO: 101496 - RNA, 21 nt, Artificial Sequence
  Synthetic
augacuggagaagacaugaag

SEQ ID NO: 101497 - RNA, 22 nt, Artificial Sequence
  Synthetic
caugacuggagaagacaugaag

SEQ ID NO: 101498 - RNA, 23 nt, Artificial Sequence
  Synthetic
ucaugacuggagaagacaugaag

SEQ ID NO: 101499 - RNA, 24 nt, Artificial Sequence
  Synthetic
uucaugacuggagaagacaugaag

SEQ ID NO: 101500 - RNA, 21 nt, Artificial Sequence
  Synthetic
aaaauacaaagaaauaugaag

SEQ ID NO: 101501 - RNA, 23 nt, Artificial Sequence
  Synthetic
agaaaauacaaagaaauaugaag

SEQ ID NO: 101502 - RNA, 18 nt, Artificial Sequence
  Synthetic
cuaaagguucaccugaag

SEQ ID NO: 101503 - RNA, 19 nt, Artificial Sequence
  Synthetic
ccuaaagguucaccugaag

SEQ ID NO: 101504 - RNA, 20 nt, Artificial Sequence
  Synthetic
uccuaaagguucaccugaag

SEQ ID NO: 101505 - RNA, 21 nt, Artificial Sequence
  Synthetic
auccuaaagguucaccugaag

SEQ ID NO: 101506 - RNA, 22 nt, Artificial Sequence
  Synthetic
aauccuaaagguucaccugaag

SEQ ID NO: 101507 - RNA, 23 nt, Artificial Sequence
  Synthetic
uaauccuaaagguucaccugaag

SEQ ID NO: 101508 - RNA, 24 nt, Artificial Sequence
  Synthetic
cuaauccuaaagguucaccugaag

SEQ ID NO: 101509 - RNA, 18 nt, Artificial Sequence
  Synthetic
uguaaccauuagcugaag

SEQ ID NO: 101510 - RNA, 19 nt, Artificial Sequence
  Synthetic
auguaaccauuagcugaag

SEQ ID NO: 101511 - RNA, 21 nt, Artificial Sequence
  Synthetic
agauguaaccauuagcugaag

SEQ ID NO: 101512 - RNA, 22 nt, Artificial Sequence
  Synthetic
aagauguaaccauuagcugaag

SEQ ID NO: 101513 - RNA, 23 nt, Artificial Sequence
  Synthetic
uaagauguaaccauuagcugaag

SEQ ID NO: 101514 - RNA, 19 nt, Artificial Sequence
  Synthetic
ugguccuugagggcugaag

SEQ ID NO: 101515 - RNA, 20 nt, Artificial Sequence
  Synthetic
cugguccuugagggcugaag

SEQ ID NO: 101516 - RNA, 23 nt, Artificial Sequence
  Synthetic
uggcugguccuugagggcugaag

SEQ ID NO: 101517 - RNA, 24 nt, Artificial Sequence
  Synthetic
uuggcugguccuugagggcugaag

SEQ ID NO: 101518 - RNA, 18 nt, Artificial Sequence
  Synthetic
cuuaacgcuuuagugaag

SEQ ID NO: 101519 - RNA, 19 nt, Artificial Sequence
  Synthetic
ucuuaacgcuuuagugaag

SEQ ID NO: 101520 - RNA, 20 nt, Artificial Sequence
  Synthetic
uucuuaacgcuuuagugaag

SEQ ID NO: 101521 - RNA, 21 nt, Artificial Sequence
  Synthetic
auucuuaacgcuuuagugaag

SEQ ID NO: 101522 - RNA, 23 nt, Artificial Sequence
  Synthetic
agauucuuaacgcuuuagugaag

SEQ ID NO: 101523 - RNA, 24 nt, Artificial Sequence
  Synthetic
uagauucuuaacgcuuuagugaag

SEQ ID NO: 101524 - RNA, 18 nt, Artificial Sequence
  Synthetic
accaccuucuccgugaag

SEQ ID NO: 101525 - RNA, 19 nt, Artificial Sequence
  Synthetic
uaccaccuucuccgugaag

SEQ ID NO: 101526 - RNA, 20 nt, Artificial Sequence
  Synthetic
cuaccaccuucuccgugaag

SEQ ID NO: 101527 - RNA, 21 nt, Artificial Sequence
  Synthetic
ucuaccaccuucuccgugaag

SEQ ID NO: 101528 - RNA, 22 nt, Artificial Sequence
  Synthetic
aucuaccaccuucuccgugaag

SEQ ID NO: 101529 - RNA, 23 nt, Artificial Sequence
  Synthetic
aaucuaccaccuucuccgugaag

SEQ ID NO: 101530 - RNA, 24 nt, Artificial Sequence
  Synthetic
uaaucuaccaccuucuccgugaag

SEQ ID NO: 101531 - RNA, 21 nt, Artificial Sequence
  Synthetic
aaauaaaaaauuccugugaag

SEQ ID NO: 101532 - RNA, 22 nt, Artificial Sequence
  Synthetic
aaaauaaaaaauuccugugaag

SEQ ID NO: 101533 - RNA, 23 nt, Artificial Sequence
  Synthetic
uaaaauaaaaaauuccugugaag

SEQ ID NO: 101534 - RNA, 24 nt, Artificial Sequence
  Synthetic
uuaaaauaaaaaauuccugugaag

SEQ ID NO: 101535 - RNA, 19 nt, Artificial Sequence
  Synthetic
aggucuacacguugugaag

SEQ ID NO: 101536 - RNA, 20 nt, Artificial Sequence
  Synthetic
caggucuacacguugugaag

SEQ ID NO: 101537 - RNA, 21 nt, Artificial Sequence
  Synthetic
ucaggucuacacguugugaag

SEQ ID NO: 101538 - RNA, 22 nt, Artificial Sequence
  Synthetic
uucaggucuacacguugugaag

SEQ ID NO: 101539 - RNA, 23 nt, Artificial Sequence
  Synthetic
uuucaggucuacacguugugaag

SEQ ID NO: 101540 - RNA, 24 nt, Artificial Sequence
  Synthetic
auuucaggucuacacguugugaag

SEQ ID NO: 101541 - RNA, 18 nt, Artificial Sequence
  Synthetic
agagaauuuaaauugaag

SEQ ID NO: 101542 - RNA, 19 nt, Artificial Sequence
  Synthetic
uagagaauuuaaauugaag

SEQ ID NO: 101543 - RNA, 20 nt, Artificial Sequence
  Synthetic
auagagaauuuaaauugaag

SEQ ID NO: 101544 - RNA, 21 nt, Artificial Sequence
  Synthetic
aauagagaauuuaaauugaag

SEQ ID NO: 101545 - RNA, 22 nt, Artificial Sequence
  Synthetic
caauagagaauuuaaauugaag

SEQ ID NO: 101546 - RNA, 23 nt, Artificial Sequence
  Synthetic
acaauagagaauuuaaauugaag

SEQ ID NO: 101547 - RNA, 24 nt, Artificial Sequence
  Synthetic
cacaauagagaauuuaaauugaag

SEQ ID NO: 101548 - RNA, 21 nt, Artificial Sequence
  Synthetic
cuaauccuauguggauugaag

SEQ ID NO: 101549 - RNA, 22 nt, Artificial Sequence
  Synthetic
ccuaauccuauguggauugaag

SEQ ID NO: 101550 - RNA, 23 nt, Artificial Sequence
  Synthetic
cccuaauccuauguggauugaag

SEQ ID NO: 101551 - RNA, 24 nt, Artificial Sequence
  Synthetic
acccuaauccuauguggauugaag

SEQ ID NO: 101552 - RNA, 18 nt, Artificial Sequence
  Synthetic
cgcuaucccuucuugaag

SEQ ID NO: 101553 - RNA, 20 nt, Artificial Sequence
  Synthetic
agcgcuaucccuucuugaag

SEQ ID NO: 101554 - RNA, 21 nt, Artificial Sequence
  Synthetic
aagcgcuaucccuucuugaag

SEQ ID NO: 101555 - RNA, 22 nt, Artificial Sequence
  Synthetic
uaagcgcuaucccuucuugaag

SEQ ID NO: 101556 - RNA, 23 nt, Artificial Sequence
  Synthetic
auaagcgcuaucccuucuugaag

SEQ ID NO: 101557 - RNA, 24 nt, Artificial Sequence
  Synthetic
uauaagcgcuaucccuucuugaag

SEQ ID NO: 101558 - RNA, 18 nt, Artificial Sequence
  Synthetic
auuuguaugggguugaag

SEQ ID NO: 101559 - RNA, 19 nt, Artificial Sequence
  Synthetic
cauuuguaugggguugaag

SEQ ID NO: 101560 - RNA, 20 nt, Artificial Sequence
  Synthetic
acauuuguaugggguugaag

SEQ ID NO: 101561 - RNA, 18 nt, Artificial Sequence
  Synthetic
cuagagcaauuuuugaag

SEQ ID NO: 101562 - RNA, 19 nt, Artificial Sequence
  Synthetic
ucuagagcaauuuuugaag

SEQ ID NO: 101563 - RNA, 20 nt, Artificial Sequence
  Synthetic
uucuagagcaauuuuugaag

SEQ ID NO: 101564 - RNA, 21 nt, Artificial Sequence
  Synthetic
uuucuagagcaauuuuugaag

SEQ ID NO: 101565 - RNA, 23 nt, Artificial Sequence
  Synthetic
uguuucuagagcaauuuuugaag

SEQ ID NO: 101566 - RNA, 24 nt, Artificial Sequence
  Synthetic
uuguuucuagagcaauuuuugaag

SEQ ID NO: 101567 - RNA, 19 nt, Artificial Sequence
  Synthetic
aggagacaguaaaaauaag

SEQ ID NO: 101568 - RNA, 20 nt, Artificial Sequence
  Synthetic
uaggagacaguaaaaauaag

SEQ ID NO: 101569 - RNA, 21 nt, Artificial Sequence
  Synthetic
auaggagacaguaaaaauaag

SEQ ID NO: 101570 - RNA, 22 nt, Artificial Sequence
  Synthetic
aauaggagacaguaaaaauaag

SEQ ID NO: 101571 - RNA, 23 nt, Artificial Sequence
  Synthetic
caauaggagacaguaaaaauaag

SEQ ID NO: 101572 - RNA, 24 nt, Artificial Sequence
  Synthetic
acaauaggagacaguaaaaauaag

SEQ ID NO: 101573 - RNA, 22 nt, Artificial Sequence
  Synthetic
uguuaaagaauuugaaaauaag

SEQ ID NO: 101574 - RNA, 23 nt, Artificial Sequence
  Synthetic
uuguuaaagaauuugaaaauaag

SEQ ID NO: 101575 - RNA, 24 nt, Artificial Sequence
  Synthetic
auuguuaaagaauuugaaaauaag

SEQ ID NO: 101576 - RNA, 18 nt, Artificial Sequence
  Synthetic
uagaggugcuaaaauaag

SEQ ID NO: 101577 - RNA, 20 nt, Artificial Sequence
  Synthetic
aguagaggugcuaaaauaag

SEQ ID NO: 101578 - RNA, 21 nt, Artificial Sequence
  Synthetic
aaaacacaaagagcaaauaag

SEQ ID NO: 101579 - RNA, 22 nt, Artificial Sequence
  Synthetic
uaaaacacaaagagcaaauaag

SEQ ID NO: 101580 - RNA, 23 nt, Artificial Sequence
  Synthetic
auaaaacacaaagagcaaauaag

SEQ ID NO: 101581 - RNA, 24 nt, Artificial Sequence
  Synthetic
aauaaaacacaaagagcaaauaag

SEQ ID NO: 101582 - RNA, 19 nt, Artificial Sequence
  Synthetic
aguucuaaguggaaauaag

SEQ ID NO: 101583 - RNA, 20 nt, Artificial Sequence
  Synthetic
caguucuaaguggaaauaag

SEQ ID NO: 101584 - RNA, 21 nt, Artificial Sequence
  Synthetic
acaguucuaaguggaaauaag

SEQ ID NO: 101585 - RNA, 23 nt, Artificial Sequence
  Synthetic
agacaguucuaaguggaaauaag

SEQ ID NO: 101586 - RNA, 19 nt, Artificial Sequence
  Synthetic
agaaagccugaggaauaag

SEQ ID NO: 101587 - RNA, 20 nt, Artificial Sequence
  Synthetic
aagaaagccugaggaauaag

SEQ ID NO: 101588 - RNA, 22 nt, Artificial Sequence
  Synthetic
agaagaaagccugaggaauaag

SEQ ID NO: 101589 - RNA, 24 nt, Artificial Sequence
  Synthetic
ugagaagaaagccugaggaauaag

SEQ ID NO: 101590 - RNA, 18 nt, Artificial Sequence
  Synthetic
aaaagccacuggaauaag

SEQ ID NO: 101591 - RNA, 20 nt, Artificial Sequence
  Synthetic
ugaaaagccacuggaauaag

SEQ ID NO: 101592 - RNA, 21 nt, Artificial Sequence
  Synthetic
augaaaagccacuggaauaag

SEQ ID NO: 101593 - RNA, 22 nt, Artificial Sequence
  Synthetic
uaugaaaagccacuggaauaag

SEQ ID NO: 101594 - RNA, 19 nt, Artificial Sequence
  Synthetic
agggcagggcaugaauaag

SEQ ID NO: 101595 - RNA, 21 nt, Artificial Sequence
  Synthetic
agagggcagggcaugaauaag

SEQ ID NO: 101596 - RNA, 22 nt, Artificial Sequence
  Synthetic
uagagggcagggcaugaauaag

SEQ ID NO: 101597 - RNA, 23 nt, Artificial Sequence
  Synthetic
auagagggcagggcaugaauaag

SEQ ID NO: 101598 - RNA, 24 nt, Artificial Sequence
  Synthetic
aauagagggcagggcaugaauaag

SEQ ID NO: 101599 - RNA, 18 nt, Artificial Sequence
  Synthetic
cuagugcuuccuaauaag

SEQ ID NO: 101600 - RNA, 19 nt, Artificial Sequence
  Synthetic
ucuagugcuuccuaauaag

SEQ ID NO: 101601 - RNA, 21 nt, Artificial Sequence
  Synthetic
agucuagugcuuccuaauaag

SEQ ID NO: 101602 - RNA, 22 nt, Artificial Sequence
  Synthetic
cagucuagugcuuccuaauaag

SEQ ID NO: 101603 - RNA, 23 nt, Artificial Sequence
  Synthetic
ccagucuagugcuuccuaauaag

SEQ ID NO: 101604 - RNA, 24 nt, Artificial Sequence
  Synthetic
uccagucuagugcuuccuaauaag

SEQ ID NO: 101605 - RNA, 18 nt, Artificial Sequence
  Synthetic
cuugccccgaaccauaag

SEQ ID NO: 101606 - RNA, 19 nt, Artificial Sequence
  Synthetic
ucuugccccgaaccauaag

SEQ ID NO: 101607 - RNA, 22 nt, Artificial Sequence
  Synthetic
uggucuugccccgaaccauaag

SEQ ID NO: 101608 - RNA, 24 nt, Artificial Sequence
  Synthetic
aguggucuugccccgaaccauaag

SEQ ID NO: 101609 - RNA, 18 nt, Artificial Sequence
  Synthetic
aacuuccacauccauaag

SEQ ID NO: 101610 - RNA, 19 nt, Artificial Sequence
  Synthetic
caacuuccacauccauaag

SEQ ID NO: 101611 - RNA, 20 nt, Artificial Sequence
  Synthetic
ucaacuuccacauccauaag

SEQ ID NO: 101612 - RNA, 18 nt, Artificial Sequence
  Synthetic
agguacauuucgcauaag

SEQ ID NO: 101613 - RNA, 19 nt, Artificial Sequence
  Synthetic
aagguacauuucgcauaag

SEQ ID NO: 101614 - RNA, 20 nt, Artificial Sequence
  Synthetic
caagguacauuucgcauaag

SEQ ID NO: 101615 - RNA, 21 nt, Artificial Sequence
  Synthetic
acaagguacauuucgcauaag

SEQ ID NO: 101616 - RNA, 22 nt, Artificial Sequence
  Synthetic
uacaagguacauuucgcauaag

SEQ ID NO: 101617 - RNA, 23 nt, Artificial Sequence
  Synthetic
cuacaagguacauuucgcauaag

SEQ ID NO: 101618 - RNA, 24 nt, Artificial Sequence
  Synthetic
acuacaagguacauuucgcauaag

SEQ ID NO: 101619 - RNA, 18 nt, Artificial Sequence
  Synthetic
agaccaugaggucauaag

SEQ ID NO: 101620 - RNA, 19 nt, Artificial Sequence
  Synthetic
aagaccaugaggucauaag

SEQ ID NO: 101621 - RNA, 20 nt, Artificial Sequence
  Synthetic
aaagaccaugaggucauaag

SEQ ID NO: 101622 - RNA, 22 nt, Artificial Sequence
  Synthetic
cgaaagaccaugaggucauaag

SEQ ID NO: 101623 - RNA, 23 nt, Artificial Sequence
  Synthetic
acgaaagaccaugaggucauaag

SEQ ID NO: 101624 - RNA, 18 nt, Artificial Sequence
  Synthetic
aacaaaucacaagauaag

SEQ ID NO: 101625 - RNA, 19 nt, Artificial Sequence
  Synthetic
caacaaaucacaagauaag

SEQ ID NO: 101626 - RNA, 21 nt, Artificial Sequence
  Synthetic
agcaacaaaucacaagauaag

SEQ ID NO: 101627 - RNA, 22 nt, Artificial Sequence
  Synthetic
aagcaacaaaucacaagauaag

SEQ ID NO: 101628 - RNA, 23 nt, Artificial Sequence
  Synthetic
aaagcaacaaaucacaagauaag

SEQ ID NO: 101629 - RNA, 24 nt, Artificial Sequence
  Synthetic
caaagcaacaaaucacaagauaag

SEQ ID NO: 101630 - RNA, 19 nt, Artificial Sequence
  Synthetic
ugauaaaauagaauauaag

SEQ ID NO: 101631 - RNA, 21 nt, Artificial Sequence
  Synthetic
ugugauaaaauagaauauaag

SEQ ID NO: 101632 - RNA, 22 nt, Artificial Sequence
  Synthetic
augugauaaaauagaauauaag

SEQ ID NO: 101633 - RNA, 23 nt, Artificial Sequence
  Synthetic
aaugugauaaaauagaauauaag

SEQ ID NO: 101634 - RNA, 24 nt, Artificial Sequence
  Synthetic
aaaugugauaaaauagaauauaag

SEQ ID NO: 101635 - RNA, 19 nt, Artificial Sequence
  Synthetic
uguucugggaacauauaag

SEQ ID NO: 101636 - RNA, 20 nt, Artificial Sequence
  Synthetic
auguucugggaacauauaag

SEQ ID NO: 101637 - RNA, 21 nt, Artificial Sequence
  Synthetic
uauguucugggaacauauaag

SEQ ID NO: 101638 - RNA, 22 nt, Artificial Sequence
  Synthetic
uuauguucugggaacauauaag

SEQ ID NO: 101639 - RNA, 23 nt, Artificial Sequence
  Synthetic
auuauguucugggaacauauaag

SEQ ID NO: 101640 - RNA, 24 nt, Artificial Sequence
  Synthetic
cauuauguucugggaacauauaag

SEQ ID NO: 101641 - RNA, 18 nt, Artificial Sequence
  Synthetic
auuuagacaaucuauaag

SEQ ID NO: 101642 - RNA, 19 nt, Artificial Sequence
  Synthetic
aauuuagacaaucuauaag

SEQ ID NO: 101643 - RNA, 20 nt, Artificial Sequence
  Synthetic
caauuuagacaaucuauaag

SEQ ID NO: 101644 - RNA, 21 nt, Artificial Sequence
  Synthetic
ucaauuuagacaaucuauaag

SEQ ID NO: 101645 - RNA, 22 nt, Artificial Sequence
  Synthetic
aucaauuuagacaaucuauaag

SEQ ID NO: 101646 - RNA, 24 nt, Artificial Sequence
  Synthetic
ugaucaauuuagacaaucuauaag

SEQ ID NO: 101647 - RNA, 18 nt, Artificial Sequence
  Synthetic
aacuauugccuguauaag

SEQ ID NO: 101648 - RNA, 19 nt, Artificial Sequence
  Synthetic
aaacuauugccuguauaag

SEQ ID NO: 101649 - RNA, 20 nt, Artificial Sequence
  Synthetic
uaaacuauugccuguauaag

SEQ ID NO: 101650 - RNA, 21 nt, Artificial Sequence
  Synthetic
uuaaacuauugccuguauaag

SEQ ID NO: 101651 - RNA, 22 nt, Artificial Sequence
  Synthetic
uuuaaacuauugccuguauaag

SEQ ID NO: 101652 - RNA, 23 nt, Artificial Sequence
  Synthetic
auuuaaacuauugccuguauaag

SEQ ID NO: 101653 - RNA, 24 nt, Artificial Sequence
  Synthetic
cauuuaaacuauugccuguauaag

SEQ ID NO: 101654 - RNA, 18 nt, Artificial Sequence
  Synthetic
auacaaaguuauuauaag

SEQ ID NO: 101655 - RNA, 19 nt, Artificial Sequence
  Synthetic
aauacaaaguuauuauaag

SEQ ID NO: 101656 - RNA, 22 nt, Artificial Sequence
  Synthetic
uggaauacaaaguuauuauaag

SEQ ID NO: 101657 - RNA, 23 nt, Artificial Sequence
  Synthetic
uuggaauacaaaguuauuauaag

SEQ ID NO: 101658 - RNA, 24 nt, Artificial Sequence
  Synthetic
uuuggaauacaaaguuauuauaag

SEQ ID NO: 101659 - RNA, 19 nt, Artificial Sequence
  Synthetic
agggcuauuuuagacuaag

SEQ ID NO: 101660 - RNA, 20 nt, Artificial Sequence
  Synthetic
aagggcuauuuuagacuaag

SEQ ID NO: 101661 - RNA, 23 nt, Artificial Sequence
  Synthetic
uggaagggcuauuuuagacuaag

SEQ ID NO: 101662 - RNA, 18 nt, Artificial Sequence
  Synthetic
ccaacauaucugacuaag

SEQ ID NO: 101663 - RNA, 19 nt, Artificial Sequence
  Synthetic
cccaacauaucugacuaag

SEQ ID NO: 101664 - RNA, 20 nt, Artificial Sequence
  Synthetic
acccaacauaucugacuaag

SEQ ID NO: 101665 - RNA, 21 nt, Artificial Sequence
  Synthetic
aacccaacauaucugacuaag

SEQ ID NO: 101666 - RNA, 22 nt, Artificial Sequence
  Synthetic
caacccaacauaucugacuaag

SEQ ID NO: 101667 - RNA, 23 nt, Artificial Sequence
  Synthetic
ucaacccaacauaucugacuaag

SEQ ID NO: 101668 - RNA, 18 nt, Artificial Sequence
  Synthetic
aaguugcaauguacuaag

SEQ ID NO: 101669 - RNA, 19 nt, Artificial Sequence
  Synthetic
caaguugcaauguacuaag

SEQ ID NO: 101670 - RNA, 21 nt, Artificial Sequence
  Synthetic
ugcaaguugcaauguacuaag

SEQ ID NO: 101671 - RNA, 24 nt, Artificial Sequence
  Synthetic
aggugcaaguugcaauguacuaag

SEQ ID NO: 101672 - RNA, 18 nt, Artificial Sequence
  Synthetic
ccgagugacuaagcuaag

SEQ ID NO: 101673 - RNA, 19 nt, Artificial Sequence
  Synthetic
cccgagugacuaagcuaag

SEQ ID NO: 101674 - RNA, 20 nt, Artificial Sequence
  Synthetic
ccccgagugacuaagcuaag

SEQ ID NO: 101675 - RNA, 21 nt, Artificial Sequence
  Synthetic
uccccgagugacuaagcuaag

SEQ ID NO: 101676 - RNA, 24 nt, Artificial Sequence
  Synthetic
ugguccccgagugacuaagcuaag

SEQ ID NO: 101677 - RNA, 20 nt, Artificial Sequence
  Synthetic
cgggcuacucuuacgcuaag

SEQ ID NO: 101678 - RNA, 21 nt, Artificial Sequence
  Synthetic
ucgggcuacucuuacgcuaag

SEQ ID NO: 101679 - RNA, 23 nt, Artificial Sequence
  Synthetic
ugucgggcuacucuuacgcuaag

SEQ ID NO: 101680 - RNA, 24 nt, Artificial Sequence
  Synthetic
cugucgggcuacucuuacgcuaag

SEQ ID NO: 101681 - RNA, 18 nt, Artificial Sequence
  Synthetic
ccuauucauggggcuaag

SEQ ID NO: 101682 - RNA, 19 nt, Artificial Sequence
  Synthetic
cccuauucauggggcuaag

SEQ ID NO: 101683 - RNA, 20 nt, Artificial Sequence
  Synthetic
acccuauucauggggcuaag

SEQ ID NO: 101684 - RNA, 21 nt, Artificial Sequence
  Synthetic
cacccuauucauggggcuaag

SEQ ID NO: 101685 - RNA, 22 nt, Artificial Sequence
  Synthetic
ucacccuauucauggggcuaag

SEQ ID NO: 101686 - RNA, 23 nt, Artificial Sequence
  Synthetic
uucacccuauucauggggcuaag

SEQ ID NO: 101687 - RNA, 24 nt, Artificial Sequence
  Synthetic
uuucacccuauucauggggcuaag

SEQ ID NO: 101688 - RNA, 18 nt, Artificial Sequence
  Synthetic
cucuggaucuuuucuaag

SEQ ID NO: 101689 - RNA, 19 nt, Artificial Sequence
  Synthetic
ccucuggaucuuuucuaag

SEQ ID NO: 101690 - RNA, 20 nt, Artificial Sequence
  Synthetic
accucuggaucuuuucuaag

SEQ ID NO: 101691 - RNA, 21 nt, Artificial Sequence
  Synthetic
uaccucuggaucuuuucuaag

SEQ ID NO: 101692 - RNA, 23 nt, Artificial Sequence
  Synthetic
uguaccucuggaucuuuucuaag

SEQ ID NO: 101693 - RNA, 24 nt, Artificial Sequence
  Synthetic
uuguaccucuggaucuuuucuaag

SEQ ID NO: 101694 - RNA, 18 nt, Artificial Sequence
  Synthetic
caaucuguguuuucuaag

SEQ ID NO: 101695 - RNA, 21 nt, Artificial Sequence
  Synthetic
aggcaaucuguguuuucuaag

SEQ ID NO: 101696 - RNA, 24 nt, Artificial Sequence
  Synthetic
aggaggcaaucuguguuuucuaag

SEQ ID NO: 101697 - RNA, 18 nt, Artificial Sequence
  Synthetic
cauaacuuugaaaguaag

SEQ ID NO: 101698 - RNA, 19 nt, Artificial Sequence
  Synthetic
ucauaacuuugaaaguaag

SEQ ID NO: 101699 - RNA, 20 nt, Artificial Sequence
  Synthetic
uucauaacuuugaaaguaag

SEQ ID NO: 101700 - RNA, 21 nt, Artificial Sequence
  Synthetic
cuucauaacuuugaaaguaag

SEQ ID NO: 101701 - RNA, 22 nt, Artificial Sequence
  Synthetic
ucuucauaacuuugaaaguaag

SEQ ID NO: 101702 - RNA, 23 nt, Artificial Sequence
  Synthetic
uucuucauaacuuugaaaguaag

SEQ ID NO: 101703 - RNA, 24 nt, Artificial Sequence
  Synthetic
uuucuucauaacuuugaaaguaag

SEQ ID NO: 101704 - RNA, 18 nt, Artificial Sequence
  Synthetic
ugcucagaaagaaguaag

SEQ ID NO: 101705 - RNA, 19 nt, Artificial Sequence
  Synthetic
cugcucagaaagaaguaag

SEQ ID NO: 101706 - RNA, 20 nt, Artificial Sequence
  Synthetic
ucugcucagaaagaaguaag

SEQ ID NO: 101707 - RNA, 21 nt, Artificial Sequence
  Synthetic
uucugcucagaaagaaguaag

SEQ ID NO: 101708 - RNA, 22 nt, Artificial Sequence
  Synthetic
uuucugcucagaaagaaguaag

SEQ ID NO: 101709 - RNA, 24 nt, Artificial Sequence
  Synthetic
uguuucugcucagaaagaaguaag

SEQ ID NO: 101710 - RNA, 19 nt, Artificial Sequence
  Synthetic
aguuucauguuucaguaag

SEQ ID NO: 101711 - RNA, 20 nt, Artificial Sequence
  Synthetic
uaguuucauguuucaguaag

SEQ ID NO: 101712 - RNA, 22 nt, Artificial Sequence
  Synthetic
uguaguuucauguuucaguaag

SEQ ID NO: 101713 - RNA, 23 nt, Artificial Sequence
  Synthetic
uuguaguuucauguuucaguaag

SEQ ID NO: 101714 - RNA, 24 nt, Artificial Sequence
  Synthetic
uuuguaguuucauguuucaguaag

SEQ ID NO: 101715 - RNA, 18 nt, Artificial Sequence
  Synthetic
aauagggaauauaguaag

SEQ ID NO: 101716 - RNA, 19 nt, Artificial Sequence
  Synthetic
aaauagggaauauaguaag

SEQ ID NO: 101717 - RNA, 20 nt, Artificial Sequence
  Synthetic
aaaauagggaauauaguaag

SEQ ID NO: 101718 - RNA, 21 nt, Artificial Sequence
  Synthetic
aaaaauagggaauauaguaag

SEQ ID NO: 101719 - RNA, 22 nt, Artificial Sequence
  Synthetic
caaaaauagggaauauaguaag

SEQ ID NO: 101720 - RNA, 23 nt, Artificial Sequence
  Synthetic
acaaaaauagggaauauaguaag

SEQ ID NO: 101721 - RNA, 24 nt, Artificial Sequence
  Synthetic
cacaaaaauagggaauauaguaag

SEQ ID NO: 101722 - RNA, 18 nt, Artificial Sequence
  Synthetic
auacuaaaaccuaguaag

SEQ ID NO: 101723 - RNA, 19 nt, Artificial Sequence
  Synthetic
aauacuaaaaccuaguaag

SEQ ID NO: 101724 - RNA, 24 nt, Artificial Sequence
  Synthetic
aggggaauacuaaaaccuaguaag

SEQ ID NO: 101725 - RNA, 20 nt, Artificial Sequence
  Synthetic
uggaaguauugggacguaag

SEQ ID NO: 101726 - RNA, 21 nt, Artificial Sequence
  Synthetic
auggaaguauugggacguaag

SEQ ID NO: 101727 - RNA, 23 nt, Artificial Sequence
  Synthetic
agauggaaguauugggacguaag

SEQ ID NO: 101728 - RNA, 24 nt, Artificial Sequence
  Synthetic
cagauggaaguauugggacguaag

SEQ ID NO: 101729 - RNA, 23 nt, Artificial Sequence
  Synthetic
ugggggucagaauuuuagguaag

SEQ ID NO: 101730 - RNA, 18 nt, Artificial Sequence
  Synthetic
caauauuugugggguaag

SEQ ID NO: 101731 - RNA, 20 nt, Artificial Sequence
  Synthetic
ugcaauauuugugggguaag

SEQ ID NO: 101732 - RNA, 21 nt, Artificial Sequence
  Synthetic
uugcaauauuugugggguaag

SEQ ID NO: 101733 - RNA, 22 nt, Artificial Sequence
  Synthetic
auugcaauauuugugggguaag

SEQ ID NO: 101734 - RNA, 23 nt, Artificial Sequence
  Synthetic
cauugcaauauuugugggguaag

SEQ ID NO: 101735 - RNA, 24 nt, Artificial Sequence
  Synthetic
ucauugcaauauuugugggguaag

SEQ ID NO: 101736 - RNA, 21 nt, Artificial Sequence
  Synthetic
uagcacuuugggaaauguaag

SEQ ID NO: 101737 - RNA, 22 nt, Artificial Sequence
  Synthetic
uuagcacuuugggaaauguaag

SEQ ID NO: 101738 - RNA, 23 nt, Artificial Sequence
  Synthetic
uuuagcacuuugggaaauguaag

SEQ ID NO: 101739 - RNA, 24 nt, Artificial Sequence
  Synthetic
uuuuagcacuuugggaaauguaag

SEQ ID NO: 101740 - RNA, 18 nt, Artificial Sequence
  Synthetic
auacuggaguucuguaag

SEQ ID NO: 101741 - RNA, 19 nt, Artificial Sequence
  Synthetic
aauacuggaguucuguaag

SEQ ID NO: 101742 - RNA, 20 nt, Artificial Sequence
  Synthetic
aaauacuggaguucuguaag

SEQ ID NO: 101743 - RNA, 21 nt, Artificial Sequence
  Synthetic
aaaauacuggaguucuguaag

SEQ ID NO: 101744 - RNA, 22 nt, Artificial Sequence
  Synthetic
caaaauacuggaguucuguaag

SEQ ID NO: 101745 - RNA, 23 nt, Artificial Sequence
  Synthetic
ccaaaauacuggaguucuguaag

SEQ ID NO: 101746 - RNA, 24 nt, Artificial Sequence
  Synthetic
accaaaauacuggaguucuguaag

SEQ ID NO: 101747 - RNA, 18 nt, Artificial Sequence
  Synthetic
uugguagaaaaguguaag

SEQ ID NO: 101748 - RNA, 19 nt, Artificial Sequence
  Synthetic
uuugguagaaaaguguaag

SEQ ID NO: 101749 - RNA, 21 nt, Artificial Sequence
  Synthetic
uguuugguagaaaaguguaag

SEQ ID NO: 101750 - RNA, 22 nt, Artificial Sequence
  Synthetic
auguuugguagaaaaguguaag

SEQ ID NO: 101751 - RNA, 23 nt, Artificial Sequence
  Synthetic
uauguuugguagaaaaguguaag

SEQ ID NO: 101752 - RNA, 18 nt, Artificial Sequence
  Synthetic
caucuuagaacaauuaag

SEQ ID NO: 101753 - RNA, 19 nt, Artificial Sequence
  Synthetic
ccaucuuagaacaauuaag

SEQ ID NO: 101754 - RNA, 20 nt, Artificial Sequence
  Synthetic
uccaucuuagaacaauuaag

SEQ ID NO: 101755 - RNA, 21 nt, Artificial Sequence
  Synthetic
auccaucuuagaacaauuaag

SEQ ID NO: 101756 - RNA, 22 nt, Artificial Sequence
  Synthetic
uauccaucuuagaacaauuaag

SEQ ID NO: 101757 - RNA, 23 nt, Artificial Sequence
  Synthetic
auauccaucuuagaacaauuaag

SEQ ID NO: 101758 - RNA, 18 nt, Artificial Sequence
  Synthetic
uaauuuuugagaauuaag

SEQ ID NO: 101759 - RNA, 21 nt, Artificial Sequence
  Synthetic
ugguaauuuuugagaauuaag

SEQ ID NO: 101760 - RNA, 22 nt, Artificial Sequence
  Synthetic
augguaauuuuugagaauuaag

SEQ ID NO: 101761 - RNA, 23 nt, Artificial Sequence
  Synthetic
caugguaauuuuugagaauuaag

SEQ ID NO: 101762 - RNA, 18 nt, Artificial Sequence
  Synthetic
cucaaaagggacauuaag

SEQ ID NO: 101763 - RNA, 19 nt, Artificial Sequence
  Synthetic
acucaaaagggacauuaag

SEQ ID NO: 101764 - RNA, 20 nt, Artificial Sequence
  Synthetic
aacucaaaagggacauuaag

SEQ ID NO: 101765 - RNA, 21 nt, Artificial Sequence
  Synthetic
aaacucaaaagggacauuaag

SEQ ID NO: 101766 - RNA, 22 nt, Artificial Sequence
  Synthetic
aaaacucaaaagggacauuaag

SEQ ID NO: 101767 - RNA, 24 nt, Artificial Sequence
  Synthetic
agaaaacucaaaagggacauuaag

SEQ ID NO: 101768 - RNA, 18 nt, Artificial Sequence
  Synthetic
agaaauaaacauauuaag

SEQ ID NO: 101769 - RNA, 19 nt, Artificial Sequence
  Synthetic
uagaaauaaacauauuaag

SEQ ID NO: 101770 - RNA, 20 nt, Artificial Sequence
  Synthetic
uuagaaauaaacauauuaag

SEQ ID NO: 101771 - RNA, 21 nt, Artificial Sequence
  Synthetic
uuuagaaauaaacauauuaag

SEQ ID NO: 101772 - RNA, 22 nt, Artificial Sequence
  Synthetic
uuuuagaaauaaacauauuaag

SEQ ID NO: 101773 - RNA, 24 nt, Artificial Sequence
  Synthetic
uguuuuagaaauaaacauauuaag

SEQ ID NO: 101774 - RNA, 18 nt, Artificial Sequence
  Synthetic
auugauaacaguauuaag

SEQ ID NO: 101775 - RNA, 19 nt, Artificial Sequence
  Synthetic
uauugauaacaguauuaag

SEQ ID NO: 101776 - RNA, 20 nt, Artificial Sequence
  Synthetic
uuauugauaacaguauuaag

SEQ ID NO: 101777 - RNA, 21 nt, Artificial Sequence
  Synthetic
uuuauugauaacaguauuaag

SEQ ID NO: 101778 - RNA, 22 nt, Artificial Sequence
  Synthetic
auuuauugauaacaguauuaag

SEQ ID NO: 101779 - RNA, 23 nt, Artificial Sequence
  Synthetic
aauuuauugauaacaguauuaag

SEQ ID NO: 101780 - RNA, 18 nt, Artificial Sequence
  Synthetic
acugguggucaucuuaag

SEQ ID NO: 101781 - RNA, 19 nt, Artificial Sequence
  Synthetic
aacugguggucaucuuaag

SEQ ID NO: 101782 - RNA, 22 nt, Artificial Sequence
  Synthetic
uggaacugguggucaucuuaag

SEQ ID NO: 101783 - RNA, 23 nt, Artificial Sequence
  Synthetic
auggaacugguggucaucuuaag

SEQ ID NO: 101784 - RNA, 19 nt, Artificial Sequence
  Synthetic
ugagguaauagcaguuaag

SEQ ID NO: 101785 - RNA, 20 nt, Artificial Sequence
  Synthetic
uugagguaauagcaguuaag

SEQ ID NO: 101786 - RNA, 21 nt, Artificial Sequence
  Synthetic
auugagguaauagcaguuaag

SEQ ID NO: 101787 - RNA, 22 nt, Artificial Sequence
  Synthetic
cauugagguaauagcaguuaag

SEQ ID NO: 101788 - RNA, 23 nt, Artificial Sequence
  Synthetic
ucauugagguaauagcaguuaag

SEQ ID NO: 101789 - RNA, 24 nt, Artificial Sequence
  Synthetic
uucauugagguaauagcaguuaag

SEQ ID NO: 101790 - RNA, 18 nt, Artificial Sequence
  Synthetic
cauuacauuucaguuaag

SEQ ID NO: 101791 - RNA, 19 nt, Artificial Sequence
  Synthetic
acauuacauuucaguuaag

SEQ ID NO: 101792 - RNA, 21 nt, Artificial Sequence
  Synthetic
agacauuacauuucaguuaag

SEQ ID NO: 101793 - RNA, 22 nt, Artificial Sequence
  Synthetic
cagacauuacauuucaguuaag

SEQ ID NO: 101794 - RNA, 23 nt, Artificial Sequence
  Synthetic
acagacauuacauuucaguuaag

SEQ ID NO: 101795 - RNA, 24 nt, Artificial Sequence
  Synthetic
aacagacauuacauuucaguuaag

SEQ ID NO: 101796 - RNA, 18 nt, Artificial Sequence
  Synthetic
uaagacgaggguguuaag

SEQ ID NO: 101797 - RNA, 19 nt, Artificial Sequence
  Synthetic
cuaagacgaggguguuaag

SEQ ID NO: 101798 - RNA, 20 nt, Artificial Sequence
  Synthetic
ucuaagacgaggguguuaag

SEQ ID NO: 101799 - RNA, 21 nt, Artificial Sequence
  Synthetic
uucuaagacgaggguguuaag

SEQ ID NO: 101800 - RNA, 22 nt, Artificial Sequence
  Synthetic
uuucuaagacgaggguguuaag

SEQ ID NO: 101801 - RNA, 23 nt, Artificial Sequence
  Synthetic
uuuucuaagacgaggguguuaag

SEQ ID NO: 101802 - RNA, 24 nt, Artificial Sequence
  Synthetic
uuuuucuaagacgaggguguuaag

SEQ ID NO: 101803 - RNA, 18 nt, Artificial Sequence
  Synthetic
aagacuacuguuguuaag

SEQ ID NO: 101804 - RNA, 20 nt, Artificial Sequence
  Synthetic
cgaagacuacuguuguuaag

SEQ ID NO: 101805 - RNA, 21 nt, Artificial Sequence
  Synthetic
acgaagacuacuguuguuaag

SEQ ID NO: 101806 - RNA, 22 nt, Artificial Sequence
  Synthetic
aacgaagacuacuguuguuaag

SEQ ID NO: 101807 - RNA, 23 nt, Artificial Sequence
  Synthetic
aaacgaagacuacuguuguuaag

SEQ ID NO: 101808 - RNA, 24 nt, Artificial Sequence
  Synthetic
caaacgaagacuacuguuguuaag

SEQ ID NO: 101809 - RNA, 22 nt, Artificial Sequence
  Synthetic
uguucauugauaggcauuuaag

SEQ ID NO: 101810 - RNA, 23 nt, Artificial Sequence
  Synthetic
cuguucauugauaggcauuuaag

SEQ ID NO: 101811 - RNA, 24 nt, Artificial Sequence
  Synthetic
ucuguucauugauaggcauuuaag

SEQ ID NO: 101812 - RNA, 19 nt, Artificial Sequence
  Synthetic
uggaaacacuaacuuuaag

SEQ ID NO: 101813 - RNA, 20 nt, Artificial Sequence
  Synthetic
uuggaaacacuaacuuuaag

SEQ ID NO: 101814 - RNA, 21 nt, Artificial Sequence
  Synthetic
cuuggaaacacuaacuuuaag

SEQ ID NO: 101815 - RNA, 22 nt, Artificial Sequence
  Synthetic
ccuuggaaacacuaacuuuaag

SEQ ID NO: 101816 - RNA, 23 nt, Artificial Sequence
  Synthetic
uccuuggaaacacuaacuuuaag

SEQ ID NO: 101817 - RNA, 24 nt, Artificial Sequence
  Synthetic
uuccuuggaaacacuaacuuuaag

SEQ ID NO: 101818 - RNA, 18 nt, Artificial Sequence
  Synthetic
cauugcuucuuguuuaag

SEQ ID NO: 101819 - RNA, 19 nt, Artificial Sequence
  Synthetic
ccauugcuucuuguuuaag

SEQ ID NO: 101820 - RNA, 20 nt, Artificial Sequence
  Synthetic
cccauugcuucuuguuuaag

SEQ ID NO: 101821 - RNA, 21 nt, Artificial Sequence
  Synthetic
acccauugcuucuuguuuaag

SEQ ID NO: 101822 - RNA, 22 nt, Artificial Sequence
  Synthetic
aacccauugcuucuuguuuaag

SEQ ID NO: 101823 - RNA, 23 nt, Artificial Sequence
  Synthetic
aaacccauugcuucuuguuuaag

SEQ ID NO: 101824 - RNA, 24 nt, Artificial Sequence
  Synthetic
aaaacccauugcuucuuguuuaag

SEQ ID NO: 101825 - RNA, 19 nt, Artificial Sequence
  Synthetic
aguugcacaguauuuuaag

SEQ ID NO: 101826 - RNA, 20 nt, Artificial Sequence
  Synthetic
uaguugcacaguauuuuaag

SEQ ID NO: 101827 - RNA, 21 nt, Artificial Sequence
  Synthetic
uuaguugcacaguauuuuaag

SEQ ID NO: 101828 - RNA, 22 nt, Artificial Sequence
  Synthetic
uuuaguugcacaguauuuuaag

SEQ ID NO: 101829 - RNA, 24 nt, Artificial Sequence
  Synthetic
aguuuaguugcacaguauuuuaag

SEQ ID NO: 101830 - RNA, 18 nt, Artificial Sequence
  Synthetic
cugccugguacuuuuaag

SEQ ID NO: 101831 - RNA, 19 nt, Artificial Sequence
  Synthetic
ucugccugguacuuuuaag

SEQ ID NO: 101832 - RNA, 21 nt, Artificial Sequence
  Synthetic
ugucugccugguacuuuuaag

SEQ ID NO: 101833 - RNA, 22 nt, Artificial Sequence
  Synthetic
augucugccugguacuuuuaag

SEQ ID NO: 101834 - RNA, 23 nt, Artificial Sequence
  Synthetic
uaugucugccugguacuuuuaag

SEQ ID NO: 101835 - RNA, 24 nt, Artificial Sequence
  Synthetic
auaugucugccugguacuuuuaag

SEQ ID NO: 101836 - RNA, 21 nt, Artificial Sequence
  Synthetic
agggacugugacucuuuuaag

SEQ ID NO: 101837 - RNA, 22 nt, Artificial Sequence
  Synthetic
uagggacugugacucuuuuaag

SEQ ID NO: 101838 - RNA, 23 nt, Artificial Sequence
  Synthetic
uuagggacugugacucuuuuaag

SEQ ID NO: 101839 - RNA, 24 nt, Artificial Sequence
  Synthetic
uuuagggacugugacucuuuuaag

SEQ ID NO: 101840 - RNA, 18 nt, Artificial Sequence
  Synthetic
uaaucuuuccuuuuuaag

SEQ ID NO: 101841 - RNA, 19 nt, Artificial Sequence
  Synthetic
uuaaucuuuccuuuuuaag

SEQ ID NO: 101842 - RNA, 20 nt, Artificial Sequence
  Synthetic
auuaaucuuuccuuuuuaag

SEQ ID NO: 101843 - RNA, 21 nt, Artificial Sequence
  Synthetic
uauuaaucuuuccuuuuuaag

SEQ ID NO: 101844 - RNA, 22 nt, Artificial Sequence
  Synthetic
uuauuaaucuuuccuuuuuaag

SEQ ID NO: 101845 - RNA, 23 nt, Artificial Sequence
  Synthetic
auuauuaaucuuuccuuuuuaag

SEQ ID NO: 101846 - RNA, 24 nt, Artificial Sequence
  Synthetic
cauuauuaaucuuuccuuuuuaag

SEQ ID NO: 101847 - RNA, 18 nt, Artificial Sequence
  Synthetic
uucaugcaucuuuuuaag

SEQ ID NO: 101848 - RNA, 19 nt, Artificial Sequence
  Synthetic
cuucaugcaucuuuuuaag

SEQ ID NO: 101849 - RNA, 20 nt, Artificial Sequence
  Synthetic
ccuucaugcaucuuuuuaag

SEQ ID NO: 101850 - RNA, 21 nt, Artificial Sequence
  Synthetic
accuucaugcaucuuuuuaag

SEQ ID NO: 101851 - RNA, 22 nt, Artificial Sequence
  Synthetic
uaccuucaugcaucuuuuuaag

SEQ ID NO: 101852 - RNA, 23 nt, Artificial Sequence
  Synthetic
uuaccuucaugcaucuuuuuaag

SEQ ID NO: 101853 - RNA, 24 nt, Artificial Sequence
  Synthetic
uuuaccuucaugcaucuuuuuaag

SEQ ID NO: 101854 - RNA, 18 nt, Artificial Sequence
  Synthetic
uuggugguuugaaaacag

SEQ ID NO: 101855 - RNA, 20 nt, Artificial Sequence
  Synthetic
uguuggugguuugaaaacag

SEQ ID NO: 101856 - RNA, 21 nt, Artificial Sequence
  Synthetic
cuguuggugguuugaaaacag

SEQ ID NO: 101857 - RNA, 23 nt, Artificial Sequence
  Synthetic
ugcuguuggugguuugaaaacag

SEQ ID NO: 101858 - RNA, 24 nt, Artificial Sequence
  Synthetic
uugcuguuggugguuugaaaacag

SEQ ID NO: 101859 - RNA, 23 nt, Artificial Sequence
  Synthetic
ugguuuuuuucacccuaaaacag

SEQ ID NO: 101860 - RNA, 24 nt, Artificial Sequence
  Synthetic
augguuuuuuucacccuaaaacag

SEQ ID NO: 101861 - RNA, 19 nt, Artificial Sequence
  Synthetic
ugagaauauggagaaacag

SEQ ID NO: 101862 - RNA, 20 nt, Artificial Sequence
  Synthetic
uugagaauauggagaaacag

SEQ ID NO: 101863 - RNA, 21 nt, Artificial Sequence
  Synthetic
uuugagaauauggagaaacag

SEQ ID NO: 101864 - RNA, 22 nt, Artificial Sequence
  Synthetic
cuuugagaauauggagaaacag

SEQ ID NO: 101865 - RNA, 23 nt, Artificial Sequence
  Synthetic
acuuugagaauauggagaaacag

SEQ ID NO: 101866 - RNA, 24 nt, Artificial Sequence
  Synthetic
uacuuugagaauauggagaaacag

SEQ ID NO: 101867 - RNA, 18 nt, Artificial Sequence
  Synthetic
cacugacacauuaaacag

SEQ ID NO: 101868 - RNA, 19 nt, Artificial Sequence
  Synthetic
ucacugacacauuaaacag

SEQ ID NO: 101869 - RNA, 20 nt, Artificial Sequence
  Synthetic
uucacugacacauuaaacag

SEQ ID NO: 101870 - RNA, 21 nt, Artificial Sequence
  Synthetic
uuucacugacacauuaaacag

SEQ ID NO: 101871 - RNA, 22 nt, Artificial Sequence
  Synthetic
uuuucacugacacauuaaacag

SEQ ID NO: 101872 - RNA, 23 nt, Artificial Sequence
  Synthetic
auuuucacugacacauuaaacag

SEQ ID NO: 101873 - RNA, 24 nt, Artificial Sequence
  Synthetic
aauuuucacugacacauuaaacag

SEQ ID NO: 101874 - RNA, 19 nt, Artificial Sequence
  Synthetic
aggaaaucccaaacaacag

SEQ ID NO: 101875 - RNA, 20 nt, Artificial Sequence
  Synthetic
aaggaaaucccaaacaacag

SEQ ID NO: 101876 - RNA, 21 nt, Artificial Sequence
  Synthetic
uaaggaaaucccaaacaacag

SEQ ID NO: 101877 - RNA, 22 nt, Artificial Sequence
  Synthetic
uuaaggaaaucccaaacaacag

SEQ ID NO: 101878 - RNA, 23 nt, Artificial Sequence
  Synthetic
uuuaaggaaaucccaaacaacag

SEQ ID NO: 101879 - RNA, 24 nt, Artificial Sequence
  Synthetic
auuuaaggaaaucccaaacaacag

SEQ ID NO: 101880 - RNA, 19 nt, Artificial Sequence
  Synthetic
ugaaacuuaccaacaacag

SEQ ID NO: 101881 - RNA, 20 nt, Artificial Sequence
  Synthetic
cugaaacuuaccaacaacag

SEQ ID NO: 101882 - RNA, 21 nt, Artificial Sequence
  Synthetic
acugaaacuuaccaacaacag

SEQ ID NO: 101883 - RNA, 22 nt, Artificial Sequence
  Synthetic
aacugaaacuuaccaacaacag

SEQ ID NO: 101884 - RNA, 18 nt, Artificial Sequence
  Synthetic
uguuuuuauccacaacag

SEQ ID NO: 101885 - RNA, 19 nt, Artificial Sequence
  Synthetic
cuguuuuuauccacaacag

SEQ ID NO: 101886 - RNA, 20 nt, Artificial Sequence
  Synthetic
ucuguuuuuauccacaacag

SEQ ID NO: 101887 - RNA, 22 nt, Artificial Sequence
  Synthetic
ugucuguuuuuauccacaacag

SEQ ID NO: 101888 - RNA, 23 nt, Artificial Sequence
  Synthetic
augucuguuuuuauccacaacag

SEQ ID NO: 101889 - RNA, 24 nt, Artificial Sequence
  Synthetic
uaugucuguuuuuauccacaacag

SEQ ID NO: 101890 - RNA, 18 nt, Artificial Sequence
  Synthetic
aaaaauauucaccaacag

SEQ ID NO: 101891 - RNA, 20 nt, Artificial Sequence
  Synthetic
agaaaaauauucaccaacag

SEQ ID NO: 101892 - RNA, 21 nt, Artificial Sequence
  Synthetic
cagaaaaauauucaccaacag

SEQ ID NO: 101893 - RNA, 23 nt, Artificial Sequence
  Synthetic
agcagaaaaauauucaccaacag

SEQ ID NO: 101894 - RNA, 24 nt, Artificial Sequence
  Synthetic
uagcagaaaaauauucaccaacag

SEQ ID NO: 101895 - RNA, 18 nt, Artificial Sequence
  Synthetic
cccaagccccgccaacag

SEQ ID NO: 101896 - RNA, 20 nt, Artificial Sequence
  Synthetic
agcccaagccccgccaacag

SEQ ID NO: 101897 - RNA, 21 nt, Artificial Sequence
  Synthetic
aagcccaagccccgccaacag

SEQ ID NO: 101898 - RNA, 23 nt, Artificial Sequence
  Synthetic
agaagcccaagccccgccaacag

SEQ ID NO: 101899 - RNA, 24 nt, Artificial Sequence
  Synthetic
uagaagcccaagccccgccaacag

SEQ ID NO: 101900 - RNA, 18 nt, Artificial Sequence
  Synthetic
ccagggugucaucaacag

SEQ ID NO: 101901 - RNA, 19 nt, Artificial Sequence
  Synthetic
uccagggugucaucaacag

SEQ ID NO: 101902 - RNA, 20 nt, Artificial Sequence
  Synthetic
cuccagggugucaucaacag

SEQ ID NO: 101903 - RNA, 21 nt, Artificial Sequence
  Synthetic
ucuccagggugucaucaacag

SEQ ID NO: 101904 - RNA, 22 nt, Artificial Sequence
  Synthetic
aucuccagggugucaucaacag

SEQ ID NO: 101905 - RNA, 23 nt, Artificial Sequence
  Synthetic
aaucuccagggugucaucaacag

SEQ ID NO: 101906 - RNA, 24 nt, Artificial Sequence
  Synthetic
aaaucuccagggugucaucaacag

SEQ ID NO: 101907 - RNA, 18 nt, Artificial Sequence
  Synthetic
ugguaccgggaugaacag

SEQ ID NO: 101908 - RNA, 19 nt, Artificial Sequence
  Synthetic
augguaccgggaugaacag

SEQ ID NO: 101909 - RNA, 21 nt, Artificial Sequence
  Synthetic
agaugguaccgggaugaacag

SEQ ID NO: 101910 - RNA, 22 nt, Artificial Sequence
  Synthetic
aagaugguaccgggaugaacag

SEQ ID NO: 101911 - RNA, 23 nt, Artificial Sequence
  Synthetic
aaagaugguaccgggaugaacag

SEQ ID NO: 101912 - RNA, 24 nt, Artificial Sequence
  Synthetic
aaaagaugguaccgggaugaacag

SEQ ID NO: 101913 - RNA, 18 nt, Artificial Sequence
  Synthetic
acauuagcuguugaacag

SEQ ID NO: 101914 - RNA, 20 nt, Artificial Sequence
  Synthetic
agacauuagcuguugaacag

SEQ ID NO: 101915 - RNA, 21 nt, Artificial Sequence
  Synthetic
aagacauuagcuguugaacag

SEQ ID NO: 101916 - RNA, 22 nt, Artificial Sequence
  Synthetic
caagacauuagcuguugaacag

SEQ ID NO: 101917 - RNA, 23 nt, Artificial Sequence
  Synthetic
acaagacauuagcuguugaacag

SEQ ID NO: 101918 - RNA, 24 nt, Artificial Sequence
  Synthetic
uacaagacauuagcuguugaacag

SEQ ID NO: 101919 - RNA, 21 nt, Artificial Sequence
  Synthetic
caaguguucaauaaauaacag

SEQ ID NO: 101920 - RNA, 23 nt, Artificial Sequence
  Synthetic
agcaaguguucaauaaauaacag

SEQ ID NO: 101921 - RNA, 24 nt, Artificial Sequence
  Synthetic
cagcaaguguucaauaaauaacag

SEQ ID NO: 101922 - RNA, 21 nt, Artificial Sequence
  Synthetic
uuuuuuucuuaaggauaacag

SEQ ID NO: 101923 - RNA, 22 nt, Artificial Sequence
  Synthetic
auuuuuuucuuaaggauaacag

SEQ ID NO: 101924 - RNA, 23 nt, Artificial Sequence
  Synthetic
aauuuuuuucuuaaggauaacag

SEQ ID NO: 101925 - RNA, 24 nt, Artificial Sequence
  Synthetic
aaauuuuuuucuuaaggauaacag

SEQ ID NO: 101926 - RNA, 18 nt, Artificial Sequence
  Synthetic
caaaccuguaccuaacag

SEQ ID NO: 101927 - RNA, 19 nt, Artificial Sequence
  Synthetic
ccaaaccuguaccuaacag

SEQ ID NO: 101928 - RNA, 20 nt, Artificial Sequence
  Synthetic
accaaaccuguaccuaacag

SEQ ID NO: 101929 - RNA, 21 nt, Artificial Sequence
  Synthetic
caccaaaccuguaccuaacag

SEQ ID NO: 101930 - RNA, 22 nt, Artificial Sequence
  Synthetic
ucaccaaaccuguaccuaacag

SEQ ID NO: 101931 - RNA, 23 nt, Artificial Sequence
  Synthetic
aucaccaaaccuguaccuaacag

SEQ ID NO: 101932 - RNA, 24 nt, Artificial Sequence
  Synthetic
aaucaccaaaccuguaccuaacag

SEQ ID NO: 101933 - RNA, 18 nt, Artificial Sequence
  Synthetic
ucugagugcaucuaacag

SEQ ID NO: 101934 - RNA, 19 nt, Artificial Sequence
  Synthetic
uucugagugcaucuaacag

SEQ ID NO: 101935 - RNA, 22 nt, Artificial Sequence
  Synthetic
agguucugagugcaucuaacag

SEQ ID NO: 101936 - RNA, 24 nt, Artificial Sequence
  Synthetic
ugagguucugagugcaucuaacag

SEQ ID NO: 101937 - RNA, 19 nt, Artificial Sequence
  Synthetic
ugcuucaacauucuaacag

SEQ ID NO: 101938 - RNA, 20 nt, Artificial Sequence
  Synthetic
cugcuucaacauucuaacag

SEQ ID NO: 101939 - RNA, 21 nt, Artificial Sequence
  Synthetic
acugcuucaacauucuaacag

SEQ ID NO: 101940 - RNA, 23 nt, Artificial Sequence
  Synthetic
ugacugcuucaacauucuaacag

SEQ ID NO: 101941 - RNA, 24 nt, Artificial Sequence
  Synthetic
augacugcuucaacauucuaacag

SEQ ID NO: 101942 - RNA, 18 nt, Artificial Sequence
  Synthetic
aacgcagcuaguuaacag

SEQ ID NO: 101943 - RNA, 19 nt, Artificial Sequence
  Synthetic
uaacgcagcuaguuaacag

SEQ ID NO: 101944 - RNA, 21 nt, Artificial Sequence
  Synthetic
aguaacgcagcuaguuaacag

SEQ ID NO: 101945 - RNA, 22 nt, Artificial Sequence
  Synthetic
aaguaacgcagcuaguuaacag

SEQ ID NO: 101946 - RNA, 23 nt, Artificial Sequence
  Synthetic
aaaguaacgcagcuaguuaacag

SEQ ID NO: 101947 - RNA, 24 nt, Artificial Sequence
  Synthetic
uaaaguaacgcagcuaguuaacag

SEQ ID NO: 101948 - RNA, 18 nt, Artificial Sequence
  Synthetic
aaaagugcaagaacacag

SEQ ID NO: 101949 - RNA, 19 nt, Artificial Sequence
  Synthetic
aaaaagugcaagaacacag

SEQ ID NO: 101950 - RNA, 20 nt, Artificial Sequence
  Synthetic
uaaaaagugcaagaacacag

SEQ ID NO: 101951 - RNA, 21 nt, Artificial Sequence
  Synthetic
auaaaaagugcaagaacacag

SEQ ID NO: 101952 - RNA, 22 nt, Artificial Sequence
  Synthetic
aauaaaaagugcaagaacacag

SEQ ID NO: 101953 - RNA, 23 nt, Artificial Sequence
  Synthetic
aaauaaaaagugcaagaacacag

SEQ ID NO: 101954 - RNA, 19 nt, Artificial Sequence
  Synthetic
agaaaagugauuaacacag

SEQ ID NO: 101955 - RNA, 20 nt, Artificial Sequence
  Synthetic
aagaaaagugauuaacacag

SEQ ID NO: 101956 - RNA, 21 nt, Artificial Sequence
  Synthetic
aaagaaaagugauuaacacag

SEQ ID NO: 101957 - RNA, 22 nt, Artificial Sequence
  Synthetic
uaaagaaaagugauuaacacag

SEQ ID NO: 101958 - RNA, 23 nt, Artificial Sequence
  Synthetic
auaaagaaaagugauuaacacag

SEQ ID NO: 101959 - RNA, 18 nt, Artificial Sequence
  Synthetic
cuaaauaccaacacacag

SEQ ID NO: 101960 - RNA, 19 nt, Artificial Sequence
  Synthetic
acuaaauaccaacacacag

SEQ ID NO: 101961 - RNA, 20 nt, Artificial Sequence
  Synthetic
uacuaaauaccaacacacag

SEQ ID NO: 101962 - RNA, 21 nt, Artificial Sequence
  Synthetic
auacuaaauaccaacacacag

SEQ ID NO: 101963 - RNA, 23 nt, Artificial Sequence
  Synthetic
ugauacuaaauaccaacacacag

SEQ ID NO: 101964 - RNA, 24 nt, Artificial Sequence
  Synthetic
uugauacuaaauaccaacacacag

SEQ ID NO: 101965 - RNA, 18 nt, Artificial Sequence
  Synthetic
acugcugggaacacacag

SEQ ID NO: 101966 - RNA, 19 nt, Artificial Sequence
  Synthetic
cacugcugggaacacacag

SEQ ID NO: 101967 - RNA, 22 nt, Artificial Sequence
  Synthetic
aggcacugcugggaacacacag

SEQ ID NO: 101968 - RNA, 23 nt, Artificial Sequence
  Synthetic
aaggcacugcugggaacacacag

SEQ ID NO: 101969 - RNA, 24 nt, Artificial Sequence
  Synthetic
uaaggcacugcugggaacacacag

SEQ ID NO: 101970 - RNA, 18 nt, Artificial Sequence
  Synthetic
cuuaacuagagcacacag

SEQ ID NO: 101971 - RNA, 19 nt, Artificial Sequence
  Synthetic
ucuuaacuagagcacacag

SEQ ID NO: 101972 - RNA, 21 nt, Artificial Sequence
  Synthetic
agucuuaacuagagcacacag

SEQ ID NO: 101973 - RNA, 22 nt, Artificial Sequence
  Synthetic
cagucuuaacuagagcacacag

SEQ ID NO: 101974 - RNA, 23 nt, Artificial Sequence
  Synthetic
acagucuuaacuagagcacacag

SEQ ID NO: 101975 - RNA, 24 nt, Artificial Sequence
  Synthetic
aacagucuuaacuagagcacacag

SEQ ID NO: 101976 - RNA, 19 nt, Artificial Sequence
  Synthetic
agauaugccaggcacacag

SEQ ID NO: 101977 - RNA, 21 nt, Artificial Sequence
  Synthetic
ugagauaugccaggcacacag

SEQ ID NO: 101978 - RNA, 22 nt, Artificial Sequence
  Synthetic
cugagauaugccaggcacacag

SEQ ID NO: 101979 - RNA, 23 nt, Artificial Sequence
  Synthetic
ucugagauaugccaggcacacag

SEQ ID NO: 101980 - RNA, 24 nt, Artificial Sequence
  Synthetic
aucugagauaugccaggcacacag

SEQ ID NO: 101981 - RNA, 18 nt, Artificial Sequence
  Synthetic
uaucugcuuugcacacag

SEQ ID NO: 101982 - RNA, 20 nt, Artificial Sequence
  Synthetic
aguaucugcuuugcacacag

SEQ ID NO: 101983 - RNA, 21 nt, Artificial Sequence
  Synthetic
caguaucugcuuugcacacag

SEQ ID NO: 101984 - RNA, 23 nt, Artificial Sequence
  Synthetic
agcaguaucugcuuugcacacag

SEQ ID NO: 101985 - RNA, 24 nt, Artificial Sequence
  Synthetic
aagcaguaucugcuuugcacacag

SEQ ID NO: 101986 - RNA, 18 nt, Artificial Sequence
  Synthetic
caaauaaaccugacacag

SEQ ID NO: 101987 - RNA, 19 nt, Artificial Sequence
  Synthetic
acaaauaaaccugacacag

SEQ ID NO: 101988 - RNA, 20 nt, Artificial Sequence
  Synthetic
aacaaauaaaccugacacag

SEQ ID NO: 101989 - RNA, 21 nt, Artificial Sequence
  Synthetic
aaacaaauaaaccugacacag

SEQ ID NO: 101990 - RNA, 22 nt, Artificial Sequence
  Synthetic
aaaacaaauaaaccugacacag

SEQ ID NO: 101991 - RNA, 23 nt, Artificial Sequence
  Synthetic
aaaaacaaauaaaccugacacag

SEQ ID NO: 101992 - RNA, 24 nt, Artificial Sequence
  Synthetic
uaaaaacaaauaaaccugacacag

SEQ ID NO: 101993 - RNA, 19 nt, Artificial Sequence
  Synthetic
agcacacagucuuccacag

SEQ ID NO: 101994 - RNA, 21 nt, Artificial Sequence
  Synthetic
ugagcacacagucuuccacag

SEQ ID NO: 101995 - RNA, 22 nt, Artificial Sequence
  Synthetic
cugagcacacagucuuccacag

SEQ ID NO: 101996 - RNA, 24 nt, Artificial Sequence
  Synthetic
ugcugagcacacagucuuccacag

SEQ ID NO: 101997 - RNA, 19 nt, Artificial Sequence
  Synthetic
agugcaugaaugagcacag

SEQ ID NO: 101998 - RNA, 21 nt, Artificial Sequence
  Synthetic
cgagugcaugaaugagcacag

SEQ ID NO: 101999 - RNA, 22 nt, Artificial Sequence
  Synthetic
acgagugcaugaaugagcacag

SEQ ID NO: 102000 - RNA, 23 nt, Artificial Sequence
  Synthetic
cacgagugcaugaaugagcacag

SEQ ID NO: 102001 - RNA, 24 nt, Artificial Sequence
  Synthetic
ccacgagugcaugaaugagcacag

SEQ ID NO: 102002 - RNA, 18 nt, Artificial Sequence
  Synthetic
agagauuucccaucacag

SEQ ID NO: 102003 - RNA, 19 nt, Artificial Sequence
  Synthetic
cagagauuucccaucacag

SEQ ID NO: 102004 - RNA, 21 nt, Artificial Sequence
  Synthetic
agcagagauuucccaucacag

SEQ ID NO: 102005 - RNA, 22 nt, Artificial Sequence
  Synthetic
cagcagagauuucccaucacag

SEQ ID NO: 102006 - RNA, 23 nt, Artificial Sequence
  Synthetic
acagcagagauuucccaucacag

SEQ ID NO: 102007 - RNA, 24 nt, Artificial Sequence
  Synthetic
cacagcagagauuucccaucacag

SEQ ID NO: 102008 - RNA, 18 nt, Artificial Sequence
  Synthetic
ucaucugagagaucacag

SEQ ID NO: 102009 - RNA, 19 nt, Artificial Sequence
  Synthetic
cucaucugagagaucacag

SEQ ID NO: 102010 - RNA, 20 nt, Artificial Sequence
  Synthetic
ccucaucugagagaucacag

SEQ ID NO: 102011 - RNA, 21 nt, Artificial Sequence
  Synthetic
uccucaucugagagaucacag

SEQ ID NO: 102012 - RNA, 22 nt, Artificial Sequence
  Synthetic
uuccucaucugagagaucacag

SEQ ID NO: 102013 - RNA, 24 nt, Artificial Sequence
  Synthetic
uguuccucaucugagagaucacag

SEQ ID NO: 102014 - RNA, 22 nt, Artificial Sequence
  Synthetic
agaaucauuuaacuguucacag

SEQ ID NO: 102015 - RNA, 18 nt, Artificial Sequence
  Synthetic
ugcuagauaguuucacag

SEQ ID NO: 102016 - RNA, 20 nt, Artificial Sequence
  Synthetic
agugcuagauaguuucacag

SEQ ID NO: 102017 - RNA, 21 nt, Artificial Sequence
  Synthetic
aagugcuagauaguuucacag

SEQ ID NO: 102018 - RNA, 22 nt, Artificial Sequence
  Synthetic
aaagugcuagauaguuucacag

SEQ ID NO: 102019 - RNA, 23 nt, Artificial Sequence
  Synthetic
uaaagugcuagauaguuucacag

SEQ ID NO: 102020 - RNA, 21 nt, Artificial Sequence
  Synthetic
cauaccuaaaagaaaagacag

SEQ ID NO: 102021 - RNA, 22 nt, Artificial Sequence
  Synthetic
acauaccuaaaagaaaagacag

SEQ ID NO: 102022 - RNA, 23 nt, Artificial Sequence
  Synthetic
aacauaccuaaaagaaaagacag

SEQ ID NO: 102023 - RNA, 24 nt, Artificial Sequence
  Synthetic
caacauaccuaaaagaaaagacag

SEQ ID NO: 102024 - RNA, 18 nt, Artificial Sequence
  Synthetic
ugggucaggaaaagacag

SEQ ID NO: 102025 - RNA, 19 nt, Artificial Sequence
  Synthetic
uugggucaggaaaagacag

SEQ ID NO: 102026 - RNA, 21 nt, Artificial Sequence
  Synthetic
uguugggucaggaaaagacag

SEQ ID NO: 102027 - RNA, 22 nt, Artificial Sequence
  Synthetic
auguugggucaggaaaagacag

SEQ ID NO: 102028 - RNA, 23 nt, Artificial Sequence
  Synthetic
uauguugggucaggaaaagacag

SEQ ID NO: 102029 - RNA, 24 nt, Artificial Sequence
  Synthetic
uuauguugggucaggaaaagacag

SEQ ID NO: 102030 - RNA, 19 nt, Artificial Sequence
  Synthetic
aguuuugagcagcagacag

SEQ ID NO: 102031 - RNA, 20 nt, Artificial Sequence
  Synthetic
uaguuuugagcagcagacag

SEQ ID NO: 102032 - RNA, 23 nt, Artificial Sequence
  Synthetic
ugguaguuuugagcagcagacag

SEQ ID NO: 102033 - RNA, 24 nt, Artificial Sequence
  Synthetic
augguaguuuugagcagcagacag

SEQ ID NO: 102034 - RNA, 18 nt, Artificial Sequence
  Synthetic
auuuugacuaugagacag

SEQ ID NO: 102035 - RNA, 19 nt, Artificial Sequence
  Synthetic
uauuuugacuaugagacag

SEQ ID NO: 102036 - RNA, 20 nt, Artificial Sequence
  Synthetic
cuauuuugacuaugagacag

SEQ ID NO: 102037 - RNA, 21 nt, Artificial Sequence
  Synthetic
ccuauuuugacuaugagacag

SEQ ID NO: 102038 - RNA, 22 nt, Artificial Sequence
  Synthetic
accuauuuugacuaugagacag

SEQ ID NO: 102039 - RNA, 23 nt, Artificial Sequence
  Synthetic
aaccuauuuugacuaugagacag

SEQ ID NO: 102040 - RNA, 24 nt, Artificial Sequence
  Synthetic
uaaccuauuuugacuaugagacag

SEQ ID NO: 102041 - RNA, 19 nt, Artificial Sequence
  Synthetic
agaguaauggguaggacag

SEQ ID NO: 102042 - RNA, 20 nt, Artificial Sequence
  Synthetic
uagaguaauggguaggacag

SEQ ID NO: 102043 - RNA, 22 nt, Artificial Sequence
  Synthetic
uguagaguaauggguaggacag

SEQ ID NO: 102044 - RNA, 23 nt, Artificial Sequence
  Synthetic
auguagaguaauggguaggacag

SEQ ID NO: 102045 - RNA, 24 nt, Artificial Sequence
  Synthetic
aauguagaguaauggguaggacag

SEQ ID NO: 102046 - RNA, 18 nt, Artificial Sequence
  Synthetic
acuuauugguuuggacag

SEQ ID NO: 102047 - RNA, 20 nt, Artificial Sequence
  Synthetic
agacuuauugguuuggacag

SEQ ID NO: 102048 - RNA, 21 nt, Artificial Sequence
  Synthetic
cagacuuauugguuuggacag

SEQ ID NO: 102049 - RNA, 22 nt, Artificial Sequence
  Synthetic
ucagacuuauugguuuggacag

SEQ ID NO: 102050 - RNA, 23 nt, Artificial Sequence
  Synthetic
aucagacuuauugguuuggacag

SEQ ID NO: 102051 - RNA, 24 nt, Artificial Sequence
  Synthetic
aaucagacuuauugguuuggacag

SEQ ID NO: 102052 - RNA, 18 nt, Artificial Sequence
  Synthetic
aaccagaacaacugacag

SEQ ID NO: 102053 - RNA, 19 nt, Artificial Sequence
  Synthetic
aaaccagaacaacugacag

SEQ ID NO: 102054 - RNA, 20 nt, Artificial Sequence
  Synthetic
aaaaccagaacaacugacag

SEQ ID NO: 102055 - RNA, 21 nt, Artificial Sequence
  Synthetic
caaaaccagaacaacugacag

SEQ ID NO: 102056 - RNA, 22 nt, Artificial Sequence
  Synthetic
acaaaaccagaacaacugacag

SEQ ID NO: 102057 - RNA, 23 nt, Artificial Sequence
  Synthetic
cacaaaaccagaacaacugacag

SEQ ID NO: 102058 - RNA, 24 nt, Artificial Sequence
  Synthetic
ccacaaaaccagaacaacugacag

SEQ ID NO: 102059 - RNA, 18 nt, Artificial Sequence
  Synthetic
ugcauacccaauugacag

SEQ ID NO: 102060 - RNA, 19 nt, Artificial Sequence
  Synthetic
cugcauacccaauugacag

SEQ ID NO: 102061 - RNA, 20 nt, Artificial Sequence
  Synthetic
acugcauacccaauugacag

SEQ ID NO: 102062 - RNA, 21 nt, Artificial Sequence
  Synthetic
cacugcauacccaauugacag

SEQ ID NO: 102063 - RNA, 22 nt, Artificial Sequence
  Synthetic
ucacugcauacccaauugacag

SEQ ID NO: 102064 - RNA, 23 nt, Artificial Sequence
  Synthetic
cucacugcauacccaauugacag

SEQ ID NO: 102065 - RNA, 24 nt, Artificial Sequence
  Synthetic
ccucacugcauacccaauugacag

SEQ ID NO: 102066 - RNA, 18 nt, Artificial Sequence
  Synthetic
uggcuaguauauugacag

SEQ ID NO: 102067 - RNA, 19 nt, Artificial Sequence
  Synthetic
cuggcuaguauauugacag

SEQ ID NO: 102068 - RNA, 20 nt, Artificial Sequence
  Synthetic
ucuggcuaguauauugacag

SEQ ID NO: 102069 - RNA, 21 nt, Artificial Sequence
  Synthetic
cucuggcuaguauauugacag

SEQ ID NO: 102070 - RNA, 22 nt, Artificial Sequence
  Synthetic
ucucuggcuaguauauugacag

SEQ ID NO: 102071 - RNA, 23 nt, Artificial Sequence
  Synthetic
aucucuggcuaguauauugacag

SEQ ID NO: 102072 - RNA, 24 nt, Artificial Sequence
  Synthetic
uaucucuggcuaguauauugacag

SEQ ID NO: 102073 - RNA, 19 nt, Artificial Sequence
  Synthetic
uguagaagucagaauacag

SEQ ID NO: 102074 - RNA, 21 nt, Artificial Sequence
  Synthetic
aguguagaagucagaauacag

SEQ ID NO: 102075 - RNA, 22 nt, Artificial Sequence
  Synthetic
aaguguagaagucagaauacag

SEQ ID NO: 102076 - RNA, 23 nt, Artificial Sequence
  Synthetic
aaaguguagaagucagaauacag

SEQ ID NO: 102077 - RNA, 24 nt, Artificial Sequence
  Synthetic
uaaaguguagaagucagaauacag

SEQ ID NO: 102078 - RNA, 18 nt, Artificial Sequence
  Synthetic
acacaucagcacauacag

SEQ ID NO: 102079 - RNA, 19 nt, Artificial Sequence
  Synthetic
cacacaucagcacauacag

SEQ ID NO: 102080 - RNA, 20 nt, Artificial Sequence
  Synthetic
acacacaucagcacauacag

SEQ ID NO: 102081 - RNA, 22 nt, Artificial Sequence
  Synthetic
agacacacaucagcacauacag

SEQ ID NO: 102082 - RNA, 23 nt, Artificial Sequence
  Synthetic
cagacacacaucagcacauacag

SEQ ID NO: 102083 - RNA, 24 nt, Artificial Sequence
  Synthetic
acagacacacaucagcacauacag

SEQ ID NO: 102084 - RNA, 18 nt, Artificial Sequence
  Synthetic
uuguuauacuacauacag

SEQ ID NO: 102085 - RNA, 19 nt, Artificial Sequence
  Synthetic
uuuguuauacuacauacag

SEQ ID NO: 102086 - RNA, 20 nt, Artificial Sequence
  Synthetic
auuuguuauacuacauacag

SEQ ID NO: 102087 - RNA, 21 nt, Artificial Sequence
  Synthetic
aauuuguuauacuacauacag

SEQ ID NO: 102088 - RNA, 22 nt, Artificial Sequence
  Synthetic
uaauuuguuauacuacauacag

SEQ ID NO: 102089 - RNA, 23 nt, Artificial Sequence
  Synthetic
auaauuuguuauacuacauacag

SEQ ID NO: 102090 - RNA, 18 nt, Artificial Sequence
  Synthetic
auuuagaggcugauacag

SEQ ID NO: 102091 - RNA, 19 nt, Artificial Sequence
  Synthetic
aauuuagaggcugauacag

SEQ ID NO: 102092 - RNA, 20 nt, Artificial Sequence
  Synthetic
caauuuagaggcugauacag

SEQ ID NO: 102093 - RNA, 21 nt, Artificial Sequence
  Synthetic
acaauuuagaggcugauacag

SEQ ID NO: 102094 - RNA, 23 nt, Artificial Sequence
  Synthetic
ugacaauuuagaggcugauacag

SEQ ID NO: 102095 - RNA, 18 nt, Artificial Sequence
  Synthetic
caucuuucagugauacag

SEQ ID NO: 102096 - RNA, 20 nt, Artificial Sequence
  Synthetic
agcaucuuucagugauacag

SEQ ID NO: 102097 - RNA, 21 nt, Artificial Sequence
  Synthetic
cagcaucuuucagugauacag

SEQ ID NO: 102098 - RNA, 24 nt, Artificial Sequence
  Synthetic
aggcagcaucuuucagugauacag

SEQ ID NO: 102099 - RNA, 21 nt, Artificial Sequence
  Synthetic
cuaggauauguguauauacag

SEQ ID NO: 102100 - RNA, 22 nt, Artificial Sequence
  Synthetic
ccuaggauauguguauauacag

SEQ ID NO: 102101 - RNA, 23 nt, Artificial Sequence
  Synthetic
uccuaggauauguguauauacag

SEQ ID NO: 102102 - RNA, 19 nt, Artificial Sequence
  Synthetic
uguuagaaaagcacuacag

SEQ ID NO: 102103 - RNA, 20 nt, Artificial Sequence
  Synthetic
cuguuagaaaagcacuacag

SEQ ID NO: 102104 - RNA, 21 nt, Artificial Sequence
  Synthetic
ucuguuagaaaagcacuacag

SEQ ID NO: 102105 - RNA, 22 nt, Artificial Sequence
  Synthetic
aucuguuagaaaagcacuacag

SEQ ID NO: 102106 - RNA, 23 nt, Artificial Sequence
  Synthetic
caucuguuagaaaagcacuacag

SEQ ID NO: 102107 - RNA, 24 nt, Artificial Sequence
  Synthetic
ucaucuguuagaaaagcacuacag

SEQ ID NO: 102108 - RNA, 18 nt, Artificial Sequence
  Synthetic
ucggaggcagaucuacag

SEQ ID NO: 102109 - RNA, 19 nt, Artificial Sequence
  Synthetic
aucggaggcagaucuacag

SEQ ID NO: 102110 - RNA, 20 nt, Artificial Sequence
  Synthetic
aaucggaggcagaucuacag

SEQ ID NO: 102111 - RNA, 21 nt, Artificial Sequence
  Synthetic
uaaucggaggcagaucuacag

SEQ ID NO: 102112 - RNA, 22 nt, Artificial Sequence
  Synthetic
auaaucggaggcagaucuacag

SEQ ID NO: 102113 - RNA, 23 nt, Artificial Sequence
  Synthetic
uauaaucggaggcagaucuacag

SEQ ID NO: 102114 - RNA, 24 nt, Artificial Sequence
  Synthetic
auauaaucggaggcagaucuacag

SEQ ID NO: 102115 - RNA, 21 nt, Artificial Sequence
  Synthetic
cuggaaucucaccuucuacag

SEQ ID NO: 102116 - RNA, 22 nt, Artificial Sequence
  Synthetic
ucuggaaucucaccuucuacag

SEQ ID NO: 102117 - RNA, 23 nt, Artificial Sequence
  Synthetic
cucuggaaucucaccuucuacag

SEQ ID NO: 102118 - RNA, 24 nt, Artificial Sequence
  Synthetic
ucucuggaaucucaccuucuacag

SEQ ID NO: 102119 - RNA, 19 nt, Artificial Sequence
  Synthetic
ugaacucugacaaguacag

SEQ ID NO: 102120 - RNA, 20 nt, Artificial Sequence
  Synthetic
augaacucugacaaguacag

SEQ ID NO: 102121 - RNA, 21 nt, Artificial Sequence
  Synthetic
uaugaacucugacaaguacag

SEQ ID NO: 102122 - RNA, 22 nt, Artificial Sequence
  Synthetic
cuaugaacucugacaaguacag

SEQ ID NO: 102123 - RNA, 24 nt, Artificial Sequence
  Synthetic
agcuaugaacucugacaaguacag

SEQ ID NO: 102124 - RNA, 18 nt, Artificial Sequence
  Synthetic
aagcagaagcaaguacag

SEQ ID NO: 102125 - RNA, 19 nt, Artificial Sequence
  Synthetic
uaagcagaagcaaguacag

SEQ ID NO: 102126 - RNA, 21 nt, Artificial Sequence
  Synthetic
aguaagcagaagcaaguacag

SEQ ID NO: 102127 - RNA, 22 nt, Artificial Sequence
  Synthetic
uaguaagcagaagcaaguacag

SEQ ID NO: 102128 - RNA, 23 nt, Artificial Sequence
  Synthetic
auaguaagcagaagcaaguacag

SEQ ID NO: 102129 - RNA, 24 nt, Artificial Sequence
  Synthetic
uauaguaagcagaagcaaguacag

SEQ ID NO: 102130 - RNA, 18 nt, Artificial Sequence
  Synthetic
aucuucacaagaguacag

SEQ ID NO: 102131 - RNA, 19 nt, Artificial Sequence
  Synthetic
uaucuucacaagaguacag

SEQ ID NO: 102132 - RNA, 21 nt, Artificial Sequence
  Synthetic
uguaucuucacaagaguacag

SEQ ID NO: 102133 - RNA, 22 nt, Artificial Sequence
  Synthetic
cuguaucuucacaagaguacag

SEQ ID NO: 102134 - RNA, 23 nt, Artificial Sequence
  Synthetic
acuguaucuucacaagaguacag

SEQ ID NO: 102135 - RNA, 24 nt, Artificial Sequence
  Synthetic
cacuguaucuucacaagaguacag

SEQ ID NO: 102136 - RNA, 18 nt, Artificial Sequence
  Synthetic
auaucuaaucagguacag

SEQ ID NO: 102137 - RNA, 19 nt, Artificial Sequence
  Synthetic
uauaucuaaucagguacag

SEQ ID NO: 102138 - RNA, 20 nt, Artificial Sequence
  Synthetic
cuauaucuaaucagguacag

SEQ ID NO: 102139 - RNA, 21 nt, Artificial Sequence
  Synthetic
ucuauaucuaaucagguacag

SEQ ID NO: 102140 - RNA, 24 nt, Artificial Sequence
  Synthetic
uggucuauaucuaaucagguacag

SEQ ID NO: 102141 - RNA, 18 nt, Artificial Sequence
  Synthetic
auguuuuggacuuuacag

SEQ ID NO: 102142 - RNA, 19 nt, Artificial Sequence
  Synthetic
uauguuuuggacuuuacag

SEQ ID NO: 102143 - RNA, 20 nt, Artificial Sequence
  Synthetic
auauguuuuggacuuuacag

SEQ ID NO: 102144 - RNA, 21 nt, Artificial Sequence
  Synthetic
cauauguuuuggacuuuacag

SEQ ID NO: 102145 - RNA, 22 nt, Artificial Sequence
  Synthetic
ucauauguuuuggacuuuacag

SEQ ID NO: 102146 - RNA, 23 nt, Artificial Sequence
  Synthetic
cucauauguuuuggacuuuacag

SEQ ID NO: 102147 - RNA, 24 nt, Artificial Sequence
  Synthetic
ucucauauguuuuggacuuuacag

SEQ ID NO: 102148 - RNA, 18 nt, Artificial Sequence
  Synthetic
aguguccuucuaaaccag

SEQ ID NO: 102149 - RNA, 20 nt, Artificial Sequence
  Synthetic
agaguguccuucuaaaccag

SEQ ID NO: 102150 - RNA, 21 nt, Artificial Sequence
  Synthetic
cagaguguccuucuaaaccag

SEQ ID NO: 102151 - RNA, 22 nt, Artificial Sequence
  Synthetic
acagaguguccuucuaaaccag

SEQ ID NO: 102152 - RNA, 23 nt, Artificial Sequence
  Synthetic
aacagaguguccuucuaaaccag

SEQ ID NO: 102153 - RNA, 24 nt, Artificial Sequence
  Synthetic
caacagaguguccuucuaaaccag

SEQ ID NO: 102154 - RNA, 18 nt, Artificial Sequence
  Synthetic
cauuuggugaagcaccag

SEQ ID NO: 102155 - RNA, 19 nt, Artificial Sequence
  Synthetic
acauuuggugaagcaccag

SEQ ID NO: 102156 - RNA, 20 nt, Artificial Sequence
  Synthetic
cacauuuggugaagcaccag

SEQ ID NO: 102157 - RNA, 21 nt, Artificial Sequence
  Synthetic
ucacauuuggugaagcaccag

SEQ ID NO: 102158 - RNA, 23 nt, Artificial Sequence
  Synthetic
ugucacauuuggugaagcaccag

SEQ ID NO: 102159 - RNA, 18 nt, Artificial Sequence
  Synthetic
ugugacuccaggcaccag

SEQ ID NO: 102160 - RNA, 20 nt, Artificial Sequence
  Synthetic
cgugugacuccaggcaccag

SEQ ID NO: 102161 - RNA, 23 nt, Artificial Sequence
  Synthetic
uggcgugugacuccaggcaccag

SEQ ID NO: 102162 - RNA, 24 nt, Artificial Sequence
  Synthetic
auggcgugugacuccaggcaccag

SEQ ID NO: 102163 - RNA, 18 nt, Artificial Sequence
  Synthetic
uuaucugagaaagaccag

SEQ ID NO: 102164 - RNA, 19 nt, Artificial Sequence
  Synthetic
cuuaucugagaaagaccag

SEQ ID NO: 102165 - RNA, 20 nt, Artificial Sequence
  Synthetic
ccuuaucugagaaagaccag

SEQ ID NO: 102166 - RNA, 21 nt, Artificial Sequence
  Synthetic
cccuuaucugagaaagaccag

SEQ ID NO: 102167 - RNA, 22 nt, Artificial Sequence
  Synthetic
acccuuaucugagaaagaccag

SEQ ID NO: 102168 - RNA, 23 nt, Artificial Sequence
  Synthetic
uacccuuaucugagaaagaccag

SEQ ID NO: 102169 - RNA, 24 nt, Artificial Sequence
  Synthetic
cuacccuuaucugagaaagaccag

SEQ ID NO: 102170 - RNA, 18 nt, Artificial Sequence
  Synthetic
agggaauucauagaccag

SEQ ID NO: 102171 - RNA, 19 nt, Artificial Sequence
  Synthetic
aagggaauucauagaccag

SEQ ID NO: 102172 - RNA, 20 nt, Artificial Sequence
  Synthetic
aaagggaauucauagaccag

SEQ ID NO: 102173 - RNA, 21 nt, Artificial Sequence
  Synthetic
aaaagggaauucauagaccag

SEQ ID NO: 102174 - RNA, 22 nt, Artificial Sequence
  Synthetic
uaaaagggaauucauagaccag

SEQ ID NO: 102175 - RNA, 23 nt, Artificial Sequence
  Synthetic
uuaaaagggaauucauagaccag

SEQ ID NO: 102176 - RNA, 24 nt, Artificial Sequence
  Synthetic
uuuaaaagggaauucauagaccag

SEQ ID NO: 102177 - RNA, 18 nt, Artificial Sequence
  Synthetic
uaaauaucccaugaccag

SEQ ID NO: 102178 - RNA, 19 nt, Artificial Sequence
  Synthetic
cuaaauaucccaugaccag

SEQ ID NO: 102179 - RNA, 20 nt, Artificial Sequence
  Synthetic
ccuaaauaucccaugaccag

SEQ ID NO: 102180 - RNA, 21 nt, Artificial Sequence
  Synthetic
uccuaaauaucccaugaccag

SEQ ID NO: 102181 - RNA, 22 nt, Artificial Sequence
  Synthetic
cuccuaaauaucccaugaccag

SEQ ID NO: 102182 - RNA, 23 nt, Artificial Sequence
  Synthetic
ucuccuaaauaucccaugaccag

SEQ ID NO: 102183 - RNA, 24 nt, Artificial Sequence
  Synthetic
uucuccuaaauaucccaugaccag

SEQ ID NO: 102184 - RNA, 18 nt, Artificial Sequence
  Synthetic
acgcagaagagugaccag

SEQ ID NO: 102185 - RNA, 19 nt, Artificial Sequence
  Synthetic
uacgcagaagagugaccag

SEQ ID NO: 102186 - RNA, 20 nt, Artificial Sequence
  Synthetic
auacgcagaagagugaccag

SEQ ID NO: 102187 - RNA, 21 nt, Artificial Sequence
  Synthetic
aauacgcagaagagugaccag

SEQ ID NO: 102188 - RNA, 22 nt, Artificial Sequence
  Synthetic
aaauacgcagaagagugaccag

SEQ ID NO: 102189 - RNA, 23 nt, Artificial Sequence
  Synthetic
caaauacgcagaagagugaccag

SEQ ID NO: 102190 - RNA, 24 nt, Artificial Sequence
  Synthetic
acaaauacgcagaagagugaccag

SEQ ID NO: 102191 - RNA, 18 nt, Artificial Sequence
  Synthetic
uuccuaacuaaauaccag

SEQ ID NO: 102192 - RNA, 19 nt, Artificial Sequence
  Synthetic
auuccuaacuaaauaccag

SEQ ID NO: 102193 - RNA, 20 nt, Artificial Sequence
  Synthetic
aauuccuaacuaaauaccag

SEQ ID NO: 102194 - RNA, 21 nt, Artificial Sequence
  Synthetic
caauuccuaacuaaauaccag

SEQ ID NO: 102195 - RNA, 22 nt, Artificial Sequence
  Synthetic
acaauuccuaacuaaauaccag

SEQ ID NO: 102196 - RNA, 23 nt, Artificial Sequence
  Synthetic
cacaauuccuaacuaaauaccag

SEQ ID NO: 102197 - RNA, 24 nt, Artificial Sequence
  Synthetic
acacaauuccuaacuaaauaccag

SEQ ID NO: 102198 - RNA, 19 nt, Artificial Sequence
  Synthetic
uggaagaaaacaauaccag

SEQ ID NO: 102199 - RNA, 21 nt, Artificial Sequence
  Synthetic
uguggaagaaaacaauaccag

SEQ ID NO: 102200 - RNA, 22 nt, Artificial Sequence
  Synthetic
auguggaagaaaacaauaccag

SEQ ID NO: 102201 - RNA, 23 nt, Artificial Sequence
  Synthetic
aauguggaagaaaacaauaccag

SEQ ID NO: 102202 - RNA, 19 nt, Artificial Sequence
  Synthetic
uguagguagcucauaccag

SEQ ID NO: 102203 - RNA, 20 nt, Artificial Sequence
  Synthetic
uuguagguagcucauaccag

SEQ ID NO: 102204 - RNA, 22 nt, Artificial Sequence
  Synthetic
uguuguagguagcucauaccag

SEQ ID NO: 102205 - RNA, 23 nt, Artificial Sequence
  Synthetic
cuguuguagguagcucauaccag

SEQ ID NO: 102206 - RNA, 24 nt, Artificial Sequence
  Synthetic
acuguuguagguagcucauaccag

SEQ ID NO: 102207 - RNA, 19 nt, Artificial Sequence
  Synthetic
uggggaugaaguaacccag

SEQ ID NO: 102208 - RNA, 20 nt, Artificial Sequence
  Synthetic
uuggggaugaaguaacccag

SEQ ID NO: 102209 - RNA, 21 nt, Artificial Sequence
  Synthetic
uuuggggaugaaguaacccag

SEQ ID NO: 102210 - RNA, 22 nt, Artificial Sequence
  Synthetic
uuuuggggaugaaguaacccag

SEQ ID NO: 102211 - RNA, 18 nt, Artificial Sequence
  Synthetic
cauuuagaauuuccccag

SEQ ID NO: 102212 - RNA, 19 nt, Artificial Sequence
  Synthetic
ccauuuagaauuuccccag

SEQ ID NO: 102213 - RNA, 20 nt, Artificial Sequence
  Synthetic
uccauuuagaauuuccccag

SEQ ID NO: 102214 - RNA, 21 nt, Artificial Sequence
  Synthetic
auccauuuagaauuuccccag

SEQ ID NO: 102215 - RNA, 22 nt, Artificial Sequence
  Synthetic
aauccauuuagaauuuccccag

SEQ ID NO: 102216 - RNA, 23 nt, Artificial Sequence
  Synthetic
caauccauuuagaauuuccccag

SEQ ID NO: 102217 - RNA, 24 nt, Artificial Sequence
  Synthetic
ucaauccauuuagaauuuccccag

SEQ ID NO: 102218 - RNA, 18 nt, Artificial Sequence
  Synthetic
cuucccggccaagcccag

SEQ ID NO: 102219 - RNA, 20 nt, Artificial Sequence
  Synthetic
agcuucccggccaagcccag

SEQ ID NO: 102220 - RNA, 22 nt, Artificial Sequence
  Synthetic
agagcuucccggccaagcccag

SEQ ID NO: 102221 - RNA, 23 nt, Artificial Sequence
  Synthetic
cagagcuucccggccaagcccag

SEQ ID NO: 102222 - RNA, 18 nt, Artificial Sequence
  Synthetic
ugcauccuccgugcccag

SEQ ID NO: 102223 - RNA, 19 nt, Artificial Sequence
  Synthetic
uugcauccuccgugcccag

SEQ ID NO: 102224 - RNA, 22 nt, Artificial Sequence
  Synthetic
ugguugcauccuccgugcccag

SEQ ID NO: 102225 - RNA, 23 nt, Artificial Sequence
  Synthetic
augguugcauccuccgugcccag

SEQ ID NO: 102226 - RNA, 24 nt, Artificial Sequence
  Synthetic
caugguugcauccuccgugcccag

SEQ ID NO: 102227 - RNA, 18 nt, Artificial Sequence
  Synthetic
ugcuuugccuaaucccag

SEQ ID NO: 102228 - RNA, 19 nt, Artificial Sequence
  Synthetic
uugcuuugccuaaucccag

SEQ ID NO: 102229 - RNA, 20 nt, Artificial Sequence
  Synthetic
cuugcuuugccuaaucccag

SEQ ID NO: 102230 - RNA, 21 nt, Artificial Sequence
  Synthetic
ccuugcuuugccuaaucccag

SEQ ID NO: 102231 - RNA, 23 nt, Artificial Sequence
  Synthetic
cgccuugcuuugccuaaucccag

SEQ ID NO: 102232 - RNA, 18 nt, Artificial Sequence
  Synthetic
aggccaugauggucccag

SEQ ID NO: 102233 - RNA, 19 nt, Artificial Sequence
  Synthetic
uaggccaugauggucccag

SEQ ID NO: 102234 - RNA, 20 nt, Artificial Sequence
  Synthetic
cuaggccaugauggucccag

SEQ ID NO: 102235 - RNA, 22 nt, Artificial Sequence
  Synthetic
agcuaggccaugauggucccag

SEQ ID NO: 102236 - RNA, 23 nt, Artificial Sequence
  Synthetic
uagcuaggccaugauggucccag

SEQ ID NO: 102237 - RNA, 24 nt, Artificial Sequence
  Synthetic
cuagcuaggccaugauggucccag

SEQ ID NO: 102238 - RNA, 18 nt, Artificial Sequence
  Synthetic
uguccuugauugucccag

SEQ ID NO: 102239 - RNA, 19 nt, Artificial Sequence
  Synthetic
cuguccuugauugucccag

SEQ ID NO: 102240 - RNA, 20 nt, Artificial Sequence
  Synthetic
ucuguccuugauugucccag

SEQ ID NO: 102241 - RNA, 21 nt, Artificial Sequence
  Synthetic
aucuguccuugauugucccag

SEQ ID NO: 102242 - RNA, 23 nt, Artificial Sequence
  Synthetic
ugaucuguccuugauugucccag

SEQ ID NO: 102243 - RNA, 24 nt, Artificial Sequence
  Synthetic
uugaucuguccuugauugucccag

SEQ ID NO: 102244 - RNA, 18 nt, Artificial Sequence
  Synthetic
uuccuuccuuguucccag

SEQ ID NO: 102245 - RNA, 19 nt, Artificial Sequence
  Synthetic
uuuccuuccuuguucccag

SEQ ID NO: 102246 - RNA, 21 nt, Artificial Sequence
  Synthetic
uguuuccuuccuuguucccag

SEQ ID NO: 102247 - RNA, 23 nt, Artificial Sequence
  Synthetic
uguguuuccuuccuuguucccag

SEQ ID NO: 102248 - RNA, 24 nt, Artificial Sequence
  Synthetic
auguguuuccuuccuuguucccag

SEQ ID NO: 102249 - RNA, 19 nt, Artificial Sequence
  Synthetic
uguugacgguauuucccag

SEQ ID NO: 102250 - RNA, 20 nt, Artificial Sequence
  Synthetic
auguugacgguauuucccag

SEQ ID NO: 102251 - RNA, 23 nt, Artificial Sequence
  Synthetic
uggauguugacgguauuucccag

SEQ ID NO: 102252 - RNA, 24 nt, Artificial Sequence
  Synthetic
auggauguugacgguauuucccag

SEQ ID NO: 102253 - RNA, 21 nt, Artificial Sequence
  Synthetic
aggagacagguagacagccag

SEQ ID NO: 102254 - RNA, 22 nt, Artificial Sequence
  Synthetic
aaggagacagguagacagccag

SEQ ID NO: 102255 - RNA, 18 nt, Artificial Sequence
  Synthetic
acgauaauuuauagccag

SEQ ID NO: 102256 - RNA, 19 nt, Artificial Sequence
  Synthetic
uacgauaauuuauagccag

SEQ ID NO: 102257 - RNA, 20 nt, Artificial Sequence
  Synthetic
auacgauaauuuauagccag

SEQ ID NO: 102258 - RNA, 21 nt, Artificial Sequence
  Synthetic
uauacgauaauuuauagccag

SEQ ID NO: 102259 - RNA, 22 nt, Artificial Sequence
  Synthetic
cuauacgauaauuuauagccag

SEQ ID NO: 102260 - RNA, 24 nt, Artificial Sequence
  Synthetic
agcuauacgauaauuuauagccag

SEQ ID NO: 102261 - RNA, 18 nt, Artificial Sequence
  Synthetic
uaaaaaaaucuuagccag

SEQ ID NO: 102262 - RNA, 19 nt, Artificial Sequence
  Synthetic
cuaaaaaaaucuuagccag

SEQ ID NO: 102263 - RNA, 21 nt, Artificial Sequence
  Synthetic
ugcuaaaaaaaucuuagccag

SEQ ID NO: 102264 - RNA, 22 nt, Artificial Sequence
  Synthetic
augcuaaaaaaaucuuagccag

SEQ ID NO: 102265 - RNA, 23 nt, Artificial Sequence
  Synthetic
uaugcuaaaaaaaucuuagccag

SEQ ID NO: 102266 - RNA, 24 nt, Artificial Sequence
  Synthetic
uuaugcuaaaaaaaucuuagccag

SEQ ID NO: 102267 - RNA, 18 nt, Artificial Sequence
  Synthetic
ccaauguacggaggccag

SEQ ID NO: 102268 - RNA, 19 nt, Artificial Sequence
  Synthetic
accaauguacggaggccag

SEQ ID NO: 102269 - RNA, 20 nt, Artificial Sequence
  Synthetic
aaccaauguacggaggccag

SEQ ID NO: 102270 - RNA, 21 nt, Artificial Sequence
  Synthetic
aaaccaauguacggaggccag

SEQ ID NO: 102271 - RNA, 23 nt, Artificial Sequence
  Synthetic
agaaaccaauguacggaggccag

SEQ ID NO: 102272 - RNA, 24 nt, Artificial Sequence
  Synthetic
aagaaaccaauguacggaggccag

SEQ ID NO: 102273 - RNA, 18 nt, Artificial Sequence
  Synthetic
acugcaacuuuaggccag

SEQ ID NO: 102274 - RNA, 20 nt, Artificial Sequence
  Synthetic
agacugcaacuuuaggccag

SEQ ID NO: 102275 - RNA, 21 nt, Artificial Sequence
  Synthetic
aagacugcaacuuuaggccag

SEQ ID NO: 102276 - RNA, 22 nt, Artificial Sequence
  Synthetic
caagacugcaacuuuaggccag

SEQ ID NO: 102277 - RNA, 23 nt, Artificial Sequence
  Synthetic
ucaagacugcaacuuuaggccag

SEQ ID NO: 102278 - RNA, 24 nt, Artificial Sequence
  Synthetic
aucaagacugcaacuuuaggccag

SEQ ID NO: 102279 - RNA, 19 nt, Artificial Sequence
  Synthetic
agcacauuuuaaaugccag

SEQ ID NO: 102280 - RNA, 20 nt, Artificial Sequence
  Synthetic
aagcacauuuuaaaugccag

SEQ ID NO: 102281 - RNA, 21 nt, Artificial Sequence
  Synthetic
aaagcacauuuuaaaugccag

SEQ ID NO: 102282 - RNA, 22 nt, Artificial Sequence
  Synthetic
aaaagcacauuuuaaaugccag

SEQ ID NO: 102283 - RNA, 23 nt, Artificial Sequence
  Synthetic
uaaaagcacauuuuaaaugccag

SEQ ID NO: 102284 - RNA, 24 nt, Artificial Sequence
  Synthetic
auaaaagcacauuuuaaaugccag

SEQ ID NO: 102285 - RNA, 18 nt, Artificial Sequence
  Synthetic
aaaacaaggugcauccag

SEQ ID NO: 102286 - RNA, 19 nt, Artificial Sequence
  Synthetic
aaaaacaaggugcauccag

SEQ ID NO: 102287 - RNA, 20 nt, Artificial Sequence
  Synthetic
uaaaaacaaggugcauccag

SEQ ID NO: 102288 - RNA, 21 nt, Artificial Sequence
  Synthetic
uuaaaaacaaggugcauccag

SEQ ID NO: 102289 - RNA, 22 nt, Artificial Sequence
  Synthetic
auuaaaaacaaggugcauccag

SEQ ID NO: 102290 - RNA, 23 nt, Artificial Sequence
  Synthetic
uauuaaaaacaaggugcauccag

SEQ ID NO: 102291 - RNA, 24 nt, Artificial Sequence
  Synthetic
auauuaaaaacaaggugcauccag

SEQ ID NO: 102292 - RNA, 18 nt, Artificial Sequence
  Synthetic
cucaaauauugcauccag

SEQ ID NO: 102293 - RNA, 19 nt, Artificial Sequence
  Synthetic
ucucaaauauugcauccag

SEQ ID NO: 102294 - RNA, 20 nt, Artificial Sequence
  Synthetic
aucucaaauauugcauccag

SEQ ID NO: 102295 - RNA, 21 nt, Artificial Sequence
  Synthetic
uaucucaaauauugcauccag

SEQ ID NO: 102296 - RNA, 22 nt, Artificial Sequence
  Synthetic
uuaucucaaauauugcauccag

SEQ ID NO: 102297 - RNA, 23 nt, Artificial Sequence
  Synthetic
uuuaucucaaauauugcauccag

SEQ ID NO: 102298 - RNA, 24 nt, Artificial Sequence
  Synthetic
auuuaucucaaauauugcauccag

SEQ ID NO: 102299 - RNA, 18 nt, Artificial Sequence
  Synthetic
uggugaaucaggauccag

SEQ ID NO: 102300 - RNA, 19 nt, Artificial Sequence
  Synthetic
auggugaaucaggauccag

SEQ ID NO: 102301 - RNA, 21 nt, Artificial Sequence
  Synthetic
ugauggugaaucaggauccag

SEQ ID NO: 102302 - RNA, 22 nt, Artificial Sequence
  Synthetic
cugauggugaaucaggauccag

SEQ ID NO: 102303 - RNA, 24 nt, Artificial Sequence
  Synthetic
agcugauggugaaucaggauccag

SEQ ID NO: 102304 - RNA, 18 nt, Artificial Sequence
  Synthetic
cugauaccaagacuccag

SEQ ID NO: 102305 - RNA, 19 nt, Artificial Sequence
  Synthetic
ccugauaccaagacuccag

SEQ ID NO: 102306 - RNA, 20 nt, Artificial Sequence
  Synthetic
accugauaccaagacuccag

SEQ ID NO: 102307 - RNA, 21 nt, Artificial Sequence
  Synthetic
caccugauaccaagacuccag

SEQ ID NO: 102308 - RNA, 22 nt, Artificial Sequence
  Synthetic
ccaccugauaccaagacuccag

SEQ ID NO: 102309 - RNA, 23 nt, Artificial Sequence
  Synthetic
uccaccugauaccaagacuccag

SEQ ID NO: 102310 - RNA, 24 nt, Artificial Sequence
  Synthetic
cuccaccugauaccaagacuccag

SEQ ID NO: 102311 - RNA, 18 nt, Artificial Sequence
  Synthetic
accuuagagacccuccag

SEQ ID NO: 102312 - RNA, 20 nt, Artificial Sequence
  Synthetic
agaccuuagagacccuccag

SEQ ID NO: 102313 - RNA, 22 nt, Artificial Sequence
  Synthetic
ugagaccuuagagacccuccag

SEQ ID NO: 102314 - RNA, 24 nt, Artificial Sequence
  Synthetic
ugugagaccuuagagacccuccag

SEQ ID NO: 102315 - RNA, 18 nt, Artificial Sequence
  Synthetic
cuugcgauugauguccag

SEQ ID NO: 102316 - RNA, 19 nt, Artificial Sequence
  Synthetic
acuugcgauugauguccag

SEQ ID NO: 102317 - RNA, 21 nt, Artificial Sequence
  Synthetic
ugacuugcgauugauguccag

SEQ ID NO: 102318 - RNA, 22 nt, Artificial Sequence
  Synthetic
cugacuugcgauugauguccag

SEQ ID NO: 102319 - RNA, 23 nt, Artificial Sequence
  Synthetic
acugacuugcgauugauguccag

SEQ ID NO: 102320 - RNA, 24 nt, Artificial Sequence
  Synthetic
uacugacuugcgauugauguccag

SEQ ID NO: 102321 - RNA, 18 nt, Artificial Sequence
  Synthetic
ccucacaagacauuccag

SEQ ID NO: 102322 - RNA, 19 nt, Artificial Sequence
  Synthetic
uccucacaagacauuccag

SEQ ID NO: 102323 - RNA, 20 nt, Artificial Sequence
  Synthetic
uuccucacaagacauuccag

SEQ ID NO: 102324 - RNA, 21 nt, Artificial Sequence
  Synthetic
auuccucacaagacauuccag

SEQ ID NO: 102325 - RNA, 22 nt, Artificial Sequence
  Synthetic
uauuccucacaagacauuccag

SEQ ID NO: 102326 - RNA, 23 nt, Artificial Sequence
  Synthetic
auauuccucacaagacauuccag

SEQ ID NO: 102327 - RNA, 24 nt, Artificial Sequence
  Synthetic
aauauuccucacaagacauuccag

SEQ ID NO: 102328 - RNA, 18 nt, Artificial Sequence
  Synthetic
accaucauuaccuuccag

SEQ ID NO: 102329 - RNA, 20 nt, Artificial Sequence
  Synthetic
ugaccaucauuaccuuccag

SEQ ID NO: 102330 - RNA, 21 nt, Artificial Sequence
  Synthetic
cugaccaucauuaccuuccag

SEQ ID NO: 102331 - RNA, 23 nt, Artificial Sequence
  Synthetic
agcugaccaucauuaccuuccag

SEQ ID NO: 102332 - RNA, 18 nt, Artificial Sequence
  Synthetic
agaagcuguacuuuccag

SEQ ID NO: 102333 - RNA, 19 nt, Artificial Sequence
  Synthetic
uagaagcuguacuuuccag

SEQ ID NO: 102334 - RNA, 20 nt, Artificial Sequence
  Synthetic
auagaagcuguacuuuccag

SEQ ID NO: 102335 - RNA, 21 nt, Artificial Sequence
  Synthetic
uauagaagcuguacuuuccag

SEQ ID NO: 102336 - RNA, 23 nt, Artificial Sequence
  Synthetic
uguauagaagcuguacuuuccag

SEQ ID NO: 102337 - RNA, 24 nt, Artificial Sequence
  Synthetic
uuguauagaagcuguacuuuccag

SEQ ID NO: 102338 - RNA, 18 nt, Artificial Sequence
  Synthetic
aacuauguauguuuccag

SEQ ID NO: 102339 - RNA, 19 nt, Artificial Sequence
  Synthetic
aaacuauguauguuuccag

SEQ ID NO: 102340 - RNA, 20 nt, Artificial Sequence
  Synthetic
caaacuauguauguuuccag

SEQ ID NO: 102341 - RNA, 21 nt, Artificial Sequence
  Synthetic
ucaaacuauguauguuuccag

SEQ ID NO: 102342 - RNA, 22 nt, Artificial Sequence
  Synthetic
cucaaacuauguauguuuccag

SEQ ID NO: 102343 - RNA, 23 nt, Artificial Sequence
  Synthetic
ucucaaacuauguauguuuccag

SEQ ID NO: 102344 - RNA, 24 nt, Artificial Sequence
  Synthetic
uucucaaacuauguauguuuccag

SEQ ID NO: 102345 - RNA, 21 nt, Artificial Sequence
  Synthetic
uacacuuugagaauuuuccag

SEQ ID NO: 102346 - RNA, 22 nt, Artificial Sequence
  Synthetic
uuacacuuugagaauuuuccag

SEQ ID NO: 102347 - RNA, 23 nt, Artificial Sequence
  Synthetic
uuuacacuuugagaauuuuccag

SEQ ID NO: 102348 - RNA, 24 nt, Artificial Sequence
  Synthetic
auuuacacuuugagaauuuuccag

SEQ ID NO: 102349 - RNA, 21 nt, Artificial Sequence
  Synthetic
caucuaugaaaguaaaagcag

SEQ ID NO: 102350 - RNA, 22 nt, Artificial Sequence
  Synthetic
ucaucuaugaaaguaaaagcag

SEQ ID NO: 102351 - RNA, 23 nt, Artificial Sequence
  Synthetic
cucaucuaugaaaguaaaagcag

SEQ ID NO: 102352 - RNA, 24 nt, Artificial Sequence
  Synthetic
ucucaucuaugaaaguaaaagcag

SEQ ID NO: 102353 - RNA, 18 nt, Artificial Sequence
  Synthetic
caacaccuuuaaaagcag

SEQ ID NO: 102354 - RNA, 20 nt, Artificial Sequence
  Synthetic
cgcaacaccuuuaaaagcag

SEQ ID NO: 102355 - RNA, 21 nt, Artificial Sequence
  Synthetic
acgcaacaccuuuaaaagcag

SEQ ID NO: 102356 - RNA, 22 nt, Artificial Sequence
  Synthetic
cacgcaacaccuuuaaaagcag

SEQ ID NO: 102357 - RNA, 23 nt, Artificial Sequence
  Synthetic
ccacgcaacaccuuuaaaagcag

SEQ ID NO: 102358 - RNA, 21 nt, Artificial Sequence
  Synthetic
auuaacaucgaaagaaagcag

SEQ ID NO: 102359 - RNA, 22 nt, Artificial Sequence
  Synthetic
cauuaacaucgaaagaaagcag

SEQ ID NO: 102360 - RNA, 23 nt, Artificial Sequence
  Synthetic
acauuaacaucgaaagaaagcag

SEQ ID NO: 102361 - RNA, 20 nt, Artificial Sequence
  Synthetic
uggacuaaugcuagaagcag

SEQ ID NO: 102362 - RNA, 21 nt, Artificial Sequence
  Synthetic
auggacuaaugcuagaagcag

SEQ ID NO: 102363 - RNA, 22 nt, Artificial Sequence
  Synthetic
uauggacuaaugcuagaagcag

SEQ ID NO: 102364 - RNA, 23 nt, Artificial Sequence
  Synthetic
auauggacuaaugcuagaagcag

SEQ ID NO: 102365 - RNA, 18 nt, Artificial Sequence
  Synthetic
ugauaucaggugaagcag

SEQ ID NO: 102366 - RNA, 19 nt, Artificial Sequence
  Synthetic
uugauaucaggugaagcag

SEQ ID NO: 102367 - RNA, 22 nt, Artificial Sequence
  Synthetic
ugguugauaucaggugaagcag

SEQ ID NO: 102368 - RNA, 23 nt, Artificial Sequence
  Synthetic
uugguugauaucaggugaagcag

SEQ ID NO: 102369 - RNA, 24 nt, Artificial Sequence
  Synthetic
cuugguugauaucaggugaagcag

SEQ ID NO: 102370 - RNA, 18 nt, Artificial Sequence
  Synthetic
uuuaauuccuuuaagcag

SEQ ID NO: 102371 - RNA, 20 nt, Artificial Sequence
  Synthetic
aguuuaauuccuuuaagcag

SEQ ID NO: 102372 - RNA, 21 nt, Artificial Sequence
  Synthetic
uaguuuaauuccuuuaagcag

SEQ ID NO: 102373 - RNA, 22 nt, Artificial Sequence
  Synthetic
auaguuuaauuccuuuaagcag

SEQ ID NO: 102374 - RNA, 23 nt, Artificial Sequence
  Synthetic
aauaguuuaauuccuuuaagcag

SEQ ID NO: 102375 - RNA, 24 nt, Artificial Sequence
  Synthetic
aaauaguuuaauuccuuuaagcag

SEQ ID NO: 102376 - RNA, 22 nt, Artificial Sequence
  Synthetic
agcauaggagaguuuucagcag

SEQ ID NO: 102377 - RNA, 23 nt, Artificial Sequence
  Synthetic
aagcauaggagaguuuucagcag

SEQ ID NO: 102378 - RNA, 18 nt, Artificial Sequence
  Synthetic
ucagagguuugagagcag

SEQ ID NO: 102379 - RNA, 19 nt, Artificial Sequence
  Synthetic
aucagagguuugagagcag

SEQ ID NO: 102380 - RNA, 20 nt, Artificial Sequence
  Synthetic
caucagagguuugagagcag

SEQ ID NO: 102381 - RNA, 21 nt, Artificial Sequence
  Synthetic
ucaucagagguuugagagcag

SEQ ID NO: 102382 - RNA, 22 nt, Artificial Sequence
  Synthetic
aucaucagagguuugagagcag

SEQ ID NO: 102383 - RNA, 23 nt, Artificial Sequence
  Synthetic
aaucaucagagguuugagagcag

SEQ ID NO: 102384 - RNA, 24 nt, Artificial Sequence
  Synthetic
aaaucaucagagguuugagagcag

SEQ ID NO: 102385 - RNA, 18 nt, Artificial Sequence
  Synthetic
cccugaaugagggagcag

SEQ ID NO: 102386 - RNA, 19 nt, Artificial Sequence
  Synthetic
ucccugaaugagggagcag

SEQ ID NO: 102387 - RNA, 20 nt, Artificial Sequence
  Synthetic
uucccugaaugagggagcag

SEQ ID NO: 102388 - RNA, 21 nt, Artificial Sequence
  Synthetic
auucccugaaugagggagcag

SEQ ID NO: 102389 - RNA, 24 nt, Artificial Sequence
  Synthetic
aggauucccugaaugagggagcag

SEQ ID NO: 102390 - RNA, 18 nt, Artificial Sequence
  Synthetic
aaagacggaagcuagcag

SEQ ID NO: 102391 - RNA, 20 nt, Artificial Sequence
  Synthetic
ugaaagacggaagcuagcag

SEQ ID NO: 102392 - RNA, 22 nt, Artificial Sequence
  Synthetic
agugaaagacggaagcuagcag

SEQ ID NO: 102393 - RNA, 24 nt, Artificial Sequence
  Synthetic
agagugaaagacggaagcuagcag

SEQ ID NO: 102394 - RNA, 18 nt, Artificial Sequence
  Synthetic
aguaacacaaauacgcag

SEQ ID NO: 102395 - RNA, 19 nt, Artificial Sequence
  Synthetic
aaguaacacaaauacgcag

SEQ ID NO: 102396 - RNA, 20 nt, Artificial Sequence
  Synthetic
aaaguaacacaaauacgcag

SEQ ID NO: 102397 - RNA, 21 nt, Artificial Sequence
  Synthetic
aaaaguaacacaaauacgcag

SEQ ID NO: 102398 - RNA, 23 nt, Artificial Sequence
  Synthetic
agaaaaguaacacaaauacgcag

SEQ ID NO: 102399 - RNA, 24 nt, Artificial Sequence
  Synthetic
cagaaaaguaacacaaauacgcag

SEQ ID NO: 102400 - RNA, 18 nt, Artificial Sequence
  Synthetic
ccauacagaaaaaggcag

SEQ ID NO: 102401 - RNA, 21 nt, Artificial Sequence
  Synthetic
uggccauacagaaaaaggcag

SEQ ID NO: 102402 - RNA, 22 nt, Artificial Sequence
  Synthetic
uuggccauacagaaaaaggcag

SEQ ID NO: 102403 - RNA, 23 nt, Artificial Sequence
  Synthetic
uuuggccauacagaaaaaggcag

SEQ ID NO: 102404 - RNA, 24 nt, Artificial Sequence
  Synthetic
cuuuggccauacagaaaaaggcag

SEQ ID NO: 102405 - RNA, 21 nt, Artificial Sequence
  Synthetic
cauuucuggaagcaaaggcag

SEQ ID NO: 102406 - RNA, 22 nt, Artificial Sequence
  Synthetic
acauuucuggaagcaaaggcag

SEQ ID NO: 102407 - RNA, 23 nt, Artificial Sequence
  Synthetic
uacauuucuggaagcaaaggcag

SEQ ID NO: 102408 - RNA, 24 nt, Artificial Sequence
  Synthetic
uuacauuucuggaagcaaaggcag

SEQ ID NO: 102409 - RNA, 18 nt, Artificial Sequence
  Synthetic
ugacugggagacaggcag

SEQ ID NO: 102410 - RNA, 19 nt, Artificial Sequence
  Synthetic
uugacugggagacaggcag

SEQ ID NO: 102411 - RNA, 20 nt, Artificial Sequence
  Synthetic
uuugacugggagacaggcag

SEQ ID NO: 102412 - RNA, 21 nt, Artificial Sequence
  Synthetic
cuuugacugggagacaggcag

SEQ ID NO: 102413 - RNA, 22 nt, Artificial Sequence
  Synthetic
ucuuugacugggagacaggcag

SEQ ID NO: 102414 - RNA, 23 nt, Artificial Sequence
  Synthetic
cucuuugacugggagacaggcag

SEQ ID NO: 102415 - RNA, 24 nt, Artificial Sequence
  Synthetic
ucucuuugacugggagacaggcag

SEQ ID NO: 102416 - RNA, 21 nt, Artificial Sequence
  Synthetic
auaaaaaggaaaaggaggcag

SEQ ID NO: 102417 - RNA, 23 nt, Artificial Sequence
  Synthetic
agauaaaaaggaaaaggaggcag

SEQ ID NO: 102418 - RNA, 24 nt, Artificial Sequence
  Synthetic
aagauaaaaaggaaaaggaggcag

SEQ ID NO: 102419 - RNA, 20 nt, Artificial Sequence
  Synthetic
uggaucauaaaggagggcag

SEQ ID NO: 102420 - RNA, 21 nt, Artificial Sequence
  Synthetic
cuggaucauaaaggagggcag

SEQ ID NO: 102421 - RNA, 22 nt, Artificial Sequence
  Synthetic
acuggaucauaaaggagggcag

SEQ ID NO: 102422 - RNA, 23 nt, Artificial Sequence
  Synthetic
aacuggaucauaaaggagggcag

SEQ ID NO: 102423 - RNA, 24 nt, Artificial Sequence
  Synthetic
caacuggaucauaaaggagggcag

SEQ ID NO: 102424 - RNA, 23 nt, Artificial Sequence
  Synthetic
uggaggagucggggagggggcag

SEQ ID NO: 102425 - RNA, 18 nt, Artificial Sequence
  Synthetic
aaucuauacaaauggcag

SEQ ID NO: 102426 - RNA, 20 nt, Artificial Sequence
  Synthetic
ugaaucuauacaaauggcag

SEQ ID NO: 102427 - RNA, 21 nt, Artificial Sequence
  Synthetic
uugaaucuauacaaauggcag

SEQ ID NO: 102428 - RNA, 22 nt, Artificial Sequence
  Synthetic
cuugaaucuauacaaauggcag

SEQ ID NO: 102429 - RNA, 21 nt, Artificial Sequence
  Synthetic
uaaccagaucagaaaaugcag

SEQ ID NO: 102430 - RNA, 22 nt, Artificial Sequence
  Synthetic
cuaaccagaucagaaaaugcag

SEQ ID NO: 102431 - RNA, 23 nt, Artificial Sequence
  Synthetic
ccuaaccagaucagaaaaugcag

SEQ ID NO: 102432 - RNA, 24 nt, Artificial Sequence
  Synthetic
uccuaaccagaucagaaaaugcag

SEQ ID NO: 102433 - RNA, 18 nt, Artificial Sequence
  Synthetic
ccaucagugaaaaugcag

SEQ ID NO: 102434 - RNA, 20 nt, Artificial Sequence
  Synthetic
ugccaucagugaaaaugcag

SEQ ID NO: 102435 - RNA, 22 nt, Artificial Sequence
  Synthetic
ugugccaucagugaaaaugcag

SEQ ID NO: 102436 - RNA, 23 nt, Artificial Sequence
  Synthetic
augugccaucagugaaaaugcag

SEQ ID NO: 102437 - RNA, 24 nt, Artificial Sequence
  Synthetic
caugugccaucagugaaaaugcag

SEQ ID NO: 102438 - RNA, 19 nt, Artificial Sequence
  Synthetic
agugcgggaagagaugcag

SEQ ID NO: 102439 - RNA, 20 nt, Artificial Sequence
  Synthetic
aagugcgggaagagaugcag

SEQ ID NO: 102440 - RNA, 21 nt, Artificial Sequence
  Synthetic
uaagugcgggaagagaugcag

SEQ ID NO: 102441 - RNA, 22 nt, Artificial Sequence
  Synthetic
auaagugcgggaagagaugcag

SEQ ID NO: 102442 - RNA, 23 nt, Artificial Sequence
  Synthetic
uauaagugcgggaagagaugcag

SEQ ID NO: 102443 - RNA, 24 nt, Artificial Sequence
  Synthetic
cuauaagugcgggaagagaugcag

SEQ ID NO: 102444 - RNA, 19 nt, Artificial Sequence
  Synthetic
ugcagaaacagcuaugcag

SEQ ID NO: 102445 - RNA, 20 nt, Artificial Sequence
  Synthetic
cugcagaaacagcuaugcag

SEQ ID NO: 102446 - RNA, 21 nt, Artificial Sequence
  Synthetic
ccugcagaaacagcuaugcag

SEQ ID NO: 102447 - RNA, 22 nt, Artificial Sequence
  Synthetic
accugcagaaacagcuaugcag

SEQ ID NO: 102448 - RNA, 23 nt, Artificial Sequence
  Synthetic
uaccugcagaaacagcuaugcag

SEQ ID NO: 102449 - RNA, 24 nt, Artificial Sequence
  Synthetic
auaccugcagaaacagcuaugcag

SEQ ID NO: 102450 - RNA, 18 nt, Artificial Sequence
  Synthetic
uaguguagaaaacugcag

SEQ ID NO: 102451 - RNA, 19 nt, Artificial Sequence
  Synthetic
auaguguagaaaacugcag

SEQ ID NO: 102452 - RNA, 20 nt, Artificial Sequence
  Synthetic
uauaguguagaaaacugcag

SEQ ID NO: 102453 - RNA, 21 nt, Artificial Sequence
  Synthetic
cuauaguguagaaaacugcag

SEQ ID NO: 102454 - RNA, 22 nt, Artificial Sequence
  Synthetic
acuauaguguagaaaacugcag

SEQ ID NO: 102455 - RNA, 23 nt, Artificial Sequence
  Synthetic
aacuauaguguagaaaacugcag

SEQ ID NO: 102456 - RNA, 24 nt, Artificial Sequence
  Synthetic
uaacuauaguguagaaaacugcag

SEQ ID NO: 102457 - RNA, 18 nt, Artificial Sequence
  Synthetic
uuaucccucagcgugcag

SEQ ID NO: 102458 - RNA, 19 nt, Artificial Sequence
  Synthetic
uuuaucccucagcgugcag

SEQ ID NO: 102459 - RNA, 20 nt, Artificial Sequence
  Synthetic
auuuaucccucagcgugcag

SEQ ID NO: 102460 - RNA, 21 nt, Artificial Sequence
  Synthetic
aauuuaucccucagcgugcag

SEQ ID NO: 102461 - RNA, 22 nt, Artificial Sequence
  Synthetic
caauuuaucccucagcgugcag

SEQ ID NO: 102462 - RNA, 23 nt, Artificial Sequence
  Synthetic
ccaauuuaucccucagcgugcag

SEQ ID NO: 102463 - RNA, 18 nt, Artificial Sequence
  Synthetic
auugauuuugacuugcag

SEQ ID NO: 102464 - RNA, 19 nt, Artificial Sequence
  Synthetic
aauugauuuugacuugcag

SEQ ID NO: 102465 - RNA, 20 nt, Artificial Sequence
  Synthetic
uaauugauuuugacuugcag

SEQ ID NO: 102466 - RNA, 21 nt, Artificial Sequence
  Synthetic
uuaauugauuuugacuugcag

SEQ ID NO: 102467 - RNA, 22 nt, Artificial Sequence
  Synthetic
uuuaauugauuuugacuugcag

SEQ ID NO: 102468 - RNA, 23 nt, Artificial Sequence
  Synthetic
auuuaauugauuuugacuugcag

SEQ ID NO: 102469 - RNA, 24 nt, Artificial Sequence
  Synthetic
uauuuaauugauuuugacuugcag

SEQ ID NO: 102470 - RNA, 19 nt, Artificial Sequence
  Synthetic
uguaguugcuggcuugcag

SEQ ID NO: 102471 - RNA, 20 nt, Artificial Sequence
  Synthetic
auguaguugcuggcuugcag

SEQ ID NO: 102472 - RNA, 21 nt, Artificial Sequence
  Synthetic
aauguaguugcuggcuugcag

SEQ ID NO: 102473 - RNA, 22 nt, Artificial Sequence
  Synthetic
aaauguaguugcuggcuugcag

SEQ ID NO: 102474 - RNA, 19 nt, Artificial Sequence
  Synthetic
aggggccaaaaaguugcag

SEQ ID NO: 102475 - RNA, 20 nt, Artificial Sequence
  Synthetic
uaggggccaaaaaguugcag

SEQ ID NO: 102476 - RNA, 21 nt, Artificial Sequence
  Synthetic
auaggggccaaaaaguugcag

SEQ ID NO: 102477 - RNA, 24 nt, Artificial Sequence
  Synthetic
uggauaggggccaaaaaguugcag

SEQ ID NO: 102478 - RNA, 18 nt, Artificial Sequence
  Synthetic
uccaguacaacuuugcag

SEQ ID NO: 102479 - RNA, 19 nt, Artificial Sequence
  Synthetic
auccaguacaacuuugcag

SEQ ID NO: 102480 - RNA, 21 nt, Artificial Sequence
  Synthetic
ugauccaguacaacuuugcag

SEQ ID NO: 102481 - RNA, 22 nt, Artificial Sequence
  Synthetic
cugauccaguacaacuuugcag

SEQ ID NO: 102482 - RNA, 23 nt, Artificial Sequence
  Synthetic
acugauccaguacaacuuugcag

SEQ ID NO: 102483 - RNA, 24 nt, Artificial Sequence
  Synthetic
aacugauccaguacaacuuugcag

SEQ ID NO: 102484 - RNA, 19 nt, Artificial Sequence
  Synthetic
ugugugccuguguuugcag

SEQ ID NO: 102485 - RNA, 20 nt, Artificial Sequence
  Synthetic
augugugccuguguuugcag

SEQ ID NO: 102486 - RNA, 21 nt, Artificial Sequence
  Synthetic
caugugugccuguguuugcag

SEQ ID NO: 102487 - RNA, 22 nt, Artificial Sequence
  Synthetic
acaugugugccuguguuugcag

SEQ ID NO: 102488 - RNA, 24 nt, Artificial Sequence
  Synthetic
agacaugugugccuguguuugcag

SEQ ID NO: 102489 - RNA, 22 nt, Artificial Sequence
  Synthetic
ugguauuuuuaauuaaaaucag

SEQ ID NO: 102490 - RNA, 23 nt, Artificial Sequence
  Synthetic
uugguauuuuuaauuaaaaucag

SEQ ID NO: 102491 - RNA, 24 nt, Artificial Sequence
  Synthetic
uuugguauuuuuaauuaaaaucag

SEQ ID NO: 102492 - RNA, 18 nt, Artificial Sequence
  Synthetic
aagaaacguauaaaucag

SEQ ID NO: 102493 - RNA, 21 nt, Artificial Sequence
  Synthetic
aggaagaaacguauaaaucag

SEQ ID NO: 102494 - RNA, 23 nt, Artificial Sequence
  Synthetic
agaggaagaaacguauaaaucag

SEQ ID NO: 102495 - RNA, 24 nt, Artificial Sequence
  Synthetic
aagaggaagaaacguauaaaucag

SEQ ID NO: 102496 - RNA, 19 nt, Artificial Sequence
  Synthetic
cgugguuaggaagaaucag

SEQ ID NO: 102497 - RNA, 20 nt, Artificial Sequence
  Synthetic
ucgugguuaggaagaaucag

SEQ ID NO: 102498 - RNA, 21 nt, Artificial Sequence
  Synthetic
cucgugguuaggaagaaucag

SEQ ID NO: 102499 - RNA, 23 nt, Artificial Sequence
  Synthetic
ugcucgugguuaggaagaaucag

SEQ ID NO: 102500 - RNA, 24 nt, Artificial Sequence
  Synthetic
augcucgugguuaggaagaaucag

SEQ ID NO: 102501 - RNA, 18 nt, Artificial Sequence
  Synthetic
accuauuuuuagaaucag

SEQ ID NO: 102502 - RNA, 19 nt, Artificial Sequence
  Synthetic
caccuauuuuuagaaucag

SEQ ID NO: 102503 - RNA, 20 nt, Artificial Sequence
  Synthetic
acaccuauuuuuagaaucag

SEQ ID NO: 102504 - RNA, 21 nt, Artificial Sequence
  Synthetic
aacaccuauuuuuagaaucag

SEQ ID NO: 102505 - RNA, 22 nt, Artificial Sequence
  Synthetic
uaacaccuauuuuuagaaucag

SEQ ID NO: 102506 - RNA, 23 nt, Artificial Sequence
  Synthetic
cuaacaccuauuuuuagaaucag

SEQ ID NO: 102507 - RNA, 24 nt, Artificial Sequence
  Synthetic
ucuaacaccuauuuuuagaaucag

SEQ ID NO: 102508 - RNA, 18 nt, Artificial Sequence
  Synthetic
cagugagggaggaaucag

SEQ ID NO: 102509 - RNA, 19 nt, Artificial Sequence
  Synthetic
ucagugagggaggaaucag

SEQ ID NO: 102510 - RNA, 20 nt, Artificial Sequence
  Synthetic
uucagugagggaggaaucag

SEQ ID NO: 102511 - RNA, 21 nt, Artificial Sequence
  Synthetic
cuucagugagggaggaaucag

SEQ ID NO: 102512 - RNA, 23 nt, Artificial Sequence
  Synthetic
ugcuucagugagggaggaaucag

SEQ ID NO: 102513 - RNA, 24 nt, Artificial Sequence
  Synthetic
uugcuucagugagggaggaaucag

SEQ ID NO: 102514 - RNA, 18 nt, Artificial Sequence
  Synthetic
aauagugcuaguaaucag

SEQ ID NO: 102515 - RNA, 19 nt, Artificial Sequence
  Synthetic
uaauagugcuaguaaucag

SEQ ID NO: 102516 - RNA, 20 nt, Artificial Sequence
  Synthetic
uuaauagugcuaguaaucag

SEQ ID NO: 102517 - RNA, 21 nt, Artificial Sequence
  Synthetic
cuuaauagugcuaguaaucag

SEQ ID NO: 102518 - RNA, 23 nt, Artificial Sequence
  Synthetic
ugcuuaauagugcuaguaaucag

SEQ ID NO: 102519 - RNA, 24 nt, Artificial Sequence
  Synthetic
augcuuaauagugcuaguaaucag

SEQ ID NO: 102520 - RNA, 18 nt, Artificial Sequence
  Synthetic
aacucauucaaagaucag

SEQ ID NO: 102521 - RNA, 19 nt, Artificial Sequence
  Synthetic
uaacucauucaaagaucag

SEQ ID NO: 102522 - RNA, 20 nt, Artificial Sequence
  Synthetic
cuaacucauucaaagaucag

SEQ ID NO: 102523 - RNA, 21 nt, Artificial Sequence
  Synthetic
ccuaacucauucaaagaucag

SEQ ID NO: 102524 - RNA, 22 nt, Artificial Sequence
  Synthetic
uccuaacucauucaaagaucag

SEQ ID NO: 102525 - RNA, 23 nt, Artificial Sequence
  Synthetic
uuccuaacucauucaaagaucag

SEQ ID NO: 102526 - RNA, 21 nt, Artificial Sequence
  Synthetic
auuuuauuauuuuuugaucag

SEQ ID NO: 102527 - RNA, 22 nt, Artificial Sequence
  Synthetic
aauuuuauuauuuuuugaucag

SEQ ID NO: 102528 - RNA, 23 nt, Artificial Sequence
  Synthetic
caauuuuauuauuuuuugaucag

SEQ ID NO: 102529 - RNA, 24 nt, Artificial Sequence
  Synthetic
acaauuuuauuauuuuuugaucag

SEQ ID NO: 102530 - RNA, 18 nt, Artificial Sequence
  Synthetic
aaaugaaaguaauaucag

SEQ ID NO: 102531 - RNA, 19 nt, Artificial Sequence
  Synthetic
aaaaugaaaguaauaucag

SEQ ID NO: 102532 - RNA, 21 nt, Artificial Sequence
  Synthetic
agaaaaugaaaguaauaucag

SEQ ID NO: 102533 - RNA, 22 nt, Artificial Sequence
  Synthetic
uagaaaaugaaaguaauaucag

SEQ ID NO: 102534 - RNA, 23 nt, Artificial Sequence
  Synthetic
auagaaaaugaaaguaauaucag

SEQ ID NO: 102535 - RNA, 24 nt, Artificial Sequence
  Synthetic
cauagaaaaugaaaguaauaucag

SEQ ID NO: 102536 - RNA, 19 nt, Artificial Sequence
  Synthetic
uguuaauaccacauaucag

SEQ ID NO: 102537 - RNA, 20 nt, Artificial Sequence
  Synthetic
cuguuaauaccacauaucag

SEQ ID NO: 102538 - RNA, 21 nt, Artificial Sequence
  Synthetic
ucuguuaauaccacauaucag

SEQ ID NO: 102539 - RNA, 22 nt, Artificial Sequence
  Synthetic
aucuguuaauaccacauaucag

SEQ ID NO: 102540 - RNA, 24 nt, Artificial Sequence
  Synthetic
ugaucuguuaauaccacauaucag

SEQ ID NO: 102541 - RNA, 19 nt, Artificial Sequence
  Synthetic
aguuccuaugaacuaucag

SEQ ID NO: 102542 - RNA, 20 nt, Artificial Sequence
  Synthetic
aaguuccuaugaacuaucag

SEQ ID NO: 102543 - RNA, 21 nt, Artificial Sequence
  Synthetic
aaaguuccuaugaacuaucag

SEQ ID NO: 102544 - RNA, 23 nt, Artificial Sequence
  Synthetic
ugaaaguuccuaugaacuaucag

SEQ ID NO: 102545 - RNA, 24 nt, Artificial Sequence
  Synthetic
uugaaaguuccuaugaacuaucag

SEQ ID NO: 102546 - RNA, 18 nt, Artificial Sequence
  Synthetic
auuuaaauagcguaucag

SEQ ID NO: 102547 - RNA, 19 nt, Artificial Sequence
  Synthetic
uauuuaaauagcguaucag

SEQ ID NO: 102548 - RNA, 20 nt, Artificial Sequence
  Synthetic
uuauuuaaauagcguaucag

SEQ ID NO: 102549 - RNA, 21 nt, Artificial Sequence
  Synthetic
cuuauuuaaauagcguaucag

SEQ ID NO: 102550 - RNA, 22 nt, Artificial Sequence
  Synthetic
acuuauuuaaauagcguaucag

SEQ ID NO: 102551 - RNA, 23 nt, Artificial Sequence
  Synthetic
aacuuauuuaaauagcguaucag

SEQ ID NO: 102552 - RNA, 24 nt, Artificial Sequence
  Synthetic
caacuuauuuaaauagcguaucag

SEQ ID NO: 102553 - RNA, 18 nt, Artificial Sequence
  Synthetic
ucagguuguucuuaucag

SEQ ID NO: 102554 - RNA, 19 nt, Artificial Sequence
  Synthetic
cucagguuguucuuaucag

SEQ ID NO: 102555 - RNA, 20 nt, Artificial Sequence
  Synthetic
ucucagguuguucuuaucag

SEQ ID NO: 102556 - RNA, 21 nt, Artificial Sequence
  Synthetic
cucucagguuguucuuaucag

SEQ ID NO: 102557 - RNA, 22 nt, Artificial Sequence
  Synthetic
acucucagguuguucuuaucag

SEQ ID NO: 102558 - RNA, 23 nt, Artificial Sequence
  Synthetic
cacucucagguuguucuuaucag

SEQ ID NO: 102559 - RNA, 24 nt, Artificial Sequence
  Synthetic
ucacucucagguuguucuuaucag

SEQ ID NO: 102560 - RNA, 18 nt, Artificial Sequence
  Synthetic
aaugcugccaguuaucag

SEQ ID NO: 102561 - RNA, 19 nt, Artificial Sequence
  Synthetic
aaaugcugccaguuaucag

SEQ ID NO: 102562 - RNA, 20 nt, Artificial Sequence
  Synthetic
uaaaugcugccaguuaucag

SEQ ID NO: 102563 - RNA, 21 nt, Artificial Sequence
  Synthetic
cuaaaugcugccaguuaucag

SEQ ID NO: 102564 - RNA, 22 nt, Artificial Sequence
  Synthetic
ucuaaaugcugccaguuaucag

SEQ ID NO: 102565 - RNA, 23 nt, Artificial Sequence
  Synthetic
aucuaaaugcugccaguuaucag

SEQ ID NO: 102566 - RNA, 24 nt, Artificial Sequence
  Synthetic
aaucuaaaugcugccaguuaucag

SEQ ID NO: 102567 - RNA, 18 nt, Artificial Sequence
  Synthetic
uuguggaggcuuuaucag

SEQ ID NO: 102568 - RNA, 19 nt, Artificial Sequence
  Synthetic
auuguggaggcuuuaucag

SEQ ID NO: 102569 - RNA, 20 nt, Artificial Sequence
  Synthetic
cauuguggaggcuuuaucag

SEQ ID NO: 102570 - RNA, 22 nt, Artificial Sequence
  Synthetic
ugcauuguggaggcuuuaucag

SEQ ID NO: 102571 - RNA, 23 nt, Artificial Sequence
  Synthetic
uugcauuguggaggcuuuaucag

SEQ ID NO: 102572 - RNA, 24 nt, Artificial Sequence
  Synthetic
uuugcauuguggaggcuuuaucag

SEQ ID NO: 102573 - RNA, 18 nt, Artificial Sequence
  Synthetic
uuuucuauguauacucag

SEQ ID NO: 102574 - RNA, 19 nt, Artificial Sequence
  Synthetic
uuuuucuauguauacucag

SEQ ID NO: 102575 - RNA, 20 nt, Artificial Sequence
  Synthetic
cuuuuucuauguauacucag

SEQ ID NO: 102576 - RNA, 21 nt, Artificial Sequence
  Synthetic
ucuuuuucuauguauacucag

SEQ ID NO: 102577 - RNA, 22 nt, Artificial Sequence
  Synthetic
uucuuuuucuauguauacucag

SEQ ID NO: 102578 - RNA, 23 nt, Artificial Sequence
  Synthetic
cuucuuuuucuauguauacucag

SEQ ID NO: 102579 - RNA, 24 nt, Artificial Sequence
  Synthetic
ccuucuuuuucuauguauacucag

SEQ ID NO: 102580 - RNA, 21 nt, Artificial Sequence
  Synthetic
auucucaaaauguuuccucag

SEQ ID NO: 102581 - RNA, 22 nt, Artificial Sequence
  Synthetic
uauucucaaaauguuuccucag

SEQ ID NO: 102582 - RNA, 23 nt, Artificial Sequence
  Synthetic
uuauucucaaaauguuuccucag

SEQ ID NO: 102583 - RNA, 18 nt, Artificial Sequence
  Synthetic
uuuaggaaaacagcucag

SEQ ID NO: 102584 - RNA, 20 nt, Artificial Sequence
  Synthetic
aguuuaggaaaacagcucag

SEQ ID NO: 102585 - RNA, 21 nt, Artificial Sequence
  Synthetic
aaguuuaggaaaacagcucag

SEQ ID NO: 102586 - RNA, 24 nt, Artificial Sequence
  Synthetic
aggaaguuuaggaaaacagcucag

SEQ ID NO: 102587 - RNA, 18 nt, Artificial Sequence
  Synthetic
augaggugaugagcucag

SEQ ID NO: 102588 - RNA, 20 nt, Artificial Sequence
  Synthetic
agaugaggugaugagcucag

SEQ ID NO: 102589 - RNA, 21 nt, Artificial Sequence
  Synthetic
uagaugaggugaugagcucag

SEQ ID NO: 102590 - RNA, 22 nt, Artificial Sequence
  Synthetic
auagaugaggugaugagcucag

SEQ ID NO: 102591 - RNA, 23 nt, Artificial Sequence
  Synthetic
uauagaugaggugaugagcucag

SEQ ID NO: 102592 - RNA, 24 nt, Artificial Sequence
  Synthetic
uuauagaugaggugaugagcucag

SEQ ID NO: 102593 - RNA, 18 nt, Artificial Sequence
  Synthetic
uaaauguaaauagcucag

SEQ ID NO: 102594 - RNA, 19 nt, Artificial Sequence
  Synthetic
uuaaauguaaauagcucag

SEQ ID NO: 102595 - RNA, 20 nt, Artificial Sequence
  Synthetic
uuuaaauguaaauagcucag

SEQ ID NO: 102596 - RNA, 22 nt, Artificial Sequence
  Synthetic
aguuuaaauguaaauagcucag

SEQ ID NO: 102597 - RNA, 23 nt, Artificial Sequence
  Synthetic
caguuuaaauguaaauagcucag

SEQ ID NO: 102598 - RNA, 24 nt, Artificial Sequence
  Synthetic
acaguuuaaauguaaauagcucag

SEQ ID NO: 102599 - RNA, 18 nt, Artificial Sequence
  Synthetic
uguucuggacaugcucag

SEQ ID NO: 102600 - RNA, 19 nt, Artificial Sequence
  Synthetic
uuguucuggacaugcucag

SEQ ID NO: 102601 - RNA, 21 nt, Artificial Sequence
  Synthetic
aguuguucuggacaugcucag

SEQ ID NO: 102602 - RNA, 22 nt, Artificial Sequence
  Synthetic
caguuguucuggacaugcucag

SEQ ID NO: 102603 - RNA, 23 nt, Artificial Sequence
  Synthetic
ccaguuguucuggacaugcucag

SEQ ID NO: 102604 - RNA, 24 nt, Artificial Sequence
  Synthetic
accaguuguucuggacaugcucag

SEQ ID NO: 102605 - RNA, 18 nt, Artificial Sequence
  Synthetic
uugcagguaggcucucag

SEQ ID NO: 102606 - RNA, 19 nt, Artificial Sequence
  Synthetic
auugcagguaggcucucag

SEQ ID NO: 102607 - RNA, 20 nt, Artificial Sequence
  Synthetic
uauugcagguaggcucucag

SEQ ID NO: 102608 - RNA, 22 nt, Artificial Sequence
  Synthetic
cguauugcagguaggcucucag

SEQ ID NO: 102609 - RNA, 23 nt, Artificial Sequence
  Synthetic
ucguauugcagguaggcucucag

SEQ ID NO: 102610 - RNA, 24 nt, Artificial Sequence
  Synthetic
uucguauugcagguaggcucucag

SEQ ID NO: 102611 - RNA, 18 nt, Artificial Sequence
  Synthetic
ucaugcaucaagucucag

SEQ ID NO: 102612 - RNA, 19 nt, Artificial Sequence
  Synthetic
aucaugcaucaagucucag

SEQ ID NO: 102613 - RNA, 20 nt, Artificial Sequence
  Synthetic
uaucaugcaucaagucucag

SEQ ID NO: 102614 - RNA, 21 nt, Artificial Sequence
  Synthetic
auaucaugcaucaagucucag

SEQ ID NO: 102615 - RNA, 22 nt, Artificial Sequence
  Synthetic
aauaucaugcaucaagucucag

SEQ ID NO: 102616 - RNA, 23 nt, Artificial Sequence
  Synthetic
aaauaucaugcaucaagucucag

SEQ ID NO: 102617 - RNA, 24 nt, Artificial Sequence
  Synthetic
uaaauaucaugcaucaagucucag

SEQ ID NO: 102618 - RNA, 18 nt, Artificial Sequence
  Synthetic
cuauaaugaguuucucag

SEQ ID NO: 102619 - RNA, 19 nt, Artificial Sequence
  Synthetic
ucuauaaugaguuucucag

SEQ ID NO: 102620 - RNA, 20 nt, Artificial Sequence
  Synthetic
uucuauaaugaguuucucag

SEQ ID NO: 102621 - RNA, 21 nt, Artificial Sequence
  Synthetic
auucuauaaugaguuucucag

SEQ ID NO: 102622 - RNA, 22 nt, Artificial Sequence
  Synthetic
aauucuauaaugaguuucucag

SEQ ID NO: 102623 - RNA, 24 nt, Artificial Sequence
  Synthetic
ugaauucuauaaugaguuucucag

SEQ ID NO: 102624 - RNA, 19 nt, Artificial Sequence
  Synthetic
ugccacuuguauaagucag

SEQ ID NO: 102625 - RNA, 20 nt, Artificial Sequence
  Synthetic
uugccacuuguauaagucag

SEQ ID NO: 102626 - RNA, 21 nt, Artificial Sequence
  Synthetic
auugccacuuguauaagucag

SEQ ID NO: 102627 - RNA, 22 nt, Artificial Sequence
  Synthetic
uauugccacuuguauaagucag

SEQ ID NO: 102628 - RNA, 23 nt, Artificial Sequence
  Synthetic
uuauugccacuuguauaagucag

SEQ ID NO: 102629 - RNA, 19 nt, Artificial Sequence
  Synthetic
aggccaauuugacagucag

SEQ ID NO: 102630 - RNA, 21 nt, Artificial Sequence
  Synthetic
agaggccaauuugacagucag

SEQ ID NO: 102631 - RNA, 22 nt, Artificial Sequence
  Synthetic
uagaggccaauuugacagucag

SEQ ID NO: 102632 - RNA, 23 nt, Artificial Sequence
  Synthetic
uuagaggccaauuugacagucag

SEQ ID NO: 102633 - RNA, 24 nt, Artificial Sequence
  Synthetic
cuuagaggccaauuugacagucag

SEQ ID NO: 102634 - RNA, 18 nt, Artificial Sequence
  Synthetic
aaauacuuagcgagucag

SEQ ID NO: 102635 - RNA, 20 nt, Artificial Sequence
  Synthetic
agaaauacuuagcgagucag

SEQ ID NO: 102636 - RNA, 21 nt, Artificial Sequence
  Synthetic
aagaaauacuuagcgagucag

SEQ ID NO: 102637 - RNA, 23 nt, Artificial Sequence
  Synthetic
agaagaaauacuuagcgagucag

SEQ ID NO: 102638 - RNA, 24 nt, Artificial Sequence
  Synthetic
uagaagaaauacuuagcgagucag

SEQ ID NO: 102639 - RNA, 18 nt, Artificial Sequence
  Synthetic
ugcacagcgucuagucag

SEQ ID NO: 102640 - RNA, 19 nt, Artificial Sequence
  Synthetic
augcacagcgucuagucag

SEQ ID NO: 102641 - RNA, 20 nt, Artificial Sequence
  Synthetic
uaugcacagcgucuagucag

SEQ ID NO: 102642 - RNA, 21 nt, Artificial Sequence
  Synthetic
auaugcacagcgucuagucag

SEQ ID NO: 102643 - RNA, 22 nt, Artificial Sequence
  Synthetic
aauaugcacagcgucuagucag

SEQ ID NO: 102644 - RNA, 24 nt, Artificial Sequence
  Synthetic
agaauaugcacagcgucuagucag

SEQ ID NO: 102645 - RNA, 18 nt, Artificial Sequence
  Synthetic
ucagagccacaaggucag

SEQ ID NO: 102646 - RNA, 19 nt, Artificial Sequence
  Synthetic
cucagagccacaaggucag

SEQ ID NO: 102647 - RNA, 21 nt, Artificial Sequence
  Synthetic
agcucagagccacaaggucag

SEQ ID NO: 102648 - RNA, 22 nt, Artificial Sequence
  Synthetic
aagcucagagccacaaggucag

SEQ ID NO: 102649 - RNA, 23 nt, Artificial Sequence
  Synthetic
caagcucagagccacaaggucag

SEQ ID NO: 102650 - RNA, 24 nt, Artificial Sequence
  Synthetic
acaagcucagagccacaaggucag

SEQ ID NO: 102651 - RNA, 18 nt, Artificial Sequence
  Synthetic
cauaaauuacaaggucag

SEQ ID NO: 102652 - RNA, 20 nt, Artificial Sequence
  Synthetic
agcauaaauuacaaggucag

SEQ ID NO: 102653 - RNA, 21 nt, Artificial Sequence
  Synthetic
aagcauaaauuacaaggucag

SEQ ID NO: 102654 - RNA, 22 nt, Artificial Sequence
  Synthetic
caagcauaaauuacaaggucag

SEQ ID NO: 102655 - RNA, 23 nt, Artificial Sequence
  Synthetic
acaagcauaaauuacaaggucag

SEQ ID NO: 102656 - RNA, 18 nt, Artificial Sequence
  Synthetic
auaguagaguccugucag

SEQ ID NO: 102657 - RNA, 19 nt, Artificial Sequence
  Synthetic
uauaguagaguccugucag

SEQ ID NO: 102658 - RNA, 20 nt, Artificial Sequence
  Synthetic
uuauaguagaguccugucag

SEQ ID NO: 102659 - RNA, 21 nt, Artificial Sequence
  Synthetic
cuuauaguagaguccugucag

SEQ ID NO: 102660 - RNA, 22 nt, Artificial Sequence
  Synthetic
acuuauaguagaguccugucag

SEQ ID NO: 102661 - RNA, 23 nt, Artificial Sequence
  Synthetic
aacuuauaguagaguccugucag

SEQ ID NO: 102662 - RNA, 24 nt, Artificial Sequence
  Synthetic
aaacuuauaguagaguccugucag

SEQ ID NO: 102663 - RNA, 18 nt, Artificial Sequence
  Synthetic
aagauuuugaaaauucag

SEQ ID NO: 102664 - RNA, 19 nt, Artificial Sequence
  Synthetic
caagauuuugaaaauucag

SEQ ID NO: 102665 - RNA, 20 nt, Artificial Sequence
  Synthetic
acaagauuuugaaaauucag

SEQ ID NO: 102666 - RNA, 21 nt, Artificial Sequence
  Synthetic
aacaagauuuugaaaauucag

SEQ ID NO: 102667 - RNA, 22 nt, Artificial Sequence
  Synthetic
uaacaagauuuugaaaauucag

SEQ ID NO: 102668 - RNA, 23 nt, Artificial Sequence
  Synthetic
auaacaagauuuugaaaauucag

SEQ ID NO: 102669 - RNA, 18 nt, Artificial Sequence
  Synthetic
aaauguguugggauucag

SEQ ID NO: 102670 - RNA, 19 nt, Artificial Sequence
  Synthetic
caaauguguugggauucag

SEQ ID NO: 102671 - RNA, 20 nt, Artificial Sequence
  Synthetic
acaaauguguugggauucag

SEQ ID NO: 102672 - RNA, 21 nt, Artificial Sequence
  Synthetic
cacaaauguguugggauucag

SEQ ID NO: 102673 - RNA, 22 nt, Artificial Sequence
  Synthetic
ucacaaauguguugggauucag

SEQ ID NO: 102674 - RNA, 23 nt, Artificial Sequence
  Synthetic
cucacaaauguguugggauucag

SEQ ID NO: 102675 - RNA, 19 nt, Artificial Sequence
  Synthetic
agguguuuuauggauucag

SEQ ID NO: 102676 - RNA, 20 nt, Artificial Sequence
  Synthetic
aagguguuuuauggauucag

SEQ ID NO: 102677 - RNA, 21 nt, Artificial Sequence
  Synthetic
aaagguguuuuauggauucag

SEQ ID NO: 102678 - RNA, 23 nt, Artificial Sequence
  Synthetic
ugaaagguguuuuauggauucag

SEQ ID NO: 102679 - RNA, 24 nt, Artificial Sequence
  Synthetic
cugaaagguguuuuauggauucag

SEQ ID NO: 102680 - RNA, 18 nt, Artificial Sequence
  Synthetic
aaaugugucuggauucag

SEQ ID NO: 102681 - RNA, 19 nt, Artificial Sequence
  Synthetic
caaaugugucuggauucag

SEQ ID NO: 102682 - RNA, 20 nt, Artificial Sequence
  Synthetic
acaaaugugucuggauucag

SEQ ID NO: 102683 - RNA, 21 nt, Artificial Sequence
  Synthetic
aacaaaugugucuggauucag

SEQ ID NO: 102684 - RNA, 22 nt, Artificial Sequence
  Synthetic
aaacaaaugugucuggauucag

SEQ ID NO: 102685 - RNA, 23 nt, Artificial Sequence
  Synthetic
uaaacaaaugugucuggauucag

SEQ ID NO: 102686 - RNA, 24 nt, Artificial Sequence
  Synthetic
uuaaacaaaugugucuggauucag

SEQ ID NO: 102687 - RNA, 18 nt, Artificial Sequence
  Synthetic
ucucuugucccuauucag

SEQ ID NO: 102688 - RNA, 19 nt, Artificial Sequence
  Synthetic
uucucuugucccuauucag

SEQ ID NO: 102689 - RNA, 20 nt, Artificial Sequence
  Synthetic
auucucuugucccuauucag

SEQ ID NO: 102690 - RNA, 21 nt, Artificial Sequence
  Synthetic
aauucucuugucccuauucag

SEQ ID NO: 102691 - RNA, 23 nt, Artificial Sequence
  Synthetic
cgaauucucuugucccuauucag

SEQ ID NO: 102692 - RNA, 24 nt, Artificial Sequence
  Synthetic
acgaauucucuugucccuauucag

SEQ ID NO: 102693 - RNA, 18 nt, Artificial Sequence
  Synthetic
aacccaguuucuauucag

SEQ ID NO: 102694 - RNA, 20 nt, Artificial Sequence
  Synthetic
agaacccaguuucuauucag

SEQ ID NO: 102695 - RNA, 21 nt, Artificial Sequence
  Synthetic
uagaacccaguuucuauucag

SEQ ID NO: 102696 - RNA, 22 nt, Artificial Sequence
  Synthetic
auagaacccaguuucuauucag

SEQ ID NO: 102697 - RNA, 23 nt, Artificial Sequence
  Synthetic
aauagaacccaguuucuauucag

SEQ ID NO: 102698 - RNA, 24 nt, Artificial Sequence
  Synthetic
caauagaacccaguuucuauucag

SEQ ID NO: 102699 - RNA, 18 nt, Artificial Sequence
  Synthetic
uaauuugagaaacuucag

SEQ ID NO: 102700 - RNA, 20 nt, Artificial Sequence
  Synthetic
uguaauuugagaaacuucag

SEQ ID NO: 102701 - RNA, 21 nt, Artificial Sequence
  Synthetic
uuguaauuugagaaacuucag

SEQ ID NO: 102702 - RNA, 22 nt, Artificial Sequence
  Synthetic
cuuguaauuugagaaacuucag

SEQ ID NO: 102703 - RNA, 23 nt, Artificial Sequence
  Synthetic
ucuuguaauuugagaaacuucag

SEQ ID NO: 102704 - RNA, 24 nt, Artificial Sequence
  Synthetic
aucuuguaauuugagaaacuucag

SEQ ID NO: 102705 - RNA, 20 nt, Artificial Sequence
  Synthetic
uggaaaacagaacacuucag

SEQ ID NO: 102706 - RNA, 21 nt, Artificial Sequence
  Synthetic
cuggaaaacagaacacuucag

SEQ ID NO: 102707 - RNA, 22 nt, Artificial Sequence
  Synthetic
ccuggaaaacagaacacuucag

SEQ ID NO: 102708 - RNA, 23 nt, Artificial Sequence
  Synthetic
accuggaaaacagaacacuucag

SEQ ID NO: 102709 - RNA, 24 nt, Artificial Sequence
  Synthetic
aaccuggaaaacagaacacuucag

SEQ ID NO: 102710 - RNA, 18 nt, Artificial Sequence
  Synthetic
cauacacaacaccuucag

SEQ ID NO: 102711 - RNA, 19 nt, Artificial Sequence
  Synthetic
acauacacaacaccuucag

SEQ ID NO: 102712 - RNA, 20 nt, Artificial Sequence
  Synthetic
aacauacacaacaccuucag

SEQ ID NO: 102713 - RNA, 21 nt, Artificial Sequence
  Synthetic
aaacauacacaacaccuucag

SEQ ID NO: 102714 - RNA, 22 nt, Artificial Sequence
  Synthetic
aaaacauacacaacaccuucag

SEQ ID NO: 102715 - RNA, 24 nt, Artificial Sequence
  Synthetic
agaaaacauacacaacaccuucag

SEQ ID NO: 102716 - RNA, 18 nt, Artificial Sequence
  Synthetic
caauuuauacaccuucag

SEQ ID NO: 102717 - RNA, 19 nt, Artificial Sequence
  Synthetic
acaauuuauacaccuucag

SEQ ID NO: 102718 - RNA, 20 nt, Artificial Sequence
  Synthetic
aacaauuuauacaccuucag

SEQ ID NO: 102719 - RNA, 21 nt, Artificial Sequence
  Synthetic
uaacaauuuauacaccuucag

SEQ ID NO: 102720 - RNA, 22 nt, Artificial Sequence
  Synthetic
uuaacaauuuauacaccuucag

SEQ ID NO: 102721 - RNA, 23 nt, Artificial Sequence
  Synthetic
uuuaacaauuuauacaccuucag

SEQ ID NO: 102722 - RNA, 24 nt, Artificial Sequence
  Synthetic
auuuaacaauuuauacaccuucag

SEQ ID NO: 102723 - RNA, 19 nt, Artificial Sequence
  Synthetic
cgcuccccaaaugcuucag

SEQ ID NO: 102724 - RNA, 20 nt, Artificial Sequence
  Synthetic
ucgcuccccaaaugcuucag

SEQ ID NO: 102725 - RNA, 21 nt, Artificial Sequence
  Synthetic
cucgcuccccaaaugcuucag

SEQ ID NO: 102726 - RNA, 22 nt, Artificial Sequence
  Synthetic
ccucgcuccccaaaugcuucag

SEQ ID NO: 102727 - RNA, 23 nt, Artificial Sequence
  Synthetic
cccucgcuccccaaaugcuucag

SEQ ID NO: 102728 - RNA, 24 nt, Artificial Sequence
  Synthetic
acccucgcuccccaaaugcuucag

SEQ ID NO: 102729 - RNA, 18 nt, Artificial Sequence
  Synthetic
aauguuccagauguucag

SEQ ID NO: 102730 - RNA, 19 nt, Artificial Sequence
  Synthetic
caauguuccagauguucag

SEQ ID NO: 102731 - RNA, 21 nt, Artificial Sequence
  Synthetic
ugcaauguuccagauguucag

SEQ ID NO: 102732 - RNA, 22 nt, Artificial Sequence
  Synthetic
augcaauguuccagauguucag

SEQ ID NO: 102733 - RNA, 23 nt, Artificial Sequence
  Synthetic
aaugcaauguuccagauguucag

SEQ ID NO: 102734 - RNA, 18 nt, Artificial Sequence
  Synthetic
augauaugaaguguucag

SEQ ID NO: 102735 - RNA, 20 nt, Artificial Sequence
  Synthetic
agaugauaugaaguguucag

SEQ ID NO: 102736 - RNA, 18 nt, Artificial Sequence
  Synthetic
aaacacaacauuguucag

SEQ ID NO: 102737 - RNA, 19 nt, Artificial Sequence
  Synthetic
aaaacacaacauuguucag

SEQ ID NO: 102738 - RNA, 20 nt, Artificial Sequence
  Synthetic
aaaaacacaacauuguucag

SEQ ID NO: 102739 - RNA, 23 nt, Artificial Sequence
  Synthetic
uggaaaaacacaacauuguucag

SEQ ID NO: 102740 - RNA, 24 nt, Artificial Sequence
  Synthetic
auggaaaaacacaacauuguucag

SEQ ID NO: 102741 - RNA, 18 nt, Artificial Sequence
  Synthetic
uugauuccucuauuucag

SEQ ID NO: 102742 - RNA, 19 nt, Artificial Sequence
  Synthetic
uuugauuccucuauuucag

SEQ ID NO: 102743 - RNA, 20 nt, Artificial Sequence
  Synthetic
cuuugauuccucuauuucag

SEQ ID NO: 102744 - RNA, 21 nt, Artificial Sequence
  Synthetic
acuuugauuccucuauuucag

SEQ ID NO: 102745 - RNA, 22 nt, Artificial Sequence
  Synthetic
uacuuugauuccucuauuucag

SEQ ID NO: 102746 - RNA, 23 nt, Artificial Sequence
  Synthetic
auacuuugauuccucuauuucag

SEQ ID NO: 102747 - RNA, 24 nt, Artificial Sequence
  Synthetic
cauacuuugauuccucuauuucag

SEQ ID NO: 102748 - RNA, 18 nt, Artificial Sequence
  Synthetic
aucuuuuagauuuuucag

SEQ ID NO: 102749 - RNA, 19 nt, Artificial Sequence
  Synthetic
caucuuuuagauuuuucag

SEQ ID NO: 102750 - RNA, 20 nt, Artificial Sequence
  Synthetic
acaucuuuuagauuuuucag

SEQ ID NO: 102751 - RNA, 21 nt, Artificial Sequence
  Synthetic
aacaucuuuuagauuuuucag

SEQ ID NO: 102752 - RNA, 23 nt, Artificial Sequence
  Synthetic
ugaacaucuuuuagauuuuucag

SEQ ID NO: 102753 - RNA, 24 nt, Artificial Sequence
  Synthetic
augaacaucuuuuagauuuuucag

SEQ ID NO: 102754 - RNA, 18 nt, Artificial Sequence
  Synthetic
cucauucagcuuuuucag

SEQ ID NO: 102755 - RNA, 19 nt, Artificial Sequence
  Synthetic
ccucauucagcuuuuucag

SEQ ID NO: 102756 - RNA, 20 nt, Artificial Sequence
  Synthetic
accucauucagcuuuuucag

SEQ ID NO: 102757 - RNA, 21 nt, Artificial Sequence
  Synthetic
uaccucauucagcuuuuucag

SEQ ID NO: 102758 - RNA, 22 nt, Artificial Sequence
  Synthetic
cuaccucauucagcuuuuucag

SEQ ID NO: 102759 - RNA, 23 nt, Artificial Sequence
  Synthetic
ccuaccucauucagcuuuuucag

SEQ ID NO: 102760 - RNA, 18 nt, Artificial Sequence
  Synthetic
auguguaaugaaaaagag

SEQ ID NO: 102761 - RNA, 19 nt, Artificial Sequence
  Synthetic
uauguguaaugaaaaagag

SEQ ID NO: 102762 - RNA, 20 nt, Artificial Sequence
  Synthetic
uuauguguaaugaaaaagag

SEQ ID NO: 102763 - RNA, 22 nt, Artificial Sequence
  Synthetic
uguuauguguaaugaaaaagag

SEQ ID NO: 102764 - RNA, 23 nt, Artificial Sequence
  Synthetic
auguuauguguaaugaaaaagag

SEQ ID NO: 102765 - RNA, 24 nt, Artificial Sequence
  Synthetic
aauguuauguguaaugaaaaagag

SEQ ID NO: 102766 - RNA, 18 nt, Artificial Sequence
  Synthetic
ugaauuguaguaaaagag

SEQ ID NO: 102767 - RNA, 19 nt, Artificial Sequence
  Synthetic
cugaauuguaguaaaagag

SEQ ID NO: 102768 - RNA, 20 nt, Artificial Sequence
  Synthetic
ccugaauuguaguaaaagag

SEQ ID NO: 102769 - RNA, 21 nt, Artificial Sequence
  Synthetic
uccugaauuguaguaaaagag

SEQ ID NO: 102770 - RNA, 23 nt, Artificial Sequence
  Synthetic
aguccugaauuguaguaaaagag

SEQ ID NO: 102771 - RNA, 24 nt, Artificial Sequence
  Synthetic
caguccugaauuguaguaaaagag

SEQ ID NO: 102772 - RNA, 18 nt, Artificial Sequence
  Synthetic
agauugcauuuaaaagag

SEQ ID NO: 102773 - RNA, 19 nt, Artificial Sequence
  Synthetic
aagauugcauuuaaaagag

SEQ ID NO: 102774 - RNA, 20 nt, Artificial Sequence
  Synthetic
aaagauugcauuuaaaagag

SEQ ID NO: 102775 - RNA, 21 nt, Artificial Sequence
  Synthetic
caaagauugcauuuaaaagag

SEQ ID NO: 102776 - RNA, 22 nt, Artificial Sequence
  Synthetic
ccaaagauugcauuuaaaagag

SEQ ID NO: 102777 - RNA, 23 nt, Artificial Sequence
  Synthetic
accaaagauugcauuuaaaagag

SEQ ID NO: 102778 - RNA, 24 nt, Artificial Sequence
  Synthetic
aaccaaagauugcauuuaaaagag

SEQ ID NO: 102779 - RNA, 18 nt, Artificial Sequence
  Synthetic
caacuauccuccaaagag

SEQ ID NO: 102780 - RNA, 19 nt, Artificial Sequence
  Synthetic
acaacuauccuccaaagag

SEQ ID NO: 102781 - RNA, 20 nt, Artificial Sequence
  Synthetic
aacaacuauccuccaaagag

SEQ ID NO: 102782 - RNA, 22 nt, Artificial Sequence
  Synthetic
ugaacaacuauccuccaaagag

SEQ ID NO: 102783 - RNA, 23 nt, Artificial Sequence
  Synthetic
cugaacaacuauccuccaaagag

SEQ ID NO: 102784 - RNA, 24 nt, Artificial Sequence
  Synthetic
acugaacaacuauccuccaaagag

SEQ ID NO: 102785 - RNA, 18 nt, Artificial Sequence
  Synthetic
uucaaacaagagaaagag

SEQ ID NO: 102786 - RNA, 20 nt, Artificial Sequence
  Synthetic
aguucaaacaagagaaagag

SEQ ID NO: 102787 - RNA, 21 nt, Artificial Sequence
  Synthetic
uaguucaaacaagagaaagag

SEQ ID NO: 102788 - RNA, 24 nt, Artificial Sequence
  Synthetic
agguaguucaaacaagagaaagag

SEQ ID NO: 102789 - RNA, 21 nt, Artificial Sequence
  Synthetic
ucccuuucuagaaauaaagag

SEQ ID NO: 102790 - RNA, 22 nt, Artificial Sequence
  Synthetic
uucccuuucuagaaauaaagag

SEQ ID NO: 102791 - RNA, 23 nt, Artificial Sequence
  Synthetic
auucccuuucuagaaauaaagag

SEQ ID NO: 102792 - RNA, 18 nt, Artificial Sequence
  Synthetic
cuaagccauaauaaagag

SEQ ID NO: 102793 - RNA, 19 nt, Artificial Sequence
  Synthetic
ucuaagccauaauaaagag

SEQ ID NO: 102794 - RNA, 20 nt, Artificial Sequence
  Synthetic
uucuaagccauaauaaagag

SEQ ID NO: 102795 - RNA, 21 nt, Artificial Sequence
  Synthetic
auucuaagccauaauaaagag

SEQ ID NO: 102796 - RNA, 22 nt, Artificial Sequence
  Synthetic
uauucuaagccauaauaaagag

SEQ ID NO: 102797 - RNA, 24 nt, Artificial Sequence
  Synthetic
uguauucuaagccauaauaaagag

SEQ ID NO: 102798 - RNA, 21 nt, Artificial Sequence
  Synthetic
aaauauuaaaaaacacaagag

SEQ ID NO: 102799 - RNA, 22 nt, Artificial Sequence
  Synthetic
aaaauauuaaaaaacacaagag

SEQ ID NO: 102800 - RNA, 23 nt, Artificial Sequence
  Synthetic
aaaaauauuaaaaaacacaagag

SEQ ID NO: 102801 - RNA, 24 nt, Artificial Sequence
  Synthetic
caaaaauauuaaaaaacacaagag

SEQ ID NO: 102802 - RNA, 21 nt, Artificial Sequence
  Synthetic
agaaggaucaggacccaagag

SEQ ID NO: 102803 - RNA, 23 nt, Artificial Sequence
  Synthetic
ugagaaggaucaggacccaagag

SEQ ID NO: 102804 - RNA, 24 nt, Artificial Sequence
  Synthetic
augagaaggaucaggacccaagag

SEQ ID NO: 102805 - RNA, 22 nt, Artificial Sequence
  Synthetic
agggggaagaacuucccaagag

SEQ ID NO: 102806 - RNA, 24 nt, Artificial Sequence
  Synthetic
agagggggaagaacuucccaagag

SEQ ID NO: 102807 - RNA, 18 nt, Artificial Sequence
  Synthetic
uagggcuuuggccaagag

SEQ ID NO: 102808 - RNA, 21 nt, Artificial Sequence
  Synthetic
agguagggcuuuggccaagag

SEQ ID NO: 102809 - RNA, 23 nt, Artificial Sequence
  Synthetic
agagguagggcuuuggccaagag

SEQ ID NO: 102810 - RNA, 24 nt, Artificial Sequence
  Synthetic
aagagguagggcuuuggccaagag

SEQ ID NO: 102811 - RNA, 21 nt, Artificial Sequence
  Synthetic
uagagcagagggugagaagag

SEQ ID NO: 102812 - RNA, 23 nt, Artificial Sequence
  Synthetic
uguagagcagagggugagaagag

SEQ ID NO: 102813 - RNA, 24 nt, Artificial Sequence
  Synthetic
uuguagagcagagggugagaagag

SEQ ID NO: 102814 - RNA, 18 nt, Artificial Sequence
  Synthetic
uuauagagucaggaagag

SEQ ID NO: 102815 - RNA, 19 nt, Artificial Sequence
  Synthetic
uuuauagagucaggaagag

SEQ ID NO: 102816 - RNA, 20 nt, Artificial Sequence
  Synthetic
auuuauagagucaggaagag

SEQ ID NO: 102817 - RNA, 21 nt, Artificial Sequence
  Synthetic
uauuuauagagucaggaagag

SEQ ID NO: 102818 - RNA, 22 nt, Artificial Sequence
  Synthetic
auauuuauagagucaggaagag

SEQ ID NO: 102819 - RNA, 23 nt, Artificial Sequence
  Synthetic
uauauuuauagagucaggaagag

SEQ ID NO: 102820 - RNA, 24 nt, Artificial Sequence
  Synthetic
auauauuuauagagucaggaagag

SEQ ID NO: 102821 - RNA, 18 nt, Artificial Sequence
  Synthetic
auauuuuaaugggaagag

SEQ ID NO: 102822 - RNA, 19 nt, Artificial Sequence
  Synthetic
aauauuuuaaugggaagag

SEQ ID NO: 102823 - RNA, 20 nt, Artificial Sequence
  Synthetic
uaauauuuuaaugggaagag

SEQ ID NO: 102824 - RNA, 21 nt, Artificial Sequence
  Synthetic
uuaauauuuuaaugggaagag

SEQ ID NO: 102825 - RNA, 22 nt, Artificial Sequence
  Synthetic
uuuaauauuuuaaugggaagag

SEQ ID NO: 102826 - RNA, 23 nt, Artificial Sequence
  Synthetic
auuuaauauuuuaaugggaagag

SEQ ID NO: 102827 - RNA, 24 nt, Artificial Sequence
  Synthetic
uauuuaauauuuuaaugggaagag

SEQ ID NO: 102828 - RNA, 21 nt, Artificial Sequence
  Synthetic
aaggagcaugagaaugaagag

SEQ ID NO: 102829 - RNA, 22 nt, Artificial Sequence
  Synthetic
caaggagcaugagaaugaagag

SEQ ID NO: 102830 - RNA, 23 nt, Artificial Sequence
  Synthetic
ucaaggagcaugagaaugaagag

SEQ ID NO: 102831 - RNA, 24 nt, Artificial Sequence
  Synthetic
aucaaggagcaugagaaugaagag

SEQ ID NO: 102832 - RNA, 18 nt, Artificial Sequence
  Synthetic
aaaaagguguuugaagag

SEQ ID NO: 102833 - RNA, 19 nt, Artificial Sequence
  Synthetic
aaaaaagguguuugaagag

SEQ ID NO: 102834 - RNA, 20 nt, Artificial Sequence
  Synthetic
caaaaaagguguuugaagag

SEQ ID NO: 102835 - RNA, 21 nt, Artificial Sequence
  Synthetic
ucaaaaaagguguuugaagag

SEQ ID NO: 102836 - RNA, 23 nt, Artificial Sequence
  Synthetic
agucaaaaaagguguuugaagag

SEQ ID NO: 102837 - RNA, 24 nt, Artificial Sequence
  Synthetic
aagucaaaaaagguguuugaagag

SEQ ID NO: 102838 - RNA, 21 nt, Artificial Sequence
  Synthetic
uuaaaggauuuuuacuaagag

SEQ ID NO: 102839 - RNA, 22 nt, Artificial Sequence
  Synthetic
auuaaaggauuuuuacuaagag

SEQ ID NO: 102840 - RNA, 23 nt, Artificial Sequence
  Synthetic
cauuaaaggauuuuuacuaagag

SEQ ID NO: 102841 - RNA, 24 nt, Artificial Sequence
  Synthetic
ccauuaaaggauuuuuacuaagag

SEQ ID NO: 102842 - RNA, 18 nt, Artificial Sequence
  Synthetic
aaguaaugaaccuaagag

SEQ ID NO: 102843 - RNA, 19 nt, Artificial Sequence
  Synthetic
caaguaaugaaccuaagag

SEQ ID NO: 102844 - RNA, 20 nt, Artificial Sequence
  Synthetic
ccaaguaaugaaccuaagag

SEQ ID NO: 102845 - RNA, 21 nt, Artificial Sequence
  Synthetic
cccaaguaaugaaccuaagag

SEQ ID NO: 102846 - RNA, 22 nt, Artificial Sequence
  Synthetic
ccccaaguaaugaaccuaagag

SEQ ID NO: 102847 - RNA, 23 nt, Artificial Sequence
  Synthetic
cccccaaguaaugaaccuaagag

SEQ ID NO: 102848 - RNA, 24 nt, Artificial Sequence
  Synthetic
ccccccaaguaaugaaccuaagag

SEQ ID NO: 102849 - RNA, 18 nt, Artificial Sequence
  Synthetic
uacuuguaugauuaagag

SEQ ID NO: 102850 - RNA, 19 nt, Artificial Sequence
  Synthetic
auacuuguaugauuaagag

SEQ ID NO: 102851 - RNA, 20 nt, Artificial Sequence
  Synthetic
aauacuuguaugauuaagag

SEQ ID NO: 102852 - RNA, 21 nt, Artificial Sequence
  Synthetic
aaauacuuguaugauuaagag

SEQ ID NO: 102853 - RNA, 22 nt, Artificial Sequence
  Synthetic
aaaauacuuguaugauuaagag

SEQ ID NO: 102854 - RNA, 23 nt, Artificial Sequence
  Synthetic
uaaaauacuuguaugauuaagag

SEQ ID NO: 102855 - RNA, 24 nt, Artificial Sequence
  Synthetic
auaaaauacuuguaugauuaagag

SEQ ID NO: 102856 - RNA, 21 nt, Artificial Sequence
  Synthetic
aucaaaaagcuaaaaacagag

SEQ ID NO: 102857 - RNA, 23 nt, Artificial Sequence
  Synthetic
agaucaaaaagcuaaaaacagag

SEQ ID NO: 102858 - RNA, 24 nt, Artificial Sequence
  Synthetic
cagaucaaaaagcuaaaaacagag

SEQ ID NO: 102859 - RNA, 18 nt, Artificial Sequence
  Synthetic
aauugaucaagaacagag

SEQ ID NO: 102860 - RNA, 19 nt, Artificial Sequence
  Synthetic
uaauugaucaagaacagag

SEQ ID NO: 102861 - RNA, 20 nt, Artificial Sequence
  Synthetic
auaauugaucaagaacagag

SEQ ID NO: 102862 - RNA, 21 nt, Artificial Sequence
  Synthetic
aauaauugaucaagaacagag

SEQ ID NO: 102863 - RNA, 24 nt, Artificial Sequence
  Synthetic
uggaauaauugaucaagaacagag

SEQ ID NO: 102864 - RNA, 18 nt, Artificial Sequence
  Synthetic
ccacaauuucacacagag

SEQ ID NO: 102865 - RNA, 19 nt, Artificial Sequence
  Synthetic
uccacaauuucacacagag

SEQ ID NO: 102866 - RNA, 20 nt, Artificial Sequence
  Synthetic
uuccacaauuucacacagag

SEQ ID NO: 102867 - RNA, 21 nt, Artificial Sequence
  Synthetic
uuuccacaauuucacacagag

SEQ ID NO: 102868 - RNA, 23 nt, Artificial Sequence
  Synthetic
aguuuccacaauuucacacagag

SEQ ID NO: 102869 - RNA, 24 nt, Artificial Sequence
  Synthetic
aaguuuccacaauuucacacagag

SEQ ID NO: 102870 - RNA, 18 nt, Artificial Sequence
  Synthetic
cacuaaguccccccagag

SEQ ID NO: 102871 - RNA, 19 nt, Artificial Sequence
  Synthetic
ucacuaaguccccccagag

SEQ ID NO: 102872 - RNA, 20 nt, Artificial Sequence
  Synthetic
cucacuaaguccccccagag

SEQ ID NO: 102873 - RNA, 21 nt, Artificial Sequence
  Synthetic
ucucacuaaguccccccagag

SEQ ID NO: 102874 - RNA, 22 nt, Artificial Sequence
  Synthetic
aucucacuaaguccccccagag

SEQ ID NO: 102875 - RNA, 23 nt, Artificial Sequence
  Synthetic
aaucucacuaaguccccccagag

SEQ ID NO: 102876 - RNA, 24 nt, Artificial Sequence
  Synthetic
uaaucucacuaaguccccccagag

SEQ ID NO: 102877 - RNA, 18 nt, Artificial Sequence
  Synthetic
accauuugcgcuccagag

SEQ ID NO: 102878 - RNA, 19 nt, Artificial Sequence
  Synthetic
uaccauuugcgcuccagag

SEQ ID NO: 102879 - RNA, 20 nt, Artificial Sequence
  Synthetic
auaccauuugcgcuccagag

SEQ ID NO: 102880 - RNA, 21 nt, Artificial Sequence
  Synthetic
aauaccauuugcgcuccagag

SEQ ID NO: 102881 - RNA, 22 nt, Artificial Sequence
  Synthetic
caauaccauuugcgcuccagag

SEQ ID NO: 102882 - RNA, 24 nt, Artificial Sequence
  Synthetic
agcaauaccauuugcgcuccagag

SEQ ID NO: 102883 - RNA, 21 nt, Artificial Sequence
  Synthetic
uuucacccuaaaacagcagag

SEQ ID NO: 102884 - RNA, 22 nt, Artificial Sequence
  Synthetic
uuuucacccuaaaacagcagag

SEQ ID NO: 102885 - RNA, 23 nt, Artificial Sequence
  Synthetic
uuuuucacccuaaaacagcagag

SEQ ID NO: 102886 - RNA, 24 nt, Artificial Sequence
  Synthetic
uuuuuucacccuaaaacagcagag

SEQ ID NO: 102887 - RNA, 18 nt, Artificial Sequence
  Synthetic
aacauucuaacagcagag

SEQ ID NO: 102888 - RNA, 19 nt, Artificial Sequence
  Synthetic
caacauucuaacagcagag

SEQ ID NO: 102889 - RNA, 20 nt, Artificial Sequence
  Synthetic
ucaacauucuaacagcagag

SEQ ID NO: 102890 - RNA, 21 nt, Artificial Sequence
  Synthetic
uucaacauucuaacagcagag

SEQ ID NO: 102891 - RNA, 22 nt, Artificial Sequence
  Synthetic
cuucaacauucuaacagcagag

SEQ ID NO: 102892 - RNA, 24 nt, Artificial Sequence
  Synthetic
ugcuucaacauucuaacagcagag

SEQ ID NO: 102893 - RNA, 18 nt, Artificial Sequence
  Synthetic
ugcaccucauuagcagag

SEQ ID NO: 102894 - RNA, 19 nt, Artificial Sequence
  Synthetic
uugcaccucauuagcagag

SEQ ID NO: 102895 - RNA, 20 nt, Artificial Sequence
  Synthetic
uuugcaccucauuagcagag

SEQ ID NO: 102896 - RNA, 21 nt, Artificial Sequence
  Synthetic
cuuugcaccucauuagcagag

SEQ ID NO: 102897 - RNA, 23 nt, Artificial Sequence
  Synthetic
ugcuuugcaccucauuagcagag

SEQ ID NO: 102898 - RNA, 24 nt, Artificial Sequence
  Synthetic
cugcuuugcaccucauuagcagag

SEQ ID NO: 102899 - RNA, 18 nt, Artificial Sequence
  Synthetic
ugacacccaugggcagag

SEQ ID NO: 102900 - RNA, 19 nt, Artificial Sequence
  Synthetic
augacacccaugggcagag

SEQ ID NO: 102901 - RNA, 21 nt, Artificial Sequence
  Synthetic
agaugacacccaugggcagag

SEQ ID NO: 102902 - RNA, 23 nt, Artificial Sequence
  Synthetic
agagaugacacccaugggcagag

SEQ ID NO: 102903 - RNA, 24 nt, Artificial Sequence
  Synthetic
aagagaugacacccaugggcagag

SEQ ID NO: 102904 - RNA, 19 nt, Artificial Sequence
  Synthetic
agaagacacgauugcagag

SEQ ID NO: 102905 - RNA, 20 nt, Artificial Sequence
  Synthetic
uagaagacacgauugcagag

SEQ ID NO: 102906 - RNA, 21 nt, Artificial Sequence
  Synthetic
auagaagacacgauugcagag

SEQ ID NO: 102907 - RNA, 22 nt, Artificial Sequence
  Synthetic
uauagaagacacgauugcagag

SEQ ID NO: 102908 - RNA, 23 nt, Artificial Sequence
  Synthetic
auauagaagacacgauugcagag

SEQ ID NO: 102909 - RNA, 24 nt, Artificial Sequence
  Synthetic
uauauagaagacacgauugcagag

SEQ ID NO: 102910 - RNA, 19 nt, Artificial Sequence
  Synthetic
agccuuaguaagaucagag

SEQ ID NO: 102911 - RNA, 20 nt, Artificial Sequence
  Synthetic
aagccuuaguaagaucagag

SEQ ID NO: 102912 - RNA, 22 nt, Artificial Sequence
  Synthetic
ugaagccuuaguaagaucagag

SEQ ID NO: 102913 - RNA, 23 nt, Artificial Sequence
  Synthetic
uugaagccuuaguaagaucagag

SEQ ID NO: 102914 - RNA, 24 nt, Artificial Sequence
  Synthetic
uuugaagccuuaguaagaucagag

SEQ ID NO: 102915 - RNA, 18 nt, Artificial Sequence
  Synthetic
acagcuggguuaucagag

SEQ ID NO: 102916 - RNA, 19 nt, Artificial Sequence
  Synthetic
cacagcuggguuaucagag

SEQ ID NO: 102917 - RNA, 20 nt, Artificial Sequence
  Synthetic
acacagcuggguuaucagag

SEQ ID NO: 102918 - RNA, 21 nt, Artificial Sequence
  Synthetic
cacacagcuggguuaucagag

SEQ ID NO: 102919 - RNA, 22 nt, Artificial Sequence
  Synthetic
acacacagcuggguuaucagag

SEQ ID NO: 102920 - RNA, 23 nt, Artificial Sequence
  Synthetic
aacacacagcuggguuaucagag

SEQ ID NO: 102921 - RNA, 24 nt, Artificial Sequence
  Synthetic
caacacacagcuggguuaucagag

SEQ ID NO: 102922 - RNA, 18 nt, Artificial Sequence
  Synthetic
auaagaaggaagucagag

SEQ ID NO: 102923 - RNA, 19 nt, Artificial Sequence
  Synthetic
uauaagaaggaagucagag

SEQ ID NO: 102924 - RNA, 20 nt, Artificial Sequence
  Synthetic
uuauaagaaggaagucagag

SEQ ID NO: 102925 - RNA, 21 nt, Artificial Sequence
  Synthetic
auuauaagaaggaagucagag

SEQ ID NO: 102926 - RNA, 22 nt, Artificial Sequence
  Synthetic
cauuauaagaaggaagucagag

SEQ ID NO: 102927 - RNA, 23 nt, Artificial Sequence
  Synthetic
ucauuauaagaaggaagucagag

SEQ ID NO: 102928 - RNA, 24 nt, Artificial Sequence
  Synthetic
aucauuauaagaaggaagucagag

SEQ ID NO: 102929 - RNA, 19 nt, Artificial Sequence
  Synthetic
agcuuguuaaucuucagag

SEQ ID NO: 102930 - RNA, 20 nt, Artificial Sequence
  Synthetic
cagcuuguuaaucuucagag

SEQ ID NO: 102931 - RNA, 21 nt, Artificial Sequence
  Synthetic
ccagcuuguuaaucuucagag

SEQ ID NO: 102932 - RNA, 22 nt, Artificial Sequence
  Synthetic
cccagcuuguuaaucuucagag

SEQ ID NO: 102933 - RNA, 23 nt, Artificial Sequence
  Synthetic
acccagcuuguuaaucuucagag

SEQ ID NO: 102934 - RNA, 18 nt, Artificial Sequence
  Synthetic
uucuaaugucuuucagag

SEQ ID NO: 102935 - RNA, 19 nt, Artificial Sequence
  Synthetic
auucuaaugucuuucagag

SEQ ID NO: 102936 - RNA, 20 nt, Artificial Sequence
  Synthetic
aauucuaaugucuuucagag

SEQ ID NO: 102937 - RNA, 21 nt, Artificial Sequence
  Synthetic
aaauucuaaugucuuucagag

SEQ ID NO: 102938 - RNA, 24 nt, Artificial Sequence
  Synthetic
aggaaauucuaaugucuuucagag

SEQ ID NO: 102939 - RNA, 21 nt, Artificial Sequence
  Synthetic
uacaugagaacaaaaagagag

SEQ ID NO: 102940 - RNA, 23 nt, Artificial Sequence
  Synthetic
uguacaugagaacaaaaagagag

SEQ ID NO: 102941 - RNA, 24 nt, Artificial Sequence
  Synthetic
auguacaugagaacaaaaagagag

SEQ ID NO: 102942 - RNA, 21 nt, Artificial Sequence
  Synthetic
aaaccgaagaggaaaagagag

SEQ ID NO: 102943 - RNA, 22 nt, Artificial Sequence
  Synthetic
caaaccgaagaggaaaagagag

SEQ ID NO: 102944 - RNA, 23 nt, Artificial Sequence
  Synthetic
acaaaccgaagaggaaaagagag

SEQ ID NO: 102945 - RNA, 24 nt, Artificial Sequence
  Synthetic
aacaaaccgaagaggaaaagagag

SEQ ID NO: 102946 - RNA, 18 nt, Artificial Sequence
  Synthetic
ucuaucaacugaagagag

SEQ ID NO: 102947 - RNA, 19 nt, Artificial Sequence
  Synthetic
uucuaucaacugaagagag

SEQ ID NO: 102948 - RNA, 24 nt, Artificial Sequence
  Synthetic
ugggaaguaacaaauaacagagag

SEQ ID NO: 102949 - RNA, 23 nt, Artificial Sequence
  Synthetic
uggagagacaggaggcaggagag

SEQ ID NO: 102950 - RNA, 24 nt, Artificial Sequence
  Synthetic
auggagagacaggaggcaggagag

SEQ ID NO: 102951 - RNA, 18 nt, Artificial Sequence
  Synthetic
aggaaccaacaaugagag

SEQ ID NO: 102952 - RNA, 19 nt, Artificial Sequence
  Synthetic
aaggaaccaacaaugagag

SEQ ID NO: 102953 - RNA, 20 nt, Artificial Sequence
  Synthetic
aaaggaaccaacaaugagag

SEQ ID NO: 102954 - RNA, 21 nt, Artificial Sequence
  Synthetic
aaaaggaaccaacaaugagag

SEQ ID NO: 102955 - RNA, 23 nt, Artificial Sequence
  Synthetic
ugaaaaggaaccaacaaugagag

SEQ ID NO: 102956 - RNA, 18 nt, Artificial Sequence
  Synthetic
aaccuuucagaaugagag

SEQ ID NO: 102957 - RNA, 20 nt, Artificial Sequence
  Synthetic
agaaccuuucagaaugagag

SEQ ID NO: 102958 - RNA, 22 nt, Artificial Sequence
  Synthetic
agagaaccuuucagaaugagag

SEQ ID NO: 102959 - RNA, 23 nt, Artificial Sequence
  Synthetic
cagagaaccuuucagaaugagag

SEQ ID NO: 102960 - RNA, 24 nt, Artificial Sequence
  Synthetic
acagagaaccuuucagaaugagag

SEQ ID NO: 102961 - RNA, 18 nt, Artificial Sequence
  Synthetic
cgucugcugggaugagag

SEQ ID NO: 102962 - RNA, 19 nt, Artificial Sequence
  Synthetic
acgucugcugggaugagag

SEQ ID NO: 102963 - RNA, 20 nt, Artificial Sequence
  Synthetic
cacgucugcugggaugagag

SEQ ID NO: 102964 - RNA, 21 nt, Artificial Sequence
  Synthetic
ucacgucugcugggaugagag

SEQ ID NO: 102965 - RNA, 22 nt, Artificial Sequence
  Synthetic
cucacgucugcugggaugagag

SEQ ID NO: 102966 - RNA, 23 nt, Artificial Sequence
  Synthetic
acucacgucugcugggaugagag

SEQ ID NO: 102967 - RNA, 24 nt, Artificial Sequence
  Synthetic
cacucacgucugcugggaugagag

SEQ ID NO: 102968 - RNA, 19 nt, Artificial Sequence
  Synthetic
aguugagauacagugagag

SEQ ID NO: 102969 - RNA, 20 nt, Artificial Sequence
  Synthetic
uaguugagauacagugagag

SEQ ID NO: 102970 - RNA, 21 nt, Artificial Sequence
  Synthetic
uuaguugagauacagugagag

SEQ ID NO: 102971 - RNA, 22 nt, Artificial Sequence
  Synthetic
auuaguugagauacagugagag

SEQ ID NO: 102972 - RNA, 23 nt, Artificial Sequence
  Synthetic
uauuaguugagauacagugagag

SEQ ID NO: 102973 - RNA, 18 nt, Artificial Sequence
  Synthetic
agaugagcugggugagag

SEQ ID NO: 102974 - RNA, 19 nt, Artificial Sequence
  Synthetic
aagaugagcugggugagag

SEQ ID NO: 102975 - RNA, 20 nt, Artificial Sequence
  Synthetic
aaagaugagcugggugagag

SEQ ID NO: 102976 - RNA, 23 nt, Artificial Sequence
  Synthetic
cggaaagaugagcugggugagag

SEQ ID NO: 102977 - RNA, 24 nt, Artificial Sequence
  Synthetic
acggaaagaugagcugggugagag

SEQ ID NO: 102978 - RNA, 18 nt, Artificial Sequence
  Synthetic
ccugccagcuauugagag

SEQ ID NO: 102979 - RNA, 21 nt, Artificial Sequence
  Synthetic
uggccugccagcuauugagag

SEQ ID NO: 102980 - RNA, 22 nt, Artificial Sequence
  Synthetic
uuggccugccagcuauugagag

SEQ ID NO: 102981 - RNA, 23 nt, Artificial Sequence
  Synthetic
auuggccugccagcuauugagag

SEQ ID NO: 102982 - RNA, 24 nt, Artificial Sequence
  Synthetic
aauuggccugccagcuauugagag

SEQ ID NO: 102983 - RNA, 19 nt, Artificial Sequence
  Synthetic
agcugauaguaguugagag

SEQ ID NO: 102984 - RNA, 20 nt, Artificial Sequence
  Synthetic
uagcugauaguaguugagag

SEQ ID NO: 102985 - RNA, 21 nt, Artificial Sequence
  Synthetic
auagcugauaguaguugagag

SEQ ID NO: 102986 - RNA, 24 nt, Artificial Sequence
  Synthetic
aggauagcugauaguaguugagag

SEQ ID NO: 102987 - RNA, 18 nt, Artificial Sequence
  Synthetic
aguggguaauaaauagag

SEQ ID NO: 102988 - RNA, 21 nt, Artificial Sequence
  Synthetic
uggaguggguaauaaauagag

SEQ ID NO: 102989 - RNA, 23 nt, Artificial Sequence
  Synthetic
cguggaguggguaauaaauagag

SEQ ID NO: 102990 - RNA, 24 nt, Artificial Sequence
  Synthetic
ucguggaguggguaauaaauagag

SEQ ID NO: 102991 - RNA, 19 nt, Artificial Sequence
  Synthetic
aggugggaagaugauagag

SEQ ID NO: 102992 - RNA, 20 nt, Artificial Sequence
  Synthetic
caggugggaagaugauagag

SEQ ID NO: 102993 - RNA, 18 nt, Artificial Sequence
  Synthetic
uggcagagaggucuagag

SEQ ID NO: 102994 - RNA, 20 nt, Artificial Sequence
  Synthetic
uguggcagagaggucuagag

SEQ ID NO: 102995 - RNA, 21 nt, Artificial Sequence
  Synthetic
uuguggcagagaggucuagag

SEQ ID NO: 102996 - RNA, 22 nt, Artificial Sequence
  Synthetic
cuuguggcagagaggucuagag

SEQ ID NO: 102997 - RNA, 23 nt, Artificial Sequence
  Synthetic
ccuuguggcagagaggucuagag

SEQ ID NO: 102998 - RNA, 24 nt, Artificial Sequence
  Synthetic
uccuuguggcagagaggucuagag

SEQ ID NO: 102999 - RNA, 19 nt, Artificial Sequence
  Synthetic
ugggaaguaaaagguagag

SEQ ID NO: 103000 - RNA, 20 nt, Artificial Sequence
  Synthetic
augggaaguaaaagguagag

SEQ ID NO: 103001 - RNA, 21 nt, Artificial Sequence
  Synthetic
caugggaaguaaaagguagag

SEQ ID NO: 103002 - RNA, 22 nt, Artificial Sequence
  Synthetic
acaugggaaguaaaagguagag

SEQ ID NO: 103003 - RNA, 23 nt, Artificial Sequence
  Synthetic
cacaugggaaguaaaagguagag

SEQ ID NO: 103004 - RNA, 24 nt, Artificial Sequence
  Synthetic
ucacaugggaaguaaaagguagag

SEQ ID NO: 103005 - RNA, 21 nt, Artificial Sequence
  Synthetic
acuauaaucucuaauguagag

SEQ ID NO: 103006 - RNA, 22 nt, Artificial Sequence
  Synthetic
uacuauaaucucuaauguagag

SEQ ID NO: 103007 - RNA, 23 nt, Artificial Sequence
  Synthetic
uuacuauaaucucuaauguagag

SEQ ID NO: 103008 - RNA, 22 nt, Artificial Sequence
  Synthetic
ugcuuuauuuaacuuuguagag

SEQ ID NO: 103009 - RNA, 23 nt, Artificial Sequence
  Synthetic
augcuuuauuuaacuuuguagag

SEQ ID NO: 103010 - RNA, 24 nt, Artificial Sequence
  Synthetic
aaugcuuuauuuaacuuuguagag

SEQ ID NO: 103011 - RNA, 18 nt, Artificial Sequence
  Synthetic
cacaguccugauuuagag

SEQ ID NO: 103012 - RNA, 19 nt, Artificial Sequence
  Synthetic
ucacaguccugauuuagag

SEQ ID NO: 103013 - RNA, 20 nt, Artificial Sequence
  Synthetic
aucacaguccugauuuagag

SEQ ID NO: 103014 - RNA, 21 nt, Artificial Sequence
  Synthetic
caucacaguccugauuuagag

SEQ ID NO: 103015 - RNA, 22 nt, Artificial Sequence
  Synthetic
acaucacaguccugauuuagag

SEQ ID NO: 103016 - RNA, 23 nt, Artificial Sequence
  Synthetic
cacaucacaguccugauuuagag

SEQ ID NO: 103017 - RNA, 24 nt, Artificial Sequence
  Synthetic
ucacaucacaguccugauuuagag

SEQ ID NO: 103018 - RNA, 21 nt, Artificial Sequence
  Synthetic
auaaaagaaaaggaccacgag

SEQ ID NO: 103019 - RNA, 22 nt, Artificial Sequence
  Synthetic
aauaaaagaaaaggaccacgag

SEQ ID NO: 103020 - RNA, 24 nt, Artificial Sequence
  Synthetic
agaauaaaagaaaaggaccacgag

SEQ ID NO: 103021 - RNA, 18 nt, Artificial Sequence
  Synthetic
agauccuuaugauacgag

SEQ ID NO: 103022 - RNA, 19 nt, Artificial Sequence
  Synthetic
aagauccuuaugauacgag

SEQ ID NO: 103023 - RNA, 20 nt, Artificial Sequence
  Synthetic
uaagauccuuaugauacgag

SEQ ID NO: 103024 - RNA, 21 nt, Artificial Sequence
  Synthetic
uuaagauccuuaugauacgag

SEQ ID NO: 103025 - RNA, 23 nt, Artificial Sequence
  Synthetic
uguuaagauccuuaugauacgag

SEQ ID NO: 103026 - RNA, 18 nt, Artificial Sequence
  Synthetic
ugcugaaagcaaggcgag

SEQ ID NO: 103027 - RNA, 20 nt, Artificial Sequence
  Synthetic
agugcugaaagcaaggcgag

SEQ ID NO: 103028 - RNA, 22 nt, Artificial Sequence
  Synthetic
cgagugcugaaagcaaggcgag

SEQ ID NO: 103029 - RNA, 24 nt, Artificial Sequence
  Synthetic
ugcgagugcugaaagcaaggcgag

SEQ ID NO: 103030 - RNA, 18 nt, Artificial Sequence
  Synthetic
ccuaacaaguuuuucgag

SEQ ID NO: 103031 - RNA, 19 nt, Artificial Sequence
  Synthetic
uccuaacaaguuuuucgag

SEQ ID NO: 103032 - RNA, 20 nt, Artificial Sequence
  Synthetic
uuccuaacaaguuuuucgag

SEQ ID NO: 103033 - RNA, 21 nt, Artificial Sequence
  Synthetic
uuuccuaacaaguuuuucgag

SEQ ID NO: 103034 - RNA, 22 nt, Artificial Sequence
  Synthetic
cuuuccuaacaaguuuuucgag

SEQ ID NO: 103035 - RNA, 23 nt, Artificial Sequence
  Synthetic
ucuuuccuaacaaguuuuucgag

SEQ ID NO: 103036 - RNA, 24 nt, Artificial Sequence
  Synthetic
aucuuuccuaacaaguuuuucgag

SEQ ID NO: 103037 - RNA, 20 nt, Artificial Sequence
  Synthetic
aggguagaaguggaaaggag

SEQ ID NO: 103038 - RNA, 22 nt, Artificial Sequence
  Synthetic
ugaggguagaaguggaaaggag

SEQ ID NO: 103039 - RNA, 23 nt, Artificial Sequence
  Synthetic
augaggguagaaguggaaaggag

SEQ ID NO: 103040 - RNA, 24 nt, Artificial Sequence
  Synthetic
uaugaggguagaaguggaaaggag

SEQ ID NO: 103041 - RNA, 18 nt, Artificial Sequence
  Synthetic
uucaaauaaagcaaggag

SEQ ID NO: 103042 - RNA, 19 nt, Artificial Sequence
  Synthetic
auucaaauaaagcaaggag

SEQ ID NO: 103043 - RNA, 21 nt, Artificial Sequence
  Synthetic
aagcaugggcagaggaaggag

SEQ ID NO: 103044 - RNA, 22 nt, Artificial Sequence
  Synthetic
aaagcaugggcagaggaaggag

SEQ ID NO: 103045 - RNA, 21 nt, Artificial Sequence
  Synthetic
uacaguucuggagaucaggag

SEQ ID NO: 103046 - RNA, 23 nt, Artificial Sequence
  Synthetic
aguacaguucuggagaucaggag

SEQ ID NO: 103047 - RNA, 24 nt, Artificial Sequence
  Synthetic
aaguacaguucuggagaucaggag

SEQ ID NO: 103048 - RNA, 19 nt, Artificial Sequence
  Synthetic
agccuacucaucucaggag

SEQ ID NO: 103049 - RNA, 20 nt, Artificial Sequence
  Synthetic
uagccuacucaucucaggag

SEQ ID NO: 103050 - RNA, 21 nt, Artificial Sequence
  Synthetic
cuagccuacucaucucaggag

SEQ ID NO: 103051 - RNA, 22 nt, Artificial Sequence
  Synthetic
acuagccuacucaucucaggag

SEQ ID NO: 103052 - RNA, 18 nt, Artificial Sequence
  Synthetic
uaugucaugauucaggag

SEQ ID NO: 103053 - RNA, 19 nt, Artificial Sequence
  Synthetic
auaugucaugauucaggag

SEQ ID NO: 103054 - RNA, 20 nt, Artificial Sequence
  Synthetic
uauaugucaugauucaggag

SEQ ID NO: 103055 - RNA, 21 nt, Artificial Sequence
  Synthetic
auauaugucaugauucaggag

SEQ ID NO: 103056 - RNA, 22 nt, Artificial Sequence
  Synthetic
uauauaugucaugauucaggag

SEQ ID NO: 103057 - RNA, 23 nt, Artificial Sequence
  Synthetic
auauauaugucaugauucaggag

SEQ ID NO: 103058 - RNA, 24 nt, Artificial Sequence
  Synthetic
uauauauaugucaugauucaggag

SEQ ID NO: 103059 - RNA, 18 nt, Artificial Sequence
  Synthetic
uuuuuagaaucagaggag

SEQ ID NO: 103060 - RNA, 19 nt, Artificial Sequence
  Synthetic
auuuuuagaaucagaggag

SEQ ID NO: 103061 - RNA, 20 nt, Artificial Sequence
  Synthetic
uauuuuuagaaucagaggag

SEQ ID NO: 103062 - RNA, 21 nt, Artificial Sequence
  Synthetic
cuauuuuuagaaucagaggag

SEQ ID NO: 103063 - RNA, 22 nt, Artificial Sequence
  Synthetic
ccuauuuuuagaaucagaggag

SEQ ID NO: 103064 - RNA, 23 nt, Artificial Sequence
  Synthetic
accuauuuuuagaaucagaggag

SEQ ID NO: 103065 - RNA, 24 nt, Artificial Sequence
  Synthetic
caccuauuuuuagaaucagaggag

SEQ ID NO: 103066 - RNA, 18 nt, Artificial Sequence
  Synthetic
ccacugggcuacgaggag

SEQ ID NO: 103067 - RNA, 19 nt, Artificial Sequence
  Synthetic
cccacugggcuacgaggag

SEQ ID NO: 103068 - RNA, 20 nt, Artificial Sequence
  Synthetic
ccccacugggcuacgaggag

SEQ ID NO: 103069 - RNA, 21 nt, Artificial Sequence
  Synthetic
accccacugggcuacgaggag

SEQ ID NO: 103070 - RNA, 22 nt, Artificial Sequence
  Synthetic
aaccccacugggcuacgaggag

SEQ ID NO: 103071 - RNA, 23 nt, Artificial Sequence
  Synthetic
aaaccccacugggcuacgaggag

SEQ ID NO: 103072 - RNA, 24 nt, Artificial Sequence
  Synthetic
aaaaccccacugggcuacgaggag

SEQ ID NO: 103073 - RNA, 21 nt, Artificial Sequence
  Synthetic
auuuugagacuuugggaggag

SEQ ID NO: 103074 - RNA, 22 nt, Artificial Sequence
  Synthetic
aauuuugagacuuugggaggag

SEQ ID NO: 103075 - RNA, 23 nt, Artificial Sequence
  Synthetic
uaauuuugagacuuugggaggag

SEQ ID NO: 103076 - RNA, 24 nt, Artificial Sequence
  Synthetic
cuaauuuugagacuuugggaggag

SEQ ID NO: 103077 - RNA, 21 nt, Artificial Sequence
  Synthetic
cuucuagguuuuugauaggag

SEQ ID NO: 103078 - RNA, 22 nt, Artificial Sequence
  Synthetic
ccuucuagguuuuugauaggag

SEQ ID NO: 103079 - RNA, 23 nt, Artificial Sequence
  Synthetic
uccuucuagguuuuugauaggag

SEQ ID NO: 103080 - RNA, 24 nt, Artificial Sequence
  Synthetic
cuccuucuagguuuuugauaggag

SEQ ID NO: 103081 - RNA, 18 nt, Artificial Sequence
  Synthetic
uugagggguggcuaggag

SEQ ID NO: 103082 - RNA, 19 nt, Artificial Sequence
  Synthetic
uuugagggguggcuaggag

SEQ ID NO: 103083 - RNA, 20 nt, Artificial Sequence
  Synthetic
auuugagggguggcuaggag

SEQ ID NO: 103084 - RNA, 21 nt, Artificial Sequence
  Synthetic
uauuugagggguggcuaggag

SEQ ID NO: 103085 - RNA, 23 nt, Artificial Sequence
  Synthetic
aguauuugagggguggcuaggag

SEQ ID NO: 103086 - RNA, 24 nt, Artificial Sequence
  Synthetic
caguauuugagggguggcuaggag

SEQ ID NO: 103087 - RNA, 23 nt, Artificial Sequence
  Synthetic
aggaacagaaaaaaaauuaggag

SEQ ID NO: 103088 - RNA, 24 nt, Artificial Sequence
  Synthetic
aaggaacagaaaaaaaauuaggag

SEQ ID NO: 103089 - RNA, 18 nt, Artificial Sequence
  Synthetic
cuagaaguccauuaggag

SEQ ID NO: 103090 - RNA, 19 nt, Artificial Sequence
  Synthetic
ucuagaaguccauuaggag

SEQ ID NO: 103091 - RNA, 20 nt, Artificial Sequence
  Synthetic
cucuagaaguccauuaggag

SEQ ID NO: 103092 - RNA, 22 nt, Artificial Sequence
  Synthetic
agcucuagaaguccauuaggag

SEQ ID NO: 103093 - RNA, 23 nt, Artificial Sequence
  Synthetic
aagcucuagaaguccauuaggag

SEQ ID NO: 103094 - RNA, 24 nt, Artificial Sequence
  Synthetic
aaagcucuagaaguccauuaggag

SEQ ID NO: 103095 - RNA, 21 nt, Artificial Sequence
  Synthetic
ugagauguuugagucacggag

SEQ ID NO: 103096 - RNA, 23 nt, Artificial Sequence
  Synthetic
ugugagauguuugagucacggag

SEQ ID NO: 103097 - RNA, 21 nt, Artificial Sequence
  Synthetic
auuuauuagagacagagggag

SEQ ID NO: 103098 - RNA, 22 nt, Artificial Sequence
  Synthetic
aauuuauuagagacagagggag

SEQ ID NO: 103099 - RNA, 24 nt, Artificial Sequence
  Synthetic
ugaauuuauuagagacagagggag

SEQ ID NO: 103100 - RNA, 18 nt, Artificial Sequence
  Synthetic
uucuuauaagggagggag

SEQ ID NO: 103101 - RNA, 19 nt, Artificial Sequence
  Synthetic
uuucuuauaagggagggag

SEQ ID NO: 103102 - RNA, 20 nt, Artificial Sequence
  Synthetic
cuuucuuauaagggagggag

SEQ ID NO: 103103 - RNA, 21 nt, Artificial Sequence
  Synthetic
ccuuucuuauaagggagggag

SEQ ID NO: 103104 - RNA, 22 nt, Artificial Sequence
  Synthetic
cccuuucuuauaagggagggag

SEQ ID NO: 103105 - RNA, 23 nt, Artificial Sequence
  Synthetic
ucccuuucuuauaagggagggag

SEQ ID NO: 103106 - RNA, 24 nt, Artificial Sequence
  Synthetic
uucccuuucuuauaagggagggag

SEQ ID NO: 103107 - RNA, 18 nt, Artificial Sequence
  Synthetic
acaguuucauuuagggag

SEQ ID NO: 103108 - RNA, 19 nt, Artificial Sequence
  Synthetic
aacaguuucauuuagggag

SEQ ID NO: 103109 - RNA, 20 nt, Artificial Sequence
  Synthetic
uaacaguuucauuuagggag

SEQ ID NO: 103110 - RNA, 21 nt, Artificial Sequence
  Synthetic
auaacaguuucauuuagggag

SEQ ID NO: 103111 - RNA, 22 nt, Artificial Sequence
  Synthetic
cauaacaguuucauuuagggag

SEQ ID NO: 103112 - RNA, 23 nt, Artificial Sequence
  Synthetic
ucauaacaguuucauuuagggag

SEQ ID NO: 103113 - RNA, 24 nt, Artificial Sequence
  Synthetic
aucauaacaguuucauuuagggag

SEQ ID NO: 103114 - RNA, 21 nt, Artificial Sequence
  Synthetic
cagggcuugggagugggggag

SEQ ID NO: 103115 - RNA, 22 nt, Artificial Sequence
  Synthetic
ucagggcuugggagugggggag

SEQ ID NO: 103116 - RNA, 23 nt, Artificial Sequence
  Synthetic
uucagggcuugggagugggggag

SEQ ID NO: 103117 - RNA, 18 nt, Artificial Sequence
  Synthetic
acauaugaacaaugggag

SEQ ID NO: 103118 - RNA, 19 nt, Artificial Sequence
  Synthetic
aacauaugaacaaugggag

SEQ ID NO: 103119 - RNA, 20 nt, Artificial Sequence
  Synthetic
caacauaugaacaaugggag

SEQ ID NO: 103120 - RNA, 21 nt, Artificial Sequence
  Synthetic
ucaacauaugaacaaugggag

SEQ ID NO: 103121 - RNA, 22 nt, Artificial Sequence
  Synthetic
aucaacauaugaacaaugggag

SEQ ID NO: 103122 - RNA, 23 nt, Artificial Sequence
  Synthetic
aaucaacauaugaacaaugggag

SEQ ID NO: 103123 - RNA, 24 nt, Artificial Sequence
  Synthetic
aaaucaacauaugaacaaugggag

SEQ ID NO: 103124 - RNA, 18 nt, Artificial Sequence
  Synthetic
caugaaugcauaugggag

SEQ ID NO: 103125 - RNA, 19 nt, Artificial Sequence
  Synthetic
ucaugaaugcauaugggag

SEQ ID NO: 103126 - RNA, 20 nt, Artificial Sequence
  Synthetic
uucaugaaugcauaugggag

SEQ ID NO: 103127 - RNA, 23 nt, Artificial Sequence
  Synthetic
agguucaugaaugcauaugggag

SEQ ID NO: 103128 - RNA, 24 nt, Artificial Sequence
  Synthetic
aagguucaugaaugcauaugggag

SEQ ID NO: 103129 - RNA, 18 nt, Artificial Sequence
  Synthetic
uuccugggacacugggag

SEQ ID NO: 103130 - RNA, 19 nt, Artificial Sequence
  Synthetic
auuccugggacacugggag

SEQ ID NO: 103131 - RNA, 20 nt, Artificial Sequence
  Synthetic
cauuccugggacacugggag

SEQ ID NO: 103132 - RNA, 21 nt, Artificial Sequence
  Synthetic
ucauuccugggacacugggag

SEQ ID NO: 103133 - RNA, 22 nt, Artificial Sequence
  Synthetic
uucauuccugggacacugggag

SEQ ID NO: 103134 - RNA, 24 nt, Artificial Sequence
  Synthetic
uguucauuccugggacacugggag

SEQ ID NO: 103135 - RNA, 18 nt, Artificial Sequence
  Synthetic
ucagcauacaccugggag

SEQ ID NO: 103136 - RNA, 19 nt, Artificial Sequence
  Synthetic
uucagcauacaccugggag

SEQ ID NO: 103137 - RNA, 21 nt, Artificial Sequence
  Synthetic
uguucagcauacaccugggag

SEQ ID NO: 103138 - RNA, 22 nt, Artificial Sequence
  Synthetic
cuguucagcauacaccugggag

SEQ ID NO: 103139 - RNA, 23 nt, Artificial Sequence
  Synthetic
ucuguucagcauacaccugggag

SEQ ID NO: 103140 - RNA, 24 nt, Artificial Sequence
  Synthetic
uucuguucagcauacaccugggag

SEQ ID NO: 103141 - RNA, 20 nt, Artificial Sequence
  Synthetic
ugguggcauuugccugggag

SEQ ID NO: 103142 - RNA, 21 nt, Artificial Sequence
  Synthetic
augguggcauuugccugggag

SEQ ID NO: 103143 - RNA, 23 nt, Artificial Sequence
  Synthetic
agaugguggcauuugccugggag

SEQ ID NO: 103144 - RNA, 24 nt, Artificial Sequence
  Synthetic
cagaugguggcauuugccugggag

SEQ ID NO: 103145 - RNA, 18 nt, Artificial Sequence
  Synthetic
augaaauaucucugggag

SEQ ID NO: 103146 - RNA, 19 nt, Artificial Sequence
  Synthetic
aaugaaauaucucugggag

SEQ ID NO: 103147 - RNA, 20 nt, Artificial Sequence
  Synthetic
aaaugaaauaucucugggag

SEQ ID NO: 103148 - RNA, 21 nt, Artificial Sequence
  Synthetic
aaaaugaaauaucucugggag

SEQ ID NO: 103149 - RNA, 22 nt, Artificial Sequence
  Synthetic
uaaaaugaaauaucucugggag

SEQ ID NO: 103150 - RNA, 23 nt, Artificial Sequence
  Synthetic
auaaaaugaaauaucucugggag

SEQ ID NO: 103151 - RNA, 24 nt, Artificial Sequence
  Synthetic
aauaaaaugaaauaucucugggag

SEQ ID NO: 103152 - RNA, 18 nt, Artificial Sequence
  Synthetic
cacaguagauuuugggag

SEQ ID NO: 103153 - RNA, 19 nt, Artificial Sequence
  Synthetic
ccacaguagauuuugggag

SEQ ID NO: 103154 - RNA, 20 nt, Artificial Sequence
  Synthetic
cccacaguagauuuugggag

SEQ ID NO: 103155 - RNA, 21 nt, Artificial Sequence
  Synthetic
acccacaguagauuuugggag

SEQ ID NO: 103156 - RNA, 22 nt, Artificial Sequence
  Synthetic
cacccacaguagauuuugggag

SEQ ID NO: 103157 - RNA, 23 nt, Artificial Sequence
  Synthetic
ucacccacaguagauuuugggag

SEQ ID NO: 103158 - RNA, 24 nt, Artificial Sequence
  Synthetic
aucacccacaguagauuuugggag

SEQ ID NO: 103159 - RNA, 18 nt, Artificial Sequence
  Synthetic
auagaguuggggauggag

SEQ ID NO: 103160 - RNA, 19 nt, Artificial Sequence
  Synthetic
cauagaguuggggauggag

SEQ ID NO: 103161 - RNA, 20 nt, Artificial Sequence
  Synthetic
ucauagaguuggggauggag

SEQ ID NO: 103162 - RNA, 22 nt, Artificial Sequence
  Synthetic
agucauagaguuggggauggag

SEQ ID NO: 103163 - RNA, 23 nt, Artificial Sequence
  Synthetic
uagucauagaguuggggauggag

SEQ ID NO: 103164 - RNA, 24 nt, Artificial Sequence
  Synthetic
auagucauagaguuggggauggag

SEQ ID NO: 103165 - RNA, 19 nt, Artificial Sequence
  Synthetic
agucacaauguguauggag

SEQ ID NO: 103166 - RNA, 20 nt, Artificial Sequence
  Synthetic
aagucacaauguguauggag

SEQ ID NO: 103167 - RNA, 21 nt, Artificial Sequence
  Synthetic
aaagucacaauguguauggag

SEQ ID NO: 103168 - RNA, 22 nt, Artificial Sequence
  Synthetic
caaagucacaauguguauggag

SEQ ID NO: 103169 - RNA, 23 nt, Artificial Sequence
  Synthetic
ucaaagucacaauguguauggag

SEQ ID NO: 103170 - RNA, 24 nt, Artificial Sequence
  Synthetic
cucaaagucacaauguguauggag

SEQ ID NO: 103171 - RNA, 18 nt, Artificial Sequence
  Synthetic
cuagaaauaugacuggag

SEQ ID NO: 103172 - RNA, 19 nt, Artificial Sequence
  Synthetic
ccuagaaauaugacuggag

SEQ ID NO: 103173 - RNA, 20 nt, Artificial Sequence
  Synthetic
accuagaaauaugacuggag

SEQ ID NO: 103174 - RNA, 21 nt, Artificial Sequence
  Synthetic
uaccuagaaauaugacuggag

SEQ ID NO: 103175 - RNA, 22 nt, Artificial Sequence
  Synthetic
cuaccuagaaauaugacuggag

SEQ ID NO: 103176 - RNA, 23 nt, Artificial Sequence
  Synthetic
ucuaccuagaaauaugacuggag

SEQ ID NO: 103177 - RNA, 24 nt, Artificial Sequence
  Synthetic
aucuaccuagaaauaugacuggag

SEQ ID NO: 103178 - RNA, 18 nt, Artificial Sequence
  Synthetic
uugauucacauacuggag

SEQ ID NO: 103179 - RNA, 19 nt, Artificial Sequence
  Synthetic
auugauucacauacuggag

SEQ ID NO: 103180 - RNA, 20 nt, Artificial Sequence
  Synthetic
cauugauucacauacuggag

SEQ ID NO: 103181 - RNA, 21 nt, Artificial Sequence
  Synthetic
acauugauucacauacuggag

SEQ ID NO: 103182 - RNA, 22 nt, Artificial Sequence
  Synthetic
uacauugauucacauacuggag

SEQ ID NO: 103183 - RNA, 24 nt, Artificial Sequence
  Synthetic
aguacauugauucacauacuggag

SEQ ID NO: 103184 - RNA, 18 nt, Artificial Sequence
  Synthetic
uuagaagaugugcuggag

SEQ ID NO: 103185 - RNA, 19 nt, Artificial Sequence
  Synthetic
uuuagaagaugugcuggag

SEQ ID NO: 103186 - RNA, 20 nt, Artificial Sequence
  Synthetic
auuuagaagaugugcuggag

SEQ ID NO: 103187 - RNA, 21 nt, Artificial Sequence
  Synthetic
cauuuagaagaugugcuggag

SEQ ID NO: 103188 - RNA, 24 nt, Artificial Sequence
  Synthetic
uggcauuuagaagaugugcuggag

SEQ ID NO: 103189 - RNA, 18 nt, Artificial Sequence
  Synthetic
ccauccucaguucuggag

SEQ ID NO: 103190 - RNA, 19 nt, Artificial Sequence
  Synthetic
uccauccucaguucuggag

SEQ ID NO: 103191 - RNA, 20 nt, Artificial Sequence
  Synthetic
auccauccucaguucuggag

SEQ ID NO: 103192 - RNA, 21 nt, Artificial Sequence
  Synthetic
aauccauccucaguucuggag

SEQ ID NO: 103193 - RNA, 24 nt, Artificial Sequence
  Synthetic
cggaauccauccucaguucuggag

SEQ ID NO: 103194 - RNA, 19 nt, Artificial Sequence
  Synthetic
ugggcaggaaugaguggag

SEQ ID NO: 103195 - RNA, 22 nt, Artificial Sequence
  Synthetic
uggugggcaggaaugaguggag

SEQ ID NO: 103196 - RNA, 23 nt, Artificial Sequence
  Synthetic
cuggugggcaggaaugaguggag

SEQ ID NO: 103197 - RNA, 24 nt, Artificial Sequence
  Synthetic
acuggugggcaggaaugaguggag

SEQ ID NO: 103198 - RNA, 18 nt, Artificial Sequence
  Synthetic
cagcuuguagcuguggag

SEQ ID NO: 103199 - RNA, 20 nt, Artificial Sequence
  Synthetic
agcagcuuguagcuguggag

SEQ ID NO: 103200 - RNA, 21 nt, Artificial Sequence
  Synthetic
uagcagcuuguagcuguggag

SEQ ID NO: 103201 - RNA, 22 nt, Artificial Sequence
  Synthetic
cuagcagcuuguagcuguggag

SEQ ID NO: 103202 - RNA, 23 nt, Artificial Sequence
  Synthetic
ucuagcagcuuguagcuguggag

SEQ ID NO: 103203 - RNA, 18 nt, Artificial Sequence
  Synthetic
acaacauggcacuuggag

SEQ ID NO: 103204 - RNA, 19 nt, Artificial Sequence
  Synthetic
cacaacauggcacuuggag

SEQ ID NO: 103205 - RNA, 20 nt, Artificial Sequence
  Synthetic
ccacaacauggcacuuggag

SEQ ID NO: 103206 - RNA, 21 nt, Artificial Sequence
  Synthetic
accacaacauggcacuuggag

SEQ ID NO: 103207 - RNA, 23 nt, Artificial Sequence
  Synthetic
ugaccacaacauggcacuuggag

SEQ ID NO: 103208 - RNA, 18 nt, Artificial Sequence
  Synthetic
uuugcaaagguguuggag

SEQ ID NO: 103209 - RNA, 19 nt, Artificial Sequence
  Synthetic
auuugcaaagguguuggag

SEQ ID NO: 103210 - RNA, 20 nt, Artificial Sequence
  Synthetic
uauuugcaaagguguuggag

SEQ ID NO: 103211 - RNA, 21 nt, Artificial Sequence
  Synthetic
auauuugcaaagguguuggag

SEQ ID NO: 103212 - RNA, 22 nt, Artificial Sequence
  Synthetic
uauauuugcaaagguguuggag

SEQ ID NO: 103213 - RNA, 23 nt, Artificial Sequence
  Synthetic
auauauuugcaaagguguuggag

SEQ ID NO: 103214 - RNA, 24 nt, Artificial Sequence
  Synthetic
aauauauuugcaaagguguuggag

SEQ ID NO: 103215 - RNA, 18 nt, Artificial Sequence
  Synthetic
cagcaaugguuuuuggag

SEQ ID NO: 103216 - RNA, 19 nt, Artificial Sequence
  Synthetic
ucagcaaugguuuuuggag

SEQ ID NO: 103217 - RNA, 20 nt, Artificial Sequence
  Synthetic
cucagcaaugguuuuuggag

SEQ ID NO: 103218 - RNA, 21 nt, Artificial Sequence
  Synthetic
acucagcaaugguuuuuggag

SEQ ID NO: 103219 - RNA, 22 nt, Artificial Sequence
  Synthetic
aacucagcaaugguuuuuggag

SEQ ID NO: 103220 - RNA, 23 nt, Artificial Sequence
  Synthetic
caacucagcaaugguuuuuggag

SEQ ID NO: 103221 - RNA, 24 nt, Artificial Sequence
  Synthetic
ucaacucagcaaugguuuuuggag

SEQ ID NO: 103222 - RNA, 18 nt, Artificial Sequence
  Synthetic
aaggcccauaaaaaugag

SEQ ID NO: 103223 - RNA, 20 nt, Artificial Sequence
  Synthetic
ugaaggcccauaaaaaugag

SEQ ID NO: 103224 - RNA, 21 nt, Artificial Sequence
  Synthetic
augaaggcccauaaaaaugag

SEQ ID NO: 103225 - RNA, 22 nt, Artificial Sequence
  Synthetic
caugaaggcccauaaaaaugag

SEQ ID NO: 103226 - RNA, 23 nt, Artificial Sequence
  Synthetic
ucaugaaggcccauaaaaaugag

SEQ ID NO: 103227 - RNA, 24 nt, Artificial Sequence
  Synthetic
aucaugaaggcccauaaaaaugag

SEQ ID NO: 103228 - RNA, 18 nt, Artificial Sequence
  Synthetic
ugauccuuggaaaaugag

SEQ ID NO: 103229 - RNA, 20 nt, Artificial Sequence
  Synthetic
ugugauccuuggaaaaugag

SEQ ID NO: 103230 - RNA, 22 nt, Artificial Sequence
  Synthetic
ugugugauccuuggaaaaugag

SEQ ID NO: 103231 - RNA, 23 nt, Artificial Sequence
  Synthetic
uugugugauccuuggaaaaugag

SEQ ID NO: 103232 - RNA, 18 nt, Artificial Sequence
  Synthetic
auaagguggauaaaugag

SEQ ID NO: 103233 - RNA, 19 nt, Artificial Sequence
  Synthetic
cauaagguggauaaaugag

SEQ ID NO: 103234 - RNA, 20 nt, Artificial Sequence
  Synthetic
ccauaagguggauaaaugag

SEQ ID NO: 103235 - RNA, 21 nt, Artificial Sequence
  Synthetic
accauaagguggauaaaugag

SEQ ID NO: 103236 - RNA, 22 nt, Artificial Sequence
  Synthetic
aaccauaagguggauaaaugag

SEQ ID NO: 103237 - RNA, 24 nt, Artificial Sequence
  Synthetic
cgaaccauaagguggauaaaugag

SEQ ID NO: 103238 - RNA, 18 nt, Artificial Sequence
  Synthetic
ucuggauuauuaaaugag

SEQ ID NO: 103239 - RNA, 19 nt, Artificial Sequence
  Synthetic
cucuggauuauuaaaugag

SEQ ID NO: 103240 - RNA, 20 nt, Artificial Sequence
  Synthetic
ucucuggauuauuaaaugag

SEQ ID NO: 103241 - RNA, 21 nt, Artificial Sequence
  Synthetic
uucucuggauuauuaaaugag

SEQ ID NO: 103242 - RNA, 22 nt, Artificial Sequence
  Synthetic
uuucucuggauuauuaaaugag

SEQ ID NO: 103243 - RNA, 23 nt, Artificial Sequence
  Synthetic
uuuucucuggauuauuaaaugag

SEQ ID NO: 103244 - RNA, 24 nt, Artificial Sequence
  Synthetic
uuuuucucuggauuauuaaaugag

SEQ ID NO: 103245 - RNA, 18 nt, Artificial Sequence
  Synthetic
cuucuugaugauaaugag

SEQ ID NO: 103246 - RNA, 19 nt, Artificial Sequence
  Synthetic
ucuucuugaugauaaugag

SEQ ID NO: 103247 - RNA, 20 nt, Artificial Sequence
  Synthetic
aucuucuugaugauaaugag

SEQ ID NO: 103248 - RNA, 21 nt, Artificial Sequence
  Synthetic
uaucuucuugaugauaaugag

SEQ ID NO: 103249 - RNA, 23 nt, Artificial Sequence
  Synthetic
aguaucuucuugaugauaaugag

SEQ ID NO: 103250 - RNA, 24 nt, Artificial Sequence
  Synthetic
caguaucuucuugaugauaaugag

SEQ ID NO: 103251 - RNA, 18 nt, Artificial Sequence
  Synthetic
acuuaauucuauaaugag

SEQ ID NO: 103252 - RNA, 19 nt, Artificial Sequence
  Synthetic
uacuuaauucuauaaugag

SEQ ID NO: 103253 - RNA, 20 nt, Artificial Sequence
  Synthetic
cuacuuaauucuauaaugag

SEQ ID NO: 103254 - RNA, 21 nt, Artificial Sequence
  Synthetic
ccuacuuaauucuauaaugag

SEQ ID NO: 103255 - RNA, 23 nt, Artificial Sequence
  Synthetic
ugccuacuuaauucuauaaugag

SEQ ID NO: 103256 - RNA, 24 nt, Artificial Sequence
  Synthetic
cugccuacuuaauucuauaaugag

SEQ ID NO: 103257 - RNA, 18 nt, Artificial Sequence
  Synthetic
cauguuucuauuaaugag

SEQ ID NO: 103258 - RNA, 19 nt, Artificial Sequence
  Synthetic
ccauguuucuauuaaugag

SEQ ID NO: 103259 - RNA, 21 nt, Artificial Sequence
  Synthetic
ugccauguuucuauuaaugag

SEQ ID NO: 103260 - RNA, 22 nt, Artificial Sequence
  Synthetic
cugccauguuucuauuaaugag

SEQ ID NO: 103261 - RNA, 23 nt, Artificial Sequence
  Synthetic
ccugccauguuucuauuaaugag

SEQ ID NO: 103262 - RNA, 24 nt, Artificial Sequence
  Synthetic
cccugccauguuucuauuaaugag

SEQ ID NO: 103263 - RNA, 18 nt, Artificial Sequence
  Synthetic
augauuuugacacaugag

SEQ ID NO: 103264 - RNA, 20 nt, Artificial Sequence
  Synthetic
ugaugauuuugacacaugag

SEQ ID NO: 103265 - RNA, 21 nt, Artificial Sequence
  Synthetic
cugaugauuuugacacaugag

SEQ ID NO: 103266 - RNA, 22 nt, Artificial Sequence
  Synthetic
acugaugauuuugacacaugag

SEQ ID NO: 103267 - RNA, 23 nt, Artificial Sequence
  Synthetic
aacugaugauuuugacacaugag

SEQ ID NO: 103268 - RNA, 24 nt, Artificial Sequence
  Synthetic
caacugaugauuuugacacaugag

SEQ ID NO: 103269 - RNA, 21 nt, Artificial Sequence
  Synthetic
agggguaaaucuuugcaugag

SEQ ID NO: 103270 - RNA, 22 nt, Artificial Sequence
  Synthetic
aagggguaaaucuuugcaugag

SEQ ID NO: 103271 - RNA, 23 nt, Artificial Sequence
  Synthetic
uaagggguaaaucuuugcaugag

SEQ ID NO: 103272 - RNA, 24 nt, Artificial Sequence
  Synthetic
cuaagggguaaaucuuugcaugag

SEQ ID NO: 103273 - RNA, 18 nt, Artificial Sequence
  Synthetic
ucucaauggccucaugag

SEQ ID NO: 103274 - RNA, 19 nt, Artificial Sequence
  Synthetic
cucucaauggccucaugag

SEQ ID NO: 103275 - RNA, 20 nt, Artificial Sequence
  Synthetic
acucucaauggccucaugag

SEQ ID NO: 103276 - RNA, 21 nt, Artificial Sequence
  Synthetic
uacucucaauggccucaugag

SEQ ID NO: 103277 - RNA, 22 nt, Artificial Sequence
  Synthetic
auacucucaauggccucaugag

SEQ ID NO: 103278 - RNA, 24 nt, Artificial Sequence
  Synthetic
agauacucucaauggccucaugag

SEQ ID NO: 103279 - RNA, 18 nt, Artificial Sequence
  Synthetic
cccauacggaaagaugag

SEQ ID NO: 103280 - RNA, 19 nt, Artificial Sequence
  Synthetic
ucccauacggaaagaugag

SEQ ID NO: 103281 - RNA, 20 nt, Artificial Sequence
  Synthetic
uucccauacggaaagaugag

SEQ ID NO: 103282 - RNA, 21 nt, Artificial Sequence
  Synthetic
cuucccauacggaaagaugag

SEQ ID NO: 103283 - RNA, 23 nt, Artificial Sequence
  Synthetic
ugcuucccauacggaaagaugag

SEQ ID NO: 103284 - RNA, 24 nt, Artificial Sequence
  Synthetic
uugcuucccauacggaaagaugag

SEQ ID NO: 103285 - RNA, 21 nt, Artificial Sequence
  Synthetic
cucauuagagaagaagaugag

SEQ ID NO: 103286 - RNA, 22 nt, Artificial Sequence
  Synthetic
ccucauuagagaagaagaugag

SEQ ID NO: 103287 - RNA, 23 nt, Artificial Sequence
  Synthetic
uccucauuagagaagaagaugag

SEQ ID NO: 103288 - RNA, 24 nt, Artificial Sequence
  Synthetic
cuccucauuagagaagaagaugag

SEQ ID NO: 103289 - RNA, 18 nt, Artificial Sequence
  Synthetic
agagaaugagcagaugag

SEQ ID NO: 103290 - RNA, 19 nt, Artificial Sequence
  Synthetic
cagagaaugagcagaugag

SEQ ID NO: 103291 - RNA, 20 nt, Artificial Sequence
  Synthetic
acagagaaugagcagaugag

SEQ ID NO: 103292 - RNA, 21 nt, Artificial Sequence
  Synthetic
uacagagaaugagcagaugag

SEQ ID NO: 103293 - RNA, 23 nt, Artificial Sequence
  Synthetic
aguacagagaaugagcagaugag

SEQ ID NO: 103294 - RNA, 18 nt, Artificial Sequence
  Synthetic
agggcaucugucuaugag

SEQ ID NO: 103295 - RNA, 19 nt, Artificial Sequence
  Synthetic
cagggcaucugucuaugag

SEQ ID NO: 103296 - RNA, 20 nt, Artificial Sequence
  Synthetic
ccagggcaucugucuaugag

SEQ ID NO: 103297 - RNA, 21 nt, Artificial Sequence
  Synthetic
cccagggcaucugucuaugag

SEQ ID NO: 103298 - RNA, 22 nt, Artificial Sequence
  Synthetic
ucccagggcaucugucuaugag

SEQ ID NO: 103299 - RNA, 23 nt, Artificial Sequence
  Synthetic
uucccagggcaucugucuaugag

SEQ ID NO: 103300 - RNA, 20 nt, Artificial Sequence
  Synthetic
cggaaugaagugcuccugag

SEQ ID NO: 103301 - RNA, 21 nt, Artificial Sequence
  Synthetic
ucggaaugaagugcuccugag

SEQ ID NO: 103302 - RNA, 23 nt, Artificial Sequence
  Synthetic
ugucggaaugaagugcuccugag

SEQ ID NO: 103303 - RNA, 24 nt, Artificial Sequence
  Synthetic
uugucggaaugaagugcuccugag

SEQ ID NO: 103304 - RNA, 18 nt, Artificial Sequence
  Synthetic
caauacuuaacagcugag

SEQ ID NO: 103305 - RNA, 19 nt, Artificial Sequence
  Synthetic
ucaauacuuaacagcugag

SEQ ID NO: 103306 - RNA, 20 nt, Artificial Sequence
  Synthetic
cucaauacuuaacagcugag

SEQ ID NO: 103307 - RNA, 21 nt, Artificial Sequence
  Synthetic
acucaauacuuaacagcugag

SEQ ID NO: 103308 - RNA, 22 nt, Artificial Sequence
  Synthetic
aacucaauacuuaacagcugag

SEQ ID NO: 103309 - RNA, 23 nt, Artificial Sequence
  Synthetic
uaacucaauacuuaacagcugag

SEQ ID NO: 103310 - RNA, 24 nt, Artificial Sequence
  Synthetic
auaacucaauacuuaacagcugag

SEQ ID NO: 103311 - RNA, 18 nt, Artificial Sequence
  Synthetic
uuuuuuguaccaucugag

SEQ ID NO: 103312 - RNA, 20 nt, Artificial Sequence
  Synthetic
uguuuuuuguaccaucugag

SEQ ID NO: 103313 - RNA, 18 nt, Artificial Sequence
  Synthetic
acacucaaucuaucugag

SEQ ID NO: 103314 - RNA, 19 nt, Artificial Sequence
  Synthetic
uacacucaaucuaucugag

SEQ ID NO: 103315 - RNA, 20 nt, Artificial Sequence
  Synthetic
cuacacucaaucuaucugag

SEQ ID NO: 103316 - RNA, 21 nt, Artificial Sequence
  Synthetic
ucuacacucaaucuaucugag

SEQ ID NO: 103317 - RNA, 22 nt, Artificial Sequence
  Synthetic
cucuacacucaaucuaucugag

SEQ ID NO: 103318 - RNA, 23 nt, Artificial Sequence
  Synthetic
ucucuacacucaaucuaucugag

SEQ ID NO: 103319 - RNA, 24 nt, Artificial Sequence
  Synthetic
cucucuacacucaaucuaucugag

SEQ ID NO: 103320 - RNA, 18 nt, Artificial Sequence
  Synthetic
aagaagaaaggcucugag

SEQ ID NO: 103321 - RNA, 19 nt, Artificial Sequence
  Synthetic
uaagaagaaaggcucugag

SEQ ID NO: 103322 - RNA, 20 nt, Artificial Sequence
  Synthetic
uuaagaagaaaggcucugag

SEQ ID NO: 103323 - RNA, 21 nt, Artificial Sequence
  Synthetic
uuuaagaagaaaggcucugag

SEQ ID NO: 103324 - RNA, 22 nt, Artificial Sequence
  Synthetic
uuuuaagaagaaaggcucugag

SEQ ID NO: 103325 - RNA, 23 nt, Artificial Sequence
  Synthetic
auuuuaagaagaaaggcucugag

SEQ ID NO: 103326 - RNA, 24 nt, Artificial Sequence
  Synthetic
uauuuuaagaagaaaggcucugag

SEQ ID NO: 103327 - RNA, 18 nt, Artificial Sequence
  Synthetic
uuggaccucauuucugag

SEQ ID NO: 103328 - RNA, 19 nt, Artificial Sequence
  Synthetic
cuuggaccucauuucugag

SEQ ID NO: 103329 - RNA, 20 nt, Artificial Sequence
  Synthetic
acuuggaccucauuucugag

SEQ ID NO: 103330 - RNA, 22 nt, Artificial Sequence
  Synthetic
ugacuuggaccucauuucugag

SEQ ID NO: 103331 - RNA, 23 nt, Artificial Sequence
  Synthetic
cugacuuggaccucauuucugag

SEQ ID NO: 103332 - RNA, 19 nt, Artificial Sequence
  Synthetic
agcauggaagaggcgugag

SEQ ID NO: 103333 - RNA, 20 nt, Artificial Sequence
  Synthetic
cagcauggaagaggcgugag

SEQ ID NO: 103334 - RNA, 21 nt, Artificial Sequence
  Synthetic
acagcauggaagaggcgugag

SEQ ID NO: 103335 - RNA, 18 nt, Artificial Sequence
  Synthetic
caacaugaugcaggugag

SEQ ID NO: 103336 - RNA, 19 nt, Artificial Sequence
  Synthetic
acaacaugaugcaggugag

SEQ ID NO: 103337 - RNA, 20 nt, Artificial Sequence
  Synthetic
aacaacaugaugcaggugag

SEQ ID NO: 103338 - RNA, 21 nt, Artificial Sequence
  Synthetic
aaacaacaugaugcaggugag

SEQ ID NO: 103339 - RNA, 22 nt, Artificial Sequence
  Synthetic
aaaacaacaugaugcaggugag

SEQ ID NO: 103340 - RNA, 23 nt, Artificial Sequence
  Synthetic
caaaacaacaugaugcaggugag

SEQ ID NO: 103341 - RNA, 24 nt, Artificial Sequence
  Synthetic
acaaaacaacaugaugcaggugag

SEQ ID NO: 103342 - RNA, 18 nt, Artificial Sequence
  Synthetic
cauuucuugguaggugag

SEQ ID NO: 103343 - RNA, 19 nt, Artificial Sequence
  Synthetic
ucauuucuugguaggugag

SEQ ID NO: 103344 - RNA, 20 nt, Artificial Sequence
  Synthetic
aucauuucuugguaggugag

SEQ ID NO: 103345 - RNA, 22 nt, Artificial Sequence
  Synthetic
agaucauuucuugguaggugag

SEQ ID NO: 103346 - RNA, 23 nt, Artificial Sequence
  Synthetic
aagaucauuucuugguaggugag

SEQ ID NO: 103347 - RNA, 18 nt, Artificial Sequence
  Synthetic
aaaggacaccagggugag

SEQ ID NO: 103348 - RNA, 19 nt, Artificial Sequence
  Synthetic
aaaaggacaccagggugag

SEQ ID NO: 103349 - RNA, 20 nt, Artificial Sequence
  Synthetic
aaaaaggacaccagggugag

SEQ ID NO: 103350 - RNA, 18 nt, Artificial Sequence
  Synthetic
aauugacccuugggugag

SEQ ID NO: 103351 - RNA, 19 nt, Artificial Sequence
  Synthetic
uaauugacccuugggugag

SEQ ID NO: 103352 - RNA, 20 nt, Artificial Sequence
  Synthetic
auaauugacccuugggugag

SEQ ID NO: 103353 - RNA, 21 nt, Artificial Sequence
  Synthetic
uauaauugacccuugggugag

SEQ ID NO: 103354 - RNA, 22 nt, Artificial Sequence
  Synthetic
uuauaauugacccuugggugag

SEQ ID NO: 103355 - RNA, 23 nt, Artificial Sequence
  Synthetic
uuuauaauugacccuugggugag

SEQ ID NO: 103356 - RNA, 24 nt, Artificial Sequence
  Synthetic
auuuauaauugacccuugggugag

SEQ ID NO: 103357 - RNA, 21 nt, Artificial Sequence
  Synthetic
cauuauuuuuauaaaugugag

SEQ ID NO: 103358 - RNA, 22 nt, Artificial Sequence
  Synthetic
acauuauuuuuauaaaugugag

SEQ ID NO: 103359 - RNA, 23 nt, Artificial Sequence
  Synthetic
cacauuauuuuuauaaaugugag

SEQ ID NO: 103360 - RNA, 24 nt, Artificial Sequence
  Synthetic
ucacauuauuuuuauaaaugugag

SEQ ID NO: 103361 - RNA, 18 nt, Artificial Sequence
  Synthetic
uaaugcuaaauaugugag

SEQ ID NO: 103362 - RNA, 19 nt, Artificial Sequence
  Synthetic
uuaaugcuaaauaugugag

SEQ ID NO: 103363 - RNA, 22 nt, Artificial Sequence
  Synthetic
cgguuaaugcuaaauaugugag

SEQ ID NO: 103364 - RNA, 23 nt, Artificial Sequence
  Synthetic
acgguuaaugcuaaauaugugag

SEQ ID NO: 103365 - RNA, 24 nt, Artificial Sequence
  Synthetic
cacgguuaaugcuaaauaugugag

SEQ ID NO: 103366 - RNA, 18 nt, Artificial Sequence
  Synthetic
aacuuccaguuaugugag

SEQ ID NO: 103367 - RNA, 20 nt, Artificial Sequence
  Synthetic
ugaacuuccaguuaugugag

SEQ ID NO: 103368 - RNA, 21 nt, Artificial Sequence
  Synthetic
cugaacuuccaguuaugugag

SEQ ID NO: 103369 - RNA, 22 nt, Artificial Sequence
  Synthetic
ucugaacuuccaguuaugugag

SEQ ID NO: 103370 - RNA, 23 nt, Artificial Sequence
  Synthetic
cucugaacuuccaguuaugugag

SEQ ID NO: 103371 - RNA, 24 nt, Artificial Sequence
  Synthetic
ccucugaacuuccaguuaugugag

SEQ ID NO: 103372 - RNA, 18 nt, Artificial Sequence
  Synthetic
aucauauuacucugugag

SEQ ID NO: 103373 - RNA, 19 nt, Artificial Sequence
  Synthetic
uaucauauuacucugugag

SEQ ID NO: 103374 - RNA, 20 nt, Artificial Sequence
  Synthetic
uuaucauauuacucugugag

SEQ ID NO: 103375 - RNA, 21 nt, Artificial Sequence
  Synthetic
auuaucauauuacucugugag

SEQ ID NO: 103376 - RNA, 22 nt, Artificial Sequence
  Synthetic
aauuaucauauuacucugugag

SEQ ID NO: 103377 - RNA, 23 nt, Artificial Sequence
  Synthetic
uaauuaucauauuacucugugag

SEQ ID NO: 103378 - RNA, 18 nt, Artificial Sequence
  Synthetic
uaggggaaagcuugugag

SEQ ID NO: 103379 - RNA, 21 nt, Artificial Sequence
  Synthetic
ugguaggggaaagcuugugag

SEQ ID NO: 103380 - RNA, 22 nt, Artificial Sequence
  Synthetic
augguaggggaaagcuugugag

SEQ ID NO: 103381 - RNA, 24 nt, Artificial Sequence
  Synthetic
cgaugguaggggaaagcuugugag

SEQ ID NO: 103382 - RNA, 18 nt, Artificial Sequence
  Synthetic
cucuaagacugcauugag

SEQ ID NO: 103383 - RNA, 19 nt, Artificial Sequence
  Synthetic
ucucuaagacugcauugag

SEQ ID NO: 103384 - RNA, 20 nt, Artificial Sequence
  Synthetic
aucucuaagacugcauugag

SEQ ID NO: 103385 - RNA, 21 nt, Artificial Sequence
  Synthetic
aaucucuaagacugcauugag

SEQ ID NO: 103386 - RNA, 22 nt, Artificial Sequence
  Synthetic
aaaucucuaagacugcauugag

SEQ ID NO: 103387 - RNA, 23 nt, Artificial Sequence
  Synthetic
uaaaucucuaagacugcauugag

SEQ ID NO: 103388 - RNA, 24 nt, Artificial Sequence
  Synthetic
auaaaucucuaagacugcauugag

SEQ ID NO: 103389 - RNA, 19 nt, Artificial Sequence
  Synthetic
cgcugcacauuagauugag

SEQ ID NO: 103390 - RNA, 20 nt, Artificial Sequence
  Synthetic
ucgcugcacauuagauugag

SEQ ID NO: 103391 - RNA, 21 nt, Artificial Sequence
  Synthetic
uucgcugcacauuagauugag

SEQ ID NO: 103392 - RNA, 22 nt, Artificial Sequence
  Synthetic
cuucgcugcacauuagauugag

SEQ ID NO: 103393 - RNA, 24 nt, Artificial Sequence
  Synthetic
agcuucgcugcacauuagauugag

SEQ ID NO: 103394 - RNA, 19 nt, Artificial Sequence
  Synthetic
uguuggggcaacgauugag

SEQ ID NO: 103395 - RNA, 20 nt, Artificial Sequence
  Synthetic
cuguuggggcaacgauugag

SEQ ID NO: 103396 - RNA, 21 nt, Artificial Sequence
  Synthetic
ccuguuggggcaacgauugag

SEQ ID NO: 103397 - RNA, 22 nt, Artificial Sequence
  Synthetic
cccuguuggggcaacgauugag

SEQ ID NO: 103398 - RNA, 23 nt, Artificial Sequence
  Synthetic
ccccuguuggggcaacgauugag

SEQ ID NO: 103399 - RNA, 24 nt, Artificial Sequence
  Synthetic
uccccuguuggggcaacgauugag

SEQ ID NO: 103400 - RNA, 19 nt, Artificial Sequence
  Synthetic
uggugaauacaugauugag

SEQ ID NO: 103401 - RNA, 20 nt, Artificial Sequence
  Synthetic
uuggugaauacaugauugag

SEQ ID NO: 103402 - RNA, 21 nt, Artificial Sequence
  Synthetic
uuuggugaauacaugauugag

SEQ ID NO: 103403 - RNA, 22 nt, Artificial Sequence
  Synthetic
uuuuggugaauacaugauugag

SEQ ID NO: 103404 - RNA, 23 nt, Artificial Sequence
  Synthetic
uuuuuggugaauacaugauugag

SEQ ID NO: 103405 - RNA, 24 nt, Artificial Sequence
  Synthetic
uuuuuuggugaauacaugauugag

SEQ ID NO: 103406 - RNA, 18 nt, Artificial Sequence
  Synthetic
uuaggauauuagcuugag

SEQ ID NO: 103407 - RNA, 19 nt, Artificial Sequence
  Synthetic
uuuaggauauuagcuugag

SEQ ID NO: 103408 - RNA, 22 nt, Artificial Sequence
  Synthetic
cgguuuaggauauuagcuugag

SEQ ID NO: 103409 - RNA, 23 nt, Artificial Sequence
  Synthetic
ucgguuuaggauauuagcuugag

SEQ ID NO: 103410 - RNA, 24 nt, Artificial Sequence
  Synthetic
cucgguuuaggauauuagcuugag

SEQ ID NO: 103411 - RNA, 19 nt, Artificial Sequence
  Synthetic
ugauuaaacacuucuugag

SEQ ID NO: 103412 - RNA, 20 nt, Artificial Sequence
  Synthetic
cugauuaaacacuucuugag

SEQ ID NO: 103413 - RNA, 21 nt, Artificial Sequence
  Synthetic
ucugauuaaacacuucuugag

SEQ ID NO: 103414 - RNA, 22 nt, Artificial Sequence
  Synthetic
aucugauuaaacacuucuugag

SEQ ID NO: 103415 - RNA, 23 nt, Artificial Sequence
  Synthetic
uaucugauuaaacacuucuugag

SEQ ID NO: 103416 - RNA, 24 nt, Artificial Sequence
  Synthetic
uuaucugauuaaacacuucuugag

SEQ ID NO: 103417 - RNA, 19 nt, Artificial Sequence
  Synthetic
agauguguaagaaguugag

SEQ ID NO: 103418 - RNA, 21 nt, Artificial Sequence
  Synthetic
ugagauguguaagaaguugag

SEQ ID NO: 103419 - RNA, 22 nt, Artificial Sequence
  Synthetic
augagauguguaagaaguugag

SEQ ID NO: 103420 - RNA, 23 nt, Artificial Sequence
  Synthetic
aaugagauguguaagaaguugag

SEQ ID NO: 103421 - RNA, 24 nt, Artificial Sequence
  Synthetic
aaaugagauguguaagaaguugag

SEQ ID NO: 103422 - RNA, 18 nt, Artificial Sequence
  Synthetic
aaaacucuauauguugag

SEQ ID NO: 103423 - RNA, 19 nt, Artificial Sequence
  Synthetic
aaaaacucuauauguugag

SEQ ID NO: 103424 - RNA, 20 nt, Artificial Sequence
  Synthetic
uaaaaacucuauauguugag

SEQ ID NO: 103425 - RNA, 21 nt, Artificial Sequence
  Synthetic
auaaaaacucuauauguugag

SEQ ID NO: 103426 - RNA, 22 nt, Artificial Sequence
  Synthetic
aauaaaaacucuauauguugag

SEQ ID NO: 103427 - RNA, 23 nt, Artificial Sequence
  Synthetic
aaauaaaaacucuauauguugag

SEQ ID NO: 103428 - RNA, 24 nt, Artificial Sequence
  Synthetic
caaauaaaaacucuauauguugag

SEQ ID NO: 103429 - RNA, 18 nt, Artificial Sequence
  Synthetic
accaacagcuuauuugag

SEQ ID NO: 103430 - RNA, 19 nt, Artificial Sequence
  Synthetic
caccaacagcuuauuugag

SEQ ID NO: 103431 - RNA, 20 nt, Artificial Sequence
  Synthetic
ccaccaacagcuuauuugag

SEQ ID NO: 103432 - RNA, 22 nt, Artificial Sequence
  Synthetic
ugccaccaacagcuuauuugag

SEQ ID NO: 103433 - RNA, 23 nt, Artificial Sequence
  Synthetic
cugccaccaacagcuuauuugag

SEQ ID NO: 103434 - RNA, 24 nt, Artificial Sequence
  Synthetic
ccugccaccaacagcuuauuugag

SEQ ID NO: 103435 - RNA, 18 nt, Artificial Sequence
  Synthetic
uucccuguuuacuuugag

SEQ ID NO: 103436 - RNA, 19 nt, Artificial Sequence
  Synthetic
cuucccuguuuacuuugag

SEQ ID NO: 103437 - RNA, 20 nt, Artificial Sequence
  Synthetic
acuucccuguuuacuuugag

SEQ ID NO: 103438 - RNA, 23 nt, Artificial Sequence
  Synthetic
aggacuucccuguuuacuuugag

SEQ ID NO: 103439 - RNA, 24 nt, Artificial Sequence
  Synthetic
aaggacuucccuguuuacuuugag

SEQ ID NO: 103440 - RNA, 18 nt, Artificial Sequence
  Synthetic
auggaucaagaaaaauag

SEQ ID NO: 103441 - RNA, 19 nt, Artificial Sequence
  Synthetic
uauggaucaagaaaaauag

SEQ ID NO: 103442 - RNA, 20 nt, Artificial Sequence
  Synthetic
auauggaucaagaaaaauag

SEQ ID NO: 103443 - RNA, 21 nt, Artificial Sequence
  Synthetic
cauauggaucaagaaaaauag

SEQ ID NO: 103444 - RNA, 23 nt, Artificial Sequence
  Synthetic
agcauauggaucaagaaaaauag

SEQ ID NO: 103445 - RNA, 24 nt, Artificial Sequence
  Synthetic
aagcauauggaucaagaaaaauag

SEQ ID NO: 103446 - RNA, 18 nt, Artificial Sequence
  Synthetic
acuugacauuaaaaauag

SEQ ID NO: 103447 - RNA, 19 nt, Artificial Sequence
  Synthetic
uacuugacauuaaaaauag

SEQ ID NO: 103448 - RNA, 20 nt, Artificial Sequence
  Synthetic
uuacuugacauuaaaaauag

SEQ ID NO: 103449 - RNA, 21 nt, Artificial Sequence
  Synthetic
auuacuugacauuaaaaauag

SEQ ID NO: 103450 - RNA, 22 nt, Artificial Sequence
  Synthetic
aauuacuugacauuaaaaauag

SEQ ID NO: 103451 - RNA, 23 nt, Artificial Sequence
  Synthetic
aaauuacuugacauuaaaaauag

SEQ ID NO: 103452 - RNA, 24 nt, Artificial Sequence
  Synthetic
aaaauuacuugacauuaaaaauag

SEQ ID NO: 103453 - RNA, 21 nt, Artificial Sequence
  Synthetic
auauauugcaugagaaaauag

SEQ ID NO: 103454 - RNA, 22 nt, Artificial Sequence
  Synthetic
cauauauugcaugagaaaauag

SEQ ID NO: 103455 - RNA, 23 nt, Artificial Sequence
  Synthetic
acauauauugcaugagaaaauag

SEQ ID NO: 103456 - RNA, 24 nt, Artificial Sequence
  Synthetic
aacauauauugcaugagaaaauag

SEQ ID NO: 103457 - RNA, 21 nt, Artificial Sequence
  Synthetic
aaaugaaaugauguaaaauag

SEQ ID NO: 103458 - RNA, 22 nt, Artificial Sequence
  Synthetic
aaaaugaaaugauguaaaauag

SEQ ID NO: 103459 - RNA, 24 nt, Artificial Sequence
  Synthetic
ugaaaaugaaaugauguaaaauag

SEQ ID NO: 103460 - RNA, 18 nt, Artificial Sequence
  Synthetic
aaaaucuuauucaaauag

SEQ ID NO: 103461 - RNA, 19 nt, Artificial Sequence
  Synthetic
aaaaaucuuauucaaauag

SEQ ID NO: 103462 - RNA, 21 nt, Artificial Sequence
  Synthetic
ugaaaaaucuuauucaaauag

SEQ ID NO: 103463 - RNA, 22 nt, Artificial Sequence
  Synthetic
augaaaaaucuuauucaaauag

SEQ ID NO: 103464 - RNA, 24 nt, Artificial Sequence
  Synthetic
ugaugaaaaaucuuauucaaauag

SEQ ID NO: 103465 - RNA, 24 nt, Artificial Sequence
  Synthetic
ugggggagcuggagagagaaauag

SEQ ID NO: 103466 - RNA, 21 nt, Artificial Sequence
  Synthetic
uuuuauaccuuaaauaaauag

SEQ ID NO: 103467 - RNA, 23 nt, Artificial Sequence
  Synthetic
uguuuuauaccuuaaauaaauag

SEQ ID NO: 103468 - RNA, 24 nt, Artificial Sequence
  Synthetic
uuguuuuauaccuuaaauaaauag

SEQ ID NO: 103469 - RNA, 22 nt, Artificial Sequence
  Synthetic
aguuguuuuauuaauuaaauag

SEQ ID NO: 103470 - RNA, 23 nt, Artificial Sequence
  Synthetic
aaguuguuuuauuaauuaaauag

SEQ ID NO: 103471 - RNA, 24 nt, Artificial Sequence
  Synthetic
uaaguuguuuuauuaauuaaauag

SEQ ID NO: 103472 - RNA, 18 nt, Artificial Sequence
  Synthetic
uugugauuuugacaauag

SEQ ID NO: 103473 - RNA, 19 nt, Artificial Sequence
  Synthetic
uuugugauuuugacaauag

SEQ ID NO: 103474 - RNA, 20 nt, Artificial Sequence
  Synthetic
uuuugugauuuugacaauag

SEQ ID NO: 103475 - RNA, 21 nt, Artificial Sequence
  Synthetic
uuuuugugauuuugacaauag

SEQ ID NO: 103476 - RNA, 22 nt, Artificial Sequence
  Synthetic
auuuuugugauuuugacaauag

SEQ ID NO: 103477 - RNA, 20 nt, Artificial Sequence
  Synthetic
aggaacauucuguacaauag

SEQ ID NO: 103478 - RNA, 21 nt, Artificial Sequence
  Synthetic
aaggaacauucuguacaauag

SEQ ID NO: 103479 - RNA, 22 nt, Artificial Sequence
  Synthetic
caaggaacauucuguacaauag

SEQ ID NO: 103480 - RNA, 23 nt, Artificial Sequence
  Synthetic
ucaaggaacauucuguacaauag

SEQ ID NO: 103481 - RNA, 18 nt, Artificial Sequence
  Synthetic
agagauugcuaagaauag

SEQ ID NO: 103482 - RNA, 21 nt, Artificial Sequence
  Synthetic
aggagagauugcuaagaauag

SEQ ID NO: 103483 - RNA, 21 nt, Artificial Sequence
  Synthetic
augugaggggaaggagaauag

SEQ ID NO: 103484 - RNA, 22 nt, Artificial Sequence
  Synthetic
uaugugaggggaaggagaauag

SEQ ID NO: 103485 - RNA, 23 nt, Artificial Sequence
  Synthetic
cuaugugaggggaaggagaauag

SEQ ID NO: 103486 - RNA, 18 nt, Artificial Sequence
  Synthetic
uucugugacagauaauag

SEQ ID NO: 103487 - RNA, 20 nt, Artificial Sequence
  Synthetic
uguucugugacagauaauag

SEQ ID NO: 103488 - RNA, 21 nt, Artificial Sequence
  Synthetic
uuguucugugacagauaauag

SEQ ID NO: 103489 - RNA, 22 nt, Artificial Sequence
  Synthetic
auuguucugugacagauaauag

SEQ ID NO: 103490 - RNA, 23 nt, Artificial Sequence
  Synthetic
uauuguucugugacagauaauag

SEQ ID NO: 103491 - RNA, 24 nt, Artificial Sequence
  Synthetic
auauuguucugugacagauaauag

SEQ ID NO: 103492 - RNA, 18 nt, Artificial Sequence
  Synthetic
auauuuaacauauaauag

SEQ ID NO: 103493 - RNA, 19 nt, Artificial Sequence
  Synthetic
aauauuuaacauauaauag

SEQ ID NO: 103494 - RNA, 22 nt, Artificial Sequence
  Synthetic
aggaauauuuaacauauaauag

SEQ ID NO: 103495 - RNA, 23 nt, Artificial Sequence
  Synthetic
uaggaauauuuaacauauaauag

SEQ ID NO: 103496 - RNA, 24 nt, Artificial Sequence
  Synthetic
uuaggaauauuuaacauauaauag

SEQ ID NO: 103497 - RNA, 18 nt, Artificial Sequence
  Synthetic
cugaauaaugauuaauag

SEQ ID NO: 103498 - RNA, 19 nt, Artificial Sequence
  Synthetic
ucugaauaaugauuaauag

SEQ ID NO: 103499 - RNA, 21 nt, Artificial Sequence
  Synthetic
ugucugaauaaugauuaauag

SEQ ID NO: 103500 - RNA, 22 nt, Artificial Sequence
  Synthetic
augucugaauaaugauuaauag

SEQ ID NO: 103501 - RNA, 23 nt, Artificial Sequence
  Synthetic
caugucugaauaaugauuaauag

SEQ ID NO: 103502 - RNA, 18 nt, Artificial Sequence
  Synthetic
cuacaaccaugaacauag

SEQ ID NO: 103503 - RNA, 19 nt, Artificial Sequence
  Synthetic
ucuacaaccaugaacauag

SEQ ID NO: 103504 - RNA, 20 nt, Artificial Sequence
  Synthetic
cucuacaaccaugaacauag

SEQ ID NO: 103505 - RNA, 21 nt, Artificial Sequence
  Synthetic
ccucuacaaccaugaacauag

SEQ ID NO: 103506 - RNA, 22 nt, Artificial Sequence
  Synthetic
uccucuacaaccaugaacauag

SEQ ID NO: 103507 - RNA, 23 nt, Artificial Sequence
  Synthetic
auccucuacaaccaugaacauag

SEQ ID NO: 103508 - RNA, 18 nt, Artificial Sequence
  Synthetic
ugcaagacaauaacauag

SEQ ID NO: 103509 - RNA, 19 nt, Artificial Sequence
  Synthetic
augcaagacaauaacauag

SEQ ID NO: 103510 - RNA, 20 nt, Artificial Sequence
  Synthetic
aaugcaagacaauaacauag

SEQ ID NO: 103511 - RNA, 23 nt, Artificial Sequence
  Synthetic
aggaaugcaagacaauaacauag

SEQ ID NO: 103512 - RNA, 24 nt, Artificial Sequence
  Synthetic
caggaaugcaagacaauaacauag

SEQ ID NO: 103513 - RNA, 18 nt, Artificial Sequence
  Synthetic
agggaaggguuaacauag

SEQ ID NO: 103514 - RNA, 19 nt, Artificial Sequence
  Synthetic
uagggaaggguuaacauag

SEQ ID NO: 103515 - RNA, 20 nt, Artificial Sequence
  Synthetic
uuagggaaggguuaacauag

SEQ ID NO: 103516 - RNA, 21 nt, Artificial Sequence
  Synthetic
cuuagggaaggguuaacauag

SEQ ID NO: 103517 - RNA, 22 nt, Artificial Sequence
  Synthetic
ccuuagggaaggguuaacauag

SEQ ID NO: 103518 - RNA, 23 nt, Artificial Sequence
  Synthetic
uccuuagggaaggguuaacauag

SEQ ID NO: 103519 - RNA, 24 nt, Artificial Sequence
  Synthetic
uuccuuagggaaggguuaacauag

SEQ ID NO: 103520 - RNA, 18 nt, Artificial Sequence
  Synthetic
uuguuaccuaucacauag

SEQ ID NO: 103521 - RNA, 19 nt, Artificial Sequence
  Synthetic
auuguuaccuaucacauag

SEQ ID NO: 103522 - RNA, 21 nt, Artificial Sequence
  Synthetic
ugauuguuaccuaucacauag

SEQ ID NO: 103523 - RNA, 23 nt, Artificial Sequence
  Synthetic
agugauuguuaccuaucacauag

SEQ ID NO: 103524 - RNA, 24 nt, Artificial Sequence
  Synthetic
uagugauuguuaccuaucacauag

SEQ ID NO: 103525 - RNA, 20 nt, Artificial Sequence
  Synthetic
aggacgcuauggggacauag

SEQ ID NO: 103526 - RNA, 21 nt, Artificial Sequence
  Synthetic
aaggacgcuauggggacauag

SEQ ID NO: 103527 - RNA, 22 nt, Artificial Sequence
  Synthetic
aaaggacgcuauggggacauag

SEQ ID NO: 103528 - RNA, 23 nt, Artificial Sequence
  Synthetic
caaaggacgcuauggggacauag

SEQ ID NO: 103529 - RNA, 18 nt, Artificial Sequence
  Synthetic
acgcuuucauguccauag

SEQ ID NO: 103530 - RNA, 19 nt, Artificial Sequence
  Synthetic
uacgcuuucauguccauag

SEQ ID NO: 103531 - RNA, 20 nt, Artificial Sequence
  Synthetic
uuacgcuuucauguccauag

SEQ ID NO: 103532 - RNA, 21 nt, Artificial Sequence
  Synthetic
cuuacgcuuucauguccauag

SEQ ID NO: 103533 - RNA, 22 nt, Artificial Sequence
  Synthetic
acuuacgcuuucauguccauag

SEQ ID NO: 103534 - RNA, 23 nt, Artificial Sequence
  Synthetic
aacuuacgcuuucauguccauag

SEQ ID NO: 103535 - RNA, 24 nt, Artificial Sequence
  Synthetic
caacuuacgcuuucauguccauag

SEQ ID NO: 103536 - RNA, 18 nt, Artificial Sequence
  Synthetic
ugagauuaggaagcauag

SEQ ID NO: 103537 - RNA, 20 nt, Artificial Sequence
  Synthetic
agugagauuaggaagcauag

SEQ ID NO: 103538 - RNA, 22 nt, Artificial Sequence
  Synthetic
ugagugagauuaggaagcauag

SEQ ID NO: 103539 - RNA, 23 nt, Artificial Sequence
  Synthetic
cugagugagauuaggaagcauag

SEQ ID NO: 103540 - RNA, 24 nt, Artificial Sequence
  Synthetic
ccugagugagauuaggaagcauag

SEQ ID NO: 103541 - RNA, 18 nt, Artificial Sequence
  Synthetic
uagcccucagaaucauag

SEQ ID NO: 103542 - RNA, 19 nt, Artificial Sequence
  Synthetic
cuagcccucagaaucauag

SEQ ID NO: 103543 - RNA, 20 nt, Artificial Sequence
  Synthetic
ucuagcccucagaaucauag

SEQ ID NO: 103544 - RNA, 21 nt, Artificial Sequence
  Synthetic
uucuagcccucagaaucauag

SEQ ID NO: 103545 - RNA, 22 nt, Artificial Sequence
  Synthetic
uuucuagcccucagaaucauag

SEQ ID NO: 103546 - RNA, 23 nt, Artificial Sequence
  Synthetic
auuucuagcccucagaaucauag

SEQ ID NO: 103547 - RNA, 24 nt, Artificial Sequence
  Synthetic
uauuucuagcccucagaaucauag

SEQ ID NO: 103548 - RNA, 18 nt, Artificial Sequence
  Synthetic
cagauacuccagucauag

SEQ ID NO: 103549 - RNA, 21 nt, Artificial Sequence
  Synthetic
uggcagauacuccagucauag

SEQ ID NO: 103550 - RNA, 22 nt, Artificial Sequence
  Synthetic
auggcagauacuccagucauag

SEQ ID NO: 103551 - RNA, 23 nt, Artificial Sequence
  Synthetic
aauggcagauacuccagucauag

SEQ ID NO: 103552 - RNA, 24 nt, Artificial Sequence
  Synthetic
aaauggcagauacuccagucauag

SEQ ID NO: 103553 - RNA, 18 nt, Artificial Sequence
  Synthetic
ugguggagaaaaagauag

SEQ ID NO: 103554 - RNA, 19 nt, Artificial Sequence
  Synthetic
cugguggagaaaaagauag

SEQ ID NO: 103555 - RNA, 20 nt, Artificial Sequence
  Synthetic
ucugguggagaaaaagauag

SEQ ID NO: 103556 - RNA, 21 nt, Artificial Sequence
  Synthetic
uucugguggagaaaaagauag

SEQ ID NO: 103557 - RNA, 23 nt, Artificial Sequence
  Synthetic
cguucugguggagaaaaagauag

SEQ ID NO: 103558 - RNA, 24 nt, Artificial Sequence
  Synthetic
acguucugguggagaaaaagauag

SEQ ID NO: 103559 - RNA, 18 nt, Artificial Sequence
  Synthetic
uaugggauggaaagauag

SEQ ID NO: 103560 - RNA, 19 nt, Artificial Sequence
  Synthetic
auaugggauggaaagauag

SEQ ID NO: 103561 - RNA, 20 nt, Artificial Sequence
  Synthetic
aauaugggauggaaagauag

SEQ ID NO: 103562 - RNA, 21 nt, Artificial Sequence
  Synthetic
aaauaugggauggaaagauag

SEQ ID NO: 103563 - RNA, 23 nt, Artificial Sequence
  Synthetic
agaaauaugggauggaaagauag

SEQ ID NO: 103564 - RNA, 18 nt, Artificial Sequence
  Synthetic
ugaugaauaaugagauag

SEQ ID NO: 103565 - RNA, 19 nt, Artificial Sequence
  Synthetic
cugaugaauaaugagauag

SEQ ID NO: 103566 - RNA, 21 nt, Artificial Sequence
  Synthetic
agcugaugaauaaugagauag

SEQ ID NO: 103567 - RNA, 22 nt, Artificial Sequence
  Synthetic
aagcugaugaauaaugagauag

SEQ ID NO: 103568 - RNA, 23 nt, Artificial Sequence
  Synthetic
aaagcugaugaauaaugagauag

SEQ ID NO: 103569 - RNA, 24 nt, Artificial Sequence
  Synthetic
aaaagcugaugaauaaugagauag

SEQ ID NO: 103570 - RNA, 18 nt, Artificial Sequence
  Synthetic
uuuucaggcauucgauag

SEQ ID NO: 103571 - RNA, 19 nt, Artificial Sequence
  Synthetic
uuuuucaggcauucgauag

SEQ ID NO: 103572 - RNA, 20 nt, Artificial Sequence
  Synthetic
uuuuuucaggcauucgauag

SEQ ID NO: 103573 - RNA, 21 nt, Artificial Sequence
  Synthetic
auuuuuucaggcauucgauag

SEQ ID NO: 103574 - RNA, 23 nt, Artificial Sequence
  Synthetic
ugauuuuuucaggcauucgauag

SEQ ID NO: 103575 - RNA, 24 nt, Artificial Sequence
  Synthetic
augauuuuuucaggcauucgauag

SEQ ID NO: 103576 - RNA, 21 nt, Artificial Sequence
  Synthetic
cacagaaagagggauggauag

SEQ ID NO: 103577 - RNA, 22 nt, Artificial Sequence
  Synthetic
ucacagaaagagggauggauag

SEQ ID NO: 103578 - RNA, 23 nt, Artificial Sequence
  Synthetic
aucacagaaagagggauggauag

SEQ ID NO: 103579 - RNA, 18 nt, Artificial Sequence
  Synthetic
uugguggggguaugauag

SEQ ID NO: 103580 - RNA, 19 nt, Artificial Sequence
  Synthetic
uuugguggggguaugauag

SEQ ID NO: 103581 - RNA, 20 nt, Artificial Sequence
  Synthetic
cuuugguggggguaugauag

SEQ ID NO: 103582 - RNA, 21 nt, Artificial Sequence
  Synthetic
acuuugguggggguaugauag

SEQ ID NO: 103583 - RNA, 22 nt, Artificial Sequence
  Synthetic
aacuuugguggggguaugauag

SEQ ID NO: 103584 - RNA, 23 nt, Artificial Sequence
  Synthetic
uaacuuugguggggguaugauag

SEQ ID NO: 103585 - RNA, 24 nt, Artificial Sequence
  Synthetic
uuaacuuugguggggguaugauag

SEQ ID NO: 103586 - RNA, 18 nt, Artificial Sequence
  Synthetic
uguuuauauucuugauag

SEQ ID NO: 103587 - RNA, 19 nt, Artificial Sequence
  Synthetic
cuguuuauauucuugauag

SEQ ID NO: 103588 - RNA, 20 nt, Artificial Sequence
  Synthetic
ccuguuuauauucuugauag

SEQ ID NO: 103589 - RNA, 21 nt, Artificial Sequence
  Synthetic
uccuguuuauauucuugauag

SEQ ID NO: 103590 - RNA, 22 nt, Artificial Sequence
  Synthetic
uuccuguuuauauucuugauag

SEQ ID NO: 103591 - RNA, 23 nt, Artificial Sequence
  Synthetic
auuccuguuuauauucuugauag

SEQ ID NO: 103592 - RNA, 24 nt, Artificial Sequence
  Synthetic
uauuccuguuuauauucuugauag

SEQ ID NO: 103593 - RNA, 18 nt, Artificial Sequence
  Synthetic
ucuguacccaaaauauag

SEQ ID NO: 103594 - RNA, 19 nt, Artificial Sequence
  Synthetic
cucuguacccaaaauauag

SEQ ID NO: 103595 - RNA, 21 nt, Artificial Sequence
  Synthetic
ugcucuguacccaaaauauag

SEQ ID NO: 103596 - RNA, 23 nt, Artificial Sequence
  Synthetic
ugugcucuguacccaaaauauag

SEQ ID NO: 103597 - RNA, 24 nt, Artificial Sequence
  Synthetic
uugugcucuguacccaaaauauag

SEQ ID NO: 103598 - RNA, 18 nt, Artificial Sequence
  Synthetic
aauguccccugaauauag

SEQ ID NO: 103599 - RNA, 19 nt, Artificial Sequence
  Synthetic
aaauguccccugaauauag

SEQ ID NO: 103600 - RNA, 20 nt, Artificial Sequence
  Synthetic
caaauguccccugaauauag

SEQ ID NO: 103601 - RNA, 21 nt, Artificial Sequence
  Synthetic
ucaaauguccccugaauauag

SEQ ID NO: 103602 - RNA, 22 nt, Artificial Sequence
  Synthetic
uucaaauguccccugaauauag

SEQ ID NO: 103603 - RNA, 23 nt, Artificial Sequence
  Synthetic
uuucaaauguccccugaauauag

SEQ ID NO: 103604 - RNA, 24 nt, Artificial Sequence
  Synthetic
uuuucaaauguccccugaauauag

SEQ ID NO: 103605 - RNA, 18 nt, Artificial Sequence
  Synthetic
caaauauaaaucauauag

SEQ ID NO: 103606 - RNA, 19 nt, Artificial Sequence
  Synthetic
ucaaauauaaaucauauag

SEQ ID NO: 103607 - RNA, 20 nt, Artificial Sequence
  Synthetic
uucaaauauaaaucauauag

SEQ ID NO: 103608 - RNA, 21 nt, Artificial Sequence
  Synthetic
auucaaauauaaaucauauag

SEQ ID NO: 103609 - RNA, 22 nt, Artificial Sequence
  Synthetic
uauucaaauauaaaucauauag

SEQ ID NO: 103610 - RNA, 23 nt, Artificial Sequence
  Synthetic
auauucaaauauaaaucauauag

SEQ ID NO: 103611 - RNA, 24 nt, Artificial Sequence
  Synthetic
aauauucaaauauaaaucauauag

SEQ ID NO: 103612 - RNA, 18 nt, Artificial Sequence
  Synthetic
uauagcagagagauauag

SEQ ID NO: 103613 - RNA, 19 nt, Artificial Sequence
  Synthetic
cuauagcagagagauauag

SEQ ID NO: 103614 - RNA, 21 nt, Artificial Sequence
  Synthetic
ugcuauagcagagagauauag

SEQ ID NO: 103615 - RNA, 22 nt, Artificial Sequence
  Synthetic
cugcuauagcagagagauauag

SEQ ID NO: 103616 - RNA, 23 nt, Artificial Sequence
  Synthetic
acugcuauagcagagagauauag

SEQ ID NO: 103617 - RNA, 24 nt, Artificial Sequence
  Synthetic
uacugcuauagcagagagauauag

SEQ ID NO: 103618 - RNA, 20 nt, Artificial Sequence
  Synthetic
uggcucuagauaggauauag

SEQ ID NO: 103619 - RNA, 21 nt, Artificial Sequence
  Synthetic
auggcucuagauaggauauag

SEQ ID NO: 103620 - RNA, 22 nt, Artificial Sequence
  Synthetic
cauggcucuagauaggauauag

SEQ ID NO: 103621 - RNA, 24 nt, Artificial Sequence
  Synthetic
agcauggcucuagauaggauauag

SEQ ID NO: 103622 - RNA, 21 nt, Artificial Sequence
  Synthetic
aggcugcuaaugcugcuauag

SEQ ID NO: 103623 - RNA, 23 nt, Artificial Sequence
  Synthetic
agaggcugcuaaugcugcuauag

SEQ ID NO: 103624 - RNA, 24 nt, Artificial Sequence
  Synthetic
aagaggcugcuaaugcugcuauag

SEQ ID NO: 103625 - RNA, 18 nt, Artificial Sequence
  Synthetic
aucagaagauuucuauag

SEQ ID NO: 103626 - RNA, 19 nt, Artificial Sequence
  Synthetic
uaucagaagauuucuauag

SEQ ID NO: 103627 - RNA, 20 nt, Artificial Sequence
  Synthetic
auaucagaagauuucuauag

SEQ ID NO: 103628 - RNA, 21 nt, Artificial Sequence
  Synthetic
aauaucagaagauuucuauag

SEQ ID NO: 103629 - RNA, 22 nt, Artificial Sequence
  Synthetic
aaauaucagaagauuucuauag

SEQ ID NO: 103630 - RNA, 23 nt, Artificial Sequence
  Synthetic
aaaauaucagaagauuucuauag

SEQ ID NO: 103631 - RNA, 21 nt, Artificial Sequence
  Synthetic
uaaaagaaaaauuuaguauag

SEQ ID NO: 103632 - RNA, 22 nt, Artificial Sequence
  Synthetic
auaaaagaaaaauuuaguauag

SEQ ID NO: 103633 - RNA, 23 nt, Artificial Sequence
  Synthetic
aauaaaagaaaaauuuaguauag

SEQ ID NO: 103634 - RNA, 24 nt, Artificial Sequence
  Synthetic
uaauaaaagaaaaauuuaguauag

SEQ ID NO: 103635 - RNA, 18 nt, Artificial Sequence
  Synthetic
aguggucuuuuaguauag

SEQ ID NO: 103636 - RNA, 19 nt, Artificial Sequence
  Synthetic
uaguggucuuuuaguauag

SEQ ID NO: 103637 - RNA, 20 nt, Artificial Sequence
  Synthetic
uuaguggucuuuuaguauag

SEQ ID NO: 103638 - RNA, 21 nt, Artificial Sequence
  Synthetic
cuuaguggucuuuuaguauag

SEQ ID NO: 103639 - RNA, 22 nt, Artificial Sequence
  Synthetic
acuuaguggucuuuuaguauag

SEQ ID NO: 103640 - RNA, 23 nt, Artificial Sequence
  Synthetic
uacuuaguggucuuuuaguauag

SEQ ID NO: 103641 - RNA, 24 nt, Artificial Sequence
  Synthetic
uuacuuaguggucuuuuaguauag

SEQ ID NO: 103642 - RNA, 18 nt, Artificial Sequence
  Synthetic
uacaaccuagauguauag

SEQ ID NO: 103643 - RNA, 19 nt, Artificial Sequence
  Synthetic
auacaaccuagauguauag

SEQ ID NO: 103644 - RNA, 20 nt, Artificial Sequence
  Synthetic
cauacaaccuagauguauag

SEQ ID NO: 103645 - RNA, 19 nt, Artificial Sequence
  Synthetic
ugauguacucauuguauag

SEQ ID NO: 103646 - RNA, 21 nt, Artificial Sequence
  Synthetic
ugugauguacucauuguauag

SEQ ID NO: 103647 - RNA, 22 nt, Artificial Sequence
  Synthetic
cugugauguacucauuguauag

SEQ ID NO: 103648 - RNA, 23 nt, Artificial Sequence
  Synthetic
ccugugauguacucauuguauag

SEQ ID NO: 103649 - RNA, 24 nt, Artificial Sequence
  Synthetic
uccugugauguacucauuguauag

SEQ ID NO: 103650 - RNA, 18 nt, Artificial Sequence
  Synthetic
ucucagcuggaauuauag

SEQ ID NO: 103651 - RNA, 19 nt, Artificial Sequence
  Synthetic
uucucagcuggaauuauag

SEQ ID NO: 103652 - RNA, 20 nt, Artificial Sequence
  Synthetic
auucucagcuggaauuauag

SEQ ID NO: 103653 - RNA, 21 nt, Artificial Sequence
  Synthetic
cauucucagcuggaauuauag

SEQ ID NO: 103654 - RNA, 22 nt, Artificial Sequence
  Synthetic
ucauucucagcuggaauuauag

SEQ ID NO: 103655 - RNA, 23 nt, Artificial Sequence
  Synthetic
aucauucucagcuggaauuauag

SEQ ID NO: 103656 - RNA, 21 nt, Artificial Sequence
  Synthetic
acagaugaaauaaacuuauag

SEQ ID NO: 103657 - RNA, 22 nt, Artificial Sequence
  Synthetic
aacagaugaaauaaacuuauag

SEQ ID NO: 103658 - RNA, 23 nt, Artificial Sequence
  Synthetic
caacagaugaaauaaacuuauag

SEQ ID NO: 103659 - RNA, 24 nt, Artificial Sequence
  Synthetic
ucaacagaugaaauaaacuuauag

SEQ ID NO: 103660 - RNA, 19 nt, Artificial Sequence
  Synthetic
aguaguacauuaaaacuag

SEQ ID NO: 103661 - RNA, 20 nt, Artificial Sequence
  Synthetic
aaguaguacauuaaaacuag

SEQ ID NO: 103662 - RNA, 18 nt, Artificial Sequence
  Synthetic
uccuaaaccaaugacuag

SEQ ID NO: 103663 - RNA, 20 nt, Artificial Sequence
  Synthetic
aguccuaaaccaaugacuag

SEQ ID NO: 103664 - RNA, 21 nt, Artificial Sequence
  Synthetic
caguccuaaaccaaugacuag

SEQ ID NO: 103665 - RNA, 23 nt, Artificial Sequence
  Synthetic
agcaguccuaaaccaaugacuag

SEQ ID NO: 103666 - RNA, 24 nt, Artificial Sequence
  Synthetic
aagcaguccuaaaccaaugacuag

SEQ ID NO: 103667 - RNA, 18 nt, Artificial Sequence
  Synthetic
uuagauauucucuacuag

SEQ ID NO: 103668 - RNA, 19 nt, Artificial Sequence
  Synthetic
auuagauauucucuacuag

SEQ ID NO: 103669 - RNA, 21 nt, Artificial Sequence
  Synthetic
agauuagauauucucuacuag

SEQ ID NO: 103670 - RNA, 23 nt, Artificial Sequence
  Synthetic
agagauuagauauucucuacuag

SEQ ID NO: 103671 - RNA, 24 nt, Artificial Sequence
  Synthetic
aagagauuagauauucucuacuag

SEQ ID NO: 103672 - RNA, 18 nt, Artificial Sequence
  Synthetic
uaaugucauguuuacuag

SEQ ID NO: 103673 - RNA, 19 nt, Artificial Sequence
  Synthetic
uuaaugucauguuuacuag

SEQ ID NO: 103674 - RNA, 20 nt, Artificial Sequence
  Synthetic
uuuaaugucauguuuacuag

SEQ ID NO: 103675 - RNA, 21 nt, Artificial Sequence
  Synthetic
cuuuaaugucauguuuacuag

SEQ ID NO: 103676 - RNA, 22 nt, Artificial Sequence
  Synthetic
ucuuuaaugucauguuuacuag

SEQ ID NO: 103677 - RNA, 23 nt, Artificial Sequence
  Synthetic
aucuuuaaugucauguuuacuag

SEQ ID NO: 103678 - RNA, 24 nt, Artificial Sequence
  Synthetic
caucuuuaaugucauguuuacuag

SEQ ID NO: 103679 - RNA, 18 nt, Artificial Sequence
  Synthetic
aucuuucuuagaaccuag

SEQ ID NO: 103680 - RNA, 19 nt, Artificial Sequence
  Synthetic
aaucuuucuuagaaccuag

SEQ ID NO: 103681 - RNA, 21 nt, Artificial Sequence
  Synthetic
ugaaucuuucuuagaaccuag

SEQ ID NO: 103682 - RNA, 22 nt, Artificial Sequence
  Synthetic
cugaaucuuucuuagaaccuag

SEQ ID NO: 103683 - RNA, 24 nt, Artificial Sequence
  Synthetic
ugcugaaucuuucuuagaaccuag

SEQ ID NO: 103684 - RNA, 18 nt, Artificial Sequence
  Synthetic
ucuucuauauggaccuag

SEQ ID NO: 103685 - RNA, 19 nt, Artificial Sequence
  Synthetic
aucuucuauauggaccuag

SEQ ID NO: 103686 - RNA, 23 nt, Artificial Sequence
  Synthetic
agggaucuucuauauggaccuag

SEQ ID NO: 103687 - RNA, 24 nt, Artificial Sequence
  Synthetic
uagggaucuucuauauggaccuag

SEQ ID NO: 103688 - RNA, 18 nt, Artificial Sequence
  Synthetic
aacaacaacucuaccuag

SEQ ID NO: 103689 - RNA, 19 nt, Artificial Sequence
  Synthetic
caacaacaacucuaccuag

SEQ ID NO: 103690 - RNA, 20 nt, Artificial Sequence
  Synthetic
ccaacaacaacucuaccuag

SEQ ID NO: 103691 - RNA, 21 nt, Artificial Sequence
  Synthetic
cccaacaacaacucuaccuag

SEQ ID NO: 103692 - RNA, 22 nt, Artificial Sequence
  Synthetic
ucccaacaacaacucuaccuag

SEQ ID NO: 103693 - RNA, 23 nt, Artificial Sequence
  Synthetic
aucccaacaacaacucuaccuag

SEQ ID NO: 103694 - RNA, 24 nt, Artificial Sequence
  Synthetic
aaucccaacaacaacucuaccuag

SEQ ID NO: 103695 - RNA, 18 nt, Artificial Sequence
  Synthetic
aguuuuauuccagccuag

SEQ ID NO: 103696 - RNA, 19 nt, Artificial Sequence
  Synthetic
uaguuuuauuccagccuag

SEQ ID NO: 103697 - RNA, 20 nt, Artificial Sequence
  Synthetic
uuaguuuuauuccagccuag

SEQ ID NO: 103698 - RNA, 21 nt, Artificial Sequence
  Synthetic
auuaguuuuauuccagccuag

SEQ ID NO: 103699 - RNA, 22 nt, Artificial Sequence
  Synthetic
cauuaguuuuauuccagccuag

SEQ ID NO: 103700 - RNA, 23 nt, Artificial Sequence
  Synthetic
acauuaguuuuauuccagccuag

SEQ ID NO: 103701 - RNA, 18 nt, Artificial Sequence
  Synthetic
uccagcugggcagccuag

SEQ ID NO: 103702 - RNA, 19 nt, Artificial Sequence
  Synthetic
cuccagcugggcagccuag

SEQ ID NO: 103703 - RNA, 20 nt, Artificial Sequence
  Synthetic
acuccagcugggcagccuag

SEQ ID NO: 103704 - RNA, 23 nt, Artificial Sequence
  Synthetic
aggacuccagcugggcagccuag

SEQ ID NO: 103705 - RNA, 24 nt, Artificial Sequence
  Synthetic
uaggacuccagcugggcagccuag

SEQ ID NO: 103706 - RNA, 21 nt, Artificial Sequence
  Synthetic
uacuucuaugaauuuuccuag

SEQ ID NO: 103707 - RNA, 22 nt, Artificial Sequence
  Synthetic
cuacuucuaugaauuuuccuag

SEQ ID NO: 103708 - RNA, 24 nt, Artificial Sequence
  Synthetic
ugcuacuucuaugaauuuuccuag

SEQ ID NO: 103709 - RNA, 18 nt, Artificial Sequence
  Synthetic
ugcgcgcgcgugcgcuag

SEQ ID NO: 103710 - RNA, 20 nt, Artificial Sequence
  Synthetic
ugugcgcgcgcgugcgcuag

SEQ ID NO: 103711 - RNA, 22 nt, Artificial Sequence
  Synthetic
ugugugcgcgcgcgugcgcuag

SEQ ID NO: 103712 - RNA, 24 nt, Artificial Sequence
  Synthetic
ugugugugcgcgcgcgugcgcuag

SEQ ID NO: 103713 - RNA, 18 nt, Artificial Sequence
  Synthetic
uuuugaauuuuaaucuag

SEQ ID NO: 103714 - RNA, 19 nt, Artificial Sequence
  Synthetic
cuuuugaauuuuaaucuag

SEQ ID NO: 103715 - RNA, 20 nt, Artificial Sequence
  Synthetic
ucuuuugaauuuuaaucuag

SEQ ID NO: 103716 - RNA, 21 nt, Artificial Sequence
  Synthetic
uucuuuugaauuuuaaucuag

SEQ ID NO: 103717 - RNA, 22 nt, Artificial Sequence
  Synthetic
cuucuuuugaauuuuaaucuag

SEQ ID NO: 103718 - RNA, 23 nt, Artificial Sequence
  Synthetic
acuucuuuugaauuuuaaucuag

SEQ ID NO: 103719 - RNA, 24 nt, Artificial Sequence
  Synthetic
aacuucuuuugaauuuuaaucuag

SEQ ID NO: 103720 - RNA, 18 nt, Artificial Sequence
  Synthetic
uuguaguacuuuaucuag

SEQ ID NO: 103721 - RNA, 19 nt, Artificial Sequence
  Synthetic
auuguaguacuuuaucuag

SEQ ID NO: 103722 - RNA, 20 nt, Artificial Sequence
  Synthetic
aauuguaguacuuuaucuag

SEQ ID NO: 103723 - RNA, 21 nt, Artificial Sequence
  Synthetic
uaauuguaguacuuuaucuag

SEQ ID NO: 103724 - RNA, 22 nt, Artificial Sequence
  Synthetic
cuaauuguaguacuuuaucuag

SEQ ID NO: 103725 - RNA, 23 nt, Artificial Sequence
  Synthetic
ccuaauuguaguacuuuaucuag

SEQ ID NO: 103726 - RNA, 24 nt, Artificial Sequence
  Synthetic
accuaauuguaguacuuuaucuag

SEQ ID NO: 103727 - RNA, 19 nt, Artificial Sequence
  Synthetic
ugugaaaccuguucucuag

SEQ ID NO: 103728 - RNA, 20 nt, Artificial Sequence
  Synthetic
uugugaaaccuguucucuag

SEQ ID NO: 103729 - RNA, 21 nt, Artificial Sequence
  Synthetic
auugugaaaccuguucucuag

SEQ ID NO: 103730 - RNA, 22 nt, Artificial Sequence
  Synthetic
uauugugaaaccuguucucuag

SEQ ID NO: 103731 - RNA, 18 nt, Artificial Sequence
  Synthetic
uggugggaaauggucuag

SEQ ID NO: 103732 - RNA, 19 nt, Artificial Sequence
  Synthetic
cuggugggaaauggucuag

SEQ ID NO: 103733 - RNA, 20 nt, Artificial Sequence
  Synthetic
acuggugggaaauggucuag

SEQ ID NO: 103734 - RNA, 21 nt, Artificial Sequence
  Synthetic
aacuggugggaaauggucuag

SEQ ID NO: 103735 - RNA, 23 nt, Artificial Sequence
  Synthetic
agaacuggugggaaauggucuag

SEQ ID NO: 103736 - RNA, 24 nt, Artificial Sequence
  Synthetic
aagaacuggugggaaauggucuag

SEQ ID NO: 103737 - RNA, 18 nt, Artificial Sequence
  Synthetic
uguuuagaaaaguucuag

SEQ ID NO: 103738 - RNA, 19 nt, Artificial Sequence
  Synthetic
auguuuagaaaaguucuag

SEQ ID NO: 103739 - RNA, 20 nt, Artificial Sequence
  Synthetic
aauguuuagaaaaguucuag

SEQ ID NO: 103740 - RNA, 21 nt, Artificial Sequence
  Synthetic
aaauguuuagaaaaguucuag

SEQ ID NO: 103741 - RNA, 22 nt, Artificial Sequence
  Synthetic
aaaauguuuagaaaaguucuag

SEQ ID NO: 103742 - RNA, 24 nt, Artificial Sequence
  Synthetic
ugaaaauguuuagaaaaguucuag

SEQ ID NO: 103743 - RNA, 18 nt, Artificial Sequence
  Synthetic
uaaaauccaccguucuag

SEQ ID NO: 103744 - RNA, 19 nt, Artificial Sequence
  Synthetic
uuaaaauccaccguucuag

SEQ ID NO: 103745 - RNA, 22 nt, Artificial Sequence
  Synthetic
agguuaaaauccaccguucuag

SEQ ID NO: 103746 - RNA, 23 nt, Artificial Sequence
  Synthetic
aagguuaaaauccaccguucuag

SEQ ID NO: 103747 - RNA, 24 nt, Artificial Sequence
  Synthetic
caagguuaaaauccaccguucuag

SEQ ID NO: 103748 - RNA, 18 nt, Artificial Sequence
  Synthetic
ugaaauucugcuuucuag

SEQ ID NO: 103749 - RNA, 19 nt, Artificial Sequence
  Synthetic
cugaaauucugcuuucuag

SEQ ID NO: 103750 - RNA, 20 nt, Artificial Sequence
  Synthetic
ucugaaauucugcuuucuag

SEQ ID NO: 103751 - RNA, 21 nt, Artificial Sequence
  Synthetic
cucugaaauucugcuuucuag

SEQ ID NO: 103752 - RNA, 22 nt, Artificial Sequence
  Synthetic
acucugaaauucugcuuucuag

SEQ ID NO: 103753 - RNA, 23 nt, Artificial Sequence
  Synthetic
cacucugaaauucugcuuucuag

SEQ ID NO: 103754 - RNA, 24 nt, Artificial Sequence
  Synthetic
ccacucugaaauucugcuuucuag

SEQ ID NO: 103755 - RNA, 18 nt, Artificial Sequence
  Synthetic
uagauggagagaaaguag

SEQ ID NO: 103756 - RNA, 20 nt, Artificial Sequence
  Synthetic
uguagauggagagaaaguag

SEQ ID NO: 103757 - RNA, 21 nt, Artificial Sequence
  Synthetic
uuguagauggagagaaaguag

SEQ ID NO: 103758 - RNA, 22 nt, Artificial Sequence
  Synthetic
cuuguagauggagagaaaguag

SEQ ID NO: 103759 - RNA, 24 nt, Artificial Sequence
  Synthetic
agcuuguagauggagagaaaguag

SEQ ID NO: 103760 - RNA, 19 nt, Artificial Sequence
  Synthetic
ugaagggccauguaaguag

SEQ ID NO: 103761 - RNA, 20 nt, Artificial Sequence
  Synthetic
augaagggccauguaaguag

SEQ ID NO: 103762 - RNA, 21 nt, Artificial Sequence
  Synthetic
caugaagggccauguaaguag

SEQ ID NO: 103763 - RNA, 23 nt, Artificial Sequence
  Synthetic
agcaugaagggccauguaaguag

SEQ ID NO: 103764 - RNA, 18 nt, Artificial Sequence
  Synthetic
augguucaauaacaguag

SEQ ID NO: 103765 - RNA, 19 nt, Artificial Sequence
  Synthetic
aaugguucaauaacaguag

SEQ ID NO: 103766 - RNA, 20 nt, Artificial Sequence
  Synthetic
uaaugguucaauaacaguag

SEQ ID NO: 103767 - RNA, 22 nt, Artificial Sequence
  Synthetic
aguaaugguucaauaacaguag

SEQ ID NO: 103768 - RNA, 18 nt, Artificial Sequence
  Synthetic
cuccaaguggcccaguag

SEQ ID NO: 103769 - RNA, 19 nt, Artificial Sequence
  Synthetic
ucuccaaguggcccaguag

SEQ ID NO: 103770 - RNA, 20 nt, Artificial Sequence
  Synthetic
aucuccaaguggcccaguag

SEQ ID NO: 103771 - RNA, 22 nt, Artificial Sequence
  Synthetic
ugaucuccaaguggcccaguag

SEQ ID NO: 103772 - RNA, 23 nt, Artificial Sequence
  Synthetic
cugaucuccaaguggcccaguag

SEQ ID NO: 103773 - RNA, 24 nt, Artificial Sequence
  Synthetic
ucugaucuccaaguggcccaguag

SEQ ID NO: 103774 - RNA, 19 nt, Artificial Sequence
  Synthetic
ugauuuguaauuccaguag

SEQ ID NO: 103775 - RNA, 20 nt, Artificial Sequence
  Synthetic
uugauuuguaauuccaguag

SEQ ID NO: 103776 - RNA, 21 nt, Artificial Sequence
  Synthetic
uuugauuuguaauuccaguag

SEQ ID NO: 103777 - RNA, 22 nt, Artificial Sequence
  Synthetic
uuuugauuuguaauuccaguag

SEQ ID NO: 103778 - RNA, 24 nt, Artificial Sequence
  Synthetic
aguuuugauuuguaauuccaguag

SEQ ID NO: 103779 - RNA, 18 nt, Artificial Sequence
  Synthetic
ugggucuugaagcaguag

SEQ ID NO: 103780 - RNA, 19 nt, Artificial Sequence
  Synthetic
augggucuugaagcaguag

SEQ ID NO: 103781 - RNA, 21 nt, Artificial Sequence
  Synthetic
agaugggucuugaagcaguag

SEQ ID NO: 103782 - RNA, 22 nt, Artificial Sequence
  Synthetic
aagaugggucuugaagcaguag

SEQ ID NO: 103783 - RNA, 23 nt, Artificial Sequence
  Synthetic
caagaugggucuugaagcaguag

SEQ ID NO: 103784 - RNA, 24 nt, Artificial Sequence
  Synthetic
ucaagaugggucuugaagcaguag

SEQ ID NO: 103785 - RNA, 18 nt, Artificial Sequence
  Synthetic
ccuucagaauggcaguag

SEQ ID NO: 103786 - RNA, 19 nt, Artificial Sequence
  Synthetic
accuucagaauggcaguag

SEQ ID NO: 103787 - RNA, 21 nt, Artificial Sequence
  Synthetic
ugaccuucagaauggcaguag

SEQ ID NO: 103788 - RNA, 22 nt, Artificial Sequence
  Synthetic
augaccuucagaauggcaguag

SEQ ID NO: 103789 - RNA, 23 nt, Artificial Sequence
  Synthetic
aaugaccuucagaauggcaguag

SEQ ID NO: 103790 - RNA, 24 nt, Artificial Sequence
  Synthetic
aaaugaccuucagaauggcaguag

SEQ ID NO: 103791 - RNA, 18 nt, Artificial Sequence
  Synthetic
agcccucauauugaguag

SEQ ID NO: 103792 - RNA, 19 nt, Artificial Sequence
  Synthetic
uagcccucauauugaguag

SEQ ID NO: 103793 - RNA, 20 nt, Artificial Sequence
  Synthetic
uuagcccucauauugaguag

SEQ ID NO: 103794 - RNA, 21 nt, Artificial Sequence
  Synthetic
uuuagcccucauauugaguag

SEQ ID NO: 103795 - RNA, 22 nt, Artificial Sequence
  Synthetic
uuuuagcccucauauugaguag

SEQ ID NO: 103796 - RNA, 23 nt, Artificial Sequence
  Synthetic
cuuuuagcccucauauugaguag

SEQ ID NO: 103797 - RNA, 24 nt, Artificial Sequence
  Synthetic
acuuuuagcccucauauugaguag

SEQ ID NO: 103798 - RNA, 18 nt, Artificial Sequence
  Synthetic
ucaucacuuucauaguag

SEQ ID NO: 103799 - RNA, 19 nt, Artificial Sequence
  Synthetic
cucaucacuuucauaguag

SEQ ID NO: 103800 - RNA, 20 nt, Artificial Sequence
  Synthetic
ucucaucacuuucauaguag

SEQ ID NO: 103801 - RNA, 21 nt, Artificial Sequence
  Synthetic
aucucaucacuuucauaguag

SEQ ID NO: 103802 - RNA, 22 nt, Artificial Sequence
  Synthetic
caucucaucacuuucauaguag

SEQ ID NO: 103803 - RNA, 23 nt, Artificial Sequence
  Synthetic
ucaucucaucacuuucauaguag

SEQ ID NO: 103804 - RNA, 24 nt, Artificial Sequence
  Synthetic
uucaucucaucacuuucauaguag

SEQ ID NO: 103805 - RNA, 18 nt, Artificial Sequence
  Synthetic
agaaaauuauuauaguag

SEQ ID NO: 103806 - RNA, 19 nt, Artificial Sequence
  Synthetic
aagaaaauuauuauaguag

SEQ ID NO: 103807 - RNA, 20 nt, Artificial Sequence
  Synthetic
caagaaaauuauuauaguag

SEQ ID NO: 103808 - RNA, 21 nt, Artificial Sequence
  Synthetic
ucaagaaaauuauuauaguag

SEQ ID NO: 103809 - RNA, 22 nt, Artificial Sequence
  Synthetic
aucaagaaaauuauuauaguag

SEQ ID NO: 103810 - RNA, 24 nt, Artificial Sequence
  Synthetic
agaucaagaaaauuauuauaguag

SEQ ID NO: 103811 - RNA, 19 nt, Artificial Sequence
  Synthetic
ugcugugcccacuuaguag

SEQ ID NO: 103812 - RNA, 20 nt, Artificial Sequence
  Synthetic
augcugugcccacuuaguag

SEQ ID NO: 103813 - RNA, 21 nt, Artificial Sequence
  Synthetic
caugcugugcccacuuaguag

SEQ ID NO: 103814 - RNA, 22 nt, Artificial Sequence
  Synthetic
ccaugcugugcccacuuaguag

SEQ ID NO: 103815 - RNA, 19 nt, Artificial Sequence
  Synthetic
cgccaaguagacaacguag

SEQ ID NO: 103816 - RNA, 20 nt, Artificial Sequence
  Synthetic
ucgccaaguagacaacguag

SEQ ID NO: 103817 - RNA, 21 nt, Artificial Sequence
  Synthetic
uucgccaaguagacaacguag

SEQ ID NO: 103818 - RNA, 22 nt, Artificial Sequence
  Synthetic
auucgccaaguagacaacguag

SEQ ID NO: 103819 - RNA, 23 nt, Artificial Sequence
  Synthetic
aauucgccaaguagacaacguag

SEQ ID NO: 103820 - RNA, 18 nt, Artificial Sequence
  Synthetic
uacggagcuaucacguag

SEQ ID NO: 103821 - RNA, 20 nt, Artificial Sequence
  Synthetic
aguacggagcuaucacguag

SEQ ID NO: 103822 - RNA, 21 nt, Artificial Sequence
  Synthetic
aaguacggagcuaucacguag

SEQ ID NO: 103823 - RNA, 23 nt, Artificial Sequence
  Synthetic
agaaguacggagcuaucacguag

SEQ ID NO: 103824 - RNA, 24 nt, Artificial Sequence
  Synthetic
aagaaguacggagcuaucacguag

SEQ ID NO: 103825 - RNA, 19 nt, Artificial Sequence
  Synthetic
agugucacaauuugcguag

SEQ ID NO: 103826 - RNA, 20 nt, Artificial Sequence
  Synthetic
aagugucacaauuugcguag

SEQ ID NO: 103827 - RNA, 21 nt, Artificial Sequence
  Synthetic
uaagugucacaauuugcguag

SEQ ID NO: 103828 - RNA, 22 nt, Artificial Sequence
  Synthetic
uuaagugucacaauuugcguag

SEQ ID NO: 103829 - RNA, 23 nt, Artificial Sequence
  Synthetic
auuaagugucacaauuugcguag

SEQ ID NO: 103830 - RNA, 24 nt, Artificial Sequence
  Synthetic
aauuaagugucacaauuugcguag

SEQ ID NO: 103831 - RNA, 18 nt, Artificial Sequence
  Synthetic
uguuuuacugaacgguag

SEQ ID NO: 103832 - RNA, 19 nt, Artificial Sequence
  Synthetic
cuguuuuacugaacgguag

SEQ ID NO: 103833 - RNA, 20 nt, Artificial Sequence
  Synthetic
ccuguuuuacugaacgguag

SEQ ID NO: 103834 - RNA, 21 nt, Artificial Sequence
  Synthetic
uccuguuuuacugaacgguag

SEQ ID NO: 103835 - RNA, 22 nt, Artificial Sequence
  Synthetic
uuccuguuuuacugaacgguag

SEQ ID NO: 103836 - RNA, 23 nt, Artificial Sequence
  Synthetic
uuuccuguuuuacugaacgguag

SEQ ID NO: 103837 - RNA, 24 nt, Artificial Sequence
  Synthetic
auuuccuguuuuacugaacgguag

SEQ ID NO: 103838 - RNA, 18 nt, Artificial Sequence
  Synthetic
ugguaggguggaggguag

SEQ ID NO: 103839 - RNA, 19 nt, Artificial Sequence
  Synthetic
augguaggguggaggguag

SEQ ID NO: 103840 - RNA, 20 nt, Artificial Sequence
  Synthetic
caugguaggguggaggguag

SEQ ID NO: 103841 - RNA, 21 nt, Artificial Sequence
  Synthetic
ucaugguaggguggaggguag

SEQ ID NO: 103842 - RNA, 22 nt, Artificial Sequence
  Synthetic
uucaugguaggguggaggguag

SEQ ID NO: 103843 - RNA, 23 nt, Artificial Sequence
  Synthetic
auucaugguaggguggaggguag

SEQ ID NO: 103844 - RNA, 24 nt, Artificial Sequence
  Synthetic
uauucaugguaggguggaggguag

SEQ ID NO: 103845 - RNA, 21 nt, Artificial Sequence
  Synthetic
ugagggguggggguaggguag

SEQ ID NO: 103846 - RNA, 22 nt, Artificial Sequence
  Synthetic
augagggguggggguaggguag

SEQ ID NO: 103847 - RNA, 24 nt, Artificial Sequence
  Synthetic
ugaugagggguggggguaggguag

SEQ ID NO: 103848 - RNA, 21 nt, Artificial Sequence
  Synthetic
acugaguggauggauggguag

SEQ ID NO: 103849 - RNA, 22 nt, Artificial Sequence
  Synthetic
aacugaguggauggauggguag

SEQ ID NO: 103850 - RNA, 23 nt, Artificial Sequence
  Synthetic
uaacugaguggauggauggguag

SEQ ID NO: 103851 - RNA, 19 nt, Artificial Sequence
  Synthetic
agaacagucugguggguag

SEQ ID NO: 103852 - RNA, 20 nt, Artificial Sequence
  Synthetic
cagaacagucugguggguag

SEQ ID NO: 103853 - RNA, 23 nt, Artificial Sequence
  Synthetic
aggcagaacagucugguggguag

SEQ ID NO: 103854 - RNA, 24 nt, Artificial Sequence
  Synthetic
uaggcagaacagucugguggguag

SEQ ID NO: 103855 - RNA, 18 nt, Artificial Sequence
  Synthetic
cugauuggugguggguag

SEQ ID NO: 103856 - RNA, 19 nt, Artificial Sequence
  Synthetic
acugauuggugguggguag

SEQ ID NO: 103857 - RNA, 20 nt, Artificial Sequence
  Synthetic
uacugauuggugguggguag

SEQ ID NO: 103858 - RNA, 21 nt, Artificial Sequence
  Synthetic
auacugauuggugguggguag

SEQ ID NO: 103859 - RNA, 22 nt, Artificial Sequence
  Synthetic
aauacugauuggugguggguag

SEQ ID NO: 103860 - RNA, 23 nt, Artificial Sequence
  Synthetic
caauacugauuggugguggguag

SEQ ID NO: 103861 - RNA, 24 nt, Artificial Sequence
  Synthetic
acaauacugauuggugguggguag

SEQ ID NO: 103862 - RNA, 18 nt, Artificial Sequence
  Synthetic
aagaucauuucuugguag

SEQ ID NO: 103863 - RNA, 20 nt, Artificial Sequence
  Synthetic
ugaagaucauuucuugguag

SEQ ID NO: 103864 - RNA, 22 nt, Artificial Sequence
  Synthetic
ugugaagaucauuucuugguag

SEQ ID NO: 103865 - RNA, 23 nt, Artificial Sequence
  Synthetic
uugugaagaucauuucuugguag

SEQ ID NO: 103866 - RNA, 24 nt, Artificial Sequence
  Synthetic
uuugugaagaucauuucuugguag

SEQ ID NO: 103867 - RNA, 18 nt, Artificial Sequence
  Synthetic
aauaauccagaaauguag

SEQ ID NO: 103868 - RNA, 19 nt, Artificial Sequence
  Synthetic
uaauaauccagaaauguag

SEQ ID NO: 103869 - RNA, 20 nt, Artificial Sequence
  Synthetic
auaauaauccagaaauguag

SEQ ID NO: 103870 - RNA, 21 nt, Artificial Sequence
  Synthetic
uauaauaauccagaaauguag

SEQ ID NO: 103871 - RNA, 22 nt, Artificial Sequence
  Synthetic
auauaauaauccagaaauguag

SEQ ID NO: 103872 - RNA, 23 nt, Artificial Sequence
  Synthetic
aauauaauaauccagaaauguag

SEQ ID NO: 103873 - RNA, 24 nt, Artificial Sequence
  Synthetic
aaauauaauaauccagaaauguag

SEQ ID NO: 103874 - RNA, 18 nt, Artificial Sequence
  Synthetic
uguucaggguaaauguag

SEQ ID NO: 103875 - RNA, 21 nt, Artificial Sequence
  Synthetic
ugguguucaggguaaauguag

SEQ ID NO: 103876 - RNA, 22 nt, Artificial Sequence
  Synthetic
augguguucaggguaaauguag

SEQ ID NO: 103877 - RNA, 18 nt, Artificial Sequence
  Synthetic
auuccacauuucauguag

SEQ ID NO: 103878 - RNA, 19 nt, Artificial Sequence
  Synthetic
aauuccacauuucauguag

SEQ ID NO: 103879 - RNA, 20 nt, Artificial Sequence
  Synthetic
uaauuccacauuucauguag

SEQ ID NO: 103880 - RNA, 21 nt, Artificial Sequence
  Synthetic
uuaauuccacauuucauguag

SEQ ID NO: 103881 - RNA, 22 nt, Artificial Sequence
  Synthetic
cuuaauuccacauuucauguag

SEQ ID NO: 103882 - RNA, 23 nt, Artificial Sequence
  Synthetic
ucuuaauuccacauuucauguag

SEQ ID NO: 103883 - RNA, 19 nt, Artificial Sequence
  Synthetic
agaaauauaauuuauguag

SEQ ID NO: 103884 - RNA, 20 nt, Artificial Sequence
  Synthetic
uagaaauauaauuuauguag

SEQ ID NO: 103885 - RNA, 21 nt, Artificial Sequence
  Synthetic
auagaaauauaauuuauguag

SEQ ID NO: 103886 - RNA, 22 nt, Artificial Sequence
  Synthetic
cauagaaauauaauuuauguag

SEQ ID NO: 103887 - RNA, 23 nt, Artificial Sequence
  Synthetic
acauagaaauauaauuuauguag

SEQ ID NO: 103888 - RNA, 24 nt, Artificial Sequence
  Synthetic
uacauagaaauauaauuuauguag

SEQ ID NO: 103889 - RNA, 20 nt, Artificial Sequence
  Synthetic
uggaguuaccaugaaauuag

SEQ ID NO: 103890 - RNA, 21 nt, Artificial Sequence
  Synthetic
uuggaguuaccaugaaauuag

SEQ ID NO: 103891 - RNA, 22 nt, Artificial Sequence
  Synthetic
cuuggaguuaccaugaaauuag

SEQ ID NO: 103892 - RNA, 23 nt, Artificial Sequence
  Synthetic
ccuuggaguuaccaugaaauuag

SEQ ID NO: 103893 - RNA, 24 nt, Artificial Sequence
  Synthetic
accuuggaguuaccaugaaauuag

SEQ ID NO: 103894 - RNA, 18 nt, Artificial Sequence
  Synthetic
ugaucacgucuaaauuag

SEQ ID NO: 103895 - RNA, 19 nt, Artificial Sequence
  Synthetic
uugaucacgucuaaauuag

SEQ ID NO: 103896 - RNA, 20 nt, Artificial Sequence
  Synthetic
auugaucacgucuaaauuag

SEQ ID NO: 103897 - RNA, 21 nt, Artificial Sequence
  Synthetic
uauugaucacgucuaaauuag

SEQ ID NO: 103898 - RNA, 22 nt, Artificial Sequence
  Synthetic
auauugaucacgucuaaauuag

SEQ ID NO: 103899 - RNA, 24 nt, Artificial Sequence
  Synthetic
agauauugaucacgucuaaauuag

SEQ ID NO: 103900 - RNA, 19 nt, Artificial Sequence
  Synthetic
agugauaccuaacaauuag

SEQ ID NO: 103901 - RNA, 20 nt, Artificial Sequence
  Synthetic
uagugauaccuaacaauuag

SEQ ID NO: 103902 - RNA, 21 nt, Artificial Sequence
  Synthetic
uuagugauaccuaacaauuag

SEQ ID NO: 103903 - RNA, 22 nt, Artificial Sequence
  Synthetic
uuuagugauaccuaacaauuag

SEQ ID NO: 103904 - RNA, 23 nt, Artificial Sequence
  Synthetic
cuuuagugauaccuaacaauuag

SEQ ID NO: 103905 - RNA, 18 nt, Artificial Sequence
  Synthetic
agggacaaagucaauuag

SEQ ID NO: 103906 - RNA, 19 nt, Artificial Sequence
  Synthetic
cagggacaaagucaauuag

SEQ ID NO: 103907 - RNA, 20 nt, Artificial Sequence
  Synthetic
ucagggacaaagucaauuag

SEQ ID NO: 103908 - RNA, 21 nt, Artificial Sequence
  Synthetic
aucagggacaaagucaauuag

SEQ ID NO: 103909 - RNA, 22 nt, Artificial Sequence
  Synthetic
caucagggacaaagucaauuag

SEQ ID NO: 103910 - RNA, 23 nt, Artificial Sequence
  Synthetic
ucaucagggacaaagucaauuag

SEQ ID NO: 103911 - RNA, 18 nt, Artificial Sequence
  Synthetic
uuacaaguugagaauuag

SEQ ID NO: 103912 - RNA, 19 nt, Artificial Sequence
  Synthetic
auuacaaguugagaauuag

SEQ ID NO: 103913 - RNA, 20 nt, Artificial Sequence
  Synthetic
uauuacaaguugagaauuag

SEQ ID NO: 103914 - RNA, 21 nt, Artificial Sequence
  Synthetic
auauuacaaguugagaauuag

SEQ ID NO: 103915 - RNA, 23 nt, Artificial Sequence
  Synthetic
agauauuacaaguugagaauuag

SEQ ID NO: 103916 - RNA, 18 nt, Artificial Sequence
  Synthetic
ucaaagggagggaauuag

SEQ ID NO: 103917 - RNA, 19 nt, Artificial Sequence
  Synthetic
cucaaagggagggaauuag

SEQ ID NO: 103918 - RNA, 20 nt, Artificial Sequence
  Synthetic
ccucaaagggagggaauuag

SEQ ID NO: 103919 - RNA, 21 nt, Artificial Sequence
  Synthetic
accucaaagggagggaauuag

SEQ ID NO: 103920 - RNA, 22 nt, Artificial Sequence
  Synthetic
aaccucaaagggagggaauuag

SEQ ID NO: 103921 - RNA, 23 nt, Artificial Sequence
  Synthetic
caaccucaaagggagggaauuag

SEQ ID NO: 103922 - RNA, 21 nt, Artificial Sequence
  Synthetic
cuaaaauuuaaaaauaauuag

SEQ ID NO: 103923 - RNA, 22 nt, Artificial Sequence
  Synthetic
ucuaaaauuuaaaaauaauuag

SEQ ID NO: 103924 - RNA, 23 nt, Artificial Sequence
  Synthetic
aucuaaaauuuaaaaauaauuag

SEQ ID NO: 103925 - RNA, 18 nt, Artificial Sequence
  Synthetic
ugcuuugcaccucauuag

SEQ ID NO: 103926 - RNA, 19 nt, Artificial Sequence
  Synthetic
cugcuuugcaccucauuag

SEQ ID NO: 103927 - RNA, 22 nt, Artificial Sequence
  Synthetic
uggcugcuuugcaccucauuag

SEQ ID NO: 103928 - RNA, 23 nt, Artificial Sequence
  Synthetic
auggcugcuuugcaccucauuag

SEQ ID NO: 103929 - RNA, 24 nt, Artificial Sequence
  Synthetic
uauggcugcuuugcaccucauuag

SEQ ID NO: 103930 - RNA, 18 nt, Artificial Sequence
  Synthetic
auguggaaauaugauuag

SEQ ID NO: 103931 - RNA, 19 nt, Artificial Sequence
  Synthetic
uauguggaaauaugauuag

SEQ ID NO: 103932 - RNA, 20 nt, Artificial Sequence
  Synthetic
uuauguggaaauaugauuag

SEQ ID NO: 103933 - RNA, 21 nt, Artificial Sequence
  Synthetic
uuuauguggaaauaugauuag

SEQ ID NO: 103934 - RNA, 22 nt, Artificial Sequence
  Synthetic
auuuauguggaaauaugauuag

SEQ ID NO: 103935 - RNA, 23 nt, Artificial Sequence
  Synthetic
uauuuauguggaaauaugauuag

SEQ ID NO: 103936 - RNA, 21 nt, Artificial Sequence
  Synthetic
uuuuuaaaaaguuaugauuag

SEQ ID NO: 103937 - RNA, 22 nt, Artificial Sequence
  Synthetic
uuuuuuaaaaaguuaugauuag

SEQ ID NO: 103938 - RNA, 23 nt, Artificial Sequence
  Synthetic
auuuuuuaaaaaguuaugauuag

SEQ ID NO: 103939 - RNA, 24 nt, Artificial Sequence
  Synthetic
aauuuuuuaaaaaguuaugauuag

SEQ ID NO: 103940 - RNA, 18 nt, Artificial Sequence
  Synthetic
ccaauguccauugauuag

SEQ ID NO: 103941 - RNA, 19 nt, Artificial Sequence
  Synthetic
cccaauguccauugauuag

SEQ ID NO: 103942 - RNA, 21 nt, Artificial Sequence
  Synthetic
agcccaauguccauugauuag

SEQ ID NO: 103943 - RNA, 22 nt, Artificial Sequence
  Synthetic
cagcccaauguccauugauuag

SEQ ID NO: 103944 - RNA, 23 nt, Artificial Sequence
  Synthetic
acagcccaauguccauugauuag

SEQ ID NO: 103945 - RNA, 24 nt, Artificial Sequence
  Synthetic
cacagcccaauguccauugauuag

SEQ ID NO: 103946 - RNA, 19 nt, Artificial Sequence
  Synthetic
aggauaaaguuuugauuag

SEQ ID NO: 103947 - RNA, 22 nt, Artificial Sequence
  Synthetic
aggaggauaaaguuuugauuag

SEQ ID NO: 103948 - RNA, 23 nt, Artificial Sequence
  Synthetic
aaggaggauaaaguuuugauuag

SEQ ID NO: 103949 - RNA, 24 nt, Artificial Sequence
  Synthetic
caaggaggauaaaguuuugauuag

SEQ ID NO: 103950 - RNA, 18 nt, Artificial Sequence
  Synthetic
uuccuuaaugcauauuag

SEQ ID NO: 103951 - RNA, 19 nt, Artificial Sequence
  Synthetic
auuccuuaaugcauauuag

SEQ ID NO: 103952 - RNA, 20 nt, Artificial Sequence
  Synthetic
uauuccuuaaugcauauuag

SEQ ID NO: 103953 - RNA, 21 nt, Artificial Sequence
  Synthetic
cuauuccuuaaugcauauuag

SEQ ID NO: 103954 - RNA, 22 nt, Artificial Sequence
  Synthetic
acuauuccuuaaugcauauuag

SEQ ID NO: 103955 - RNA, 23 nt, Artificial Sequence
  Synthetic
cacuauuccuuaaugcauauuag

SEQ ID NO: 103956 - RNA, 24 nt, Artificial Sequence
  Synthetic
ccacuauuccuuaaugcauauuag

SEQ ID NO: 103957 - RNA, 18 nt, Artificial Sequence
  Synthetic
aaggaauguagauauuag

SEQ ID NO: 103958 - RNA, 19 nt, Artificial Sequence
  Synthetic
uaaggaauguagauauuag

SEQ ID NO: 103959 - RNA, 22 nt, Artificial Sequence
  Synthetic
ugguaaggaauguagauauuag

SEQ ID NO: 103960 - RNA, 23 nt, Artificial Sequence
  Synthetic
augguaaggaauguagauauuag

SEQ ID NO: 103961 - RNA, 24 nt, Artificial Sequence
  Synthetic
aaugguaaggaauguagauauuag

SEQ ID NO: 103962 - RNA, 18 nt, Artificial Sequence
  Synthetic
uccacuaauuucuauuag

SEQ ID NO: 103963 - RNA, 19 nt, Artificial Sequence
  Synthetic
uuccacuaauuucuauuag

SEQ ID NO: 103964 - RNA, 20 nt, Artificial Sequence
  Synthetic
uuuccacuaauuucuauuag

SEQ ID NO: 103965 - RNA, 21 nt, Artificial Sequence
  Synthetic
auuuccacuaauuucuauuag

SEQ ID NO: 103966 - RNA, 22 nt, Artificial Sequence
  Synthetic
uauuuccacuaauuucuauuag

SEQ ID NO: 103967 - RNA, 23 nt, Artificial Sequence
  Synthetic
auauuuccacuaauuucuauuag

SEQ ID NO: 103968 - RNA, 24 nt, Artificial Sequence
  Synthetic
aauauuuccacuaauuucuauuag

SEQ ID NO: 103969 - RNA, 20 nt, Artificial Sequence
  Synthetic
agguucccuauaauuauuag

SEQ ID NO: 103970 - RNA, 23 nt, Artificial Sequence
  Synthetic
uggagguucccuauaauuauuag

SEQ ID NO: 103971 - RNA, 24 nt, Artificial Sequence
  Synthetic
auggagguucccuauaauuauuag

SEQ ID NO: 103972 - RNA, 18 nt, Artificial Sequence
  Synthetic
uauuuaauaguuuauuag

SEQ ID NO: 103973 - RNA, 19 nt, Artificial Sequence
  Synthetic
auauuuaauaguuuauuag

SEQ ID NO: 103974 - RNA, 20 nt, Artificial Sequence
  Synthetic
cauauuuaauaguuuauuag

SEQ ID NO: 103975 - RNA, 21 nt, Artificial Sequence
  Synthetic
ccauauuuaauaguuuauuag

SEQ ID NO: 103976 - RNA, 22 nt, Artificial Sequence
  Synthetic
accauauuuaauaguuuauuag

SEQ ID NO: 103977 - RNA, 23 nt, Artificial Sequence
  Synthetic
aaccauauuuaauaguuuauuag

SEQ ID NO: 103978 - RNA, 18 nt, Artificial Sequence
  Synthetic
uuggcacagacaacuuag

SEQ ID NO: 103979 - RNA, 19 nt, Artificial Sequence
  Synthetic
auuggcacagacaacuuag

SEQ ID NO: 103980 - RNA, 20 nt, Artificial Sequence
  Synthetic
aauuggcacagacaacuuag

SEQ ID NO: 103981 - RNA, 21 nt, Artificial Sequence
  Synthetic
aaauuggcacagacaacuuag

SEQ ID NO: 103982 - RNA, 22 nt, Artificial Sequence
  Synthetic
caaauuggcacagacaacuuag

SEQ ID NO: 103983 - RNA, 18 nt, Artificial Sequence
  Synthetic
aacagcaaauggacuuag

SEQ ID NO: 103984 - RNA, 19 nt, Artificial Sequence
  Synthetic
caacagcaaauggacuuag

SEQ ID NO: 103985 - RNA, 18 nt, Artificial Sequence
  Synthetic
caaguauagaagccuuag

SEQ ID NO: 103986 - RNA, 19 nt, Artificial Sequence
  Synthetic
ccaaguauagaagccuuag

SEQ ID NO: 103987 - RNA, 20 nt, Artificial Sequence
  Synthetic
uccaaguauagaagccuuag

SEQ ID NO: 103988 - RNA, 21 nt, Artificial Sequence
  Synthetic
auccaaguauagaagccuuag

SEQ ID NO: 103989 - RNA, 22 nt, Artificial Sequence
  Synthetic
aauccaaguauagaagccuuag

SEQ ID NO: 103990 - RNA, 23 nt, Artificial Sequence
  Synthetic
aaauccaaguauagaagccuuag

SEQ ID NO: 103991 - RNA, 24 nt, Artificial Sequence
  Synthetic
aaaauccaaguauagaagccuuag

SEQ ID NO: 103992 - RNA, 18 nt, Artificial Sequence
  Synthetic
ccacauuuuucuucuuag

SEQ ID NO: 103993 - RNA, 19 nt, Artificial Sequence
  Synthetic
cccacauuuuucuucuuag

SEQ ID NO: 103994 - RNA, 20 nt, Artificial Sequence
  Synthetic
ucccacauuuuucuucuuag

SEQ ID NO: 103995 - RNA, 21 nt, Artificial Sequence
  Synthetic
aucccacauuuuucuucuuag

SEQ ID NO: 103996 - RNA, 22 nt, Artificial Sequence
  Synthetic
uaucccacauuuuucuucuuag

SEQ ID NO: 103997 - RNA, 23 nt, Artificial Sequence
  Synthetic
uuaucccacauuuuucuucuuag

SEQ ID NO: 103998 - RNA, 24 nt, Artificial Sequence
  Synthetic
uuuaucccacauuuuucuucuuag

SEQ ID NO: 103999 - RNA, 18 nt, Artificial Sequence
  Synthetic
auuccuacauuuucuuag

SEQ ID NO: 104000 - RNA, 19 nt, Artificial Sequence
  Synthetic
uauuccuacauuuucuuag

SEQ ID NO: 104001 - RNA, 21 nt, Artificial Sequence
  Synthetic
uguauuccuacauuuucuuag

SEQ ID NO: 104002 - RNA, 22 nt, Artificial Sequence
  Synthetic
uuguauuccuacauuuucuuag

SEQ ID NO: 104003 - RNA, 23 nt, Artificial Sequence
  Synthetic
auuguauuccuacauuuucuuag

SEQ ID NO: 104004 - RNA, 24 nt, Artificial Sequence
  Synthetic
cauuguauuccuacauuuucuuag

SEQ ID NO: 104005 - RNA, 21 nt, Artificial Sequence
  Synthetic
agggagcccagucuaaguuag

SEQ ID NO: 104006 - RNA, 22 nt, Artificial Sequence
  Synthetic
cagggagcccagucuaaguuag

SEQ ID NO: 104007 - RNA, 23 nt, Artificial Sequence
  Synthetic
ccagggagcccagucuaaguuag

SEQ ID NO: 104008 - RNA, 24 nt, Artificial Sequence
  Synthetic
uccagggagcccagucuaaguuag

SEQ ID NO: 104009 - RNA, 18 nt, Artificial Sequence
  Synthetic
aggggaggguauaguuag

SEQ ID NO: 104010 - RNA, 19 nt, Artificial Sequence
  Synthetic
aaggggaggguauaguuag

SEQ ID NO: 104011 - RNA, 20 nt, Artificial Sequence
  Synthetic
uaaggggaggguauaguuag

SEQ ID NO: 104012 - RNA, 21 nt, Artificial Sequence
  Synthetic
cuaaggggaggguauaguuag

SEQ ID NO: 104013 - RNA, 24 nt, Artificial Sequence
  Synthetic
aggcuaaggggaggguauaguuag

SEQ ID NO: 104014 - RNA, 18 nt, Artificial Sequence
  Synthetic
agcuguguaauuaguuag

SEQ ID NO: 104015 - RNA, 19 nt, Artificial Sequence
  Synthetic
cagcuguguaauuaguuag

SEQ ID NO: 104016 - RNA, 23 nt, Artificial Sequence
  Synthetic
agggcagcuguguaauuaguuag

SEQ ID NO: 104017 - RNA, 24 nt, Artificial Sequence
  Synthetic
aagggcagcuguguaauuaguuag

SEQ ID NO: 104018 - RNA, 18 nt, Artificial Sequence
  Synthetic
uguuguuuuguuaguuag

SEQ ID NO: 104019 - RNA, 19 nt, Artificial Sequence
  Synthetic
uuguuguuuuguuaguuag

SEQ ID NO: 104020 - RNA, 20 nt, Artificial Sequence
  Synthetic
auuguuguuuuguuaguuag

SEQ ID NO: 104021 - RNA, 21 nt, Artificial Sequence
  Synthetic
aauuguuguuuuguuaguuag

SEQ ID NO: 104022 - RNA, 22 nt, Artificial Sequence
  Synthetic
aaauuguuguuuuguuaguuag

SEQ ID NO: 104023 - RNA, 23 nt, Artificial Sequence
  Synthetic
uaaauuguuguuuuguuaguuag

SEQ ID NO: 104024 - RNA, 24 nt, Artificial Sequence
  Synthetic
uuaaauuguuguuuuguuaguuag

SEQ ID NO: 104025 - RNA, 18 nt, Artificial Sequence
  Synthetic
aaucuagguguggguuag

SEQ ID NO: 104026 - RNA, 19 nt, Artificial Sequence
  Synthetic
aaaucuagguguggguuag

SEQ ID NO: 104027 - RNA, 20 nt, Artificial Sequence
  Synthetic
aaaaucuagguguggguuag

SEQ ID NO: 104028 - RNA, 21 nt, Artificial Sequence
  Synthetic
aaaaaucuagguguggguuag

SEQ ID NO: 104029 - RNA, 22 nt, Artificial Sequence
  Synthetic
uaaaaaucuagguguggguuag

SEQ ID NO: 104030 - RNA, 23 nt, Artificial Sequence
  Synthetic
auaaaaaucuagguguggguuag

SEQ ID NO: 104031 - RNA, 24 nt, Artificial Sequence
  Synthetic
cauaaaaaucuagguguggguuag

SEQ ID NO: 104032 - RNA, 21 nt, Artificial Sequence
  Synthetic
uaagaaaagaaaacguguuag

SEQ ID NO: 104033 - RNA, 22 nt, Artificial Sequence
  Synthetic
auaagaaaagaaaacguguuag

SEQ ID NO: 104034 - RNA, 23 nt, Artificial Sequence
  Synthetic
uauaagaaaagaaaacguguuag

SEQ ID NO: 104035 - RNA, 24 nt, Artificial Sequence
  Synthetic
cuauaagaaaagaaaacguguuag

SEQ ID NO: 104036 - RNA, 18 nt, Artificial Sequence
  Synthetic
uauucaacuucguguuag

SEQ ID NO: 104037 - RNA, 20 nt, Artificial Sequence
  Synthetic
uguauucaacuucguguuag

SEQ ID NO: 104038 - RNA, 21 nt, Artificial Sequence
  Synthetic
cuguauucaacuucguguuag

SEQ ID NO: 104039 - RNA, 22 nt, Artificial Sequence
  Synthetic
ucuguauucaacuucguguuag

SEQ ID NO: 104040 - RNA, 23 nt, Artificial Sequence
  Synthetic
aucuguauucaacuucguguuag

SEQ ID NO: 104041 - RNA, 24 nt, Artificial Sequence
  Synthetic
caucuguauucaacuucguguuag

SEQ ID NO: 104042 - RNA, 22 nt, Artificial Sequence
  Synthetic
agaaaaaaauuaagauuguuag

SEQ ID NO: 104043 - RNA, 23 nt, Artificial Sequence
  Synthetic
uagaaaaaaauuaagauuguuag

SEQ ID NO: 104044 - RNA, 24 nt, Artificial Sequence
  Synthetic
auagaaaaaaauuaagauuguuag

SEQ ID NO: 104045 - RNA, 18 nt, Artificial Sequence
  Synthetic
cuaacugcuacaauuuag

SEQ ID NO: 104046 - RNA, 19 nt, Artificial Sequence
  Synthetic
acuaacugcuacaauuuag

SEQ ID NO: 104047 - RNA, 20 nt, Artificial Sequence
  Synthetic
aacuaacugcuacaauuuag

SEQ ID NO: 104048 - RNA, 21 nt, Artificial Sequence
  Synthetic
caacuaacugcuacaauuuag

SEQ ID NO: 104049 - RNA, 22 nt, Artificial Sequence
  Synthetic
acaacuaacugcuacaauuuag

SEQ ID NO: 104050 - RNA, 23 nt, Artificial Sequence
  Synthetic
cacaacuaacugcuacaauuuag

SEQ ID NO: 104051 - RNA, 24 nt, Artificial Sequence
  Synthetic
ucacaacuaacugcuacaauuuag

SEQ ID NO: 104052 - RNA, 18 nt, Artificial Sequence
  Synthetic
caauauacagcaauuuag

SEQ ID NO: 104053 - RNA, 21 nt, Artificial Sequence
  Synthetic
aggcaauauacagcaauuuag

SEQ ID NO: 104054 - RNA, 23 nt, Artificial Sequence
  Synthetic
ugaggcaauauacagcaauuuag

SEQ ID NO: 104055 - RNA, 24 nt, Artificial Sequence
  Synthetic
cugaggcaauauacagcaauuuag

SEQ ID NO: 104056 - RNA, 19 nt, Artificial Sequence
  Synthetic
agaguagcagagcauuuag

SEQ ID NO: 104057 - RNA, 20 nt, Artificial Sequence
  Synthetic
aagaguagcagagcauuuag

SEQ ID NO: 104058 - RNA, 21 nt, Artificial Sequence
  Synthetic
uaagaguagcagagcauuuag

SEQ ID NO: 104059 - RNA, 22 nt, Artificial Sequence
  Synthetic
auaagaguagcagagcauuuag

SEQ ID NO: 104060 - RNA, 23 nt, Artificial Sequence
  Synthetic
cauaagaguagcagagcauuuag

SEQ ID NO: 104061 - RNA, 18 nt, Artificial Sequence
  Synthetic
auacaaaguugacuuuag

SEQ ID NO: 104062 - RNA, 19 nt, Artificial Sequence
  Synthetic
uauacaaaguugacuuuag

SEQ ID NO: 104063 - RNA, 20 nt, Artificial Sequence
  Synthetic
uuauacaaaguugacuuuag

SEQ ID NO: 104064 - RNA, 21 nt, Artificial Sequence
  Synthetic
uuuauacaaaguugacuuuag

SEQ ID NO: 104065 - RNA, 23 nt, Artificial Sequence
  Synthetic
aguuuauacaaaguugacuuuag

SEQ ID NO: 104066 - RNA, 18 nt, Artificial Sequence
  Synthetic
cauggccaauagcuuuag

SEQ ID NO: 104067 - RNA, 19 nt, Artificial Sequence
  Synthetic
ucauggccaauagcuuuag

SEQ ID NO: 104068 - RNA, 20 nt, Artificial Sequence
  Synthetic
cucauggccaauagcuuuag

SEQ ID NO: 104069 - RNA, 23 nt, Artificial Sequence
  Synthetic
aggcucauggccaauagcuuuag

SEQ ID NO: 104070 - RNA, 19 nt, Artificial Sequence
  Synthetic
aguacaucgauugcuuuag

SEQ ID NO: 104071 - RNA, 20 nt, Artificial Sequence
  Synthetic
aaguacaucgauugcuuuag

SEQ ID NO: 104072 - RNA, 21 nt, Artificial Sequence
  Synthetic
caaguacaucgauugcuuuag

SEQ ID NO: 104073 - RNA, 23 nt, Artificial Sequence
  Synthetic
agcaaguacaucgauugcuuuag

SEQ ID NO: 104074 - RNA, 24 nt, Artificial Sequence
  Synthetic
cagcaaguacaucgauugcuuuag

SEQ ID NO: 104075 - RNA, 18 nt, Artificial Sequence
  Synthetic
ucccaagcuccaguuuag

SEQ ID NO: 104076 - RNA, 19 nt, Artificial Sequence
  Synthetic
cucccaagcuccaguuuag

SEQ ID NO: 104077 - RNA, 20 nt, Artificial Sequence
  Synthetic
ccucccaagcuccaguuuag

SEQ ID NO: 104078 - RNA, 21 nt, Artificial Sequence
  Synthetic
cccucccaagcuccaguuuag

SEQ ID NO: 104079 - RNA, 22 nt, Artificial Sequence
  Synthetic
acccucccaagcuccaguuuag

SEQ ID NO: 104080 - RNA, 23 nt, Artificial Sequence
  Synthetic
aacccucccaagcuccaguuuag

SEQ ID NO: 104081 - RNA, 18 nt, Artificial Sequence
  Synthetic
acagucaauauaguuuag

SEQ ID NO: 104082 - RNA, 19 nt, Artificial Sequence
  Synthetic
cacagucaauauaguuuag

SEQ ID NO: 104083 - RNA, 20 nt, Artificial Sequence
  Synthetic
acacagucaauauaguuuag

SEQ ID NO: 104084 - RNA, 21 nt, Artificial Sequence
  Synthetic
cacacagucaauauaguuuag

SEQ ID NO: 104085 - RNA, 22 nt, Artificial Sequence
  Synthetic
ucacacagucaauauaguuuag

SEQ ID NO: 104086 - RNA, 23 nt, Artificial Sequence
  Synthetic
cucacacagucaauauaguuuag

SEQ ID NO: 104087 - RNA, 24 nt, Artificial Sequence
  Synthetic
ucucacacagucaauauaguuuag

SEQ ID NO: 104088 - RNA, 18 nt, Artificial Sequence
  Synthetic
uggggaaaaaagguuuag

SEQ ID NO: 104089 - RNA, 19 nt, Artificial Sequence
  Synthetic
cuggggaaaaaagguuuag

SEQ ID NO: 104090 - RNA, 20 nt, Artificial Sequence
  Synthetic
ucuggggaaaaaagguuuag

SEQ ID NO: 104091 - RNA, 21 nt, Artificial Sequence
  Synthetic
uucuggggaaaaaagguuuag

SEQ ID NO: 104092 - RNA, 22 nt, Artificial Sequence
  Synthetic
uuucuggggaaaaaagguuuag

SEQ ID NO: 104093 - RNA, 23 nt, Artificial Sequence
  Synthetic
auuucuggggaaaaaagguuuag

SEQ ID NO: 104094 - RNA, 18 nt, Artificial Sequence
  Synthetic
uuguaggugacauuuuag

SEQ ID NO: 104095 - RNA, 19 nt, Artificial Sequence
  Synthetic
auuguaggugacauuuuag

SEQ ID NO: 104096 - RNA, 20 nt, Artificial Sequence
  Synthetic
uauuguaggugacauuuuag

SEQ ID NO: 104097 - RNA, 22 nt, Artificial Sequence
  Synthetic
aguauuguaggugacauuuuag

SEQ ID NO: 104098 - RNA, 23 nt, Artificial Sequence
  Synthetic
aaguauuguaggugacauuuuag

SEQ ID NO: 104099 - RNA, 18 nt, Artificial Sequence
  Synthetic
ucuuaaaguacauuuuag

SEQ ID NO: 104100 - RNA, 19 nt, Artificial Sequence
  Synthetic
uucuuaaaguacauuuuag

SEQ ID NO: 104101 - RNA, 21 nt, Artificial Sequence
  Synthetic
cguucuuaaaguacauuuuag

SEQ ID NO: 104102 - RNA, 23 nt, Artificial Sequence
  Synthetic
ugcguucuuaaaguacauuuuag

SEQ ID NO: 104103 - RNA, 21 nt, Artificial Sequence
  Synthetic
ccacagacaauggacuuuuag

SEQ ID NO: 104104 - RNA, 22 nt, Artificial Sequence
  Synthetic
uccacagacaauggacuuuuag

SEQ ID NO: 104105 - RNA, 23 nt, Artificial Sequence
  Synthetic
auccacagacaauggacuuuuag

SEQ ID NO: 104106 - RNA, 24 nt, Artificial Sequence
  Synthetic
cauccacagacaauggacuuuuag

SEQ ID NO: 104107 - RNA, 18 nt, Artificial Sequence
  Synthetic
uugcucccuaccuuuuag

SEQ ID NO: 104108 - RNA, 19 nt, Artificial Sequence
  Synthetic
uuugcucccuaccuuuuag

SEQ ID NO: 104109 - RNA, 20 nt, Artificial Sequence
  Synthetic
auuugcucccuaccuuuuag

SEQ ID NO: 104110 - RNA, 21 nt, Artificial Sequence
  Synthetic
uauuugcucccuaccuuuuag

SEQ ID NO: 104111 - RNA, 22 nt, Artificial Sequence
  Synthetic
uuauuugcucccuaccuuuuag

SEQ ID NO: 104112 - RNA, 23 nt, Artificial Sequence
  Synthetic
uuuauuugcucccuaccuuuuag

SEQ ID NO: 104113 - RNA, 24 nt, Artificial Sequence
  Synthetic
uuuuauuugcucccuaccuuuuag

SEQ ID NO: 104114 - RNA, 18 nt, Artificial Sequence
  Synthetic
aaagaaaaucucuuuuag

SEQ ID NO: 104115 - RNA, 19 nt, Artificial Sequence
  Synthetic
caaagaaaaucucuuuuag

SEQ ID NO: 104116 - RNA, 20 nt, Artificial Sequence
  Synthetic
ucaaagaaaaucucuuuuag

SEQ ID NO: 104117 - RNA, 21 nt, Artificial Sequence
  Synthetic
uucaaagaaaaucucuuuuag

SEQ ID NO: 104118 - RNA, 22 nt, Artificial Sequence
  Synthetic
uuucaaagaaaaucucuuuuag

SEQ ID NO: 104119 - RNA, 23 nt, Artificial Sequence
  Synthetic
cuuucaaagaaaaucucuuuuag

SEQ ID NO: 104120 - RNA, 24 nt, Artificial Sequence
  Synthetic
ucuuucaaagaaaaucucuuuuag

SEQ ID NO: 104121 - RNA, 22 nt, Artificial Sequence
  Synthetic
aguuuucuauuaauuaaaaacg

SEQ ID NO: 104122 - RNA, 23 nt, Artificial Sequence
  Synthetic
aaguuuucuauuaauuaaaaacg

SEQ ID NO: 104123 - RNA, 24 nt, Artificial Sequence
  Synthetic
aaaguuuucuauuaauuaaaaacg

SEQ ID NO: 104124 - RNA, 19 nt, Artificial Sequence
  Synthetic
agauuaaacccagcaaacg

SEQ ID NO: 104125 - RNA, 20 nt, Artificial Sequence
  Synthetic
aagauuaaacccagcaaacg

SEQ ID NO: 104126 - RNA, 21 nt, Artificial Sequence
  Synthetic
uaagauuaaacccagcaaacg

SEQ ID NO: 104127 - RNA, 18 nt, Artificial Sequence
  Synthetic
ugaguagaugagcaaacg

SEQ ID NO: 104128 - RNA, 19 nt, Artificial Sequence
  Synthetic
uugaguagaugagcaaacg

SEQ ID NO: 104129 - RNA, 22 nt, Artificial Sequence
  Synthetic
agguugaguagaugagcaaacg

SEQ ID NO: 104130 - RNA, 23 nt, Artificial Sequence
  Synthetic
uagguugaguagaugagcaaacg

SEQ ID NO: 104131 - RNA, 24 nt, Artificial Sequence
  Synthetic
cuagguugaguagaugagcaaacg

SEQ ID NO: 104132 - RNA, 18 nt, Artificial Sequence
  Synthetic
aguacauaguuaccaacg

SEQ ID NO: 104133 - RNA, 19 nt, Artificial Sequence
  Synthetic
caguacauaguuaccaacg

SEQ ID NO: 104134 - RNA, 20 nt, Artificial Sequence
  Synthetic
ucaguacauaguuaccaacg

SEQ ID NO: 104135 - RNA, 22 nt, Artificial Sequence
  Synthetic
ugucaguacauaguuaccaacg

SEQ ID NO: 104136 - RNA, 23 nt, Artificial Sequence
  Synthetic
augucaguacauaguuaccaacg

SEQ ID NO: 104137 - RNA, 24 nt, Artificial Sequence
  Synthetic
caugucaguacauaguuaccaacg

SEQ ID NO: 104138 - RNA, 18 nt, Artificial Sequence
  Synthetic
auggcuagaaggagaacg

SEQ ID NO: 104139 - RNA, 19 nt, Artificial Sequence
  Synthetic
aauggcuagaaggagaacg

SEQ ID NO: 104140 - RNA, 20 nt, Artificial Sequence
  Synthetic
aaauggcuagaaggagaacg

SEQ ID NO: 104141 - RNA, 18 nt, Artificial Sequence
  Synthetic
auggaccuuuuaugaacg

SEQ ID NO: 104142 - RNA, 19 nt, Artificial Sequence
  Synthetic
aauggaccuuuuaugaacg

SEQ ID NO: 104143 - RNA, 20 nt, Artificial Sequence
  Synthetic
aaauggaccuuuuaugaacg

SEQ ID NO: 104144 - RNA, 21 nt, Artificial Sequence
  Synthetic
aaaauggaccuuuuaugaacg

SEQ ID NO: 104145 - RNA, 23 nt, Artificial Sequence
  Synthetic
ugaaaauggaccuuuuaugaacg

SEQ ID NO: 104146 - RNA, 24 nt, Artificial Sequence
  Synthetic
uugaaaauggaccuuuuaugaacg

SEQ ID NO: 104147 - RNA, 18 nt, Artificial Sequence
  Synthetic
aauaaaaccaacugaacg

SEQ ID NO: 104148 - RNA, 19 nt, Artificial Sequence
  Synthetic
uaauaaaaccaacugaacg

SEQ ID NO: 104149 - RNA, 20 nt, Artificial Sequence
  Synthetic
uuaauaaaaccaacugaacg

SEQ ID NO: 104150 - RNA, 21 nt, Artificial Sequence
  Synthetic
uuuaauaaaaccaacugaacg

SEQ ID NO: 104151 - RNA, 22 nt, Artificial Sequence
  Synthetic
uuuuaauaaaaccaacugaacg

SEQ ID NO: 104152 - RNA, 23 nt, Artificial Sequence
  Synthetic
auuuuaauaaaaccaacugaacg

SEQ ID NO: 104153 - RNA, 24 nt, Artificial Sequence
  Synthetic
cauuuuaauaaaaccaacugaacg

SEQ ID NO: 104154 - RNA, 18 nt, Artificial Sequence
  Synthetic
cuaaagaggccuugaacg

SEQ ID NO: 104155 - RNA, 19 nt, Artificial Sequence
  Synthetic
acuaaagaggccuugaacg

SEQ ID NO: 104156 - RNA, 20 nt, Artificial Sequence
  Synthetic
aacuaaagaggccuugaacg

SEQ ID NO: 104157 - RNA, 21 nt, Artificial Sequence
  Synthetic
uaacuaaagaggccuugaacg

SEQ ID NO: 104158 - RNA, 22 nt, Artificial Sequence
  Synthetic
cuaacuaaagaggccuugaacg

SEQ ID NO: 104159 - RNA, 23 nt, Artificial Sequence
  Synthetic
acuaacuaaagaggccuugaacg

SEQ ID NO: 104160 - RNA, 24 nt, Artificial Sequence
  Synthetic
uacuaacuaaagaggccuugaacg

SEQ ID NO: 104161 - RNA, 18 nt, Artificial Sequence
  Synthetic
aagcuguaaauacuaacg

SEQ ID NO: 104162 - RNA, 20 nt, Artificial Sequence
  Synthetic
agaagcuguaaauacuaacg

SEQ ID NO: 104163 - RNA, 21 nt, Artificial Sequence
  Synthetic
aagaagcuguaaauacuaacg

SEQ ID NO: 104164 - RNA, 22 nt, Artificial Sequence
  Synthetic
uaagaagcuguaaauacuaacg

SEQ ID NO: 104165 - RNA, 23 nt, Artificial Sequence
  Synthetic
auaagaagcuguaaauacuaacg

SEQ ID NO: 104166 - RNA, 20 nt, Artificial Sequence
  Synthetic
ugggcuucaauaacuuaacg

SEQ ID NO: 104167 - RNA, 21 nt, Artificial Sequence
  Synthetic
cugggcuucaauaacuuaacg

SEQ ID NO: 104168 - RNA, 22 nt, Artificial Sequence
  Synthetic
acugggcuucaauaacuuaacg

SEQ ID NO: 104169 - RNA, 23 nt, Artificial Sequence
  Synthetic
aacugggcuucaauaacuuaacg

SEQ ID NO: 104170 - RNA, 24 nt, Artificial Sequence
  Synthetic
caacugggcuucaauaacuuaacg

SEQ ID NO: 104171 - RNA, 19 nt, Artificial Sequence
  Synthetic
agguuugcuggggaacacg

SEQ ID NO: 104172 - RNA, 21 nt, Artificial Sequence
  Synthetic
ugagguuugcuggggaacacg

SEQ ID NO: 104173 - RNA, 22 nt, Artificial Sequence
  Synthetic
uugagguuugcuggggaacacg

SEQ ID NO: 104174 - RNA, 18 nt, Artificial Sequence
  Synthetic
cuugcgcugcuacacacg

SEQ ID NO: 104175 - RNA, 19 nt, Artificial Sequence
  Synthetic
ccuugcgcugcuacacacg

SEQ ID NO: 104176 - RNA, 20 nt, Artificial Sequence
  Synthetic
cccuugcgcugcuacacacg

SEQ ID NO: 104177 - RNA, 21 nt, Artificial Sequence
  Synthetic
ucccuugcgcugcuacacacg

SEQ ID NO: 104178 - RNA, 22 nt, Artificial Sequence
  Synthetic
aucccuugcgcugcuacacacg

SEQ ID NO: 104179 - RNA, 23 nt, Artificial Sequence
  Synthetic
uaucccuugcgcugcuacacacg

SEQ ID NO: 104180 - RNA, 24 nt, Artificial Sequence
  Synthetic
auaucccuugcgcugcuacacacg

SEQ ID NO: 104181 - RNA, 18 nt, Artificial Sequence
  Synthetic
ccacauaagagggacacg

SEQ ID NO: 104182 - RNA, 19 nt, Artificial Sequence
  Synthetic
cccacauaagagggacacg

SEQ ID NO: 104183 - RNA, 20 nt, Artificial Sequence
  Synthetic
ccccacauaagagggacacg

SEQ ID NO: 104184 - RNA, 22 nt, Artificial Sequence
  Synthetic
agccccacauaagagggacacg

SEQ ID NO: 104185 - RNA, 23 nt, Artificial Sequence
  Synthetic
aagccccacauaagagggacacg

SEQ ID NO: 104186 - RNA, 24 nt, Artificial Sequence
  Synthetic
aaagccccacauaagagggacacg

SEQ ID NO: 104187 - RNA, 19 nt, Artificial Sequence
  Synthetic
aguauuuaagguguacacg

SEQ ID NO: 104188 - RNA, 20 nt, Artificial Sequence
  Synthetic
aaguauuuaagguguacacg

SEQ ID NO: 104189 - RNA, 21 nt, Artificial Sequence
  Synthetic
uaaguauuuaagguguacacg

SEQ ID NO: 104190 - RNA, 22 nt, Artificial Sequence
  Synthetic
uuaaguauuuaagguguacacg

SEQ ID NO: 104191 - RNA, 23 nt, Artificial Sequence
  Synthetic
auuaaguauuuaagguguacacg

SEQ ID NO: 104192 - RNA, 24 nt, Artificial Sequence
  Synthetic
uauuaaguauuuaagguguacacg

SEQ ID NO: 104193 - RNA, 18 nt, Artificial Sequence
  Synthetic
uugcaucuuccucccacg

SEQ ID NO: 104194 - RNA, 19 nt, Artificial Sequence
  Synthetic
uuugcaucuuccucccacg

SEQ ID NO: 104195 - RNA, 20 nt, Artificial Sequence
  Synthetic
cuuugcaucuuccucccacg

SEQ ID NO: 104196 - RNA, 21 nt, Artificial Sequence
  Synthetic
acuuugcaucuuccucccacg

SEQ ID NO: 104197 - RNA, 22 nt, Artificial Sequence
  Synthetic
cacuuugcaucuuccucccacg

SEQ ID NO: 104198 - RNA, 23 nt, Artificial Sequence
  Synthetic
ccacuuugcaucuuccucccacg

SEQ ID NO: 104199 - RNA, 24 nt, Artificial Sequence
  Synthetic
accacuuugcaucuuccucccacg

SEQ ID NO: 104200 - RNA, 21 nt, Artificial Sequence
  Synthetic
auuaccauguacuaugucacg

SEQ ID NO: 104201 - RNA, 23 nt, Artificial Sequence
  Synthetic
agauuaccauguacuaugucacg

SEQ ID NO: 104202 - RNA, 24 nt, Artificial Sequence
  Synthetic
uagauuaccauguacuaugucacg

SEQ ID NO: 104203 - RNA, 18 nt, Artificial Sequence
  Synthetic
aauaccuaagaauucacg

SEQ ID NO: 104204 - RNA, 19 nt, Artificial Sequence
  Synthetic
caauaccuaagaauucacg

SEQ ID NO: 104205 - RNA, 20 nt, Artificial Sequence
  Synthetic
acaauaccuaagaauucacg

SEQ ID NO: 104206 - RNA, 21 nt, Artificial Sequence
  Synthetic
aacaauaccuaagaauucacg

SEQ ID NO: 104207 - RNA, 22 nt, Artificial Sequence
  Synthetic
uaacaauaccuaagaauucacg

SEQ ID NO: 104208 - RNA, 23 nt, Artificial Sequence
  Synthetic
uuaacaauaccuaagaauucacg

SEQ ID NO: 104209 - RNA, 24 nt, Artificial Sequence
  Synthetic
uuuaacaauaccuaagaauucacg

SEQ ID NO: 104210 - RNA, 19 nt, Artificial Sequence
  Synthetic
aguuagaugaagaaagacg

SEQ ID NO: 104211 - RNA, 20 nt, Artificial Sequence
  Synthetic
aaguuagaugaagaaagacg

SEQ ID NO: 104212 - RNA, 23 nt, Artificial Sequence
  Synthetic
uggaaguuagaugaagaaagacg

SEQ ID NO: 104213 - RNA, 18 nt, Artificial Sequence
  Synthetic
auuccuaggguaaagacg

SEQ ID NO: 104214 - RNA, 19 nt, Artificial Sequence
  Synthetic
uauuccuaggguaaagacg

SEQ ID NO: 104215 - RNA, 20 nt, Artificial Sequence
  Synthetic
uuauuccuaggguaaagacg

SEQ ID NO: 104216 - RNA, 21 nt, Artificial Sequence
  Synthetic
auuauuccuaggguaaagacg

SEQ ID NO: 104217 - RNA, 22 nt, Artificial Sequence
  Synthetic
uauuauuccuaggguaaagacg

SEQ ID NO: 104218 - RNA, 23 nt, Artificial Sequence
  Synthetic
uuauuauuccuaggguaaagacg

SEQ ID NO: 104219 - RNA, 18 nt, Artificial Sequence
  Synthetic
aaacuuuagcuuuagacg

SEQ ID NO: 104220 - RNA, 19 nt, Artificial Sequence
  Synthetic
uaaacuuuagcuuuagacg

SEQ ID NO: 104221 - RNA, 20 nt, Artificial Sequence
  Synthetic
auaaacuuuagcuuuagacg

SEQ ID NO: 104222 - RNA, 21 nt, Artificial Sequence
  Synthetic
aauaaacuuuagcuuuagacg

SEQ ID NO: 104223 - RNA, 22 nt, Artificial Sequence
  Synthetic
caauaaacuuuagcuuuagacg

SEQ ID NO: 104224 - RNA, 23 nt, Artificial Sequence
  Synthetic
ccaauaaacuuuagcuuuagacg

SEQ ID NO: 104225 - RNA, 24 nt, Artificial Sequence
  Synthetic
uccaauaaacuuuagcuuuagacg

SEQ ID NO: 104226 - RNA, 22 nt, Artificial Sequence
  Synthetic
aggggucaguuggcucaauacg

SEQ ID NO: 104227 - RNA, 23 nt, Artificial Sequence
  Synthetic
aaggggucaguuggcucaauacg

SEQ ID NO: 104228 - RNA, 24 nt, Artificial Sequence
  Synthetic
uaaggggucaguuggcucaauacg

SEQ ID NO: 104229 - RNA, 22 nt, Artificial Sequence
  Synthetic
ugcuugacuaggaaaacauacg

SEQ ID NO: 104230 - RNA, 23 nt, Artificial Sequence
  Synthetic
cugcuugacuaggaaaacauacg

SEQ ID NO: 104231 - RNA, 18 nt, Artificial Sequence
  Synthetic
uucuagaauauacauacg

SEQ ID NO: 104232 - RNA, 19 nt, Artificial Sequence
  Synthetic
auucuagaauauacauacg

SEQ ID NO: 104233 - RNA, 20 nt, Artificial Sequence
  Synthetic
aauucuagaauauacauacg

SEQ ID NO: 104234 - RNA, 21 nt, Artificial Sequence
  Synthetic
caauucuagaauauacauacg

SEQ ID NO: 104235 - RNA, 22 nt, Artificial Sequence
  Synthetic
acaauucuagaauauacauacg

SEQ ID NO: 104236 - RNA, 23 nt, Artificial Sequence
  Synthetic
uacaauucuagaauauacauacg

SEQ ID NO: 104237 - RNA, 24 nt, Artificial Sequence
  Synthetic
cuacaauucuagaauauacauacg

SEQ ID NO: 104238 - RNA, 20 nt, Artificial Sequence
  Synthetic
agguguuuagcaaagauacg

SEQ ID NO: 104239 - RNA, 21 nt, Artificial Sequence
  Synthetic
cagguguuuagcaaagauacg

SEQ ID NO: 104240 - RNA, 24 nt, Artificial Sequence
  Synthetic
uggcagguguuuagcaaagauacg

SEQ ID NO: 104241 - RNA, 18 nt, Artificial Sequence
  Synthetic
ucauucagcuaauauacg

SEQ ID NO: 104242 - RNA, 19 nt, Artificial Sequence
  Synthetic
cucauucagcuaauauacg

SEQ ID NO: 104243 - RNA, 20 nt, Artificial Sequence
  Synthetic
ucucauucagcuaauauacg

SEQ ID NO: 104244 - RNA, 21 nt, Artificial Sequence
  Synthetic
uucucauucagcuaauauacg

SEQ ID NO: 104245 - RNA, 22 nt, Artificial Sequence
  Synthetic
uuucucauucagcuaauauacg

SEQ ID NO: 104246 - RNA, 23 nt, Artificial Sequence
  Synthetic
uuuucucauucagcuaauauacg

SEQ ID NO: 104247 - RNA, 24 nt, Artificial Sequence
  Synthetic
auuuucucauucagcuaauauacg

SEQ ID NO: 104248 - RNA, 18 nt, Artificial Sequence
  Synthetic
uuuuuccuuuugccuacg

SEQ ID NO: 104249 - RNA, 19 nt, Artificial Sequence
  Synthetic
uuuuuuccuuuugccuacg

SEQ ID NO: 104250 - RNA, 20 nt, Artificial Sequence
  Synthetic
cuuuuuuccuuuugccuacg

SEQ ID NO: 104251 - RNA, 21 nt, Artificial Sequence
  Synthetic
ucuuuuuuccuuuugccuacg

SEQ ID NO: 104252 - RNA, 22 nt, Artificial Sequence
  Synthetic
uucuuuuuuccuuuugccuacg

SEQ ID NO: 104253 - RNA, 23 nt, Artificial Sequence
  Synthetic
uuucuuuuuuccuuuugccuacg

SEQ ID NO: 104254 - RNA, 24 nt, Artificial Sequence
  Synthetic
cuuucuuuuuuccuuuugccuacg

SEQ ID NO: 104255 - RNA, 18 nt, Artificial Sequence
  Synthetic
aaaccccacugggcuacg

SEQ ID NO: 104256 - RNA, 19 nt, Artificial Sequence
  Synthetic
aaaaccccacugggcuacg

SEQ ID NO: 104257 - RNA, 20 nt, Artificial Sequence
  Synthetic
aaaaaccccacugggcuacg

SEQ ID NO: 104258 - RNA, 21 nt, Artificial Sequence
  Synthetic
aaaaaaccccacugggcuacg

SEQ ID NO: 104259 - RNA, 22 nt, Artificial Sequence
  Synthetic
aaaaaaaccccacugggcuacg

SEQ ID NO: 104260 - RNA, 23 nt, Artificial Sequence
  Synthetic
aaaaaaaaccccacugggcuacg

SEQ ID NO: 104261 - RNA, 24 nt, Artificial Sequence
  Synthetic
aaaaaaaaaccccacugggcuacg

SEQ ID NO: 104262 - RNA, 18 nt, Artificial Sequence
  Synthetic
aaucuauguguguguacg

SEQ ID NO: 104263 - RNA, 21 nt, Artificial Sequence
  Synthetic
cggaaucuauguguguguacg

SEQ ID NO: 104264 - RNA, 22 nt, Artificial Sequence
  Synthetic
ucggaaucuauguguguguacg

SEQ ID NO: 104265 - RNA, 23 nt, Artificial Sequence
  Synthetic
cucggaaucuauguguguguacg

SEQ ID NO: 104266 - RNA, 24 nt, Artificial Sequence
  Synthetic
ucucggaaucuauguguguguacg

SEQ ID NO: 104267 - RNA, 19 nt, Artificial Sequence
  Synthetic
agauaucaaugagguuacg

SEQ ID NO: 104268 - RNA, 22 nt, Artificial Sequence
  Synthetic
uggagauaucaaugagguuacg

SEQ ID NO: 104269 - RNA, 23 nt, Artificial Sequence
  Synthetic
cuggagauaucaaugagguuacg

SEQ ID NO: 104270 - RNA, 24 nt, Artificial Sequence
  Synthetic
acuggagauaucaaugagguuacg

SEQ ID NO: 104271 - RNA, 19 nt, Artificial Sequence
  Synthetic
cguuugaaaagcuuuuacg

SEQ ID NO: 104272 - RNA, 20 nt, Artificial Sequence
  Synthetic
acguuugaaaagcuuuuacg

SEQ ID NO: 104273 - RNA, 21 nt, Artificial Sequence
  Synthetic
cacguuugaaaagcuuuuacg

SEQ ID NO: 104274 - RNA, 22 nt, Artificial Sequence
  Synthetic
ucacguuugaaaagcuuuuacg

SEQ ID NO: 104275 - RNA, 24 nt, Artificial Sequence
  Synthetic
ugucacguuugaaaagcuuuuacg

SEQ ID NO: 104276 - RNA, 18 nt, Artificial Sequence
  Synthetic
acaaauucuaauccaccg

SEQ ID NO: 104277 - RNA, 19 nt, Artificial Sequence
  Synthetic
uacaaauucuaauccaccg

SEQ ID NO: 104278 - RNA, 20 nt, Artificial Sequence
  Synthetic
auacaaauucuaauccaccg

SEQ ID NO: 104279 - RNA, 21 nt, Artificial Sequence
  Synthetic
uauacaaauucuaauccaccg

SEQ ID NO: 104280 - RNA, 24 nt, Artificial Sequence
  Synthetic
ugguauacaaauucuaauccaccg

SEQ ID NO: 104281 - RNA, 18 nt, Artificial Sequence
  Synthetic
ccagggaacauguacccg

SEQ ID NO: 104282 - RNA, 19 nt, Artificial Sequence
  Synthetic
uccagggaacauguacccg

SEQ ID NO: 104283 - RNA, 20 nt, Artificial Sequence
  Synthetic
auccagggaacauguacccg

SEQ ID NO: 104284 - RNA, 21 nt, Artificial Sequence
  Synthetic
uauccagggaacauguacccg

SEQ ID NO: 104285 - RNA, 22 nt, Artificial Sequence
  Synthetic
auauccagggaacauguacccg

SEQ ID NO: 104286 - RNA, 23 nt, Artificial Sequence
  Synthetic
uauauccagggaacauguacccg

SEQ ID NO: 104287 - RNA, 24 nt, Artificial Sequence
  Synthetic
cuauauccagggaacauguacccg

SEQ ID NO: 104288 - RNA, 21 nt, Artificial Sequence
  Synthetic
caaaggugccuggcgugcccg

SEQ ID NO: 104289 - RNA, 22 nt, Artificial Sequence
  Synthetic
acaaaggugccuggcgugcccg

SEQ ID NO: 104290 - RNA, 23 nt, Artificial Sequence
  Synthetic
uacaaaggugccuggcgugcccg

SEQ ID NO: 104291 - RNA, 24 nt, Artificial Sequence
  Synthetic
uuacaaaggugccuggcgugcccg

SEQ ID NO: 104292 - RNA, 19 nt, Artificial Sequence
  Synthetic
agcccaggagcgcuugccg

SEQ ID NO: 104293 - RNA, 20 nt, Artificial Sequence
  Synthetic
aagcccaggagcgcuugccg

SEQ ID NO: 104294 - RNA, 21 nt, Artificial Sequence
  Synthetic
uaagcccaggagcgcuugccg

SEQ ID NO: 104295 - RNA, 22 nt, Artificial Sequence
  Synthetic
auaagcccaggagcgcuugccg

SEQ ID NO: 104296 - RNA, 23 nt, Artificial Sequence
  Synthetic
aauaagcccaggagcgcuugccg

SEQ ID NO: 104297 - RNA, 18 nt, Artificial Sequence
  Synthetic
uaucuauuuccuuauccg

SEQ ID NO: 104298 - RNA, 19 nt, Artificial Sequence
  Synthetic
uuaucuauuuccuuauccg

SEQ ID NO: 104299 - RNA, 20 nt, Artificial Sequence
  Synthetic
cuuaucuauuuccuuauccg

SEQ ID NO: 104300 - RNA, 21 nt, Artificial Sequence
  Synthetic
ucuuaucuauuuccuuauccg

SEQ ID NO: 104301 - RNA, 22 nt, Artificial Sequence
  Synthetic
uucuuaucuauuuccuuauccg

SEQ ID NO: 104302 - RNA, 23 nt, Artificial Sequence
  Synthetic
uuucuuaucuauuuccuuauccg

SEQ ID NO: 104303 - RNA, 24 nt, Artificial Sequence
  Synthetic
auuucuuaucuauuuccuuauccg

SEQ ID NO: 104304 - RNA, 18 nt, Artificial Sequence
  Synthetic
agcucacuuaaaccuccg

SEQ ID NO: 104305 - RNA, 19 nt, Artificial Sequence
  Synthetic
cagcucacuuaaaccuccg

SEQ ID NO: 104306 - RNA, 20 nt, Artificial Sequence
  Synthetic
ucagcucacuuaaaccuccg

SEQ ID NO: 104307 - RNA, 21 nt, Artificial Sequence
  Synthetic
cucagcucacuuaaaccuccg

SEQ ID NO: 104308 - RNA, 22 nt, Artificial Sequence
  Synthetic
ucucagcucacuuaaaccuccg

SEQ ID NO: 104309 - RNA, 23 nt, Artificial Sequence
  Synthetic
aucucagcucacuuaaaccuccg

SEQ ID NO: 104310 - RNA, 24 nt, Artificial Sequence
  Synthetic
aaucucagcucacuuaaaccuccg

SEQ ID NO: 104311 - RNA, 19 nt, Artificial Sequence
  Synthetic
ugugacauaccuaccuccg

SEQ ID NO: 104312 - RNA, 20 nt, Artificial Sequence
  Synthetic
cugugacauaccuaccuccg

SEQ ID NO: 104313 - RNA, 21 nt, Artificial Sequence
  Synthetic
acugugacauaccuaccuccg

SEQ ID NO: 104314 - RNA, 22 nt, Artificial Sequence
  Synthetic
aacugugacauaccuaccuccg

SEQ ID NO: 104315 - RNA, 23 nt, Artificial Sequence
  Synthetic
aaacugugacauaccuaccuccg

SEQ ID NO: 104316 - RNA, 24 nt, Artificial Sequence
  Synthetic
caaacugugacauaccuaccuccg

SEQ ID NO: 104317 - RNA, 18 nt, Artificial Sequence
  Synthetic
aaacaaaagaaacaagcg

SEQ ID NO: 104318 - RNA, 19 nt, Artificial Sequence
  Synthetic
caaacaaaagaaacaagcg

SEQ ID NO: 104319 - RNA, 20 nt, Artificial Sequence
  Synthetic
ccaaacaaaagaaacaagcg

SEQ ID NO: 104320 - RNA, 21 nt, Artificial Sequence
  Synthetic
accaaacaaaagaaacaagcg

SEQ ID NO: 104321 - RNA, 22 nt, Artificial Sequence
  Synthetic
uaccaaacaaaagaaacaagcg

SEQ ID NO: 104322 - RNA, 23 nt, Artificial Sequence
  Synthetic
uuaccaaacaaaagaaacaagcg

SEQ ID NO: 104323 - RNA, 24 nt, Artificial Sequence
  Synthetic
auuaccaaacaaaagaaacaagcg

SEQ ID NO: 104324 - RNA, 18 nt, Artificial Sequence
  Synthetic
cauuauuuccaaggagcg

SEQ ID NO: 104325 - RNA, 19 nt, Artificial Sequence
  Synthetic
ccauuauuuccaaggagcg

SEQ ID NO: 104326 - RNA, 20 nt, Artificial Sequence
  Synthetic
accauuauuuccaaggagcg

SEQ ID NO: 104327 - RNA, 22 nt, Artificial Sequence
  Synthetic
ugaccauuauuuccaaggagcg

SEQ ID NO: 104328 - RNA, 23 nt, Artificial Sequence
  Synthetic
augaccauuauuuccaaggagcg

SEQ ID NO: 104329 - RNA, 24 nt, Artificial Sequence
  Synthetic
caugaccauuauuuccaaggagcg

SEQ ID NO: 104330 - RNA, 18 nt, Artificial Sequence
  Synthetic
aauuaacauuuauccgcg

SEQ ID NO: 104331 - RNA, 19 nt, Artificial Sequence
  Synthetic
caauuaacauuuauccgcg

SEQ ID NO: 104332 - RNA, 20 nt, Artificial Sequence
  Synthetic
acaauuaacauuuauccgcg

SEQ ID NO: 104333 - RNA, 21 nt, Artificial Sequence
  Synthetic
aacaauuaacauuuauccgcg

SEQ ID NO: 104334 - RNA, 22 nt, Artificial Sequence
  Synthetic
aaacaauuaacauuuauccgcg

SEQ ID NO: 104335 - RNA, 23 nt, Artificial Sequence
  Synthetic
aaaacaauuaacauuuauccgcg

SEQ ID NO: 104336 - RNA, 24 nt, Artificial Sequence
  Synthetic
caaaacaauuaacauuuauccgcg

SEQ ID NO: 104337 - RNA, 22 nt, Artificial Sequence
  Synthetic
ugaaauggggucucggaaggcg

SEQ ID NO: 104338 - RNA, 23 nt, Artificial Sequence
  Synthetic
cugaaauggggucucggaaggcg

SEQ ID NO: 104339 - RNA, 24 nt, Artificial Sequence
  Synthetic
ucugaaauggggucucggaaggcg

SEQ ID NO: 104340 - RNA, 18 nt, Artificial Sequence
  Synthetic
uuaugaaacuguaaggcg

SEQ ID NO: 104341 - RNA, 20 nt, Artificial Sequence
  Synthetic
uguuaugaaacuguaaggcg

SEQ ID NO: 104342 - RNA, 21 nt, Artificial Sequence
  Synthetic
cuguuaugaaacuguaaggcg

SEQ ID NO: 104343 - RNA, 22 nt, Artificial Sequence
  Synthetic
ucuguuaugaaacuguaaggcg

SEQ ID NO: 104344 - RNA, 23 nt, Artificial Sequence
  Synthetic
cucuguuaugaaacuguaaggcg

SEQ ID NO: 104345 - RNA, 24 nt, Artificial Sequence
  Synthetic
ccucuguuaugaaacuguaaggcg

SEQ ID NO: 104346 - RNA, 19 nt, Artificial Sequence
  Synthetic
aggcuaggaaggagaggcg

SEQ ID NO: 104347 - RNA, 20 nt, Artificial Sequence
  Synthetic
aaggcuaggaaggagaggcg

SEQ ID NO: 104348 - RNA, 21 nt, Artificial Sequence
  Synthetic
cgagagggugggaugggggcg

SEQ ID NO: 104349 - RNA, 18 nt, Artificial Sequence
  Synthetic
aaagauggggggugggcg

SEQ ID NO: 104350 - RNA, 19 nt, Artificial Sequence
  Synthetic
uaaagauggggggugggcg

SEQ ID NO: 104351 - RNA, 20 nt, Artificial Sequence
  Synthetic
uuaaagauggggggugggcg

SEQ ID NO: 104352 - RNA, 21 nt, Artificial Sequence
  Synthetic
uuuaaagauggggggugggcg

SEQ ID NO: 104353 - RNA, 22 nt, Artificial Sequence
  Synthetic
uuuuaaagauggggggugggcg

SEQ ID NO: 104354 - RNA, 23 nt, Artificial Sequence
  Synthetic
uuuuuaaagauggggggugggcg

SEQ ID NO: 104355 - RNA, 24 nt, Artificial Sequence
  Synthetic
uuuuuuaaagauggggggugggcg

SEQ ID NO: 104356 - RNA, 18 nt, Artificial Sequence
  Synthetic
uguacagcuugccuggcg

SEQ ID NO: 104357 - RNA, 19 nt, Artificial Sequence
  Synthetic
auguacagcuugccuggcg

SEQ ID NO: 104358 - RNA, 20 nt, Artificial Sequence
  Synthetic
cauguacagcuugccuggcg

SEQ ID NO: 104359 - RNA, 21 nt, Artificial Sequence
  Synthetic
ucauguacagcuugccuggcg

SEQ ID NO: 104360 - RNA, 22 nt, Artificial Sequence
  Synthetic
aucauguacagcuugccuggcg

SEQ ID NO: 104361 - RNA, 23 nt, Artificial Sequence
  Synthetic
aaucauguacagcuugccuggcg

SEQ ID NO: 104362 - RNA, 24 nt, Artificial Sequence
  Synthetic
caaucauguacagcuugccuggcg

SEQ ID NO: 104363 - RNA, 22 nt, Artificial Sequence
  Synthetic
agauccucacaaaagcucugcg

SEQ ID NO: 104364 - RNA, 23 nt, Artificial Sequence
  Synthetic
aagauccucacaaaagcucugcg

SEQ ID NO: 104365 - RNA, 24 nt, Artificial Sequence
  Synthetic
uaagauccucacaaaagcucugcg

SEQ ID NO: 104366 - RNA, 18 nt, Artificial Sequence
  Synthetic
uccaucgaguucguugcg

SEQ ID NO: 104367 - RNA, 19 nt, Artificial Sequence
  Synthetic
auccaucgaguucguugcg

SEQ ID NO: 104368 - RNA, 20 nt, Artificial Sequence
  Synthetic
cauccaucgaguucguugcg

SEQ ID NO: 104369 - RNA, 21 nt, Artificial Sequence
  Synthetic
acauccaucgaguucguugcg

SEQ ID NO: 104370 - RNA, 22 nt, Artificial Sequence
  Synthetic
aacauccaucgaguucguugcg

SEQ ID NO: 104371 - RNA, 24 nt, Artificial Sequence
  Synthetic
ugaacauccaucgaguucguugcg

SEQ ID NO: 104372 - RNA, 18 nt, Artificial Sequence
  Synthetic
uugucuaaccauacaucg

SEQ ID NO: 104373 - RNA, 19 nt, Artificial Sequence
  Synthetic
auugucuaaccauacaucg

SEQ ID NO: 104374 - RNA, 20 nt, Artificial Sequence
  Synthetic
cauugucuaaccauacaucg

SEQ ID NO: 104375 - RNA, 21 nt, Artificial Sequence
  Synthetic
acauugucuaaccauacaucg

SEQ ID NO: 104376 - RNA, 22 nt, Artificial Sequence
  Synthetic
uacauugucuaaccauacaucg

SEQ ID NO: 104377 - RNA, 19 nt, Artificial Sequence
  Synthetic
uggacagaagguuacaucg

SEQ ID NO: 104378 - RNA, 20 nt, Artificial Sequence
  Synthetic
auggacagaagguuacaucg

SEQ ID NO: 104379 - RNA, 21 nt, Artificial Sequence
  Synthetic
aauggacagaagguuacaucg

SEQ ID NO: 104380 - RNA, 22 nt, Artificial Sequence
  Synthetic
aaauggacagaagguuacaucg

SEQ ID NO: 104381 - RNA, 23 nt, Artificial Sequence
  Synthetic
aaaauggacagaagguuacaucg

SEQ ID NO: 104382 - RNA, 24 nt, Artificial Sequence
  Synthetic
aaaaauggacagaagguuacaucg

SEQ ID NO: 104383 - RNA, 19 nt, Artificial Sequence
  Synthetic
ugccugguggggauuaucg

SEQ ID NO: 104384 - RNA, 20 nt, Artificial Sequence
  Synthetic
augccugguggggauuaucg

SEQ ID NO: 104385 - RNA, 21 nt, Artificial Sequence
  Synthetic
caugccugguggggauuaucg

SEQ ID NO: 104386 - RNA, 22 nt, Artificial Sequence
  Synthetic
ccaugccugguggggauuaucg

SEQ ID NO: 104387 - RNA, 23 nt, Artificial Sequence
  Synthetic
accaugccugguggggauuaucg

SEQ ID NO: 104388 - RNA, 24 nt, Artificial Sequence
  Synthetic
caccaugccugguggggauuaucg

SEQ ID NO: 104389 - RNA, 18 nt, Artificial Sequence
  Synthetic
agcaaaaugauuaacucg

SEQ ID NO: 104390 - RNA, 19 nt, Artificial Sequence
  Synthetic
cagcaaaaugauuaacucg

SEQ ID NO: 104391 - RNA, 21 nt, Artificial Sequence
  Synthetic
ugcagcaaaaugauuaacucg

SEQ ID NO: 104392 - RNA, 22 nt, Artificial Sequence
  Synthetic
cugcagcaaaaugauuaacucg

SEQ ID NO: 104393 - RNA, 23 nt, Artificial Sequence
  Synthetic
acugcagcaaaaugauuaacucg

SEQ ID NO: 104394 - RNA, 24 nt, Artificial Sequence
  Synthetic
aacugcagcaaaaugauuaacucg

SEQ ID NO: 104395 - RNA, 18 nt, Artificial Sequence
  Synthetic
uuguuguagaauuacucg

SEQ ID NO: 104396 - RNA, 19 nt, Artificial Sequence
  Synthetic
uuuguuguagaauuacucg

SEQ ID NO: 104397 - RNA, 20 nt, Artificial Sequence
  Synthetic
cuuuguuguagaauuacucg

SEQ ID NO: 104398 - RNA, 21 nt, Artificial Sequence
  Synthetic
ucuuuguuguagaauuacucg

SEQ ID NO: 104399 - RNA, 22 nt, Artificial Sequence
  Synthetic
aucuuuguuguagaauuacucg

SEQ ID NO: 104400 - RNA, 23 nt, Artificial Sequence
  Synthetic
uaucuuuguuguagaauuacucg

SEQ ID NO: 104401 - RNA, 24 nt, Artificial Sequence
  Synthetic
auaucuuuguuguagaauuacucg

SEQ ID NO: 104402 - RNA, 18 nt, Artificial Sequence
  Synthetic
agcuugcccacaaccucg

SEQ ID NO: 104403 - RNA, 19 nt, Artificial Sequence
  Synthetic
uagcuugcccacaaccucg

SEQ ID NO: 104404 - RNA, 20 nt, Artificial Sequence
  Synthetic
auagcuugcccacaaccucg

SEQ ID NO: 104405 - RNA, 21 nt, Artificial Sequence
  Synthetic
aauagcuugcccacaaccucg

SEQ ID NO: 104406 - RNA, 23 nt, Artificial Sequence
  Synthetic
ugaauagcuugcccacaaccucg

SEQ ID NO: 104407 - RNA, 19 nt, Artificial Sequence
  Synthetic
ugcuuugcuuaugaucucg

SEQ ID NO: 104408 - RNA, 20 nt, Artificial Sequence
  Synthetic
augcuuugcuuaugaucucg

SEQ ID NO: 104409 - RNA, 21 nt, Artificial Sequence
  Synthetic
caugcuuugcuuaugaucucg

SEQ ID NO: 104410 - RNA, 22 nt, Artificial Sequence
  Synthetic
ccaugcuuugcuuaugaucucg

SEQ ID NO: 104411 - RNA, 24 nt, Artificial Sequence
  Synthetic
ugccaugcuuugcuuaugaucucg

SEQ ID NO: 104412 - RNA, 18 nt, Artificial Sequence
  Synthetic
uucaaauuagcacugucg

SEQ ID NO: 104413 - RNA, 19 nt, Artificial Sequence
  Synthetic
uuucaaauuagcacugucg

SEQ ID NO: 104414 - RNA, 20 nt, Artificial Sequence
  Synthetic
cuuucaaauuagcacugucg

SEQ ID NO: 104415 - RNA, 21 nt, Artificial Sequence
  Synthetic
acuuucaaauuagcacugucg

SEQ ID NO: 104416 - RNA, 22 nt, Artificial Sequence
  Synthetic
cacuuucaaauuagcacugucg

SEQ ID NO: 104417 - RNA, 23 nt, Artificial Sequence
  Synthetic
acacuuucaaauuagcacugucg

SEQ ID NO: 104418 - RNA, 24 nt, Artificial Sequence
  Synthetic
aacacuuucaaauuagcacugucg

SEQ ID NO: 104419 - RNA, 18 nt, Artificial Sequence
  Synthetic
ugguguugaccuuugucg

SEQ ID NO: 104420 - RNA, 20 nt, Artificial Sequence
  Synthetic
agugguguugaccuuugucg

SEQ ID NO: 104421 - RNA, 22 nt, Artificial Sequence
  Synthetic
agagugguguugaccuuugucg

SEQ ID NO: 104422 - RNA, 19 nt, Artificial Sequence
  Synthetic
aguugaugaagaucauucg

SEQ ID NO: 104423 - RNA, 22 nt, Artificial Sequence
  Synthetic
cggaguugaugaagaucauucg

SEQ ID NO: 104424 - RNA, 23 nt, Artificial Sequence
  Synthetic
ucggaguugaugaagaucauucg

SEQ ID NO: 104425 - RNA, 24 nt, Artificial Sequence
  Synthetic
cucggaguugaugaagaucauucg

SEQ ID NO: 104426 - RNA, 18 nt, Artificial Sequence
  Synthetic
auaucccugauuacuucg

SEQ ID NO: 104427 - RNA, 20 nt, Artificial Sequence
  Synthetic
agauaucccugauuacuucg

SEQ ID NO: 104428 - RNA, 21 nt, Artificial Sequence
  Synthetic
aagauaucccugauuacuucg

SEQ ID NO: 104429 - RNA, 23 nt, Artificial Sequence
  Synthetic
ugaagauaucccugauuacuucg

SEQ ID NO: 104430 - RNA, 24 nt, Artificial Sequence
  Synthetic
cugaagauaucccugauuacuucg

SEQ ID NO: 104431 - RNA, 18 nt, Artificial Sequence
  Synthetic
acuucuuuuaccucuucg

SEQ ID NO: 104432 - RNA, 20 nt, Artificial Sequence
  Synthetic
ugacuucuuuuaccucuucg

SEQ ID NO: 104433 - RNA, 21 nt, Artificial Sequence
  Synthetic
augacuucuuuuaccucuucg

SEQ ID NO: 104434 - RNA, 22 nt, Artificial Sequence
  Synthetic
aaugacuucuuuuaccucuucg

SEQ ID NO: 104435 - RNA, 23 nt, Artificial Sequence
  Synthetic
uaaugacuucuuuuaccucuucg

SEQ ID NO: 104436 - RNA, 18 nt, Artificial Sequence
  Synthetic
auaaauaaaaugauuucg

SEQ ID NO: 104437 - RNA, 19 nt, Artificial Sequence
  Synthetic
uauaaauaaaaugauuucg

SEQ ID NO: 104438 - RNA, 20 nt, Artificial Sequence
  Synthetic
uuauaaauaaaaugauuucg

SEQ ID NO: 104439 - RNA, 21 nt, Artificial Sequence
  Synthetic
uuuauaaauaaaaugauuucg

SEQ ID NO: 104440 - RNA, 22 nt, Artificial Sequence
  Synthetic
uuuuauaaauaaaaugauuucg

SEQ ID NO: 104441 - RNA, 23 nt, Artificial Sequence
  Synthetic
uuuuuauaaauaaaaugauuucg

SEQ ID NO: 104442 - RNA, 24 nt, Artificial Sequence
  Synthetic
auuuuuauaaauaaaaugauuucg

SEQ ID NO: 104443 - RNA, 18 nt, Artificial Sequence
  Synthetic
uucugggaaauuuuuucg

SEQ ID NO: 104444 - RNA, 19 nt, Artificial Sequence
  Synthetic
uuucugggaaauuuuuucg

SEQ ID NO: 104445 - RNA, 20 nt, Artificial Sequence
  Synthetic
uuuucugggaaauuuuuucg

SEQ ID NO: 104446 - RNA, 21 nt, Artificial Sequence
  Synthetic
uuuuucugggaaauuuuuucg

SEQ ID NO: 104447 - RNA, 22 nt, Artificial Sequence
  Synthetic
auuuuucugggaaauuuuuucg

SEQ ID NO: 104448 - RNA, 24 nt, Artificial Sequence
  Synthetic
ugauuuuucugggaaauuuuuucg

SEQ ID NO: 104449 - RNA, 19 nt, Artificial Sequence
  Synthetic
uguuucuuuagaaaaaagg

SEQ ID NO: 104450 - RNA, 20 nt, Artificial Sequence
  Synthetic
auguuucuuuagaaaaaagg

SEQ ID NO: 104451 - RNA, 21 nt, Artificial Sequence
  Synthetic
uauguuucuuuagaaaaaagg

SEQ ID NO: 104452 - RNA, 22 nt, Artificial Sequence
  Synthetic
auauguuucuuuagaaaaaagg

SEQ ID NO: 104453 - RNA, 23 nt, Artificial Sequence
  Synthetic
aauauguuucuuuagaaaaaagg

SEQ ID NO: 104454 - RNA, 24 nt, Artificial Sequence
  Synthetic
aaauauguuucuuuagaaaaaagg

SEQ ID NO: 104455 - RNA, 18 nt, Artificial Sequence
  Synthetic
aaaaugggcucaaaaagg

SEQ ID NO: 104456 - RNA, 20 nt, Artificial Sequence
  Synthetic
agaaaaugggcucaaaaagg

SEQ ID NO: 104457 - RNA, 18 nt, Artificial Sequence
  Synthetic
uaguauuauugaaaaagg

SEQ ID NO: 104458 - RNA, 19 nt, Artificial Sequence
  Synthetic
auaguauuauugaaaaagg

SEQ ID NO: 104459 - RNA, 20 nt, Artificial Sequence
  Synthetic
uauaguauuauugaaaaagg

SEQ ID NO: 104460 - RNA, 21 nt, Artificial Sequence
  Synthetic
auauaguauuauugaaaaagg

SEQ ID NO: 104461 - RNA, 22 nt, Artificial Sequence
  Synthetic
aauauaguauuauugaaaaagg

SEQ ID NO: 104462 - RNA, 23 nt, Artificial Sequence
  Synthetic
aaauauaguauuauugaaaaagg

SEQ ID NO: 104463 - RNA, 24 nt, Artificial Sequence
  Synthetic
caaauauaguauuauugaaaaagg

SEQ ID NO: 104464 - RNA, 18 nt, Artificial Sequence
  Synthetic
agcacaaaagccaaaagg

SEQ ID NO: 104465 - RNA, 19 nt, Artificial Sequence
  Synthetic
uagcacaaaagccaaaagg

SEQ ID NO: 104466 - RNA, 20 nt, Artificial Sequence
  Synthetic
uuagcacaaaagccaaaagg

SEQ ID NO: 104467 - RNA, 21 nt, Artificial Sequence
  Synthetic
uuuagcacaaaagccaaaagg

SEQ ID NO: 104468 - RNA, 22 nt, Artificial Sequence
  Synthetic
uuuuagcacaaaagccaaaagg

SEQ ID NO: 104469 - RNA, 23 nt, Artificial Sequence
  Synthetic
uuuuuagcacaaaagccaaaagg

SEQ ID NO: 104470 - RNA, 24 nt, Artificial Sequence
  Synthetic
auuuuuagcacaaaagccaaaagg

SEQ ID NO: 104471 - RNA, 18 nt, Artificial Sequence
  Synthetic
uguauuucuagcaaaagg

SEQ ID NO: 104472 - RNA, 19 nt, Artificial Sequence
  Synthetic
auguauuucuagcaaaagg

SEQ ID NO: 104473 - RNA, 20 nt, Artificial Sequence
  Synthetic
aauguauuucuagcaaaagg

SEQ ID NO: 104474 - RNA, 21 nt, Artificial Sequence
  Synthetic
aaauguauuucuagcaaaagg

SEQ ID NO: 104475 - RNA, 22 nt, Artificial Sequence
  Synthetic
caaauguauuucuagcaaaagg

SEQ ID NO: 104476 - RNA, 23 nt, Artificial Sequence
  Synthetic
acaaauguauuucuagcaaaagg

SEQ ID NO: 104477 - RNA, 18 nt, Artificial Sequence
  Synthetic
uguaacaaauucaaaagg

SEQ ID NO: 104478 - RNA, 19 nt, Artificial Sequence
  Synthetic
cuguaacaaauucaaaagg

SEQ ID NO: 104479 - RNA, 20 nt, Artificial Sequence
  Synthetic
acuguaacaaauucaaaagg

SEQ ID NO: 104480 - RNA, 21 nt, Artificial Sequence
  Synthetic
cacuguaacaaauucaaaagg

SEQ ID NO: 104481 - RNA, 22 nt, Artificial Sequence
  Synthetic
acacuguaacaaauucaaaagg

SEQ ID NO: 104482 - RNA, 23 nt, Artificial Sequence
  Synthetic
aacacuguaacaaauucaaaagg

SEQ ID NO: 104483 - RNA, 24 nt, Artificial Sequence
  Synthetic
caacacuguaacaaauucaaaagg

SEQ ID NO: 104484 - RNA, 18 nt, Artificial Sequence
  Synthetic
aaaccaaggcagaaaagg

SEQ ID NO: 104485 - RNA, 19 nt, Artificial Sequence
  Synthetic
uaaaccaaggcagaaaagg

SEQ ID NO: 104486 - RNA, 20 nt, Artificial Sequence
  Synthetic
uuaaaccaaggcagaaaagg

SEQ ID NO: 104487 - RNA, 21 nt, Artificial Sequence
  Synthetic
auuaaaccaaggcagaaaagg

SEQ ID NO: 104488 - RNA, 22 nt, Artificial Sequence
  Synthetic
aauuaaaccaaggcagaaaagg

SEQ ID NO: 104489 - RNA, 23 nt, Artificial Sequence
  Synthetic
caauuaaaccaaggcagaaaagg

SEQ ID NO: 104490 - RNA, 24 nt, Artificial Sequence
  Synthetic
ucaauuaaaccaaggcagaaaagg

SEQ ID NO: 104491 - RNA, 18 nt, Artificial Sequence
  Synthetic
acuuagauauagaaaagg

SEQ ID NO: 104492 - RNA, 19 nt, Artificial Sequence
  Synthetic
cacuuagauauagaaaagg

SEQ ID NO: 104493 - RNA, 20 nt, Artificial Sequence
  Synthetic
ucacuuagauauagaaaagg

SEQ ID NO: 104494 - RNA, 21 nt, Artificial Sequence
  Synthetic
uucacuuagauauagaaaagg

SEQ ID NO: 104495 - RNA, 22 nt, Artificial Sequence
  Synthetic
uuucacuuagauauagaaaagg

SEQ ID NO: 104496 - RNA, 23 nt, Artificial Sequence
  Synthetic
uuuucacuuagauauagaaaagg

SEQ ID NO: 104497 - RNA, 24 nt, Artificial Sequence
  Synthetic
uuuuucacuuagauauagaaaagg

SEQ ID NO: 104498 - RNA, 18 nt, Artificial Sequence
  Synthetic
cacaugggaaguaaaagg

SEQ ID NO: 104499 - RNA, 19 nt, Artificial Sequence
  Synthetic
ucacaugggaaguaaaagg

SEQ ID NO: 104500 - RNA, 20 nt, Artificial Sequence
  Synthetic
uucacaugggaaguaaaagg

SEQ ID NO: 104501 - RNA, 22 nt, Artificial Sequence
  Synthetic
uguucacaugggaaguaaaagg

SEQ ID NO: 104502 - RNA, 23 nt, Artificial Sequence
  Synthetic
auguucacaugggaaguaaaagg

SEQ ID NO: 104503 - RNA, 24 nt, Artificial Sequence
  Synthetic
aauguucacaugggaaguaaaagg

SEQ ID NO: 104504 - RNA, 18 nt, Artificial Sequence
  Synthetic
caaauaaguuaacaaagg

SEQ ID NO: 104505 - RNA, 19 nt, Artificial Sequence
  Synthetic
acaaauaaguuaacaaagg

SEQ ID NO: 104506 - RNA, 20 nt, Artificial Sequence
  Synthetic
aacaaauaaguuaacaaagg

SEQ ID NO: 104507 - RNA, 21 nt, Artificial Sequence
  Synthetic
aaacaaauaaguuaacaaagg

SEQ ID NO: 104508 - RNA, 22 nt, Artificial Sequence
  Synthetic
uaaacaaauaaguuaacaaagg

SEQ ID NO: 104509 - RNA, 23 nt, Artificial Sequence
  Synthetic
cuaaacaaauaaguuaacaaagg

SEQ ID NO: 104510 - RNA, 19 nt, Artificial Sequence
  Synthetic
agcucuuuaaagacaaagg

SEQ ID NO: 104511 - RNA, 21 nt, Artificial Sequence
  Synthetic
ugagcucuuuaaagacaaagg

SEQ ID NO: 104512 - RNA, 23 nt, Artificial Sequence
  Synthetic
ugugagcucuuuaaagacaaagg

SEQ ID NO: 104513 - RNA, 24 nt, Artificial Sequence
  Synthetic
uugugagcucuuuaaagacaaagg

SEQ ID NO: 104514 - RNA, 18 nt, Artificial Sequence
  Synthetic
uauacuacgaggcaaagg

SEQ ID NO: 104515 - RNA, 19 nt, Artificial Sequence
  Synthetic
cuauacuacgaggcaaagg

SEQ ID NO: 104516 - RNA, 21 nt, Artificial Sequence
  Synthetic
agcuauacuacgaggcaaagg

SEQ ID NO: 104517 - RNA, 22 nt, Artificial Sequence
  Synthetic
aagcuauacuacgaggcaaagg

SEQ ID NO: 104518 - RNA, 23 nt, Artificial Sequence
  Synthetic
caagcuauacuacgaggcaaagg

SEQ ID NO: 104519 - RNA, 24 nt, Artificial Sequence
  Synthetic
ccaagcuauacuacgaggcaaagg

SEQ ID NO: 104520 - RNA, 18 nt, Artificial Sequence
  Synthetic
uuucagaaguuucaaagg

SEQ ID NO: 104521 - RNA, 19 nt, Artificial Sequence
  Synthetic
uuuucagaaguuucaaagg

SEQ ID NO: 104522 - RNA, 20 nt, Artificial Sequence
  Synthetic
cuuuucagaaguuucaaagg

SEQ ID NO: 104523 - RNA, 21 nt, Artificial Sequence
  Synthetic
ccuuuucagaaguuucaaagg

SEQ ID NO: 104524 - RNA, 23 nt, Artificial Sequence
  Synthetic
ugccuuuucagaaguuucaaagg

SEQ ID NO: 104525 - RNA, 24 nt, Artificial Sequence
  Synthetic
cugccuuuucagaaguuucaaagg

SEQ ID NO: 104526 - RNA, 21 nt, Artificial Sequence
  Synthetic
augcuugaaagaaaagaaagg

SEQ ID NO: 104527 - RNA, 22 nt, Artificial Sequence
  Synthetic
uaugcuugaaagaaaagaaagg

SEQ ID NO: 104528 - RNA, 23 nt, Artificial Sequence
  Synthetic
auaugcuugaaagaaaagaaagg

SEQ ID NO: 104529 - RNA, 24 nt, Artificial Sequence
  Synthetic
cauaugcuugaaagaaaagaaagg

SEQ ID NO: 104530 - RNA, 18 nt, Artificial Sequence
  Synthetic
aucuagaauugagaaagg

SEQ ID NO: 104531 - RNA, 19 nt, Artificial Sequence
  Synthetic
aaucuagaauugagaaagg

SEQ ID NO: 104532 - RNA, 21 nt, Artificial Sequence
  Synthetic
ugaaucuagaauugagaaagg

SEQ ID NO: 104533 - RNA, 22 nt, Artificial Sequence
  Synthetic
uugaaucuagaauugagaaagg

SEQ ID NO: 104534 - RNA, 23 nt, Artificial Sequence
  Synthetic
uuugaaucuagaauugagaaagg

SEQ ID NO: 104535 - RNA, 24 nt, Artificial Sequence
  Synthetic
auuugaaucuagaauugagaaagg

SEQ ID NO: 104536 - RNA, 18 nt, Artificial Sequence
  Synthetic
uacuucuccauggaaagg

SEQ ID NO: 104537 - RNA, 19 nt, Artificial Sequence
  Synthetic
auacuucuccauggaaagg

SEQ ID NO: 104538 - RNA, 21 nt, Artificial Sequence
  Synthetic
ugauacuucuccauggaaagg

SEQ ID NO: 104539 - RNA, 22 nt, Artificial Sequence
  Synthetic
uugauacuucuccauggaaagg

SEQ ID NO: 104540 - RNA, 23 nt, Artificial Sequence
  Synthetic
uuugauacuucuccauggaaagg

SEQ ID NO: 104541 - RNA, 24 nt, Artificial Sequence
  Synthetic
uuuugauacuucuccauggaaagg

SEQ ID NO: 104542 - RNA, 18 nt, Artificial Sequence
  Synthetic
ccggauacauuguaaagg

SEQ ID NO: 104543 - RNA, 19 nt, Artificial Sequence
  Synthetic
uccggauacauuguaaagg

SEQ ID NO: 104544 - RNA, 20 nt, Artificial Sequence
  Synthetic
uuccggauacauuguaaagg

SEQ ID NO: 104545 - RNA, 21 nt, Artificial Sequence
  Synthetic
auuccggauacauuguaaagg

SEQ ID NO: 104546 - RNA, 22 nt, Artificial Sequence
  Synthetic
aauuccggauacauuguaaagg

SEQ ID NO: 104547 - RNA, 24 nt, Artificial Sequence
  Synthetic
ugaauuccggauacauuguaaagg

SEQ ID NO: 104548 - RNA, 18 nt, Artificial Sequence
  Synthetic
cucuauaaaaacacaagg

SEQ ID NO: 104549 - RNA, 19 nt, Artificial Sequence
  Synthetic
ucucuauaaaaacacaagg

SEQ ID NO: 104550 - RNA, 20 nt, Artificial Sequence
  Synthetic
uucucuauaaaaacacaagg

SEQ ID NO: 104551 - RNA, 21 nt, Artificial Sequence
  Synthetic
cuucucuauaaaaacacaagg

SEQ ID NO: 104552 - RNA, 22 nt, Artificial Sequence
  Synthetic
ccuucucuauaaaaacacaagg

SEQ ID NO: 104553 - RNA, 23 nt, Artificial Sequence
  Synthetic
uccuucucuauaaaaacacaagg

SEQ ID NO: 104554 - RNA, 24 nt, Artificial Sequence
  Synthetic
auccuucucuauaaaaacacaagg

SEQ ID NO: 104555 - RNA, 18 nt, Artificial Sequence
  Synthetic
uauaaacagcguccaagg

SEQ ID NO: 104556 - RNA, 19 nt, Artificial Sequence
  Synthetic
auauaaacagcguccaagg

SEQ ID NO: 104557 - RNA, 21 nt, Artificial Sequence
  Synthetic
ugauauaaacagcguccaagg

SEQ ID NO: 104558 - RNA, 22 nt, Artificial Sequence
  Synthetic
augauauaaacagcguccaagg

SEQ ID NO: 104559 - RNA, 23 nt, Artificial Sequence
  Synthetic
uaugauauaaacagcguccaagg

SEQ ID NO: 104560 - RNA, 24 nt, Artificial Sequence
  Synthetic
auaugauauaaacagcguccaagg

SEQ ID NO: 104561 - RNA, 21 nt, Artificial Sequence
  Synthetic
agauaagaaaaugaagcaagg

SEQ ID NO: 104562 - RNA, 22 nt, Artificial Sequence
  Synthetic
cagauaagaaaaugaagcaagg

SEQ ID NO: 104563 - RNA, 23 nt, Artificial Sequence
  Synthetic
acagauaagaaaaugaagcaagg

SEQ ID NO: 104564 - RNA, 24 nt, Artificial Sequence
  Synthetic
uacagauaagaaaaugaagcaagg

SEQ ID NO: 104565 - RNA, 19 nt, Artificial Sequence
  Synthetic
aguuagaacacuagcaagg

SEQ ID NO: 104566 - RNA, 21 nt, Artificial Sequence
  Synthetic
agaguuagaacacuagcaagg

SEQ ID NO: 104567 - RNA, 22 nt, Artificial Sequence
  Synthetic
uagaguuagaacacuagcaagg

SEQ ID NO: 104568 - RNA, 23 nt, Artificial Sequence
  Synthetic
uuagaguuagaacacuagcaagg

SEQ ID NO: 104569 - RNA, 24 nt, Artificial Sequence
  Synthetic
cuuagaguuagaacacuagcaagg

SEQ ID NO: 104570 - RNA, 18 nt, Artificial Sequence
  Synthetic
aacaugacuuauucaagg

SEQ ID NO: 104571 - RNA, 20 nt, Artificial Sequence
  Synthetic
ugaacaugacuuauucaagg

SEQ ID NO: 104572 - RNA, 21 nt, Artificial Sequence
  Synthetic
augaacaugacuuauucaagg

SEQ ID NO: 104573 - RNA, 22 nt, Artificial Sequence
  Synthetic
caugaacaugacuuauucaagg

SEQ ID NO: 104574 - RNA, 24 nt, Artificial Sequence
  Synthetic
agcaugaacaugacuuauucaagg

SEQ ID NO: 104575 - RNA, 21 nt, Artificial Sequence
  Synthetic
cauucaacagaagaaagaagg

SEQ ID NO: 104576 - RNA, 22 nt, Artificial Sequence
  Synthetic
ucauucaacagaagaaagaagg

SEQ ID NO: 104577 - RNA, 23 nt, Artificial Sequence
  Synthetic
cucauucaacagaagaaagaagg

SEQ ID NO: 104578 - RNA, 24 nt, Artificial Sequence
  Synthetic
acucauucaacagaagaaagaagg

SEQ ID NO: 104579 - RNA, 18 nt, Artificial Sequence
  Synthetic
auagcugaagaaagaagg

SEQ ID NO: 104580 - RNA, 21 nt, Artificial Sequence
  Synthetic
uggauagcugaagaaagaagg

SEQ ID NO: 104581 - RNA, 23 nt, Artificial Sequence
  Synthetic
uguggauagcugaagaaagaagg

SEQ ID NO: 104582 - RNA, 18 nt, Artificial Sequence
  Synthetic
cccaaggggagaagaagg

SEQ ID NO: 104583 - RNA, 19 nt, Artificial Sequence
  Synthetic
acccaaggggagaagaagg

SEQ ID NO: 104584 - RNA, 20 nt, Artificial Sequence
  Synthetic
uacccaaggggagaagaagg

SEQ ID NO: 104585 - RNA, 21 nt, Artificial Sequence
  Synthetic
cuacccaaggggagaagaagg

SEQ ID NO: 104586 - RNA, 22 nt, Artificial Sequence
  Synthetic
ccuacccaaggggagaagaagg

SEQ ID NO: 104587 - RNA, 23 nt, Artificial Sequence
  Synthetic
uccuacccaaggggagaagaagg

SEQ ID NO: 104588 - RNA, 18 nt, Artificial Sequence
  Synthetic
uauagaaugagaagaagg

SEQ ID NO: 104589 - RNA, 20 nt, Artificial Sequence
  Synthetic
cguauagaaugagaagaagg

SEQ ID NO: 104590 - RNA, 21 nt, Artificial Sequence
  Synthetic
ccguauagaaugagaagaagg

SEQ ID NO: 104591 - RNA, 22 nt, Artificial Sequence
  Synthetic
accguauagaaugagaagaagg

SEQ ID NO: 104592 - RNA, 23 nt, Artificial Sequence
  Synthetic
aaccguauagaaugagaagaagg

SEQ ID NO: 104593 - RNA, 24 nt, Artificial Sequence
  Synthetic
aaaccguauagaaugagaagaagg

SEQ ID NO: 104594 - RNA, 18 nt, Artificial Sequence
  Synthetic
aauguugucauaagaagg

SEQ ID NO: 104595 - RNA, 19 nt, Artificial Sequence
  Synthetic
caauguugucauaagaagg

SEQ ID NO: 104596 - RNA, 20 nt, Artificial Sequence
  Synthetic
acaauguugucauaagaagg

SEQ ID NO: 104597 - RNA, 21 nt, Artificial Sequence
  Synthetic
cacaauguugucauaagaagg

SEQ ID NO: 104598 - RNA, 23 nt, Artificial Sequence
  Synthetic
agcacaauguugucauaagaagg

SEQ ID NO: 104599 - RNA, 24 nt, Artificial Sequence
  Synthetic
aagcacaauguugucauaagaagg

SEQ ID NO: 104600 - RNA, 18 nt, Artificial Sequence
  Synthetic
aggaaaugauuaagaagg

SEQ ID NO: 104601 - RNA, 19 nt, Artificial Sequence
  Synthetic
uaggaaaugauuaagaagg

SEQ ID NO: 104602 - RNA, 20 nt, Artificial Sequence
  Synthetic
uuaggaaaugauuaagaagg

SEQ ID NO: 104603 - RNA, 21 nt, Artificial Sequence
  Synthetic
cuuaggaaaugauuaagaagg

SEQ ID NO: 104604 - RNA, 22 nt, Artificial Sequence
  Synthetic
acuuaggaaaugauuaagaagg

SEQ ID NO: 104605 - RNA, 23 nt, Artificial Sequence
  Synthetic
uacuuaggaaaugauuaagaagg

SEQ ID NO: 104606 - RNA, 24 nt, Artificial Sequence
  Synthetic
auacuuaggaaaugauuaagaagg

SEQ ID NO: 104607 - RNA, 18 nt, Artificial Sequence
  Synthetic
aagacaaaauucagaagg

SEQ ID NO: 104608 - RNA, 19 nt, Artificial Sequence
  Synthetic
uaagacaaaauucagaagg

SEQ ID NO: 104609 - RNA, 20 nt, Artificial Sequence
  Synthetic
cuaagacaaaauucagaagg

SEQ ID NO: 104610 - RNA, 21 nt, Artificial Sequence
  Synthetic
acuaagacaaaauucagaagg

SEQ ID NO: 104611 - RNA, 23 nt, Artificial Sequence
  Synthetic
agacuaagacaaaauucagaagg

SEQ ID NO: 104612 - RNA, 24 nt, Artificial Sequence
  Synthetic
uagacuaagacaaaauucagaagg

SEQ ID NO: 104613 - RNA, 18 nt, Artificial Sequence
  Synthetic
aaaccacugcagagaagg

SEQ ID NO: 104614 - RNA, 19 nt, Artificial Sequence
  Synthetic
caaaccacugcagagaagg

SEQ ID NO: 104615 - RNA, 21 nt, Artificial Sequence
  Synthetic
agcaaaccacugcagagaagg

SEQ ID NO: 104616 - RNA, 22 nt, Artificial Sequence
  Synthetic
uagcaaaccacugcagagaagg

SEQ ID NO: 104617 - RNA, 23 nt, Artificial Sequence
  Synthetic
cuagcaaaccacugcagagaagg

SEQ ID NO: 104618 - RNA, 24 nt, Artificial Sequence
  Synthetic
acuagcaaaccacugcagagaagg

SEQ ID NO: 104619 - RNA, 19 nt, Artificial Sequence
  Synthetic
aguucuagccaguagaagg

SEQ ID NO: 104620 - RNA, 21 nt, Artificial Sequence
  Synthetic
agaguucuagccaguagaagg

SEQ ID NO: 104621 - RNA, 22 nt, Artificial Sequence
  Synthetic
cagaguucuagccaguagaagg

SEQ ID NO: 104622 - RNA, 18 nt, Artificial Sequence
  Synthetic
uccccauuacaaggaagg

SEQ ID NO: 104623 - RNA, 19 nt, Artificial Sequence
  Synthetic
uuccccauuacaaggaagg

SEQ ID NO: 104624 - RNA, 20 nt, Artificial Sequence
  Synthetic
auuccccauuacaaggaagg

SEQ ID NO: 104625 - RNA, 21 nt, Artificial Sequence
  Synthetic
uauuccccauuacaaggaagg

SEQ ID NO: 104626 - RNA, 22 nt, Artificial Sequence
  Synthetic
cuauuccccauuacaaggaagg

SEQ ID NO: 104627 - RNA, 23 nt, Artificial Sequence
  Synthetic
ccuauuccccauuacaaggaagg

SEQ ID NO: 104628 - RNA, 24 nt, Artificial Sequence
  Synthetic
uccuauuccccauuacaaggaagg

SEQ ID NO: 104629 - RNA, 18 nt, Artificial Sequence
  Synthetic
ucaugguuuauaggaagg

SEQ ID NO: 104630 - RNA, 19 nt, Artificial Sequence
  Synthetic
uucaugguuuauaggaagg

SEQ ID NO: 104631 - RNA, 20 nt, Artificial Sequence
  Synthetic
cuucaugguuuauaggaagg

SEQ ID NO: 104632 - RNA, 22 nt, Artificial Sequence
  Synthetic
cgcuucaugguuuauaggaagg

SEQ ID NO: 104633 - RNA, 23 nt, Artificial Sequence
  Synthetic
acgcuucaugguuuauaggaagg

SEQ ID NO: 104634 - RNA, 18 nt, Artificial Sequence
  Synthetic
cuagugagguagggaagg

SEQ ID NO: 104635 - RNA, 19 nt, Artificial Sequence
  Synthetic
ccuagugagguagggaagg

SEQ ID NO: 104636 - RNA, 20 nt, Artificial Sequence
  Synthetic
uccuagugagguagggaagg

SEQ ID NO: 104637 - RNA, 21 nt, Artificial Sequence
  Synthetic
auccuagugagguagggaagg

SEQ ID NO: 104638 - RNA, 22 nt, Artificial Sequence
  Synthetic
cauccuagugagguagggaagg

SEQ ID NO: 104639 - RNA, 23 nt, Artificial Sequence
  Synthetic
acauccuagugagguagggaagg

SEQ ID NO: 104640 - RNA, 24 nt, Artificial Sequence
  Synthetic
aacauccuagugagguagggaagg

SEQ ID NO: 104641 - RNA, 20 nt, Artificial Sequence
  Synthetic
aggauucacucaggggaagg

SEQ ID NO: 104642 - RNA, 21 nt, Artificial Sequence
  Synthetic
aaggauucacucaggggaagg

SEQ ID NO: 104643 - RNA, 22 nt, Artificial Sequence
  Synthetic
uaaggauucacucaggggaagg

SEQ ID NO: 104644 - RNA, 23 nt, Artificial Sequence
  Synthetic
cuaaggauucacucaggggaagg

SEQ ID NO: 104645 - RNA, 18 nt, Artificial Sequence
  Synthetic
uuuuacguugcuggaagg

SEQ ID NO: 104646 - RNA, 19 nt, Artificial Sequence
  Synthetic
auuuuacguugcuggaagg

SEQ ID NO: 104647 - RNA, 20 nt, Artificial Sequence
  Synthetic
aauuuuacguugcuggaagg

SEQ ID NO: 104648 - RNA, 22 nt, Artificial Sequence
  Synthetic
agaauuuuacguugcuggaagg

SEQ ID NO: 104649 - RNA, 23 nt, Artificial Sequence
  Synthetic
uagaauuuuacguugcuggaagg

SEQ ID NO: 104650 - RNA, 18 nt, Artificial Sequence
  Synthetic
agaaaauacuguggaagg

SEQ ID NO: 104651 - RNA, 19 nt, Artificial Sequence
  Synthetic
cagaaaauacuguggaagg

SEQ ID NO: 104652 - RNA, 20 nt, Artificial Sequence
  Synthetic
acagaaaauacuguggaagg

SEQ ID NO: 104653 - RNA, 21 nt, Artificial Sequence
  Synthetic
aacagaaaauacuguggaagg

SEQ ID NO: 104654 - RNA, 22 nt, Artificial Sequence
  Synthetic
aaacagaaaauacuguggaagg

SEQ ID NO: 104655 - RNA, 24 nt, Artificial Sequence
  Synthetic
agaaacagaaaauacuguggaagg

SEQ ID NO: 104656 - RNA, 19 nt, Artificial Sequence
  Synthetic
agugauaggguguggaagg

SEQ ID NO: 104657 - RNA, 20 nt, Artificial Sequence
  Synthetic
uagugauaggguguggaagg

SEQ ID NO: 104658 - RNA, 21 nt, Artificial Sequence
  Synthetic
uuagugauaggguguggaagg

SEQ ID NO: 104659 - RNA, 22 nt, Artificial Sequence
  Synthetic
cuuagugauaggguguggaagg

SEQ ID NO: 104660 - RNA, 23 nt, Artificial Sequence
  Synthetic
acuuagugauaggguguggaagg

SEQ ID NO: 104661 - RNA, 24 nt, Artificial Sequence
  Synthetic
cacuuagugauaggguguggaagg

SEQ ID NO: 104662 - RNA, 18 nt, Artificial Sequence
  Synthetic
uguccuaccuuuggaagg

SEQ ID NO: 104663 - RNA, 19 nt, Artificial Sequence
  Synthetic
uuguccuaccuuuggaagg

SEQ ID NO: 104664 - RNA, 20 nt, Artificial Sequence
  Synthetic
cuuguccuaccuuuggaagg

SEQ ID NO: 104665 - RNA, 21 nt, Artificial Sequence
  Synthetic
ucuuguccuaccuuuggaagg

SEQ ID NO: 104666 - RNA, 22 nt, Artificial Sequence
  Synthetic
cucuuguccuaccuuuggaagg

SEQ ID NO: 104667 - RNA, 23 nt, Artificial Sequence
  Synthetic
ucucuuguccuaccuuuggaagg

SEQ ID NO: 104668 - RNA, 24 nt, Artificial Sequence
  Synthetic
uucucuuguccuaccuuuggaagg

SEQ ID NO: 104669 - RNA, 18 nt, Artificial Sequence
  Synthetic
aucuauuuauuaugaagg

SEQ ID NO: 104670 - RNA, 19 nt, Artificial Sequence
  Synthetic
aaucuauuuauuaugaagg

SEQ ID NO: 104671 - RNA, 20 nt, Artificial Sequence
  Synthetic
aaaucuauuuauuaugaagg

SEQ ID NO: 104672 - RNA, 21 nt, Artificial Sequence
  Synthetic
uaaaucuauuuauuaugaagg

SEQ ID NO: 104673 - RNA, 22 nt, Artificial Sequence
  Synthetic
auaaaucuauuuauuaugaagg

SEQ ID NO: 104674 - RNA, 24 nt, Artificial Sequence
  Synthetic
agauaaaucuauuuauuaugaagg

SEQ ID NO: 104675 - RNA, 18 nt, Artificial Sequence
  Synthetic
cacuaacaaagcugaagg

SEQ ID NO: 104676 - RNA, 19 nt, Artificial Sequence
  Synthetic
ucacuaacaaagcugaagg

SEQ ID NO: 104677 - RNA, 21 nt, Artificial Sequence
  Synthetic
ugucacuaacaaagcugaagg

SEQ ID NO: 104678 - RNA, 22 nt, Artificial Sequence
  Synthetic
cugucacuaacaaagcugaagg

SEQ ID NO: 104679 - RNA, 23 nt, Artificial Sequence
  Synthetic
ccugucacuaacaaagcugaagg

SEQ ID NO: 104680 - RNA, 24 nt, Artificial Sequence
  Synthetic
cccugucacuaacaaagcugaagg

SEQ ID NO: 104681 - RNA, 19 nt, Artificial Sequence
  Synthetic
agcuaaaagguggugaagg

SEQ ID NO: 104682 - RNA, 20 nt, Artificial Sequence
  Synthetic
aagcuaaaagguggugaagg

SEQ ID NO: 104683 - RNA, 21 nt, Artificial Sequence
  Synthetic
caagcuaaaagguggugaagg

SEQ ID NO: 104684 - RNA, 22 nt, Artificial Sequence
  Synthetic
ccaagcuaaaagguggugaagg

SEQ ID NO: 104685 - RNA, 23 nt, Artificial Sequence
  Synthetic
accaagcuaaaagguggugaagg

SEQ ID NO: 104686 - RNA, 24 nt, Artificial Sequence
  Synthetic
caccaagcuaaaagguggugaagg

SEQ ID NO: 104687 - RNA, 21 nt, Artificial Sequence
  Synthetic
uagagauaaaaagaaauaagg

SEQ ID NO: 104688 - RNA, 24 nt, Artificial Sequence
  Synthetic
agguagagauaaaaagaaauaagg

SEQ ID NO: 104689 - RNA, 18 nt, Artificial Sequence
  Synthetic
auuuagaaaucacuaagg

SEQ ID NO: 104690 - RNA, 19 nt, Artificial Sequence
  Synthetic
uauuuagaaaucacuaagg

SEQ ID NO: 104691 - RNA, 20 nt, Artificial Sequence
  Synthetic
cuauuuagaaaucacuaagg

SEQ ID NO: 104692 - RNA, 21 nt, Artificial Sequence
  Synthetic
ucuauuuagaaaucacuaagg

SEQ ID NO: 104693 - RNA, 22 nt, Artificial Sequence
  Synthetic
cucuauuuagaaaucacuaagg

SEQ ID NO: 104694 - RNA, 23 nt, Artificial Sequence
  Synthetic
ccucuauuuagaaaucacuaagg

SEQ ID NO: 104695 - RNA, 24 nt, Artificial Sequence
  Synthetic
accucuauuuagaaaucacuaagg

SEQ ID NO: 104696 - RNA, 18 nt, Artificial Sequence
  Synthetic
ucuauuguguagguaagg

SEQ ID NO: 104697 - RNA, 19 nt, Artificial Sequence
  Synthetic
aucuauuguguagguaagg

SEQ ID NO: 104698 - RNA, 20 nt, Artificial Sequence
  Synthetic
aaucuauuguguagguaagg

SEQ ID NO: 104699 - RNA, 21 nt, Artificial Sequence
  Synthetic
caaucuauuguguagguaagg

SEQ ID NO: 104700 - RNA, 22 nt, Artificial Sequence
  Synthetic
acaaucuauuguguagguaagg

SEQ ID NO: 104701 - RNA, 24 nt, Artificial Sequence
  Synthetic
agacaaucuauuguguagguaagg

SEQ ID NO: 104702 - RNA, 18 nt, Artificial Sequence
  Synthetic
uacgaagaaagauuaagg

SEQ ID NO: 104703 - RNA, 19 nt, Artificial Sequence
  Synthetic
cuacgaagaaagauuaagg

SEQ ID NO: 104704 - RNA, 21 nt, Artificial Sequence
  Synthetic
ugcuacgaagaaagauuaagg

SEQ ID NO: 104705 - RNA, 22 nt, Artificial Sequence
  Synthetic
augcuacgaagaaagauuaagg

SEQ ID NO: 104706 - RNA, 24 nt, Artificial Sequence
  Synthetic
ugaugcuacgaagaaagauuaagg

SEQ ID NO: 104707 - RNA, 18 nt, Artificial Sequence
  Synthetic
aucuaaaaguuauuaagg

SEQ ID NO: 104708 - RNA, 19 nt, Artificial Sequence
  Synthetic
caucuaaaaguuauuaagg

SEQ ID NO: 104709 - RNA, 20 nt, Artificial Sequence
  Synthetic
ccaucuaaaaguuauuaagg

SEQ ID NO: 104710 - RNA, 21 nt, Artificial Sequence
  Synthetic
cccaucuaaaaguuauuaagg

SEQ ID NO: 104711 - RNA, 22 nt, Artificial Sequence
  Synthetic
ucccaucuaaaaguuauuaagg

SEQ ID NO: 104712 - RNA, 23 nt, Artificial Sequence
  Synthetic
cucccaucuaaaaguuauuaagg

SEQ ID NO: 104713 - RNA, 24 nt, Artificial Sequence
  Synthetic
ccucccaucuaaaaguuauuaagg

SEQ ID NO: 104714 - RNA, 21 nt, Artificial Sequence
  Synthetic
aaggauauucuuuauuuaagg

SEQ ID NO: 104715 - RNA, 22 nt, Artificial Sequence
  Synthetic
aaaggauauucuuuauuuaagg

SEQ ID NO: 104716 - RNA, 23 nt, Artificial Sequence
  Synthetic
aaaaggauauucuuuauuuaagg

SEQ ID NO: 104717 - RNA, 24 nt, Artificial Sequence
  Synthetic
caaaaggauauucuuuauuuaagg

SEQ ID NO: 104718 - RNA, 18 nt, Artificial Sequence
  Synthetic
aaaauucagacuuuaagg

SEQ ID NO: 104719 - RNA, 20 nt, Artificial Sequence
  Synthetic
ugaaaauucagacuuuaagg

SEQ ID NO: 104720 - RNA, 21 nt, Artificial Sequence
  Synthetic
uugaaaauucagacuuuaagg

SEQ ID NO: 104721 - RNA, 22 nt, Artificial Sequence
  Synthetic
cuugaaaauucagacuuuaagg

SEQ ID NO: 104722 - RNA, 23 nt, Artificial Sequence
  Synthetic
ccuugaaaauucagacuuuaagg

SEQ ID NO: 104723 - RNA, 24 nt, Artificial Sequence
  Synthetic
cccuugaaaauucagacuuuaagg

SEQ ID NO: 104724 - RNA, 18 nt, Artificial Sequence
  Synthetic
auaugagauacuuuaagg

SEQ ID NO: 104725 - RNA, 19 nt, Artificial Sequence
  Synthetic
cauaugagauacuuuaagg

SEQ ID NO: 104726 - RNA, 20 nt, Artificial Sequence
  Synthetic
ucauaugagauacuuuaagg

SEQ ID NO: 104727 - RNA, 21 nt, Artificial Sequence
  Synthetic
uucauaugagauacuuuaagg

SEQ ID NO: 104728 - RNA, 22 nt, Artificial Sequence
  Synthetic
uuucauaugagauacuuuaagg

SEQ ID NO: 104729 - RNA, 23 nt, Artificial Sequence
  Synthetic
cuuucauaugagauacuuuaagg

SEQ ID NO: 104730 - RNA, 18 nt, Artificial Sequence
  Synthetic
aucauuaaaauuuuaagg

SEQ ID NO: 104731 - RNA, 19 nt, Artificial Sequence
  Synthetic
uaucauuaaaauuuuaagg

SEQ ID NO: 104732 - RNA, 20 nt, Artificial Sequence
  Synthetic
cuaucauuaaaauuuuaagg

SEQ ID NO: 104733 - RNA, 21 nt, Artificial Sequence
  Synthetic
ucuaucauuaaaauuuuaagg

SEQ ID NO: 104734 - RNA, 22 nt, Artificial Sequence
  Synthetic
cucuaucauuaaaauuuuaagg

SEQ ID NO: 104735 - RNA, 24 nt, Artificial Sequence
  Synthetic
agcucuaucauuaaaauuuuaagg

SEQ ID NO: 104736 - RNA, 18 nt, Artificial Sequence
  Synthetic
caggccaucucaaacagg

SEQ ID NO: 104737 - RNA, 19 nt, Artificial Sequence
  Synthetic
ccaggccaucucaaacagg

SEQ ID NO: 104738 - RNA, 20 nt, Artificial Sequence
  Synthetic
uccaggccaucucaaacagg

SEQ ID NO: 104739 - RNA, 21 nt, Artificial Sequence
  Synthetic
auccaggccaucucaaacagg

SEQ ID NO: 104740 - RNA, 22 nt, Artificial Sequence
  Synthetic
cauccaggccaucucaaacagg

SEQ ID NO: 104741 - RNA, 23 nt, Artificial Sequence
  Synthetic
ccauccaggccaucucaaacagg

SEQ ID NO: 104742 - RNA, 24 nt, Artificial Sequence
  Synthetic
accauccaggccaucucaaacagg

SEQ ID NO: 104743 - RNA, 21 nt, Artificial Sequence
  Synthetic
aguaaaaaaaugagaaacagg

SEQ ID NO: 104744 - RNA, 22 nt, Artificial Sequence
  Synthetic
caguaaaaaaaugagaaacagg

SEQ ID NO: 104745 - RNA, 24 nt, Artificial Sequence
  Synthetic
agcaguaaaaaaaugagaaacagg

SEQ ID NO: 104746 - RNA, 21 nt, Artificial Sequence
  Synthetic
aaaacauuaugaguacacagg

SEQ ID NO: 104747 - RNA, 22 nt, Artificial Sequence
  Synthetic
uaaaacauuaugaguacacagg

SEQ ID NO: 104748 - RNA, 23 nt, Artificial Sequence
  Synthetic
auaaaacauuaugaguacacagg

SEQ ID NO: 104749 - RNA, 24 nt, Artificial Sequence
  Synthetic
uauaaaacauuaugaguacacagg

SEQ ID NO: 104750 - RNA, 18 nt, Artificial Sequence
  Synthetic
ugacuaguuucucacagg

SEQ ID NO: 104751 - RNA, 19 nt, Artificial Sequence
  Synthetic
augacuaguuucucacagg

SEQ ID NO: 104752 - RNA, 20 nt, Artificial Sequence
  Synthetic
uaugacuaguuucucacagg

SEQ ID NO: 104753 - RNA, 21 nt, Artificial Sequence
  Synthetic
uuaugacuaguuucucacagg

SEQ ID NO: 104754 - RNA, 22 nt, Artificial Sequence
  Synthetic
auuaugacuaguuucucacagg

SEQ ID NO: 104755 - RNA, 23 nt, Artificial Sequence
  Synthetic
uauuaugacuaguuucucacagg

SEQ ID NO: 104756 - RNA, 24 nt, Artificial Sequence
  Synthetic
uuauuaugacuaguuucucacagg

SEQ ID NO: 104757 - RNA, 18 nt, Artificial Sequence
  Synthetic
acgagucuuaaagacagg

SEQ ID NO: 104758 - RNA, 19 nt, Artificial Sequence
  Synthetic
aacgagucuuaaagacagg

SEQ ID NO: 104759 - RNA, 20 nt, Artificial Sequence
  Synthetic
aaacgagucuuaaagacagg

SEQ ID NO: 104760 - RNA, 21 nt, Artificial Sequence
  Synthetic
aaaacgagucuuaaagacagg

SEQ ID NO: 104761 - RNA, 23 nt, Artificial Sequence
  Synthetic
agaaaacgagucuuaaagacagg

SEQ ID NO: 104762 - RNA, 18 nt, Artificial Sequence
  Synthetic
ccucuggauaaggacagg

SEQ ID NO: 104763 - RNA, 19 nt, Artificial Sequence
  Synthetic
accucuggauaaggacagg

SEQ ID NO: 104764 - RNA, 20 nt, Artificial Sequence
  Synthetic
aaccucuggauaaggacagg

SEQ ID NO: 104765 - RNA, 21 nt, Artificial Sequence
  Synthetic
caaccucuggauaaggacagg

SEQ ID NO: 104766 - RNA, 22 nt, Artificial Sequence
  Synthetic
ucaaccucuggauaaggacagg

SEQ ID NO: 104767 - RNA, 23 nt, Artificial Sequence
  Synthetic
uucaaccucuggauaaggacagg

SEQ ID NO: 104768 - RNA, 24 nt, Artificial Sequence
  Synthetic
uuucaaccucuggauaaggacagg

SEQ ID NO: 104769 - RNA, 18 nt, Artificial Sequence
  Synthetic
ccaaucuaugacuacagg

SEQ ID NO: 104770 - RNA, 20 nt, Artificial Sequence
  Synthetic
agccaaucuaugacuacagg

SEQ ID NO: 104771 - RNA, 21 nt, Artificial Sequence
  Synthetic
aagccaaucuaugacuacagg

SEQ ID NO: 104772 - RNA, 22 nt, Artificial Sequence
  Synthetic
aaagccaaucuaugacuacagg

SEQ ID NO: 104773 - RNA, 23 nt, Artificial Sequence
  Synthetic
aaaagccaaucuaugacuacagg

SEQ ID NO: 104774 - RNA, 24 nt, Artificial Sequence
  Synthetic
uaaaagccaaucuaugacuacagg

SEQ ID NO: 104775 - RNA, 18 nt, Artificial Sequence
  Synthetic
ugaagccuuccuuacagg

SEQ ID NO: 104776 - RNA, 19 nt, Artificial Sequence
  Synthetic
augaagccuuccuuacagg

SEQ ID NO: 104777 - RNA, 20 nt, Artificial Sequence
  Synthetic
caugaagccuuccuuacagg

SEQ ID NO: 104778 - RNA, 21 nt, Artificial Sequence
  Synthetic
ccaugaagccuuccuuacagg

SEQ ID NO: 104779 - RNA, 22 nt, Artificial Sequence
  Synthetic
accaugaagccuuccuuacagg

SEQ ID NO: 104780 - RNA, 23 nt, Artificial Sequence
  Synthetic
aaccaugaagccuuccuuacagg

SEQ ID NO: 104781 - RNA, 18 nt, Artificial Sequence
  Synthetic
aucaaaauuugaaccagg

SEQ ID NO: 104782 - RNA, 19 nt, Artificial Sequence
  Synthetic
aaucaaaauuugaaccagg

SEQ ID NO: 104783 - RNA, 20 nt, Artificial Sequence
  Synthetic
aaaucaaaauuugaaccagg

SEQ ID NO: 104784 - RNA, 22 nt, Artificial Sequence
  Synthetic
ugaaaucaaaauuugaaccagg

SEQ ID NO: 104785 - RNA, 24 nt, Artificial Sequence
  Synthetic
agugaaaucaaaauuugaaccagg

SEQ ID NO: 104786 - RNA, 21 nt, Artificial Sequence
  Synthetic
uaaaaaaaaaaggacaccagg

SEQ ID NO: 104787 - RNA, 22 nt, Artificial Sequence
  Synthetic
uuaaaaaaaaaaggacaccagg

SEQ ID NO: 104788 - RNA, 23 nt, Artificial Sequence
  Synthetic
auuaaaaaaaaaaggacaccagg

SEQ ID NO: 104789 - RNA, 24 nt, Artificial Sequence
  Synthetic
aauuaaaaaaaaaaggacaccagg

SEQ ID NO: 104790 - RNA, 18 nt, Artificial Sequence
  Synthetic
aaaacaacccagaccagg

SEQ ID NO: 104791 - RNA, 20 nt, Artificial Sequence
  Synthetic
agaaaacaacccagaccagg

SEQ ID NO: 104792 - RNA, 21 nt, Artificial Sequence
  Synthetic
aagaaaacaacccagaccagg

SEQ ID NO: 104793 - RNA, 23 nt, Artificial Sequence
  Synthetic
ugaagaaaacaacccagaccagg

SEQ ID NO: 104794 - RNA, 24 nt, Artificial Sequence
  Synthetic
augaagaaaacaacccagaccagg

SEQ ID NO: 104795 - RNA, 18 nt, Artificial Sequence
  Synthetic
cugaaacauucagccagg

SEQ ID NO: 104796 - RNA, 21 nt, Artificial Sequence
  Synthetic
aggcugaaacauucagccagg

SEQ ID NO: 104797 - RNA, 22 nt, Artificial Sequence
  Synthetic
uaggcugaaacauucagccagg

SEQ ID NO: 104798 - RNA, 23 nt, Artificial Sequence
  Synthetic
auaggcugaaacauucagccagg

SEQ ID NO: 104799 - RNA, 24 nt, Artificial Sequence
  Synthetic
aauaggcugaaacauucagccagg

SEQ ID NO: 104800 - RNA, 18 nt, Artificial Sequence
  Synthetic
uuuccauguggagccagg

SEQ ID NO: 104801 - RNA, 19 nt, Artificial Sequence
  Synthetic
uuuuccauguggagccagg

SEQ ID NO: 104802 - RNA, 20 nt, Artificial Sequence
  Synthetic
auuuuccauguggagccagg

SEQ ID NO: 104803 - RNA, 21 nt, Artificial Sequence
  Synthetic
uauuuuccauguggagccagg

SEQ ID NO: 104804 - RNA, 22 nt, Artificial Sequence
  Synthetic
auauuuuccauguggagccagg

SEQ ID NO: 104805 - RNA, 23 nt, Artificial Sequence
  Synthetic
cauauuuuccauguggagccagg

SEQ ID NO: 104806 - RNA, 24 nt, Artificial Sequence
  Synthetic
ccauauuuuccauguggagccagg

SEQ ID NO: 104807 - RNA, 18 nt, Artificial Sequence
  Synthetic
aagcuuucucuagccagg

SEQ ID NO: 104808 - RNA, 20 nt, Artificial Sequence
  Synthetic
ugaagcuuucucuagccagg

SEQ ID NO: 104809 - RNA, 21 nt, Artificial Sequence
  Synthetic
uugaagcuuucucuagccagg

SEQ ID NO: 104810 - RNA, 22 nt, Artificial Sequence
  Synthetic
cuugaagcuuucucuagccagg

SEQ ID NO: 104811 - RNA, 23 nt, Artificial Sequence
  Synthetic
acuugaagcuuucucuagccagg

SEQ ID NO: 104812 - RNA, 24 nt, Artificial Sequence
  Synthetic
aacuugaagcuuucucuagccagg

SEQ ID NO: 104813 - RNA, 18 nt, Artificial Sequence
  Synthetic
agcuauucugcauccagg

SEQ ID NO: 104814 - RNA, 19 nt, Artificial Sequence
  Synthetic
cagcuauucugcauccagg

SEQ ID NO: 104815 - RNA, 21 nt, Artificial Sequence
  Synthetic
ugcagcuauucugcauccagg

SEQ ID NO: 104816 - RNA, 22 nt, Artificial Sequence
  Synthetic
cugcagcuauucugcauccagg

SEQ ID NO: 104817 - RNA, 23 nt, Artificial Sequence
  Synthetic
ucugcagcuauucugcauccagg

SEQ ID NO: 104818 - RNA, 24 nt, Artificial Sequence
  Synthetic
uucugcagcuauucugcauccagg

SEQ ID NO: 104819 - RNA, 19 nt, Artificial Sequence
  Synthetic
agaaacuugccuuuccagg

SEQ ID NO: 104820 - RNA, 21 nt, Artificial Sequence
  Synthetic
agagaaacuugccuuuccagg

SEQ ID NO: 104821 - RNA, 24 nt, Artificial Sequence
  Synthetic
uggagagaaacuugccuuuccagg

SEQ ID NO: 104822 - RNA, 18 nt, Artificial Sequence
  Synthetic
agguugaauuucagcagg

SEQ ID NO: 104823 - RNA, 19 nt, Artificial Sequence
  Synthetic
aagguugaauuucagcagg

SEQ ID NO: 104824 - RNA, 21 nt, Artificial Sequence
  Synthetic
agaagguugaauuucagcagg

SEQ ID NO: 104825 - RNA, 22 nt, Artificial Sequence
  Synthetic
aagaagguugaauuucagcagg

SEQ ID NO: 104826 - RNA, 23 nt, Artificial Sequence
  Synthetic
aaagaagguugaauuucagcagg

SEQ ID NO: 104827 - RNA, 18 nt, Artificial Sequence
  Synthetic
ugccacuggcugagcagg

SEQ ID NO: 104828 - RNA, 20 nt, Artificial Sequence
  Synthetic
ugugccacuggcugagcagg

SEQ ID NO: 104829 - RNA, 21 nt, Artificial Sequence
  Synthetic
cugugccacuggcugagcagg

SEQ ID NO: 104830 - RNA, 22 nt, Artificial Sequence
  Synthetic
acugugccacuggcugagcagg

SEQ ID NO: 104831 - RNA, 24 nt, Artificial Sequence
  Synthetic
agacugugccacuggcugagcagg

SEQ ID NO: 104832 - RNA, 18 nt, Artificial Sequence
  Synthetic
cucuagcggaauagcagg

SEQ ID NO: 104833 - RNA, 20 nt, Artificial Sequence
  Synthetic
ugcucuagcggaauagcagg

SEQ ID NO: 104834 - RNA, 21 nt, Artificial Sequence
  Synthetic
cugcucuagcggaauagcagg

SEQ ID NO: 104835 - RNA, 22 nt, Artificial Sequence
  Synthetic
acugcucuagcggaauagcagg

SEQ ID NO: 104836 - RNA, 23 nt, Artificial Sequence
  Synthetic
cacugcucuagcggaauagcagg

SEQ ID NO: 104837 - RNA, 19 nt, Artificial Sequence
  Synthetic
uggacccuccacuagcagg

SEQ ID NO: 104838 - RNA, 20 nt, Artificial Sequence
  Synthetic
cuggacccuccacuagcagg

SEQ ID NO: 104839 - RNA, 22 nt, Artificial Sequence
  Synthetic
agcuggacccuccacuagcagg

SEQ ID NO: 104840 - RNA, 19 nt, Artificial Sequence
  Synthetic
ugcccuuccugggggcagg

SEQ ID NO: 104841 - RNA, 20 nt, Artificial Sequence
  Synthetic
augcccuuccugggggcagg

SEQ ID NO: 104842 - RNA, 21 nt, Artificial Sequence
  Synthetic
aaugcccuuccugggggcagg

SEQ ID NO: 104843 - RNA, 22 nt, Artificial Sequence
  Synthetic
uaaugcccuuccugggggcagg

SEQ ID NO: 104844 - RNA, 23 nt, Artificial Sequence
  Synthetic
uuaaugcccuuccugggggcagg

SEQ ID NO: 104845 - RNA, 24 nt, Artificial Sequence
  Synthetic
cuuaaugcccuuccugggggcagg

SEQ ID NO: 104846 - RNA, 18 nt, Artificial Sequence
  Synthetic
acuacauuuauuugcagg

SEQ ID NO: 104847 - RNA, 19 nt, Artificial Sequence
  Synthetic
cacuacauuuauuugcagg

SEQ ID NO: 104848 - RNA, 20 nt, Artificial Sequence
  Synthetic
ucacuacauuuauuugcagg

SEQ ID NO: 104849 - RNA, 21 nt, Artificial Sequence
  Synthetic
cucacuacauuuauuugcagg

SEQ ID NO: 104850 - RNA, 22 nt, Artificial Sequence
  Synthetic
ccucacuacauuuauuugcagg

SEQ ID NO: 104851 - RNA, 23 nt, Artificial Sequence
  Synthetic
accucacuacauuuauuugcagg

SEQ ID NO: 104852 - RNA, 24 nt, Artificial Sequence
  Synthetic
uaccucacuacauuuauuugcagg

SEQ ID NO: 104853 - RNA, 18 nt, Artificial Sequence
  Synthetic
aauauugacaacaucagg

SEQ ID NO: 104854 - RNA, 19 nt, Artificial Sequence
  Synthetic
aaauauugacaacaucagg

SEQ ID NO: 104855 - RNA, 21 nt, Artificial Sequence
  Synthetic
ugaaauauugacaacaucagg

SEQ ID NO: 104856 - RNA, 22 nt, Artificial Sequence
  Synthetic
cugaaauauugacaacaucagg

SEQ ID NO: 104857 - RNA, 23 nt, Artificial Sequence
  Synthetic
ucugaaauauugacaacaucagg

SEQ ID NO: 104858 - RNA, 18 nt, Artificial Sequence
  Synthetic
caggcauugaauaucagg

SEQ ID NO: 104859 - RNA, 19 nt, Artificial Sequence
  Synthetic
acaggcauugaauaucagg

SEQ ID NO: 104860 - RNA, 20 nt, Artificial Sequence
  Synthetic
aacaggcauugaauaucagg

SEQ ID NO: 104861 - RNA, 21 nt, Artificial Sequence
  Synthetic
aaacaggcauugaauaucagg

SEQ ID NO: 104862 - RNA, 22 nt, Artificial Sequence
  Synthetic
aaaacaggcauugaauaucagg

SEQ ID NO: 104863 - RNA, 23 nt, Artificial Sequence
  Synthetic
uaaaacaggcauugaauaucagg

SEQ ID NO: 104864 - RNA, 24 nt, Artificial Sequence
  Synthetic
uuaaaacaggcauugaauaucagg

SEQ ID NO: 104865 - RNA, 21 nt, Artificial Sequence
  Synthetic
caauauauuuauagagucagg

SEQ ID NO: 104866 - RNA, 22 nt, Artificial Sequence
  Synthetic
ucaauauauuuauagagucagg

SEQ ID NO: 104867 - RNA, 24 nt, Artificial Sequence
  Synthetic
agucaauauauuuauagagucagg

SEQ ID NO: 104868 - RNA, 18 nt, Artificial Sequence
  Synthetic
acaguucuaagggucagg

SEQ ID NO: 104869 - RNA, 19 nt, Artificial Sequence
  Synthetic
cacaguucuaagggucagg

SEQ ID NO: 104870 - RNA, 20 nt, Artificial Sequence
  Synthetic
ucacaguucuaagggucagg

SEQ ID NO: 104871 - RNA, 21 nt, Artificial Sequence
  Synthetic
uucacaguucuaagggucagg

SEQ ID NO: 104872 - RNA, 23 nt, Artificial Sequence
  Synthetic
uguucacaguucuaagggucagg

SEQ ID NO: 104873 - RNA, 24 nt, Artificial Sequence
  Synthetic
cuguucacaguucuaagggucagg

SEQ ID NO: 104874 - RNA, 19 nt, Artificial Sequence
  Synthetic
ugcucaaaggagggucagg

SEQ ID NO: 104875 - RNA, 20 nt, Artificial Sequence
  Synthetic
uugcucaaaggagggucagg

SEQ ID NO: 104876 - RNA, 21 nt, Artificial Sequence
  Synthetic
auugcucaaaggagggucagg

SEQ ID NO: 104877 - RNA, 22 nt, Artificial Sequence
  Synthetic
uauugcucaaaggagggucagg

SEQ ID NO: 104878 - RNA, 23 nt, Artificial Sequence
  Synthetic
cuauugcucaaaggagggucagg

SEQ ID NO: 104879 - RNA, 24 nt, Artificial Sequence
  Synthetic
acuauugcucaaaggagggucagg

SEQ ID NO: 104880 - RNA, 18 nt, Artificial Sequence
  Synthetic
caccuugcucuauucagg

SEQ ID NO: 104881 - RNA, 19 nt, Artificial Sequence
  Synthetic
ucaccuugcucuauucagg

SEQ ID NO: 104882 - RNA, 20 nt, Artificial Sequence
  Synthetic
aucaccuugcucuauucagg

SEQ ID NO: 104883 - RNA, 21 nt, Artificial Sequence
  Synthetic
aaucaccuugcucuauucagg

SEQ ID NO: 104884 - RNA, 22 nt, Artificial Sequence
  Synthetic
caaucaccuugcucuauucagg

SEQ ID NO: 104885 - RNA, 23 nt, Artificial Sequence
  Synthetic
acaaucaccuugcucuauucagg

SEQ ID NO: 104886 - RNA, 24 nt, Artificial Sequence
  Synthetic
cacaaucaccuugcucuauucagg

SEQ ID NO: 104887 - RNA, 19 nt, Artificial Sequence
  Synthetic
aggcaauucaguuuucagg

SEQ ID NO: 104888 - RNA, 20 nt, Artificial Sequence
  Synthetic
caggcaauucaguuuucagg

SEQ ID NO: 104889 - RNA, 21 nt, Artificial Sequence
  Synthetic
ucaggcaauucaguuuucagg

SEQ ID NO: 104890 - RNA, 22 nt, Artificial Sequence
  Synthetic
uucaggcaauucaguuuucagg

SEQ ID NO: 104891 - RNA, 23 nt, Artificial Sequence
  Synthetic
uuucaggcaauucaguuuucagg

SEQ ID NO: 104892 - RNA, 24 nt, Artificial Sequence
  Synthetic
uuuucaggcaauucaguuuucagg

SEQ ID NO: 104893 - RNA, 18 nt, Artificial Sequence
  Synthetic
ucgaauauuagaaagagg

SEQ ID NO: 104894 - RNA, 19 nt, Artificial Sequence
  Synthetic
uucgaauauuagaaagagg

SEQ ID NO: 104895 - RNA, 20 nt, Artificial Sequence
  Synthetic
auucgaauauuagaaagagg

SEQ ID NO: 104896 - RNA, 21 nt, Artificial Sequence
  Synthetic
aauucgaauauuagaaagagg

SEQ ID NO: 104897 - RNA, 22 nt, Artificial Sequence
  Synthetic
caauucgaauauuagaaagagg

SEQ ID NO: 104898 - RNA, 24 nt, Artificial Sequence
  Synthetic
agcaauucgaauauuagaaagagg

SEQ ID NO: 104899 - RNA, 18 nt, Artificial Sequence
  Synthetic
uaaaaaccugcucagagg

SEQ ID NO: 104900 - RNA, 19 nt, Artificial Sequence
  Synthetic
uuaaaaaccugcucagagg

SEQ ID NO: 104901 - RNA, 20 nt, Artificial Sequence
  Synthetic
cuuaaaaaccugcucagagg

SEQ ID NO: 104902 - RNA, 22 nt, Artificial Sequence
  Synthetic
ugcuuaaaaaccugcucagagg

SEQ ID NO: 104903 - RNA, 24 nt, Artificial Sequence
  Synthetic
ugugcuuaaaaaccugcucagagg

SEQ ID NO: 104904 - RNA, 18 nt, Artificial Sequence
  Synthetic
aucuucaucugucagagg

SEQ ID NO: 104905 - RNA, 21 nt, Artificial Sequence
  Synthetic
uggaucuucaucugucagagg

SEQ ID NO: 104906 - RNA, 22 nt, Artificial Sequence
  Synthetic
uuggaucuucaucugucagagg

SEQ ID NO: 104907 - RNA, 23 nt, Artificial Sequence
  Synthetic
uuuggaucuucaucugucagagg

SEQ ID NO: 104908 - RNA, 24 nt, Artificial Sequence
  Synthetic
cuuuggaucuucaucugucagagg

SEQ ID NO: 104909 - RNA, 18 nt, Artificial Sequence
  Synthetic
acuugagucugggagagg

SEQ ID NO: 104910 - RNA, 20 nt, Artificial Sequence
  Synthetic
agacuugagucugggagagg

SEQ ID NO: 104911 - RNA, 22 nt, Artificial Sequence
  Synthetic
agagacuugagucugggagagg

SEQ ID NO: 104912 - RNA, 24 nt, Artificial Sequence
  Synthetic
ugagagacuugagucugggagagg

SEQ ID NO: 104913 - RNA, 20 nt, Artificial Sequence
  Synthetic
aggacucaaauauugagagg

SEQ ID NO: 104914 - RNA, 22 nt, Artificial Sequence
  Synthetic
ugaggacucaaauauugagagg

SEQ ID NO: 104915 - RNA, 23 nt, Artificial Sequence
  Synthetic
augaggacucaaauauugagagg

SEQ ID NO: 104916 - RNA, 24 nt, Artificial Sequence
  Synthetic
caugaggacucaaauauugagagg

SEQ ID NO: 104917 - RNA, 18 nt, Artificial Sequence
  Synthetic
uuuaaucaagucacgagg

SEQ ID NO: 104918 - RNA, 19 nt, Artificial Sequence
  Synthetic
uuuuaaucaagucacgagg

SEQ ID NO: 104919 - RNA, 21 nt, Artificial Sequence
  Synthetic
uguuuuaaucaagucacgagg

SEQ ID NO: 104920 - RNA, 22 nt, Artificial Sequence
  Synthetic
uuguuuuaaucaagucacgagg

SEQ ID NO: 104921 - RNA, 23 nt, Artificial Sequence
  Synthetic
uuuguuuuaaucaagucacgagg

SEQ ID NO: 104922 - RNA, 24 nt, Artificial Sequence
  Synthetic
uuuuguuuuaaucaagucacgagg

SEQ ID NO: 104923 - RNA, 18 nt, Artificial Sequence
  Synthetic
acacagagauaagcgagg

SEQ ID NO: 104924 - RNA, 19 nt, Artificial Sequence
  Synthetic
aacacagagauaagcgagg

SEQ ID NO: 104925 - RNA, 20 nt, Artificial Sequence
  Synthetic
caacacagagauaagcgagg

SEQ ID NO: 104926 - RNA, 22 nt, Artificial Sequence
  Synthetic
ugcaacacagagauaagcgagg

SEQ ID NO: 104927 - RNA, 23 nt, Artificial Sequence
  Synthetic
cugcaacacagagauaagcgagg

SEQ ID NO: 104928 - RNA, 24 nt, Artificial Sequence
  Synthetic
ucugcaacacagagauaagcgagg

SEQ ID NO: 104929 - RNA, 21 nt, Artificial Sequence
  Synthetic
augaaagacuagagaaggagg

SEQ ID NO: 104930 - RNA, 22 nt, Artificial Sequence
  Synthetic
aaugaaagacuagagaaggagg

SEQ ID NO: 104931 - RNA, 24 nt, Artificial Sequence
  Synthetic
ugaaugaaagacuagagaaggagg

SEQ ID NO: 104932 - RNA, 18 nt, Artificial Sequence
  Synthetic
agcuagguaaggaggagg

SEQ ID NO: 104933 - RNA, 19 nt, Artificial Sequence
  Synthetic
aagcuagguaaggaggagg

SEQ ID NO: 104934 - RNA, 20 nt, Artificial Sequence
  Synthetic
aaagcuagguaaggaggagg

SEQ ID NO: 104935 - RNA, 21 nt, Artificial Sequence
  Synthetic
uaaagcuagguaaggaggagg

SEQ ID NO: 104936 - RNA, 22 nt, Artificial Sequence
  Synthetic
auaaagcuagguaaggaggagg

SEQ ID NO: 104937 - RNA, 23 nt, Artificial Sequence
  Synthetic
aauaaagcuagguaaggaggagg

SEQ ID NO: 104938 - RNA, 24 nt, Artificial Sequence
  Synthetic
caauaaagcuagguaaggaggagg

SEQ ID NO: 104939 - RNA, 21 nt, Artificial Sequence
  Synthetic
aacauaaaaugugggaggagg

SEQ ID NO: 104940 - RNA, 22 nt, Artificial Sequence
  Synthetic
aaacauaaaaugugggaggagg

SEQ ID NO: 104941 - RNA, 24 nt, Artificial Sequence
  Synthetic
agaaacauaaaaugugggaggagg

SEQ ID NO: 104942 - RNA, 21 nt, Artificial Sequence
  Synthetic
agagaacaagaaaguaggagg

SEQ ID NO: 104943 - RNA, 22 nt, Artificial Sequence
  Synthetic
uagagaacaagaaaguaggagg

SEQ ID NO: 104944 - RNA, 24 nt, Artificial Sequence
  Synthetic
aguagagaacaagaaaguaggagg

SEQ ID NO: 104945 - RNA, 18 nt, Artificial Sequence
  Synthetic
aggcccacaagagggagg

SEQ ID NO: 104946 - RNA, 19 nt, Artificial Sequence
  Synthetic
caggcccacaagagggagg

SEQ ID NO: 104947 - RNA, 20 nt, Artificial Sequence
  Synthetic
ccaggcccacaagagggagg

SEQ ID NO: 104948 - RNA, 21 nt, Artificial Sequence
  Synthetic
uccaggcccacaagagggagg

SEQ ID NO: 104949 - RNA, 22 nt, Artificial Sequence
  Synthetic
uuccaggcccacaagagggagg

SEQ ID NO: 104950 - RNA, 24 nt, Artificial Sequence
  Synthetic
uguuccaggcccacaagagggagg

SEQ ID NO: 104951 - RNA, 18 nt, Artificial Sequence
  Synthetic
cauaaagaauuagggagg

SEQ ID NO: 104952 - RNA, 19 nt, Artificial Sequence
  Synthetic
ucauaaagaauuagggagg

SEQ ID NO: 104953 - RNA, 22 nt, Artificial Sequence
  Synthetic
uggucauaaagaauuagggagg

SEQ ID NO: 104954 - RNA, 23 nt, Artificial Sequence
  Synthetic
auggucauaaagaauuagggagg

SEQ ID NO: 104955 - RNA, 24 nt, Artificial Sequence
  Synthetic
aauggucauaaagaauuagggagg

SEQ ID NO: 104956 - RNA, 18 nt, Artificial Sequence
  Synthetic
auaagaucagaauggagg

SEQ ID NO: 104957 - RNA, 19 nt, Artificial Sequence
  Synthetic
cauaagaucagaauggagg

SEQ ID NO: 104958 - RNA, 20 nt, Artificial Sequence
  Synthetic
acauaagaucagaauggagg

SEQ ID NO: 104959 - RNA, 21 nt, Artificial Sequence
  Synthetic
cacauaagaucagaauggagg

SEQ ID NO: 104960 - RNA, 22 nt, Artificial Sequence
  Synthetic
acacauaagaucagaauggagg

SEQ ID NO: 104961 - RNA, 23 nt, Artificial Sequence
  Synthetic
aacacauaagaucagaauggagg

SEQ ID NO: 104962 - RNA, 24 nt, Artificial Sequence
  Synthetic
uaacacauaagaucagaauggagg

SEQ ID NO: 104963 - RNA, 18 nt, Artificial Sequence
  Synthetic
agacauagugccuggagg

SEQ ID NO: 104964 - RNA, 19 nt, Artificial Sequence
  Synthetic
cagacauagugccuggagg

SEQ ID NO: 104965 - RNA, 20 nt, Artificial Sequence
  Synthetic
acagacauagugccuggagg

SEQ ID NO: 104966 - RNA, 21 nt, Artificial Sequence
  Synthetic
uacagacauagugccuggagg

SEQ ID NO: 104967 - RNA, 23 nt, Artificial Sequence
  Synthetic
aguacagacauagugccuggagg

SEQ ID NO: 104968 - RNA, 24 nt, Artificial Sequence
  Synthetic
aaguacagacauagugccuggagg

SEQ ID NO: 104969 - RNA, 18 nt, Artificial Sequence
  Synthetic
aucauucucugcuggagg

SEQ ID NO: 104970 - RNA, 19 nt, Artificial Sequence
  Synthetic
caucauucucugcuggagg

SEQ ID NO: 104971 - RNA, 20 nt, Artificial Sequence
  Synthetic
ucaucauucucugcuggagg

SEQ ID NO: 104972 - RNA, 22 nt, Artificial Sequence
  Synthetic
agucaucauucucugcuggagg

SEQ ID NO: 104973 - RNA, 23 nt, Artificial Sequence
  Synthetic
uagucaucauucucugcuggagg

SEQ ID NO: 104974 - RNA, 24 nt, Artificial Sequence
  Synthetic
cuagucaucauucucugcuggagg

SEQ ID NO: 104975 - RNA, 18 nt, Artificial Sequence
  Synthetic
uuuggaucagaguggagg

SEQ ID NO: 104976 - RNA, 19 nt, Artificial Sequence
  Synthetic
cuuuggaucagaguggagg

SEQ ID NO: 104977 - RNA, 21 nt, Artificial Sequence
  Synthetic
ugcuuuggaucagaguggagg

SEQ ID NO: 104978 - RNA, 24 nt, Artificial Sequence
  Synthetic
uggugcuuuggaucagaguggagg

SEQ ID NO: 104979 - RNA, 18 nt, Artificial Sequence
  Synthetic
uguggcaauaguuggagg

SEQ ID NO: 104980 - RNA, 20 nt, Artificial Sequence
  Synthetic
aguguggcaauaguuggagg

SEQ ID NO: 104981 - RNA, 21 nt, Artificial Sequence
  Synthetic
caguguggcaauaguuggagg

SEQ ID NO: 104982 - RNA, 22 nt, Artificial Sequence
  Synthetic
acaguguggcaauaguuggagg

SEQ ID NO: 104983 - RNA, 23 nt, Artificial Sequence
  Synthetic
aacaguguggcaauaguuggagg

SEQ ID NO: 104984 - RNA, 24 nt, Artificial Sequence
  Synthetic
uaacaguguggcaauaguuggagg

SEQ ID NO: 104985 - RNA, 18 nt, Artificial Sequence
  Synthetic
cugccucccugacugagg

SEQ ID NO: 104986 - RNA, 19 nt, Artificial Sequence
  Synthetic
ucugccucccugacugagg

SEQ ID NO: 104987 - RNA, 20 nt, Artificial Sequence
  Synthetic
aucugccucccugacugagg

SEQ ID NO: 104988 - RNA, 21 nt, Artificial Sequence
  Synthetic
caucugccucccugacugagg

SEQ ID NO: 104989 - RNA, 24 nt, Artificial Sequence
  Synthetic
aggcaucugccucccugacugagg

SEQ ID NO: 104990 - RNA, 18 nt, Artificial Sequence
  Synthetic
uuauggaagaggcugagg

SEQ ID NO: 104991 - RNA, 19 nt, Artificial Sequence
  Synthetic
auuauggaagaggcugagg

SEQ ID NO: 104992 - RNA, 20 nt, Artificial Sequence
  Synthetic
uauuauggaagaggcugagg

SEQ ID NO: 104993 - RNA, 21 nt, Artificial Sequence
  Synthetic
uuauuauggaagaggcugagg

SEQ ID NO: 104994 - RNA, 22 nt, Artificial Sequence
  Synthetic
cuuauuauggaagaggcugagg

SEQ ID NO: 104995 - RNA, 23 nt, Artificial Sequence
  Synthetic
acuuauuauggaagaggcugagg

SEQ ID NO: 104996 - RNA, 24 nt, Artificial Sequence
  Synthetic
uacuuauuauggaagaggcugagg

SEQ ID NO: 104997 - RNA, 18 nt, Artificial Sequence
  Synthetic
aguugacggacagugagg

SEQ ID NO: 104998 - RNA, 19 nt, Artificial Sequence
  Synthetic
uaguugacggacagugagg

SEQ ID NO: 104999 - RNA, 22 nt, Artificial Sequence
  Synthetic
ugguaguugacggacagugagg

SEQ ID NO: 105000 - RNA, 23 nt, Artificial Sequence
  Synthetic
augguaguugacggacagugagg

SEQ ID NO: 105001 - RNA, 24 nt, Artificial Sequence
  Synthetic
aaugguaguugacggacagugagg

SEQ ID NO: 105002 - RNA, 18 nt, Artificial Sequence
  Synthetic
uggucgcuuggauugagg

SEQ ID NO: 105003 - RNA, 19 nt, Artificial Sequence
  Synthetic
auggucgcuuggauugagg

SEQ ID NO: 105004 - RNA, 21 nt, Artificial Sequence
  Synthetic
agauggucgcuuggauugagg

SEQ ID NO: 105005 - RNA, 22 nt, Artificial Sequence
  Synthetic
aagauggucgcuuggauugagg

SEQ ID NO: 105006 - RNA, 23 nt, Artificial Sequence
  Synthetic
aaagauggucgcuuggauugagg

SEQ ID NO: 105007 - RNA, 18 nt, Artificial Sequence
  Synthetic
agaguugagagaaauagg

SEQ ID NO: 105008 - RNA, 20 nt, Artificial Sequence
  Synthetic
ugagaguugagagaaauagg

SEQ ID NO: 105009 - RNA, 21 nt, Artificial Sequence
  Synthetic
augagaguugagagaaauagg

SEQ ID NO: 105010 - RNA, 22 nt, Artificial Sequence
  Synthetic
aaugagaguugagagaaauagg

SEQ ID NO: 105011 - RNA, 23 nt, Artificial Sequence
  Synthetic
caaugagaguugagagaaauagg

SEQ ID NO: 105012 - RNA, 24 nt, Artificial Sequence
  Synthetic
acaaugagaguugagagaaauagg

SEQ ID NO: 105013 - RNA, 18 nt, Artificial Sequence
  Synthetic
uauaucaaauucaauagg

SEQ ID NO: 105014 - RNA, 19 nt, Artificial Sequence
  Synthetic
uuauaucaaauucaauagg

SEQ ID NO: 105015 - RNA, 21 nt, Artificial Sequence
  Synthetic
aguuauaucaaauucaauagg

SEQ ID NO: 105016 - RNA, 22 nt, Artificial Sequence
  Synthetic
uaguuauaucaaauucaauagg

SEQ ID NO: 105017 - RNA, 23 nt, Artificial Sequence
  Synthetic
auaguuauaucaaauucaauagg

SEQ ID NO: 105018 - RNA, 18 nt, Artificial Sequence
  Synthetic
uuugaacauagccauagg

SEQ ID NO: 105019 - RNA, 19 nt, Artificial Sequence
  Synthetic
uuuugaacauagccauagg

SEQ ID NO: 105020 - RNA, 21 nt, Artificial Sequence
  Synthetic
uguuuugaacauagccauagg

SEQ ID NO: 105021 - RNA, 22 nt, Artificial Sequence
  Synthetic
uuguuuugaacauagccauagg

SEQ ID NO: 105022 - RNA, 23 nt, Artificial Sequence
  Synthetic
auuguuuugaacauagccauagg

SEQ ID NO: 105023 - RNA, 24 nt, Artificial Sequence
  Synthetic
cauuguuuugaacauagccauagg

SEQ ID NO: 105024 - RNA, 18 nt, Artificial Sequence
  Synthetic
ccuuguaggagggauagg

SEQ ID NO: 105025 - RNA, 19 nt, Artificial Sequence
  Synthetic
cccuuguaggagggauagg

SEQ ID NO: 105026 - RNA, 20 nt, Artificial Sequence
  Synthetic
ucccuuguaggagggauagg

SEQ ID NO: 105027 - RNA, 21 nt, Artificial Sequence
  Synthetic
uucccuuguaggagggauagg

SEQ ID NO: 105028 - RNA, 22 nt, Artificial Sequence
  Synthetic
uuucccuuguaggagggauagg

SEQ ID NO: 105029 - RNA, 24 nt, Artificial Sequence
  Synthetic
aguuucccuuguaggagggauagg

SEQ ID NO: 105030 - RNA, 18 nt, Artificial Sequence
  Synthetic
auuaagggaggggauagg

SEQ ID NO: 105031 - RNA, 19 nt, Artificial Sequence
  Synthetic
uauuaagggaggggauagg

SEQ ID NO: 105032 - RNA, 20 nt, Artificial Sequence
  Synthetic
auauuaagggaggggauagg

SEQ ID NO: 105033 - RNA, 21 nt, Artificial Sequence
  Synthetic
aauauuaagggaggggauagg

SEQ ID NO: 105034 - RNA, 22 nt, Artificial Sequence
  Synthetic
uaauauuaagggaggggauagg

SEQ ID NO: 105035 - RNA, 23 nt, Artificial Sequence
  Synthetic
uuaauauuaagggaggggauagg

SEQ ID NO: 105036 - RNA, 18 nt, Artificial Sequence
  Synthetic
acccuuaccaucuauagg

SEQ ID NO: 105037 - RNA, 19 nt, Artificial Sequence
  Synthetic
uacccuuaccaucuauagg

SEQ ID NO: 105038 - RNA, 20 nt, Artificial Sequence
  Synthetic
auacccuuaccaucuauagg

SEQ ID NO: 105039 - RNA, 21 nt, Artificial Sequence
  Synthetic
aauacccuuaccaucuauagg

SEQ ID NO: 105040 - RNA, 22 nt, Artificial Sequence
  Synthetic
uaauacccuuaccaucuauagg

SEQ ID NO: 105041 - RNA, 24 nt, Artificial Sequence
  Synthetic
aguaauacccuuaccaucuauagg

SEQ ID NO: 105042 - RNA, 21 nt, Artificial Sequence
  Synthetic
acaccauuuaaaauuuauagg

SEQ ID NO: 105043 - RNA, 22 nt, Artificial Sequence
  Synthetic
cacaccauuuaaaauuuauagg

SEQ ID NO: 105044 - RNA, 23 nt, Artificial Sequence
  Synthetic
ccacaccauuuaaaauuuauagg

SEQ ID NO: 105045 - RNA, 24 nt, Artificial Sequence
  Synthetic
uccacaccauuuaaaauuuauagg

SEQ ID NO: 105046 - RNA, 18 nt, Artificial Sequence
  Synthetic
uauagaaaagcaacuagg

SEQ ID NO: 105047 - RNA, 20 nt, Artificial Sequence
  Synthetic
aguauagaaaagcaacuagg

SEQ ID NO: 105048 - RNA, 21 nt, Artificial Sequence
  Synthetic
uaguauagaaaagcaacuagg

SEQ ID NO: 105049 - RNA, 22 nt, Artificial Sequence
  Synthetic
auaguauagaaaagcaacuagg

SEQ ID NO: 105050 - RNA, 23 nt, Artificial Sequence
  Synthetic
aauaguauagaaaagcaacuagg

SEQ ID NO: 105051 - RNA, 24 nt, Artificial Sequence
  Synthetic
aaauaguauagaaaagcaacuagg

SEQ ID NO: 105052 - RNA, 18 nt, Artificial Sequence
  Synthetic
aaaaaugccuggccuagg

SEQ ID NO: 105053 - RNA, 19 nt, Artificial Sequence
  Synthetic
uaaaaaugccuggccuagg

SEQ ID NO: 105054 - RNA, 20 nt, Artificial Sequence
  Synthetic
uuaaaaaugccuggccuagg

SEQ ID NO: 105055 - RNA, 21 nt, Artificial Sequence
  Synthetic
uuuaaaaaugccuggccuagg

SEQ ID NO: 105056 - RNA, 22 nt, Artificial Sequence
  Synthetic
cuuuaaaaaugccuggccuagg

SEQ ID NO: 105057 - RNA, 23 nt, Artificial Sequence
  Synthetic
ucuuuaaaaaugccuggccuagg

SEQ ID NO: 105058 - RNA, 24 nt, Artificial Sequence
  Synthetic
aucuuuaaaaaugccuggccuagg

SEQ ID NO: 105059 - RNA, 18 nt, Artificial Sequence
  Synthetic
cauuuacuggauccuagg

SEQ ID NO: 105060 - RNA, 19 nt, Artificial Sequence
  Synthetic
ucauuuacuggauccuagg

SEQ ID NO: 105061 - RNA, 20 nt, Artificial Sequence
  Synthetic
aucauuuacuggauccuagg

SEQ ID NO: 105062 - RNA, 21 nt, Artificial Sequence
  Synthetic
caucauuuacuggauccuagg

SEQ ID NO: 105063 - RNA, 23 nt, Artificial Sequence
  Synthetic
agcaucauuuacuggauccuagg

SEQ ID NO: 105064 - RNA, 24 nt, Artificial Sequence
  Synthetic
aagcaucauuuacuggauccuagg

SEQ ID NO: 105065 - RNA, 21 nt, Artificial Sequence
  Synthetic
cgggucaaugcaaaagcuagg

SEQ ID NO: 105066 - RNA, 22 nt, Artificial Sequence
  Synthetic
ucgggucaaugcaaaagcuagg

SEQ ID NO: 105067 - RNA, 23 nt, Artificial Sequence
  Synthetic
uucgggucaaugcaaaagcuagg

SEQ ID NO: 105068 - RNA, 18 nt, Artificial Sequence
  Synthetic
cucuaauaaguaucuagg

SEQ ID NO: 105069 - RNA, 19 nt, Artificial Sequence
  Synthetic
acucuaauaaguaucuagg

SEQ ID NO: 105070 - RNA, 21 nt, Artificial Sequence
  Synthetic
uaagaauuuaacuacucuagg

SEQ ID NO: 105071 - RNA, 22 nt, Artificial Sequence
  Synthetic
cuaagaauuuaacuacucuagg

SEQ ID NO: 105072 - RNA, 23 nt, Artificial Sequence
  Synthetic
ucuaagaauuuaacuacucuagg

SEQ ID NO: 105073 - RNA, 18 nt, Artificial Sequence
  Synthetic
ugacacuuagugucuagg

SEQ ID NO: 105074 - RNA, 19 nt, Artificial Sequence
  Synthetic
augacacuuagugucuagg

SEQ ID NO: 105075 - RNA, 20 nt, Artificial Sequence
  Synthetic
aaugacacuuagugucuagg

SEQ ID NO: 105076 - RNA, 22 nt, Artificial Sequence
  Synthetic
agaaugacacuuagugucuagg

SEQ ID NO: 105077 - RNA, 23 nt, Artificial Sequence
  Synthetic
aagaaugacacuuagugucuagg

SEQ ID NO: 105078 - RNA, 24 nt, Artificial Sequence
  Synthetic
caagaaugacacuuagugucuagg

SEQ ID NO: 105079 - RNA, 18 nt, Artificial Sequence
  Synthetic
acauuucaguuaaguagg

SEQ ID NO: 105080 - RNA, 19 nt, Artificial Sequence
  Synthetic
uacauuucaguuaaguagg

SEQ ID NO: 105081 - RNA, 20 nt, Artificial Sequence
  Synthetic
uuacauuucaguuaaguagg

SEQ ID NO: 105082 - RNA, 21 nt, Artificial Sequence
  Synthetic
auuacauuucaguuaaguagg

SEQ ID NO: 105083 - RNA, 22 nt, Artificial Sequence
  Synthetic
cauuacauuucaguuaaguagg

SEQ ID NO: 105084 - RNA, 23 nt, Artificial Sequence
  Synthetic
acauuacauuucaguuaaguagg

SEQ ID NO: 105085 - RNA, 18 nt, Artificial Sequence
  Synthetic
ugagaauuuuccaguagg

SEQ ID NO: 105086 - RNA, 19 nt, Artificial Sequence
  Synthetic
uugagaauuuuccaguagg

SEQ ID NO: 105087 - RNA, 20 nt, Artificial Sequence
  Synthetic
uuugagaauuuuccaguagg

SEQ ID NO: 105088 - RNA, 21 nt, Artificial Sequence
  Synthetic
cuuugagaauuuuccaguagg

SEQ ID NO: 105089 - RNA, 22 nt, Artificial Sequence
  Synthetic
acuuugagaauuuuccaguagg

SEQ ID NO: 105090 - RNA, 23 nt, Artificial Sequence
  Synthetic
cacuuugagaauuuuccaguagg

SEQ ID NO: 105091 - RNA, 24 nt, Artificial Sequence
  Synthetic
acacuuugagaauuuuccaguagg

SEQ ID NO: 105092 - RNA, 18 nt, Artificial Sequence
  Synthetic
uuguuuucaaauaguagg

SEQ ID NO: 105093 - RNA, 21 nt, Artificial Sequence
  Synthetic
ugguuguuuucaaauaguagg

SEQ ID NO: 105094 - RNA, 22 nt, Artificial Sequence
  Synthetic
augguuguuuucaaauaguagg

SEQ ID NO: 105095 - RNA, 23 nt, Artificial Sequence
  Synthetic
uaugguuguuuucaaauaguagg

SEQ ID NO: 105096 - RNA, 24 nt, Artificial Sequence
  Synthetic
auaugguuguuuucaaauaguagg

SEQ ID NO: 105097 - RNA, 18 nt, Artificial Sequence
  Synthetic
aacuugggcucagguagg

SEQ ID NO: 105098 - RNA, 19 nt, Artificial Sequence
  Synthetic
aaacuugggcucagguagg

SEQ ID NO: 105099 - RNA, 20 nt, Artificial Sequence
  Synthetic
uaaacuugggcucagguagg

SEQ ID NO: 105100 - RNA, 21 nt, Artificial Sequence
  Synthetic
auaaacuugggcucagguagg

SEQ ID NO: 105101 - RNA, 23 nt, Artificial Sequence
  Synthetic
agauaaacuugggcucagguagg

SEQ ID NO: 105102 - RNA, 24 nt, Artificial Sequence
  Synthetic
uagauaaacuugggcucagguagg

SEQ ID NO: 105103 - RNA, 18 nt, Artificial Sequence
  Synthetic
uaacuauugauauguagg

SEQ ID NO: 105104 - RNA, 19 nt, Artificial Sequence
  Synthetic
auaacuauugauauguagg

SEQ ID NO: 105105 - RNA, 20 nt, Artificial Sequence
  Synthetic
uauaacuauugauauguagg

SEQ ID NO: 105106 - RNA, 21 nt, Artificial Sequence
  Synthetic
cuauaacuauugauauguagg

SEQ ID NO: 105107 - RNA, 22 nt, Artificial Sequence
  Synthetic
acuauaacuauugauauguagg

SEQ ID NO: 105108 - RNA, 23 nt, Artificial Sequence
  Synthetic
uacuauaacuauugauauguagg

SEQ ID NO: 105109 - RNA, 24 nt, Artificial Sequence
  Synthetic
uuacuauaacuauugauauguagg

SEQ ID NO: 105110 - RNA, 18 nt, Artificial Sequence
  Synthetic
ccccccuuccacuguagg

SEQ ID NO: 105111 - RNA, 19 nt, Artificial Sequence
  Synthetic
uccccccuuccacuguagg

SEQ ID NO: 105112 - RNA, 20 nt, Artificial Sequence
  Synthetic
cuccccccuuccacuguagg

SEQ ID NO: 105113 - RNA, 21 nt, Artificial Sequence
  Synthetic
ucuccccccuuccacuguagg

SEQ ID NO: 105114 - RNA, 22 nt, Artificial Sequence
  Synthetic
cucuccccccuuccacuguagg

SEQ ID NO: 105115 - RNA, 23 nt, Artificial Sequence
  Synthetic
ucucuccccccuuccacuguagg

SEQ ID NO: 105116 - RNA, 24 nt, Artificial Sequence
  Synthetic
aucucuccccccuuccacuguagg

SEQ ID NO: 105117 - RNA, 19 nt, Artificial Sequence
  Synthetic
ugguaguuucccuuguagg

SEQ ID NO: 105118 - RNA, 22 nt, Artificial Sequence
  Synthetic
uggugguaguuucccuuguagg

SEQ ID NO: 105119 - RNA, 23 nt, Artificial Sequence
  Synthetic
cuggugguaguuucccuuguagg

SEQ ID NO: 105120 - RNA, 24 nt, Artificial Sequence
  Synthetic
ccuggugguaguuucccuuguagg

SEQ ID NO: 105121 - RNA, 21 nt, Artificial Sequence
  Synthetic
uaagaaguuauaaaaauuagg

SEQ ID NO: 105122 - RNA, 23 nt, Artificial Sequence
  Synthetic
aguaagaaguuauaaaaauuagg

SEQ ID NO: 105123 - RNA, 24 nt, Artificial Sequence
  Synthetic
caguaagaaguuauaaaaauuagg

SEQ ID NO: 105124 - RNA, 18 nt, Artificial Sequence
  Synthetic
uccuugauuauacuuagg

SEQ ID NO: 105125 - RNA, 19 nt, Artificial Sequence
  Synthetic
auccuugauuauacuuagg

SEQ ID NO: 105126 - RNA, 20 nt, Artificial Sequence
  Synthetic
uauccuugauuauacuuagg

SEQ ID NO: 105127 - RNA, 21 nt, Artificial Sequence
  Synthetic
auauccuugauuauacuuagg

SEQ ID NO: 105128 - RNA, 22 nt, Artificial Sequence
  Synthetic
uauauccuugauuauacuuagg

SEQ ID NO: 105129 - RNA, 23 nt, Artificial Sequence
  Synthetic
uuauauccuugauuauacuuagg

SEQ ID NO: 105130 - RNA, 24 nt, Artificial Sequence
  Synthetic
uuuauauccuugauuauacuuagg

SEQ ID NO: 105131 - RNA, 18 nt, Artificial Sequence
  Synthetic
uagguguaaguucuuagg

SEQ ID NO: 105132 - RNA, 19 nt, Artificial Sequence
  Synthetic
auagguguaaguucuuagg

SEQ ID NO: 105133 - RNA, 20 nt, Artificial Sequence
  Synthetic
aauagguguaaguucuuagg

SEQ ID NO: 105134 - RNA, 21 nt, Artificial Sequence
  Synthetic
uaauagguguaaguucuuagg

SEQ ID NO: 105135 - RNA, 22 nt, Artificial Sequence
  Synthetic
cuaauagguguaaguucuuagg

SEQ ID NO: 105136 - RNA, 23 nt, Artificial Sequence
  Synthetic
ucuaauagguguaaguucuuagg

SEQ ID NO: 105137 - RNA, 18 nt, Artificial Sequence
  Synthetic
agggcgaaguguguuagg

SEQ ID NO: 105138 - RNA, 19 nt, Artificial Sequence
  Synthetic
uagggcgaaguguguuagg

SEQ ID NO: 105139 - RNA, 20 nt, Artificial Sequence
  Synthetic
uuagggcgaaguguguuagg

SEQ ID NO: 105140 - RNA, 23 nt, Artificial Sequence
  Synthetic
agguuagggcgaaguguguuagg

SEQ ID NO: 105141 - RNA, 24 nt, Artificial Sequence
  Synthetic
aagguuagggcgaaguguguuagg

SEQ ID NO: 105142 - RNA, 18 nt, Artificial Sequence
  Synthetic
aaacuucccaacuuuagg

SEQ ID NO: 105143 - RNA, 19 nt, Artificial Sequence
  Synthetic
aaaacuucccaacuuuagg

SEQ ID NO: 105144 - RNA, 20 nt, Artificial Sequence
  Synthetic
uaaaacuucccaacuuuagg

SEQ ID NO: 105145 - RNA, 21 nt, Artificial Sequence
  Synthetic
uuaaaacuucccaacuuuagg

SEQ ID NO: 105146 - RNA, 22 nt, Artificial Sequence
  Synthetic
auuaaaacuucccaacuuuagg

SEQ ID NO: 105147 - RNA, 23 nt, Artificial Sequence
  Synthetic
aauuaaaacuucccaacuuuagg

SEQ ID NO: 105148 - RNA, 24 nt, Artificial Sequence
  Synthetic
caauuaaaacuucccaacuuuagg

SEQ ID NO: 105149 - RNA, 18 nt, Artificial Sequence
  Synthetic
ugaacaaugaauaaacgg

SEQ ID NO: 105150 - RNA, 19 nt, Artificial Sequence
  Synthetic
augaacaaugaauaaacgg

SEQ ID NO: 105151 - RNA, 20 nt, Artificial Sequence
  Synthetic
aaugaacaaugaauaaacgg

SEQ ID NO: 105152 - RNA, 21 nt, Artificial Sequence
  Synthetic
uaaugaacaaugaauaaacgg

SEQ ID NO: 105153 - RNA, 23 nt, Artificial Sequence
  Synthetic
aguaaugaacaaugaauaaacgg

SEQ ID NO: 105154 - RNA, 24 nt, Artificial Sequence
  Synthetic
aaguaaugaacaaugaauaaacgg

SEQ ID NO: 105155 - RNA, 19 nt, Artificial Sequence
  Synthetic
agaaauuuguaaauaacgg

SEQ ID NO: 105156 - RNA, 20 nt, Artificial Sequence
  Synthetic
cagaaauuuguaaauaacgg

SEQ ID NO: 105157 - RNA, 21 nt, Artificial Sequence
  Synthetic
ucagaaauuuguaaauaacgg

SEQ ID NO: 105158 - RNA, 22 nt, Artificial Sequence
  Synthetic
aucagaaauuuguaaauaacgg

SEQ ID NO: 105159 - RNA, 23 nt, Artificial Sequence
  Synthetic
caucagaaauuuguaaauaacgg

SEQ ID NO: 105160 - RNA, 24 nt, Artificial Sequence
  Synthetic
ucaucagaaauuuguaaauaacgg

SEQ ID NO: 105161 - RNA, 18 nt, Artificial Sequence
  Synthetic
ucagagccgcuuuaacgg

SEQ ID NO: 105162 - RNA, 19 nt, Artificial Sequence
  Synthetic
uucagagccgcuuuaacgg

SEQ ID NO: 105163 - RNA, 20 nt, Artificial Sequence
  Synthetic
uuucagagccgcuuuaacgg

SEQ ID NO: 105164 - RNA, 21 nt, Artificial Sequence
  Synthetic
auuucagagccgcuuuaacgg

SEQ ID NO: 105165 - RNA, 22 nt, Artificial Sequence
  Synthetic
uauuucagagccgcuuuaacgg

SEQ ID NO: 105166 - RNA, 24 nt, Artificial Sequence
  Synthetic
uguauuucagagccgcuuuaacgg

SEQ ID NO: 105167 - RNA, 18 nt, Artificial Sequence
  Synthetic
ugugguauuaaaacacgg

SEQ ID NO: 105168 - RNA, 19 nt, Artificial Sequence
  Synthetic
cugugguauuaaaacacgg

SEQ ID NO: 105169 - RNA, 20 nt, Artificial Sequence
  Synthetic
ucugugguauuaaaacacgg

SEQ ID NO: 105170 - RNA, 22 nt, Artificial Sequence
  Synthetic
ugucugugguauuaaaacacgg

SEQ ID NO: 105171 - RNA, 23 nt, Artificial Sequence
  Synthetic
augucugugguauuaaaacacgg

SEQ ID NO: 105172 - RNA, 24 nt, Artificial Sequence
  Synthetic
caugucugugguauuaaaacacgg

SEQ ID NO: 105173 - RNA, 18 nt, Artificial Sequence
  Synthetic
cugaguacgugaacacgg

SEQ ID NO: 105174 - RNA, 20 nt, Artificial Sequence
  Synthetic
agcugaguacgugaacacgg

SEQ ID NO: 105175 - RNA, 21 nt, Artificial Sequence
  Synthetic
cagcugaguacgugaacacgg

SEQ ID NO: 105176 - RNA, 22 nt, Artificial Sequence
  Synthetic
ucagcugaguacgugaacacgg

SEQ ID NO: 105177 - RNA, 23 nt, Artificial Sequence
  Synthetic
aucagcugaguacgugaacacgg

SEQ ID NO: 105178 - RNA, 24 nt, Artificial Sequence
  Synthetic
uaucagcugaguacgugaacacgg

SEQ ID NO: 105179 - RNA, 18 nt, Artificial Sequence
  Synthetic
ucaguaaaguggggacgg

SEQ ID NO: 105180 - RNA, 19 nt, Artificial Sequence
  Synthetic
aucaguaaaguggggacgg

SEQ ID NO: 105181 - RNA, 20 nt, Artificial Sequence
  Synthetic
uaucaguaaaguggggacgg

SEQ ID NO: 105182 - RNA, 21 nt, Artificial Sequence
  Synthetic
auaucaguaaaguggggacgg

SEQ ID NO: 105183 - RNA, 22 nt, Artificial Sequence
  Synthetic
cauaucaguaaaguggggacgg

SEQ ID NO: 105184 - RNA, 23 nt, Artificial Sequence
  Synthetic
ucauaucaguaaaguggggacgg

SEQ ID NO: 105185 - RNA, 24 nt, Artificial Sequence
  Synthetic
uucauaucaguaaaguggggacgg

SEQ ID NO: 105186 - RNA, 18 nt, Artificial Sequence
  Synthetic
cuuccauaacagauacgg

SEQ ID NO: 105187 - RNA, 19 nt, Artificial Sequence
  Synthetic
acuuccauaacagauacgg

SEQ ID NO: 105188 - RNA, 20 nt, Artificial Sequence
  Synthetic
cacuuccauaacagauacgg

SEQ ID NO: 105189 - RNA, 22 nt, Artificial Sequence
  Synthetic
agcacuuccauaacagauacgg

SEQ ID NO: 105190 - RNA, 23 nt, Artificial Sequence
  Synthetic
uagcacuuccauaacagauacgg

SEQ ID NO: 105191 - RNA, 24 nt, Artificial Sequence
  Synthetic
uuagcacuuccauaacagauacgg

SEQ ID NO: 105192 - RNA, 18 nt, Artificial Sequence
  Synthetic
agcuucuuauuguuacgg

SEQ ID NO: 105193 - RNA, 19 nt, Artificial Sequence
  Synthetic
aagcuucuuauuguuacgg

SEQ ID NO: 105194 - RNA, 20 nt, Artificial Sequence
  Synthetic
aaagcuucuuauuguuacgg

SEQ ID NO: 105195 - RNA, 21 nt, Artificial Sequence
  Synthetic
uaaagcuucuuauuguuacgg

SEQ ID NO: 105196 - RNA, 22 nt, Artificial Sequence
  Synthetic
cuaaagcuucuuauuguuacgg

SEQ ID NO: 105197 - RNA, 24 nt, Artificial Sequence
  Synthetic
cgcuaaagcuucuuauuguuacgg

SEQ ID NO: 105198 - RNA, 18 nt, Artificial Sequence
  Synthetic
acucuguaucuugagcgg

SEQ ID NO: 105199 - RNA, 19 nt, Artificial Sequence
  Synthetic
aacucuguaucuugagcgg

SEQ ID NO: 105200 - RNA, 21 nt, Artificial Sequence
  Synthetic
agaacucuguaucuugagcgg

SEQ ID NO: 105201 - RNA, 22 nt, Artificial Sequence
  Synthetic
aagaacucuguaucuugagcgg

SEQ ID NO: 105202 - RNA, 23 nt, Artificial Sequence
  Synthetic
aaagaacucuguaucuugagcgg

SEQ ID NO: 105203 - RNA, 24 nt, Artificial Sequence
  Synthetic
uaaagaacucuguaucuugagcgg

SEQ ID NO: 105204 - RNA, 19 nt, Artificial Sequence
  Synthetic
agccuuccauuuugagcgg

SEQ ID NO: 105205 - RNA, 20 nt, Artificial Sequence
  Synthetic
aagccuuccauuuugagcgg

SEQ ID NO: 105206 - RNA, 22 nt, Artificial Sequence
  Synthetic
ugaagccuuccauuuugagcgg

SEQ ID NO: 105207 - RNA, 23 nt, Artificial Sequence
  Synthetic
uugaagccuuccauuuugagcgg

SEQ ID NO: 105208 - RNA, 18 nt, Artificial Sequence
  Synthetic
aagauucaagcuaugcgg

SEQ ID NO: 105209 - RNA, 19 nt, Artificial Sequence
  Synthetic
uaagauucaagcuaugcgg

SEQ ID NO: 105210 - RNA, 20 nt, Artificial Sequence
  Synthetic
auaagauucaagcuaugcgg

SEQ ID NO: 105211 - RNA, 22 nt, Artificial Sequence
  Synthetic
ugauaagauucaagcuaugcgg

SEQ ID NO: 105212 - RNA, 23 nt, Artificial Sequence
  Synthetic
uugauaagauucaagcuaugcgg

SEQ ID NO: 105213 - RNA, 24 nt, Artificial Sequence
  Synthetic
auugauaagauucaagcuaugcgg

SEQ ID NO: 105214 - RNA, 18 nt, Artificial Sequence
  Synthetic
auuacuguaaacuaucgg

SEQ ID NO: 105215 - RNA, 19 nt, Artificial Sequence
  Synthetic
aauuacuguaaacuaucgg

SEQ ID NO: 105216 - RNA, 20 nt, Artificial Sequence
  Synthetic
uaauuacuguaaacuaucgg

SEQ ID NO: 105217 - RNA, 21 nt, Artificial Sequence
  Synthetic
cuaauuacuguaaacuaucgg

SEQ ID NO: 105218 - RNA, 22 nt, Artificial Sequence
  Synthetic
acuaauuacuguaaacuaucgg

SEQ ID NO: 105219 - RNA, 23 nt, Artificial Sequence
  Synthetic
uacuaauuacuguaaacuaucgg

SEQ ID NO: 105220 - RNA, 24 nt, Artificial Sequence
  Synthetic
uuacuaauuacuguaaacuaucgg

SEQ ID NO: 105221 - RNA, 18 nt, Artificial Sequence
  Synthetic
augugaauuauagcucgg

SEQ ID NO: 105222 - RNA, 19 nt, Artificial Sequence
  Synthetic
uaugugaauuauagcucgg

SEQ ID NO: 105223 - RNA, 22 nt, Artificial Sequence
  Synthetic
ugguaugugaauuauagcucgg

SEQ ID NO: 105224 - RNA, 23 nt, Artificial Sequence
  Synthetic
augguaugugaauuauagcucgg

SEQ ID NO: 105225 - RNA, 24 nt, Artificial Sequence
  Synthetic
aaugguaugugaauuauagcucgg

SEQ ID NO: 105226 - RNA, 18 nt, Artificial Sequence
  Synthetic
uguaucuucuguggucgg

SEQ ID NO: 105227 - RNA, 19 nt, Artificial Sequence
  Synthetic
auguaucuucuguggucgg

SEQ ID NO: 105228 - RNA, 20 nt, Artificial Sequence
  Synthetic
uauguaucuucuguggucgg

SEQ ID NO: 105229 - RNA, 21 nt, Artificial Sequence
  Synthetic
auauguaucuucuguggucgg

SEQ ID NO: 105230 - RNA, 23 nt, Artificial Sequence
  Synthetic
ugauauguaucuucuguggucgg

SEQ ID NO: 105231 - RNA, 24 nt, Artificial Sequence
  Synthetic
uugauauguaucuucuguggucgg

SEQ ID NO: 105232 - RNA, 18 nt, Artificial Sequence
  Synthetic
aacaaaacauugcuucgg

SEQ ID NO: 105233 - RNA, 19 nt, Artificial Sequence
  Synthetic
aaacaaaacauugcuucgg

SEQ ID NO: 105234 - RNA, 20 nt, Artificial Sequence
  Synthetic
aaaacaaaacauugcuucgg

SEQ ID NO: 105235 - RNA, 21 nt, Artificial Sequence
  Synthetic
uaaaacaaaacauugcuucgg

SEQ ID NO: 105236 - RNA, 22 nt, Artificial Sequence
  Synthetic
cuaaaacaaaacauugcuucgg

SEQ ID NO: 105237 - RNA, 24 nt, Artificial Sequence
  Synthetic
agcuaaaacaaaacauugcuucgg

SEQ ID NO: 105238 - RNA, 18 nt, Artificial Sequence
  Synthetic
acugacauacuucuucgg

SEQ ID NO: 105239 - RNA, 19 nt, Artificial Sequence
  Synthetic
uacugacauacuucuucgg

SEQ ID NO: 105240 - RNA, 20 nt, Artificial Sequence
  Synthetic
auacugacauacuucuucgg

SEQ ID NO: 105241 - RNA, 21 nt, Artificial Sequence
  Synthetic
cauacugacauacuucuucgg

SEQ ID NO: 105242 - RNA, 22 nt, Artificial Sequence
  Synthetic
acauacugacauacuucuucgg

SEQ ID NO: 105243 - RNA, 24 nt, Artificial Sequence
  Synthetic
ugacauacugacauacuucuucgg

SEQ ID NO: 105244 - RNA, 18 nt, Artificial Sequence
  Synthetic
caugcagaaagaaaaggg

SEQ ID NO: 105245 - RNA, 19 nt, Artificial Sequence
  Synthetic
acaugcagaaagaaaaggg

SEQ ID NO: 105246 - RNA, 20 nt, Artificial Sequence
  Synthetic
aacaugcagaaagaaaaggg

SEQ ID NO: 105247 - RNA, 21 nt, Artificial Sequence
  Synthetic
aaacaugcagaaagaaaaggg

SEQ ID NO: 105248 - RNA, 22 nt, Artificial Sequence
  Synthetic
uaaacaugcagaaagaaaaggg

SEQ ID NO: 105249 - RNA, 23 nt, Artificial Sequence
  Synthetic
uuaaacaugcagaaagaaaaggg

SEQ ID NO: 105250 - RNA, 24 nt, Artificial Sequence
  Synthetic
cuuaaacaugcagaaagaaaaggg

SEQ ID NO: 105251 - RNA, 18 nt, Artificial Sequence
  Synthetic
cuagguuguaacaaaggg

SEQ ID NO: 105252 - RNA, 19 nt, Artificial Sequence
  Synthetic
acuagguuguaacaaaggg

SEQ ID NO: 105253 - RNA, 23 nt, Artificial Sequence
  Synthetic
agggacuagguuguaacaaaggg

SEQ ID NO: 105254 - RNA, 24 nt, Artificial Sequence
  Synthetic
uagggacuagguuguaacaaaggg

SEQ ID NO: 105255 - RNA, 19 nt, Artificial Sequence
  Synthetic
ugaaauccuccccaaaggg

SEQ ID NO: 105256 - RNA, 20 nt, Artificial Sequence
  Synthetic
cugaaauccuccccaaaggg

SEQ ID NO: 105257 - RNA, 21 nt, Artificial Sequence
  Synthetic
ucugaaauccuccccaaaggg

SEQ ID NO: 105258 - RNA, 22 nt, Artificial Sequence
  Synthetic
aucugaaauccuccccaaaggg

SEQ ID NO: 105259 - RNA, 23 nt, Artificial Sequence
  Synthetic
caucugaaauccuccccaaaggg

SEQ ID NO: 105260 - RNA, 24 nt, Artificial Sequence
  Synthetic
ucaucugaaauccuccccaaaggg

SEQ ID NO: 105261 - RNA, 18 nt, Artificial Sequence
  Synthetic
uauaccuaaaucaaaggg

SEQ ID NO: 105262 - RNA, 19 nt, Artificial Sequence
  Synthetic
auauaccuaaaucaaaggg

SEQ ID NO: 105263 - RNA, 20 nt, Artificial Sequence
  Synthetic
uauauaccuaaaucaaaggg

SEQ ID NO: 105264 - RNA, 21 nt, Artificial Sequence
  Synthetic
cuauauaccuaaaucaaaggg

SEQ ID NO: 105265 - RNA, 22 nt, Artificial Sequence
  Synthetic
acuauauaccuaaaucaaaggg

SEQ ID NO: 105266 - RNA, 24 nt, Artificial Sequence
  Synthetic
agacuauauaccuaaaucaaaggg

SEQ ID NO: 105267 - RNA, 21 nt, Artificial Sequence
  Synthetic
aaggaggggaaagagaaaggg

SEQ ID NO: 105268 - RNA, 22 nt, Artificial Sequence
  Synthetic
aaaggaggggaaagagaaaggg

SEQ ID NO: 105269 - RNA, 23 nt, Artificial Sequence
  Synthetic
caaaggaggggaaagagaaaggg

SEQ ID NO: 105270 - RNA, 24 nt, Artificial Sequence
  Synthetic
ccaaaggaggggaaagagaaaggg

SEQ ID NO: 105271 - RNA, 21 nt, Artificial Sequence
  Synthetic
ugggaaggaaaagggaaaggg

SEQ ID NO: 105272 - RNA, 22 nt, Artificial Sequence
  Synthetic
cugggaaggaaaagggaaaggg

SEQ ID NO: 105273 - RNA, 23 nt, Artificial Sequence
  Synthetic
ucugggaaggaaaagggaaaggg

SEQ ID NO: 105274 - RNA, 24 nt, Artificial Sequence
  Synthetic
aucugggaaggaaaagggaaaggg

SEQ ID NO: 105275 - RNA, 18 nt, Artificial Sequence
  Synthetic
agugguagggggaaaggg

SEQ ID NO: 105276 - RNA, 19 nt, Artificial Sequence
  Synthetic
uagugguagggggaaaggg

SEQ ID NO: 105277 - RNA, 23 nt, Artificial Sequence
  Synthetic
aggguagugguagggggaaaggg

SEQ ID NO: 105278 - RNA, 24 nt, Artificial Sequence
  Synthetic
aaggguagugguagggggaaaggg

SEQ ID NO: 105279 - RNA, 18 nt, Artificial Sequence
  Synthetic
agcccccuaccccaaggg

SEQ ID NO: 105280 - RNA, 19 nt, Artificial Sequence
  Synthetic
uagcccccuaccccaaggg

SEQ ID NO: 105281 - RNA, 20 nt, Artificial Sequence
  Synthetic
auagcccccuaccccaaggg

SEQ ID NO: 105282 - RNA, 22 nt, Artificial Sequence
  Synthetic
agauagcccccuaccccaaggg

SEQ ID NO: 105283 - RNA, 23 nt, Artificial Sequence
  Synthetic
cagauagcccccuaccccaaggg

SEQ ID NO: 105284 - RNA, 18 nt, Artificial Sequence
  Synthetic
aagcaguggugccaaggg

SEQ ID NO: 105285 - RNA, 19 nt, Artificial Sequence
  Synthetic
uaagcaguggugccaaggg

SEQ ID NO: 105286 - RNA, 20 nt, Artificial Sequence
  Synthetic
auaagcaguggugccaaggg

SEQ ID NO: 105287 - RNA, 22 nt, Artificial Sequence
  Synthetic
agauaagcaguggugccaaggg

SEQ ID NO: 105288 - RNA, 20 nt, Artificial Sequence
  Synthetic
uggaaucuagugagcaaggg

SEQ ID NO: 105289 - RNA, 22 nt, Artificial Sequence
  Synthetic
aguggaaucuagugagcaaggg

SEQ ID NO: 105290 - RNA, 24 nt, Artificial Sequence
  Synthetic
ugaguggaaucuagugagcaaggg

SEQ ID NO: 105291 - RNA, 20 nt, Artificial Sequence
  Synthetic
cggcguuuacuaugcaaggg

SEQ ID NO: 105292 - RNA, 21 nt, Artificial Sequence
  Synthetic
acggcguuuacuaugcaaggg

SEQ ID NO: 105293 - RNA, 22 nt, Artificial Sequence
  Synthetic
aacggcguuuacuaugcaaggg

SEQ ID NO: 105294 - RNA, 23 nt, Artificial Sequence
  Synthetic
aaacggcguuuacuaugcaaggg

SEQ ID NO: 105295 - RNA, 18 nt, Artificial Sequence
  Synthetic
cugcacacagcagaaggg

SEQ ID NO: 105296 - RNA, 20 nt, Artificial Sequence
  Synthetic
ugcugcacacagcagaaggg

SEQ ID NO: 105297 - RNA, 21 nt, Artificial Sequence
  Synthetic
uugcugcacacagcagaaggg

SEQ ID NO: 105298 - RNA, 22 nt, Artificial Sequence
  Synthetic
cuugcugcacacagcagaaggg

SEQ ID NO: 105299 - RNA, 23 nt, Artificial Sequence
  Synthetic
ccuugcugcacacagcagaaggg

SEQ ID NO: 105300 - RNA, 24 nt, Artificial Sequence
  Synthetic
uccuugcugcacacagcagaaggg

SEQ ID NO: 105301 - RNA, 18 nt, Artificial Sequence
  Synthetic
cccuguacuagggaaggg

SEQ ID NO: 105302 - RNA, 24 nt, Artificial Sequence
  Synthetic
ugggggcccuguacuagggaaggg

SEQ ID NO: 105303 - RNA, 18 nt, Artificial Sequence
  Synthetic
auguccuuuaaauaaggg

SEQ ID NO: 105304 - RNA, 19 nt, Artificial Sequence
  Synthetic
cauguccuuuaaauaaggg

SEQ ID NO: 105305 - RNA, 21 nt, Artificial Sequence
  Synthetic
ugcauguccuuuaaauaaggg

SEQ ID NO: 105306 - RNA, 22 nt, Artificial Sequence
  Synthetic
augcauguccuuuaaauaaggg

SEQ ID NO: 105307 - RNA, 23 nt, Artificial Sequence
  Synthetic
uaugcauguccuuuaaauaaggg

SEQ ID NO: 105308 - RNA, 24 nt, Artificial Sequence
  Synthetic
uuaugcauguccuuuaaauaaggg

SEQ ID NO: 105309 - RNA, 21 nt, Artificial Sequence
  Synthetic
auaauuauuuuuaaauaaggg

SEQ ID NO: 105310 - RNA, 22 nt, Artificial Sequence
  Synthetic
aauaauuauuuuuaaauaaggg

SEQ ID NO: 105311 - RNA, 24 nt, Artificial Sequence
  Synthetic
ugaauaauuauuuuuaaauaaggg

SEQ ID NO: 105312 - RNA, 21 nt, Artificial Sequence
  Synthetic
caaggccugaaaggcuaaggg

SEQ ID NO: 105313 - RNA, 22 nt, Artificial Sequence
  Synthetic
ucaaggccugaaaggcuaaggg

SEQ ID NO: 105314 - RNA, 23 nt, Artificial Sequence
  Synthetic
cucaaggccugaaaggcuaaggg

SEQ ID NO: 105315 - RNA, 24 nt, Artificial Sequence
  Synthetic
ccucaaggccugaaaggcuaaggg

SEQ ID NO: 105316 - RNA, 18 nt, Artificial Sequence
  Synthetic
cuuucuucucaguaaggg

SEQ ID NO: 105317 - RNA, 19 nt, Artificial Sequence
  Synthetic
ucuuucuucucaguaaggg

SEQ ID NO: 105318 - RNA, 20 nt, Artificial Sequence
  Synthetic
cucuuucuucucaguaaggg

SEQ ID NO: 105319 - RNA, 21 nt, Artificial Sequence
  Synthetic
ucucuuucuucucaguaaggg

SEQ ID NO: 105320 - RNA, 22 nt, Artificial Sequence
  Synthetic
uucucuuucuucucaguaaggg

SEQ ID NO: 105321 - RNA, 24 nt, Artificial Sequence
  Synthetic
aguucucuuucuucucaguaaggg

SEQ ID NO: 105322 - RNA, 18 nt, Artificial Sequence
  Synthetic
uuacauguggccacaggg

SEQ ID NO: 105323 - RNA, 20 nt, Artificial Sequence
  Synthetic
uguuacauguggccacaggg

SEQ ID NO: 105324 - RNA, 21 nt, Artificial Sequence
  Synthetic
cuguuacauguggccacaggg

SEQ ID NO: 105325 - RNA, 23 nt, Artificial Sequence
  Synthetic
ugcuguuacauguggccacaggg

SEQ ID NO: 105326 - RNA, 24 nt, Artificial Sequence
  Synthetic
cugcuguuacauguggccacaggg

SEQ ID NO: 105327 - RNA, 18 nt, Artificial Sequence
  Synthetic
uaauggugguucacaggg

SEQ ID NO: 105328 - RNA, 19 nt, Artificial Sequence
  Synthetic
uuaauggugguucacaggg

SEQ ID NO: 105329 - RNA, 20 nt, Artificial Sequence
  Synthetic
uuuaauggugguucacaggg

SEQ ID NO: 105330 - RNA, 21 nt, Artificial Sequence
  Synthetic
auuuaauggugguucacaggg

SEQ ID NO: 105331 - RNA, 22 nt, Artificial Sequence
  Synthetic
uauuuaauggugguucacaggg

SEQ ID NO: 105332 - RNA, 23 nt, Artificial Sequence
  Synthetic
cuauuuaauggugguucacaggg

SEQ ID NO: 105333 - RNA, 21 nt, Artificial Sequence
  Synthetic
cauuuuuauuuuuauacaggg

SEQ ID NO: 105334 - RNA, 22 nt, Artificial Sequence
  Synthetic
acauuuuuauuuuuauacaggg

SEQ ID NO: 105335 - RNA, 23 nt, Artificial Sequence
  Synthetic
uacauuuuuauuuuuauacaggg

SEQ ID NO: 105336 - RNA, 24 nt, Artificial Sequence
  Synthetic
cuacauuuuuauuuuuauacaggg

SEQ ID NO: 105337 - RNA, 18 nt, Artificial Sequence
  Synthetic
cauaaccccaggccaggg

SEQ ID NO: 105338 - RNA, 19 nt, Artificial Sequence
  Synthetic
ccauaaccccaggccaggg

SEQ ID NO: 105339 - RNA, 20 nt, Artificial Sequence
  Synthetic
accauaaccccaggccaggg

SEQ ID NO: 105340 - RNA, 21 nt, Artificial Sequence
  Synthetic
aaccauaaccccaggccaggg

SEQ ID NO: 105341 - RNA, 23 nt, Artificial Sequence
  Synthetic
agaaccauaaccccaggccaggg

SEQ ID NO: 105342 - RNA, 18 nt, Artificial Sequence
  Synthetic
uuggaggggagagcaggg

SEQ ID NO: 105343 - RNA, 19 nt, Artificial Sequence
  Synthetic
uuuggaggggagagcaggg

SEQ ID NO: 105344 - RNA, 20 nt, Artificial Sequence
  Synthetic
cuuuggaggggagagcaggg

SEQ ID NO: 105345 - RNA, 21 nt, Artificial Sequence
  Synthetic
acuuuggaggggagagcaggg

SEQ ID NO: 105346 - RNA, 23 nt, Artificial Sequence
  Synthetic
ugacuuuggaggggagagcaggg

SEQ ID NO: 105347 - RNA, 24 nt, Artificial Sequence
  Synthetic
augacuuuggaggggagagcaggg

SEQ ID NO: 105348 - RNA, 21 nt, Artificial Sequence
  Synthetic
uggaucagaguggaggcaggg

SEQ ID NO: 105349 - RNA, 22 nt, Artificial Sequence
  Synthetic
uuggaucagaguggaggcaggg

SEQ ID NO: 105350 - RNA, 23 nt, Artificial Sequence
  Synthetic
uuuggaucagaguggaggcaggg

SEQ ID NO: 105351 - RNA, 24 nt, Artificial Sequence
  Synthetic
cuuuggaucagaguggaggcaggg

SEQ ID NO: 105352 - RNA, 18 nt, Artificial Sequence
  Synthetic
auucccuuuugcucaggg

SEQ ID NO: 105353 - RNA, 20 nt, Artificial Sequence
  Synthetic
cgauucccuuuugcucaggg

SEQ ID NO: 105354 - RNA, 21 nt, Artificial Sequence
  Synthetic
acgauucccuuuugcucaggg

SEQ ID NO: 105355 - RNA, 22 nt, Artificial Sequence
  Synthetic
aacgauucccuuuugcucaggg

SEQ ID NO: 105356 - RNA, 24 nt, Artificial Sequence
  Synthetic
agaacgauucccuuuugcucaggg

SEQ ID NO: 105357 - RNA, 18 nt, Artificial Sequence
  Synthetic
auucaccaucagucaggg

SEQ ID NO: 105358 - RNA, 19 nt, Artificial Sequence
  Synthetic
uauucaccaucagucaggg

SEQ ID NO: 105359 - RNA, 20 nt, Artificial Sequence
  Synthetic
cuauucaccaucagucaggg

SEQ ID NO: 105360 - RNA, 21 nt, Artificial Sequence
  Synthetic
ucuauucaccaucagucaggg

SEQ ID NO: 105361 - RNA, 22 nt, Artificial Sequence
  Synthetic
aucuauucaccaucagucaggg

SEQ ID NO: 105362 - RNA, 23 nt, Artificial Sequence
  Synthetic
aaucuauucaccaucagucaggg

SEQ ID NO: 105363 - RNA, 24 nt, Artificial Sequence
  Synthetic
uaaucuauucaccaucagucaggg

SEQ ID NO: 105364 - RNA, 21 nt, Artificial Sequence
  Synthetic
aaauugaucacagaaagaggg

SEQ ID NO: 105365 - RNA, 22 nt, Artificial Sequence
  Synthetic
aaaauugaucacagaaagaggg

SEQ ID NO: 105366 - RNA, 23 nt, Artificial Sequence
  Synthetic
aaaaauugaucacagaaagaggg

SEQ ID NO: 105367 - RNA, 24 nt, Artificial Sequence
  Synthetic
uaaaaauugaucacagaaagaggg

SEQ ID NO: 105368 - RNA, 21 nt, Artificial Sequence
  Synthetic
auaugccaggcacacagaggg

SEQ ID NO: 105369 - RNA, 23 nt, Artificial Sequence
  Synthetic
agauaugccaggcacacagaggg

SEQ ID NO: 105370 - RNA, 18 nt, Artificial Sequence
  Synthetic
uucacauacuggagaggg

SEQ ID NO: 105371 - RNA, 19 nt, Artificial Sequence
  Synthetic
auucacauacuggagaggg

SEQ ID NO: 105372 - RNA, 21 nt, Artificial Sequence
  Synthetic
ugauucacauacuggagaggg

SEQ ID NO: 105373 - RNA, 22 nt, Artificial Sequence
  Synthetic
uugauucacauacuggagaggg

SEQ ID NO: 105374 - RNA, 23 nt, Artificial Sequence
  Synthetic
auugauucacauacuggagaggg

SEQ ID NO: 105375 - RNA, 24 nt, Artificial Sequence
  Synthetic
cauugauucacauacuggagaggg

SEQ ID NO: 105376 - RNA, 18 nt, Artificial Sequence
  Synthetic
auccaauguaaaggaggg

SEQ ID NO: 105377 - RNA, 19 nt, Artificial Sequence
  Synthetic
aauccaauguaaaggaggg

SEQ ID NO: 105378 - RNA, 20 nt, Artificial Sequence
  Synthetic
caauccaauguaaaggaggg

SEQ ID NO: 105379 - RNA, 23 nt, Artificial Sequence
  Synthetic
uggcaauccaauguaaaggaggg

SEQ ID NO: 105380 - RNA, 24 nt, Artificial Sequence
  Synthetic
auggcaauccaauguaaaggaggg

SEQ ID NO: 105381 - RNA, 19 nt, Artificial Sequence
  Synthetic
ugcauuaacugguggaggg

SEQ ID NO: 105382 - RNA, 20 nt, Artificial Sequence
  Synthetic
cugcauuaacugguggaggg

SEQ ID NO: 105383 - RNA, 21 nt, Artificial Sequence
  Synthetic
ucugcauuaacugguggaggg

SEQ ID NO: 105384 - RNA, 23 nt, Artificial Sequence
  Synthetic
ugucugcauuaacugguggaggg

SEQ ID NO: 105385 - RNA, 24 nt, Artificial Sequence
  Synthetic
cugucugcauuaacugguggaggg

SEQ ID NO: 105386 - RNA, 21 nt, Artificial Sequence
  Synthetic
aaagugaagaagugcugaggg

SEQ ID NO: 105387 - RNA, 24 nt, Artificial Sequence
  Synthetic
uggaaagugaagaagugcugaggg

SEQ ID NO: 105388 - RNA, 18 nt, Artificial Sequence
  Synthetic
uuuuugcuucagugaggg

SEQ ID NO: 105389 - RNA, 19 nt, Artificial Sequence
  Synthetic
uuuuuugcuucagugaggg

SEQ ID NO: 105390 - RNA, 20 nt, Artificial Sequence
  Synthetic
uuuuuuugcuucagugaggg

SEQ ID NO: 105391 - RNA, 21 nt, Artificial Sequence
  Synthetic
uuuuuuuugcuucagugaggg

SEQ ID NO: 105392 - RNA, 22 nt, Artificial Sequence
  Synthetic
uuuuuuuuugcuucagugaggg

SEQ ID NO: 105393 - RNA, 23 nt, Artificial Sequence
  Synthetic
cuuuuuuuuugcuucagugaggg

SEQ ID NO: 105394 - RNA, 24 nt, Artificial Sequence
  Synthetic
acuuuuuuuuugcuucagugaggg

SEQ ID NO: 105395 - RNA, 18 nt, Artificial Sequence
  Synthetic
uacuucauuucuugaggg

SEQ ID NO: 105396 - RNA, 19 nt, Artificial Sequence
  Synthetic
auacuucauuucuugaggg

SEQ ID NO: 105397 - RNA, 20 nt, Artificial Sequence
  Synthetic
aauacuucauuucuugaggg

SEQ ID NO: 105398 - RNA, 21 nt, Artificial Sequence
  Synthetic
uaauacuucauuucuugaggg

SEQ ID NO: 105399 - RNA, 22 nt, Artificial Sequence
  Synthetic
auaauacuucauuucuugaggg

SEQ ID NO: 105400 - RNA, 23 nt, Artificial Sequence
  Synthetic
uauaauacuucauuucuugaggg

SEQ ID NO: 105401 - RNA, 24 nt, Artificial Sequence
  Synthetic
uuauaauacuucauuucuugaggg

SEQ ID NO: 105402 - RNA, 21 nt, Artificial Sequence
  Synthetic
agggaaucuuauuuuugaggg

SEQ ID NO: 105403 - RNA, 22 nt, Artificial Sequence
  Synthetic
aagggaaucuuauuuuugaggg

SEQ ID NO: 105404 - RNA, 23 nt, Artificial Sequence
  Synthetic
caagggaaucuuauuuuugaggg

SEQ ID NO: 105405 - RNA, 24 nt, Artificial Sequence
  Synthetic
acaagggaaucuuauuuuugaggg

SEQ ID NO: 105406 - RNA, 19 nt, Artificial Sequence
  Synthetic
aggaauaccgcaaauaggg

SEQ ID NO: 105407 - RNA, 20 nt, Artificial Sequence
  Synthetic
aaggaauaccgcaaauaggg

SEQ ID NO: 105408 - RNA, 21 nt, Artificial Sequence
  Synthetic
aaaggaauaccgcaaauaggg

SEQ ID NO: 105409 - RNA, 22 nt, Artificial Sequence
  Synthetic
aaaaggaauaccgcaaauaggg

SEQ ID NO: 105410 - RNA, 23 nt, Artificial Sequence
  Synthetic
uaaaaggaauaccgcaaauaggg

SEQ ID NO: 105411 - RNA, 24 nt, Artificial Sequence
  Synthetic
cuaaaaggaauaccgcaaauaggg

SEQ ID NO: 105412 - RNA, 18 nt, Artificial Sequence
  Synthetic
ucagaaaguuuuauaggg

SEQ ID NO: 105413 - RNA, 19 nt, Artificial Sequence
  Synthetic
uucagaaaguuuuauaggg

SEQ ID NO: 105414 - RNA, 20 nt, Artificial Sequence
  Synthetic
auucagaaaguuuuauaggg

SEQ ID NO: 105415 - RNA, 21 nt, Artificial Sequence
  Synthetic
aauucagaaaguuuuauaggg

SEQ ID NO: 105416 - RNA, 22 nt, Artificial Sequence
  Synthetic
aaauucagaaaguuuuauaggg

SEQ ID NO: 105417 - RNA, 24 nt, Artificial Sequence
  Synthetic
ugaaauucagaaaguuuuauaggg

SEQ ID NO: 105418 - RNA, 19 nt, Artificial Sequence
  Synthetic
ugggggcccuguacuaggg

SEQ ID NO: 105419 - RNA, 20 nt, Artificial Sequence
  Synthetic
augggggcccuguacuaggg

SEQ ID NO: 105420 - RNA, 21 nt, Artificial Sequence
  Synthetic
aaugggggcccuguacuaggg

SEQ ID NO: 105421 - RNA, 23 nt, Artificial Sequence
  Synthetic
agaaugggggcccuguacuaggg

SEQ ID NO: 105422 - RNA, 24 nt, Artificial Sequence
  Synthetic
aagaaugggggcccuguacuaggg

SEQ ID NO: 105423 - RNA, 18 nt, Artificial Sequence
  Synthetic
ucuagggcaaaucuaggg

SEQ ID NO: 105424 - RNA, 19 nt, Artificial Sequence
  Synthetic
cucuagggcaaaucuaggg

SEQ ID NO: 105425 - RNA, 20 nt, Artificial Sequence
  Synthetic
ucucuagggcaaaucuaggg

SEQ ID NO: 105426 - RNA, 21 nt, Artificial Sequence
  Synthetic
cucucuagggcaaaucuaggg

SEQ ID NO: 105427 - RNA, 23 nt, Artificial Sequence
  Synthetic
ugcucucuagggcaaaucuaggg

SEQ ID NO: 105428 - RNA, 24 nt, Artificial Sequence
  Synthetic
uugcucucuagggcaaaucuaggg

SEQ ID NO: 105429 - RNA, 18 nt, Artificial Sequence
  Synthetic
aagagaacuagaguaggg

SEQ ID NO: 105430 - RNA, 20 nt, Artificial Sequence
  Synthetic
ugaagagaacuagaguaggg

SEQ ID NO: 105431 - RNA, 21 nt, Artificial Sequence
  Synthetic
cugaagagaacuagaguaggg

SEQ ID NO: 105432 - RNA, 22 nt, Artificial Sequence
  Synthetic
ccugaagagaacuagaguaggg

SEQ ID NO: 105433 - RNA, 23 nt, Artificial Sequence
  Synthetic
accugaagagaacuagaguaggg

SEQ ID NO: 105434 - RNA, 24 nt, Artificial Sequence
  Synthetic
aaccugaagagaacuagaguaggg

SEQ ID NO: 105435 - RNA, 18 nt, Artificial Sequence
  Synthetic
ccucuaagggauguaggg

SEQ ID NO: 105436 - RNA, 19 nt, Artificial Sequence
  Synthetic
cccucuaagggauguaggg

SEQ ID NO: 105437 - RNA, 20 nt, Artificial Sequence
  Synthetic
ucccucuaagggauguaggg

SEQ ID NO: 105438 - RNA, 21 nt, Artificial Sequence
  Synthetic
uucccucuaagggauguaggg

SEQ ID NO: 105439 - RNA, 22 nt, Artificial Sequence
  Synthetic
auucccucuaagggauguaggg

SEQ ID NO: 105440 - RNA, 23 nt, Artificial Sequence
  Synthetic
cauucccucuaagggauguaggg

SEQ ID NO: 105441 - RNA, 18 nt, Artificial Sequence
  Synthetic
agaaagauaacauuaggg

SEQ ID NO: 105442 - RNA, 19 nt, Artificial Sequence
  Synthetic
aagaaagauaacauuaggg

SEQ ID NO: 105443 - RNA, 20 nt, Artificial Sequence
  Synthetic
uaagaaagauaacauuaggg

SEQ ID NO: 105444 - RNA, 21 nt, Artificial Sequence
  Synthetic
cuaagaaagauaacauuaggg

SEQ ID NO: 105445 - RNA, 22 nt, Artificial Sequence
  Synthetic
ucuaagaaagauaacauuaggg

SEQ ID NO: 105446 - RNA, 23 nt, Artificial Sequence
  Synthetic
aucuaagaaagauaacauuaggg

SEQ ID NO: 105447 - RNA, 24 nt, Artificial Sequence
  Synthetic
uaucuaagaaagauaacauuaggg

SEQ ID NO: 105448 - RNA, 18 nt, Artificial Sequence
  Synthetic
cuagucauuuccuuaggg

SEQ ID NO: 105449 - RNA, 19 nt, Artificial Sequence
  Synthetic
acuagucauuuccuuaggg

SEQ ID NO: 105450 - RNA, 20 nt, Artificial Sequence
  Synthetic
aacuagucauuuccuuaggg

SEQ ID NO: 105451 - RNA, 21 nt, Artificial Sequence
  Synthetic
caacuagucauuuccuuaggg

SEQ ID NO: 105452 - RNA, 22 nt, Artificial Sequence
  Synthetic
acaacuagucauuuccuuaggg

SEQ ID NO: 105453 - RNA, 24 nt, Artificial Sequence
  Synthetic
ugacaacuagucauuuccuuaggg

SEQ ID NO: 105454 - RNA, 18 nt, Artificial Sequence
  Synthetic
ucauggaggggcuuaggg

SEQ ID NO: 105455 - RNA, 19 nt, Artificial Sequence
  Synthetic
uucauggaggggcuuaggg

SEQ ID NO: 105456 - RNA, 21 nt, Artificial Sequence
  Synthetic
aguucauggaggggcuuaggg

SEQ ID NO: 105457 - RNA, 22 nt, Artificial Sequence
  Synthetic
aaguucauggaggggcuuaggg

SEQ ID NO: 105458 - RNA, 23 nt, Artificial Sequence
  Synthetic
caaguucauggaggggcuuaggg

SEQ ID NO: 105459 - RNA, 24 nt, Artificial Sequence
  Synthetic
ccaaguucauggaggggcuuaggg

SEQ ID NO: 105460 - RNA, 18 nt, Artificial Sequence
  Synthetic
acaacaucucucuuaggg

SEQ ID NO: 105461 - RNA, 19 nt, Artificial Sequence
  Synthetic
cacaacaucucucuuaggg

SEQ ID NO: 105462 - RNA, 20 nt, Artificial Sequence
  Synthetic
ccacaacaucucucuuaggg

SEQ ID NO: 105463 - RNA, 21 nt, Artificial Sequence
  Synthetic
cccacaacaucucucuuaggg

SEQ ID NO: 105464 - RNA, 22 nt, Artificial Sequence
  Synthetic
ucccacaacaucucucuuaggg

SEQ ID NO: 105465 - RNA, 23 nt, Artificial Sequence
  Synthetic
uucccacaacaucucucuuaggg

SEQ ID NO: 105466 - RNA, 24 nt, Artificial Sequence
  Synthetic
auucccacaacaucucucuuaggg

SEQ ID NO: 105467 - RNA, 19 nt, Artificial Sequence
  Synthetic
uguaauaacugaguuaggg

SEQ ID NO: 105468 - RNA, 21 nt, Artificial Sequence
  Synthetic
aguguaauaacugaguuaggg

SEQ ID NO: 105469 - RNA, 22 nt, Artificial Sequence
  Synthetic
caguguaauaacugaguuaggg

SEQ ID NO: 105470 - RNA, 23 nt, Artificial Sequence
  Synthetic
ccaguguaauaacugaguuaggg

SEQ ID NO: 105471 - RNA, 24 nt, Artificial Sequence
  Synthetic
cccaguguaauaacugaguuaggg

SEQ ID NO: 105472 - RNA, 18 nt, Artificial Sequence
  Synthetic
ccauggaucaggggcggg

SEQ ID NO: 105473 - RNA, 19 nt, Artificial Sequence
  Synthetic
uccauggaucaggggcggg

SEQ ID NO: 105474 - RNA, 20 nt, Artificial Sequence
  Synthetic
uuccauggaucaggggcggg

SEQ ID NO: 105475 - RNA, 19 nt, Artificial Sequence
  Synthetic
agccagaguaagaugcggg

SEQ ID NO: 105476 - RNA, 20 nt, Artificial Sequence
  Synthetic
aagccagaguaagaugcggg

SEQ ID NO: 105477 - RNA, 21 nt, Artificial Sequence
  Synthetic
uaagccagaguaagaugcggg

SEQ ID NO: 105478 - RNA, 23 nt, Artificial Sequence
  Synthetic
aguaagccagaguaagaugcggg

SEQ ID NO: 105479 - RNA, 24 nt, Artificial Sequence
  Synthetic
uaguaagccagaguaagaugcggg

SEQ ID NO: 105480 - RNA, 18 nt, Artificial Sequence
  Synthetic
uuugaacacaacaucggg

SEQ ID NO: 105481 - RNA, 19 nt, Artificial Sequence
  Synthetic
uuuugaacacaacaucggg

SEQ ID NO: 105482 - RNA, 22 nt, Artificial Sequence
  Synthetic
agguuuugaacacaacaucggg

SEQ ID NO: 105483 - RNA, 23 nt, Artificial Sequence
  Synthetic
aagguuuugaacacaacaucggg

SEQ ID NO: 105484 - RNA, 24 nt, Artificial Sequence
  Synthetic
aaagguuuugaacacaacaucggg

SEQ ID NO: 105485 - RNA, 18 nt, Artificial Sequence
  Synthetic
auuguaaaauauaucggg

SEQ ID NO: 105486 - RNA, 19 nt, Artificial Sequence
  Synthetic
aauuguaaaauauaucggg

SEQ ID NO: 105487 - RNA, 20 nt, Artificial Sequence
  Synthetic
aaauuguaaaauauaucggg

SEQ ID NO: 105488 - RNA, 21 nt, Artificial Sequence
  Synthetic
caaauuguaaaauauaucggg

SEQ ID NO: 105489 - RNA, 22 nt, Artificial Sequence
  Synthetic
ucaaauuguaaaauauaucggg

SEQ ID NO: 105490 - RNA, 23 nt, Artificial Sequence
  Synthetic
uucaaauuguaaaauauaucggg

SEQ ID NO: 105491 - RNA, 24 nt, Artificial Sequence
  Synthetic
auucaaauuguaaaauauaucggg

SEQ ID NO: 105492 - RNA, 18 nt, Artificial Sequence
  Synthetic
uaguaaauauuucucggg

SEQ ID NO: 105493 - RNA, 20 nt, Artificial Sequence
  Synthetic
aguaguaaauauuucucggg

SEQ ID NO: 105494 - RNA, 21 nt, Artificial Sequence
  Synthetic
uaguaguaaauauuucucggg

SEQ ID NO: 105495 - RNA, 22 nt, Artificial Sequence
  Synthetic
uuaguaguaaauauuucucggg

SEQ ID NO: 105496 - RNA, 23 nt, Artificial Sequence
  Synthetic
cuuaguaguaaauauuucucggg

SEQ ID NO: 105497 - RNA, 24 nt, Artificial Sequence
  Synthetic
ccuuaguaguaaauauuucucggg

SEQ ID NO: 105498 - RNA, 18 nt, Artificial Sequence
  Synthetic
aagaaucuacugaagggg

SEQ ID NO: 105499 - RNA, 19 nt, Artificial Sequence
  Synthetic
caagaaucuacugaagggg

SEQ ID NO: 105500 - RNA, 21 nt, Artificial Sequence
  Synthetic
agcaagaaucuacugaagggg

SEQ ID NO: 105501 - RNA, 22 nt, Artificial Sequence
  Synthetic
aagcaagaaucuacugaagggg

SEQ ID NO: 105502 - RNA, 23 nt, Artificial Sequence
  Synthetic
caagcaagaaucuacugaagggg

SEQ ID NO: 105503 - RNA, 24 nt, Artificial Sequence
  Synthetic
acaagcaagaaucuacugaagggg

SEQ ID NO: 105504 - RNA, 18 nt, Artificial Sequence
  Synthetic
uaaggauucacucagggg

SEQ ID NO: 105505 - RNA, 19 nt, Artificial Sequence
  Synthetic
cuaaggauucacucagggg

SEQ ID NO: 105506 - RNA, 21 nt, Artificial Sequence
  Synthetic
ugcuaaggauucacucagggg

SEQ ID NO: 105507 - RNA, 23 nt, Artificial Sequence
  Synthetic
agugcuaaggauucacucagggg

SEQ ID NO: 105508 - RNA, 24 nt, Artificial Sequence
  Synthetic
cagugcuaaggauucacucagggg

SEQ ID NO: 105509 - RNA, 18 nt, Artificial Sequence
  Synthetic
aaaaacuucuuggagggg

SEQ ID NO: 105510 - RNA, 19 nt, Artificial Sequence
  Synthetic
aaaaaacuucuuggagggg

SEQ ID NO: 105511 - RNA, 20 nt, Artificial Sequence
  Synthetic
aaaaaaacuucuuggagggg

SEQ ID NO: 105512 - RNA, 21 nt, Artificial Sequence
  Synthetic
uaaaaaaacuucuuggagggg

SEQ ID NO: 105513 - RNA, 22 nt, Artificial Sequence
  Synthetic
uuaaaaaaacuucuuggagggg

SEQ ID NO: 105514 - RNA, 23 nt, Artificial Sequence
  Synthetic
auuaaaaaaacuucuuggagggg

SEQ ID NO: 105515 - RNA, 24 nt, Artificial Sequence
  Synthetic
aauuaaaaaaacuucuuggagggg

SEQ ID NO: 105516 - RNA, 18 nt, Artificial Sequence
  Synthetic
uccuauauuucugagggg

SEQ ID NO: 105517 - RNA, 19 nt, Artificial Sequence
  Synthetic
cuccuauauuucugagggg

SEQ ID NO: 105518 - RNA, 20 nt, Artificial Sequence
  Synthetic
ucuccuauauuucugagggg

SEQ ID NO: 105519 - RNA, 21 nt, Artificial Sequence
  Synthetic
cucuccuauauuucugagggg

SEQ ID NO: 105520 - RNA, 22 nt, Artificial Sequence
  Synthetic
ucucuccuauauuucugagggg

SEQ ID NO: 105521 - RNA, 23 nt, Artificial Sequence
  Synthetic
uucucuccuauauuucugagggg

SEQ ID NO: 105522 - RNA, 24 nt, Artificial Sequence
  Synthetic
cuucucuccuauauuucugagggg

SEQ ID NO: 105523 - RNA, 19 nt, Artificial Sequence
  Synthetic
ugagagcaggcguuagggg

SEQ ID NO: 105524 - RNA, 20 nt, Artificial Sequence
  Synthetic
augagagcaggcguuagggg

SEQ ID NO: 105525 - RNA, 21 nt, Artificial Sequence
  Synthetic
uaugagagcaggcguuagggg

SEQ ID NO: 105526 - RNA, 23 nt, Artificial Sequence
  Synthetic
uguaugagagcaggcguuagggg

SEQ ID NO: 105527 - RNA, 24 nt, Artificial Sequence
  Synthetic
cuguaugagagcaggcguuagggg

SEQ ID NO: 105528 - RNA, 18 nt, Artificial Sequence
  Synthetic
uuuggaguuauuuagggg

SEQ ID NO: 105529 - RNA, 19 nt, Artificial Sequence
  Synthetic
cuuuggaguuauuuagggg

SEQ ID NO: 105530 - RNA, 22 nt, Artificial Sequence
  Synthetic
uggcuuuggaguuauuuagggg

SEQ ID NO: 105531 - RNA, 23 nt, Artificial Sequence
  Synthetic
cuggcuuuggaguuauuuagggg

SEQ ID NO: 105532 - RNA, 24 nt, Artificial Sequence
  Synthetic
acuggcuuuggaguuauuuagggg

SEQ ID NO: 105533 - RNA, 18 nt, Artificial Sequence
  Synthetic
ccacauggagaaacgggg

SEQ ID NO: 105534 - RNA, 20 nt, Artificial Sequence
  Synthetic
agccacauggagaaacgggg

SEQ ID NO: 105535 - RNA, 22 nt, Artificial Sequence
  Synthetic
agagccacauggagaaacgggg

SEQ ID NO: 105536 - RNA, 23 nt, Artificial Sequence
  Synthetic
aagagccacauggagaaacgggg

SEQ ID NO: 105537 - RNA, 24 nt, Artificial Sequence
  Synthetic
aaagagccacauggagaaacgggg

SEQ ID NO: 105538 - RNA, 18 nt, Artificial Sequence
  Synthetic
auuuuggggaaaaggggg

SEQ ID NO: 105539 - RNA, 19 nt, Artificial Sequence
  Synthetic
aauuuuggggaaaaggggg

SEQ ID NO: 105540 - RNA, 21 nt, Artificial Sequence
  Synthetic
agaauuuuggggaaaaggggg

SEQ ID NO: 105541 - RNA, 22 nt, Artificial Sequence
  Synthetic
aagaauuuuggggaaaaggggg

SEQ ID NO: 105542 - RNA, 23 nt, Artificial Sequence
  Synthetic
caagaauuuuggggaaaaggggg

SEQ ID NO: 105543 - RNA, 24 nt, Artificial Sequence
  Synthetic
acaagaauuuuggggaaaaggggg

SEQ ID NO: 105544 - RNA, 18 nt, Artificial Sequence
  Synthetic
aaauuuuggggaaggggg

SEQ ID NO: 105545 - RNA, 19 nt, Artificial Sequence
  Synthetic
caaauuuuggggaaggggg

SEQ ID NO: 105546 - RNA, 21 nt, Artificial Sequence
  Synthetic
ugcaaauuuuggggaaggggg

SEQ ID NO: 105547 - RNA, 22 nt, Artificial Sequence
  Synthetic
uugcaaauuuuggggaaggggg

SEQ ID NO: 105548 - RNA, 23 nt, Artificial Sequence
  Synthetic
cuugcaaauuuuggggaaggggg

SEQ ID NO: 105549 - RNA, 24 nt, Artificial Sequence
  Synthetic
ccuugcaaauuuuggggaaggggg

SEQ ID NO: 105550 - RNA, 19 nt, Artificial Sequence
  Synthetic
ugcugauuggcuugggggg

SEQ ID NO: 105551 - RNA, 20 nt, Artificial Sequence
  Synthetic
augcugauuggcuugggggg

SEQ ID NO: 105552 - RNA, 21 nt, Artificial Sequence
  Synthetic
caugcugauuggcuugggggg

SEQ ID NO: 105553 - RNA, 22 nt, Artificial Sequence
  Synthetic
acaugcugauuggcuugggggg

SEQ ID NO: 105554 - RNA, 23 nt, Artificial Sequence
  Synthetic
uacaugcugauuggcuugggggg

SEQ ID NO: 105555 - RNA, 24 nt, Artificial Sequence
  Synthetic
cuacaugcugauuggcuugggggg

SEQ ID NO: 105556 - RNA, 18 nt, Artificial Sequence
  Synthetic
aauuaacguagauggggg

SEQ ID NO: 105557 - RNA, 19 nt, Artificial Sequence
  Synthetic
caauuaacguagauggggg

SEQ ID NO: 105558 - RNA, 20 nt, Artificial Sequence
  Synthetic
ccaauuaacguagauggggg

SEQ ID NO: 105559 - RNA, 22 nt, Artificial Sequence
  Synthetic
ugccaauuaacguagauggggg

SEQ ID NO: 105560 - RNA, 23 nt, Artificial Sequence
  Synthetic
augccaauuaacguagauggggg

SEQ ID NO: 105561 - RNA, 18 nt, Artificial Sequence
  Synthetic
auuaacuugauauggggg

SEQ ID NO: 105562 - RNA, 20 nt, Artificial Sequence
  Synthetic
agauuaacuugauauggggg

SEQ ID NO: 105563 - RNA, 21 nt, Artificial Sequence
  Synthetic
uagauuaacuugauauggggg

SEQ ID NO: 105564 - RNA, 22 nt, Artificial Sequence
  Synthetic
auagauuaacuugauauggggg

SEQ ID NO: 105565 - RNA, 23 nt, Artificial Sequence
  Synthetic
cauagauuaacuugauauggggg

SEQ ID NO: 105566 - RNA, 24 nt, Artificial Sequence
  Synthetic
acauagauuaacuugauauggggg

SEQ ID NO: 105567 - RNA, 20 nt, Artificial Sequence
  Synthetic
ugguuauuagauccuggggg

SEQ ID NO: 105568 - RNA, 23 nt, Artificial Sequence
  Synthetic
uggugguuauuagauccuggggg

SEQ ID NO: 105569 - RNA, 24 nt, Artificial Sequence
  Synthetic
auggugguuauuagauccuggggg

SEQ ID NO: 105570 - RNA, 22 nt, Artificial Sequence
  Synthetic
aggguuggggguuguguggggg

SEQ ID NO: 105571 - RNA, 23 nt, Artificial Sequence
  Synthetic
caggguuggggguuguguggggg

SEQ ID NO: 105572 - RNA, 20 nt, Artificial Sequence
  Synthetic
uggcugggcuccguuggggg

SEQ ID NO: 105573 - RNA, 18 nt, Artificial Sequence
  Synthetic
aagcuauuugguuggggg

SEQ ID NO: 105574 - RNA, 19 nt, Artificial Sequence
  Synthetic
aaagcuauuugguuggggg

SEQ ID NO: 105575 - RNA, 21 nt, Artificial Sequence
  Synthetic
ugaaagcuauuugguuggggg

SEQ ID NO: 105576 - RNA, 22 nt, Artificial Sequence
  Synthetic
uugaaagcuauuugguuggggg

SEQ ID NO: 105577 - RNA, 22 nt, Artificial Sequence
  Synthetic
cgggaaguguggggucaugggg

SEQ ID NO: 105578 - RNA, 23 nt, Artificial Sequence
  Synthetic
acgggaaguguggggucaugggg

SEQ ID NO: 105579 - RNA, 24 nt, Artificial Sequence
  Synthetic
aacgggaaguguggggucaugggg

SEQ ID NO: 105580 - RNA, 18 nt, Artificial Sequence
  Synthetic
agaacucucuggaugggg

SEQ ID NO: 105581 - RNA, 19 nt, Artificial Sequence
  Synthetic
aagaacucucuggaugggg

SEQ ID NO: 105582 - RNA, 20 nt, Artificial Sequence
  Synthetic
uaagaacucucuggaugggg

SEQ ID NO: 105583 - RNA, 21 nt, Artificial Sequence
  Synthetic
auaagaacucucuggaugggg

SEQ ID NO: 105584 - RNA, 22 nt, Artificial Sequence
  Synthetic
cauaagaacucucuggaugggg

SEQ ID NO: 105585 - RNA, 23 nt, Artificial Sequence
  Synthetic
acauaagaacucucuggaugggg

SEQ ID NO: 105586 - RNA, 21 nt, Artificial Sequence
  Synthetic
uaaguaauaauacaacugggg

SEQ ID NO: 105587 - RNA, 22 nt, Artificial Sequence
  Synthetic
auaaguaauaauacaacugggg

SEQ ID NO: 105588 - RNA, 23 nt, Artificial Sequence
  Synthetic
cauaaguaauaauacaacugggg

SEQ ID NO: 105589 - RNA, 24 nt, Artificial Sequence
  Synthetic
ucauaaguaauaauacaacugggg

SEQ ID NO: 105590 - RNA, 18 nt, Artificial Sequence
  Synthetic
cacacuaaccaagugggg

SEQ ID NO: 105591 - RNA, 20 nt, Artificial Sequence
  Synthetic
agcacacuaaccaagugggg

SEQ ID NO: 105592 - RNA, 21 nt, Artificial Sequence
  Synthetic
aagcacacuaaccaagugggg

SEQ ID NO: 105593 - RNA, 22 nt, Artificial Sequence
  Synthetic
caagcacacuaaccaagugggg

SEQ ID NO: 105594 - RNA, 24 nt, Artificial Sequence
  Synthetic
agcaagcacacuaaccaagugggg

SEQ ID NO: 105595 - RNA, 18 nt, Artificial Sequence
  Synthetic
auaucucugggagugggg

SEQ ID NO: 105596 - RNA, 19 nt, Artificial Sequence
  Synthetic
aauaucucugggagugggg

SEQ ID NO: 105597 - RNA, 20 nt, Artificial Sequence
  Synthetic
aaauaucucugggagugggg

SEQ ID NO: 105598 - RNA, 22 nt, Artificial Sequence
  Synthetic
ugaaauaucucugggagugggg

SEQ ID NO: 105599 - RNA, 23 nt, Artificial Sequence
  Synthetic
augaaauaucucugggagugggg

SEQ ID NO: 105600 - RNA, 24 nt, Artificial Sequence
  Synthetic
aaugaaauaucucugggagugggg

SEQ ID NO: 105601 - RNA, 21 nt, Artificial Sequence
  Synthetic
auggcaaaaaaaaaugugggg

SEQ ID NO: 105602 - RNA, 22 nt, Artificial Sequence
  Synthetic
cauggcaaaaaaaaaugugggg

SEQ ID NO: 105603 - RNA, 23 nt, Artificial Sequence
  Synthetic
ccauggcaaaaaaaaaugugggg

SEQ ID NO: 105604 - RNA, 24 nt, Artificial Sequence
  Synthetic
cccauggcaaaaaaaaaugugggg

SEQ ID NO: 105605 - RNA, 19 nt, Artificial Sequence
  Synthetic
ugagcuuugggauuugggg

SEQ ID NO: 105606 - RNA, 20 nt, Artificial Sequence
  Synthetic
augagcuuugggauuugggg

SEQ ID NO: 105607 - RNA, 21 nt, Artificial Sequence
  Synthetic
caugagcuuugggauuugggg

SEQ ID NO: 105608 - RNA, 22 nt, Artificial Sequence
  Synthetic
ucaugagcuuugggauuugggg

SEQ ID NO: 105609 - RNA, 23 nt, Artificial Sequence
  Synthetic
uucaugagcuuugggauuugggg

SEQ ID NO: 105610 - RNA, 24 nt, Artificial Sequence
  Synthetic
uuucaugagcuuugggauuugggg

SEQ ID NO: 105611 - RNA, 21 nt, Artificial Sequence
  Synthetic
ucugauuuaacugguuugggg

SEQ ID NO: 105612 - RNA, 22 nt, Artificial Sequence
  Synthetic
cucugauuuaacugguuugggg

SEQ ID NO: 105613 - RNA, 21 nt, Artificial Sequence
  Synthetic
aagaaguuacagguuuugggg

SEQ ID NO: 105614 - RNA, 23 nt, Artificial Sequence
  Synthetic
agaagaaguuacagguuuugggg

SEQ ID NO: 105615 - RNA, 24 nt, Artificial Sequence
  Synthetic
uagaagaaguuacagguuuugggg

SEQ ID NO: 105616 - RNA, 19 nt, Artificial Sequence
  Synthetic
ugcugaguggaaaaauggg

SEQ ID NO: 105617 - RNA, 20 nt, Artificial Sequence
  Synthetic
uugcugaguggaaaaauggg

SEQ ID NO: 105618 - RNA, 21 nt, Artificial Sequence
  Synthetic
auugcugaguggaaaaauggg

SEQ ID NO: 105619 - RNA, 22 nt, Artificial Sequence
  Synthetic
aauugcugaguggaaaaauggg

SEQ ID NO: 105620 - RNA, 23 nt, Artificial Sequence
  Synthetic
aaauugcugaguggaaaaauggg

SEQ ID NO: 105621 - RNA, 24 nt, Artificial Sequence
  Synthetic
uaaauugcugaguggaaaaauggg

SEQ ID NO: 105622 - RNA, 18 nt, Artificial Sequence
  Synthetic
cuaaagugauuaaauggg

SEQ ID NO: 105623 - RNA, 19 nt, Artificial Sequence
  Synthetic
acuaaagugauuaaauggg

SEQ ID NO: 105624 - RNA, 20 nt, Artificial Sequence
  Synthetic
aacuaaagugauuaaauggg

SEQ ID NO: 105625 - RNA, 21 nt, Artificial Sequence
  Synthetic
uaacuaaagugauuaaauggg

SEQ ID NO: 105626 - RNA, 22 nt, Artificial Sequence
  Synthetic
uuaacuaaagugauuaaauggg

SEQ ID NO: 105627 - RNA, 23 nt, Artificial Sequence
  Synthetic
uuuaacuaaagugauuaaauggg

SEQ ID NO: 105628 - RNA, 21 nt, Artificial Sequence
  Synthetic
uuguaauauaccaacaauggg

SEQ ID NO: 105629 - RNA, 22 nt, Artificial Sequence
  Synthetic
auuguaauauaccaacaauggg

SEQ ID NO: 105630 - RNA, 23 nt, Artificial Sequence
  Synthetic
aauuguaauauaccaacaauggg

SEQ ID NO: 105631 - RNA, 24 nt, Artificial Sequence
  Synthetic
aaauuguaauauaccaacaauggg

SEQ ID NO: 105632 - RNA, 19 nt, Artificial Sequence
  Synthetic
agaaauaucagagaauggg

SEQ ID NO: 105633 - RNA, 21 nt, Artificial Sequence
  Synthetic
agagaaauaucagagaauggg

SEQ ID NO: 105634 - RNA, 22 nt, Artificial Sequence
  Synthetic
cagagaaauaucagagaauggg

SEQ ID NO: 105635 - RNA, 23 nt, Artificial Sequence
  Synthetic
ccagagaaauaucagagaauggg

SEQ ID NO: 105636 - RNA, 24 nt, Artificial Sequence
  Synthetic
accagagaaauaucagagaauggg

SEQ ID NO: 105637 - RNA, 18 nt, Artificial Sequence
  Synthetic
auuuaauauuuuaauggg

SEQ ID NO: 105638 - RNA, 19 nt, Artificial Sequence
  Synthetic
uauuuaauauuuuaauggg

SEQ ID NO: 105639 - RNA, 20 nt, Artificial Sequence
  Synthetic
cuauuuaauauuuuaauggg

SEQ ID NO: 105640 - RNA, 21 nt, Artificial Sequence
  Synthetic
acuauuuaauauuuuaauggg

SEQ ID NO: 105641 - RNA, 22 nt, Artificial Sequence
  Synthetic
uacuauuuaauauuuuaauggg

SEQ ID NO: 105642 - RNA, 23 nt, Artificial Sequence
  Synthetic
cuacuauuuaauauuuuaauggg

SEQ ID NO: 105643 - RNA, 24 nt, Artificial Sequence
  Synthetic
ucuacuauuuaauauuuuaauggg

SEQ ID NO: 105644 - RNA, 18 nt, Artificial Sequence
  Synthetic
aucauauuaacacauggg

SEQ ID NO: 105645 - RNA, 19 nt, Artificial Sequence
  Synthetic
aaucauauuaacacauggg

SEQ ID NO: 105646 - RNA, 20 nt, Artificial Sequence
  Synthetic
aaaucauauuaacacauggg

SEQ ID NO: 105647 - RNA, 24 nt, Artificial Sequence
  Synthetic
agggaaaucauauuaacacauggg

SEQ ID NO: 105648 - RNA, 18 nt, Artificial Sequence
  Synthetic
cuagauauugcacauggg

SEQ ID NO: 105649 - RNA, 20 nt, Artificial Sequence
  Synthetic
ugcuagauauugcacauggg

SEQ ID NO: 105650 - RNA, 22 nt, Artificial Sequence
  Synthetic
ugugcuagauauugcacauggg

SEQ ID NO: 105651 - RNA, 23 nt, Artificial Sequence
  Synthetic
augugcuagauauugcacauggg

SEQ ID NO: 105652 - RNA, 24 nt, Artificial Sequence
  Synthetic
uaugugcuagauauugcacauggg

SEQ ID NO: 105653 - RNA, 18 nt, Artificial Sequence
  Synthetic
cuuuaagaaagacauggg

SEQ ID NO: 105654 - RNA, 19 nt, Artificial Sequence
  Synthetic
ccuuuaagaaagacauggg

SEQ ID NO: 105655 - RNA, 21 nt, Artificial Sequence
  Synthetic
agccuuuaagaaagacauggg

SEQ ID NO: 105656 - RNA, 22 nt, Artificial Sequence
  Synthetic
uagccuuuaagaaagacauggg

SEQ ID NO: 105657 - RNA, 23 nt, Artificial Sequence
  Synthetic
uuagccuuuaagaaagacauggg

SEQ ID NO: 105658 - RNA, 24 nt, Artificial Sequence
  Synthetic
cuuagccuuuaagaaagacauggg

SEQ ID NO: 105659 - RNA, 18 nt, Artificial Sequence
  Synthetic
aguaggauggggcauggg

SEQ ID NO: 105660 - RNA, 19 nt, Artificial Sequence
  Synthetic
caguaggauggggcauggg

SEQ ID NO: 105661 - RNA, 20 nt, Artificial Sequence
  Synthetic
acaguaggauggggcauggg

SEQ ID NO: 105662 - RNA, 21 nt, Artificial Sequence
  Synthetic
cacaguaggauggggcauggg

SEQ ID NO: 105663 - RNA, 22 nt, Artificial Sequence
  Synthetic
ccacaguaggauggggcauggg

SEQ ID NO: 105664 - RNA, 24 nt, Artificial Sequence
  Synthetic
agccacaguaggauggggcauggg

SEQ ID NO: 105665 - RNA, 18 nt, Artificial Sequence
  Synthetic
uauggaguaaaucauggg

SEQ ID NO: 105666 - RNA, 19 nt, Artificial Sequence
  Synthetic
uuauggaguaaaucauggg

SEQ ID NO: 105667 - RNA, 20 nt, Artificial Sequence
  Synthetic
uuuauggaguaaaucauggg

SEQ ID NO: 105668 - RNA, 21 nt, Artificial Sequence
  Synthetic
auuuauggaguaaaucauggg

SEQ ID NO: 105669 - RNA, 24 nt, Artificial Sequence
  Synthetic
aggauuuauggaguaaaucauggg

SEQ ID NO: 105670 - RNA, 18 nt, Artificial Sequence
  Synthetic
cucgauuucguucauggg

SEQ ID NO: 105671 - RNA, 19 nt, Artificial Sequence
  Synthetic
ccucgauuucguucauggg

SEQ ID NO: 105672 - RNA, 23 nt, Artificial Sequence
  Synthetic
agggccucgauuucguucauggg

SEQ ID NO: 105673 - RNA, 24 nt, Artificial Sequence
  Synthetic
cagggccucgauuucguucauggg

SEQ ID NO: 105674 - RNA, 20 nt, Artificial Sequence
  Synthetic
aggguagagcagaugauggg

SEQ ID NO: 105675 - RNA, 22 nt, Artificial Sequence
  Synthetic
ugaggguagagcagaugauggg

SEQ ID NO: 105676 - RNA, 24 nt, Artificial Sequence
  Synthetic
agugaggguagagcagaugauggg

SEQ ID NO: 105677 - RNA, 18 nt, Artificial Sequence
  Synthetic
uauuauguggaugauggg

SEQ ID NO: 105678 - RNA, 19 nt, Artificial Sequence
  Synthetic
cuauuauguggaugauggg

SEQ ID NO: 105679 - RNA, 20 nt, Artificial Sequence
  Synthetic
ccuauuauguggaugauggg

SEQ ID NO: 105680 - RNA, 21 nt, Artificial Sequence
  Synthetic
accuauuauguggaugauggg

SEQ ID NO: 105681 - RNA, 22 nt, Artificial Sequence
  Synthetic
caccuauuauguggaugauggg

SEQ ID NO: 105682 - RNA, 23 nt, Artificial Sequence
  Synthetic
ccaccuauuauguggaugauggg

SEQ ID NO: 105683 - RNA, 24 nt, Artificial Sequence
  Synthetic
uccaccuauuauguggaugauggg

SEQ ID NO: 105684 - RNA, 21 nt, Artificial Sequence
  Synthetic
uauauauauauaucauauggg

SEQ ID NO: 105685 - RNA, 22 nt, Artificial Sequence
  Synthetic
auauauauauauaucauauggg

SEQ ID NO: 105686 - RNA, 23 nt, Artificial Sequence
  Synthetic
cauauauauauauaucauauggg

SEQ ID NO: 105687 - RNA, 24 nt, Artificial Sequence
  Synthetic
acauauauauauauaucauauggg

SEQ ID NO: 105688 - RNA, 18 nt, Artificial Sequence
  Synthetic
acccuaugcagauauggg

SEQ ID NO: 105689 - RNA, 19 nt, Artificial Sequence
  Synthetic
aacccuaugcagauauggg

SEQ ID NO: 105690 - RNA, 21 nt, Artificial Sequence
  Synthetic
agaacccuaugcagauauggg

SEQ ID NO: 105691 - RNA, 22 nt, Artificial Sequence
  Synthetic
aagaacccuaugcagauauggg

SEQ ID NO: 105692 - RNA, 24 nt, Artificial Sequence
  Synthetic
agaagaacccuaugcagauauggg

SEQ ID NO: 105693 - RNA, 18 nt, Artificial Sequence
  Synthetic
acaaagaaaugauauggg

SEQ ID NO: 105694 - RNA, 19 nt, Artificial Sequence
  Synthetic
uacaaagaaaugauauggg

SEQ ID NO: 105695 - RNA, 20 nt, Artificial Sequence
  Synthetic
auacaaagaaaugauauggg

SEQ ID NO: 105696 - RNA, 21 nt, Artificial Sequence
  Synthetic
cauacaaagaaaugauauggg

SEQ ID NO: 105697 - RNA, 22 nt, Artificial Sequence
  Synthetic
ccauacaaagaaaugauauggg

SEQ ID NO: 105698 - RNA, 24 nt, Artificial Sequence
  Synthetic
ugccauacaaagaaaugauauggg

SEQ ID NO: 105699 - RNA, 18 nt, Artificial Sequence
  Synthetic
uaaguucuuugcuauggg

SEQ ID NO: 105700 - RNA, 19 nt, Artificial Sequence
  Synthetic
uuaaguucuuugcuauggg

SEQ ID NO: 105701 - RNA, 22 nt, Artificial Sequence
  Synthetic
cgguuaaguucuuugcuauggg

SEQ ID NO: 105702 - RNA, 23 nt, Artificial Sequence
  Synthetic
acgguuaaguucuuugcuauggg

SEQ ID NO: 105703 - RNA, 24 nt, Artificial Sequence
  Synthetic
aacgguuaaguucuuugcuauggg

SEQ ID NO: 105704 - RNA, 18 nt, Artificial Sequence
  Synthetic
agggacauauucuauggg

SEQ ID NO: 105705 - RNA, 19 nt, Artificial Sequence
  Synthetic
aagggacauauucuauggg

SEQ ID NO: 105706 - RNA, 22 nt, Artificial Sequence
  Synthetic
aggaagggacauauucuauggg

SEQ ID NO: 105707 - RNA, 23 nt, Artificial Sequence
  Synthetic
aaggaagggacauauucuauggg

SEQ ID NO: 105708 - RNA, 24 nt, Artificial Sequence
  Synthetic
aaaggaagggacauauucuauggg

SEQ ID NO: 105709 - RNA, 18 nt, Artificial Sequence
  Synthetic
aaaauauuuauguauggg

SEQ ID NO: 105710 - RNA, 19 nt, Artificial Sequence
  Synthetic
uaaaauauuuauguauggg

SEQ ID NO: 105711 - RNA, 20 nt, Artificial Sequence
  Synthetic
uuaaaauauuuauguauggg

SEQ ID NO: 105712 - RNA, 21 nt, Artificial Sequence
  Synthetic
cuuaaaauauuuauguauggg

SEQ ID NO: 105713 - RNA, 23 nt, Artificial Sequence
  Synthetic
cgcuuaaaauauuuauguauggg

SEQ ID NO: 105714 - RNA, 24 nt, Artificial Sequence
  Synthetic
ucgcuuaaaauauuuauguauggg

SEQ ID NO: 105715 - RNA, 18 nt, Artificial Sequence
  Synthetic
auugaccugacaacuggg

SEQ ID NO: 105716 - RNA, 19 nt, Artificial Sequence
  Synthetic
uauugaccugacaacuggg

SEQ ID NO: 105717 - RNA, 20 nt, Artificial Sequence
  Synthetic
auauugaccugacaacuggg

SEQ ID NO: 105718 - RNA, 21 nt, Artificial Sequence
  Synthetic
cauauugaccugacaacuggg

SEQ ID NO: 105719 - RNA, 22 nt, Artificial Sequence
  Synthetic
acauauugaccugacaacuggg

SEQ ID NO: 105720 - RNA, 23 nt, Artificial Sequence
  Synthetic
aacauauugaccugacaacuggg

SEQ ID NO: 105721 - RNA, 18 nt, Artificial Sequence
  Synthetic
uauuuccaggagacuggg

SEQ ID NO: 105722 - RNA, 19 nt, Artificial Sequence
  Synthetic
auauuuccaggagacuggg

SEQ ID NO: 105723 - RNA, 20 nt, Artificial Sequence
  Synthetic
aauauuuccaggagacuggg

SEQ ID NO: 105724 - RNA, 21 nt, Artificial Sequence
  Synthetic
uaauauuuccaggagacuggg

SEQ ID NO: 105725 - RNA, 22 nt, Artificial Sequence
  Synthetic
uuaauauuuccaggagacuggg

SEQ ID NO: 105726 - RNA, 23 nt, Artificial Sequence
  Synthetic
uuuaauauuuccaggagacuggg

SEQ ID NO: 105727 - RNA, 18 nt, Artificial Sequence
  Synthetic
cacugcugaguuacuggg

SEQ ID NO: 105728 - RNA, 19 nt, Artificial Sequence
  Synthetic
ucacugcugaguuacuggg

SEQ ID NO: 105729 - RNA, 21 nt, Artificial Sequence
  Synthetic
ugucacugcugaguuacuggg

SEQ ID NO: 105730 - RNA, 23 nt, Artificial Sequence
  Synthetic
agugucacugcugaguuacuggg

SEQ ID NO: 105731 - RNA, 18 nt, Artificial Sequence
  Synthetic
aucucucaaauaccuggg

SEQ ID NO: 105732 - RNA, 19 nt, Artificial Sequence
  Synthetic
aaucucucaaauaccuggg

SEQ ID NO: 105733 - RNA, 22 nt, Artificial Sequence
  Synthetic
uggaaucucucaaauaccuggg

SEQ ID NO: 105734 - RNA, 23 nt, Artificial Sequence
  Synthetic
cuggaaucucucaaauaccuggg

SEQ ID NO: 105735 - RNA, 24 nt, Artificial Sequence
  Synthetic
acuggaaucucucaaauaccuggg

SEQ ID NO: 105736 - RNA, 18 nt, Artificial Sequence
  Synthetic
auaaguaacuucccuggg

SEQ ID NO: 105737 - RNA, 19 nt, Artificial Sequence
  Synthetic
aauaaguaacuucccuggg

SEQ ID NO: 105738 - RNA, 20 nt, Artificial Sequence
  Synthetic
aaauaaguaacuucccuggg

SEQ ID NO: 105739 - RNA, 21 nt, Artificial Sequence
  Synthetic
aaaauaaguaacuucccuggg

SEQ ID NO: 105740 - RNA, 22 nt, Artificial Sequence
  Synthetic
aaaaauaaguaacuucccuggg

SEQ ID NO: 105741 - RNA, 23 nt, Artificial Sequence
  Synthetic
uaaaaauaaguaacuucccuggg

SEQ ID NO: 105742 - RNA, 24 nt, Artificial Sequence
  Synthetic
auaaaaauaaguaacuucccuggg

SEQ ID NO: 105743 - RNA, 18 nt, Artificial Sequence
  Synthetic
aaaggccagucuccuggg

SEQ ID NO: 105744 - RNA, 20 nt, Artificial Sequence
  Synthetic
agaaaggccagucuccuggg

SEQ ID NO: 105745 - RNA, 21 nt, Artificial Sequence
  Synthetic
cagaaaggccagucuccuggg

SEQ ID NO: 105746 - RNA, 22 nt, Artificial Sequence
  Synthetic
ucagaaaggccagucuccuggg

SEQ ID NO: 105747 - RNA, 23 nt, Artificial Sequence
  Synthetic
aucagaaaggccagucuccuggg

SEQ ID NO: 105748 - RNA, 24 nt, Artificial Sequence
  Synthetic
aaucagaaaggccagucuccuggg

SEQ ID NO: 105749 - RNA, 21 nt, Artificial Sequence
  Synthetic
uuauagauaccagaggcuggg

SEQ ID NO: 105750 - RNA, 22 nt, Artificial Sequence
  Synthetic
uuuauagauaccagaggcuggg

SEQ ID NO: 105751 - RNA, 23 nt, Artificial Sequence
  Synthetic
uuuuauagauaccagaggcuggg

SEQ ID NO: 105752 - RNA, 24 nt, Artificial Sequence
  Synthetic
uuuuuauagauaccagaggcuggg

SEQ ID NO: 105753 - RNA, 18 nt, Artificial Sequence
  Synthetic
caguuuccaaacucuggg

SEQ ID NO: 105754 - RNA, 19 nt, Artificial Sequence
  Synthetic
ucaguuuccaaacucuggg

SEQ ID NO: 105755 - RNA, 20 nt, Artificial Sequence
  Synthetic
cucaguuuccaaacucuggg

SEQ ID NO: 105756 - RNA, 21 nt, Artificial Sequence
  Synthetic
acucaguuuccaaacucuggg

SEQ ID NO: 105757 - RNA, 22 nt, Artificial Sequence
  Synthetic
uacucaguuuccaaacucuggg

SEQ ID NO: 105758 - RNA, 18 nt, Artificial Sequence
  Synthetic
uuucaaugauguucuggg

SEQ ID NO: 105759 - RNA, 19 nt, Artificial Sequence
  Synthetic
uuuucaaugauguucuggg

SEQ ID NO: 105760 - RNA, 20 nt, Artificial Sequence
  Synthetic
auuuucaaugauguucuggg

SEQ ID NO: 105761 - RNA, 21 nt, Artificial Sequence
  Synthetic
aauuuucaaugauguucuggg

SEQ ID NO: 105762 - RNA, 23 nt, Artificial Sequence
  Synthetic
agaauuuucaaugauguucuggg

SEQ ID NO: 105763 - RNA, 24 nt, Artificial Sequence
  Synthetic
uagaauuuucaaugauguucuggg

SEQ ID NO: 105764 - RNA, 18 nt, Artificial Sequence
  Synthetic
uuccugagaaaaaguggg

SEQ ID NO: 105765 - RNA, 19 nt, Artificial Sequence
  Synthetic
uuuccugagaaaaaguggg

SEQ ID NO: 105766 - RNA, 20 nt, Artificial Sequence
  Synthetic
auuuccugagaaaaaguggg

SEQ ID NO: 105767 - RNA, 21 nt, Artificial Sequence
  Synthetic
aauuuccugagaaaaaguggg

SEQ ID NO: 105768 - RNA, 22 nt, Artificial Sequence
  Synthetic
caauuuccugagaaaaaguggg

SEQ ID NO: 105769 - RNA, 23 nt, Artificial Sequence
  Synthetic
acaauuuccugagaaaaaguggg

SEQ ID NO: 105770 - RNA, 24 nt, Artificial Sequence
  Synthetic
cacaauuuccugagaaaaaguggg

SEQ ID NO: 105771 - RNA, 18 nt, Artificial Sequence
  Synthetic
uaucuucaaaacaguggg

SEQ ID NO: 105772 - RNA, 20 nt, Artificial Sequence
  Synthetic
uguaucuucaaaacaguggg

SEQ ID NO: 105773 - RNA, 21 nt, Artificial Sequence
  Synthetic
uuguaucuucaaaacaguggg

SEQ ID NO: 105774 - RNA, 22 nt, Artificial Sequence
  Synthetic
uuuguaucuucaaaacaguggg

SEQ ID NO: 105775 - RNA, 23 nt, Artificial Sequence
  Synthetic
uuuuguaucuucaaaacaguggg

SEQ ID NO: 105776 - RNA, 24 nt, Artificial Sequence
  Synthetic
cuuuuguaucuucaaaacaguggg

SEQ ID NO: 105777 - RNA, 20 nt, Artificial Sequence
  Synthetic
uggaagccuacuggaguggg

SEQ ID NO: 105778 - RNA, 22 nt, Artificial Sequence
  Synthetic
cguggaagccuacuggaguggg

SEQ ID NO: 105779 - RNA, 23 nt, Artificial Sequence
  Synthetic
acguggaagccuacuggaguggg

SEQ ID NO: 105780 - RNA, 18 nt, Artificial Sequence
  Synthetic
uaaauuaacuuuaguggg

SEQ ID NO: 105781 - RNA, 19 nt, Artificial Sequence
  Synthetic
cuaaauuaacuuuaguggg

SEQ ID NO: 105782 - RNA, 20 nt, Artificial Sequence
  Synthetic
ucuaaauuaacuuuaguggg

SEQ ID NO: 105783 - RNA, 21 nt, Artificial Sequence
  Synthetic
uucuaaauuaacuuuaguggg

SEQ ID NO: 105784 - RNA, 22 nt, Artificial Sequence
  Synthetic
cuucuaaauuaacuuuaguggg

SEQ ID NO: 105785 - RNA, 23 nt, Artificial Sequence
  Synthetic
acuucuaaauuaacuuuaguggg

SEQ ID NO: 105786 - RNA, 24 nt, Artificial Sequence
  Synthetic
uacuucuaaauuaacuuuaguggg

SEQ ID NO: 105787 - RNA, 18 nt, Artificial Sequence
  Synthetic
caaauacaugaucguggg

SEQ ID NO: 105788 - RNA, 19 nt, Artificial Sequence
  Synthetic
ccaaauacaugaucguggg

SEQ ID NO: 105789 - RNA, 21 nt, Artificial Sequence
  Synthetic
ugccaaauacaugaucguggg

SEQ ID NO: 105790 - RNA, 22 nt, Artificial Sequence
  Synthetic
augccaaauacaugaucguggg

SEQ ID NO: 105791 - RNA, 23 nt, Artificial Sequence
  Synthetic
aaugccaaauacaugaucguggg

SEQ ID NO: 105792 - RNA, 24 nt, Artificial Sequence
  Synthetic
caaugccaaauacaugaucguggg

SEQ ID NO: 105793 - RNA, 19 nt, Artificial Sequence
  Synthetic
ugggaagaguguagguggg

SEQ ID NO: 105794 - RNA, 20 nt, Artificial Sequence
  Synthetic
cugggaagaguguagguggg

SEQ ID NO: 105795 - RNA, 18 nt, Artificial Sequence
  Synthetic
uuagcuuuagacgguggg

SEQ ID NO: 105796 - RNA, 19 nt, Artificial Sequence
  Synthetic
uuuagcuuuagacgguggg

SEQ ID NO: 105797 - RNA, 20 nt, Artificial Sequence
  Synthetic
cuuuagcuuuagacgguggg

SEQ ID NO: 105798 - RNA, 21 nt, Artificial Sequence
  Synthetic
acuuuagcuuuagacgguggg

SEQ ID NO: 105799 - RNA, 22 nt, Artificial Sequence
  Synthetic
aacuuuagcuuuagacgguggg

SEQ ID NO: 105800 - RNA, 23 nt, Artificial Sequence
  Synthetic
aaacuuuagcuuuagacgguggg

SEQ ID NO: 105801 - RNA, 24 nt, Artificial Sequence
  Synthetic
uaaacuuuagcuuuagacgguggg

SEQ ID NO: 105802 - RNA, 18 nt, Artificial Sequence
  Synthetic
aaaugaagcaaggguggg

SEQ ID NO: 105803 - RNA, 19 nt, Artificial Sequence
  Synthetic
aaaaugaagcaaggguggg

SEQ ID NO: 105804 - RNA, 21 nt, Artificial Sequence
  Synthetic
agaaaaugaagcaaggguggg

SEQ ID NO: 105805 - RNA, 22 nt, Artificial Sequence
  Synthetic
aagaaaaugaagcaaggguggg

SEQ ID NO: 105806 - RNA, 23 nt, Artificial Sequence
  Synthetic
uaagaaaaugaagcaaggguggg

SEQ ID NO: 105807 - RNA, 24 nt, Artificial Sequence
  Synthetic
auaagaaaaugaagcaaggguggg

SEQ ID NO: 105808 - RNA, 21 nt, Artificial Sequence
  Synthetic
aaggaacuucuuagggguggg

SEQ ID NO: 105809 - RNA, 22 nt, Artificial Sequence
  Synthetic
caaggaacuucuuagggguggg

SEQ ID NO: 105810 - RNA, 23 nt, Artificial Sequence
  Synthetic
acaaggaacuucuuagggguggg

SEQ ID NO: 105811 - RNA, 24 nt, Artificial Sequence
  Synthetic
uacaaggaacuucuuagggguggg

SEQ ID NO: 105812 - RNA, 18 nt, Artificial Sequence
  Synthetic
caagggggaugugguggg

SEQ ID NO: 105813 - RNA, 19 nt, Artificial Sequence
  Synthetic
ucaagggggaugugguggg

SEQ ID NO: 105814 - RNA, 20 nt, Artificial Sequence
  Synthetic
uucaagggggaugugguggg

SEQ ID NO: 105815 - RNA, 21 nt, Artificial Sequence
  Synthetic
uuucaagggggaugugguggg

SEQ ID NO: 105816 - RNA, 22 nt, Artificial Sequence
  Synthetic
uuuucaagggggaugugguggg

SEQ ID NO: 105817 - RNA, 23 nt, Artificial Sequence
  Synthetic
auuuucaagggggaugugguggg

SEQ ID NO: 105818 - RNA, 24 nt, Artificial Sequence
  Synthetic
aauuuucaagggggaugugguggg

SEQ ID NO: 105819 - RNA, 18 nt, Artificial Sequence
  Synthetic
uggaaauucuucuguggg

SEQ ID NO: 105820 - RNA, 19 nt, Artificial Sequence
  Synthetic
uuggaaauucuucuguggg

SEQ ID NO: 105821 - RNA, 20 nt, Artificial Sequence
  Synthetic
uuuggaaauucuucuguggg

SEQ ID NO: 105822 - RNA, 21 nt, Artificial Sequence
  Synthetic
uuuuggaaauucuucuguggg

SEQ ID NO: 105823 - RNA, 22 nt, Artificial Sequence
  Synthetic
uuuuuggaaauucuucuguggg

SEQ ID NO: 105824 - RNA, 24 nt, Artificial Sequence
  Synthetic
uguuuuuggaaauucuucuguggg

SEQ ID NO: 105825 - RNA, 18 nt, Artificial Sequence
  Synthetic
ccucuucuccauuguggg

SEQ ID NO: 105826 - RNA, 20 nt, Artificial Sequence
  Synthetic
ugccucuucuccauuguggg

SEQ ID NO: 105827 - RNA, 21 nt, Artificial Sequence
  Synthetic
augccucuucuccauuguggg

SEQ ID NO: 105828 - RNA, 22 nt, Artificial Sequence
  Synthetic
aaugccucuucuccauuguggg

SEQ ID NO: 105829 - RNA, 23 nt, Artificial Sequence
  Synthetic
uaaugccucuucuccauuguggg

SEQ ID NO: 105830 - RNA, 24 nt, Artificial Sequence
  Synthetic
auaaugccucuucuccauuguggg

SEQ ID NO: 105831 - RNA, 18 nt, Artificial Sequence
  Synthetic
auauauaacuaccuuggg

SEQ ID NO: 105832 - RNA, 19 nt, Artificial Sequence
  Synthetic
aauauauaacuaccuuggg

SEQ ID NO: 105833 - RNA, 20 nt, Artificial Sequence
  Synthetic
aaauauauaacuaccuuggg

SEQ ID NO: 105834 - RNA, 22 nt, Artificial Sequence
  Synthetic
ugaaauauauaacuaccuuggg

SEQ ID NO: 105835 - RNA, 23 nt, Artificial Sequence
  Synthetic
uugaaauauauaacuaccuuggg

SEQ ID NO: 105836 - RNA, 24 nt, Artificial Sequence
  Synthetic
auugaaauauauaacuaccuuggg

SEQ ID NO: 105837 - RNA, 18 nt, Artificial Sequence
  Synthetic
caagccuggagucuuggg

SEQ ID NO: 105838 - RNA, 19 nt, Artificial Sequence
  Synthetic
ccaagccuggagucuuggg

SEQ ID NO: 105839 - RNA, 20 nt, Artificial Sequence
  Synthetic
uccaagccuggagucuuggg

SEQ ID NO: 105840 - RNA, 21 nt, Artificial Sequence
  Synthetic
cuccaagccuggagucuuggg

SEQ ID NO: 105841 - RNA, 24 nt, Artificial Sequence
  Synthetic
uggcuccaagccuggagucuuggg

SEQ ID NO: 105842 - RNA, 19 nt, Artificial Sequence
  Synthetic
ugaugaauucuuucuuggg

SEQ ID NO: 105843 - RNA, 20 nt, Artificial Sequence
  Synthetic
uugaugaauucuuucuuggg

SEQ ID NO: 105844 - RNA, 21 nt, Artificial Sequence
  Synthetic
cuugaugaauucuuucuuggg

SEQ ID NO: 105845 - RNA, 22 nt, Artificial Sequence
  Synthetic
ucuugaugaauucuuucuuggg

SEQ ID NO: 105846 - RNA, 23 nt, Artificial Sequence
  Synthetic
aucuugaugaauucuuucuuggg

SEQ ID NO: 105847 - RNA, 19 nt, Artificial Sequence
  Synthetic
ugagcuacauauuuuuggg

SEQ ID NO: 105848 - RNA, 20 nt, Artificial Sequence
  Synthetic
augagcuacauauuuuuggg

SEQ ID NO: 105849 - RNA, 21 nt, Artificial Sequence
  Synthetic
uaugagcuacauauuuuuggg

SEQ ID NO: 105850 - RNA, 22 nt, Artificial Sequence
  Synthetic
uuaugagcuacauauuuuuggg

SEQ ID NO: 105851 - RNA, 23 nt, Artificial Sequence
  Synthetic
cuuaugagcuacauauuuuuggg

SEQ ID NO: 105852 - RNA, 24 nt, Artificial Sequence
  Synthetic
ucuuaugagcuacauauuuuuggg

SEQ ID NO: 105853 - RNA, 21 nt, Artificial Sequence
  Synthetic
aaaacagcuaauuaaaaaugg

SEQ ID NO: 105854 - RNA, 22 nt, Artificial Sequence
  Synthetic
aaaaacagcuaauuaaaaaugg

SEQ ID NO: 105855 - RNA, 23 nt, Artificial Sequence
  Synthetic
uaaaaacagcuaauuaaaaaugg

SEQ ID NO: 105856 - RNA, 24 nt, Artificial Sequence
  Synthetic
uuaaaaacagcuaauuaaaaaugg

SEQ ID NO: 105857 - RNA, 18 nt, Artificial Sequence
  Synthetic
uuacauagggcaaaaugg

SEQ ID NO: 105858 - RNA, 19 nt, Artificial Sequence
  Synthetic
uuuacauagggcaaaaugg

SEQ ID NO: 105859 - RNA, 20 nt, Artificial Sequence
  Synthetic
auuuacauagggcaaaaugg

SEQ ID NO: 105860 - RNA, 21 nt, Artificial Sequence
  Synthetic
uauuuacauagggcaaaaugg

SEQ ID NO: 105861 - RNA, 22 nt, Artificial Sequence
  Synthetic
uuauuuacauagggcaaaaugg

SEQ ID NO: 105862 - RNA, 23 nt, Artificial Sequence
  Synthetic
auuauuuacauagggcaaaaugg

SEQ ID NO: 105863 - RNA, 24 nt, Artificial Sequence
  Synthetic
uauuauuuacauagggcaaaaugg

SEQ ID NO: 105864 - RNA, 18 nt, Artificial Sequence
  Synthetic
ucgcuuaguggcaaaugg

SEQ ID NO: 105865 - RNA, 19 nt, Artificial Sequence
  Synthetic
aucgcuuaguggcaaaugg

SEQ ID NO: 105866 - RNA, 21 nt, Artificial Sequence
  Synthetic
ugaucgcuuaguggcaaaugg

SEQ ID NO: 105867 - RNA, 23 nt, Artificial Sequence
  Synthetic
cgugaucgcuuaguggcaaaugg

SEQ ID NO: 105868 - RNA, 18 nt, Artificial Sequence
  Synthetic
cauguggcuugcaaaugg

SEQ ID NO: 105869 - RNA, 19 nt, Artificial Sequence
  Synthetic
ccauguggcuugcaaaugg

SEQ ID NO: 105870 - RNA, 20 nt, Artificial Sequence
  Synthetic
accauguggcuugcaaaugg

SEQ ID NO: 105871 - RNA, 22 nt, Artificial Sequence
  Synthetic
agaccauguggcuugcaaaugg

SEQ ID NO: 105872 - RNA, 23 nt, Artificial Sequence
  Synthetic
aagaccauguggcuugcaaaugg

SEQ ID NO: 105873 - RNA, 24 nt, Artificial Sequence
  Synthetic
caagaccauguggcuugcaaaugg

SEQ ID NO: 105874 - RNA, 18 nt, Artificial Sequence
  Synthetic
acauccuaacagaaaugg

SEQ ID NO: 105875 - RNA, 21 nt, Artificial Sequence
  Synthetic
uggacauccuaacagaaaugg

SEQ ID NO: 105876 - RNA, 22 nt, Artificial Sequence
  Synthetic
uuggacauccuaacagaaaugg

SEQ ID NO: 105877 - RNA, 23 nt, Artificial Sequence
  Synthetic
auuggacauccuaacagaaaugg

SEQ ID NO: 105878 - RNA, 24 nt, Artificial Sequence
  Synthetic
aauuggacauccuaacagaaaugg

SEQ ID NO: 105879 - RNA, 19 nt, Artificial Sequence
  Synthetic
ugcauuucaauagaaaugg

SEQ ID NO: 105880 - RNA, 20 nt, Artificial Sequence
  Synthetic
uugcauuucaauagaaaugg

SEQ ID NO: 105881 - RNA, 21 nt, Artificial Sequence
  Synthetic
cuugcauuucaauagaaaugg

SEQ ID NO: 105882 - RNA, 22 nt, Artificial Sequence
  Synthetic
ccuugcauuucaauagaaaugg

SEQ ID NO: 105883 - RNA, 23 nt, Artificial Sequence
  Synthetic
cccuugcauuucaauagaaaugg

SEQ ID NO: 105884 - RNA, 24 nt, Artificial Sequence
  Synthetic
ucccuugcauuucaauagaaaugg

SEQ ID NO: 105885 - RNA, 19 nt, Artificial Sequence
  Synthetic
ugagaggguguagaaaugg

SEQ ID NO: 105886 - RNA, 20 nt, Artificial Sequence
  Synthetic
uugagaggguguagaaaugg

SEQ ID NO: 105887 - RNA, 22 nt, Artificial Sequence
  Synthetic
aguugagaggguguagaaaugg

SEQ ID NO: 105888 - RNA, 23 nt, Artificial Sequence
  Synthetic
caguugagaggguguagaaaugg

SEQ ID NO: 105889 - RNA, 24 nt, Artificial Sequence
  Synthetic
ucaguugagaggguguagaaaugg

SEQ ID NO: 105890 - RNA, 18 nt, Artificial Sequence
  Synthetic
auaaaacuagugaaaugg

SEQ ID NO: 105891 - RNA, 19 nt, Artificial Sequence
  Synthetic
uauaaaacuagugaaaugg

SEQ ID NO: 105892 - RNA, 20 nt, Artificial Sequence
  Synthetic
uuauaaaacuagugaaaugg

SEQ ID NO: 105893 - RNA, 21 nt, Artificial Sequence
  Synthetic
uuuauaaaacuagugaaaugg

SEQ ID NO: 105894 - RNA, 23 nt, Artificial Sequence
  Synthetic
aguuuauaaaacuagugaaaugg

SEQ ID NO: 105895 - RNA, 24 nt, Artificial Sequence
  Synthetic
caguuuauaaaacuagugaaaugg

SEQ ID NO: 105896 - RNA, 18 nt, Artificial Sequence
  Synthetic
aacauguugcauaaaugg

SEQ ID NO: 105897 - RNA, 19 nt, Artificial Sequence
  Synthetic
caacauguugcauaaaugg

SEQ ID NO: 105898 - RNA, 22 nt, Artificial Sequence
  Synthetic
aggcaacauguugcauaaaugg

SEQ ID NO: 105899 - RNA, 23 nt, Artificial Sequence
  Synthetic
uaggcaacauguugcauaaaugg

SEQ ID NO: 105900 - RNA, 24 nt, Artificial Sequence
  Synthetic
uuaggcaacauguugcauaaaugg

SEQ ID NO: 105901 - RNA, 18 nt, Artificial Sequence
  Synthetic
agaagaugaguagaaugg

SEQ ID NO: 105902 - RNA, 19 nt, Artificial Sequence
  Synthetic
aagaagaugaguagaaugg

SEQ ID NO: 105903 - RNA, 21 nt, Artificial Sequence
  Synthetic
agaagaagaugaguagaaugg

SEQ ID NO: 105904 - RNA, 23 nt, Artificial Sequence
  Synthetic
agagaagaagaugaguagaaugg

SEQ ID NO: 105905 - RNA, 24 nt, Artificial Sequence
  Synthetic
uagagaagaagaugaguagaaugg

SEQ ID NO: 105906 - RNA, 18 nt, Artificial Sequence
  Synthetic
agccacccauuagaaugg

SEQ ID NO: 105907 - RNA, 19 nt, Artificial Sequence
  Synthetic
cagccacccauuagaaugg

SEQ ID NO: 105908 - RNA, 20 nt, Artificial Sequence
  Synthetic
acagccacccauuagaaugg

SEQ ID NO: 105909 - RNA, 21 nt, Artificial Sequence
  Synthetic
aacagccacccauuagaaugg

SEQ ID NO: 105910 - RNA, 22 nt, Artificial Sequence
  Synthetic
uaacagccacccauuagaaugg

SEQ ID NO: 105911 - RNA, 23 nt, Artificial Sequence
  Synthetic
uuaacagccacccauuagaaugg

SEQ ID NO: 105912 - RNA, 24 nt, Artificial Sequence
  Synthetic
uuuaacagccacccauuagaaugg

SEQ ID NO: 105913 - RNA, 19 nt, Artificial Sequence
  Synthetic
ugucucuggcagggaaugg

SEQ ID NO: 105914 - RNA, 20 nt, Artificial Sequence
  Synthetic
uugucucuggcagggaaugg

SEQ ID NO: 105915 - RNA, 21 nt, Artificial Sequence
  Synthetic
uuugucucuggcagggaaugg

SEQ ID NO: 105916 - RNA, 22 nt, Artificial Sequence
  Synthetic
uuuugucucuggcagggaaugg

SEQ ID NO: 105917 - RNA, 23 nt, Artificial Sequence
  Synthetic
auuuugucucuggcagggaaugg

SEQ ID NO: 105918 - RNA, 24 nt, Artificial Sequence
  Synthetic
cauuuugucucuggcagggaaugg

SEQ ID NO: 105919 - RNA, 18 nt, Artificial Sequence
  Synthetic
uuacaauucccugaaugg

SEQ ID NO: 105920 - RNA, 21 nt, Artificial Sequence
  Synthetic
agguuacaauucccugaaugg

SEQ ID NO: 105921 - RNA, 22 nt, Artificial Sequence
  Synthetic
cagguuacaauucccugaaugg

SEQ ID NO: 105922 - RNA, 23 nt, Artificial Sequence
  Synthetic
acagguuacaauucccugaaugg

SEQ ID NO: 105923 - RNA, 24 nt, Artificial Sequence
  Synthetic
uacagguuacaauucccugaaugg

SEQ ID NO: 105924 - RNA, 18 nt, Artificial Sequence
  Synthetic
cuugagagcaaauaaugg

SEQ ID NO: 105925 - RNA, 19 nt, Artificial Sequence
  Synthetic
acuugagagcaaauaaugg

SEQ ID NO: 105926 - RNA, 20 nt, Artificial Sequence
  Synthetic
aacuugagagcaaauaaugg

SEQ ID NO: 105927 - RNA, 21 nt, Artificial Sequence
  Synthetic
uaacuugagagcaaauaaugg

SEQ ID NO: 105928 - RNA, 22 nt, Artificial Sequence
  Synthetic
uuaacuugagagcaaauaaugg

SEQ ID NO: 105929 - RNA, 23 nt, Artificial Sequence
  Synthetic
uuuaacuugagagcaaauaaugg

SEQ ID NO: 105930 - RNA, 18 nt, Artificial Sequence
  Synthetic
cccaaugcccaauaaugg

SEQ ID NO: 105931 - RNA, 19 nt, Artificial Sequence
  Synthetic
ucccaaugcccaauaaugg

SEQ ID NO: 105932 - RNA, 21 nt, Artificial Sequence
  Synthetic
agucccaaugcccaauaaugg

SEQ ID NO: 105933 - RNA, 22 nt, Artificial Sequence
  Synthetic
cagucccaaugcccaauaaugg

SEQ ID NO: 105934 - RNA, 24 nt, Artificial Sequence
  Synthetic
agcagucccaaugcccaauaaugg

SEQ ID NO: 105935 - RNA, 18 nt, Artificial Sequence
  Synthetic
uuaaguguuuaauaaugg

SEQ ID NO: 105936 - RNA, 19 nt, Artificial Sequence
  Synthetic
cuuaaguguuuaauaaugg

SEQ ID NO: 105937 - RNA, 20 nt, Artificial Sequence
  Synthetic
acuuaaguguuuaauaaugg

SEQ ID NO: 105938 - RNA, 18 nt, Artificial Sequence
  Synthetic
agacaauuuuuauaaugg

SEQ ID NO: 105939 - RNA, 19 nt, Artificial Sequence
  Synthetic
aagacaauuuuuauaaugg

SEQ ID NO: 105940 - RNA, 18 nt, Artificial Sequence
  Synthetic
uguguuacaugguaaugg

SEQ ID NO: 105941 - RNA, 19 nt, Artificial Sequence
  Synthetic
auguguuacaugguaaugg

SEQ ID NO: 105942 - RNA, 21 nt, Artificial Sequence
  Synthetic
agauguguuacaugguaaugg

SEQ ID NO: 105943 - RNA, 22 nt, Artificial Sequence
  Synthetic
cagauguguuacaugguaaugg

SEQ ID NO: 105944 - RNA, 23 nt, Artificial Sequence
  Synthetic
ucagauguguuacaugguaaugg

SEQ ID NO: 105945 - RNA, 24 nt, Artificial Sequence
  Synthetic
uucagauguguuacaugguaaugg

SEQ ID NO: 105946 - RNA, 19 nt, Artificial Sequence
  Synthetic
uggcaauaucacuuaaugg

SEQ ID NO: 105947 - RNA, 20 nt, Artificial Sequence
  Synthetic
uuggcaauaucacuuaaugg

SEQ ID NO: 105948 - RNA, 21 nt, Artificial Sequence
  Synthetic
uuuggcaauaucacuuaaugg

SEQ ID NO: 105949 - RNA, 22 nt, Artificial Sequence
  Synthetic
cuuuggcaauaucacuuaaugg

SEQ ID NO: 105950 - RNA, 23 nt, Artificial Sequence
  Synthetic
ucuuuggcaauaucacuuaaugg

SEQ ID NO: 105951 - RNA, 24 nt, Artificial Sequence
  Synthetic
uucuuuggcaauaucacuuaaugg

SEQ ID NO: 105952 - RNA, 18 nt, Artificial Sequence
  Synthetic
auggauauuuguuaaugg

SEQ ID NO: 105953 - RNA, 19 nt, Artificial Sequence
  Synthetic
aauggauauuuguuaaugg

SEQ ID NO: 105954 - RNA, 20 nt, Artificial Sequence
  Synthetic
caauggauauuuguuaaugg

SEQ ID NO: 105955 - RNA, 21 nt, Artificial Sequence
  Synthetic
acaauggauauuuguuaaugg

SEQ ID NO: 105956 - RNA, 22 nt, Artificial Sequence
  Synthetic
aacaauggauauuuguuaaugg

SEQ ID NO: 105957 - RNA, 23 nt, Artificial Sequence
  Synthetic
uaacaauggauauuuguuaaugg

SEQ ID NO: 105958 - RNA, 24 nt, Artificial Sequence
  Synthetic
auaacaauggauauuuguuaaugg

SEQ ID NO: 105959 - RNA, 18 nt, Artificial Sequence
  Synthetic
agacaacaacucacaugg

SEQ ID NO: 105960 - RNA, 19 nt, Artificial Sequence
  Synthetic
aagacaacaacucacaugg

SEQ ID NO: 105961 - RNA, 20 nt, Artificial Sequence
  Synthetic
uaagacaacaacucacaugg

SEQ ID NO: 105962 - RNA, 21 nt, Artificial Sequence
  Synthetic
cuaagacaacaacucacaugg

SEQ ID NO: 105963 - RNA, 22 nt, Artificial Sequence
  Synthetic
acuaagacaacaacucacaugg

SEQ ID NO: 105964 - RNA, 23 nt, Artificial Sequence
  Synthetic
uacuaagacaacaacucacaugg

SEQ ID NO: 105965 - RNA, 18 nt, Artificial Sequence
  Synthetic
auacguauagucacaugg

SEQ ID NO: 105966 - RNA, 19 nt, Artificial Sequence
  Synthetic
cauacguauagucacaugg

SEQ ID NO: 105967 - RNA, 20 nt, Artificial Sequence
  Synthetic
acauacguauagucacaugg

SEQ ID NO: 105968 - RNA, 21 nt, Artificial Sequence
  Synthetic
uacauacguauagucacaugg

SEQ ID NO: 105969 - RNA, 22 nt, Artificial Sequence
  Synthetic
auacauacguauagucacaugg

SEQ ID NO: 105970 - RNA, 24 nt, Artificial Sequence
  Synthetic
ugauacauacguauagucacaugg

SEQ ID NO: 105971 - RNA, 18 nt, Artificial Sequence
  Synthetic
aauccaggauguacaugg

SEQ ID NO: 105972 - RNA, 19 nt, Artificial Sequence
  Synthetic
caauccaggauguacaugg

SEQ ID NO: 105973 - RNA, 21 nt, Artificial Sequence
  Synthetic
agcaauccaggauguacaugg

SEQ ID NO: 105974 - RNA, 22 nt, Artificial Sequence
  Synthetic
aagcaauccaggauguacaugg

SEQ ID NO: 105975 - RNA, 23 nt, Artificial Sequence
  Synthetic
caagcaauccaggauguacaugg

SEQ ID NO: 105976 - RNA, 21 nt, Artificial Sequence
  Synthetic
acagcugauacacuuacaugg

SEQ ID NO: 105977 - RNA, 22 nt, Artificial Sequence
  Synthetic
aacagcugauacacuuacaugg

SEQ ID NO: 105978 - RNA, 24 nt, Artificial Sequence
  Synthetic
ugaacagcugauacacuuacaugg

SEQ ID NO: 105979 - RNA, 18 nt, Artificial Sequence
  Synthetic
uaugaaauucucccaugg

SEQ ID NO: 105980 - RNA, 19 nt, Artificial Sequence
  Synthetic
auaugaaauucucccaugg

SEQ ID NO: 105981 - RNA, 20 nt, Artificial Sequence
  Synthetic
aauaugaaauucucccaugg

SEQ ID NO: 105982 - RNA, 21 nt, Artificial Sequence
  Synthetic
aaauaugaaauucucccaugg

SEQ ID NO: 105983 - RNA, 22 nt, Artificial Sequence
  Synthetic
aaaauaugaaauucucccaugg

SEQ ID NO: 105984 - RNA, 23 nt, Artificial Sequence
  Synthetic
aaaaauaugaaauucucccaugg

SEQ ID NO: 105985 - RNA, 24 nt, Artificial Sequence
  Synthetic
uaaaaauaugaaauucucccaugg

SEQ ID NO: 105986 - RNA, 18 nt, Artificial Sequence
  Synthetic
uuuagaacucagccaugg

SEQ ID NO: 105987 - RNA, 19 nt, Artificial Sequence
  Synthetic
cuuuagaacucagccaugg

SEQ ID NO: 105988 - RNA, 20 nt, Artificial Sequence
  Synthetic
ucuuuagaacucagccaugg

SEQ ID NO: 105989 - RNA, 21 nt, Artificial Sequence
  Synthetic
aucuuuagaacucagccaugg

SEQ ID NO: 105990 - RNA, 23 nt, Artificial Sequence
  Synthetic
agaucuuuagaacucagccaugg

SEQ ID NO: 105991 - RNA, 18 nt, Artificial Sequence
  Synthetic
uugguucuguugccaugg

SEQ ID NO: 105992 - RNA, 19 nt, Artificial Sequence
  Synthetic
cuugguucuguugccaugg

SEQ ID NO: 105993 - RNA, 20 nt, Artificial Sequence
  Synthetic
ucuugguucuguugccaugg

SEQ ID NO: 105994 - RNA, 21 nt, Artificial Sequence
  Synthetic
cucuugguucuguugccaugg

SEQ ID NO: 105995 - RNA, 22 nt, Artificial Sequence
  Synthetic
acucuugguucuguugccaugg

SEQ ID NO: 105996 - RNA, 24 nt, Artificial Sequence
  Synthetic
agacucuugguucuguugccaugg

SEQ ID NO: 105997 - RNA, 23 nt, Artificial Sequence
  Synthetic
aggcaguggacagugaagcaugg

SEQ ID NO: 105998 - RNA, 24 nt, Artificial Sequence
  Synthetic
aaggcaguggacagugaagcaugg

SEQ ID NO: 105999 - RNA, 18 nt, Artificial Sequence
  Synthetic
caucugagcagggcaugg

SEQ ID NO: 106000 - RNA, 20 nt, Artificial Sequence
  Synthetic
agcaucugagcagggcaugg

SEQ ID NO: 106001 - RNA, 21 nt, Artificial Sequence
  Synthetic
uagcaucugagcagggcaugg

SEQ ID NO: 106002 - RNA, 23 nt, Artificial Sequence
  Synthetic
uguagcaucugagcagggcaugg

SEQ ID NO: 106003 - RNA, 24 nt, Artificial Sequence
  Synthetic
auguagcaucugagcagggcaugg

SEQ ID NO: 106004 - RNA, 18 nt, Artificial Sequence
  Synthetic
cuaucaagcuauucaugg

SEQ ID NO: 106005 - RNA, 20 nt, Artificial Sequence
  Synthetic
agcuaucaagcuauucaugg

SEQ ID NO: 106006 - RNA, 21 nt, Artificial Sequence
  Synthetic
cagcuaucaagcuauucaugg

SEQ ID NO: 106007 - RNA, 22 nt, Artificial Sequence
  Synthetic
acagcuaucaagcuauucaugg

SEQ ID NO: 106008 - RNA, 23 nt, Artificial Sequence
  Synthetic
aacagcuaucaagcuauucaugg

SEQ ID NO: 106009 - RNA, 18 nt, Artificial Sequence
  Synthetic
auauagucaagaagaugg

SEQ ID NO: 106010 - RNA, 19 nt, Artificial Sequence
  Synthetic
aauauagucaagaagaugg

SEQ ID NO: 106011 - RNA, 20 nt, Artificial Sequence
  Synthetic
aaauauagucaagaagaugg

SEQ ID NO: 106012 - RNA, 21 nt, Artificial Sequence
  Synthetic
aaaauauagucaagaagaugg

SEQ ID NO: 106013 - RNA, 22 nt, Artificial Sequence
  Synthetic
uaaaauauagucaagaagaugg

SEQ ID NO: 106014 - RNA, 23 nt, Artificial Sequence
  Synthetic
uuaaaauauagucaagaagaugg

SEQ ID NO: 106015 - RNA, 19 nt, Artificial Sequence
  Synthetic
ugugcuuucuuuaagaugg

SEQ ID NO: 106016 - RNA, 21 nt, Artificial Sequence
  Synthetic
ugugugcuuucuuuaagaugg

SEQ ID NO: 106017 - RNA, 23 nt, Artificial Sequence
  Synthetic
cgugugugcuuucuuuaagaugg

SEQ ID NO: 106018 - RNA, 24 nt, Artificial Sequence
  Synthetic
acgugugugcuuucuuuaagaugg

SEQ ID NO: 106019 - RNA, 18 nt, Artificial Sequence
  Synthetic
cauaguuaccaacgaugg

SEQ ID NO: 106020 - RNA, 19 nt, Artificial Sequence
  Synthetic
acauaguuaccaacgaugg

SEQ ID NO: 106021 - RNA, 20 nt, Artificial Sequence
  Synthetic
uacauaguuaccaacgaugg

SEQ ID NO: 106022 - RNA, 22 nt, Artificial Sequence
  Synthetic
aguacauaguuaccaacgaugg

SEQ ID NO: 106023 - RNA, 23 nt, Artificial Sequence
  Synthetic
caguacauaguuaccaacgaugg

SEQ ID NO: 106024 - RNA, 24 nt, Artificial Sequence
  Synthetic
ucaguacauaguuaccaacgaugg

SEQ ID NO: 106025 - RNA, 18 nt, Artificial Sequence
  Synthetic
aaguaacugaguggaugg

SEQ ID NO: 106026 - RNA, 20 nt, Artificial Sequence
  Synthetic
agaaguaacugaguggaugg

SEQ ID NO: 106027 - RNA, 22 nt, Artificial Sequence
  Synthetic
agagaaguaacugaguggaugg

SEQ ID NO: 106028 - RNA, 24 nt, Artificial Sequence
  Synthetic
agagagaaguaacugaguggaugg

SEQ ID NO: 106029 - RNA, 18 nt, Artificial Sequence
  Synthetic
accaccuccugaugaugg

SEQ ID NO: 106030 - RNA, 19 nt, Artificial Sequence
  Synthetic
uaccaccuccugaugaugg

SEQ ID NO: 106031 - RNA, 20 nt, Artificial Sequence
  Synthetic
auaccaccuccugaugaugg

SEQ ID NO: 106032 - RNA, 21 nt, Artificial Sequence
  Synthetic
uauaccaccuccugaugaugg

SEQ ID NO: 106033 - RNA, 22 nt, Artificial Sequence
  Synthetic
auauaccaccuccugaugaugg

SEQ ID NO: 106034 - RNA, 23 nt, Artificial Sequence
  Synthetic
uauauaccaccuccugaugaugg

SEQ ID NO: 106035 - RNA, 24 nt, Artificial Sequence
  Synthetic
uuauauaccaccuccugaugaugg

SEQ ID NO: 106036 - RNA, 18 nt, Artificial Sequence
  Synthetic
ccuaggagauucugaugg

SEQ ID NO: 106037 - RNA, 19 nt, Artificial Sequence
  Synthetic
cccuaggagauucugaugg

SEQ ID NO: 106038 - RNA, 20 nt, Artificial Sequence
  Synthetic
ucccuaggagauucugaugg

SEQ ID NO: 106039 - RNA, 19 nt, Artificial Sequence
  Synthetic
ugcacguauugguugaugg

SEQ ID NO: 106040 - RNA, 20 nt, Artificial Sequence
  Synthetic
cugcacguauugguugaugg

SEQ ID NO: 106041 - RNA, 24 nt, Artificial Sequence
  Synthetic
cgggcugcacguauugguugaugg

SEQ ID NO: 106042 - RNA, 18 nt, Artificial Sequence
  Synthetic
caauuauuacuuugaugg

SEQ ID NO: 106043 - RNA, 20 nt, Artificial Sequence
  Synthetic
agcaauuauuacuuugaugg

SEQ ID NO: 106044 - RNA, 21 nt, Artificial Sequence
  Synthetic
aagcaauuauuacuuugaugg

SEQ ID NO: 106045 - RNA, 22 nt, Artificial Sequence
  Synthetic
uaagcaauuauuacuuugaugg

SEQ ID NO: 106046 - RNA, 23 nt, Artificial Sequence
  Synthetic
cuaagcaauuauuacuuugaugg

SEQ ID NO: 106047 - RNA, 24 nt, Artificial Sequence
  Synthetic
acuaagcaauuauuacuuugaugg

SEQ ID NO: 106048 - RNA, 18 nt, Artificial Sequence
  Synthetic
aaagcaugcacaauaugg

SEQ ID NO: 106049 - RNA, 19 nt, Artificial Sequence
  Synthetic
aaaagcaugcacaauaugg

SEQ ID NO: 106050 - RNA, 20 nt, Artificial Sequence
  Synthetic
caaaagcaugcacaauaugg

SEQ ID NO: 106051 - RNA, 21 nt, Artificial Sequence
  Synthetic
acaaaagcaugcacaauaugg

SEQ ID NO: 106052 - RNA, 22 nt, Artificial Sequence
  Synthetic
uacaaaagcaugcacaauaugg

SEQ ID NO: 106053 - RNA, 24 nt, Artificial Sequence
  Synthetic
uguacaaaagcaugcacaauaugg

SEQ ID NO: 106054 - RNA, 18 nt, Artificial Sequence
  Synthetic
aaggugcuccuaauaugg

SEQ ID NO: 106055 - RNA, 19 nt, Artificial Sequence
  Synthetic
caaggugcuccuaauaugg

SEQ ID NO: 106056 - RNA, 20 nt, Artificial Sequence
  Synthetic
ucaaggugcuccuaauaugg

SEQ ID NO: 106057 - RNA, 21 nt, Artificial Sequence
  Synthetic
uucaaggugcuccuaauaugg

SEQ ID NO: 106058 - RNA, 22 nt, Artificial Sequence
  Synthetic
cuucaaggugcuccuaauaugg

SEQ ID NO: 106059 - RNA, 23 nt, Artificial Sequence
  Synthetic
ccuucaaggugcuccuaauaugg

SEQ ID NO: 106060 - RNA, 24 nt, Artificial Sequence
  Synthetic
accuucaaggugcuccuaauaugg

SEQ ID NO: 106061 - RNA, 19 nt, Artificial Sequence
  Synthetic
aggguacauacucauaugg

SEQ ID NO: 106062 - RNA, 20 nt, Artificial Sequence
  Synthetic
aaggguacauacucauaugg

SEQ ID NO: 106063 - RNA, 21 nt, Artificial Sequence
  Synthetic
caaggguacauacucauaugg

SEQ ID NO: 106064 - RNA, 23 nt, Artificial Sequence
  Synthetic
agcaaggguacauacucauaugg

SEQ ID NO: 106065 - RNA, 24 nt, Artificial Sequence
  Synthetic
cagcaaggguacauacucauaugg

SEQ ID NO: 106066 - RNA, 18 nt, Artificial Sequence
  Synthetic
auaaauuaaaagauaugg

SEQ ID NO: 106067 - RNA, 19 nt, Artificial Sequence
  Synthetic
cauaaauuaaaagauaugg

SEQ ID NO: 106068 - RNA, 20 nt, Artificial Sequence
  Synthetic
ccauaaauuaaaagauaugg

SEQ ID NO: 106069 - RNA, 21 nt, Artificial Sequence
  Synthetic
uccauaaauuaaaagauaugg

SEQ ID NO: 106070 - RNA, 22 nt, Artificial Sequence
  Synthetic
auccauaaauuaaaagauaugg

SEQ ID NO: 106071 - RNA, 23 nt, Artificial Sequence
  Synthetic
aauccauaaauuaaaagauaugg

SEQ ID NO: 106072 - RNA, 24 nt, Artificial Sequence
  Synthetic
aaauccauaaauuaaaagauaugg

SEQ ID NO: 106073 - RNA, 19 nt, Artificial Sequence
  Synthetic
agguaggagggugauaugg

SEQ ID NO: 106074 - RNA, 21 nt, Artificial Sequence
  Synthetic
ugagguaggagggugauaugg

SEQ ID NO: 106075 - RNA, 22 nt, Artificial Sequence
  Synthetic
cugagguaggagggugauaugg

SEQ ID NO: 106076 - RNA, 24 nt, Artificial Sequence
  Synthetic
agcugagguaggagggugauaugg

SEQ ID NO: 106077 - RNA, 21 nt, Artificial Sequence
  Synthetic
ugaauuuaacuacuuauaugg

SEQ ID NO: 106078 - RNA, 22 nt, Artificial Sequence
  Synthetic
uugaauuuaacuacuuauaugg

SEQ ID NO: 106079 - RNA, 23 nt, Artificial Sequence
  Synthetic
cuugaauuuaacuacuuauaugg

SEQ ID NO: 106080 - RNA, 24 nt, Artificial Sequence
  Synthetic
ucuugaauuuaacuacuuauaugg

SEQ ID NO: 106081 - RNA, 18 nt, Artificial Sequence
  Synthetic
cuuuuaaacaaacuaugg

SEQ ID NO: 106082 - RNA, 19 nt, Artificial Sequence
  Synthetic
ucuuuuaaacaaacuaugg

SEQ ID NO: 106083 - RNA, 20 nt, Artificial Sequence
  Synthetic
cucuuuuaaacaaacuaugg

SEQ ID NO: 106084 - RNA, 21 nt, Artificial Sequence
  Synthetic
ucucuuuuaaacaaacuaugg

SEQ ID NO: 106085 - RNA, 22 nt, Artificial Sequence
  Synthetic
uucucuuuuaaacaaacuaugg

SEQ ID NO: 106086 - RNA, 23 nt, Artificial Sequence
  Synthetic
uuucucuuuuaaacaaacuaugg

SEQ ID NO: 106087 - RNA, 24 nt, Artificial Sequence
  Synthetic
auuucucuuuuaaacaaacuaugg

SEQ ID NO: 106088 - RNA, 18 nt, Artificial Sequence
  Synthetic
aggucugugauacuaugg

SEQ ID NO: 106089 - RNA, 19 nt, Artificial Sequence
  Synthetic
caggucugugauacuaugg

SEQ ID NO: 106090 - RNA, 21 nt, Artificial Sequence
  Synthetic
ugcaggucugugauacuaugg

SEQ ID NO: 106091 - RNA, 22 nt, Artificial Sequence
  Synthetic
uugcaggucugugauacuaugg

SEQ ID NO: 106092 - RNA, 23 nt, Artificial Sequence
  Synthetic
cuugcaggucugugauacuaugg

SEQ ID NO: 106093 - RNA, 18 nt, Artificial Sequence
  Synthetic
ucauauacauaauuaugg

SEQ ID NO: 106094 - RNA, 19 nt, Artificial Sequence
  Synthetic
cucauauacauaauuaugg

SEQ ID NO: 106095 - RNA, 20 nt, Artificial Sequence
  Synthetic
ucucauauacauaauuaugg

SEQ ID NO: 106096 - RNA, 21 nt, Artificial Sequence
  Synthetic
uucucauauacauaauuaugg

SEQ ID NO: 106097 - RNA, 22 nt, Artificial Sequence
  Synthetic
uuucucauauacauaauuaugg

SEQ ID NO: 106098 - RNA, 23 nt, Artificial Sequence
  Synthetic
uuuucucauauacauaauuaugg

SEQ ID NO: 106099 - RNA, 24 nt, Artificial Sequence
  Synthetic
uuuuucucauauacauaauuaugg

SEQ ID NO: 106100 - RNA, 20 nt, Artificial Sequence
  Synthetic
agguauuuuguggcuuaugg

SEQ ID NO: 106101 - RNA, 21 nt, Artificial Sequence
  Synthetic
aagguauuuuguggcuuaugg

SEQ ID NO: 106102 - RNA, 24 nt, Artificial Sequence
  Synthetic
uggaagguauuuuguggcuuaugg

SEQ ID NO: 106103 - RNA, 18 nt, Artificial Sequence
  Synthetic
cuugcuuaaugcuuaugg

SEQ ID NO: 106104 - RNA, 19 nt, Artificial Sequence
  Synthetic
acuugcuuaaugcuuaugg

SEQ ID NO: 106105 - RNA, 20 nt, Artificial Sequence
  Synthetic
uacuugcuuaaugcuuaugg

SEQ ID NO: 106106 - RNA, 21 nt, Artificial Sequence
  Synthetic
cuacuugcuuaaugcuuaugg

SEQ ID NO: 106107 - RNA, 22 nt, Artificial Sequence
  Synthetic
ccuacuugcuuaaugcuuaugg

SEQ ID NO: 106108 - RNA, 23 nt, Artificial Sequence
  Synthetic
accuacuugcuuaaugcuuaugg

SEQ ID NO: 106109 - RNA, 24 nt, Artificial Sequence
  Synthetic
uaccuacuugcuuaaugcuuaugg

SEQ ID NO: 106110 - RNA, 18 nt, Artificial Sequence
  Synthetic
acguuguuuucuuuaugg

SEQ ID NO: 106111 - RNA, 22 nt, Artificial Sequence
  Synthetic
agggacguuguuuucuuuaugg

SEQ ID NO: 106112 - RNA, 23 nt, Artificial Sequence
  Synthetic
aagggacguuguuuucuuuaugg

SEQ ID NO: 106113 - RNA, 24 nt, Artificial Sequence
  Synthetic
aaagggacguuguuuucuuuaugg

SEQ ID NO: 106114 - RNA, 18 nt, Artificial Sequence
  Synthetic
uaaagacuugauaacugg

SEQ ID NO: 106115 - RNA, 20 nt, Artificial Sequence
  Synthetic
cguaaagacuugauaacugg

SEQ ID NO: 106116 - RNA, 22 nt, Artificial Sequence
  Synthetic
agcguaaagacuugauaacugg

SEQ ID NO: 106117 - RNA, 24 nt, Artificial Sequence
  Synthetic
ugagcguaaagacuugauaacugg

SEQ ID NO: 106118 - RNA, 18 nt, Artificial Sequence
  Synthetic
cuucauuaccuucacugg

SEQ ID NO: 106119 - RNA, 20 nt, Artificial Sequence
  Synthetic
ugcuucauuaccuucacugg

SEQ ID NO: 106120 - RNA, 21 nt, Artificial Sequence
  Synthetic
uugcuucauuaccuucacugg

SEQ ID NO: 106121 - RNA, 24 nt, Artificial Sequence
  Synthetic
agguugcuucauuaccuucacugg

SEQ ID NO: 106122 - RNA, 18 nt, Artificial Sequence
  Synthetic
caucugugaugauacugg

SEQ ID NO: 106123 - RNA, 19 nt, Artificial Sequence
  Synthetic
acaucugugaugauacugg

SEQ ID NO: 106124 - RNA, 20 nt, Artificial Sequence
  Synthetic
aacaucugugaugauacugg

SEQ ID NO: 106125 - RNA, 21 nt, Artificial Sequence
  Synthetic
caacaucugugaugauacugg

SEQ ID NO: 106126 - RNA, 22 nt, Artificial Sequence
  Synthetic
ccaacaucugugaugauacugg

SEQ ID NO: 106127 - RNA, 24 nt, Artificial Sequence
  Synthetic
ugccaacaucugugaugauacugg

SEQ ID NO: 106128 - RNA, 18 nt, Artificial Sequence
  Synthetic
aaaccagguuuguacugg

SEQ ID NO: 106129 - RNA, 19 nt, Artificial Sequence
  Synthetic
caaaccagguuuguacugg

SEQ ID NO: 106130 - RNA, 20 nt, Artificial Sequence
  Synthetic
acaaaccagguuuguacugg

SEQ ID NO: 106131 - RNA, 21 nt, Artificial Sequence
  Synthetic
uacaaaccagguuuguacugg

SEQ ID NO: 106132 - RNA, 23 nt, Artificial Sequence
  Synthetic
aguacaaaccagguuuguacugg

SEQ ID NO: 106133 - RNA, 24 nt, Artificial Sequence
  Synthetic
uaguacaaaccagguuuguacugg

SEQ ID NO: 106134 - RNA, 18 nt, Artificial Sequence
  Synthetic
uuacuuuuauuuaccugg

SEQ ID NO: 106135 - RNA, 19 nt, Artificial Sequence
  Synthetic
uuuacuuuuauuuaccugg

SEQ ID NO: 106136 - RNA, 20 nt, Artificial Sequence
  Synthetic
cuuuacuuuuauuuaccugg

SEQ ID NO: 106137 - RNA, 21 nt, Artificial Sequence
  Synthetic
ucuuuacuuuuauuuaccugg

SEQ ID NO: 106138 - RNA, 22 nt, Artificial Sequence
  Synthetic
uucuuuacuuuuauuuaccugg

SEQ ID NO: 106139 - RNA, 23 nt, Artificial Sequence
  Synthetic
uuucuuuacuuuuauuuaccugg

SEQ ID NO: 106140 - RNA, 24 nt, Artificial Sequence
  Synthetic
auuucuuuacuuuuauuuaccugg

SEQ ID NO: 106141 - RNA, 18 nt, Artificial Sequence
  Synthetic
uauaagaguaugcccugg

SEQ ID NO: 106142 - RNA, 19 nt, Artificial Sequence
  Synthetic
auauaagaguaugcccugg

SEQ ID NO: 106143 - RNA, 20 nt, Artificial Sequence
  Synthetic
aauauaagaguaugcccugg

SEQ ID NO: 106144 - RNA, 23 nt, Artificial Sequence
  Synthetic
uggaauauaagaguaugcccugg

SEQ ID NO: 106145 - RNA, 18 nt, Artificial Sequence
  Synthetic
uccaagauggcagccugg

SEQ ID NO: 106146 - RNA, 19 nt, Artificial Sequence
  Synthetic
uuccaagauggcagccugg

SEQ ID NO: 106147 - RNA, 20 nt, Artificial Sequence
  Synthetic
auuccaagauggcagccugg

SEQ ID NO: 106148 - RNA, 21 nt, Artificial Sequence
  Synthetic
uauuccaagauggcagccugg

SEQ ID NO: 106149 - RNA, 22 nt, Artificial Sequence
  Synthetic
auauuccaagauggcagccugg

SEQ ID NO: 106150 - RNA, 23 nt, Artificial Sequence
  Synthetic
cauauuccaagauggcagccugg

SEQ ID NO: 106151 - RNA, 18 nt, Artificial Sequence
  Synthetic
acacuggaaugugccugg

SEQ ID NO: 106152 - RNA, 20 nt, Artificial Sequence
  Synthetic
ugacacuggaaugugccugg

SEQ ID NO: 106153 - RNA, 21 nt, Artificial Sequence
  Synthetic
cugacacuggaaugugccugg

SEQ ID NO: 106154 - RNA, 22 nt, Artificial Sequence
  Synthetic
ccugacacuggaaugugccugg

SEQ ID NO: 106155 - RNA, 23 nt, Artificial Sequence
  Synthetic
cccugacacuggaaugugccugg

SEQ ID NO: 106156 - RNA, 18 nt, Artificial Sequence
  Synthetic
uuaccucugggcuccugg

SEQ ID NO: 106157 - RNA, 19 nt, Artificial Sequence
  Synthetic
auuaccucugggcuccugg

SEQ ID NO: 106158 - RNA, 20 nt, Artificial Sequence
  Synthetic
aauuaccucugggcuccugg

SEQ ID NO: 106159 - RNA, 21 nt, Artificial Sequence
  Synthetic
caauuaccucugggcuccugg

SEQ ID NO: 106160 - RNA, 22 nt, Artificial Sequence
  Synthetic
ucaauuaccucugggcuccugg

SEQ ID NO: 106161 - RNA, 23 nt, Artificial Sequence
  Synthetic
uucaauuaccucugggcuccugg

SEQ ID NO: 106162 - RNA, 24 nt, Artificial Sequence
  Synthetic
auucaauuaccucugggcuccugg

SEQ ID NO: 106163 - RNA, 18 nt, Artificial Sequence
  Synthetic
cauaucggccauuccugg

SEQ ID NO: 106164 - RNA, 20 nt, Artificial Sequence
  Synthetic
agcauaucggccauuccugg

SEQ ID NO: 106165 - RNA, 21 nt, Artificial Sequence
  Synthetic
aagcauaucggccauuccugg

SEQ ID NO: 106166 - RNA, 22 nt, Artificial Sequence
  Synthetic
caagcauaucggccauuccugg

SEQ ID NO: 106167 - RNA, 23 nt, Artificial Sequence
  Synthetic
acaagcauaucggccauuccugg

SEQ ID NO: 106168 - RNA, 24 nt, Artificial Sequence
  Synthetic
uacaagcauaucggccauuccugg

SEQ ID NO: 106169 - RNA, 21 nt, Artificial Sequence
  Synthetic
auucagaaagggcauuccugg

SEQ ID NO: 106170 - RNA, 22 nt, Artificial Sequence
  Synthetic
cauucagaaagggcauuccugg

SEQ ID NO: 106171 - RNA, 24 nt, Artificial Sequence
  Synthetic
agcauucagaaagggcauuccugg

SEQ ID NO: 106172 - RNA, 18 nt, Artificial Sequence
  Synthetic
uccacaugcauuuccugg

SEQ ID NO: 106173 - RNA, 20 nt, Artificial Sequence
  Synthetic
aguccacaugcauuuccugg

SEQ ID NO: 106174 - RNA, 21 nt, Artificial Sequence
  Synthetic
aaguccacaugcauuuccugg

SEQ ID NO: 106175 - RNA, 23 nt, Artificial Sequence
  Synthetic
agaaguccacaugcauuuccugg

SEQ ID NO: 106176 - RNA, 24 nt, Artificial Sequence
  Synthetic
uagaaguccacaugcauuuccugg

SEQ ID NO: 106177 - RNA, 18 nt, Artificial Sequence
  Synthetic
cuaaaaaggauuuccugg

SEQ ID NO: 106178 - RNA, 19 nt, Artificial Sequence
  Synthetic
ccuaaaaaggauuuccugg

SEQ ID NO: 106179 - RNA, 20 nt, Artificial Sequence
  Synthetic
cccuaaaaaggauuuccugg

SEQ ID NO: 106180 - RNA, 21 nt, Artificial Sequence
  Synthetic
ucccuaaaaaggauuuccugg

SEQ ID NO: 106181 - RNA, 22 nt, Artificial Sequence
  Synthetic
aucccuaaaaaggauuuccugg

SEQ ID NO: 106182 - RNA, 23 nt, Artificial Sequence
  Synthetic
aaucccuaaaaaggauuuccugg

SEQ ID NO: 106183 - RNA, 24 nt, Artificial Sequence
  Synthetic
uaaucccuaaaaaggauuuccugg

SEQ ID NO: 106184 - RNA, 21 nt, Artificial Sequence
  Synthetic
cuuaacuuucagggaagcugg

SEQ ID NO: 106185 - RNA, 22 nt, Artificial Sequence
  Synthetic
acuuaacuuucagggaagcugg

SEQ ID NO: 106186 - RNA, 23 nt, Artificial Sequence
  Synthetic
aacuuaacuuucagggaagcugg

SEQ ID NO: 106187 - RNA, 18 nt, Artificial Sequence
  Synthetic
aaacagaccacgggcugg

SEQ ID NO: 106188 - RNA, 19 nt, Artificial Sequence
  Synthetic
aaaacagaccacgggcugg

SEQ ID NO: 106189 - RNA, 22 nt, Artificial Sequence
  Synthetic
aggaaaacagaccacgggcugg

SEQ ID NO: 106190 - RNA, 24 nt, Artificial Sequence
  Synthetic
agaggaaaacagaccacgggcugg

SEQ ID NO: 106191 - RNA, 18 nt, Artificial Sequence
  Synthetic
cauuccccuuugggcugg

SEQ ID NO: 106192 - RNA, 19 nt, Artificial Sequence
  Synthetic
ucauuccccuuugggcugg

SEQ ID NO: 106193 - RNA, 20 nt, Artificial Sequence
  Synthetic
cucauuccccuuugggcugg

SEQ ID NO: 106194 - RNA, 22 nt, Artificial Sequence
  Synthetic
agcucauuccccuuugggcugg

SEQ ID NO: 106195 - RNA, 23 nt, Artificial Sequence
  Synthetic
uagcucauuccccuuugggcugg

SEQ ID NO: 106196 - RNA, 24 nt, Artificial Sequence
  Synthetic
cuagcucauuccccuuugggcugg

SEQ ID NO: 106197 - RNA, 18 nt, Artificial Sequence
  Synthetic
ccccuggccaauggcugg

SEQ ID NO: 106198 - RNA, 20 nt, Artificial Sequence
  Synthetic
agccccuggccaauggcugg

SEQ ID NO: 106199 - RNA, 21 nt, Artificial Sequence
  Synthetic
cagccccuggccaauggcugg

SEQ ID NO: 106200 - RNA, 22 nt, Artificial Sequence
  Synthetic
ccagccccuggccaauggcugg

SEQ ID NO: 106201 - RNA, 24 nt, Artificial Sequence
  Synthetic
agccagccccuggccaauggcugg

SEQ ID NO: 106202 - RNA, 19 nt, Artificial Sequence
  Synthetic
agcauaaaacauuggcugg

SEQ ID NO: 106203 - RNA, 20 nt, Artificial Sequence
  Synthetic
cagcauaaaacauuggcugg

SEQ ID NO: 106204 - RNA, 21 nt, Artificial Sequence
  Synthetic
acagcauaaaacauuggcugg

SEQ ID NO: 106205 - RNA, 22 nt, Artificial Sequence
  Synthetic
cacagcauaaaacauuggcugg

SEQ ID NO: 106206 - RNA, 23 nt, Artificial Sequence
  Synthetic
ccacagcauaaaacauuggcugg

SEQ ID NO: 106207 - RNA, 24 nt, Artificial Sequence
  Synthetic
accacagcauaaaacauuggcugg

SEQ ID NO: 106208 - RNA, 20 nt, Artificial Sequence
  Synthetic
cgggcugguuagccugcugg

SEQ ID NO: 106209 - RNA, 21 nt, Artificial Sequence
  Synthetic
ucgggcugguuagccugcugg

SEQ ID NO: 106210 - RNA, 22 nt, Artificial Sequence
  Synthetic
cucgggcugguuagccugcugg

SEQ ID NO: 106211 - RNA, 24 nt, Artificial Sequence
  Synthetic
ugcucgggcugguuagccugcugg

SEQ ID NO: 106212 - RNA, 20 nt, Artificial Sequence
  Synthetic
aggagaaacauagcugcugg

SEQ ID NO: 106213 - RNA, 21 nt, Artificial Sequence
  Synthetic
aaggagaaacauagcugcugg

SEQ ID NO: 106214 - RNA, 22 nt, Artificial Sequence
  Synthetic
aaaggagaaacauagcugcugg

SEQ ID NO: 106215 - RNA, 24 nt, Artificial Sequence
  Synthetic
agaaaggagaaacauagcugcugg

SEQ ID NO: 106216 - RNA, 18 nt, Artificial Sequence
  Synthetic
ugaaaacagugcugcugg

SEQ ID NO: 106217 - RNA, 19 nt, Artificial Sequence
  Synthetic
augaaaacagugcugcugg

SEQ ID NO: 106218 - RNA, 20 nt, Artificial Sequence
  Synthetic
uaugaaaacagugcugcugg

SEQ ID NO: 106219 - RNA, 21 nt, Artificial Sequence
  Synthetic
uuaugaaaacagugcugcugg

SEQ ID NO: 106220 - RNA, 22 nt, Artificial Sequence
  Synthetic
auuaugaaaacagugcugcugg

SEQ ID NO: 106221 - RNA, 18 nt, Artificial Sequence
  Synthetic
auacggggagauugcugg

SEQ ID NO: 106222 - RNA, 19 nt, Artificial Sequence
  Synthetic
uauacggggagauugcugg

SEQ ID NO: 106223 - RNA, 20 nt, Artificial Sequence
  Synthetic
cuauacggggagauugcugg

SEQ ID NO: 106224 - RNA, 21 nt, Artificial Sequence
  Synthetic
acuauacggggagauugcugg

SEQ ID NO: 106225 - RNA, 23 nt, Artificial Sequence
  Synthetic
agacuauacggggagauugcugg

SEQ ID NO: 106226 - RNA, 24 nt, Artificial Sequence
  Synthetic
cagacuauacggggagauugcugg

SEQ ID NO: 106227 - RNA, 18 nt, Artificial Sequence
  Synthetic
uuaaaagaucacaucugg

SEQ ID NO: 106228 - RNA, 19 nt, Artificial Sequence
  Synthetic
uuuaaaagaucacaucugg

SEQ ID NO: 106229 - RNA, 20 nt, Artificial Sequence
  Synthetic
uuuuaaaagaucacaucugg

SEQ ID NO: 106230 - RNA, 21 nt, Artificial Sequence
  Synthetic
uuuuuaaaagaucacaucugg

SEQ ID NO: 106231 - RNA, 22 nt, Artificial Sequence
  Synthetic
auuuuuaaaagaucacaucugg

SEQ ID NO: 106232 - RNA, 23 nt, Artificial Sequence
  Synthetic
aauuuuuaaaagaucacaucugg

SEQ ID NO: 106233 - RNA, 18 nt, Artificial Sequence
  Synthetic
uguauuuuuuucaucugg

SEQ ID NO: 106234 - RNA, 19 nt, Artificial Sequence
  Synthetic
auguauuuuuuucaucugg

SEQ ID NO: 106235 - RNA, 20 nt, Artificial Sequence
  Synthetic
cauguauuuuuuucaucugg

SEQ ID NO: 106236 - RNA, 21 nt, Artificial Sequence
  Synthetic
acauguauuuuuuucaucugg

SEQ ID NO: 106237 - RNA, 22 nt, Artificial Sequence
  Synthetic
uacauguauuuuuuucaucugg

SEQ ID NO: 106238 - RNA, 23 nt, Artificial Sequence
  Synthetic
cuacauguauuuuuuucaucugg

SEQ ID NO: 106239 - RNA, 24 nt, Artificial Sequence
  Synthetic
ucuacauguauuuuuuucaucugg

SEQ ID NO: 106240 - RNA, 19 nt, Artificial Sequence
  Synthetic
ugagaauuuacuuaucugg

SEQ ID NO: 106241 - RNA, 20 nt, Artificial Sequence
  Synthetic
cugagaauuuacuuaucugg

SEQ ID NO: 106242 - RNA, 21 nt, Artificial Sequence
  Synthetic
ucugagaauuuacuuaucugg

SEQ ID NO: 106243 - RNA, 22 nt, Artificial Sequence
  Synthetic
aucugagaauuuacuuaucugg

SEQ ID NO: 106244 - RNA, 23 nt, Artificial Sequence
  Synthetic
aaucugagaauuuacuuaucugg

SEQ ID NO: 106245 - RNA, 24 nt, Artificial Sequence
  Synthetic
caaucugagaauuuacuuaucugg

SEQ ID NO: 106246 - RNA, 18 nt, Artificial Sequence
  Synthetic
aucugacacuaucucugg

SEQ ID NO: 106247 - RNA, 22 nt, Artificial Sequence
  Synthetic
ugggaucugacacuaucucugg

SEQ ID NO: 106248 - RNA, 23 nt, Artificial Sequence
  Synthetic
augggaucugacacuaucucugg

SEQ ID NO: 106249 - RNA, 24 nt, Artificial Sequence
  Synthetic
uaugggaucugacacuaucucugg

SEQ ID NO: 106250 - RNA, 18 nt, Artificial Sequence
  Synthetic
uuaaauguaauucucugg

SEQ ID NO: 106251 - RNA, 19 nt, Artificial Sequence
  Synthetic
cuuaaauguaauucucugg

SEQ ID NO: 106252 - RNA, 20 nt, Artificial Sequence
  Synthetic
acuuaaauguaauucucugg

SEQ ID NO: 106253 - RNA, 21 nt, Artificial Sequence
  Synthetic
aacuuaaauguaauucucugg

SEQ ID NO: 106254 - RNA, 22 nt, Artificial Sequence
  Synthetic
caacuuaaauguaauucucugg

SEQ ID NO: 106255 - RNA, 23 nt, Artificial Sequence
  Synthetic
acaacuuaaauguaauucucugg

SEQ ID NO: 106256 - RNA, 24 nt, Artificial Sequence
  Synthetic
aacaacuuaaauguaauucucugg

SEQ ID NO: 106257 - RNA, 20 nt, Artificial Sequence
  Synthetic
uggcauguuucaguuucugg

SEQ ID NO: 106258 - RNA, 21 nt, Artificial Sequence
  Synthetic
auggcauguuucaguuucugg

SEQ ID NO: 106259 - RNA, 22 nt, Artificial Sequence
  Synthetic
cauggcauguuucaguuucugg

SEQ ID NO: 106260 - RNA, 23 nt, Artificial Sequence
  Synthetic
ucauggcauguuucaguuucugg

SEQ ID NO: 106261 - RNA, 24 nt, Artificial Sequence
  Synthetic
aucauggcauguuucaguuucugg

SEQ ID NO: 106262 - RNA, 18 nt, Artificial Sequence
  Synthetic
aguuaauaaauaaagugg

SEQ ID NO: 106263 - RNA, 19 nt, Artificial Sequence
  Synthetic
aaguuaauaaauaaagugg

SEQ ID NO: 106264 - RNA, 22 nt, Artificial Sequence
  Synthetic
uggaaguuaauaaauaaagugg

SEQ ID NO: 106265 - RNA, 23 nt, Artificial Sequence
  Synthetic
auggaaguuaauaaauaaagugg

SEQ ID NO: 106266 - RNA, 24 nt, Artificial Sequence
  Synthetic
cauggaaguuaauaaauaaagugg

SEQ ID NO: 106267 - RNA, 18 nt, Artificial Sequence
  Synthetic
cugaaacuacacaagugg

SEQ ID NO: 106268 - RNA, 19 nt, Artificial Sequence
  Synthetic
acugaaacuacacaagugg

SEQ ID NO: 106269 - RNA, 21 nt, Artificial Sequence
  Synthetic
agacugaaacuacacaagugg

SEQ ID NO: 106270 - RNA, 22 nt, Artificial Sequence
  Synthetic
cagacugaaacuacacaagugg

SEQ ID NO: 106271 - RNA, 23 nt, Artificial Sequence
  Synthetic
acagacugaaacuacacaagugg

SEQ ID NO: 106272 - RNA, 24 nt, Artificial Sequence
  Synthetic
aacagacugaaacuacacaagugg

SEQ ID NO: 106273 - RNA, 18 nt, Artificial Sequence
  Synthetic
uggccaggggagaagugg

SEQ ID NO: 106274 - RNA, 19 nt, Artificial Sequence
  Synthetic
cuggccaggggagaagugg

SEQ ID NO: 106275 - RNA, 21 nt, Artificial Sequence
  Synthetic
agcuggccaggggagaagugg

SEQ ID NO: 106276 - RNA, 22 nt, Artificial Sequence
  Synthetic
cagcuggccaggggagaagugg

SEQ ID NO: 106277 - RNA, 24 nt, Artificial Sequence
  Synthetic
agcagcuggccaggggagaagugg

SEQ ID NO: 106278 - RNA, 18 nt, Artificial Sequence
  Synthetic
acccagugucugcagugg

SEQ ID NO: 106279 - RNA, 19 nt, Artificial Sequence
  Synthetic
cacccagugucugcagugg

SEQ ID NO: 106280 - RNA, 20 nt, Artificial Sequence
  Synthetic
ucacccagugucugcagugg

SEQ ID NO: 106281 - RNA, 21 nt, Artificial Sequence
  Synthetic
uucacccagugucugcagugg

SEQ ID NO: 106282 - RNA, 22 nt, Artificial Sequence
  Synthetic
cuucacccagugucugcagugg

SEQ ID NO: 106283 - RNA, 23 nt, Artificial Sequence
  Synthetic
ucuucacccagugucugcagugg

SEQ ID NO: 106284 - RNA, 24 nt, Artificial Sequence
  Synthetic
uucuucacccagugucugcagugg

SEQ ID NO: 106285 - RNA, 18 nt, Artificial Sequence
  Synthetic
accugaggguuucagugg

SEQ ID NO: 106286 - RNA, 19 nt, Artificial Sequence
  Synthetic
caccugaggguuucagugg

SEQ ID NO: 106287 - RNA, 20 nt, Artificial Sequence
  Synthetic
ucaccugaggguuucagugg

SEQ ID NO: 106288 - RNA, 23 nt, Artificial Sequence
  Synthetic
aggucaccugaggguuucagugg

SEQ ID NO: 106289 - RNA, 18 nt, Artificial Sequence
  Synthetic
agcauauacacagagugg

SEQ ID NO: 106290 - RNA, 19 nt, Artificial Sequence
  Synthetic
uagcauauacacagagugg

SEQ ID NO: 106291 - RNA, 21 nt, Artificial Sequence
  Synthetic
uguagcauauacacagagugg

SEQ ID NO: 106292 - RNA, 22 nt, Artificial Sequence
  Synthetic
uuguagcauauacacagagugg

SEQ ID NO: 106293 - RNA, 23 nt, Artificial Sequence
  Synthetic
uuuguagcauauacacagagugg

SEQ ID NO: 106294 - RNA, 24 nt, Artificial Sequence
  Synthetic
auuuguagcauauacacagagugg

SEQ ID NO: 106295 - RNA, 18 nt, Artificial Sequence
  Synthetic
uucagggcuugggagugg

SEQ ID NO: 106296 - RNA, 20 nt, Artificial Sequence
  Synthetic
aguucagggcuugggagugg

SEQ ID NO: 106297 - RNA, 22 nt, Artificial Sequence
  Synthetic
agaguucagggcuugggagugg

SEQ ID NO: 106298 - RNA, 23 nt, Artificial Sequence
  Synthetic
cagaguucagggcuugggagugg

SEQ ID NO: 106299 - RNA, 24 nt, Artificial Sequence
  Synthetic
ucagaguucagggcuugggagugg

SEQ ID NO: 106300 - RNA, 18 nt, Artificial Sequence
  Synthetic
ccaggauauuaugagugg

SEQ ID NO: 106301 - RNA, 19 nt, Artificial Sequence
  Synthetic
accaggauauuaugagugg

SEQ ID NO: 106302 - RNA, 20 nt, Artificial Sequence
  Synthetic
aaccaggauauuaugagugg

SEQ ID NO: 106303 - RNA, 21 nt, Artificial Sequence
  Synthetic
uaaccaggauauuaugagugg

SEQ ID NO: 106304 - RNA, 22 nt, Artificial Sequence
  Synthetic
auaaccaggauauuaugagugg

SEQ ID NO: 106305 - RNA, 24 nt, Artificial Sequence
  Synthetic
ugauaaccaggauauuaugagugg

SEQ ID NO: 106306 - RNA, 18 nt, Artificial Sequence
  Synthetic
agagaaguaacugagugg

SEQ ID NO: 106307 - RNA, 20 nt, Artificial Sequence
  Synthetic
agagagaaguaacugagugg

SEQ ID NO: 106308 - RNA, 22 nt, Artificial Sequence
  Synthetic
agagagagaaguaacugagugg

SEQ ID NO: 106309 - RNA, 18 nt, Artificial Sequence
  Synthetic
ugcacuucauauuagugg

SEQ ID NO: 106310 - RNA, 19 nt, Artificial Sequence
  Synthetic
cugcacuucauauuagugg

SEQ ID NO: 106311 - RNA, 20 nt, Artificial Sequence
  Synthetic
ucugcacuucauauuagugg

SEQ ID NO: 106312 - RNA, 21 nt, Artificial Sequence
  Synthetic
uucugcacuucauauuagugg

SEQ ID NO: 106313 - RNA, 23 nt, Artificial Sequence
  Synthetic
uguucugcacuucauauuagugg

SEQ ID NO: 106314 - RNA, 24 nt, Artificial Sequence
  Synthetic
auguucugcacuucauauuagugg

SEQ ID NO: 106315 - RNA, 18 nt, Artificial Sequence
  Synthetic
uuuccugaauguuagugg

SEQ ID NO: 106316 - RNA, 19 nt, Artificial Sequence
  Synthetic
auuuccugaauguuagugg

SEQ ID NO: 106317 - RNA, 21 nt, Artificial Sequence
  Synthetic
ugauuuccugaauguuagugg

SEQ ID NO: 106318 - RNA, 22 nt, Artificial Sequence
  Synthetic
augauuuccugaauguuagugg

SEQ ID NO: 106319 - RNA, 23 nt, Artificial Sequence
  Synthetic
caugauuuccugaauguuagugg

SEQ ID NO: 106320 - RNA, 24 nt, Artificial Sequence
  Synthetic
acaugauuuccugaauguuagugg

SEQ ID NO: 106321 - RNA, 18 nt, Artificial Sequence
  Synthetic
agaaauaguugggcgugg

SEQ ID NO: 106322 - RNA, 20 nt, Artificial Sequence
  Synthetic
cgagaaauaguugggcgugg

SEQ ID NO: 106323 - RNA, 21 nt, Artificial Sequence
  Synthetic
acgagaaauaguugggcgugg

SEQ ID NO: 106324 - RNA, 22 nt, Artificial Sequence
  Synthetic
cacgagaaauaguugggcgugg

SEQ ID NO: 106325 - RNA, 23 nt, Artificial Sequence
  Synthetic
acacgagaaauaguugggcgugg

SEQ ID NO: 106326 - RNA, 24 nt, Artificial Sequence
  Synthetic
aacacgagaaauaguugggcgugg

SEQ ID NO: 106327 - RNA, 19 nt, Artificial Sequence
  Synthetic
uguuuaauuuucaaggugg

SEQ ID NO: 106328 - RNA, 20 nt, Artificial Sequence
  Synthetic
auguuuaauuuucaaggugg

SEQ ID NO: 106329 - RNA, 21 nt, Artificial Sequence
  Synthetic
uauguuuaauuuucaaggugg

SEQ ID NO: 106330 - RNA, 22 nt, Artificial Sequence
  Synthetic
uuauguuuaauuuucaaggugg

SEQ ID NO: 106331 - RNA, 23 nt, Artificial Sequence
  Synthetic
auuauguuuaauuuucaaggugg

SEQ ID NO: 106332 - RNA, 24 nt, Artificial Sequence
  Synthetic
uauuauguuuaauuuucaaggugg

SEQ ID NO: 106333 - RNA, 19 nt, Artificial Sequence
  Synthetic
ugacacuagguacaggugg

SEQ ID NO: 106334 - RNA, 20 nt, Artificial Sequence
  Synthetic
uugacacuagguacaggugg

SEQ ID NO: 106335 - RNA, 21 nt, Artificial Sequence
  Synthetic
auugacacuagguacaggugg

SEQ ID NO: 106336 - RNA, 22 nt, Artificial Sequence
  Synthetic
aauugacacuagguacaggugg

SEQ ID NO: 106337 - RNA, 24 nt, Artificial Sequence
  Synthetic
agaauugacacuagguacaggugg

SEQ ID NO: 106338 - RNA, 18 nt, Artificial Sequence
  Synthetic
auaggagguaagaggugg

SEQ ID NO: 106339 - RNA, 19 nt, Artificial Sequence
  Synthetic
uauaggagguaagaggugg

SEQ ID NO: 106340 - RNA, 20 nt, Artificial Sequence
  Synthetic
cuauaggagguaagaggugg

SEQ ID NO: 106341 - RNA, 22 nt, Artificial Sequence
  Synthetic
ugcuauaggagguaagaggugg

SEQ ID NO: 106342 - RNA, 24 nt, Artificial Sequence
  Synthetic
agugcuauaggagguaagaggugg

SEQ ID NO: 106343 - RNA, 18 nt, Artificial Sequence
  Synthetic
caaauaacagagaggugg

SEQ ID NO: 106344 - RNA, 19 nt, Artificial Sequence
  Synthetic
acaaauaacagagaggugg

SEQ ID NO: 106345 - RNA, 20 nt, Artificial Sequence
  Synthetic
aacaaauaacagagaggugg

SEQ ID NO: 106346 - RNA, 21 nt, Artificial Sequence
  Synthetic
uaacaaauaacagagaggugg

SEQ ID NO: 106347 - RNA, 23 nt, Artificial Sequence
  Synthetic
aguaacaaauaacagagaggugg

SEQ ID NO: 106348 - RNA, 24 nt, Artificial Sequence
  Synthetic
aaguaacaaauaacagagaggugg

SEQ ID NO: 106349 - RNA, 18 nt, Artificial Sequence
  Synthetic
cacugugcugauaggugg

SEQ ID NO: 106350 - RNA, 19 nt, Artificial Sequence
  Synthetic
ucacugugcugauaggugg

SEQ ID NO: 106351 - RNA, 20 nt, Artificial Sequence
  Synthetic
uucacugugcugauaggugg

SEQ ID NO: 106352 - RNA, 21 nt, Artificial Sequence
  Synthetic
uuucacugugcugauaggugg

SEQ ID NO: 106353 - RNA, 22 nt, Artificial Sequence
  Synthetic
auuucacugugcugauaggugg

SEQ ID NO: 106354 - RNA, 23 nt, Artificial Sequence
  Synthetic
aauuucacugugcugauaggugg

SEQ ID NO: 106355 - RNA, 24 nt, Artificial Sequence
  Synthetic
aaauuucacugugcugauaggugg

SEQ ID NO: 106356 - RNA, 21 nt, Artificial Sequence
  Synthetic
uuagucauuuuugcacggugg

SEQ ID NO: 106357 - RNA, 22 nt, Artificial Sequence
  Synthetic
uuuagucauuuuugcacggugg

SEQ ID NO: 106358 - RNA, 23 nt, Artificial Sequence
  Synthetic
auuuagucauuuuugcacggugg

SEQ ID NO: 106359 - RNA, 24 nt, Artificial Sequence
  Synthetic
uauuuagucauuuuugcacggugg

SEQ ID NO: 106360 - RNA, 18 nt, Artificial Sequence
  Synthetic
ucacaaugaucagggugg

SEQ ID NO: 106361 - RNA, 19 nt, Artificial Sequence
  Synthetic
uucacaaugaucagggugg

SEQ ID NO: 106362 - RNA, 20 nt, Artificial Sequence
  Synthetic
cuucacaaugaucagggugg

SEQ ID NO: 106363 - RNA, 24 nt, Artificial Sequence
  Synthetic
ugggcuucacaaugaucagggugg

SEQ ID NO: 106364 - RNA, 18 nt, Artificial Sequence
  Synthetic
agucacauggaggggugg

SEQ ID NO: 106365 - RNA, 19 nt, Artificial Sequence
  Synthetic
uagucacauggaggggugg

SEQ ID NO: 106366 - RNA, 20 nt, Artificial Sequence
  Synthetic
auagucacauggaggggugg

SEQ ID NO: 106367 - RNA, 21 nt, Artificial Sequence
  Synthetic
uauagucacauggaggggugg

SEQ ID NO: 106368 - RNA, 23 nt, Artificial Sequence
  Synthetic
cguauagucacauggaggggugg

SEQ ID NO: 106369 - RNA, 24 nt, Artificial Sequence
  Synthetic
acguauagucacauggaggggugg

SEQ ID NO: 106370 - RNA, 21 nt, Artificial Sequence
  Synthetic
aaaaagcaaaaaacggggugg

SEQ ID NO: 106371 - RNA, 23 nt, Artificial Sequence
  Synthetic
ugaaaaagcaaaaaacggggugg

SEQ ID NO: 106372 - RNA, 24 nt, Artificial Sequence
  Synthetic
cugaaaaagcaaaaaacggggugg

SEQ ID NO: 106373 - RNA, 18 nt, Artificial Sequence
  Synthetic
aagguuccaguauggugg

SEQ ID NO: 106374 - RNA, 19 nt, Artificial Sequence
  Synthetic
caagguuccaguauggugg

SEQ ID NO: 106375 - RNA, 20 nt, Artificial Sequence
  Synthetic
ucaagguuccaguauggugg

SEQ ID NO: 106376 - RNA, 21 nt, Artificial Sequence
  Synthetic
cucaagguuccaguauggugg

SEQ ID NO: 106377 - RNA, 22 nt, Artificial Sequence
  Synthetic
ccucaagguuccaguauggugg

SEQ ID NO: 106378 - RNA, 23 nt, Artificial Sequence
  Synthetic
cccucaagguuccaguauggugg

SEQ ID NO: 106379 - RNA, 24 nt, Artificial Sequence
  Synthetic
acccucaagguuccaguauggugg

SEQ ID NO: 106380 - RNA, 18 nt, Artificial Sequence
  Synthetic
caaaagcugcaguggugg

SEQ ID NO: 106381 - RNA, 19 nt, Artificial Sequence
  Synthetic
ucaaaagcugcaguggugg

SEQ ID NO: 106382 - RNA, 20 nt, Artificial Sequence
  Synthetic
aucaaaagcugcaguggugg

SEQ ID NO: 106383 - RNA, 22 nt, Artificial Sequence
  Synthetic
ugaucaaaagcugcaguggugg

SEQ ID NO: 106384 - RNA, 18 nt, Artificial Sequence
  Synthetic
uuauaacaguguuggugg

SEQ ID NO: 106385 - RNA, 20 nt, Artificial Sequence
  Synthetic
aguuauaacaguguuggugg

SEQ ID NO: 106386 - RNA, 22 nt, Artificial Sequence
  Synthetic
agaguuauaacaguguuggugg

SEQ ID NO: 106387 - RNA, 23 nt, Artificial Sequence
  Synthetic
aagaguuauaacaguguuggugg

SEQ ID NO: 106388 - RNA, 24 nt, Artificial Sequence
  Synthetic
uaagaguuauaacaguguuggugg

SEQ ID NO: 106389 - RNA, 18 nt, Artificial Sequence
  Synthetic
auuucguugcaaaugugg

SEQ ID NO: 106390 - RNA, 19 nt, Artificial Sequence
  Synthetic
cauuucguugcaaaugugg

SEQ ID NO: 106391 - RNA, 20 nt, Artificial Sequence
  Synthetic
acauuucguugcaaaugugg

SEQ ID NO: 106392 - RNA, 21 nt, Artificial Sequence
  Synthetic
aacauuucguugcaaaugugg

SEQ ID NO: 106393 - RNA, 22 nt, Artificial Sequence
  Synthetic
aaacauuucguugcaaaugugg

SEQ ID NO: 106394 - RNA, 23 nt, Artificial Sequence
  Synthetic
uaaacauuucguugcaaaugugg

SEQ ID NO: 106395 - RNA, 24 nt, Artificial Sequence
  Synthetic
auaaacauuucguugcaaaugugg

SEQ ID NO: 106396 - RNA, 21 nt, Artificial Sequence
  Synthetic
uuaccauaugcuacaaugugg

SEQ ID NO: 106397 - RNA, 22 nt, Artificial Sequence
  Synthetic
cuuaccauaugcuacaaugugg

SEQ ID NO: 106398 - RNA, 23 nt, Artificial Sequence
  Synthetic
ucuuaccauaugcuacaaugugg

SEQ ID NO: 106399 - RNA, 24 nt, Artificial Sequence
  Synthetic
aucuuaccauaugcuacaaugugg

SEQ ID NO: 106400 - RNA, 18 nt, Artificial Sequence
  Synthetic
auauguagagcaaugugg

SEQ ID NO: 106401 - RNA, 19 nt, Artificial Sequence
  Synthetic
uauauguagagcaaugugg

SEQ ID NO: 106402 - RNA, 23 nt, Artificial Sequence
  Synthetic
aggguauauguagagcaaugugg

SEQ ID NO: 106403 - RNA, 24 nt, Artificial Sequence
  Synthetic
aaggguauauguagagcaaugugg

SEQ ID NO: 106404 - RNA, 18 nt, Artificial Sequence
  Synthetic
ugacaguuacagaugugg

SEQ ID NO: 106405 - RNA, 19 nt, Artificial Sequence
  Synthetic
uugacaguuacagaugugg

SEQ ID NO: 106406 - RNA, 20 nt, Artificial Sequence
  Synthetic
auugacaguuacagaugugg

SEQ ID NO: 106407 - RNA, 21 nt, Artificial Sequence
  Synthetic
aauugacaguuacagaugugg

SEQ ID NO: 106408 - RNA, 23 nt, Artificial Sequence
  Synthetic
ugaauugacaguuacagaugugg

SEQ ID NO: 106409 - RNA, 24 nt, Artificial Sequence
  Synthetic
uugaauugacaguuacagaugugg

SEQ ID NO: 106410 - RNA, 22 nt, Artificial Sequence
  Synthetic
agaauuuucaagggggaugugg

SEQ ID NO: 106411 - RNA, 23 nt, Artificial Sequence
  Synthetic
cagaauuuucaagggggaugugg

SEQ ID NO: 106412 - RNA, 24 nt, Artificial Sequence
  Synthetic
ccagaauuuucaagggggaugugg

SEQ ID NO: 106413 - RNA, 18 nt, Artificial Sequence
  Synthetic
caaccucgugggaugugg

SEQ ID NO: 106414 - RNA, 19 nt, Artificial Sequence
  Synthetic
acaaccucgugggaugugg

SEQ ID NO: 106415 - RNA, 20 nt, Artificial Sequence
  Synthetic
cacaaccucgugggaugugg

SEQ ID NO: 106416 - RNA, 21 nt, Artificial Sequence
  Synthetic
ccacaaccucgugggaugugg

SEQ ID NO: 106417 - RNA, 22 nt, Artificial Sequence
  Synthetic
cccacaaccucgugggaugugg

SEQ ID NO: 106418 - RNA, 24 nt, Artificial Sequence
  Synthetic
ugcccacaaccucgugggaugugg

SEQ ID NO: 106419 - RNA, 19 nt, Artificial Sequence
  Synthetic
aguauugcaugguaugugg

SEQ ID NO: 106420 - RNA, 20 nt, Artificial Sequence
  Synthetic
uaguauugcaugguaugugg

SEQ ID NO: 106421 - RNA, 22 nt, Artificial Sequence
  Synthetic
aguaguauugcaugguaugugg

SEQ ID NO: 106422 - RNA, 24 nt, Artificial Sequence
  Synthetic
ugaguaguauugcaugguaugugg

SEQ ID NO: 106423 - RNA, 18 nt, Artificial Sequence
  Synthetic
uaaguaguaacacugugg

SEQ ID NO: 106424 - RNA, 19 nt, Artificial Sequence
  Synthetic
cuaaguaguaacacugugg

SEQ ID NO: 106425 - RNA, 21 nt, Artificial Sequence
  Synthetic
agcuaaguaguaacacugugg

SEQ ID NO: 106426 - RNA, 22 nt, Artificial Sequence
  Synthetic
aagcuaaguaguaacacugugg

SEQ ID NO: 106427 - RNA, 23 nt, Artificial Sequence
  Synthetic
aaagcuaaguaguaacacugugg

SEQ ID NO: 106428 - RNA, 24 nt, Artificial Sequence
  Synthetic
uaaagcuaaguaguaacacugugg

SEQ ID NO: 106429 - RNA, 18 nt, Artificial Sequence
  Synthetic
auacugggcaugcugugg

SEQ ID NO: 106430 - RNA, 19 nt, Artificial Sequence
  Synthetic
cauacugggcaugcugugg

SEQ ID NO: 106431 - RNA, 21 nt, Artificial Sequence
  Synthetic
agcauacugggcaugcugugg

SEQ ID NO: 106432 - RNA, 22 nt, Artificial Sequence
  Synthetic
cagcauacugggcaugcugugg

SEQ ID NO: 106433 - RNA, 24 nt, Artificial Sequence
  Synthetic
ugcagcauacugggcaugcugugg

SEQ ID NO: 106434 - RNA, 19 nt, Artificial Sequence
  Synthetic
ugauauguaucuucugugg

SEQ ID NO: 106435 - RNA, 20 nt, Artificial Sequence
  Synthetic
uugauauguaucuucugugg

SEQ ID NO: 106436 - RNA, 22 nt, Artificial Sequence
  Synthetic
aguugauauguaucuucugugg

SEQ ID NO: 106437 - RNA, 23 nt, Artificial Sequence
  Synthetic
aaguugauauguaucuucugugg

SEQ ID NO: 106438 - RNA, 24 nt, Artificial Sequence
  Synthetic
aaaguugauauguaucuucugugg

SEQ ID NO: 106439 - RNA, 18 nt, Artificial Sequence
  Synthetic
ugucuuccuccuuugugg

SEQ ID NO: 106440 - RNA, 19 nt, Artificial Sequence
  Synthetic
augucuuccuccuuugugg

SEQ ID NO: 106441 - RNA, 20 nt, Artificial Sequence
  Synthetic
uaugucuuccuccuuugugg

SEQ ID NO: 106442 - RNA, 21 nt, Artificial Sequence
  Synthetic
cuaugucuuccuccuuugugg

SEQ ID NO: 106443 - RNA, 22 nt, Artificial Sequence
  Synthetic
ccuaugucuuccuccuuugugg

SEQ ID NO: 106444 - RNA, 23 nt, Artificial Sequence
  Synthetic
cccuaugucuuccuccuuugugg

SEQ ID NO: 106445 - RNA, 24 nt, Artificial Sequence
  Synthetic
acccuaugucuuccuccuuugugg

SEQ ID NO: 106446 - RNA, 18 nt, Artificial Sequence
  Synthetic
cguaauuaugguuugugg

SEQ ID NO: 106447 - RNA, 19 nt, Artificial Sequence
  Synthetic
acguaauuaugguuugugg

SEQ ID NO: 106448 - RNA, 18 nt, Artificial Sequence
  Synthetic
aaaauauuguaaaauugg

SEQ ID NO: 106449 - RNA, 19 nt, Artificial Sequence
  Synthetic
aaaaauauuguaaaauugg

SEQ ID NO: 106450 - RNA, 22 nt, Artificial Sequence
  Synthetic
uggaaaaauauuguaaaauugg

SEQ ID NO: 106451 - RNA, 23 nt, Artificial Sequence
  Synthetic
uuggaaaaauauuguaaaauugg

SEQ ID NO: 106452 - RNA, 24 nt, Artificial Sequence
  Synthetic
uuuggaaaaauauuguaaaauugg

SEQ ID NO: 106453 - RNA, 21 nt, Artificial Sequence
  Synthetic
uagagucuguagaucaauugg

SEQ ID NO: 106454 - RNA, 22 nt, Artificial Sequence
  Synthetic
auagagucuguagaucaauugg

SEQ ID NO: 106455 - RNA, 23 nt, Artificial Sequence
  Synthetic
cauagagucuguagaucaauugg

SEQ ID NO: 106456 - RNA, 24 nt, Artificial Sequence
  Synthetic
ccauagagucuguagaucaauugg

SEQ ID NO: 106457 - RNA, 18 nt, Artificial Sequence
  Synthetic
auagugguguucaauugg

SEQ ID NO: 106458 - RNA, 20 nt, Artificial Sequence
  Synthetic
agauagugguguucaauugg

SEQ ID NO: 106459 - RNA, 23 nt, Artificial Sequence
  Synthetic
aggagauagugguguucaauugg

SEQ ID NO: 106460 - RNA, 24 nt, Artificial Sequence
  Synthetic
aaggagauagugguguucaauugg

SEQ ID NO: 106461 - RNA, 19 nt, Artificial Sequence
  Synthetic
ugugcagaccuuacauugg

SEQ ID NO: 106462 - RNA, 20 nt, Artificial Sequence
  Synthetic
cugugcagaccuuacauugg

SEQ ID NO: 106463 - RNA, 22 nt, Artificial Sequence
  Synthetic
ugcugugcagaccuuacauugg

SEQ ID NO: 106464 - RNA, 23 nt, Artificial Sequence
  Synthetic
cugcugugcagaccuuacauugg

SEQ ID NO: 106465 - RNA, 24 nt, Artificial Sequence
  Synthetic
ccugcugugcagaccuuacauugg

SEQ ID NO: 106466 - RNA, 18 nt, Artificial Sequence
  Synthetic
ucuucucaaguccauugg

SEQ ID NO: 106467 - RNA, 19 nt, Artificial Sequence
  Synthetic
uucuucucaaguccauugg

SEQ ID NO: 106468 - RNA, 20 nt, Artificial Sequence
  Synthetic
auucuucucaaguccauugg

SEQ ID NO: 106469 - RNA, 21 nt, Artificial Sequence
  Synthetic
uauucuucucaaguccauugg

SEQ ID NO: 106470 - RNA, 18 nt, Artificial Sequence
  Synthetic
uguacaaugacagauugg

SEQ ID NO: 106471 - RNA, 19 nt, Artificial Sequence
  Synthetic
uuguacaaugacagauugg

SEQ ID NO: 106472 - RNA, 20 nt, Artificial Sequence
  Synthetic
auuguacaaugacagauugg

SEQ ID NO: 106473 - RNA, 21 nt, Artificial Sequence
  Synthetic
aauuguacaaugacagauugg

SEQ ID NO: 106474 - RNA, 22 nt, Artificial Sequence
  Synthetic
aaauuguacaaugacagauugg

SEQ ID NO: 106475 - RNA, 24 nt, Artificial Sequence
  Synthetic
agaaauuguacaaugacagauugg

SEQ ID NO: 106476 - RNA, 18 nt, Artificial Sequence
  Synthetic
aguagaaugggagauugg

SEQ ID NO: 106477 - RNA, 19 nt, Artificial Sequence
  Synthetic
aaguagaaugggagauugg

SEQ ID NO: 106478 - RNA, 22 nt, Artificial Sequence
  Synthetic
aggaaguagaaugggagauugg

SEQ ID NO: 106479 - RNA, 23 nt, Artificial Sequence
  Synthetic
caggaaguagaaugggagauugg

SEQ ID NO: 106480 - RNA, 24 nt, Artificial Sequence
  Synthetic
ucaggaaguagaaugggagauugg

SEQ ID NO: 106481 - RNA, 18 nt, Artificial Sequence
  Synthetic
cuucuacucuuauauugg

SEQ ID NO: 106482 - RNA, 19 nt, Artificial Sequence
  Synthetic
acuucuacucuuauauugg

SEQ ID NO: 106483 - RNA, 20 nt, Artificial Sequence
  Synthetic
aacuucuacucuuauauugg

SEQ ID NO: 106484 - RNA, 21 nt, Artificial Sequence
  Synthetic
aaacuucuacucuuauauugg

SEQ ID NO: 106485 - RNA, 22 nt, Artificial Sequence
  Synthetic
aaaacuucuacucuuauauugg

SEQ ID NO: 106486 - RNA, 24 nt, Artificial Sequence
  Synthetic
ugaaaacuucuacucuuauauugg

SEQ ID NO: 106487 - RNA, 18 nt, Artificial Sequence
  Synthetic
cugauugacuaguauugg

SEQ ID NO: 106488 - RNA, 21 nt, Artificial Sequence
  Synthetic
aggcugauugacuaguauugg

SEQ ID NO: 106489 - RNA, 22 nt, Artificial Sequence
  Synthetic
caggcugauugacuaguauugg

SEQ ID NO: 106490 - RNA, 23 nt, Artificial Sequence
  Synthetic
acaggcugauugacuaguauugg

SEQ ID NO: 106491 - RNA, 24 nt, Artificial Sequence
  Synthetic
cacaggcugauugacuaguauugg

SEQ ID NO: 106492 - RNA, 18 nt, Artificial Sequence
  Synthetic
ucugguaaugauuauugg

SEQ ID NO: 106493 - RNA, 19 nt, Artificial Sequence
  Synthetic
aucugguaaugauuauugg

SEQ ID NO: 106494 - RNA, 20 nt, Artificial Sequence
  Synthetic
caucugguaaugauuauugg

SEQ ID NO: 106495 - RNA, 22 nt, Artificial Sequence
  Synthetic
agcaucugguaaugauuauugg

SEQ ID NO: 106496 - RNA, 23 nt, Artificial Sequence
  Synthetic
uagcaucugguaaugauuauugg

SEQ ID NO: 106497 - RNA, 24 nt, Artificial Sequence
  Synthetic
auagcaucugguaaugauuauugg

SEQ ID NO: 106498 - RNA, 18 nt, Artificial Sequence
  Synthetic
ucuacucucccuuauugg

SEQ ID NO: 106499 - RNA, 19 nt, Artificial Sequence
  Synthetic
aucuacucucccuuauugg

SEQ ID NO: 106500 - RNA, 20 nt, Artificial Sequence
  Synthetic
caucuacucucccuuauugg

SEQ ID NO: 106501 - RNA, 21 nt, Artificial Sequence
  Synthetic
ccaucuacucucccuuauugg

SEQ ID NO: 106502 - RNA, 22 nt, Artificial Sequence
  Synthetic
cccaucuacucucccuuauugg

SEQ ID NO: 106503 - RNA, 23 nt, Artificial Sequence
  Synthetic
acccaucuacucucccuuauugg

SEQ ID NO: 106504 - RNA, 24 nt, Artificial Sequence
  Synthetic
uacccaucuacucucccuuauugg

SEQ ID NO: 106505 - RNA, 18 nt, Artificial Sequence
  Synthetic
aguauggaaaacacuugg

SEQ ID NO: 106506 - RNA, 19 nt, Artificial Sequence
  Synthetic
uaguauggaaaacacuugg

SEQ ID NO: 106507 - RNA, 20 nt, Artificial Sequence
  Synthetic
auaguauggaaaacacuugg

SEQ ID NO: 106508 - RNA, 21 nt, Artificial Sequence
  Synthetic
aauaguauggaaaacacuugg

SEQ ID NO: 106509 - RNA, 22 nt, Artificial Sequence
  Synthetic
aaauaguauggaaaacacuugg

SEQ ID NO: 106510 - RNA, 23 nt, Artificial Sequence
  Synthetic
aaaauaguauggaaaacacuugg

SEQ ID NO: 106511 - RNA, 24 nt, Artificial Sequence
  Synthetic
aaaaauaguauggaaaacacuugg

SEQ ID NO: 106512 - RNA, 20 nt, Artificial Sequence
  Synthetic
ugguuucuuucuucacuugg

SEQ ID NO: 106513 - RNA, 21 nt, Artificial Sequence
  Synthetic
uugguuucuuucuucacuugg

SEQ ID NO: 106514 - RNA, 22 nt, Artificial Sequence
  Synthetic
cuugguuucuuucuucacuugg

SEQ ID NO: 106515 - RNA, 23 nt, Artificial Sequence
  Synthetic
ucuugguuucuuucuucacuugg

SEQ ID NO: 106516 - RNA, 24 nt, Artificial Sequence
  Synthetic
uucuugguuucuuucuucacuugg

SEQ ID NO: 106517 - RNA, 18 nt, Artificial Sequence
  Synthetic
ccuaacuaguaaccuugg

SEQ ID NO: 106518 - RNA, 19 nt, Artificial Sequence
  Synthetic
uccuaacuaguaaccuugg

SEQ ID NO: 106519 - RNA, 20 nt, Artificial Sequence
  Synthetic
uuccuaacuaguaaccuugg

SEQ ID NO: 106520 - RNA, 21 nt, Artificial Sequence
  Synthetic
cuuccuaacuaguaaccuugg

SEQ ID NO: 106521 - RNA, 22 nt, Artificial Sequence
  Synthetic
ucuuccuaacuaguaaccuugg

SEQ ID NO: 106522 - RNA, 24 nt, Artificial Sequence
  Synthetic
agucuuccuaacuaguaaccuugg

SEQ ID NO: 106523 - RNA, 18 nt, Artificial Sequence
  Synthetic
augcuuauaucaccuugg

SEQ ID NO: 106524 - RNA, 19 nt, Artificial Sequence
  Synthetic
aaugcuuauaucaccuugg

SEQ ID NO: 106525 - RNA, 21 nt, Artificial Sequence
  Synthetic
ugaaugcuuauaucaccuugg

SEQ ID NO: 106526 - RNA, 22 nt, Artificial Sequence
  Synthetic
cugaaugcuuauaucaccuugg

SEQ ID NO: 106527 - RNA, 23 nt, Artificial Sequence
  Synthetic
acugaaugcuuauaucaccuugg

SEQ ID NO: 106528 - RNA, 24 nt, Artificial Sequence
  Synthetic
cacugaaugcuuauaucaccuugg

SEQ ID NO: 106529 - RNA, 18 nt, Artificial Sequence
  Synthetic
uaagaauaacagccuugg

SEQ ID NO: 106530 - RNA, 21 nt, Artificial Sequence
  Synthetic
agguaagaauaacagccuugg

SEQ ID NO: 106531 - RNA, 23 nt, Artificial Sequence
  Synthetic
ugagguaagaauaacagccuugg

SEQ ID NO: 106532 - RNA, 24 nt, Artificial Sequence
  Synthetic
augagguaagaauaacagccuugg

SEQ ID NO: 106533 - RNA, 18 nt, Artificial Sequence
  Synthetic
cucauaugacugccuugg

SEQ ID NO: 106534 - RNA, 20 nt, Artificial Sequence
  Synthetic
ugcucauaugacugccuugg

SEQ ID NO: 106535 - RNA, 21 nt, Artificial Sequence
  Synthetic
augcucauaugacugccuugg

SEQ ID NO: 106536 - RNA, 22 nt, Artificial Sequence
  Synthetic
aaugcucauaugacugccuugg

SEQ ID NO: 106537 - RNA, 23 nt, Artificial Sequence
  Synthetic
caaugcucauaugacugccuugg

SEQ ID NO: 106538 - RNA, 24 nt, Artificial Sequence
  Synthetic
ucaaugcucauaugacugccuugg

SEQ ID NO: 106539 - RNA, 18 nt, Artificial Sequence
  Synthetic
ucaucuuucccuccuugg

SEQ ID NO: 106540 - RNA, 19 nt, Artificial Sequence
  Synthetic
uucaucuuucccuccuugg

SEQ ID NO: 106541 - RNA, 20 nt, Artificial Sequence
  Synthetic
uuucaucuuucccuccuugg

SEQ ID NO: 106542 - RNA, 21 nt, Artificial Sequence
  Synthetic
auuucaucuuucccuccuugg

SEQ ID NO: 106543 - RNA, 22 nt, Artificial Sequence
  Synthetic
cauuucaucuuucccuccuugg

SEQ ID NO: 106544 - RNA, 23 nt, Artificial Sequence
  Synthetic
ccauuucaucuuucccuccuugg

SEQ ID NO: 106545 - RNA, 24 nt, Artificial Sequence
  Synthetic
cccauuucaucuuucccuccuugg

SEQ ID NO: 106546 - RNA, 18 nt, Artificial Sequence
  Synthetic
uuaccagacauuccuugg

SEQ ID NO: 106547 - RNA, 21 nt, Artificial Sequence
  Synthetic
agguuaccagacauuccuugg

SEQ ID NO: 106548 - RNA, 24 nt, Artificial Sequence
  Synthetic
uggagguuaccagacauuccuugg

SEQ ID NO: 106549 - RNA, 18 nt, Artificial Sequence
  Synthetic
uuacuuaagccagcuugg

SEQ ID NO: 106550 - RNA, 19 nt, Artificial Sequence
  Synthetic
uuuacuuaagccagcuugg

SEQ ID NO: 106551 - RNA, 20 nt, Artificial Sequence
  Synthetic
cuuuacuuaagccagcuugg

SEQ ID NO: 106552 - RNA, 21 nt, Artificial Sequence
  Synthetic
acuuuacuuaagccagcuugg

SEQ ID NO: 106553 - RNA, 23 nt, Artificial Sequence
  Synthetic
agacuuuacuuaagccagcuugg

SEQ ID NO: 106554 - RNA, 24 nt, Artificial Sequence
  Synthetic
uagacuuuacuuaagccagcuugg

SEQ ID NO: 106555 - RNA, 18 nt, Artificial Sequence
  Synthetic
ugagggaauucugcuugg

SEQ ID NO: 106556 - RNA, 19 nt, Artificial Sequence
  Synthetic
uugagggaauucugcuugg

SEQ ID NO: 106557 - RNA, 20 nt, Artificial Sequence
  Synthetic
auugagggaauucugcuugg

SEQ ID NO: 106558 - RNA, 21 nt, Artificial Sequence
  Synthetic
aauugagggaauucugcuugg

SEQ ID NO: 106559 - RNA, 22 nt, Artificial Sequence
  Synthetic
aaauugagggaauucugcuugg

SEQ ID NO: 106560 - RNA, 23 nt, Artificial Sequence
  Synthetic
uaaauugagggaauucugcuugg

SEQ ID NO: 106561 - RNA, 19 nt, Artificial Sequence
  Synthetic
uguguacaugacaucuugg

SEQ ID NO: 106562 - RNA, 20 nt, Artificial Sequence
  Synthetic
auguguacaugacaucuugg

SEQ ID NO: 106563 - RNA, 21 nt, Artificial Sequence
  Synthetic
uauguguacaugacaucuugg

SEQ ID NO: 106564 - RNA, 22 nt, Artificial Sequence
  Synthetic
cuauguguacaugacaucuugg

SEQ ID NO: 106565 - RNA, 23 nt, Artificial Sequence
  Synthetic
ucuauguguacaugacaucuugg

SEQ ID NO: 106566 - RNA, 18 nt, Artificial Sequence
  Synthetic
agccagccaaucucuugg

SEQ ID NO: 106567 - RNA, 19 nt, Artificial Sequence
  Synthetic
aagccagccaaucucuugg

SEQ ID NO: 106568 - RNA, 20 nt, Artificial Sequence
  Synthetic
aaagccagccaaucucuugg

SEQ ID NO: 106569 - RNA, 21 nt, Artificial Sequence
  Synthetic
caaagccagccaaucucuugg

SEQ ID NO: 106570 - RNA, 22 nt, Artificial Sequence
  Synthetic
acaaagccagccaaucucuugg

SEQ ID NO: 106571 - RNA, 23 nt, Artificial Sequence
  Synthetic
uacaaagccagccaaucucuugg

SEQ ID NO: 106572 - RNA, 24 nt, Artificial Sequence
  Synthetic
auacaaagccagccaaucucuugg

SEQ ID NO: 106573 - RNA, 18 nt, Artificial Sequence
  Synthetic
uucuauauuguaaguugg

SEQ ID NO: 106574 - RNA, 19 nt, Artificial Sequence
  Synthetic
cuucuauauuguaaguugg

SEQ ID NO: 106575 - RNA, 21 nt, Artificial Sequence
  Synthetic
ugcuucuauauuguaaguugg

SEQ ID NO: 106576 - RNA, 22 nt, Artificial Sequence
  Synthetic
augcuucuauauuguaaguugg

SEQ ID NO: 106577 - RNA, 23 nt, Artificial Sequence
  Synthetic
aaugcuucuauauuguaaguugg

SEQ ID NO: 106578 - RNA, 24 nt, Artificial Sequence
  Synthetic
aaaugcuucuauauuguaaguugg

SEQ ID NO: 106579 - RNA, 18 nt, Artificial Sequence
  Synthetic
uagcugguaucugguugg

SEQ ID NO: 106580 - RNA, 19 nt, Artificial Sequence
  Synthetic
cuagcugguaucugguugg

SEQ ID NO: 106581 - RNA, 20 nt, Artificial Sequence
  Synthetic
acuagcugguaucugguugg

SEQ ID NO: 106582 - RNA, 21 nt, Artificial Sequence
  Synthetic
uacuagcugguaucugguugg

SEQ ID NO: 106583 - RNA, 23 nt, Artificial Sequence
  Synthetic
uguacuagcugguaucugguugg

SEQ ID NO: 106584 - RNA, 24 nt, Artificial Sequence
  Synthetic
cuguacuagcugguaucugguugg

SEQ ID NO: 106585 - RNA, 18 nt, Artificial Sequence
  Synthetic
cugcuagucuucuguugg

SEQ ID NO: 106586 - RNA, 19 nt, Artificial Sequence
  Synthetic
ucugcuagucuucuguugg

SEQ ID NO: 106587 - RNA, 20 nt, Artificial Sequence
  Synthetic
aucugcuagucuucuguugg

SEQ ID NO: 106588 - RNA, 21 nt, Artificial Sequence
  Synthetic
aaucugcuagucuucuguugg

SEQ ID NO: 106589 - RNA, 22 nt, Artificial Sequence
  Synthetic
caaucugcuagucuucuguugg

SEQ ID NO: 106590 - RNA, 23 nt, Artificial Sequence
  Synthetic
ccaaucugcuagucuucuguugg

SEQ ID NO: 106591 - RNA, 24 nt, Artificial Sequence
  Synthetic
cccaaucugcuagucuucuguugg

SEQ ID NO: 106592 - RNA, 18 nt, Artificial Sequence
  Synthetic
acuacauuucauuguugg

SEQ ID NO: 106593 - RNA, 19 nt, Artificial Sequence
  Synthetic
aacuacauuucauuguugg

SEQ ID NO: 106594 - RNA, 20 nt, Artificial Sequence
  Synthetic
uaacuacauuucauuguugg

SEQ ID NO: 106595 - RNA, 21 nt, Artificial Sequence
  Synthetic
uuaacuacauuucauuguugg

SEQ ID NO: 106596 - RNA, 23 nt, Artificial Sequence
  Synthetic
cguuaacuacauuucauuguugg

SEQ ID NO: 106597 - RNA, 24 nt, Artificial Sequence
  Synthetic
acguuaacuacauuucauuguugg

SEQ ID NO: 106598 - RNA, 20 nt, Artificial Sequence
  Synthetic
aggcccuggagaaaauuugg

SEQ ID NO: 106599 - RNA, 21 nt, Artificial Sequence
  Synthetic
caggcccuggagaaaauuugg

SEQ ID NO: 106600 - RNA, 22 nt, Artificial Sequence
  Synthetic
acaggcccuggagaaaauuugg

SEQ ID NO: 106601 - RNA, 23 nt, Artificial Sequence
  Synthetic
uacaggcccuggagaaaauuugg

SEQ ID NO: 106602 - RNA, 24 nt, Artificial Sequence
  Synthetic
cuacaggcccuggagaaaauuugg

SEQ ID NO: 106603 - RNA, 21 nt, Artificial Sequence
  Synthetic
auguaauaaaaugaaauuugg

SEQ ID NO: 106604 - RNA, 23 nt, Artificial Sequence
  Synthetic
agauguaauaaaaugaaauuugg

SEQ ID NO: 106605 - RNA, 24 nt, Artificial Sequence
  Synthetic
aagauguaauaaaaugaaauuugg

SEQ ID NO: 106606 - RNA, 18 nt, Artificial Sequence
  Synthetic
cuccaguaacagauuugg

SEQ ID NO: 106607 - RNA, 19 nt, Artificial Sequence
  Synthetic
ccuccaguaacagauuugg

SEQ ID NO: 106608 - RNA, 20 nt, Artificial Sequence
  Synthetic
uccuccaguaacagauuugg

SEQ ID NO: 106609 - RNA, 21 nt, Artificial Sequence
  Synthetic
uuccuccaguaacagauuugg

SEQ ID NO: 106610 - RNA, 24 nt, Artificial Sequence
  Synthetic
agguuccuccaguaacagauuugg

SEQ ID NO: 106611 - RNA, 18 nt, Artificial Sequence
  Synthetic
aagguaaagaauauuugg

SEQ ID NO: 106612 - RNA, 19 nt, Artificial Sequence
  Synthetic
uaagguaaagaauauuugg

SEQ ID NO: 106613 - RNA, 20 nt, Artificial Sequence
  Synthetic
uuaagguaaagaauauuugg

SEQ ID NO: 106614 - RNA, 21 nt, Artificial Sequence
  Synthetic
auuaagguaaagaauauuugg

SEQ ID NO: 106615 - RNA, 22 nt, Artificial Sequence
  Synthetic
aauuaagguaaagaauauuugg

SEQ ID NO: 106616 - RNA, 18 nt, Artificial Sequence
  Synthetic
ucccuugguacuauuugg

SEQ ID NO: 106617 - RNA, 19 nt, Artificial Sequence
  Synthetic
cucccuugguacuauuugg

SEQ ID NO: 106618 - RNA, 20 nt, Artificial Sequence
  Synthetic
ccucccuugguacuauuugg

SEQ ID NO: 106619 - RNA, 21 nt, Artificial Sequence
  Synthetic
cccucccuugguacuauuugg

SEQ ID NO: 106620 - RNA, 22 nt, Artificial Sequence
  Synthetic
ucccucccuugguacuauuugg

SEQ ID NO: 106621 - RNA, 23 nt, Artificial Sequence
  Synthetic
cucccucccuugguacuauuugg

SEQ ID NO: 106622 - RNA, 24 nt, Artificial Sequence
  Synthetic
acucccucccuugguacuauuugg

SEQ ID NO: 106623 - RNA, 19 nt, Artificial Sequence
  Synthetic
ugacccaucuucccuuugg

SEQ ID NO: 106624 - RNA, 20 nt, Artificial Sequence
  Synthetic
augacccaucuucccuuugg

SEQ ID NO: 106625 - RNA, 21 nt, Artificial Sequence
  Synthetic
aaugacccaucuucccuuugg

SEQ ID NO: 106626 - RNA, 23 nt, Artificial Sequence
  Synthetic
agaaugacccaucuucccuuugg

SEQ ID NO: 106627 - RNA, 24 nt, Artificial Sequence
  Synthetic
aagaaugacccaucuucccuuugg

SEQ ID NO: 106628 - RNA, 18 nt, Artificial Sequence
  Synthetic
ugaaaauucaugcuuugg

SEQ ID NO: 106629 - RNA, 19 nt, Artificial Sequence
  Synthetic
uugaaaauucaugcuuugg

SEQ ID NO: 106630 - RNA, 20 nt, Artificial Sequence
  Synthetic
uuugaaaauucaugcuuugg

SEQ ID NO: 106631 - RNA, 22 nt, Artificial Sequence
  Synthetic
uguuugaaaauucaugcuuugg

SEQ ID NO: 106632 - RNA, 24 nt, Artificial Sequence
  Synthetic
uguguuugaaaauucaugcuuugg

SEQ ID NO: 106633 - RNA, 18 nt, Artificial Sequence
  Synthetic
ugauugguuaaucuuugg

SEQ ID NO: 106634 - RNA, 19 nt, Artificial Sequence
  Synthetic
cugauugguuaaucuuugg

SEQ ID NO: 106635 - RNA, 20 nt, Artificial Sequence
  Synthetic
ucugauugguuaaucuuugg

SEQ ID NO: 106636 - RNA, 21 nt, Artificial Sequence
  Synthetic
cucugauugguuaaucuuugg

SEQ ID NO: 106637 - RNA, 23 nt, Artificial Sequence
  Synthetic
ugcucugauugguuaaucuuugg

SEQ ID NO: 106638 - RNA, 24 nt, Artificial Sequence
  Synthetic
cugcucugauugguuaaucuuugg

SEQ ID NO: 106639 - RNA, 18 nt, Artificial Sequence
  Synthetic
uagguccugcaucuuugg

SEQ ID NO: 106640 - RNA, 19 nt, Artificial Sequence
  Synthetic
auagguccugcaucuuugg

SEQ ID NO: 106641 - RNA, 22 nt, Artificial Sequence
  Synthetic
aggauagguccugcaucuuugg

SEQ ID NO: 106642 - RNA, 18 nt, Artificial Sequence
  Synthetic
aaggagccaauaguuugg

SEQ ID NO: 106643 - RNA, 19 nt, Artificial Sequence
  Synthetic
uaaggagccaauaguuugg

SEQ ID NO: 106644 - RNA, 20 nt, Artificial Sequence
  Synthetic
uuaaggagccaauaguuugg

SEQ ID NO: 106645 - RNA, 21 nt, Artificial Sequence
  Synthetic
auuaaggagccaauaguuugg

SEQ ID NO: 106646 - RNA, 22 nt, Artificial Sequence
  Synthetic
cauuaaggagccaauaguuugg

SEQ ID NO: 106647 - RNA, 23 nt, Artificial Sequence
  Synthetic
ucauuaaggagccaauaguuugg

SEQ ID NO: 106648 - RNA, 18 nt, Artificial Sequence
  Synthetic
aguucuggcauaguuugg

SEQ ID NO: 106649 - RNA, 19 nt, Artificial Sequence
  Synthetic
caguucuggcauaguuugg

SEQ ID NO: 106650 - RNA, 20 nt, Artificial Sequence
  Synthetic
ucaguucuggcauaguuugg

SEQ ID NO: 106651 - RNA, 21 nt, Artificial Sequence
  Synthetic
uucaguucuggcauaguuugg

SEQ ID NO: 106652 - RNA, 22 nt, Artificial Sequence
  Synthetic
uuucaguucuggcauaguuugg

SEQ ID NO: 106653 - RNA, 23 nt, Artificial Sequence
  Synthetic
cuuucaguucuggcauaguuugg

SEQ ID NO: 106654 - RNA, 24 nt, Artificial Sequence
  Synthetic
ucuuucaguucuggcauaguuugg

SEQ ID NO: 106655 - RNA, 18 nt, Artificial Sequence
  Synthetic
ugaaacagaugcguuugg

SEQ ID NO: 106656 - RNA, 19 nt, Artificial Sequence
  Synthetic
cugaaacagaugcguuugg

SEQ ID NO: 106657 - RNA, 20 nt, Artificial Sequence
  Synthetic
ucugaaacagaugcguuugg

SEQ ID NO: 106658 - RNA, 21 nt, Artificial Sequence
  Synthetic
aucugaaacagaugcguuugg

SEQ ID NO: 106659 - RNA, 22 nt, Artificial Sequence
  Synthetic
uaucugaaacagaugcguuugg

SEQ ID NO: 106660 - RNA, 23 nt, Artificial Sequence
  Synthetic
cuaucugaaacagaugcguuugg

SEQ ID NO: 106661 - RNA, 19 nt, Artificial Sequence
  Synthetic
aggacgcuggcauguuugg

SEQ ID NO: 106662 - RNA, 21 nt, Artificial Sequence
  Synthetic
ugaggacgcuggcauguuugg

SEQ ID NO: 106663 - RNA, 22 nt, Artificial Sequence
  Synthetic
uugaggacgcuggcauguuugg

SEQ ID NO: 106664 - RNA, 23 nt, Artificial Sequence
  Synthetic
auugaggacgcuggcauguuugg

SEQ ID NO: 106665 - RNA, 24 nt, Artificial Sequence
  Synthetic
uauugaggacgcuggcauguuugg

SEQ ID NO: 106666 - RNA, 18 nt, Artificial Sequence
  Synthetic
aguuguuuauauguuugg

SEQ ID NO: 106667 - RNA, 20 nt, Artificial Sequence
  Synthetic
agaguuguuuauauguuugg

SEQ ID NO: 106668 - RNA, 21 nt, Artificial Sequence
  Synthetic
aagaguuguuuauauguuugg

SEQ ID NO: 106669 - RNA, 24 nt, Artificial Sequence
  Synthetic
uggaagaguuguuuauauguuugg

SEQ ID NO: 106670 - RNA, 18 nt, Artificial Sequence
  Synthetic
aaaagucuaaguguuugg

SEQ ID NO: 106671 - RNA, 19 nt, Artificial Sequence
  Synthetic
caaaagucuaaguguuugg

SEQ ID NO: 106672 - RNA, 21 nt, Artificial Sequence
  Synthetic
ugcaaaagucuaaguguuugg

SEQ ID NO: 106673 - RNA, 23 nt, Artificial Sequence
  Synthetic
agugcaaaagucuaaguguuugg

SEQ ID NO: 106674 - RNA, 24 nt, Artificial Sequence
  Synthetic
aagugcaaaagucuaaguguuugg

SEQ ID NO: 106675 - RNA, 23 nt, Artificial Sequence
  Synthetic
uggggguuucaaagucuuuuugg

SEQ ID NO: 106676 - RNA, 18 nt, Artificial Sequence
  Synthetic
ucauacuagucuuuuugg

SEQ ID NO: 106677 - RNA, 19 nt, Artificial Sequence
  Synthetic
uucauacuagucuuuuugg

SEQ ID NO: 106678 - RNA, 20 nt, Artificial Sequence
  Synthetic
auucauacuagucuuuuugg

SEQ ID NO: 106679 - RNA, 21 nt, Artificial Sequence
  Synthetic
aauucauacuagucuuuuugg

SEQ ID NO: 106680 - RNA, 23 nt, Artificial Sequence
  Synthetic
agaauucauacuagucuuuuugg

SEQ ID NO: 106681 - RNA, 24 nt, Artificial Sequence
  Synthetic
aagaauucauacuagucuuuuugg

SEQ ID NO: 106682 - RNA, 18 nt, Artificial Sequence
  Synthetic
agggauuugacaaaaaug

SEQ ID NO: 106683 - RNA, 19 nt, Artificial Sequence
  Synthetic
cagggauuugacaaaaaug

SEQ ID NO: 106684 - RNA, 20 nt, Artificial Sequence
  Synthetic
acagggauuugacaaaaaug

SEQ ID NO: 106685 - RNA, 22 nt, Artificial Sequence
  Synthetic
ugacagggauuugacaaaaaug

SEQ ID NO: 106686 - RNA, 21 nt, Artificial Sequence
  Synthetic
uaaaguuuagagagaaaaaug

SEQ ID NO: 106687 - RNA, 22 nt, Artificial Sequence
  Synthetic
cuaaaguuuagagagaaaaaug

SEQ ID NO: 106688 - RNA, 18 nt, Artificial Sequence
  Synthetic
agggacuuaauaaaaaug

SEQ ID NO: 106689 - RNA, 20 nt, Artificial Sequence
  Synthetic
agagggacuuaauaaaaaug

SEQ ID NO: 106690 - RNA, 21 nt, Artificial Sequence
  Synthetic
cagagggacuuaauaaaaaug

SEQ ID NO: 106691 - RNA, 22 nt, Artificial Sequence
  Synthetic
acagagggacuuaauaaaaaug

SEQ ID NO: 106692 - RNA, 23 nt, Artificial Sequence
  Synthetic
uacagagggacuuaauaaaaaug

SEQ ID NO: 106693 - RNA, 24 nt, Artificial Sequence
  Synthetic
uuacagagggacuuaauaaaaaug

SEQ ID NO: 106694 - RNA, 18 nt, Artificial Sequence
  Synthetic
uuucccuugaacaaaaug

SEQ ID NO: 106695 - RNA, 21 nt, Artificial Sequence
  Synthetic
ugguuucccuugaacaaaaug

SEQ ID NO: 106696 - RNA, 22 nt, Artificial Sequence
  Synthetic
cugguuucccuugaacaaaaug

SEQ ID NO: 106697 - RNA, 23 nt, Artificial Sequence
  Synthetic
acugguuucccuugaacaaaaug

SEQ ID NO: 106698 - RNA, 24 nt, Artificial Sequence
  Synthetic
aacugguuucccuugaacaaaaug

SEQ ID NO: 106699 - RNA, 19 nt, Artificial Sequence
  Synthetic
agagaauggaaucaaaaug

SEQ ID NO: 106700 - RNA, 21 nt, Artificial Sequence
  Synthetic
ugagagaauggaaucaaaaug

SEQ ID NO: 106701 - RNA, 23 nt, Artificial Sequence
  Synthetic
ugugagagaauggaaucaaaaug

SEQ ID NO: 106702 - RNA, 24 nt, Artificial Sequence
  Synthetic
augugagagaauggaaucaaaaug

SEQ ID NO: 106703 - RNA, 19 nt, Artificial Sequence
  Synthetic
aguuuauauguagaaaaug

SEQ ID NO: 106704 - RNA, 20 nt, Artificial Sequence
  Synthetic
caguuuauauguagaaaaug

SEQ ID NO: 106705 - RNA, 24 nt, Artificial Sequence
  Synthetic
ugggcaguuuauauguagaaaaug

SEQ ID NO: 106706 - RNA, 21 nt, Artificial Sequence
  Synthetic
cuaauaagaaguuagaaaaug

SEQ ID NO: 106707 - RNA, 22 nt, Artificial Sequence
  Synthetic
ucuaauaagaaguuagaaaaug

SEQ ID NO: 106708 - RNA, 23 nt, Artificial Sequence
  Synthetic
uucuaauaagaaguuagaaaaug

SEQ ID NO: 106709 - RNA, 24 nt, Artificial Sequence
  Synthetic
uuucuaauaagaaguuagaaaaug

SEQ ID NO: 106710 - RNA, 18 nt, Artificial Sequence
  Synthetic
agaaacgcugcuaaaaug

SEQ ID NO: 106711 - RNA, 19 nt, Artificial Sequence
  Synthetic
uagaaacgcugcuaaaaug

SEQ ID NO: 106712 - RNA, 20 nt, Artificial Sequence
  Synthetic
auagaaacgcugcuaaaaug

SEQ ID NO: 106713 - RNA, 21 nt, Artificial Sequence
  Synthetic
aauagaaacgcugcuaaaaug

SEQ ID NO: 106714 - RNA, 22 nt, Artificial Sequence
  Synthetic
aaauagaaacgcugcuaaaaug

SEQ ID NO: 106715 - RNA, 23 nt, Artificial Sequence
  Synthetic
caaauagaaacgcugcuaaaaug

SEQ ID NO: 106716 - RNA, 24 nt, Artificial Sequence
  Synthetic
acaaauagaaacgcugcuaaaaug

SEQ ID NO: 106717 - RNA, 18 nt, Artificial Sequence
  Synthetic
cugcacccuuguaaaaug

SEQ ID NO: 106718 - RNA, 19 nt, Artificial Sequence
  Synthetic
ccugcacccuuguaaaaug

SEQ ID NO: 106719 - RNA, 20 nt, Artificial Sequence
  Synthetic
uccugcacccuuguaaaaug

SEQ ID NO: 106720 - RNA, 21 nt, Artificial Sequence
  Synthetic
uuccugcacccuuguaaaaug

SEQ ID NO: 106721 - RNA, 23 nt, Artificial Sequence
  Synthetic
uguuccugcacccuuguaaaaug

SEQ ID NO: 106722 - RNA, 24 nt, Artificial Sequence
  Synthetic
uuguuccugcacccuuguaaaaug

SEQ ID NO: 106723 - RNA, 18 nt, Artificial Sequence
  Synthetic
agucuuuaaguuaaaaug

SEQ ID NO: 106724 - RNA, 21 nt, Artificial Sequence
  Synthetic
cggagucuuuaaguuaaaaug

SEQ ID NO: 106725 - RNA, 22 nt, Artificial Sequence
  Synthetic
acggagucuuuaaguuaaaaug

SEQ ID NO: 106726 - RNA, 24 nt, Artificial Sequence
  Synthetic
agacggagucuuuaaguuaaaaug

SEQ ID NO: 106727 - RNA, 18 nt, Artificial Sequence
  Synthetic
uguuuguuuguuaaaaug

SEQ ID NO: 106728 - RNA, 19 nt, Artificial Sequence
  Synthetic
uuguuuguuuguuaaaaug

SEQ ID NO: 106729 - RNA, 20 nt, Artificial Sequence
  Synthetic
auuguuuguuuguuaaaaug

SEQ ID NO: 106730 - RNA, 21 nt, Artificial Sequence
  Synthetic
aauuguuuguuuguuaaaaug

SEQ ID NO: 106731 - RNA, 22 nt, Artificial Sequence
  Synthetic
caauuguuuguuuguuaaaaug

SEQ ID NO: 106732 - RNA, 23 nt, Artificial Sequence
  Synthetic
acaauuguuuguuuguuaaaaug

SEQ ID NO: 106733 - RNA, 18 nt, Artificial Sequence
  Synthetic
ccaagaauacaccaaaug

SEQ ID NO: 106734 - RNA, 19 nt, Artificial Sequence
  Synthetic
accaagaauacaccaaaug

SEQ ID NO: 106735 - RNA, 20 nt, Artificial Sequence
  Synthetic
aaccaagaauacaccaaaug

SEQ ID NO: 106736 - RNA, 21 nt, Artificial Sequence
  Synthetic
aaaccaagaauacaccaaaug

SEQ ID NO: 106737 - RNA, 23 nt, Artificial Sequence
  Synthetic
agaaaccaagaauacaccaaaug

SEQ ID NO: 106738 - RNA, 24 nt, Artificial Sequence
  Synthetic
cagaaaccaagaauacaccaaaug

SEQ ID NO: 106739 - RNA, 18 nt, Artificial Sequence
  Synthetic
ugaauaguuuaccaaaug

SEQ ID NO: 106740 - RNA, 20 nt, Artificial Sequence
  Synthetic
agugaauaguuuaccaaaug

SEQ ID NO: 106741 - RNA, 22 nt, Artificial Sequence
  Synthetic
agagugaauaguuuaccaaaug

SEQ ID NO: 106742 - RNA, 23 nt, Artificial Sequence
  Synthetic
cagagugaauaguuuaccaaaug

SEQ ID NO: 106743 - RNA, 24 nt, Artificial Sequence
  Synthetic
acagagugaauaguuuaccaaaug

SEQ ID NO: 106744 - RNA, 19 nt, Artificial Sequence
  Synthetic
aguuaaguacaugcaaaug

SEQ ID NO: 106745 - RNA, 20 nt, Artificial Sequence
  Synthetic
caguuaaguacaugcaaaug

SEQ ID NO: 106746 - RNA, 21 nt, Artificial Sequence
  Synthetic
ccaguuaaguacaugcaaaug

SEQ ID NO: 106747 - RNA, 22 nt, Artificial Sequence
  Synthetic
uccaguuaaguacaugcaaaug

SEQ ID NO: 106748 - RNA, 24 nt, Artificial Sequence
  Synthetic
uguccaguuaaguacaugcaaaug

SEQ ID NO: 106749 - RNA, 18 nt, Artificial Sequence
  Synthetic
cuaagaagcucucaaaug

SEQ ID NO: 106750 - RNA, 19 nt, Artificial Sequence
  Synthetic
ucuaagaagcucucaaaug

SEQ ID NO: 106751 - RNA, 20 nt, Artificial Sequence
  Synthetic
aucuaagaagcucucaaaug

SEQ ID NO: 106752 - RNA, 21 nt, Artificial Sequence
  Synthetic
aaucuaagaagcucucaaaug

SEQ ID NO: 106753 - RNA, 23 nt, Artificial Sequence
  Synthetic
ugaaucuaagaagcucucaaaug

SEQ ID NO: 106754 - RNA, 24 nt, Artificial Sequence
  Synthetic
augaaucuaagaagcucucaaaug

SEQ ID NO: 106755 - RNA, 21 nt, Artificial Sequence
  Synthetic
aaauauaugaucaaagaaaug

SEQ ID NO: 106756 - RNA, 22 nt, Artificial Sequence
  Synthetic
uaaauauaugaucaaagaaaug

SEQ ID NO: 106757 - RNA, 23 nt, Artificial Sequence
  Synthetic
uuaaauauaugaucaaagaaaug

SEQ ID NO: 106758 - RNA, 24 nt, Artificial Sequence
  Synthetic
uuuaaauauaugaucaaagaaaug

SEQ ID NO: 106759 - RNA, 21 nt, Artificial Sequence
  Synthetic
aaucagcagaaugaagaaaug

SEQ ID NO: 106760 - RNA, 24 nt, Artificial Sequence
  Synthetic
aggaaucagcagaaugaagaaaug

SEQ ID NO: 106761 - RNA, 18 nt, Artificial Sequence
  Synthetic
cgaucugagacagaaaug

SEQ ID NO: 106762 - RNA, 19 nt, Artificial Sequence
  Synthetic
acgaucugagacagaaaug

SEQ ID NO: 106763 - RNA, 20 nt, Artificial Sequence
  Synthetic
cacgaucugagacagaaaug

SEQ ID NO: 106764 - RNA, 23 nt, Artificial Sequence
  Synthetic
uggcacgaucugagacagaaaug

SEQ ID NO: 106765 - RNA, 24 nt, Artificial Sequence
  Synthetic
uuggcacgaucugagacagaaaug

SEQ ID NO: 106766 - RNA, 18 nt, Artificial Sequence
  Synthetic
auucagaauccagaaaug

SEQ ID NO: 106767 - RNA, 21 nt, Artificial Sequence
  Synthetic
aggauucagaauccagaaaug

SEQ ID NO: 106768 - RNA, 23 nt, Artificial Sequence
  Synthetic
ugaggauucagaauccagaaaug

SEQ ID NO: 106769 - RNA, 24 nt, Artificial Sequence
  Synthetic
augaggauucagaauccagaaaug

SEQ ID NO: 106770 - RNA, 21 nt, Artificial Sequence
  Synthetic
ccugagcacuugcuagaaaug

SEQ ID NO: 106771 - RNA, 22 nt, Artificial Sequence
  Synthetic
cccugagcacuugcuagaaaug

SEQ ID NO: 106772 - RNA, 23 nt, Artificial Sequence
  Synthetic
acccugagcacuugcuagaaaug

SEQ ID NO: 106773 - RNA, 24 nt, Artificial Sequence
  Synthetic
aacccugagcacuugcuagaaaug

SEQ ID NO: 106774 - RNA, 21 nt, Artificial Sequence
  Synthetic
caauaaaaauauuuagaaaug

SEQ ID NO: 106775 - RNA, 22 nt, Artificial Sequence
  Synthetic
acaauaaaaauauuuagaaaug

SEQ ID NO: 106776 - RNA, 23 nt, Artificial Sequence
  Synthetic
aacaauaaaaauauuuagaaaug

SEQ ID NO: 106777 - RNA, 24 nt, Artificial Sequence
  Synthetic
caacaauaaaaauauuuagaaaug

SEQ ID NO: 106778 - RNA, 18 nt, Artificial Sequence
  Synthetic
augcacaguuuagaaaug

SEQ ID NO: 106779 - RNA, 19 nt, Artificial Sequence
  Synthetic
aaugcacaguuuagaaaug

SEQ ID NO: 106780 - RNA, 21 nt, Artificial Sequence
  Synthetic
ugaaugcacaguuuagaaaug

SEQ ID NO: 106781 - RNA, 22 nt, Artificial Sequence
  Synthetic
augaaugcacaguuuagaaaug

SEQ ID NO: 106782 - RNA, 24 nt, Artificial Sequence
  Synthetic
ugaugaaugcacaguuuagaaaug

SEQ ID NO: 106783 - RNA, 23 nt, Artificial Sequence
  Synthetic
agguggagagauuaggggaaaug

SEQ ID NO: 106784 - RNA, 24 nt, Artificial Sequence
  Synthetic
uagguggagagauuaggggaaaug

SEQ ID NO: 106785 - RNA, 18 nt, Artificial Sequence
  Synthetic
uagacaggcucugaaaug

SEQ ID NO: 106786 - RNA, 19 nt, Artificial Sequence
  Synthetic
cuagacaggcucugaaaug

SEQ ID NO: 106787 - RNA, 20 nt, Artificial Sequence
  Synthetic
acuagacaggcucugaaaug

SEQ ID NO: 106788 - RNA, 21 nt, Artificial Sequence
  Synthetic
cacuagacaggcucugaaaug

SEQ ID NO: 106789 - RNA, 22 nt, Artificial Sequence
  Synthetic
acacuagacaggcucugaaaug

SEQ ID NO: 106790 - RNA, 18 nt, Artificial Sequence
  Synthetic
acuguauuaugugaaaug

SEQ ID NO: 106791 - RNA, 20 nt, Artificial Sequence
  Synthetic
agacuguauuaugugaaaug

SEQ ID NO: 106792 - RNA, 22 nt, Artificial Sequence
  Synthetic
ugagacuguauuaugugaaaug

SEQ ID NO: 106793 - RNA, 23 nt, Artificial Sequence
  Synthetic
uugagacuguauuaugugaaaug

SEQ ID NO: 106794 - RNA, 24 nt, Artificial Sequence
  Synthetic
uuugagacuguauuaugugaaaug

SEQ ID NO: 106795 - RNA, 21 nt, Artificial Sequence
  Synthetic
cagcaacaaggaaaauaaaug

SEQ ID NO: 106796 - RNA, 22 nt, Artificial Sequence
  Synthetic
ucagcaacaaggaaaauaaaug

SEQ ID NO: 106797 - RNA, 23 nt, Artificial Sequence
  Synthetic
uucagcaacaaggaaaauaaaug

SEQ ID NO: 106798 - RNA, 24 nt, Artificial Sequence
  Synthetic
cuucagcaacaaggaaaauaaaug

SEQ ID NO: 106799 - RNA, 19 nt, Artificial Sequence
  Synthetic
ugaucacugcagauaaaug

SEQ ID NO: 106800 - RNA, 20 nt, Artificial Sequence
  Synthetic
augaucacugcagauaaaug

SEQ ID NO: 106801 - RNA, 21 nt, Artificial Sequence
  Synthetic
aaugaucacugcagauaaaug

SEQ ID NO: 106802 - RNA, 22 nt, Artificial Sequence
  Synthetic
aaaugaucacugcagauaaaug

SEQ ID NO: 106803 - RNA, 23 nt, Artificial Sequence
  Synthetic
aaaaugaucacugcagauaaaug

SEQ ID NO: 106804 - RNA, 24 nt, Artificial Sequence
  Synthetic
aaaaaugaucacugcagauaaaug

SEQ ID NO: 106805 - RNA, 18 nt, Artificial Sequence
  Synthetic
ccugguacaugauaaaug

SEQ ID NO: 106806 - RNA, 19 nt, Artificial Sequence
  Synthetic
uccugguacaugauaaaug

SEQ ID NO: 106807 - RNA, 20 nt, Artificial Sequence
  Synthetic
uuccugguacaugauaaaug

SEQ ID NO: 106808 - RNA, 22 nt, Artificial Sequence
  Synthetic
uguuccugguacaugauaaaug

SEQ ID NO: 106809 - RNA, 23 nt, Artificial Sequence
  Synthetic
cuguuccugguacaugauaaaug

SEQ ID NO: 106810 - RNA, 18 nt, Artificial Sequence
  Synthetic
cauuccagaauauaaaug

SEQ ID NO: 106811 - RNA, 19 nt, Artificial Sequence
  Synthetic
acauuccagaauauaaaug

SEQ ID NO: 106812 - RNA, 20 nt, Artificial Sequence
  Synthetic
cacauuccagaauauaaaug

SEQ ID NO: 106813 - RNA, 21 nt, Artificial Sequence
  Synthetic
ucacauuccagaauauaaaug

SEQ ID NO: 106814 - RNA, 23 nt, Artificial Sequence
  Synthetic
ugucacauuccagaauauaaaug

SEQ ID NO: 106815 - RNA, 24 nt, Artificial Sequence
  Synthetic
cugucacauuccagaauauaaaug

SEQ ID NO: 106816 - RNA, 18 nt, Artificial Sequence
  Synthetic
auaauuaacaucuaaaug

SEQ ID NO: 106817 - RNA, 21 nt, Artificial Sequence
  Synthetic
uggauaauuaacaucuaaaug

SEQ ID NO: 106818 - RNA, 22 nt, Artificial Sequence
  Synthetic
auggauaauuaacaucuaaaug

SEQ ID NO: 106819 - RNA, 23 nt, Artificial Sequence
  Synthetic
aauggauaauuaacaucuaaaug

SEQ ID NO: 106820 - RNA, 24 nt, Artificial Sequence
  Synthetic
aaauggauaauuaacaucuaaaug

SEQ ID NO: 106821 - RNA, 18 nt, Artificial Sequence
  Synthetic
uuuccagauagguaaaug

SEQ ID NO: 106822 - RNA, 19 nt, Artificial Sequence
  Synthetic
auuuccagauagguaaaug

SEQ ID NO: 106823 - RNA, 20 nt, Artificial Sequence
  Synthetic
uauuuccagauagguaaaug

SEQ ID NO: 106824 - RNA, 21 nt, Artificial Sequence
  Synthetic
uuauuuccagauagguaaaug

SEQ ID NO: 106825 - RNA, 22 nt, Artificial Sequence
  Synthetic
cuuauuuccagauagguaaaug

SEQ ID NO: 106826 - RNA, 23 nt, Artificial Sequence
  Synthetic
ucuuauuuccagauagguaaaug

SEQ ID NO: 106827 - RNA, 24 nt, Artificial Sequence
  Synthetic
cucuuauuuccagauagguaaaug

SEQ ID NO: 106828 - RNA, 18 nt, Artificial Sequence
  Synthetic
caggcaaaauuguaaaug

SEQ ID NO: 106829 - RNA, 20 nt, Artificial Sequence
  Synthetic
ugcaggcaaaauuguaaaug

SEQ ID NO: 106830 - RNA, 21 nt, Artificial Sequence
  Synthetic
uugcaggcaaaauuguaaaug

SEQ ID NO: 106831 - RNA, 22 nt, Artificial Sequence
  Synthetic
uuugcaggcaaaauuguaaaug

SEQ ID NO: 106832 - RNA, 23 nt, Artificial Sequence
  Synthetic
auuugcaggcaaaauuguaaaug

SEQ ID NO: 106833 - RNA, 24 nt, Artificial Sequence
  Synthetic
cauuugcaggcaaaauuguaaaug

SEQ ID NO: 106834 - RNA, 18 nt, Artificial Sequence
  Synthetic
uccuaggagcauuaaaug

SEQ ID NO: 106835 - RNA, 19 nt, Artificial Sequence
  Synthetic
uuccuaggagcauuaaaug

SEQ ID NO: 106836 - RNA, 20 nt, Artificial Sequence
  Synthetic
auuccuaggagcauuaaaug

SEQ ID NO: 106837 - RNA, 23 nt, Artificial Sequence
  Synthetic
aggauuccuaggagcauuaaaug

SEQ ID NO: 106838 - RNA, 24 nt, Artificial Sequence
  Synthetic
aaggauuccuaggagcauuaaaug

SEQ ID NO: 106839 - RNA, 18 nt, Artificial Sequence
  Synthetic
uagaaugagaagacaaug

SEQ ID NO: 106840 - RNA, 20 nt, Artificial Sequence
  Synthetic
uguagaaugagaagacaaug

SEQ ID NO: 106841 - RNA, 21 nt, Artificial Sequence
  Synthetic
auguagaaugagaagacaaug

SEQ ID NO: 106842 - RNA, 22 nt, Artificial Sequence
  Synthetic
cauguagaaugagaagacaaug

SEQ ID NO: 106843 - RNA, 23 nt, Artificial Sequence
  Synthetic
ucauguagaaugagaagacaaug

SEQ ID NO: 106844 - RNA, 24 nt, Artificial Sequence
  Synthetic
cucauguagaaugagaagacaaug

SEQ ID NO: 106845 - RNA, 21 nt, Artificial Sequence
  Synthetic
uacuacuggauaaugacaaug

SEQ ID NO: 106846 - RNA, 22 nt, Artificial Sequence
  Synthetic
uuacuacuggauaaugacaaug

SEQ ID NO: 106847 - RNA, 23 nt, Artificial Sequence
  Synthetic
uuuacuacuggauaaugacaaug

SEQ ID NO: 106848 - RNA, 24 nt, Artificial Sequence
  Synthetic
uuuuacuacuggauaaugacaaug

SEQ ID NO: 106849 - RNA, 19 nt, Artificial Sequence
  Synthetic
uggggauugucuuacaaug

SEQ ID NO: 106850 - RNA, 20 nt, Artificial Sequence
  Synthetic
uuggggauugucuuacaaug

SEQ ID NO: 106851 - RNA, 21 nt, Artificial Sequence
  Synthetic
cuuggggauugucuuacaaug

SEQ ID NO: 106852 - RNA, 22 nt, Artificial Sequence
  Synthetic
ccuuggggauugucuuacaaug

SEQ ID NO: 106853 - RNA, 23 nt, Artificial Sequence
  Synthetic
cccuuggggauugucuuacaaug

SEQ ID NO: 106854 - RNA, 24 nt, Artificial Sequence
  Synthetic
ucccuuggggauugucuuacaaug

SEQ ID NO: 106855 - RNA, 19 nt, Artificial Sequence
  Synthetic
ugagguggccuuuacaaug

SEQ ID NO: 106856 - RNA, 20 nt, Artificial Sequence
  Synthetic
augagguggccuuuacaaug

SEQ ID NO: 106857 - RNA, 21 nt, Artificial Sequence
  Synthetic
aaugagguggccuuuacaaug

SEQ ID NO: 106858 - RNA, 23 nt, Artificial Sequence
  Synthetic
ugaaugagguggccuuuacaaug

SEQ ID NO: 106859 - RNA, 24 nt, Artificial Sequence
  Synthetic
uugaaugagguggccuuuacaaug

SEQ ID NO: 106860 - RNA, 19 nt, Artificial Sequence
  Synthetic
ugagauuaagagaccaaug

SEQ ID NO: 106861 - RNA, 20 nt, Artificial Sequence
  Synthetic
cugagauuaagagaccaaug

SEQ ID NO: 106862 - RNA, 21 nt, Artificial Sequence
  Synthetic
ucugagauuaagagaccaaug

SEQ ID NO: 106863 - RNA, 22 nt, Artificial Sequence
  Synthetic
aucugagauuaagagaccaaug

SEQ ID NO: 106864 - RNA, 23 nt, Artificial Sequence
  Synthetic
uaucugagauuaagagaccaaug

SEQ ID NO: 106865 - RNA, 24 nt, Artificial Sequence
  Synthetic
cuaucugagauuaagagaccaaug

SEQ ID NO: 106866 - RNA, 19 nt, Artificial Sequence
  Synthetic
aggaagcauuuagccaaug

SEQ ID NO: 106867 - RNA, 20 nt, Artificial Sequence
  Synthetic
caggaagcauuuagccaaug

SEQ ID NO: 106868 - RNA, 21 nt, Artificial Sequence
  Synthetic
ccaggaagcauuuagccaaug

SEQ ID NO: 106869 - RNA, 22 nt, Artificial Sequence
  Synthetic
accaggaagcauuuagccaaug

SEQ ID NO: 106870 - RNA, 23 nt, Artificial Sequence
  Synthetic
uaccaggaagcauuuagccaaug

SEQ ID NO: 106871 - RNA, 21 nt, Artificial Sequence
  Synthetic
uguaguaaaaaaaaagcaaug

SEQ ID NO: 106872 - RNA, 22 nt, Artificial Sequence
  Synthetic
auguaguaaaaaaaaagcaaug

SEQ ID NO: 106873 - RNA, 23 nt, Artificial Sequence
  Synthetic
uauguaguaaaaaaaaagcaaug

SEQ ID NO: 106874 - RNA, 24 nt, Artificial Sequence
  Synthetic
uuauguaguaaaaaaaaagcaaug

SEQ ID NO: 106875 - RNA, 18 nt, Artificial Sequence
  Synthetic
aaccucuacucagcaaug

SEQ ID NO: 106876 - RNA, 19 nt, Artificial Sequence
  Synthetic
uaaccucuacucagcaaug

SEQ ID NO: 106877 - RNA, 20 nt, Artificial Sequence
  Synthetic
cuaaccucuacucagcaaug

SEQ ID NO: 106878 - RNA, 21 nt, Artificial Sequence
  Synthetic
ucuaaccucuacucagcaaug

SEQ ID NO: 106879 - RNA, 23 nt, Artificial Sequence
  Synthetic
agucuaaccucuacucagcaaug

SEQ ID NO: 106880 - RNA, 24 nt, Artificial Sequence
  Synthetic
cagucuaaccucuacucagcaaug

SEQ ID NO: 106881 - RNA, 21 nt, Artificial Sequence
  Synthetic
uaacauauacaaagagcaaug

SEQ ID NO: 106882 - RNA, 22 nt, Artificial Sequence
  Synthetic
auaacauauacaaagagcaaug

SEQ ID NO: 106883 - RNA, 23 nt, Artificial Sequence
  Synthetic
uauaacauauacaaagagcaaug

SEQ ID NO: 106884 - RNA, 24 nt, Artificial Sequence
  Synthetic
auauaacauauacaaagagcaaug

SEQ ID NO: 106885 - RNA, 21 nt, Artificial Sequence
  Synthetic
auuugaaacuccagugcaaug

SEQ ID NO: 106886 - RNA, 23 nt, Artificial Sequence
  Synthetic
ugauuugaaacuccagugcaaug

SEQ ID NO: 106887 - RNA, 18 nt, Artificial Sequence
  Synthetic
aacuaucauacaucaaug

SEQ ID NO: 106888 - RNA, 19 nt, Artificial Sequence
  Synthetic
aaacuaucauacaucaaug

SEQ ID NO: 106889 - RNA, 20 nt, Artificial Sequence
  Synthetic
aaaacuaucauacaucaaug

SEQ ID NO: 106890 - RNA, 21 nt, Artificial Sequence
  Synthetic
caaaacuaucauacaucaaug

SEQ ID NO: 106891 - RNA, 22 nt, Artificial Sequence
  Synthetic
acaaaacuaucauacaucaaug

SEQ ID NO: 106892 - RNA, 23 nt, Artificial Sequence
  Synthetic
uacaaaacuaucauacaucaaug

SEQ ID NO: 106893 - RNA, 24 nt, Artificial Sequence
  Synthetic
auacaaaacuaucauacaucaaug

SEQ ID NO: 106894 - RNA, 18 nt, Artificial Sequence
  Synthetic
uauagaaucuucucaaug

SEQ ID NO: 106895 - RNA, 19 nt, Artificial Sequence
  Synthetic
uuauagaaucuucucaaug

SEQ ID NO: 106896 - RNA, 20 nt, Artificial Sequence
  Synthetic
uuuauagaaucuucucaaug

SEQ ID NO: 106897 - RNA, 21 nt, Artificial Sequence
  Synthetic
uuuuauagaaucuucucaaug

SEQ ID NO: 106898 - RNA, 23 nt, Artificial Sequence
  Synthetic
aguuuuauagaaucuucucaaug

SEQ ID NO: 106899 - RNA, 24 nt, Artificial Sequence
  Synthetic
uaguuuuauagaaucuucucaaug

SEQ ID NO: 106900 - RNA, 18 nt, Artificial Sequence
  Synthetic
uguaaugcugagucaaug

SEQ ID NO: 106901 - RNA, 19 nt, Artificial Sequence
  Synthetic
cuguaaugcugagucaaug

SEQ ID NO: 106902 - RNA, 20 nt, Artificial Sequence
  Synthetic
ccuguaaugcugagucaaug

SEQ ID NO: 106903 - RNA, 21 nt, Artificial Sequence
  Synthetic
cccuguaaugcugagucaaug

SEQ ID NO: 106904 - RNA, 22 nt, Artificial Sequence
  Synthetic
ucccuguaaugcugagucaaug

SEQ ID NO: 106905 - RNA, 23 nt, Artificial Sequence
  Synthetic
uucccuguaaugcugagucaaug

SEQ ID NO: 106906 - RNA, 24 nt, Artificial Sequence
  Synthetic
uuucccuguaaugcugagucaaug

SEQ ID NO: 106907 - RNA, 22 nt, Artificial Sequence
  Synthetic
uggggaguugcagaugucaaug

SEQ ID NO: 106908 - RNA, 23 nt, Artificial Sequence
  Synthetic
cuggggaguugcagaugucaaug

SEQ ID NO: 106909 - RNA, 24 nt, Artificial Sequence
  Synthetic
acuggggaguugcagaugucaaug

SEQ ID NO: 106910 - RNA, 18 nt, Artificial Sequence
  Synthetic
cugccuauccaaagaaug

SEQ ID NO: 106911 - RNA, 19 nt, Artificial Sequence
  Synthetic
acugccuauccaaagaaug

SEQ ID NO: 106912 - RNA, 20 nt, Artificial Sequence
  Synthetic
cacugccuauccaaagaaug

SEQ ID NO: 106913 - RNA, 21 nt, Artificial Sequence
  Synthetic
ucacugccuauccaaagaaug

SEQ ID NO: 106914 - RNA, 22 nt, Artificial Sequence
  Synthetic
uucacugccuauccaaagaaug

SEQ ID NO: 106915 - RNA, 23 nt, Artificial Sequence
  Synthetic
auucacugccuauccaaagaaug

SEQ ID NO: 106916 - RNA, 24 nt, Artificial Sequence
  Synthetic
uauucacugccuauccaaagaaug

SEQ ID NO: 106917 - RNA, 18 nt, Artificial Sequence
  Synthetic
aaugccuuuauaagaaug

SEQ ID NO: 106918 - RNA, 20 nt, Artificial Sequence
  Synthetic
ugaaugccuuuauaagaaug

SEQ ID NO: 106919 - RNA, 21 nt, Artificial Sequence
  Synthetic
augaaugccuuuauaagaaug

SEQ ID NO: 106920 - RNA, 22 nt, Artificial Sequence
  Synthetic
caugaaugccuuuauaagaaug

SEQ ID NO: 106921 - RNA, 23 nt, Artificial Sequence
  Synthetic
ucaugaaugccuuuauaagaaug

SEQ ID NO: 106922 - RNA, 18 nt, Artificial Sequence
  Synthetic
ugugugauacacagaaug

SEQ ID NO: 106923 - RNA, 19 nt, Artificial Sequence
  Synthetic
augugugauacacagaaug

SEQ ID NO: 106924 - RNA, 22 nt, Artificial Sequence
  Synthetic
aggaugugugauacacagaaug

SEQ ID NO: 106925 - RNA, 23 nt, Artificial Sequence
  Synthetic
caggaugugugauacacagaaug

SEQ ID NO: 106926 - RNA, 24 nt, Artificial Sequence
  Synthetic
acaggaugugugauacacagaaug

SEQ ID NO: 106927 - RNA, 19 nt, Artificial Sequence
  Synthetic
ugggaaacugcugagaaug

SEQ ID NO: 106928 - RNA, 20 nt, Artificial Sequence
  Synthetic
augggaaacugcugagaaug

SEQ ID NO: 106929 - RNA, 21 nt, Artificial Sequence
  Synthetic
caugggaaacugcugagaaug

SEQ ID NO: 106930 - RNA, 22 nt, Artificial Sequence
  Synthetic
acaugggaaacugcugagaaug

SEQ ID NO: 106931 - RNA, 24 nt, Artificial Sequence
  Synthetic
ugacaugggaaacugcugagaaug

SEQ ID NO: 106932 - RNA, 18 nt, Artificial Sequence
  Synthetic
cuugguaaauauagaaug

SEQ ID NO: 106933 - RNA, 19 nt, Artificial Sequence
  Synthetic
ccuugguaaauauagaaug

SEQ ID NO: 106934 - RNA, 21 nt, Artificial Sequence
  Synthetic
ugccuugguaaauauagaaug

SEQ ID NO: 106935 - RNA, 22 nt, Artificial Sequence
  Synthetic
uugccuugguaaauauagaaug

SEQ ID NO: 106936 - RNA, 23 nt, Artificial Sequence
  Synthetic
auugccuugguaaauauagaaug

SEQ ID NO: 106937 - RNA, 24 nt, Artificial Sequence
  Synthetic
uauugccuugguaaauauagaaug

SEQ ID NO: 106938 - RNA, 18 nt, Artificial Sequence
  Synthetic
ugaggcuuauuuagaaug

SEQ ID NO: 106939 - RNA, 19 nt, Artificial Sequence
  Synthetic
augaggcuuauuuagaaug

SEQ ID NO: 106940 - RNA, 20 nt, Artificial Sequence
  Synthetic
uaugaggcuuauuuagaaug

SEQ ID NO: 106941 - RNA, 21 nt, Artificial Sequence
  Synthetic
cuaugaggcuuauuuagaaug

SEQ ID NO: 106942 - RNA, 22 nt, Artificial Sequence
  Synthetic
ucuaugaggcuuauuuagaaug

SEQ ID NO: 106943 - RNA, 23 nt, Artificial Sequence
  Synthetic
aucuaugaggcuuauuuagaaug

SEQ ID NO: 106944 - RNA, 24 nt, Artificial Sequence
  Synthetic
aaucuaugaggcuuauuuagaaug

SEQ ID NO: 106945 - RNA, 18 nt, Artificial Sequence
  Synthetic
acuuuuuguauaggaaug

SEQ ID NO: 106946 - RNA, 19 nt, Artificial Sequence
  Synthetic
uacuuuuuguauaggaaug

SEQ ID NO: 106947 - RNA, 20 nt, Artificial Sequence
  Synthetic
uuacuuuuuguauaggaaug

SEQ ID NO: 106948 - RNA, 18 nt, Artificial Sequence
  Synthetic
uucacugggguaggaaug

SEQ ID NO: 106949 - RNA, 19 nt, Artificial Sequence
  Synthetic
uuucacugggguaggaaug

SEQ ID NO: 106950 - RNA, 21 nt, Artificial Sequence
  Synthetic
uguuucacugggguaggaaug

SEQ ID NO: 106951 - RNA, 22 nt, Artificial Sequence
  Synthetic
auguuucacugggguaggaaug

SEQ ID NO: 106952 - RNA, 23 nt, Artificial Sequence
  Synthetic
uauguuucacugggguaggaaug

SEQ ID NO: 106953 - RNA, 24 nt, Artificial Sequence
  Synthetic
cuauguuucacugggguaggaaug

SEQ ID NO: 106954 - RNA, 18 nt, Artificial Sequence
  Synthetic
uguuaaguauauggaaug

SEQ ID NO: 106955 - RNA, 19 nt, Artificial Sequence
  Synthetic
auguuaaguauauggaaug

SEQ ID NO: 106956 - RNA, 21 nt, Artificial Sequence
  Synthetic
ugauguuaaguauauggaaug

SEQ ID NO: 106957 - RNA, 22 nt, Artificial Sequence
  Synthetic
augauguuaaguauauggaaug

SEQ ID NO: 106958 - RNA, 23 nt, Artificial Sequence
  Synthetic
uaugauguuaaguauauggaaug

SEQ ID NO: 106959 - RNA, 24 nt, Artificial Sequence
  Synthetic
uuaugauguuaaguauauggaaug

SEQ ID NO: 106960 - RNA, 18 nt, Artificial Sequence
  Synthetic
ugguugcagcaaugaaug

SEQ ID NO: 106961 - RNA, 19 nt, Artificial Sequence
  Synthetic
uugguugcagcaaugaaug

SEQ ID NO: 106962 - RNA, 20 nt, Artificial Sequence
  Synthetic
uuugguugcagcaaugaaug

SEQ ID NO: 106963 - RNA, 21 nt, Artificial Sequence
  Synthetic
auuugguugcagcaaugaaug

SEQ ID NO: 106964 - RNA, 23 nt, Artificial Sequence
  Synthetic
agauuugguugcagcaaugaaug

SEQ ID NO: 106965 - RNA, 24 nt, Artificial Sequence
  Synthetic
uagauuugguugcagcaaugaaug

SEQ ID NO: 106966 - RNA, 18 nt, Artificial Sequence
  Synthetic
uaaaacagaaacugaaug

SEQ ID NO: 106967 - RNA, 20 nt, Artificial Sequence
  Synthetic
aguaaaacagaaacugaaug

SEQ ID NO: 106968 - RNA, 21 nt, Artificial Sequence
  Synthetic
aaguaaaacagaaacugaaug

SEQ ID NO: 106969 - RNA, 22 nt, Artificial Sequence
  Synthetic
caaguaaaacagaaacugaaug

SEQ ID NO: 106970 - RNA, 23 nt, Artificial Sequence
  Synthetic
acaaguaaaacagaaacugaaug

SEQ ID NO: 106971 - RNA, 24 nt, Artificial Sequence
  Synthetic
aacaaguaaaacagaaacugaaug

SEQ ID NO: 106972 - RNA, 18 nt, Artificial Sequence
  Synthetic
ugguauuugcacugaaug

SEQ ID NO: 106973 - RNA, 21 nt, Artificial Sequence
  Synthetic
aggugguauuugcacugaaug

SEQ ID NO: 106974 - RNA, 23 nt, Artificial Sequence
  Synthetic
agaggugguauuugcacugaaug

SEQ ID NO: 106975 - RNA, 24 nt, Artificial Sequence
  Synthetic
aagaggugguauuugcacugaaug

SEQ ID NO: 106976 - RNA, 18 nt, Artificial Sequence
  Synthetic
ugagaaaauaggugaaug

SEQ ID NO: 106977 - RNA, 19 nt, Artificial Sequence
  Synthetic
augagaaaauaggugaaug

SEQ ID NO: 106978 - RNA, 20 nt, Artificial Sequence
  Synthetic
caugagaaaauaggugaaug

SEQ ID NO: 106979 - RNA, 22 nt, Artificial Sequence
  Synthetic
ugcaugagaaaauaggugaaug

SEQ ID NO: 106980 - RNA, 23 nt, Artificial Sequence
  Synthetic
uugcaugagaaaauaggugaaug

SEQ ID NO: 106981 - RNA, 24 nt, Artificial Sequence
  Synthetic
auugcaugagaaaauaggugaaug

SEQ ID NO: 106982 - RNA, 18 nt, Artificial Sequence
  Synthetic
aagcuaauuuugugaaug

SEQ ID NO: 106983 - RNA, 19 nt, Artificial Sequence
  Synthetic
aaagcuaauuuugugaaug

SEQ ID NO: 106984 - RNA, 20 nt, Artificial Sequence
  Synthetic
caaagcuaauuuugugaaug

SEQ ID NO: 106985 - RNA, 22 nt, Artificial Sequence
  Synthetic
ugcaaagcuaauuuugugaaug

SEQ ID NO: 106986 - RNA, 23 nt, Artificial Sequence
  Synthetic
cugcaaagcuaauuuugugaaug

SEQ ID NO: 106987 - RNA, 24 nt, Artificial Sequence
  Synthetic
ucugcaaagcuaauuuugugaaug

SEQ ID NO: 106988 - RNA, 18 nt, Artificial Sequence
  Synthetic
acaauuucuuguugaaug

SEQ ID NO: 106989 - RNA, 19 nt, Artificial Sequence
  Synthetic
cacaauuucuuguugaaug

SEQ ID NO: 106990 - RNA, 20 nt, Artificial Sequence
  Synthetic
ccacaauuucuuguugaaug

SEQ ID NO: 106991 - RNA, 21 nt, Artificial Sequence
  Synthetic
cccacaauuucuuguugaaug

SEQ ID NO: 106992 - RNA, 22 nt, Artificial Sequence
  Synthetic
acccacaauuucuuguugaaug

SEQ ID NO: 106993 - RNA, 18 nt, Artificial Sequence
  Synthetic
acaucuauuauuugaaug

SEQ ID NO: 106994 - RNA, 19 nt, Artificial Sequence
  Synthetic
aacaucuauuauuugaaug

SEQ ID NO: 106995 - RNA, 20 nt, Artificial Sequence
  Synthetic
uaacaucuauuauuugaaug

SEQ ID NO: 106996 - RNA, 21 nt, Artificial Sequence
  Synthetic
uuaacaucuauuauuugaaug

SEQ ID NO: 106997 - RNA, 22 nt, Artificial Sequence
  Synthetic
uuuaacaucuauuauuugaaug

SEQ ID NO: 106998 - RNA, 23 nt, Artificial Sequence
  Synthetic
uuuuaacaucuauuauuugaaug

SEQ ID NO: 106999 - RNA, 24 nt, Artificial Sequence
  Synthetic
uuuuuaacaucuauuauuugaaug

SEQ ID NO: 107000 - RNA, 18 nt, Artificial Sequence
  Synthetic
caacuacugcuuugaaug

SEQ ID NO: 107001 - RNA, 19 nt, Artificial Sequence
  Synthetic
acaacuacugcuuugaaug

SEQ ID NO: 107002 - RNA, 20 nt, Artificial Sequence
  Synthetic
cacaacuacugcuuugaaug

SEQ ID NO: 107003 - RNA, 21 nt, Artificial Sequence
  Synthetic
acacaacuacugcuuugaaug

SEQ ID NO: 107004 - RNA, 22 nt, Artificial Sequence
  Synthetic
cacacaacuacugcuuugaaug

SEQ ID NO: 107005 - RNA, 23 nt, Artificial Sequence
  Synthetic
acacacaacuacugcuuugaaug

SEQ ID NO: 107006 - RNA, 24 nt, Artificial Sequence
  Synthetic
aacacacaacuacugcuuugaaug

SEQ ID NO: 107007 - RNA, 18 nt, Artificial Sequence
  Synthetic
cuuugauugaaaauaaug

SEQ ID NO: 107008 - RNA, 19 nt, Artificial Sequence
  Synthetic
ccuuugauugaaaauaaug

SEQ ID NO: 107009 - RNA, 21 nt, Artificial Sequence
  Synthetic
ugccuuugauugaaaauaaug

SEQ ID NO: 107010 - RNA, 22 nt, Artificial Sequence
  Synthetic
uugccuuugauugaaaauaaug

SEQ ID NO: 107011 - RNA, 23 nt, Artificial Sequence
  Synthetic
uuugccuuugauugaaaauaaug

SEQ ID NO: 107012 - RNA, 24 nt, Artificial Sequence
  Synthetic
uuuugccuuugauugaaaauaaug

SEQ ID NO: 107013 - RNA, 21 nt, Artificial Sequence
  Synthetic
uggaaauuuaauaaaauaaug

SEQ ID NO: 107014 - RNA, 22 nt, Artificial Sequence
  Synthetic
cuggaaauuuaauaaaauaaug

SEQ ID NO: 107015 - RNA, 23 nt, Artificial Sequence
  Synthetic
ucuggaaauuuaauaaaauaaug

SEQ ID NO: 107016 - RNA, 24 nt, Artificial Sequence
  Synthetic
cucuggaaauuuaauaaaauaaug

SEQ ID NO: 107017 - RNA, 18 nt, Artificial Sequence
  Synthetic
aaccuaugaacaauaaug

SEQ ID NO: 107018 - RNA, 20 nt, Artificial Sequence
  Synthetic
agaaccuaugaacaauaaug

SEQ ID NO: 107019 - RNA, 22 nt, Artificial Sequence
  Synthetic
ugagaaccuaugaacaauaaug

SEQ ID NO: 107020 - RNA, 23 nt, Artificial Sequence
  Synthetic
cugagaaccuaugaacaauaaug

SEQ ID NO: 107021 - RNA, 24 nt, Artificial Sequence
  Synthetic
ccugagaaccuaugaacaauaaug

SEQ ID NO: 107022 - RNA, 18 nt, Artificial Sequence
  Synthetic
cuuucacagagaauaaug

SEQ ID NO: 107023 - RNA, 20 nt, Artificial Sequence
  Synthetic
ugcuuucacagagaauaaug

SEQ ID NO: 107024 - RNA, 21 nt, Artificial Sequence
  Synthetic
augcuuucacagagaauaaug

SEQ ID NO: 107025 - RNA, 18 nt, Artificial Sequence
  Synthetic
cuugcauacuucauaaug

SEQ ID NO: 107026 - RNA, 19 nt, Artificial Sequence
  Synthetic
ucuugcauacuucauaaug

SEQ ID NO: 107027 - RNA, 21 nt, Artificial Sequence
  Synthetic
agucuugcauacuucauaaug

SEQ ID NO: 107028 - RNA, 22 nt, Artificial Sequence
  Synthetic
uagucuugcauacuucauaaug

SEQ ID NO: 107029 - RNA, 23 nt, Artificial Sequence
  Synthetic
uuagucuugcauacuucauaaug

SEQ ID NO: 107030 - RNA, 24 nt, Artificial Sequence
  Synthetic
uuuagucuugcauacuucauaaug

SEQ ID NO: 107031 - RNA, 18 nt, Artificial Sequence
  Synthetic
caauuaaaaaggauaaug

SEQ ID NO: 107032 - RNA, 19 nt, Artificial Sequence
  Synthetic
ucaauuaaaaaggauaaug

SEQ ID NO: 107033 - RNA, 20 nt, Artificial Sequence
  Synthetic
cucaauuaaaaaggauaaug

SEQ ID NO: 107034 - RNA, 21 nt, Artificial Sequence
  Synthetic
acucaauuaaaaaggauaaug

SEQ ID NO: 107035 - RNA, 22 nt, Artificial Sequence
  Synthetic
uacucaauuaaaaaggauaaug

SEQ ID NO: 107036 - RNA, 23 nt, Artificial Sequence
  Synthetic
auacucaauuaaaaaggauaaug

SEQ ID NO: 107037 - RNA, 24 nt, Artificial Sequence
  Synthetic
aauacucaauuaaaaaggauaaug

SEQ ID NO: 107038 - RNA, 18 nt, Artificial Sequence
  Synthetic
uaaacucuaaugauaaug

SEQ ID NO: 107039 - RNA, 19 nt, Artificial Sequence
  Synthetic
cuaaacucuaaugauaaug

SEQ ID NO: 107040 - RNA, 20 nt, Artificial Sequence
  Synthetic
ucuaaacucuaaugauaaug

SEQ ID NO: 107041 - RNA, 21 nt, Artificial Sequence
  Synthetic
uucuaaacucuaaugauaaug

SEQ ID NO: 107042 - RNA, 22 nt, Artificial Sequence
  Synthetic
auucuaaacucuaaugauaaug

SEQ ID NO: 107043 - RNA, 23 nt, Artificial Sequence
  Synthetic
cauucuaaacucuaaugauaaug

SEQ ID NO: 107044 - RNA, 18 nt, Artificial Sequence
  Synthetic
cuuacacuucaaguaaug

SEQ ID NO: 107045 - RNA, 19 nt, Artificial Sequence
  Synthetic
ucuuacacuucaaguaaug

SEQ ID NO: 107046 - RNA, 20 nt, Artificial Sequence
  Synthetic
aucuuacacuucaaguaaug

SEQ ID NO: 107047 - RNA, 21 nt, Artificial Sequence
  Synthetic
aaucuuacacuucaaguaaug

SEQ ID NO: 107048 - RNA, 23 nt, Artificial Sequence
  Synthetic
ugaaucuuacacuucaaguaaug

SEQ ID NO: 107049 - RNA, 19 nt, Artificial Sequence
  Synthetic
agcuauugucacaguaaug

SEQ ID NO: 107050 - RNA, 20 nt, Artificial Sequence
  Synthetic
uagcuauugucacaguaaug

SEQ ID NO: 107051 - RNA, 21 nt, Artificial Sequence
  Synthetic
uuagcuauugucacaguaaug

SEQ ID NO: 107052 - RNA, 22 nt, Artificial Sequence
  Synthetic
auuagcuauugucacaguaaug

SEQ ID NO: 107053 - RNA, 23 nt, Artificial Sequence
  Synthetic
aauuagcuauugucacaguaaug

SEQ ID NO: 107054 - RNA, 24 nt, Artificial Sequence
  Synthetic
caauuagcuauugucacaguaaug

SEQ ID NO: 107055 - RNA, 19 nt, Artificial Sequence
  Synthetic
ugggucuuucccuguaaug

SEQ ID NO: 107056 - RNA, 20 nt, Artificial Sequence
  Synthetic
uugggucuuucccuguaaug

SEQ ID NO: 107057 - RNA, 21 nt, Artificial Sequence
  Synthetic
cuugggucuuucccuguaaug

SEQ ID NO: 107058 - RNA, 22 nt, Artificial Sequence
  Synthetic
ucuugggucuuucccuguaaug

SEQ ID NO: 107059 - RNA, 23 nt, Artificial Sequence
  Synthetic
aucuugggucuuucccuguaaug

SEQ ID NO: 107060 - RNA, 18 nt, Artificial Sequence
  Synthetic
uguuggcugaaauuaaug

SEQ ID NO: 107061 - RNA, 19 nt, Artificial Sequence
  Synthetic
auguuggcugaaauuaaug

SEQ ID NO: 107062 - RNA, 20 nt, Artificial Sequence
  Synthetic
aauguuggcugaaauuaaug

SEQ ID NO: 107063 - RNA, 21 nt, Artificial Sequence
  Synthetic
caauguuggcugaaauuaaug

SEQ ID NO: 107064 - RNA, 22 nt, Artificial Sequence
  Synthetic
ucaauguuggcugaaauuaaug

SEQ ID NO: 107065 - RNA, 23 nt, Artificial Sequence
  Synthetic
aucaauguuggcugaaauuaaug

SEQ ID NO: 107066 - RNA, 24 nt, Artificial Sequence
  Synthetic
aaucaauguuggcugaaauuaaug

SEQ ID NO: 107067 - RNA, 18 nt, Artificial Sequence
  Synthetic
uaagaauccccuuuaaug

SEQ ID NO: 107068 - RNA, 19 nt, Artificial Sequence
  Synthetic
uuaagaauccccuuuaaug

SEQ ID NO: 107069 - RNA, 21 nt, Artificial Sequence
  Synthetic
uguuaagaauccccuuuaaug

SEQ ID NO: 107070 - RNA, 22 nt, Artificial Sequence
  Synthetic
auguuaagaauccccuuuaaug

SEQ ID NO: 107071 - RNA, 23 nt, Artificial Sequence
  Synthetic
uauguuaagaauccccuuuaaug

SEQ ID NO: 107072 - RNA, 24 nt, Artificial Sequence
  Synthetic
cuauguuaagaauccccuuuaaug

SEQ ID NO: 107073 - RNA, 18 nt, Artificial Sequence
  Synthetic
cauagaaauauuuuaaug

SEQ ID NO: 107074 - RNA, 19 nt, Artificial Sequence
  Synthetic
acauagaaauauuuuaaug

SEQ ID NO: 107075 - RNA, 20 nt, Artificial Sequence
  Synthetic
cacauagaaauauuuuaaug

SEQ ID NO: 107076 - RNA, 23 nt, Artificial Sequence
  Synthetic
uggcacauagaaauauuuuaaug

SEQ ID NO: 107077 - RNA, 24 nt, Artificial Sequence
  Synthetic
auggcacauagaaauauuuuaaug

SEQ ID NO: 107078 - RNA, 18 nt, Artificial Sequence
  Synthetic
ucuucauauuaaaacaug

SEQ ID NO: 107079 - RNA, 19 nt, Artificial Sequence
  Synthetic
aucuucauauuaaaacaug

SEQ ID NO: 107080 - RNA, 20 nt, Artificial Sequence
  Synthetic
caucuucauauuaaaacaug

SEQ ID NO: 107081 - RNA, 22 nt, Artificial Sequence
  Synthetic
agcaucuucauauuaaaacaug

SEQ ID NO: 107082 - RNA, 23 nt, Artificial Sequence
  Synthetic
aagcaucuucauauuaaaacaug

SEQ ID NO: 107083 - RNA, 24 nt, Artificial Sequence
  Synthetic
aaagcaucuucauauuaaaacaug

SEQ ID NO: 107084 - RNA, 19 nt, Artificial Sequence
  Synthetic
ugagaugcuggcaaacaug

SEQ ID NO: 107085 - RNA, 20 nt, Artificial Sequence
  Synthetic
cugagaugcuggcaaacaug

SEQ ID NO: 107086 - RNA, 22 nt, Artificial Sequence
  Synthetic
ugcugagaugcuggcaaacaug

SEQ ID NO: 107087 - RNA, 23 nt, Artificial Sequence
  Synthetic
augcugagaugcuggcaaacaug

SEQ ID NO: 107088 - RNA, 18 nt, Artificial Sequence
  Synthetic
uaugguaggggaaacaug

SEQ ID NO: 107089 - RNA, 19 nt, Artificial Sequence
  Synthetic
uuaugguaggggaaacaug

SEQ ID NO: 107090 - RNA, 20 nt, Artificial Sequence
  Synthetic
auuaugguaggggaaacaug

SEQ ID NO: 107091 - RNA, 21 nt, Artificial Sequence
  Synthetic
uauuaugguaggggaaacaug

SEQ ID NO: 107092 - RNA, 24 nt, Artificial Sequence
  Synthetic
agguauuaugguaggggaaacaug

SEQ ID NO: 107093 - RNA, 18 nt, Artificial Sequence
  Synthetic
ugcuagccuauaaacaug

SEQ ID NO: 107094 - RNA, 19 nt, Artificial Sequence
  Synthetic
augcuagccuauaaacaug

SEQ ID NO: 107095 - RNA, 20 nt, Artificial Sequence
  Synthetic
aaugcuagccuauaaacaug

SEQ ID NO: 107096 - RNA, 21 nt, Artificial Sequence
  Synthetic
aaaugcuagccuauaaacaug

SEQ ID NO: 107097 - RNA, 22 nt, Artificial Sequence
  Synthetic
aaaaugcuagccuauaaacaug

SEQ ID NO: 107098 - RNA, 23 nt, Artificial Sequence
  Synthetic
aaaaaugcuagccuauaaacaug

SEQ ID NO: 107099 - RNA, 24 nt, Artificial Sequence
  Synthetic
uaaaaaugcuagccuauaaacaug

SEQ ID NO: 107100 - RNA, 18 nt, Artificial Sequence
  Synthetic
aguucaaaagccaacaug

SEQ ID NO: 107101 - RNA, 19 nt, Artificial Sequence
  Synthetic
uaguucaaaagccaacaug

SEQ ID NO: 107102 - RNA, 20 nt, Artificial Sequence
  Synthetic
uuaguucaaaagccaacaug

SEQ ID NO: 107103 - RNA, 21 nt, Artificial Sequence
  Synthetic
uuuaguucaaaagccaacaug

SEQ ID NO: 107104 - RNA, 22 nt, Artificial Sequence
  Synthetic
auuuaguucaaaagccaacaug

SEQ ID NO: 107105 - RNA, 23 nt, Artificial Sequence
  Synthetic
aauuuaguucaaaagccaacaug

SEQ ID NO: 107106 - RNA, 24 nt, Artificial Sequence
  Synthetic
aaauuuaguucaaaagccaacaug

SEQ ID NO: 107107 - RNA, 18 nt, Artificial Sequence
  Synthetic
ccagcacucuagaacaug

SEQ ID NO: 107108 - RNA, 19 nt, Artificial Sequence
  Synthetic
accagcacucuagaacaug

SEQ ID NO: 107109 - RNA, 20 nt, Artificial Sequence
  Synthetic
aaccagcacucuagaacaug

SEQ ID NO: 107110 - RNA, 21 nt, Artificial Sequence
  Synthetic
aaaccagcacucuagaacaug

SEQ ID NO: 107111 - RNA, 23 nt, Artificial Sequence
  Synthetic
ugaaaccagcacucuagaacaug

SEQ ID NO: 107112 - RNA, 24 nt, Artificial Sequence
  Synthetic
augaaaccagcacucuagaacaug

SEQ ID NO: 107113 - RNA, 19 nt, Artificial Sequence
  Synthetic
aggccuuaaggauaacaug

SEQ ID NO: 107114 - RNA, 20 nt, Artificial Sequence
  Synthetic
aaggccuuaaggauaacaug

SEQ ID NO: 107115 - RNA, 21 nt, Artificial Sequence
  Synthetic
aaaggccuuaaggauaacaug

SEQ ID NO: 107116 - RNA, 23 nt, Artificial Sequence
  Synthetic
agaaaggccuuaaggauaacaug

SEQ ID NO: 107117 - RNA, 20 nt, Artificial Sequence
  Synthetic
ugggagaggaauauaacaug

SEQ ID NO: 107118 - RNA, 21 nt, Artificial Sequence
  Synthetic
uugggagaggaauauaacaug

SEQ ID NO: 107119 - RNA, 22 nt, Artificial Sequence
  Synthetic
uuugggagaggaauauaacaug

SEQ ID NO: 107120 - RNA, 23 nt, Artificial Sequence
  Synthetic
uuuugggagaggaauauaacaug

SEQ ID NO: 107121 - RNA, 24 nt, Artificial Sequence
  Synthetic
auuuugggagaggaauauaacaug

SEQ ID NO: 107122 - RNA, 21 nt, Artificial Sequence
  Synthetic
auauaauugaaaaguaacaug

SEQ ID NO: 107123 - RNA, 22 nt, Artificial Sequence
  Synthetic
aauauaauugaaaaguaacaug

SEQ ID NO: 107124 - RNA, 23 nt, Artificial Sequence
  Synthetic
aaauauaauugaaaaguaacaug

SEQ ID NO: 107125 - RNA, 24 nt, Artificial Sequence
  Synthetic
uaaauauaauugaaaaguaacaug

SEQ ID NO: 107126 - RNA, 18 nt, Artificial Sequence
  Synthetic
auuucaaagcgacacaug

SEQ ID NO: 107127 - RNA, 19 nt, Artificial Sequence
  Synthetic
uauuucaaagcgacacaug

SEQ ID NO: 107128 - RNA, 21 nt, Artificial Sequence
  Synthetic
uguauuucaaagcgacacaug

SEQ ID NO: 107129 - RNA, 22 nt, Artificial Sequence
  Synthetic
cuguauuucaaagcgacacaug

SEQ ID NO: 107130 - RNA, 23 nt, Artificial Sequence
  Synthetic
ucuguauuucaaagcgacacaug

SEQ ID NO: 107131 - RNA, 18 nt, Artificial Sequence
  Synthetic
auauaguuaggacacaug

SEQ ID NO: 107132 - RNA, 19 nt, Artificial Sequence
  Synthetic
aauauaguuaggacacaug

SEQ ID NO: 107133 - RNA, 20 nt, Artificial Sequence
  Synthetic
aaauauaguuaggacacaug

SEQ ID NO: 107134 - RNA, 21 nt, Artificial Sequence
  Synthetic
uaaauauaguuaggacacaug

SEQ ID NO: 107135 - RNA, 23 nt, Artificial Sequence
  Synthetic
aguaaauauaguuaggacacaug

SEQ ID NO: 107136 - RNA, 24 nt, Artificial Sequence
  Synthetic
uaguaaauauaguuaggacacaug

SEQ ID NO: 107137 - RNA, 19 nt, Artificial Sequence
  Synthetic
cguguuuccuguacacaug

SEQ ID NO: 107138 - RNA, 20 nt, Artificial Sequence
  Synthetic
acguguuuccuguacacaug

SEQ ID NO: 107139 - RNA, 21 nt, Artificial Sequence
  Synthetic
cacguguuuccuguacacaug

SEQ ID NO: 107140 - RNA, 23 nt, Artificial Sequence
  Synthetic
ugcacguguuuccuguacacaug

SEQ ID NO: 107141 - RNA, 24 nt, Artificial Sequence
  Synthetic
cugcacguguuuccuguacacaug

SEQ ID NO: 107142 - RNA, 18 nt, Artificial Sequence
  Synthetic
agugaaaaaauccacaug

SEQ ID NO: 107143 - RNA, 19 nt, Artificial Sequence
  Synthetic
uagugaaaaaauccacaug

SEQ ID NO: 107144 - RNA, 20 nt, Artificial Sequence
  Synthetic
uuagugaaaaaauccacaug

SEQ ID NO: 107145 - RNA, 21 nt, Artificial Sequence
  Synthetic
uuuagugaaaaaauccacaug

SEQ ID NO: 107146 - RNA, 22 nt, Artificial Sequence
  Synthetic
cuuuagugaaaaaauccacaug

SEQ ID NO: 107147 - RNA, 24 nt, Artificial Sequence
  Synthetic
agcuuuagugaaaaaauccacaug

SEQ ID NO: 107148 - RNA, 18 nt, Artificial Sequence
  Synthetic
uauguuuauuuccacaug

SEQ ID NO: 107149 - RNA, 19 nt, Artificial Sequence
  Synthetic
auauguuuauuuccacaug

SEQ ID NO: 107150 - RNA, 20 nt, Artificial Sequence
  Synthetic
cauauguuuauuuccacaug

SEQ ID NO: 107151 - RNA, 21 nt, Artificial Sequence
  Synthetic
ccauauguuuauuuccacaug

SEQ ID NO: 107152 - RNA, 23 nt, Artificial Sequence
  Synthetic
agccauauguuuauuuccacaug

SEQ ID NO: 107153 - RNA, 24 nt, Artificial Sequence
  Synthetic
uagccauauguuuauuuccacaug

SEQ ID NO: 107154 - RNA, 18 nt, Artificial Sequence
  Synthetic
ugcugcauacuucacaug

SEQ ID NO: 107155 - RNA, 19 nt, Artificial Sequence
  Synthetic
augcugcauacuucacaug

SEQ ID NO: 107156 - RNA, 21 nt, Artificial Sequence
  Synthetic
agaugcugcauacuucacaug

SEQ ID NO: 107157 - RNA, 22 nt, Artificial Sequence
  Synthetic
aagaugcugcauacuucacaug

SEQ ID NO: 107158 - RNA, 23 nt, Artificial Sequence
  Synthetic
uaagaugcugcauacuucacaug

SEQ ID NO: 107159 - RNA, 24 nt, Artificial Sequence
  Synthetic
auaagaugcugcauacuucacaug

SEQ ID NO: 107160 - RNA, 18 nt, Artificial Sequence
  Synthetic
acaguugcugaagacaug

SEQ ID NO: 107161 - RNA, 19 nt, Artificial Sequence
  Synthetic
cacaguugcugaagacaug

SEQ ID NO: 107162 - RNA, 20 nt, Artificial Sequence
  Synthetic
ccacaguugcugaagacaug

SEQ ID NO: 107163 - RNA, 22 nt, Artificial Sequence
  Synthetic
agccacaguugcugaagacaug

SEQ ID NO: 107164 - RNA, 23 nt, Artificial Sequence
  Synthetic
cagccacaguugcugaagacaug

SEQ ID NO: 107165 - RNA, 24 nt, Artificial Sequence
  Synthetic
ccagccacaguugcugaagacaug

SEQ ID NO: 107166 - RNA, 20 nt, Artificial Sequence
  Synthetic
ugggaagcaggaaggacaug

SEQ ID NO: 107167 - RNA, 21 nt, Artificial Sequence
  Synthetic
uugggaagcaggaaggacaug

SEQ ID NO: 107168 - RNA, 23 nt, Artificial Sequence
  Synthetic
aguugggaagcaggaaggacaug

SEQ ID NO: 107169 - RNA, 19 nt, Artificial Sequence
  Synthetic
ugacaagugaccugacaug

SEQ ID NO: 107170 - RNA, 20 nt, Artificial Sequence
  Synthetic
uugacaagugaccugacaug

SEQ ID NO: 107171 - RNA, 21 nt, Artificial Sequence
  Synthetic
uuugacaagugaccugacaug

SEQ ID NO: 107172 - RNA, 22 nt, Artificial Sequence
  Synthetic
cuuugacaagugaccugacaug

SEQ ID NO: 107173 - RNA, 23 nt, Artificial Sequence
  Synthetic
ccuuugacaagugaccugacaug

SEQ ID NO: 107174 - RNA, 24 nt, Artificial Sequence
  Synthetic
cccuuugacaagugaccugacaug

SEQ ID NO: 107175 - RNA, 18 nt, Artificial Sequence
  Synthetic
cgaaacauauacuacaug

SEQ ID NO: 107176 - RNA, 21 nt, Artificial Sequence
  Synthetic
aggcgaaacauauacuacaug

SEQ ID NO: 107177 - RNA, 18 nt, Artificial Sequence
  Synthetic
aacaaaaaguucuacaug

SEQ ID NO: 107178 - RNA, 20 nt, Artificial Sequence
  Synthetic
ugaacaaaaaguucuacaug

SEQ ID NO: 107179 - RNA, 21 nt, Artificial Sequence
  Synthetic
augaacaaaaaguucuacaug

SEQ ID NO: 107180 - RNA, 22 nt, Artificial Sequence
  Synthetic
uaugaacaaaaaguucuacaug

SEQ ID NO: 107181 - RNA, 23 nt, Artificial Sequence
  Synthetic
uuaugaacaaaaaguucuacaug

SEQ ID NO: 107182 - RNA, 24 nt, Artificial Sequence
  Synthetic
cuuaugaacaaaaaguucuacaug

SEQ ID NO: 107183 - RNA, 18 nt, Artificial Sequence
  Synthetic
uguacacacauguacaug

SEQ ID NO: 107184 - RNA, 19 nt, Artificial Sequence
  Synthetic
auguacacacauguacaug

SEQ ID NO: 107185 - RNA, 20 nt, Artificial Sequence
  Synthetic
cauguacacacauguacaug

SEQ ID NO: 107186 - RNA, 21 nt, Artificial Sequence
  Synthetic
acauguacacacauguacaug

SEQ ID NO: 107187 - RNA, 22 nt, Artificial Sequence
  Synthetic
uacauguacacacauguacaug

SEQ ID NO: 107188 - RNA, 23 nt, Artificial Sequence
  Synthetic
auacauguacacacauguacaug

SEQ ID NO: 107189 - RNA, 24 nt, Artificial Sequence
  Synthetic
cauacauguacacacauguacaug

SEQ ID NO: 107190 - RNA, 18 nt, Artificial Sequence
  Synthetic
augugaucccuguacaug

SEQ ID NO: 107191 - RNA, 19 nt, Artificial Sequence
  Synthetic
caugugaucccuguacaug

SEQ ID NO: 107192 - RNA, 20 nt, Artificial Sequence
  Synthetic
ucaugugaucccuguacaug

SEQ ID NO: 107193 - RNA, 21 nt, Artificial Sequence
  Synthetic
aucaugugaucccuguacaug

SEQ ID NO: 107194 - RNA, 22 nt, Artificial Sequence
  Synthetic
aaucaugugaucccuguacaug

SEQ ID NO: 107195 - RNA, 23 nt, Artificial Sequence
  Synthetic
caaucaugugaucccuguacaug

SEQ ID NO: 107196 - RNA, 24 nt, Artificial Sequence
  Synthetic
ucaaucaugugaucccuguacaug

SEQ ID NO: 107197 - RNA, 21 nt, Artificial Sequence
  Synthetic
uccaaaacaauaaaaaccaug

SEQ ID NO: 107198 - RNA, 24 nt, Artificial Sequence
  Synthetic
cgguccaaaacaauaaaaaccaug

SEQ ID NO: 107199 - RNA, 18 nt, Artificial Sequence
  Synthetic
aaguugagcauuaccaug

SEQ ID NO: 107200 - RNA, 19 nt, Artificial Sequence
  Synthetic
aaaguugagcauuaccaug

SEQ ID NO: 107201 - RNA, 20 nt, Artificial Sequence
  Synthetic
uaaaguugagcauuaccaug

SEQ ID NO: 107202 - RNA, 21 nt, Artificial Sequence
  Synthetic
auaaaguugagcauuaccaug

SEQ ID NO: 107203 - RNA, 22 nt, Artificial Sequence
  Synthetic
aauaaaguugagcauuaccaug

SEQ ID NO: 107204 - RNA, 23 nt, Artificial Sequence
  Synthetic
uaauaaaguugagcauuaccaug

SEQ ID NO: 107205 - RNA, 24 nt, Artificial Sequence
  Synthetic
auaauaaaguugagcauuaccaug

SEQ ID NO: 107206 - RNA, 18 nt, Artificial Sequence
  Synthetic
cuggaagucauucccaug

SEQ ID NO: 107207 - RNA, 19 nt, Artificial Sequence
  Synthetic
acuggaagucauucccaug

SEQ ID NO: 107208 - RNA, 20 nt, Artificial Sequence
  Synthetic
aacuggaagucauucccaug

SEQ ID NO: 107209 - RNA, 21 nt, Artificial Sequence
  Synthetic
aaacuggaagucauucccaug

SEQ ID NO: 107210 - RNA, 22 nt, Artificial Sequence
  Synthetic
uaaacuggaagucauucccaug

SEQ ID NO: 107211 - RNA, 23 nt, Artificial Sequence
  Synthetic
auaaacuggaagucauucccaug

SEQ ID NO: 107212 - RNA, 24 nt, Artificial Sequence
  Synthetic
uauaaacuggaagucauucccaug

SEQ ID NO: 107213 - RNA, 18 nt, Artificial Sequence
  Synthetic
ccuuuuuauuucgccaug

SEQ ID NO: 107214 - RNA, 20 nt, Artificial Sequence
  Synthetic
agccuuuuuauuucgccaug

SEQ ID NO: 107215 - RNA, 22 nt, Artificial Sequence
  Synthetic
agagccuuuuuauuucgccaug

SEQ ID NO: 107216 - RNA, 23 nt, Artificial Sequence
  Synthetic
cagagccuuuuuauuucgccaug

SEQ ID NO: 107217 - RNA, 24 nt, Artificial Sequence
  Synthetic
acagagccuuuuuauuucgccaug

SEQ ID NO: 107218 - RNA, 21 nt, Artificial Sequence
  Synthetic
ugggaaauuguuauggccaug

SEQ ID NO: 107219 - RNA, 22 nt, Artificial Sequence
  Synthetic
cugggaaauuguuauggccaug

SEQ ID NO: 107220 - RNA, 23 nt, Artificial Sequence
  Synthetic
ccugggaaauuguuauggccaug

SEQ ID NO: 107221 - RNA, 24 nt, Artificial Sequence
  Synthetic
uccugggaaauuguuauggccaug

SEQ ID NO: 107222 - RNA, 18 nt, Artificial Sequence
  Synthetic
cccugucuuuuuuccaug

SEQ ID NO: 107223 - RNA, 19 nt, Artificial Sequence
  Synthetic
ucccugucuuuuuuccaug

SEQ ID NO: 107224 - RNA, 20 nt, Artificial Sequence
  Synthetic
uucccugucuuuuuuccaug

SEQ ID NO: 107225 - RNA, 21 nt, Artificial Sequence
  Synthetic
uuucccugucuuuuuuccaug

SEQ ID NO: 107226 - RNA, 22 nt, Artificial Sequence
  Synthetic
uuuucccugucuuuuuuccaug

SEQ ID NO: 107227 - RNA, 23 nt, Artificial Sequence
  Synthetic
uuuuucccugucuuuuuuccaug

SEQ ID NO: 107228 - RNA, 24 nt, Artificial Sequence
  Synthetic
cuuuuucccugucuuuuuuccaug

SEQ ID NO: 107229 - RNA, 21 nt, Artificial Sequence
  Synthetic
uugcuuuucauccacagcaug

SEQ ID NO: 107230 - RNA, 22 nt, Artificial Sequence
  Synthetic
cuugcuuuucauccacagcaug

SEQ ID NO: 107231 - RNA, 24 nt, Artificial Sequence
  Synthetic
ugcuugcuuuucauccacagcaug

SEQ ID NO: 107232 - RNA, 19 nt, Artificial Sequence
  Synthetic
uguacauuauuucagcaug

SEQ ID NO: 107233 - RNA, 20 nt, Artificial Sequence
  Synthetic
auguacauuauuucagcaug

SEQ ID NO: 107234 - RNA, 21 nt, Artificial Sequence
  Synthetic
cauguacauuauuucagcaug

SEQ ID NO: 107235 - RNA, 22 nt, Artificial Sequence
  Synthetic
acauguacauuauuucagcaug

SEQ ID NO: 107236 - RNA, 23 nt, Artificial Sequence
  Synthetic
aacauguacauuauuucagcaug

SEQ ID NO: 107237 - RNA, 19 nt, Artificial Sequence
  Synthetic
agucagaguacaaggcaug

SEQ ID NO: 107238 - RNA, 20 nt, Artificial Sequence
  Synthetic
cagucagaguacaaggcaug

SEQ ID NO: 107239 - RNA, 21 nt, Artificial Sequence
  Synthetic
ccagucagaguacaaggcaug

SEQ ID NO: 107240 - RNA, 22 nt, Artificial Sequence
  Synthetic
accagucagaguacaaggcaug

SEQ ID NO: 107241 - RNA, 23 nt, Artificial Sequence
  Synthetic
uaccagucagaguacaaggcaug

SEQ ID NO: 107242 - RNA, 24 nt, Artificial Sequence
  Synthetic
cuaccagucagaguacaaggcaug

SEQ ID NO: 107243 - RNA, 18 nt, Artificial Sequence
  Synthetic
uauagacuaucaggcaug

SEQ ID NO: 107244 - RNA, 22 nt, Artificial Sequence
  Synthetic
uggguauagacuaucaggcaug

SEQ ID NO: 107245 - RNA, 23 nt, Artificial Sequence
  Synthetic
auggguauagacuaucaggcaug

SEQ ID NO: 107246 - RNA, 24 nt, Artificial Sequence
  Synthetic
aauggguauagacuaucaggcaug

SEQ ID NO: 107247 - RNA, 19 nt, Artificial Sequence
  Synthetic
aggacugagaugaggcaug

SEQ ID NO: 107248 - RNA, 20 nt, Artificial Sequence
  Synthetic
caggacugagaugaggcaug

SEQ ID NO: 107249 - RNA, 21 nt, Artificial Sequence
  Synthetic
ccaggacugagaugaggcaug

SEQ ID NO: 107250 - RNA, 22 nt, Artificial Sequence
  Synthetic
uccaggacugagaugaggcaug

SEQ ID NO: 107251 - RNA, 23 nt, Artificial Sequence
  Synthetic
uuccaggacugagaugaggcaug

SEQ ID NO: 107252 - RNA, 24 nt, Artificial Sequence
  Synthetic
uuuccaggacugagaugaggcaug

SEQ ID NO: 107253 - RNA, 19 nt, Artificial Sequence
  Synthetic
uggcaaagugccuggcaug

SEQ ID NO: 107254 - RNA, 20 nt, Artificial Sequence
  Synthetic
auggcaaagugccuggcaug

SEQ ID NO: 107255 - RNA, 21 nt, Artificial Sequence
  Synthetic
aauggcaaagugccuggcaug

SEQ ID NO: 107256 - RNA, 22 nt, Artificial Sequence
  Synthetic
aaauggcaaagugccuggcaug

SEQ ID NO: 107257 - RNA, 23 nt, Artificial Sequence
  Synthetic
caaauggcaaagugccuggcaug

SEQ ID NO: 107258 - RNA, 24 nt, Artificial Sequence
  Synthetic
ccaaauggcaaagugccuggcaug

SEQ ID NO: 107259 - RNA, 19 nt, Artificial Sequence
  Synthetic
ugugauguaauaaugcaug

SEQ ID NO: 107260 - RNA, 20 nt, Artificial Sequence
  Synthetic
augugauguaauaaugcaug

SEQ ID NO: 107261 - RNA, 21 nt, Artificial Sequence
  Synthetic
caugugauguaauaaugcaug

SEQ ID NO: 107262 - RNA, 22 nt, Artificial Sequence
  Synthetic
acaugugauguaauaaugcaug

SEQ ID NO: 107263 - RNA, 23 nt, Artificial Sequence
  Synthetic
aacaugugauguaauaaugcaug

SEQ ID NO: 107264 - RNA, 24 nt, Artificial Sequence
  Synthetic
caacaugugauguaauaaugcaug

SEQ ID NO: 107265 - RNA, 19 nt, Artificial Sequence
  Synthetic
ugacagcuuaucaugcaug

SEQ ID NO: 107266 - RNA, 20 nt, Artificial Sequence
  Synthetic
augacagcuuaucaugcaug

SEQ ID NO: 107267 - RNA, 21 nt, Artificial Sequence
  Synthetic
aaugacagcuuaucaugcaug

SEQ ID NO: 107268 - RNA, 22 nt, Artificial Sequence
  Synthetic
uaaugacagcuuaucaugcaug

SEQ ID NO: 107269 - RNA, 24 nt, Artificial Sequence
  Synthetic
aguaaugacagcuuaucaugcaug

SEQ ID NO: 107270 - RNA, 18 nt, Artificial Sequence
  Synthetic
aauggcuuuagaugcaug

SEQ ID NO: 107271 - RNA, 19 nt, Artificial Sequence
  Synthetic
caauggcuuuagaugcaug

SEQ ID NO: 107272 - RNA, 20 nt, Artificial Sequence
  Synthetic
acaauggcuuuagaugcaug

SEQ ID NO: 107273 - RNA, 21 nt, Artificial Sequence
  Synthetic
aacaauggcuuuagaugcaug

SEQ ID NO: 107274 - RNA, 22 nt, Artificial Sequence
  Synthetic
uaacaauggcuuuagaugcaug

SEQ ID NO: 107275 - RNA, 24 nt, Artificial Sequence
  Synthetic
uguaacaauggcuuuagaugcaug

SEQ ID NO: 107276 - RNA, 18 nt, Artificial Sequence
  Synthetic
agguacaucauuugcaug

SEQ ID NO: 107277 - RNA, 19 nt, Artificial Sequence
  Synthetic
aagguacaucauuugcaug

SEQ ID NO: 107278 - RNA, 20 nt, Artificial Sequence
  Synthetic
aaagguacaucauuugcaug

SEQ ID NO: 107279 - RNA, 21 nt, Artificial Sequence
  Synthetic
aaaagguacaucauuugcaug

SEQ ID NO: 107280 - RNA, 23 nt, Artificial Sequence
  Synthetic
agaaaagguacaucauuugcaug

SEQ ID NO: 107281 - RNA, 18 nt, Artificial Sequence
  Synthetic
uuaaccuauguuugcaug

SEQ ID NO: 107282 - RNA, 19 nt, Artificial Sequence
  Synthetic
auuaaccuauguuugcaug

SEQ ID NO: 107283 - RNA, 21 nt, Artificial Sequence
  Synthetic
ugauuaaccuauguuugcaug

SEQ ID NO: 107284 - RNA, 22 nt, Artificial Sequence
  Synthetic
augauuaaccuauguuugcaug

SEQ ID NO: 107285 - RNA, 23 nt, Artificial Sequence
  Synthetic
aaugauuaaccuauguuugcaug

SEQ ID NO: 107286 - RNA, 24 nt, Artificial Sequence
  Synthetic
aaaugauuaaccuauguuugcaug

SEQ ID NO: 107287 - RNA, 18 nt, Artificial Sequence
  Synthetic
uaccagaauuuuugcaug

SEQ ID NO: 107288 - RNA, 19 nt, Artificial Sequence
  Synthetic
auaccagaauuuuugcaug

SEQ ID NO: 107289 - RNA, 20 nt, Artificial Sequence
  Synthetic
cauaccagaauuuuugcaug

SEQ ID NO: 107290 - RNA, 21 nt, Artificial Sequence
  Synthetic
acauaccagaauuuuugcaug

SEQ ID NO: 107291 - RNA, 23 nt, Artificial Sequence
  Synthetic
agacauaccagaauuuuugcaug

SEQ ID NO: 107292 - RNA, 24 nt, Artificial Sequence
  Synthetic
cagacauaccagaauuuuugcaug

SEQ ID NO: 107293 - RNA, 18 nt, Artificial Sequence
  Synthetic
auaguuccaaaaaucaug

SEQ ID NO: 107294 - RNA, 19 nt, Artificial Sequence
  Synthetic
aauaguuccaaaaaucaug

SEQ ID NO: 107295 - RNA, 20 nt, Artificial Sequence
  Synthetic
aaauaguuccaaaaaucaug

SEQ ID NO: 107296 - RNA, 21 nt, Artificial Sequence
  Synthetic
uaaauaguuccaaaaaucaug

SEQ ID NO: 107297 - RNA, 22 nt, Artificial Sequence
  Synthetic
auaaauaguuccaaaaaucaug

SEQ ID NO: 107298 - RNA, 23 nt, Artificial Sequence
  Synthetic
cauaaauaguuccaaaaaucaug

SEQ ID NO: 107299 - RNA, 24 nt, Artificial Sequence
  Synthetic
ccauaaauaguuccaaaaaucaug

SEQ ID NO: 107300 - RNA, 21 nt, Artificial Sequence
  Synthetic
auaaauauuuuuaaaaucaug

SEQ ID NO: 107301 - RNA, 22 nt, Artificial Sequence
  Synthetic
uauaaauauuuuuaaaaucaug

SEQ ID NO: 107302 - RNA, 23 nt, Artificial Sequence
  Synthetic
auauaaauauuuuuaaaaucaug

SEQ ID NO: 107303 - RNA, 24 nt, Artificial Sequence
  Synthetic
aauauaaauauuuuuaaaaucaug

SEQ ID NO: 107304 - RNA, 18 nt, Artificial Sequence
  Synthetic
cugauuccauaaaucaug

SEQ ID NO: 107305 - RNA, 19 nt, Artificial Sequence
  Synthetic
ucugauuccauaaaucaug

SEQ ID NO: 107306 - RNA, 20 nt, Artificial Sequence
  Synthetic
aucugauuccauaaaucaug

SEQ ID NO: 107307 - RNA, 21 nt, Artificial Sequence
  Synthetic
aaucugauuccauaaaucaug

SEQ ID NO: 107308 - RNA, 22 nt, Artificial Sequence
  Synthetic
aaaucugauuccauaaaucaug

SEQ ID NO: 107309 - RNA, 23 nt, Artificial Sequence
  Synthetic
aaaaucugauuccauaaaucaug

SEQ ID NO: 107310 - RNA, 24 nt, Artificial Sequence
  Synthetic
aaaaaucugauuccauaaaucaug

SEQ ID NO: 107311 - RNA, 18 nt, Artificial Sequence
  Synthetic
uaagagaaaagaaucaug

SEQ ID NO: 107312 - RNA, 20 nt, Artificial Sequence
  Synthetic
uguaagagaaaagaaucaug

SEQ ID NO: 107313 - RNA, 21 nt, Artificial Sequence
  Synthetic
auguaagagaaaagaaucaug

SEQ ID NO: 107314 - RNA, 22 nt, Artificial Sequence
  Synthetic
aauguaagagaaaagaaucaug

SEQ ID NO: 107315 - RNA, 23 nt, Artificial Sequence
  Synthetic
uaauguaagagaaaagaaucaug

SEQ ID NO: 107316 - RNA, 18 nt, Artificial Sequence
  Synthetic
cacuguuuacgcaucaug

SEQ ID NO: 107317 - RNA, 19 nt, Artificial Sequence
  Synthetic
acacuguuuacgcaucaug

SEQ ID NO: 107318 - RNA, 20 nt, Artificial Sequence
  Synthetic
aacacuguuuacgcaucaug

SEQ ID NO: 107319 - RNA, 21 nt, Artificial Sequence
  Synthetic
aaacacuguuuacgcaucaug

SEQ ID NO: 107320 - RNA, 24 nt, Artificial Sequence
  Synthetic
aggaaacacuguuuacgcaucaug

SEQ ID NO: 107321 - RNA, 18 nt, Artificial Sequence
  Synthetic
aacuguaauuuuaucaug

SEQ ID NO: 107322 - RNA, 20 nt, Artificial Sequence
  Synthetic
agaacuguaauuuuaucaug

SEQ ID NO: 107323 - RNA, 21 nt, Artificial Sequence
  Synthetic
cagaacuguaauuuuaucaug

SEQ ID NO: 107324 - RNA, 22 nt, Artificial Sequence
  Synthetic
acagaacuguaauuuuaucaug

SEQ ID NO: 107325 - RNA, 23 nt, Artificial Sequence
  Synthetic
aacagaacuguaauuuuaucaug

SEQ ID NO: 107326 - RNA, 24 nt, Artificial Sequence
  Synthetic
aaacagaacuguaauuuuaucaug

SEQ ID NO: 107327 - RNA, 18 nt, Artificial Sequence
  Synthetic
cugcaaaaggaccucaug

SEQ ID NO: 107328 - RNA, 19 nt, Artificial Sequence
  Synthetic
acugcaaaaggaccucaug

SEQ ID NO: 107329 - RNA, 20 nt, Artificial Sequence
  Synthetic
aacugcaaaaggaccucaug

SEQ ID NO: 107330 - RNA, 21 nt, Artificial Sequence
  Synthetic
aaacugcaaaaggaccucaug

SEQ ID NO: 107331 - RNA, 22 nt, Artificial Sequence
  Synthetic
uaaacugcaaaaggaccucaug

SEQ ID NO: 107332 - RNA, 24 nt, Artificial Sequence
  Synthetic
uguaaacugcaaaaggaccucaug

SEQ ID NO: 107333 - RNA, 18 nt, Artificial Sequence
  Synthetic
uuugucuuuccucucaug

SEQ ID NO: 107334 - RNA, 19 nt, Artificial Sequence
  Synthetic
cuuugucuuuccucucaug

SEQ ID NO: 107335 - RNA, 20 nt, Artificial Sequence
  Synthetic
ucuuugucuuuccucucaug

SEQ ID NO: 107336 - RNA, 21 nt, Artificial Sequence
  Synthetic
uucuuugucuuuccucucaug

SEQ ID NO: 107337 - RNA, 22 nt, Artificial Sequence
  Synthetic
uuucuuugucuuuccucucaug

SEQ ID NO: 107338 - RNA, 24 nt, Artificial Sequence
  Synthetic
aguuucuuugucuuuccucucaug

SEQ ID NO: 107339 - RNA, 18 nt, Artificial Sequence
  Synthetic
agaauucucauucucaug

SEQ ID NO: 107340 - RNA, 19 nt, Artificial Sequence
  Synthetic
aagaauucucauucucaug

SEQ ID NO: 107341 - RNA, 20 nt, Artificial Sequence
  Synthetic
aaagaauucucauucucaug

SEQ ID NO: 107342 - RNA, 21 nt, Artificial Sequence
  Synthetic
aaaagaauucucauucucaug

SEQ ID NO: 107343 - RNA, 22 nt, Artificial Sequence
  Synthetic
uaaaagaauucucauucucaug

SEQ ID NO: 107344 - RNA, 23 nt, Artificial Sequence
  Synthetic
uuaaaagaauucucauucucaug

SEQ ID NO: 107345 - RNA, 24 nt, Artificial Sequence
  Synthetic
auuaaaagaauucucauucucaug

SEQ ID NO: 107346 - RNA, 18 nt, Artificial Sequence
  Synthetic
uucuccuggaaauucaug

SEQ ID NO: 107347 - RNA, 20 nt, Artificial Sequence
  Synthetic
aguucuccuggaaauucaug

SEQ ID NO: 107348 - RNA, 21 nt, Artificial Sequence
  Synthetic
caguucuccuggaaauucaug

SEQ ID NO: 107349 - RNA, 22 nt, Artificial Sequence
  Synthetic
ucaguucuccuggaaauucaug

SEQ ID NO: 107350 - RNA, 23 nt, Artificial Sequence
  Synthetic
uucaguucuccuggaaauucaug

SEQ ID NO: 107351 - RNA, 18 nt, Artificial Sequence
  Synthetic
uaucccuugaaauucaug

SEQ ID NO: 107352 - RNA, 19 nt, Artificial Sequence
  Synthetic
auaucccuugaaauucaug

SEQ ID NO: 107353 - RNA, 21 nt, Artificial Sequence
  Synthetic
agauaucccuugaaauucaug

SEQ ID NO: 107354 - RNA, 22 nt, Artificial Sequence
  Synthetic
cagauaucccuugaaauucaug

SEQ ID NO: 107355 - RNA, 23 nt, Artificial Sequence
  Synthetic
ucagauaucccuugaaauucaug

SEQ ID NO: 107356 - RNA, 19 nt, Artificial Sequence
  Synthetic
agaaggggccacauucaug

SEQ ID NO: 107357 - RNA, 20 nt, Artificial Sequence
  Synthetic
uagaaggggccacauucaug

SEQ ID NO: 107358 - RNA, 21 nt, Artificial Sequence
  Synthetic
auagaaggggccacauucaug

SEQ ID NO: 107359 - RNA, 22 nt, Artificial Sequence
  Synthetic
cauagaaggggccacauucaug

SEQ ID NO: 107360 - RNA, 23 nt, Artificial Sequence
  Synthetic
ucauagaaggggccacauucaug

SEQ ID NO: 107361 - RNA, 24 nt, Artificial Sequence
  Synthetic
uucauagaaggggccacauucaug

SEQ ID NO: 107362 - RNA, 18 nt, Artificial Sequence
  Synthetic
ccaaagggaucauucaug

SEQ ID NO: 107363 - RNA, 19 nt, Artificial Sequence
  Synthetic
accaaagggaucauucaug

SEQ ID NO: 107364 - RNA, 20 nt, Artificial Sequence
  Synthetic
caccaaagggaucauucaug

SEQ ID NO: 107365 - RNA, 21 nt, Artificial Sequence
  Synthetic
ucaccaaagggaucauucaug

SEQ ID NO: 107366 - RNA, 23 nt, Artificial Sequence
  Synthetic
ugucaccaaagggaucauucaug

SEQ ID NO: 107367 - RNA, 24 nt, Artificial Sequence
  Synthetic
uugucaccaaagggaucauucaug

SEQ ID NO: 107368 - RNA, 21 nt, Artificial Sequence
  Synthetic
uauauuaaauuuauauucaug

SEQ ID NO: 107369 - RNA, 22 nt, Artificial Sequence
  Synthetic
uuauauuaaauuuauauucaug

SEQ ID NO: 107370 - RNA, 23 nt, Artificial Sequence
  Synthetic
auuauauuaaauuuauauucaug

SEQ ID NO: 107371 - RNA, 24 nt, Artificial Sequence
  Synthetic
uauuauauuaaauuuauauucaug

SEQ ID NO: 107372 - RNA, 18 nt, Artificial Sequence
  Synthetic
uauuucagguacuucaug

SEQ ID NO: 107373 - RNA, 19 nt, Artificial Sequence
  Synthetic
auauuucagguacuucaug

SEQ ID NO: 107374 - RNA, 20 nt, Artificial Sequence
  Synthetic
cauauuucagguacuucaug

SEQ ID NO: 107375 - RNA, 21 nt, Artificial Sequence
  Synthetic
acauauuucagguacuucaug

SEQ ID NO: 107376 - RNA, 22 nt, Artificial Sequence
  Synthetic
aacauauuucagguacuucaug

SEQ ID NO: 107377 - RNA, 23 nt, Artificial Sequence
  Synthetic
caacauauuucagguacuucaug

SEQ ID NO: 107378 - RNA, 24 nt, Artificial Sequence
  Synthetic
acaacauauuucagguacuucaug

SEQ ID NO: 107379 - RNA, 19 nt, Artificial Sequence
  Synthetic
uguauuuggucauuucaug

SEQ ID NO: 107380 - RNA, 20 nt, Artificial Sequence
  Synthetic
cuguauuuggucauuucaug

SEQ ID NO: 107381 - RNA, 21 nt, Artificial Sequence
  Synthetic
acuguauuuggucauuucaug

SEQ ID NO: 107382 - RNA, 22 nt, Artificial Sequence
  Synthetic
aacuguauuuggucauuucaug

SEQ ID NO: 107383 - RNA, 23 nt, Artificial Sequence
  Synthetic
aaacuguauuuggucauuucaug

SEQ ID NO: 107384 - RNA, 24 nt, Artificial Sequence
  Synthetic
aaaacuguauuuggucauuucaug

SEQ ID NO: 107385 - RNA, 20 nt, Artificial Sequence
  Synthetic
aggaacucgacuaaaagaug

SEQ ID NO: 107386 - RNA, 21 nt, Artificial Sequence
  Synthetic
uaggaacucgacuaaaagaug

SEQ ID NO: 107387 - RNA, 22 nt, Artificial Sequence
  Synthetic
uuaggaacucgacuaaaagaug

SEQ ID NO: 107388 - RNA, 23 nt, Artificial Sequence
  Synthetic
uuuaggaacucgacuaaaagaug

SEQ ID NO: 107389 - RNA, 24 nt, Artificial Sequence
  Synthetic
cuuuaggaacucgacuaaaagaug

SEQ ID NO: 107390 - RNA, 18 nt, Artificial Sequence
  Synthetic
ucacuggguagaaagaug

SEQ ID NO: 107391 - RNA, 20 nt, Artificial Sequence
  Synthetic
agucacuggguagaaagaug

SEQ ID NO: 107392 - RNA, 21 nt, Artificial Sequence
  Synthetic
aagucacuggguagaaagaug

SEQ ID NO: 107393 - RNA, 22 nt, Artificial Sequence
  Synthetic
caagucacuggguagaaagaug

SEQ ID NO: 107394 - RNA, 23 nt, Artificial Sequence
  Synthetic
ucaagucacuggguagaaagaug

SEQ ID NO: 107395 - RNA, 23 nt, Artificial Sequence
  Synthetic
cggaaauugauuuuuuaaagaug

SEQ ID NO: 107396 - RNA, 24 nt, Artificial Sequence
  Synthetic
ucggaaauugauuuuuuaaagaug

SEQ ID NO: 107397 - RNA, 18 nt, Artificial Sequence
  Synthetic
uccaaagggaacaagaug

SEQ ID NO: 107398 - RNA, 19 nt, Artificial Sequence
  Synthetic
cuccaaagggaacaagaug

SEQ ID NO: 107399 - RNA, 20 nt, Artificial Sequence
  Synthetic
ucuccaaagggaacaagaug

SEQ ID NO: 107400 - RNA, 23 nt, Artificial Sequence
  Synthetic
uggucuccaaagggaacaagaug

SEQ ID NO: 107401 - RNA, 19 nt, Artificial Sequence
  Synthetic
ugauuuacaagacaagaug

SEQ ID NO: 107402 - RNA, 20 nt, Artificial Sequence
  Synthetic
augauuuacaagacaagaug

SEQ ID NO: 107403 - RNA, 18 nt, Artificial Sequence
  Synthetic
acuuuaaccaagaagaug

SEQ ID NO: 107404 - RNA, 19 nt, Artificial Sequence
  Synthetic
uacuuuaaccaagaagaug

SEQ ID NO: 107405 - RNA, 20 nt, Artificial Sequence
  Synthetic
auacuuuaaccaagaagaug

SEQ ID NO: 107406 - RNA, 21 nt, Artificial Sequence
  Synthetic
uauacuuuaaccaagaagaug

SEQ ID NO: 107407 - RNA, 22 nt, Artificial Sequence
  Synthetic
uuauacuuuaaccaagaagaug

SEQ ID NO: 107408 - RNA, 23 nt, Artificial Sequence
  Synthetic
cuuauacuuuaaccaagaagaug

SEQ ID NO: 107409 - RNA, 24 nt, Artificial Sequence
  Synthetic
ccuuauacuuuaaccaagaagaug

SEQ ID NO: 107410 - RNA, 21 nt, Artificial Sequence
  Synthetic
uagagugcagugaagaagaug

SEQ ID NO: 107411 - RNA, 23 nt, Artificial Sequence
  Synthetic
aguagagugcagugaagaagaug

SEQ ID NO: 107412 - RNA, 24 nt, Artificial Sequence
  Synthetic
caguagagugcagugaagaagaug

SEQ ID NO: 107413 - RNA, 18 nt, Artificial Sequence
  Synthetic
aaugcuacacugaagaug

SEQ ID NO: 107414 - RNA, 19 nt, Artificial Sequence
  Synthetic
aaaugcuacacugaagaug

SEQ ID NO: 107415 - RNA, 20 nt, Artificial Sequence
  Synthetic
aaaaugcuacacugaagaug

SEQ ID NO: 107416 - RNA, 21 nt, Artificial Sequence
  Synthetic
aaaaaugcuacacugaagaug

SEQ ID NO: 107417 - RNA, 22 nt, Artificial Sequence
  Synthetic
uaaaaaugcuacacugaagaug

SEQ ID NO: 107418 - RNA, 23 nt, Artificial Sequence
  Synthetic
uuaaaaaugcuacacugaagaug

SEQ ID NO: 107419 - RNA, 24 nt, Artificial Sequence
  Synthetic
cuuaaaaaugcuacacugaagaug

SEQ ID NO: 107420 - RNA, 19 nt, Artificial Sequence
  Synthetic
uggcugugagcugaagaug

SEQ ID NO: 107421 - RNA, 21 nt, Artificial Sequence
  Synthetic
uguggcugugagcugaagaug

SEQ ID NO: 107422 - RNA, 23 nt, Artificial Sequence
  Synthetic
aguguggcugugagcugaagaug

SEQ ID NO: 107423 - RNA, 18 nt, Artificial Sequence
  Synthetic
ccacagccucuuaagaug

SEQ ID NO: 107424 - RNA, 20 nt, Artificial Sequence
  Synthetic
agccacagccucuuaagaug

SEQ ID NO: 107425 - RNA, 21 nt, Artificial Sequence
  Synthetic
cagccacagccucuuaagaug

SEQ ID NO: 107426 - RNA, 22 nt, Artificial Sequence
  Synthetic
ucagccacagccucuuaagaug

SEQ ID NO: 107427 - RNA, 23 nt, Artificial Sequence
  Synthetic
uucagccacagccucuuaagaug

SEQ ID NO: 107428 - RNA, 24 nt, Artificial Sequence
  Synthetic
uuucagccacagccucuuaagaug

SEQ ID NO: 107429 - RNA, 18 nt, Artificial Sequence
  Synthetic
aaaauuacauuacagaug

SEQ ID NO: 107430 - RNA, 19 nt, Artificial Sequence
  Synthetic
uaaaauuacauuacagaug

SEQ ID NO: 107431 - RNA, 20 nt, Artificial Sequence
  Synthetic
uuaaaauuacauuacagaug

SEQ ID NO: 107432 - RNA, 21 nt, Artificial Sequence
  Synthetic
cuuaaaauuacauuacagaug

SEQ ID NO: 107433 - RNA, 22 nt, Artificial Sequence
  Synthetic
acuuaaaauuacauuacagaug

SEQ ID NO: 107434 - RNA, 23 nt, Artificial Sequence
  Synthetic
uacuuaaaauuacauuacagaug

SEQ ID NO: 107435 - RNA, 24 nt, Artificial Sequence
  Synthetic
auacuuaaaauuacauuacagaug

SEQ ID NO: 107436 - RNA, 19 nt, Artificial Sequence
  Synthetic
agugaggguagagcagaug

SEQ ID NO: 107437 - RNA, 20 nt, Artificial Sequence
  Synthetic
cagugaggguagagcagaug

SEQ ID NO: 107438 - RNA, 22 nt, Artificial Sequence
  Synthetic
ugcagugaggguagagcagaug

SEQ ID NO: 107439 - RNA, 24 nt, Artificial Sequence
  Synthetic
ugugcagugaggguagagcagaug

SEQ ID NO: 107440 - RNA, 18 nt, Artificial Sequence
  Synthetic
uuaauggaagggcagaug

SEQ ID NO: 107441 - RNA, 19 nt, Artificial Sequence
  Synthetic
cuuaauggaagggcagaug

SEQ ID NO: 107442 - RNA, 20 nt, Artificial Sequence
  Synthetic
acuuaauggaagggcagaug

SEQ ID NO: 107443 - RNA, 18 nt, Artificial Sequence
  Synthetic
uagcucugaucucagaug

SEQ ID NO: 107444 - RNA, 19 nt, Artificial Sequence
  Synthetic
auagcucugaucucagaug

SEQ ID NO: 107445 - RNA, 20 nt, Artificial Sequence
  Synthetic
aauagcucugaucucagaug

SEQ ID NO: 107446 - RNA, 21 nt, Artificial Sequence
  Synthetic
aaauagcucugaucucagaug

SEQ ID NO: 107447 - RNA, 23 nt, Artificial Sequence
  Synthetic
agaaauagcucugaucucagaug

SEQ ID NO: 107448 - RNA, 24 nt, Artificial Sequence
  Synthetic
uagaaauagcucugaucucagaug

SEQ ID NO: 107449 - RNA, 18 nt, Artificial Sequence
  Synthetic
cuaaauagcuuucagaug

SEQ ID NO: 107450 - RNA, 19 nt, Artificial Sequence
  Synthetic
acuaaauagcuuucagaug

SEQ ID NO: 107451 - RNA, 20 nt, Artificial Sequence
  Synthetic
cacuaaauagcuuucagaug

SEQ ID NO: 107452 - RNA, 21 nt, Artificial Sequence
  Synthetic
ccacuaaauagcuuucagaug

SEQ ID NO: 107453 - RNA, 22 nt, Artificial Sequence
  Synthetic
accacuaaauagcuuucagaug

SEQ ID NO: 107454 - RNA, 23 nt, Artificial Sequence
  Synthetic
caccacuaaauagcuuucagaug

SEQ ID NO: 107455 - RNA, 24 nt, Artificial Sequence
  Synthetic
ccaccacuaaauagcuuucagaug

SEQ ID NO: 107456 - RNA, 18 nt, Artificial Sequence
  Synthetic
aguuguuugguagagaug

SEQ ID NO: 107457 - RNA, 19 nt, Artificial Sequence
  Synthetic
uaguuguuugguagagaug

SEQ ID NO: 107458 - RNA, 20 nt, Artificial Sequence
  Synthetic
auaguuguuugguagagaug

SEQ ID NO: 107459 - RNA, 21 nt, Artificial Sequence
  Synthetic
aauaguuguuugguagagaug

SEQ ID NO: 107460 - RNA, 22 nt, Artificial Sequence
  Synthetic
aaauaguuguuugguagagaug

SEQ ID NO: 107461 - RNA, 23 nt, Artificial Sequence
  Synthetic
caaauaguuguuugguagagaug

SEQ ID NO: 107462 - RNA, 24 nt, Artificial Sequence
  Synthetic
ccaaauaguuguuugguagagaug

SEQ ID NO: 107463 - RNA, 18 nt, Artificial Sequence
  Synthetic
ccucgggguggggagaug

SEQ ID NO: 107464 - RNA, 19 nt, Artificial Sequence
  Synthetic
uccucgggguggggagaug

SEQ ID NO: 107465 - RNA, 20 nt, Artificial Sequence
  Synthetic
auccucgggguggggagaug

SEQ ID NO: 107466 - RNA, 21 nt, Artificial Sequence
  Synthetic
cauccucgggguggggagaug

SEQ ID NO: 107467 - RNA, 22 nt, Artificial Sequence
  Synthetic
acauccucgggguggggagaug

SEQ ID NO: 107468 - RNA, 23 nt, Artificial Sequence
  Synthetic
aacauccucgggguggggagaug

SEQ ID NO: 107469 - RNA, 24 nt, Artificial Sequence
  Synthetic
uaacauccucgggguggggagaug

SEQ ID NO: 107470 - RNA, 19 nt, Artificial Sequence
  Synthetic
ugcuaucacauaugagaug

SEQ ID NO: 107471 - RNA, 20 nt, Artificial Sequence
  Synthetic
uugcuaucacauaugagaug

SEQ ID NO: 107472 - RNA, 21 nt, Artificial Sequence
  Synthetic
uuugcuaucacauaugagaug

SEQ ID NO: 107473 - RNA, 22 nt, Artificial Sequence
  Synthetic
uuuugcuaucacauaugagaug

SEQ ID NO: 107474 - RNA, 23 nt, Artificial Sequence
  Synthetic
uuuuugcuaucacauaugagaug

SEQ ID NO: 107475 - RNA, 24 nt, Artificial Sequence
  Synthetic
uuuuuugcuaucacauaugagaug

SEQ ID NO: 107476 - RNA, 18 nt, Artificial Sequence
  Synthetic
uugugcaguaaauagaug

SEQ ID NO: 107477 - RNA, 19 nt, Artificial Sequence
  Synthetic
uuugugcaguaaauagaug

SEQ ID NO: 107478 - RNA, 20 nt, Artificial Sequence
  Synthetic
auuugugcaguaaauagaug

SEQ ID NO: 107479 - RNA, 21 nt, Artificial Sequence
  Synthetic
aauuugugcaguaaauagaug

SEQ ID NO: 107480 - RNA, 22 nt, Artificial Sequence
  Synthetic
uaauuugugcaguaaauagaug

SEQ ID NO: 107481 - RNA, 23 nt, Artificial Sequence
  Synthetic
cuaauuugugcaguaaauagaug

SEQ ID NO: 107482 - RNA, 24 nt, Artificial Sequence
  Synthetic
acuaauuugugcaguaaauagaug

SEQ ID NO: 107483 - RNA, 18 nt, Artificial Sequence
  Synthetic
aaacucccacucuagaug

SEQ ID NO: 107484 - RNA, 19 nt, Artificial Sequence
  Synthetic
aaaacucccacucuagaug

SEQ ID NO: 107485 - RNA, 21 nt, Artificial Sequence
  Synthetic
agaaaacucccacucuagaug

SEQ ID NO: 107486 - RNA, 22 nt, Artificial Sequence
  Synthetic
aagaaaacucccacucuagaug

SEQ ID NO: 107487 - RNA, 23 nt, Artificial Sequence
  Synthetic
aaagaaaacucccacucuagaug

SEQ ID NO: 107488 - RNA, 24 nt, Artificial Sequence
  Synthetic
aaaagaaaacucccacucuagaug

SEQ ID NO: 107489 - RNA, 20 nt, Artificial Sequence
  Synthetic
uggaagaaaacaaguagaug

SEQ ID NO: 107490 - RNA, 21 nt, Artificial Sequence
  Synthetic
auggaagaaaacaaguagaug

SEQ ID NO: 107491 - RNA, 22 nt, Artificial Sequence
  Synthetic
aauggaagaaaacaaguagaug

SEQ ID NO: 107492 - RNA, 24 nt, Artificial Sequence
  Synthetic
agaauggaagaaaacaaguagaug

SEQ ID NO: 107493 - RNA, 18 nt, Artificial Sequence
  Synthetic
ugccaauuaacguagaug

SEQ ID NO: 107494 - RNA, 19 nt, Artificial Sequence
  Synthetic
augccaauuaacguagaug

SEQ ID NO: 107495 - RNA, 21 nt, Artificial Sequence
  Synthetic
agaugccaauuaacguagaug

SEQ ID NO: 107496 - RNA, 22 nt, Artificial Sequence
  Synthetic
uagaugccaauuaacguagaug

SEQ ID NO: 107497 - RNA, 18 nt, Artificial Sequence
  Synthetic
aaaagcauggcuuagaug

SEQ ID NO: 107498 - RNA, 19 nt, Artificial Sequence
  Synthetic
aaaaagcauggcuuagaug

SEQ ID NO: 107499 - RNA, 20 nt, Artificial Sequence
  Synthetic
aaaaaagcauggcuuagaug

SEQ ID NO: 107500 - RNA, 21 nt, Artificial Sequence
  Synthetic
uaaaaaagcauggcuuagaug

SEQ ID NO: 107501 - RNA, 22 nt, Artificial Sequence
  Synthetic
auaaaaaagcauggcuuagaug

SEQ ID NO: 107502 - RNA, 24 nt, Artificial Sequence
  Synthetic
ugauaaaaaagcauggcuuagaug

SEQ ID NO: 107503 - RNA, 21 nt, Artificial Sequence
  Synthetic
aauucaaaauuucaagcgaug

SEQ ID NO: 107504 - RNA, 22 nt, Artificial Sequence
  Synthetic
aaauucaaaauuucaagcgaug

SEQ ID NO: 107505 - RNA, 23 nt, Artificial Sequence
  Synthetic
aaaauucaaaauuucaagcgaug

SEQ ID NO: 107506 - RNA, 24 nt, Artificial Sequence
  Synthetic
caaaauucaaaauuucaagcgaug

SEQ ID NO: 107507 - RNA, 18 nt, Artificial Sequence
  Synthetic
aaucuagccuacaggaug

SEQ ID NO: 107508 - RNA, 19 nt, Artificial Sequence
  Synthetic
uaaucuagccuacaggaug

SEQ ID NO: 107509 - RNA, 20 nt, Artificial Sequence
  Synthetic
cuaaucuagccuacaggaug

SEQ ID NO: 107510 - RNA, 21 nt, Artificial Sequence
  Synthetic
ccuaaucuagccuacaggaug

SEQ ID NO: 107511 - RNA, 23 nt, Artificial Sequence
  Synthetic
agccuaaucuagccuacaggaug

SEQ ID NO: 107512 - RNA, 24 nt, Artificial Sequence
  Synthetic
aagccuaaucuagccuacaggaug

SEQ ID NO: 107513 - RNA, 21 nt, Artificial Sequence
  Synthetic
uuaggaaaaagagccaggaug

SEQ ID NO: 107514 - RNA, 22 nt, Artificial Sequence
  Synthetic
auuaggaaaaagagccaggaug

SEQ ID NO: 107515 - RNA, 24 nt, Artificial Sequence
  Synthetic
ugauuaggaaaaagagccaggaug

SEQ ID NO: 107516 - RNA, 19 nt, Artificial Sequence
  Synthetic
aggaaggccauccaggaug

SEQ ID NO: 107517 - RNA, 20 nt, Artificial Sequence
  Synthetic
uaggaaggccauccaggaug

SEQ ID NO: 107518 - RNA, 21 nt, Artificial Sequence
  Synthetic
auaggaaggccauccaggaug

SEQ ID NO: 107519 - RNA, 22 nt, Artificial Sequence
  Synthetic
uauaggaaggccauccaggaug

SEQ ID NO: 107520 - RNA, 23 nt, Artificial Sequence
  Synthetic
cuauaggaaggccauccaggaug

SEQ ID NO: 107521 - RNA, 24 nt, Artificial Sequence
  Synthetic
ucuauaggaaggccauccaggaug

SEQ ID NO: 107522 - RNA, 18 nt, Artificial Sequence
  Synthetic
auaacagcuaucaggaug

SEQ ID NO: 107523 - RNA, 19 nt, Artificial Sequence
  Synthetic
cauaacagcuaucaggaug

SEQ ID NO: 107524 - RNA, 20 nt, Artificial Sequence
  Synthetic
acauaacagcuaucaggaug

SEQ ID NO: 107525 - RNA, 21 nt, Artificial Sequence
  Synthetic
cacauaacagcuaucaggaug

SEQ ID NO: 107526 - RNA, 22 nt, Artificial Sequence
  Synthetic
ucacauaacagcuaucaggaug

SEQ ID NO: 107527 - RNA, 23 nt, Artificial Sequence
  Synthetic
cucacauaacagcuaucaggaug

SEQ ID NO: 107528 - RNA, 24 nt, Artificial Sequence
  Synthetic
ccucacauaacagcuaucaggaug

SEQ ID NO: 107529 - RNA, 18 nt, Artificial Sequence
  Synthetic
ccagguuuugugaggaug

SEQ ID NO: 107530 - RNA, 19 nt, Artificial Sequence
  Synthetic
cccagguuuugugaggaug

SEQ ID NO: 107531 - RNA, 21 nt, Artificial Sequence
  Synthetic
ugcccagguuuugugaggaug

SEQ ID NO: 107532 - RNA, 22 nt, Artificial Sequence
  Synthetic
cugcccagguuuugugaggaug

SEQ ID NO: 107533 - RNA, 23 nt, Artificial Sequence
  Synthetic
acugcccagguuuugugaggaug

SEQ ID NO: 107534 - RNA, 24 nt, Artificial Sequence
  Synthetic
uacugcccagguuuugugaggaug

SEQ ID NO: 107535 - RNA, 18 nt, Artificial Sequence
  Synthetic
uucaacuucuaucggaug

SEQ ID NO: 107536 - RNA, 19 nt, Artificial Sequence
  Synthetic
uuucaacuucuaucggaug

SEQ ID NO: 107537 - RNA, 20 nt, Artificial Sequence
  Synthetic
cuuucaacuucuaucggaug

SEQ ID NO: 107538 - RNA, 21 nt, Artificial Sequence
  Synthetic
ucuuucaacuucuaucggaug

SEQ ID NO: 107539 - RNA, 22 nt, Artificial Sequence
  Synthetic
uucuuucaacuucuaucggaug

SEQ ID NO: 107540 - RNA, 23 nt, Artificial Sequence
  Synthetic
uuucuuucaacuucuaucggaug

SEQ ID NO: 107541 - RNA, 19 nt, Artificial Sequence
  Synthetic
agaaagagcugcugggaug

SEQ ID NO: 107542 - RNA, 21 nt, Artificial Sequence
  Synthetic
agagaaagagcugcugggaug

SEQ ID NO: 107543 - RNA, 22 nt, Artificial Sequence
  Synthetic
aagagaaagagcugcugggaug

SEQ ID NO: 107544 - RNA, 24 nt, Artificial Sequence
  Synthetic
ugaagagaaagagcugcugggaug

SEQ ID NO: 107545 - RNA, 20 nt, Artificial Sequence
  Synthetic
agguauucuuaacauggaug

SEQ ID NO: 107546 - RNA, 21 nt, Artificial Sequence
  Synthetic
cagguauucuuaacauggaug

SEQ ID NO: 107547 - RNA, 22 nt, Artificial Sequence
  Synthetic
acagguauucuuaacauggaug

SEQ ID NO: 107548 - RNA, 23 nt, Artificial Sequence
  Synthetic
cacagguauucuuaacauggaug

SEQ ID NO: 107549 - RNA, 18 nt, Artificial Sequence
  Synthetic
caaacucugggcuggaug

SEQ ID NO: 107550 - RNA, 19 nt, Artificial Sequence
  Synthetic
ccaaacucugggcuggaug

SEQ ID NO: 107551 - RNA, 20 nt, Artificial Sequence
  Synthetic
uccaaacucugggcuggaug

SEQ ID NO: 107552 - RNA, 21 nt, Artificial Sequence
  Synthetic
uuccaaacucugggcuggaug

SEQ ID NO: 107553 - RNA, 22 nt, Artificial Sequence
  Synthetic
uuuccaaacucugggcuggaug

SEQ ID NO: 107554 - RNA, 24 nt, Artificial Sequence
  Synthetic
aguuuccaaacucugggcuggaug

SEQ ID NO: 107555 - RNA, 18 nt, Artificial Sequence
  Synthetic
ccaccuauuauguggaug

SEQ ID NO: 107556 - RNA, 19 nt, Artificial Sequence
  Synthetic
uccaccuauuauguggaug

SEQ ID NO: 107557 - RNA, 20 nt, Artificial Sequence
  Synthetic
auccaccuauuauguggaug

SEQ ID NO: 107558 - RNA, 21 nt, Artificial Sequence
  Synthetic
aauccaccuauuauguggaug

SEQ ID NO: 107559 - RNA, 22 nt, Artificial Sequence
  Synthetic
aaauccaccuauuauguggaug

SEQ ID NO: 107560 - RNA, 23 nt, Artificial Sequence
  Synthetic
aaaauccaccuauuauguggaug

SEQ ID NO: 107561 - RNA, 24 nt, Artificial Sequence
  Synthetic
uaaaauccaccuauuauguggaug

SEQ ID NO: 107562 - RNA, 18 nt, Artificial Sequence
  Synthetic
cacucuaaccuuuggaug

SEQ ID NO: 107563 - RNA, 19 nt, Artificial Sequence
  Synthetic
ccacucuaaccuuuggaug

SEQ ID NO: 107564 - RNA, 20 nt, Artificial Sequence
  Synthetic
cccacucuaaccuuuggaug

SEQ ID NO: 107565 - RNA, 21 nt, Artificial Sequence
  Synthetic
acccacucuaaccuuuggaug

SEQ ID NO: 107566 - RNA, 22 nt, Artificial Sequence
  Synthetic
cacccacucuaaccuuuggaug

SEQ ID NO: 107567 - RNA, 23 nt, Artificial Sequence
  Synthetic
ucacccacucuaaccuuuggaug

SEQ ID NO: 107568 - RNA, 24 nt, Artificial Sequence
  Synthetic
aucacccacucuaaccuuuggaug

SEQ ID NO: 107569 - RNA, 18 nt, Artificial Sequence
  Synthetic
acuuauacaaaaaugaug

SEQ ID NO: 107570 - RNA, 19 nt, Artificial Sequence
  Synthetic
aacuuauacaaaaaugaug

SEQ ID NO: 107571 - RNA, 20 nt, Artificial Sequence
  Synthetic
aaacuuauacaaaaaugaug

SEQ ID NO: 107572 - RNA, 21 nt, Artificial Sequence
  Synthetic
caaacuuauacaaaaaugaug

SEQ ID NO: 107573 - RNA, 22 nt, Artificial Sequence
  Synthetic
ucaaacuuauacaaaaaugaug

SEQ ID NO: 107574 - RNA, 23 nt, Artificial Sequence
  Synthetic
aucaaacuuauacaaaaaugaug

SEQ ID NO: 107575 - RNA, 24 nt, Artificial Sequence
  Synthetic
uaucaaacuuauacaaaaaugaug

SEQ ID NO: 107576 - RNA, 18 nt, Artificial Sequence
  Synthetic
uuuugcagagccaugaug

SEQ ID NO: 107577 - RNA, 19 nt, Artificial Sequence
  Synthetic
uuuuugcagagccaugaug

SEQ ID NO: 107578 - RNA, 21 nt, Artificial Sequence
  Synthetic
uguuuuugcagagccaugaug

SEQ ID NO: 107579 - RNA, 22 nt, Artificial Sequence
  Synthetic
uuguuuuugcagagccaugaug

SEQ ID NO: 107580 - RNA, 23 nt, Artificial Sequence
  Synthetic
uuuguuuuugcagagccaugaug

SEQ ID NO: 107581 - RNA, 24 nt, Artificial Sequence
  Synthetic
auuuguuuuugcagagccaugaug

SEQ ID NO: 107582 - RNA, 18 nt, Artificial Sequence
  Synthetic
aaagauaugcagaugaug

SEQ ID NO: 107583 - RNA, 19 nt, Artificial Sequence
  Synthetic
aaaagauaugcagaugaug

SEQ ID NO: 107584 - RNA, 20 nt, Artificial Sequence
  Synthetic
aaaaagauaugcagaugaug

SEQ ID NO: 107585 - RNA, 22 nt, Artificial Sequence
  Synthetic
cgaaaaagauaugcagaugaug

SEQ ID NO: 107586 - RNA, 24 nt, Artificial Sequence
  Synthetic
agcgaaaaagauaugcagaugaug

SEQ ID NO: 107587 - RNA, 18 nt, Artificial Sequence
  Synthetic
uuacaaaaauggaugaug

SEQ ID NO: 107588 - RNA, 20 nt, Artificial Sequence
  Synthetic
cguuacaaaaauggaugaug

SEQ ID NO: 107589 - RNA, 21 nt, Artificial Sequence
  Synthetic
ucguuacaaaaauggaugaug

SEQ ID NO: 107590 - RNA, 23 nt, Artificial Sequence
  Synthetic
agucguuacaaaaauggaugaug

SEQ ID NO: 107591 - RNA, 24 nt, Artificial Sequence
  Synthetic
uagucguuacaaaaauggaugaug

SEQ ID NO: 107592 - RNA, 18 nt, Artificial Sequence
  Synthetic
augcucaggaugaugaug

SEQ ID NO: 107593 - RNA, 19 nt, Artificial Sequence
  Synthetic
aaugcucaggaugaugaug

SEQ ID NO: 107594 - RNA, 20 nt, Artificial Sequence
  Synthetic
uaaugcucaggaugaugaug

SEQ ID NO: 107595 - RNA, 21 nt, Artificial Sequence
  Synthetic
uuaaugcucaggaugaugaug

SEQ ID NO: 107596 - RNA, 23 nt, Artificial Sequence
  Synthetic
aguuaaugcucaggaugaugaug

SEQ ID NO: 107597 - RNA, 24 nt, Artificial Sequence
  Synthetic
uaguuaaugcucaggaugaugaug

SEQ ID NO: 107598 - RNA, 18 nt, Artificial Sequence
  Synthetic
ucaccucagggacugaug

SEQ ID NO: 107599 - RNA, 19 nt, Artificial Sequence
  Synthetic
uucaccucagggacugaug

SEQ ID NO: 107600 - RNA, 21 nt, Artificial Sequence
  Synthetic
aguucaccucagggacugaug

SEQ ID NO: 107601 - RNA, 22 nt, Artificial Sequence
  Synthetic
caguucaccucagggacugaug

SEQ ID NO: 107602 - RNA, 23 nt, Artificial Sequence
  Synthetic
ccaguucaccucagggacugaug

SEQ ID NO: 107603 - RNA, 24 nt, Artificial Sequence
  Synthetic
cccaguucaccucagggacugaug

SEQ ID NO: 107604 - RNA, 23 nt, Artificial Sequence
  Synthetic
aggaguccaggcacagccugaug

SEQ ID NO: 107605 - RNA, 24 nt, Artificial Sequence
  Synthetic
uaggaguccaggcacagccugaug

SEQ ID NO: 107606 - RNA, 18 nt, Artificial Sequence
  Synthetic
agaauacaaaagcugaug

SEQ ID NO: 107607 - RNA, 19 nt, Artificial Sequence
  Synthetic
cagaauacaaaagcugaug

SEQ ID NO: 107608 - RNA, 20 nt, Artificial Sequence
  Synthetic
ucagaauacaaaagcugaug

SEQ ID NO: 107609 - RNA, 21 nt, Artificial Sequence
  Synthetic
cucagaauacaaaagcugaug

SEQ ID NO: 107610 - RNA, 22 nt, Artificial Sequence
  Synthetic
ccucagaauacaaaagcugaug

SEQ ID NO: 107611 - RNA, 24 nt, Artificial Sequence
  Synthetic
agccucagaauacaaaagcugaug

SEQ ID NO: 107612 - RNA, 18 nt, Artificial Sequence
  Synthetic
cagacaggcugucugaug

SEQ ID NO: 107613 - RNA, 19 nt, Artificial Sequence
  Synthetic
acagacaggcugucugaug

SEQ ID NO: 107614 - RNA, 22 nt, Artificial Sequence
  Synthetic
uggacagacaggcugucugaug

SEQ ID NO: 107615 - RNA, 23 nt, Artificial Sequence
  Synthetic
cuggacagacaggcugucugaug

SEQ ID NO: 107616 - RNA, 18 nt, Artificial Sequence
  Synthetic
auuggaaugugugugaug

SEQ ID NO: 107617 - RNA, 19 nt, Artificial Sequence
  Synthetic
cauuggaaugugugugaug

SEQ ID NO: 107618 - RNA, 20 nt, Artificial Sequence
  Synthetic
ucauuggaaugugugugaug

SEQ ID NO: 107619 - RNA, 22 nt, Artificial Sequence
  Synthetic
agucauuggaaugugugugaug

SEQ ID NO: 107620 - RNA, 23 nt, Artificial Sequence
  Synthetic
uagucauuggaaugugugugaug

SEQ ID NO: 107621 - RNA, 24 nt, Artificial Sequence
  Synthetic
auagucauuggaaugugugugaug

SEQ ID NO: 107622 - RNA, 18 nt, Artificial Sequence
  Synthetic
agcaagugucuugugaug

SEQ ID NO: 107623 - RNA, 20 nt, Artificial Sequence
  Synthetic
ugagcaagugucuugugaug

SEQ ID NO: 107624 - RNA, 21 nt, Artificial Sequence
  Synthetic
uugagcaagugucuugugaug

SEQ ID NO: 107625 - RNA, 22 nt, Artificial Sequence
  Synthetic
cuugagcaagugucuugugaug

SEQ ID NO: 107626 - RNA, 23 nt, Artificial Sequence
  Synthetic
acuugagcaagugucuugugaug

SEQ ID NO: 107627 - RNA, 18 nt, Artificial Sequence
  Synthetic
auugaugcaaaauugaug

SEQ ID NO: 107628 - RNA, 19 nt, Artificial Sequence
  Synthetic
uauugaugcaaaauugaug

SEQ ID NO: 107629 - RNA, 20 nt, Artificial Sequence
  Synthetic
auauugaugcaaaauugaug

SEQ ID NO: 107630 - RNA, 21 nt, Artificial Sequence
  Synthetic
aauauugaugcaaaauugaug

SEQ ID NO: 107631 - RNA, 22 nt, Artificial Sequence
  Synthetic
aaauauugaugcaaaauugaug

SEQ ID NO: 107632 - RNA, 23 nt, Artificial Sequence
  Synthetic
aaaauauugaugcaaaauugaug

SEQ ID NO: 107633 - RNA, 24 nt, Artificial Sequence
  Synthetic
aaaaauauugaugcaaaauugaug

SEQ ID NO: 107634 - RNA, 18 nt, Artificial Sequence
  Synthetic
caaauaacuugauugaug

SEQ ID NO: 107635 - RNA, 19 nt, Artificial Sequence
  Synthetic
acaaauaacuugauugaug

SEQ ID NO: 107636 - RNA, 20 nt, Artificial Sequence
  Synthetic
uacaaauaacuugauugaug

SEQ ID NO: 107637 - RNA, 21 nt, Artificial Sequence
  Synthetic
auacaaauaacuugauugaug

SEQ ID NO: 107638 - RNA, 22 nt, Artificial Sequence
  Synthetic
aauacaaauaacuugauugaug

SEQ ID NO: 107639 - RNA, 18 nt, Artificial Sequence
  Synthetic
aagaccacgcuauugaug

SEQ ID NO: 107640 - RNA, 19 nt, Artificial Sequence
  Synthetic
aaagaccacgcuauugaug

SEQ ID NO: 107641 - RNA, 20 nt, Artificial Sequence
  Synthetic
uaaagaccacgcuauugaug

SEQ ID NO: 107642 - RNA, 21 nt, Artificial Sequence
  Synthetic
auaaagaccacgcuauugaug

SEQ ID NO: 107643 - RNA, 22 nt, Artificial Sequence
  Synthetic
aauaaagaccacgcuauugaug

SEQ ID NO: 107644 - RNA, 23 nt, Artificial Sequence
  Synthetic
uaauaaagaccacgcuauugaug

SEQ ID NO: 107645 - RNA, 24 nt, Artificial Sequence
  Synthetic
auaauaaagaccacgcuauugaug

SEQ ID NO: 107646 - RNA, 18 nt, Artificial Sequence
  Synthetic
aauagauauuauuugaug

SEQ ID NO: 107647 - RNA, 19 nt, Artificial Sequence
  Synthetic
aaauagauauuauuugaug

SEQ ID NO: 107648 - RNA, 21 nt, Artificial Sequence
  Synthetic
agucaccuggaaauuuugaug

SEQ ID NO: 107649 - RNA, 23 nt, Artificial Sequence
  Synthetic
ugagucaccuggaaauuuugaug

SEQ ID NO: 107650 - RNA, 24 nt, Artificial Sequence
  Synthetic
augagucaccuggaaauuuugaug

SEQ ID NO: 107651 - RNA, 18 nt, Artificial Sequence
  Synthetic
uuucauagucuuuugaug

SEQ ID NO: 107652 - RNA, 19 nt, Artificial Sequence
  Synthetic
uuuucauagucuuuugaug

SEQ ID NO: 107653 - RNA, 20 nt, Artificial Sequence
  Synthetic
uuuuucauagucuuuugaug

SEQ ID NO: 107654 - RNA, 21 nt, Artificial Sequence
  Synthetic
auuuuucauagucuuuugaug

SEQ ID NO: 107655 - RNA, 23 nt, Artificial Sequence
  Synthetic
ugauuuuucauagucuuuugaug

SEQ ID NO: 107656 - RNA, 24 nt, Artificial Sequence
  Synthetic
cugauuuuucauagucuuuugaug

SEQ ID NO: 107657 - RNA, 18 nt, Artificial Sequence
  Synthetic
ugcuucugaaaaaauaug

SEQ ID NO: 107658 - RNA, 19 nt, Artificial Sequence
  Synthetic
cugcuucugaaaaaauaug

SEQ ID NO: 107659 - RNA, 20 nt, Artificial Sequence
  Synthetic
acugcuucugaaaaaauaug

SEQ ID NO: 107660 - RNA, 21 nt, Artificial Sequence
  Synthetic
cacugcuucugaaaaaauaug

SEQ ID NO: 107661 - RNA, 23 nt, Artificial Sequence
  Synthetic
ugcacugcuucugaaaaaauaug

SEQ ID NO: 107662 - RNA, 24 nt, Artificial Sequence
  Synthetic
cugcacugcuucugaaaaaauaug

SEQ ID NO: 107663 - RNA, 18 nt, Artificial Sequence
  Synthetic
auacgaauuccaaauaug

SEQ ID NO: 107664 - RNA, 19 nt, Artificial Sequence
  Synthetic
aauacgaauuccaaauaug

SEQ ID NO: 107665 - RNA, 21 nt, Artificial Sequence
  Synthetic
agaauacgaauuccaaauaug

SEQ ID NO: 107666 - RNA, 23 nt, Artificial Sequence
  Synthetic
ugagaauacgaauuccaaauaug

SEQ ID NO: 107667 - RNA, 18 nt, Artificial Sequence
  Synthetic
aaagccaaguugaauaug

SEQ ID NO: 107668 - RNA, 19 nt, Artificial Sequence
  Synthetic
aaaagccaaguugaauaug

SEQ ID NO: 107669 - RNA, 20 nt, Artificial Sequence
  Synthetic
aaaaagccaaguugaauaug

SEQ ID NO: 107670 - RNA, 21 nt, Artificial Sequence
  Synthetic
aaaaaagccaaguugaauaug

SEQ ID NO: 107671 - RNA, 22 nt, Artificial Sequence
  Synthetic
aaaaaaagccaaguugaauaug

SEQ ID NO: 107672 - RNA, 23 nt, Artificial Sequence
  Synthetic
uaaaaaaagccaaguugaauaug

SEQ ID NO: 107673 - RNA, 24 nt, Artificial Sequence
  Synthetic
uuaaaaaaagccaaguugaauaug

SEQ ID NO: 107674 - RNA, 18 nt, Artificial Sequence
  Synthetic
uucauaacaucuaauaug

SEQ ID NO: 107675 - RNA, 19 nt, Artificial Sequence
  Synthetic
auucauaacaucuaauaug

SEQ ID NO: 107676 - RNA, 20 nt, Artificial Sequence
  Synthetic
cauucauaacaucuaauaug

SEQ ID NO: 107677 - RNA, 21 nt, Artificial Sequence
  Synthetic
acauucauaacaucuaauaug

SEQ ID NO: 107678 - RNA, 22 nt, Artificial Sequence
  Synthetic
uacauucauaacaucuaauaug

SEQ ID NO: 107679 - RNA, 23 nt, Artificial Sequence
  Synthetic
uuacauucauaacaucuaauaug

SEQ ID NO: 107680 - RNA, 24 nt, Artificial Sequence
  Synthetic
auuacauucauaacaucuaauaug

SEQ ID NO: 107681 - RNA, 18 nt, Artificial Sequence
  Synthetic
cauagcauauguaauaug

SEQ ID NO: 107682 - RNA, 19 nt, Artificial Sequence
  Synthetic
acauagcauauguaauaug

SEQ ID NO: 107683 - RNA, 20 nt, Artificial Sequence
  Synthetic
uacauagcauauguaauaug

SEQ ID NO: 107684 - RNA, 21 nt, Artificial Sequence
  Synthetic
uuacauagcauauguaauaug

SEQ ID NO: 107685 - RNA, 22 nt, Artificial Sequence
  Synthetic
uuuacauagcauauguaauaug

SEQ ID NO: 107686 - RNA, 23 nt, Artificial Sequence
  Synthetic
cuuuacauagcauauguaauaug

SEQ ID NO: 107687 - RNA, 24 nt, Artificial Sequence
  Synthetic
ccuuuacauagcauauguaauaug

SEQ ID NO: 107688 - RNA, 20 nt, Artificial Sequence
  Synthetic
agggcacaaccuaacauaug

SEQ ID NO: 107689 - RNA, 21 nt, Artificial Sequence
  Synthetic
uagggcacaaccuaacauaug

SEQ ID NO: 107690 - RNA, 22 nt, Artificial Sequence
  Synthetic
cuagggcacaaccuaacauaug

SEQ ID NO: 107691 - RNA, 23 nt, Artificial Sequence
  Synthetic
ccuagggcacaaccuaacauaug

SEQ ID NO: 107692 - RNA, 18 nt, Artificial Sequence
  Synthetic
ugacuuucaggacauaug

SEQ ID NO: 107693 - RNA, 19 nt, Artificial Sequence
  Synthetic
uugacuuucaggacauaug

SEQ ID NO: 107694 - RNA, 20 nt, Artificial Sequence
  Synthetic
cuugacuuucaggacauaug

SEQ ID NO: 107695 - RNA, 23 nt, Artificial Sequence
  Synthetic
uggcuugacuuucaggacauaug

SEQ ID NO: 107696 - RNA, 24 nt, Artificial Sequence
  Synthetic
uuggcuugacuuucaggacauaug

SEQ ID NO: 107697 - RNA, 18 nt, Artificial Sequence
  Synthetic
uucuguuauugccauaug

SEQ ID NO: 107698 - RNA, 19 nt, Artificial Sequence
  Synthetic
uuucuguuauugccauaug

SEQ ID NO: 107699 - RNA, 20 nt, Artificial Sequence
  Synthetic
uuuucuguuauugccauaug

SEQ ID NO: 107700 - RNA, 21 nt, Artificial Sequence
  Synthetic
auuuucuguuauugccauaug

SEQ ID NO: 107701 - RNA, 22 nt, Artificial Sequence
  Synthetic
aauuuucuguuauugccauaug

SEQ ID NO: 107702 - RNA, 23 nt, Artificial Sequence
  Synthetic
uaauuuucuguuauugccauaug

SEQ ID NO: 107703 - RNA, 24 nt, Artificial Sequence
  Synthetic
uuaauuuucuguuauugccauaug

SEQ ID NO: 107704 - RNA, 18 nt, Artificial Sequence
  Synthetic
caagcagcuugccauaug

SEQ ID NO: 107705 - RNA, 19 nt, Artificial Sequence
  Synthetic
acaagcagcuugccauaug

SEQ ID NO: 107706 - RNA, 20 nt, Artificial Sequence
  Synthetic
aacaagcagcuugccauaug

SEQ ID NO: 107707 - RNA, 21 nt, Artificial Sequence
  Synthetic
aaacaagcagcuugccauaug

SEQ ID NO: 107708 - RNA, 22 nt, Artificial Sequence
  Synthetic
aaaacaagcagcuugccauaug

SEQ ID NO: 107709 - RNA, 23 nt, Artificial Sequence
  Synthetic
uaaaacaagcagcuugccauaug

SEQ ID NO: 107710 - RNA, 24 nt, Artificial Sequence
  Synthetic
uuaaaacaagcagcuugccauaug

SEQ ID NO: 107711 - RNA, 21 nt, Artificial Sequence
  Synthetic
uaaaaauaauuuauccauaug

SEQ ID NO: 107712 - RNA, 23 nt, Artificial Sequence
  Synthetic
uguaaaaauaauuuauccauaug

SEQ ID NO: 107713 - RNA, 24 nt, Artificial Sequence
  Synthetic
cuguaaaaauaauuuauccauaug

SEQ ID NO: 107714 - RNA, 19 nt, Artificial Sequence
  Synthetic
cguagaacuuaggcauaug

SEQ ID NO: 107715 - RNA, 20 nt, Artificial Sequence
  Synthetic
ucguagaacuuaggcauaug

SEQ ID NO: 107716 - RNA, 21 nt, Artificial Sequence
  Synthetic
aucguagaacuuaggcauaug

SEQ ID NO: 107717 - RNA, 22 nt, Artificial Sequence
  Synthetic
aaucguagaacuuaggcauaug

SEQ ID NO: 107718 - RNA, 24 nt, Artificial Sequence
  Synthetic
agaaucguagaacuuaggcauaug

SEQ ID NO: 107719 - RNA, 18 nt, Artificial Sequence
  Synthetic
cagcgggaaggucauaug

SEQ ID NO: 107720 - RNA, 20 nt, Artificial Sequence
  Synthetic
agcagcgggaaggucauaug

SEQ ID NO: 107721 - RNA, 21 nt, Artificial Sequence
  Synthetic
uagcagcgggaaggucauaug

SEQ ID NO: 107722 - RNA, 23 nt, Artificial Sequence
  Synthetic
aguagcagcgggaaggucauaug

SEQ ID NO: 107723 - RNA, 24 nt, Artificial Sequence
  Synthetic
aaguagcagcgggaaggucauaug

SEQ ID NO: 107724 - RNA, 18 nt, Artificial Sequence
  Synthetic
uagauaacaggucauaug

SEQ ID NO: 107725 - RNA, 19 nt, Artificial Sequence
  Synthetic
auagauaacaggucauaug

SEQ ID NO: 107726 - RNA, 20 nt, Artificial Sequence
  Synthetic
aauagauaacaggucauaug

SEQ ID NO: 107727 - RNA, 21 nt, Artificial Sequence
  Synthetic
aaauagauaacaggucauaug

SEQ ID NO: 107728 - RNA, 24 nt, Artificial Sequence
  Synthetic
uggaaauagauaacaggucauaug

SEQ ID NO: 107729 - RNA, 18 nt, Artificial Sequence
  Synthetic
auaaguucaucugauaug

SEQ ID NO: 107730 - RNA, 19 nt, Artificial Sequence
  Synthetic
uauaaguucaucugauaug

SEQ ID NO: 107731 - RNA, 20 nt, Artificial Sequence
  Synthetic
auauaaguucaucugauaug

SEQ ID NO: 107732 - RNA, 21 nt, Artificial Sequence
  Synthetic
uauauaaguucaucugauaug

SEQ ID NO: 107733 - RNA, 22 nt, Artificial Sequence
  Synthetic
cuauauaaguucaucugauaug

SEQ ID NO: 107734 - RNA, 23 nt, Artificial Sequence
  Synthetic
acuauauaaguucaucugauaug

SEQ ID NO: 107735 - RNA, 24 nt, Artificial Sequence
  Synthetic
aacuauauaaguucaucugauaug

SEQ ID NO: 107736 - RNA, 19 nt, Artificial Sequence
  Synthetic
agagcaaaagauugauaug

SEQ ID NO: 107737 - RNA, 20 nt, Artificial Sequence
  Synthetic
aagagcaaaagauugauaug

SEQ ID NO: 107738 - RNA, 21 nt, Artificial Sequence
  Synthetic
aaagagcaaaagauugauaug

SEQ ID NO: 107739 - RNA, 22 nt, Artificial Sequence
  Synthetic
aaaagagcaaaagauugauaug

SEQ ID NO: 107740 - RNA, 23 nt, Artificial Sequence
  Synthetic
caaaagagcaaaagauugauaug

SEQ ID NO: 107741 - RNA, 24 nt, Artificial Sequence
  Synthetic
acaaaagagcaaaagauugauaug

SEQ ID NO: 107742 - RNA, 18 nt, Artificial Sequence
  Synthetic
ucaggaagaaaauauaug

SEQ ID NO: 107743 - RNA, 19 nt, Artificial Sequence
  Synthetic
aucaggaagaaaauauaug

SEQ ID NO: 107744 - RNA, 20 nt, Artificial Sequence
  Synthetic
caucaggaagaaaauauaug

SEQ ID NO: 107745 - RNA, 21 nt, Artificial Sequence
  Synthetic
acaucaggaagaaaauauaug

SEQ ID NO: 107746 - RNA, 22 nt, Artificial Sequence
  Synthetic
aacaucaggaagaaaauauaug

SEQ ID NO: 107747 - RNA, 23 nt, Artificial Sequence
  Synthetic
uaacaucaggaagaaaauauaug

SEQ ID NO: 107748 - RNA, 24 nt, Artificial Sequence
  Synthetic
cuaacaucaggaagaaaauauaug

SEQ ID NO: 107749 - RNA, 23 nt, Artificial Sequence
  Synthetic
cggaaaauugggguaaauauaug

SEQ ID NO: 107750 - RNA, 24 nt, Artificial Sequence
  Synthetic
acggaaaauugggguaaauauaug

SEQ ID NO: 107751 - RNA, 19 nt, Artificial Sequence
  Synthetic
ugguuuucaaguauauaug

SEQ ID NO: 107752 - RNA, 20 nt, Artificial Sequence
  Synthetic
augguuuucaaguauauaug

SEQ ID NO: 107753 - RNA, 22 nt, Artificial Sequence
  Synthetic
ugaugguuuucaaguauauaug

SEQ ID NO: 107754 - RNA, 23 nt, Artificial Sequence
  Synthetic
cugaugguuuucaaguauauaug

SEQ ID NO: 107755 - RNA, 24 nt, Artificial Sequence
  Synthetic
ucugaugguuuucaaguauauaug

SEQ ID NO: 107756 - RNA, 20 nt, Artificial Sequence
  Synthetic
aggaucagaauuacuauaug

SEQ ID NO: 107757 - RNA, 21 nt, Artificial Sequence
  Synthetic
caggaucagaauuacuauaug

SEQ ID NO: 107758 - RNA, 22 nt, Artificial Sequence
  Synthetic
acaggaucagaauuacuauaug

SEQ ID NO: 107759 - RNA, 24 nt, Artificial Sequence
  Synthetic
agacaggaucagaauuacuauaug

SEQ ID NO: 107760 - RNA, 18 nt, Artificial Sequence
  Synthetic
acaucuuguggcuauaug

SEQ ID NO: 107761 - RNA, 19 nt, Artificial Sequence
  Synthetic
aacaucuuguggcuauaug

SEQ ID NO: 107762 - RNA, 20 nt, Artificial Sequence
  Synthetic
aaacaucuuguggcuauaug

SEQ ID NO: 107763 - RNA, 21 nt, Artificial Sequence
  Synthetic
aaaacaucuuguggcuauaug

SEQ ID NO: 107764 - RNA, 22 nt, Artificial Sequence
  Synthetic
uaaaacaucuuguggcuauaug

SEQ ID NO: 107765 - RNA, 23 nt, Artificial Sequence
  Synthetic
cuaaaacaucuuguggcuauaug

SEQ ID NO: 107766 - RNA, 24 nt, Artificial Sequence
  Synthetic
ucuaaaacaucuuguggcuauaug

SEQ ID NO: 107767 - RNA, 18 nt, Artificial Sequence
  Synthetic
aaauaaaaacucuauaug

SEQ ID NO: 107768 - RNA, 19 nt, Artificial Sequence
  Synthetic
caaauaaaaacucuauaug

SEQ ID NO: 107769 - RNA, 20 nt, Artificial Sequence
  Synthetic
ucaaauaaaaacucuauaug

SEQ ID NO: 107770 - RNA, 21 nt, Artificial Sequence
  Synthetic
cucaaauaaaaacucuauaug

SEQ ID NO: 107771 - RNA, 22 nt, Artificial Sequence
  Synthetic
acucaaauaaaaacucuauaug

SEQ ID NO: 107772 - RNA, 23 nt, Artificial Sequence
  Synthetic
uacucaaauaaaaacucuauaug

SEQ ID NO: 107773 - RNA, 24 nt, Artificial Sequence
  Synthetic
auacucaaauaaaaacucuauaug

SEQ ID NO: 107774 - RNA, 22 nt, Artificial Sequence
  Synthetic
uggacucauauauauguauaug

SEQ ID NO: 107775 - RNA, 24 nt, Artificial Sequence
  Synthetic
uguggacucauauauauguauaug

SEQ ID NO: 107776 - RNA, 18 nt, Artificial Sequence
  Synthetic
uuaaucauauuguauaug

SEQ ID NO: 107777 - RNA, 19 nt, Artificial Sequence
  Synthetic
cuuaaucauauuguauaug

SEQ ID NO: 107778 - RNA, 20 nt, Artificial Sequence
  Synthetic
ccuuaaucauauuguauaug

SEQ ID NO: 107779 - RNA, 21 nt, Artificial Sequence
  Synthetic
uccuuaaucauauuguauaug

SEQ ID NO: 107780 - RNA, 22 nt, Artificial Sequence
  Synthetic
auccuuaaucauauuguauaug

SEQ ID NO: 107781 - RNA, 23 nt, Artificial Sequence
  Synthetic
uauccuuaaucauauuguauaug

SEQ ID NO: 107782 - RNA, 24 nt, Artificial Sequence
  Synthetic
auauccuuaaucauauuguauaug

SEQ ID NO: 107783 - RNA, 18 nt, Artificial Sequence
  Synthetic
uaaaacccaaaaacuaug

SEQ ID NO: 107784 - RNA, 19 nt, Artificial Sequence
  Synthetic
auaaaacccaaaaacuaug

SEQ ID NO: 107785 - RNA, 21 nt, Artificial Sequence
  Synthetic
ugauaaaacccaaaaacuaug

SEQ ID NO: 107786 - RNA, 22 nt, Artificial Sequence
  Synthetic
cugauaaaacccaaaaacuaug

SEQ ID NO: 107787 - RNA, 23 nt, Artificial Sequence
  Synthetic
ucugauaaaacccaaaaacuaug

SEQ ID NO: 107788 - RNA, 24 nt, Artificial Sequence
  Synthetic
uucugauaaaacccaaaaacuaug

SEQ ID NO: 107789 - RNA, 18 nt, Artificial Sequence
  Synthetic
uccuagaucaaaacuaug

SEQ ID NO: 107790 - RNA, 21 nt, Artificial Sequence
  Synthetic
agguccuagaucaaaacuaug

SEQ ID NO: 107791 - RNA, 23 nt, Artificial Sequence
  Synthetic
agagguccuagaucaaaacuaug

SEQ ID NO: 107792 - RNA, 24 nt, Artificial Sequence
  Synthetic
aagagguccuagaucaaaacuaug

SEQ ID NO: 107793 - RNA, 18 nt, Artificial Sequence
  Synthetic
aaacuuaagaaaacuaug

SEQ ID NO: 107794 - RNA, 20 nt, Artificial Sequence
  Synthetic
ugaaacuuaagaaaacuaug

SEQ ID NO: 107795 - RNA, 21 nt, Artificial Sequence
  Synthetic
cugaaacuuaagaaaacuaug

SEQ ID NO: 107796 - RNA, 22 nt, Artificial Sequence
  Synthetic
ccugaaacuuaagaaaacuaug

SEQ ID NO: 107797 - RNA, 23 nt, Artificial Sequence
  Synthetic
uccugaaacuuaagaaaacuaug

SEQ ID NO: 107798 - RNA, 18 nt, Artificial Sequence
  Synthetic
agucuaauuacaacuaug

SEQ ID NO: 107799 - RNA, 19 nt, Artificial Sequence
  Synthetic
cagucuaauuacaacuaug

SEQ ID NO: 107800 - RNA, 20 nt, Artificial Sequence
  Synthetic
acagucuaauuacaacuaug

SEQ ID NO: 107801 - RNA, 21 nt, Artificial Sequence
  Synthetic
uacagucuaauuacaacuaug

SEQ ID NO: 107802 - RNA, 22 nt, Artificial Sequence
  Synthetic
uuacagucuaauuacaacuaug

SEQ ID NO: 107803 - RNA, 23 nt, Artificial Sequence
  Synthetic
uuuacagucuaauuacaacuaug

SEQ ID NO: 107804 - RNA, 24 nt, Artificial Sequence
  Synthetic
cuuuacagucuaauuacaacuaug

SEQ ID NO: 107805 - RNA, 18 nt, Artificial Sequence
  Synthetic
uuaauaaaagucacuaug

SEQ ID NO: 107806 - RNA, 19 nt, Artificial Sequence
  Synthetic
auuaauaaaagucacuaug

SEQ ID NO: 107807 - RNA, 20 nt, Artificial Sequence
  Synthetic
cauuaauaaaagucacuaug

SEQ ID NO: 107808 - RNA, 22 nt, Artificial Sequence
  Synthetic
ugcauuaauaaaagucacuaug

SEQ ID NO: 107809 - RNA, 23 nt, Artificial Sequence
  Synthetic
uugcauuaauaaaagucacuaug

SEQ ID NO: 107810 - RNA, 24 nt, Artificial Sequence
  Synthetic
uuugcauuaauaaaagucacuaug

SEQ ID NO: 107811 - RNA, 19 nt, Artificial Sequence
  Synthetic
ugaugcucaaaauacuaug

SEQ ID NO: 107812 - RNA, 21 nt, Artificial Sequence
  Synthetic
ugugaugcucaaaauacuaug

SEQ ID NO: 107813 - RNA, 22 nt, Artificial Sequence
  Synthetic
uugugaugcucaaaauacuaug

SEQ ID NO: 107814 - RNA, 23 nt, Artificial Sequence
  Synthetic
uuugugaugcucaaaauacuaug

SEQ ID NO: 107815 - RNA, 24 nt, Artificial Sequence
  Synthetic
cuuugugaugcucaaaauacuaug

SEQ ID NO: 107816 - RNA, 18 nt, Artificial Sequence
  Synthetic
acuucauuucuaccuaug

SEQ ID NO: 107817 - RNA, 20 nt, Artificial Sequence
  Synthetic
agacuucauuucuaccuaug

SEQ ID NO: 107818 - RNA, 21 nt, Artificial Sequence
  Synthetic
cagacuucauuucuaccuaug

SEQ ID NO: 107819 - RNA, 22 nt, Artificial Sequence
  Synthetic
ucagacuucauuucuaccuaug

SEQ ID NO: 107820 - RNA, 23 nt, Artificial Sequence
  Synthetic
uucagacuucauuucuaccuaug

SEQ ID NO: 107821 - RNA, 24 nt, Artificial Sequence
  Synthetic
auucagacuucauuucuaccuaug

SEQ ID NO: 107822 - RNA, 18 nt, Artificial Sequence
  Synthetic
uuagaagaaguaccuaug

SEQ ID NO: 107823 - RNA, 19 nt, Artificial Sequence
  Synthetic
uuuagaagaaguaccuaug

SEQ ID NO: 107824 - RNA, 20 nt, Artificial Sequence
  Synthetic
uuuuagaagaaguaccuaug

SEQ ID NO: 107825 - RNA, 21 nt, Artificial Sequence
  Synthetic
auuuuagaagaaguaccuaug

SEQ ID NO: 107826 - RNA, 22 nt, Artificial Sequence
  Synthetic
cauuuuagaagaaguaccuaug

SEQ ID NO: 107827 - RNA, 23 nt, Artificial Sequence
  Synthetic
acauuuuagaagaaguaccuaug

SEQ ID NO: 107828 - RNA, 20 nt, Artificial Sequence
  Synthetic
uggacuagggaguaccuaug

SEQ ID NO: 107829 - RNA, 21 nt, Artificial Sequence
  Synthetic
uuggacuagggaguaccuaug

SEQ ID NO: 107830 - RNA, 22 nt, Artificial Sequence
  Synthetic
uuuggacuagggaguaccuaug

SEQ ID NO: 107831 - RNA, 23 nt, Artificial Sequence
  Synthetic
uuuuggacuagggaguaccuaug

SEQ ID NO: 107832 - RNA, 24 nt, Artificial Sequence
  Synthetic
auuuuggacuagggaguaccuaug

SEQ ID NO: 107833 - RNA, 18 nt, Artificial Sequence
  Synthetic
aggauaucauagucuaug

SEQ ID NO: 107834 - RNA, 19 nt, Artificial Sequence
  Synthetic
caggauaucauagucuaug

SEQ ID NO: 107835 - RNA, 21 nt, Artificial Sequence
  Synthetic
agcaggauaucauagucuaug

SEQ ID NO: 107836 - RNA, 22 nt, Artificial Sequence
  Synthetic
aagcaggauaucauagucuaug

SEQ ID NO: 107837 - RNA, 24 nt, Artificial Sequence
  Synthetic
agaagcaggauaucauagucuaug

SEQ ID NO: 107838 - RNA, 18 nt, Artificial Sequence
  Synthetic
uggaaaaguaguucuaug

SEQ ID NO: 107839 - RNA, 19 nt, Artificial Sequence
  Synthetic
auggaaaaguaguucuaug

SEQ ID NO: 107840 - RNA, 20 nt, Artificial Sequence
  Synthetic
uauggaaaaguaguucuaug

SEQ ID NO: 107841 - RNA, 21 nt, Artificial Sequence
  Synthetic
auauggaaaaguaguucuaug

SEQ ID NO: 107842 - RNA, 22 nt, Artificial Sequence
  Synthetic
aauauggaaaaguaguucuaug

SEQ ID NO: 107843 - RNA, 23 nt, Artificial Sequence
  Synthetic
aaauauggaaaaguaguucuaug

SEQ ID NO: 107844 - RNA, 24 nt, Artificial Sequence
  Synthetic
uaaauauggaaaaguaguucuaug

SEQ ID NO: 107845 - RNA, 18 nt, Artificial Sequence
  Synthetic
auauaucagaaaaguaug

SEQ ID NO: 107846 - RNA, 19 nt, Artificial Sequence
  Synthetic
aauauaucagaaaaguaug

SEQ ID NO: 107847 - RNA, 20 nt, Artificial Sequence
  Synthetic
aaauauaucagaaaaguaug

SEQ ID NO: 107848 - RNA, 21 nt, Artificial Sequence
  Synthetic
aaaauauaucagaaaaguaug

SEQ ID NO: 107849 - RNA, 22 nt, Artificial Sequence
  Synthetic
uaaaauauaucagaaaaguaug

SEQ ID NO: 107850 - RNA, 23 nt, Artificial Sequence
  Synthetic
uuaaaauauaucagaaaaguaug

SEQ ID NO: 107851 - RNA, 24 nt, Artificial Sequence
  Synthetic
auuaaaauauaucagaaaaguaug

SEQ ID NO: 107852 - RNA, 18 nt, Artificial Sequence
  Synthetic
uaccuccuuaaaaguaug

SEQ ID NO: 107853 - RNA, 19 nt, Artificial Sequence
  Synthetic
uuaccuccuuaaaaguaug

SEQ ID NO: 107854 - RNA, 20 nt, Artificial Sequence
  Synthetic
auuaccuccuuaaaaguaug

SEQ ID NO: 107855 - RNA, 22 nt, Artificial Sequence
  Synthetic
agauuaccuccuuaaaaguaug

SEQ ID NO: 107856 - RNA, 23 nt, Artificial Sequence
  Synthetic
cagauuaccuccuuaaaaguaug

SEQ ID NO: 107857 - RNA, 24 nt, Artificial Sequence
  Synthetic
ccagauuaccuccuuaaaaguaug

SEQ ID NO: 107858 - RNA, 19 nt, Artificial Sequence
  Synthetic
uguccuggccgagaguaug

SEQ ID NO: 107859 - RNA, 20 nt, Artificial Sequence
  Synthetic
cuguccuggccgagaguaug

SEQ ID NO: 107860 - RNA, 21 nt, Artificial Sequence
  Synthetic
ucuguccuggccgagaguaug

SEQ ID NO: 107861 - RNA, 23 nt, Artificial Sequence
  Synthetic
ugucuguccuggccgagaguaug

SEQ ID NO: 107862 - RNA, 24 nt, Artificial Sequence
  Synthetic
augucuguccuggccgagaguaug

SEQ ID NO: 107863 - RNA, 21 nt, Artificial Sequence
  Synthetic
caauuuuauuaugugaguaug

SEQ ID NO: 107864 - RNA, 23 nt, Artificial Sequence
  Synthetic
ugcaauuuuauuaugugaguaug

SEQ ID NO: 107865 - RNA, 18 nt, Artificial Sequence
  Synthetic
uggagacauuuuaguaug

SEQ ID NO: 107866 - RNA, 19 nt, Artificial Sequence
  Synthetic
cuggagacauuuuaguaug

SEQ ID NO: 107867 - RNA, 20 nt, Artificial Sequence
  Synthetic
ucuggagacauuuuaguaug

SEQ ID NO: 107868 - RNA, 21 nt, Artificial Sequence
  Synthetic
uucuggagacauuuuaguaug

SEQ ID NO: 107869 - RNA, 22 nt, Artificial Sequence
  Synthetic
auucuggagacauuuuaguaug

SEQ ID NO: 107870 - RNA, 23 nt, Artificial Sequence
  Synthetic
uauucuggagacauuuuaguaug

SEQ ID NO: 107871 - RNA, 24 nt, Artificial Sequence
  Synthetic
cuauucuggagacauuuuaguaug

SEQ ID NO: 107872 - RNA, 18 nt, Artificial Sequence
  Synthetic
agauuguacagggguaug

SEQ ID NO: 107873 - RNA, 20 nt, Artificial Sequence
  Synthetic
ugagauuguacagggguaug

SEQ ID NO: 107874 - RNA, 21 nt, Artificial Sequence
  Synthetic
augagauuguacagggguaug

SEQ ID NO: 107875 - RNA, 23 nt, Artificial Sequence
  Synthetic
ugaugagauuguacagggguaug

SEQ ID NO: 107876 - RNA, 24 nt, Artificial Sequence
  Synthetic
augaugagauuguacagggguaug

SEQ ID NO: 107877 - RNA, 18 nt, Artificial Sequence
  Synthetic
ccagaccaggaugguaug

SEQ ID NO: 107878 - RNA, 19 nt, Artificial Sequence
  Synthetic
cccagaccaggaugguaug

SEQ ID NO: 107879 - RNA, 20 nt, Artificial Sequence
  Synthetic
ucccagaccaggaugguaug

SEQ ID NO: 107880 - RNA, 21 nt, Artificial Sequence
  Synthetic
uucccagaccaggaugguaug

SEQ ID NO: 107881 - RNA, 22 nt, Artificial Sequence
  Synthetic
auucccagaccaggaugguaug

SEQ ID NO: 107882 - RNA, 23 nt, Artificial Sequence
  Synthetic
aauucccagaccaggaugguaug

SEQ ID NO: 107883 - RNA, 24 nt, Artificial Sequence
  Synthetic
aaauucccagaccaggaugguaug

SEQ ID NO: 107884 - RNA, 18 nt, Artificial Sequence
  Synthetic
cuagguucauuugguaug

SEQ ID NO: 107885 - RNA, 19 nt, Artificial Sequence
  Synthetic
acuagguucauuugguaug

SEQ ID NO: 107886 - RNA, 20 nt, Artificial Sequence
  Synthetic
aacuagguucauuugguaug

SEQ ID NO: 107887 - RNA, 21 nt, Artificial Sequence
  Synthetic
uaacuagguucauuugguaug

SEQ ID NO: 107888 - RNA, 22 nt, Artificial Sequence
  Synthetic
auaacuagguucauuugguaug

SEQ ID NO: 107889 - RNA, 23 nt, Artificial Sequence
  Synthetic
aauaacuagguucauuugguaug

SEQ ID NO: 107890 - RNA, 24 nt, Artificial Sequence
  Synthetic
aaauaacuagguucauuugguaug

SEQ ID NO: 107891 - RNA, 19 nt, Artificial Sequence
  Synthetic
ugagaaggugcuuuguaug

SEQ ID NO: 107892 - RNA, 21 nt, Artificial Sequence
  Synthetic
agugagaaggugcuuuguaug

SEQ ID NO: 107893 - RNA, 22 nt, Artificial Sequence
  Synthetic
cagugagaaggugcuuuguaug

SEQ ID NO: 107894 - RNA, 24 nt, Artificial Sequence
  Synthetic
ugcagugagaaggugcuuuguaug

SEQ ID NO: 107895 - RNA, 19 nt, Artificial Sequence
  Synthetic
aggcaaagggaggauuaug

SEQ ID NO: 107896 - RNA, 21 nt, Artificial Sequence
  Synthetic
cgaggcaaagggaggauuaug

SEQ ID NO: 107897 - RNA, 22 nt, Artificial Sequence
  Synthetic
acgaggcaaagggaggauuaug

SEQ ID NO: 107898 - RNA, 23 nt, Artificial Sequence
  Synthetic
uacgaggcaaagggaggauuaug

SEQ ID NO: 107899 - RNA, 24 nt, Artificial Sequence
  Synthetic
cuacgaggcaaagggaggauuaug

SEQ ID NO: 107900 - RNA, 18 nt, Artificial Sequence
  Synthetic
aauaaauuccuacuuaug

SEQ ID NO: 107901 - RNA, 19 nt, Artificial Sequence
  Synthetic
caauaaauuccuacuuaug

SEQ ID NO: 107902 - RNA, 20 nt, Artificial Sequence
  Synthetic
acaauaaauuccuacuuaug

SEQ ID NO: 107903 - RNA, 18 nt, Artificial Sequence
  Synthetic
uccuaugcuuaccuuaug

SEQ ID NO: 107904 - RNA, 19 nt, Artificial Sequence
  Synthetic
uuccuaugcuuaccuuaug

SEQ ID NO: 107905 - RNA, 20 nt, Artificial Sequence
  Synthetic
auuccuaugcuuaccuuaug

SEQ ID NO: 107906 - RNA, 21 nt, Artificial Sequence
  Synthetic
aauuccuaugcuuaccuuaug

SEQ ID NO: 107907 - RNA, 22 nt, Artificial Sequence
  Synthetic
aaauuccuaugcuuaccuuaug

SEQ ID NO: 107908 - RNA, 23 nt, Artificial Sequence
  Synthetic
uaaauuccuaugcuuaccuuaug

SEQ ID NO: 107909 - RNA, 18 nt, Artificial Sequence
  Synthetic
augaugaguggccuuaug

SEQ ID NO: 107910 - RNA, 21 nt, Artificial Sequence
  Synthetic
aggaugaugaguggccuuaug

SEQ ID NO: 107911 - RNA, 22 nt, Artificial Sequence
  Synthetic
caggaugaugaguggccuuaug

SEQ ID NO: 107912 - RNA, 23 nt, Artificial Sequence
  Synthetic
acaggaugaugaguggccuuaug

SEQ ID NO: 107913 - RNA, 24 nt, Artificial Sequence
  Synthetic
uacaggaugaugaguggccuuaug

SEQ ID NO: 107914 - RNA, 18 nt, Artificial Sequence
  Synthetic
aggaagguuuuaguuaug

SEQ ID NO: 107915 - RNA, 19 nt, Artificial Sequence
  Synthetic
aaggaagguuuuaguuaug

SEQ ID NO: 107916 - RNA, 20 nt, Artificial Sequence
  Synthetic
aaaggaagguuuuaguuaug

SEQ ID NO: 107917 - RNA, 22 nt, Artificial Sequence
  Synthetic
ugaaaggaagguuuuaguuaug

SEQ ID NO: 107918 - RNA, 23 nt, Artificial Sequence
  Synthetic
uugaaaggaagguuuuaguuaug

SEQ ID NO: 107919 - RNA, 24 nt, Artificial Sequence
  Synthetic
cuugaaaggaagguuuuaguuaug

SEQ ID NO: 107920 - RNA, 18 nt, Artificial Sequence
  Synthetic
agugcuucacaauuuaug

SEQ ID NO: 107921 - RNA, 19 nt, Artificial Sequence
  Synthetic
cagugcuucacaauuuaug

SEQ ID NO: 107922 - RNA, 20 nt, Artificial Sequence
  Synthetic
ucagugcuucacaauuuaug

SEQ ID NO: 107923 - RNA, 21 nt, Artificial Sequence
  Synthetic
aucagugcuucacaauuuaug

SEQ ID NO: 107924 - RNA, 22 nt, Artificial Sequence
  Synthetic
uaucagugcuucacaauuuaug

SEQ ID NO: 107925 - RNA, 24 nt, Artificial Sequence
  Synthetic
aguaucagugcuucacaauuuaug

SEQ ID NO: 107926 - RNA, 18 nt, Artificial Sequence
  Synthetic
auuuaacccagauuuaug

SEQ ID NO: 107927 - RNA, 19 nt, Artificial Sequence
  Synthetic
uauuuaacccagauuuaug

SEQ ID NO: 107928 - RNA, 20 nt, Artificial Sequence
  Synthetic
auauuuaacccagauuuaug

SEQ ID NO: 107929 - RNA, 21 nt, Artificial Sequence
  Synthetic
cauauuuaacccagauuuaug

SEQ ID NO: 107930 - RNA, 22 nt, Artificial Sequence
  Synthetic
ucauauuuaacccagauuuaug

SEQ ID NO: 107931 - RNA, 23 nt, Artificial Sequence
  Synthetic
uucauauuuaacccagauuuaug

SEQ ID NO: 107932 - RNA, 24 nt, Artificial Sequence
  Synthetic
cuucauauuuaacccagauuuaug

SEQ ID NO: 107933 - RNA, 18 nt, Artificial Sequence
  Synthetic
aggaagccccacuuuaug

SEQ ID NO: 107934 - RNA, 19 nt, Artificial Sequence
  Synthetic
caggaagccccacuuuaug

SEQ ID NO: 107935 - RNA, 21 nt, Artificial Sequence
  Synthetic
agcaggaagccccacuuuaug

SEQ ID NO: 107936 - RNA, 22 nt, Artificial Sequence
  Synthetic
aagcaggaagccccacuuuaug

SEQ ID NO: 107937 - RNA, 23 nt, Artificial Sequence
  Synthetic
aaagcaggaagccccacuuuaug

SEQ ID NO: 107938 - RNA, 24 nt, Artificial Sequence
  Synthetic
aaaagcaggaagccccacuuuaug

SEQ ID NO: 107939 - RNA, 19 nt, Artificial Sequence
  Synthetic
aggauaguuuuguuuuaug

SEQ ID NO: 107940 - RNA, 20 nt, Artificial Sequence
  Synthetic
aaggauaguuuuguuuuaug

SEQ ID NO: 107941 - RNA, 19 nt, Artificial Sequence
  Synthetic
uggcaggcuaauuuuuaug

SEQ ID NO: 107942 - RNA, 21 nt, Artificial Sequence
  Synthetic
aguggcaggcuaauuuuuaug

SEQ ID NO: 107943 - RNA, 22 nt, Artificial Sequence
  Synthetic
aaguggcaggcuaauuuuuaug

SEQ ID NO: 107944 - RNA, 23 nt, Artificial Sequence
  Synthetic
aaaguggcaggcuaauuuuuaug

SEQ ID NO: 107945 - RNA, 24 nt, Artificial Sequence
  Synthetic
uaaaguggcaggcuaauuuuuaug

SEQ ID NO: 107946 - RNA, 18 nt, Artificial Sequence
  Synthetic
accguacauauuuuuaug

SEQ ID NO: 107947 - RNA, 19 nt, Artificial Sequence
  Synthetic
uaccguacauauuuuuaug

SEQ ID NO: 107948 - RNA, 20 nt, Artificial Sequence
  Synthetic
cuaccguacauauuuuuaug

SEQ ID NO: 107949 - RNA, 21 nt, Artificial Sequence
  Synthetic
acuaccguacauauuuuuaug

SEQ ID NO: 107950 - RNA, 22 nt, Artificial Sequence
  Synthetic
cacuaccguacauauuuuuaug

SEQ ID NO: 107951 - RNA, 23 nt, Artificial Sequence
  Synthetic
ccacuaccguacauauuuuuaug

SEQ ID NO: 107952 - RNA, 24 nt, Artificial Sequence
  Synthetic
uccacuaccguacauauuuuuaug

SEQ ID NO: 107953 - RNA, 18 nt, Artificial Sequence
  Synthetic
ccuuguucucuuuuuaug

SEQ ID NO: 107954 - RNA, 19 nt, Artificial Sequence
  Synthetic
uccuuguucucuuuuuaug

SEQ ID NO: 107955 - RNA, 20 nt, Artificial Sequence
  Synthetic
cuccuuguucucuuuuuaug

SEQ ID NO: 107956 - RNA, 21 nt, Artificial Sequence
  Synthetic
ccuccuuguucucuuuuuaug

SEQ ID NO: 107957 - RNA, 22 nt, Artificial Sequence
  Synthetic
uccuccuuguucucuuuuuaug

SEQ ID NO: 107958 - RNA, 23 nt, Artificial Sequence
  Synthetic
uuccuccuuguucucuuuuuaug

SEQ ID NO: 107959 - RNA, 24 nt, Artificial Sequence
  Synthetic
cuuccuccuuguucucuuuuuaug

SEQ ID NO: 107960 - RNA, 18 nt, Artificial Sequence
  Synthetic
agaccuagaaaaaaacug

SEQ ID NO: 107961 - RNA, 20 nt, Artificial Sequence
  Synthetic
agagaccuagaaaaaaacug

SEQ ID NO: 107962 - RNA, 21 nt, Artificial Sequence
  Synthetic
aagagaccuagaaaaaaacug

SEQ ID NO: 107963 - RNA, 22 nt, Artificial Sequence
  Synthetic
uaagagaccuagaaaaaaacug

SEQ ID NO: 107964 - RNA, 18 nt, Artificial Sequence
  Synthetic
cacucauuuaaaaaacug

SEQ ID NO: 107965 - RNA, 19 nt, Artificial Sequence
  Synthetic
ucacucauuuaaaaaacug

SEQ ID NO: 107966 - RNA, 20 nt, Artificial Sequence
  Synthetic
uucacucauuuaaaaaacug

SEQ ID NO: 107967 - RNA, 21 nt, Artificial Sequence
  Synthetic
uuucacucauuuaaaaaacug

SEQ ID NO: 107968 - RNA, 24 nt, Artificial Sequence
  Synthetic
ugguuucacucauuuaaaaaacug

SEQ ID NO: 107969 - RNA, 18 nt, Artificial Sequence
  Synthetic
acaaaucccugaaaacug

SEQ ID NO: 107970 - RNA, 19 nt, Artificial Sequence
  Synthetic
uacaaaucccugaaaacug

SEQ ID NO: 107971 - RNA, 22 nt, Artificial Sequence
  Synthetic
agguacaaaucccugaaaacug

SEQ ID NO: 107972 - RNA, 23 nt, Artificial Sequence
  Synthetic
aagguacaaaucccugaaaacug

SEQ ID NO: 107973 - RNA, 24 nt, Artificial Sequence
  Synthetic
aaagguacaaaucccugaaaacug

SEQ ID NO: 107974 - RNA, 19 nt, Artificial Sequence
  Synthetic
agauuaccuuuuaaaacug

SEQ ID NO: 107975 - RNA, 20 nt, Artificial Sequence
  Synthetic
aagauuaccuuuuaaaacug

SEQ ID NO: 107976 - RNA, 21 nt, Artificial Sequence
  Synthetic
uaagauuaccuuuuaaaacug

SEQ ID NO: 107977 - RNA, 22 nt, Artificial Sequence
  Synthetic
uuaagauuaccuuuuaaaacug

SEQ ID NO: 107978 - RNA, 23 nt, Artificial Sequence
  Synthetic
cuuaagauuaccuuuuaaaacug

SEQ ID NO: 107979 - RNA, 24 nt, Artificial Sequence
  Synthetic
ucuuaagauuaccuuuuaaaacug

SEQ ID NO: 107980 - RNA, 18 nt, Artificial Sequence
  Synthetic
ugaacgcgaaagaaacug

SEQ ID NO: 107981 - RNA, 20 nt, Artificial Sequence
  Synthetic
agugaacgcgaaagaaacug

SEQ ID NO: 107982 - RNA, 21 nt, Artificial Sequence
  Synthetic
aagugaacgcgaaagaaacug

SEQ ID NO: 107983 - RNA, 22 nt, Artificial Sequence
  Synthetic
aaagugaacgcgaaagaaacug

SEQ ID NO: 107984 - RNA, 23 nt, Artificial Sequence
  Synthetic
caaagugaacgcgaaagaaacug

SEQ ID NO: 107985 - RNA, 24 nt, Artificial Sequence
  Synthetic
ucaaagugaacgcgaaagaaacug

SEQ ID NO: 107986 - RNA, 18 nt, Artificial Sequence
  Synthetic
auaauaaaacagaaacug

SEQ ID NO: 107987 - RNA, 19 nt, Artificial Sequence
  Synthetic
cauaauaaaacagaaacug

SEQ ID NO: 107988 - RNA, 20 nt, Artificial Sequence
  Synthetic
ucauaauaaaacagaaacug

SEQ ID NO: 107989 - RNA, 21 nt, Artificial Sequence
  Synthetic
cucauaauaaaacagaaacug

SEQ ID NO: 107990 - RNA, 22 nt, Artificial Sequence
  Synthetic
acucauaauaaaacagaaacug

SEQ ID NO: 107991 - RNA, 23 nt, Artificial Sequence
  Synthetic
aacucauaauaaaacagaaacug

SEQ ID NO: 107992 - RNA, 24 nt, Artificial Sequence
  Synthetic
aaacucauaauaaaacagaaacug

SEQ ID NO: 107993 - RNA, 18 nt, Artificial Sequence
  Synthetic
uucuugagauggaaacug

SEQ ID NO: 107994 - RNA, 20 nt, Artificial Sequence
  Synthetic
aguucuugagauggaaacug

SEQ ID NO: 107995 - RNA, 22 nt, Artificial Sequence
  Synthetic
ugaguucuugagauggaaacug

SEQ ID NO: 107996 - RNA, 23 nt, Artificial Sequence
  Synthetic
augaguucuugagauggaaacug

SEQ ID NO: 107997 - RNA, 24 nt, Artificial Sequence
  Synthetic
uaugaguucuugagauggaaacug

SEQ ID NO: 107998 - RNA, 18 nt, Artificial Sequence
  Synthetic
ugguauguggugaaacug

SEQ ID NO: 107999 - RNA, 19 nt, Artificial Sequence
  Synthetic
cugguauguggugaaacug

SEQ ID NO: 108000 - RNA, 20 nt, Artificial Sequence
  Synthetic
acugguauguggugaaacug

SEQ ID NO: 108001 - RNA, 21 nt, Artificial Sequence
  Synthetic
uacugguauguggugaaacug

SEQ ID NO: 108002 - RNA, 22 nt, Artificial Sequence
  Synthetic
uuacugguauguggugaaacug

SEQ ID NO: 108003 - RNA, 23 nt, Artificial Sequence
  Synthetic
uuuacugguauguggugaaacug

SEQ ID NO: 108004 - RNA, 24 nt, Artificial Sequence
  Synthetic
uuuuacugguauguggugaaacug

SEQ ID NO: 108005 - RNA, 18 nt, Artificial Sequence
  Synthetic
cuuccaaugccacaacug

SEQ ID NO: 108006 - RNA, 20 nt, Artificial Sequence
  Synthetic
ugcuuccaaugccacaacug

SEQ ID NO: 108007 - RNA, 21 nt, Artificial Sequence
  Synthetic
cugcuuccaaugccacaacug

SEQ ID NO: 108008 - RNA, 23 nt, Artificial Sequence
  Synthetic
agcugcuuccaaugccacaacug

SEQ ID NO: 108009 - RNA, 24 nt, Artificial Sequence
  Synthetic
uagcugcuuccaaugccacaacug

SEQ ID NO: 108010 - RNA, 19 nt, Artificial Sequence
  Synthetic
ugugaaaaaagcccaacug

SEQ ID NO: 108011 - RNA, 20 nt, Artificial Sequence
  Synthetic
uugugaaaaaagcccaacug

SEQ ID NO: 108012 - RNA, 21 nt, Artificial Sequence
  Synthetic
uuugugaaaaaagcccaacug

SEQ ID NO: 108013 - RNA, 22 nt, Artificial Sequence
  Synthetic
auuugugaaaaaagcccaacug

SEQ ID NO: 108014 - RNA, 23 nt, Artificial Sequence
  Synthetic
uauuugugaaaaaagcccaacug

SEQ ID NO: 108015 - RNA, 22 nt, Artificial Sequence
  Synthetic
agcucuguuacagcaucaacug

SEQ ID NO: 108016 - RNA, 23 nt, Artificial Sequence
  Synthetic
uagcucuguuacagcaucaacug

SEQ ID NO: 108017 - RNA, 24 nt, Artificial Sequence
  Synthetic
uuagcucuguuacagcaucaacug

SEQ ID NO: 108018 - RNA, 18 nt, Artificial Sequence
  Synthetic
ugcacugguucagaacug

SEQ ID NO: 108019 - RNA, 20 nt, Artificial Sequence
  Synthetic
ugugcacugguucagaacug

SEQ ID NO: 108020 - RNA, 21 nt, Artificial Sequence
  Synthetic
augugcacugguucagaacug

SEQ ID NO: 108021 - RNA, 22 nt, Artificial Sequence
  Synthetic
uaugugcacugguucagaacug

SEQ ID NO: 108022 - RNA, 23 nt, Artificial Sequence
  Synthetic
uuaugugcacugguucagaacug

SEQ ID NO: 108023 - RNA, 24 nt, Artificial Sequence
  Synthetic
cuuaugugcacugguucagaacug

SEQ ID NO: 108024 - RNA, 19 nt, Artificial Sequence
  Synthetic
agacaucuaaguggaacug

SEQ ID NO: 108025 - RNA, 21 nt, Artificial Sequence
  Synthetic
ugagacaucuaaguggaacug

SEQ ID NO: 108026 - RNA, 22 nt, Artificial Sequence
  Synthetic
uugagacaucuaaguggaacug

SEQ ID NO: 108027 - RNA, 23 nt, Artificial Sequence
  Synthetic
uuugagacaucuaaguggaacug

SEQ ID NO: 108028 - RNA, 24 nt, Artificial Sequence
  Synthetic
uuuugagacaucuaaguggaacug

SEQ ID NO: 108029 - RNA, 18 nt, Artificial Sequence
  Synthetic
agggauauaugauaacug

SEQ ID NO: 108030 - RNA, 19 nt, Artificial Sequence
  Synthetic
uagggauauaugauaacug

SEQ ID NO: 108031 - RNA, 20 nt, Artificial Sequence
  Synthetic
auagggauauaugauaacug

SEQ ID NO: 108032 - RNA, 23 nt, Artificial Sequence
  Synthetic
uggauagggauauaugauaacug

SEQ ID NO: 108033 - RNA, 24 nt, Artificial Sequence
  Synthetic
auggauagggauauaugauaacug

SEQ ID NO: 108034 - RNA, 18 nt, Artificial Sequence
  Synthetic
ucagaguuacccuaacug

SEQ ID NO: 108035 - RNA, 19 nt, Artificial Sequence
  Synthetic
uucagaguuacccuaacug

SEQ ID NO: 108036 - RNA, 20 nt, Artificial Sequence
  Synthetic
cuucagaguuacccuaacug

SEQ ID NO: 108037 - RNA, 22 nt, Artificial Sequence
  Synthetic
ugcuucagaguuacccuaacug

SEQ ID NO: 108038 - RNA, 23 nt, Artificial Sequence
  Synthetic
augcuucagaguuacccuaacug

SEQ ID NO: 108039 - RNA, 24 nt, Artificial Sequence
  Synthetic
caugcuucagaguuacccuaacug

SEQ ID NO: 108040 - RNA, 18 nt, Artificial Sequence
  Synthetic
aucaugcugguguaacug

SEQ ID NO: 108041 - RNA, 19 nt, Artificial Sequence
  Synthetic
aaucaugcugguguaacug

SEQ ID NO: 108042 - RNA, 20 nt, Artificial Sequence
  Synthetic
aaaucaugcugguguaacug

SEQ ID NO: 108043 - RNA, 21 nt, Artificial Sequence
  Synthetic
uaaaucaugcugguguaacug

SEQ ID NO: 108044 - RNA, 22 nt, Artificial Sequence
  Synthetic
cuaaaucaugcugguguaacug

SEQ ID NO: 108045 - RNA, 23 nt, Artificial Sequence
  Synthetic
ccuaaaucaugcugguguaacug

SEQ ID NO: 108046 - RNA, 24 nt, Artificial Sequence
  Synthetic
accuaaaucaugcugguguaacug

SEQ ID NO: 108047 - RNA, 18 nt, Artificial Sequence
  Synthetic
ugacugucucauuaacug

SEQ ID NO: 108048 - RNA, 19 nt, Artificial Sequence
  Synthetic
uugacugucucauuaacug

SEQ ID NO: 108049 - RNA, 23 nt, Artificial Sequence
  Synthetic
uggguugacugucucauuaacug

SEQ ID NO: 108050 - RNA, 24 nt, Artificial Sequence
  Synthetic
uuggguugacugucucauuaacug

SEQ ID NO: 108051 - RNA, 18 nt, Artificial Sequence
  Synthetic
ucauuaccuaacacacug

SEQ ID NO: 108052 - RNA, 19 nt, Artificial Sequence
  Synthetic
aucauuaccuaacacacug

SEQ ID NO: 108053 - RNA, 20 nt, Artificial Sequence
  Synthetic
uaucauuaccuaacacacug

SEQ ID NO: 108054 - RNA, 21 nt, Artificial Sequence
  Synthetic
cuaucauuaccuaacacacug

SEQ ID NO: 108055 - RNA, 22 nt, Artificial Sequence
  Synthetic
acuaucauuaccuaacacacug

SEQ ID NO: 108056 - RNA, 23 nt, Artificial Sequence
  Synthetic
aacuaucauuaccuaacacacug

SEQ ID NO: 108057 - RNA, 24 nt, Artificial Sequence
  Synthetic
uaacuaucauuaccuaacacacug

SEQ ID NO: 108058 - RNA, 18 nt, Artificial Sequence
  Synthetic
ucaauaauuuccacacug

SEQ ID NO: 108059 - RNA, 19 nt, Artificial Sequence
  Synthetic
uucaauaauuuccacacug

SEQ ID NO: 108060 - RNA, 20 nt, Artificial Sequence
  Synthetic
auucaauaauuuccacacug

SEQ ID NO: 108061 - RNA, 21 nt, Artificial Sequence
  Synthetic
uauucaauaauuuccacacug

SEQ ID NO: 108062 - RNA, 22 nt, Artificial Sequence
  Synthetic
auauucaauaauuuccacacug

SEQ ID NO: 108063 - RNA, 23 nt, Artificial Sequence
  Synthetic
cauauucaauaauuuccacacug

SEQ ID NO: 108064 - RNA, 24 nt, Artificial Sequence
  Synthetic
acauauucaauaauuuccacacug

SEQ ID NO: 108065 - RNA, 19 nt, Artificial Sequence
  Synthetic
ugaauaguguuggacacug

SEQ ID NO: 108066 - RNA, 20 nt, Artificial Sequence
  Synthetic
augaauaguguuggacacug

SEQ ID NO: 108067 - RNA, 21 nt, Artificial Sequence
  Synthetic
uaugaauaguguuggacacug

SEQ ID NO: 108068 - RNA, 22 nt, Artificial Sequence
  Synthetic
auaugaauaguguuggacacug

SEQ ID NO: 108069 - RNA, 23 nt, Artificial Sequence
  Synthetic
aauaugaauaguguuggacacug

SEQ ID NO: 108070 - RNA, 24 nt, Artificial Sequence
  Synthetic
uaauaugaauaguguuggacacug

SEQ ID NO: 108071 - RNA, 21 nt, Artificial Sequence
  Synthetic
aaaaaugaagagaugacacug

SEQ ID NO: 108072 - RNA, 22 nt, Artificial Sequence
  Synthetic
uaaaaaugaagagaugacacug

SEQ ID NO: 108073 - RNA, 23 nt, Artificial Sequence
  Synthetic
auaaaaaugaagagaugacacug

SEQ ID NO: 108074 - RNA, 24 nt, Artificial Sequence
  Synthetic
aauaaaaaugaagagaugacacug

SEQ ID NO: 108075 - RNA, 22 nt, Artificial Sequence
  Synthetic
uguaagauggaaguugacacug

SEQ ID NO: 108076 - RNA, 24 nt, Artificial Sequence
  Synthetic
aguguaagauggaaguugacacug

SEQ ID NO: 108077 - RNA, 18 nt, Artificial Sequence
  Synthetic
ucauaucaaaagccacug

SEQ ID NO: 108078 - RNA, 19 nt, Artificial Sequence
  Synthetic
aucauaucaaaagccacug

SEQ ID NO: 108079 - RNA, 21 nt, Artificial Sequence
  Synthetic
ugaucauaucaaaagccacug

SEQ ID NO: 108080 - RNA, 22 nt, Artificial Sequence
  Synthetic
augaucauaucaaaagccacug

SEQ ID NO: 108081 - RNA, 23 nt, Artificial Sequence
  Synthetic
aaugaucauaucaaaagccacug

SEQ ID NO: 108082 - RNA, 24 nt, Artificial Sequence
  Synthetic
aaaugaucauaucaaaagccacug

SEQ ID NO: 108083 - RNA, 18 nt, Artificial Sequence
  Synthetic
accgauacagagccacug

SEQ ID NO: 108084 - RNA, 19 nt, Artificial Sequence
  Synthetic
caccgauacagagccacug

SEQ ID NO: 108085 - RNA, 20 nt, Artificial Sequence
  Synthetic
ccaccgauacagagccacug

SEQ ID NO: 108086 - RNA, 21 nt, Artificial Sequence
  Synthetic
accaccgauacagagccacug

SEQ ID NO: 108087 - RNA, 22 nt, Artificial Sequence
  Synthetic
aaccaccgauacagagccacug

SEQ ID NO: 108088 - RNA, 23 nt, Artificial Sequence
  Synthetic
aaaccaccgauacagagccacug

SEQ ID NO: 108089 - RNA, 24 nt, Artificial Sequence
  Synthetic
aaaaccaccgauacagagccacug

SEQ ID NO: 108090 - RNA, 18 nt, Artificial Sequence
  Synthetic
cauuacuauccuccacug

SEQ ID NO: 108091 - RNA, 19 nt, Artificial Sequence
  Synthetic
ucauuacuauccuccacug

SEQ ID NO: 108092 - RNA, 20 nt, Artificial Sequence
  Synthetic
uucauuacuauccuccacug

SEQ ID NO: 108093 - RNA, 21 nt, Artificial Sequence
  Synthetic
uuucauuacuauccuccacug

SEQ ID NO: 108094 - RNA, 22 nt, Artificial Sequence
  Synthetic
cuuucauuacuauccuccacug

SEQ ID NO: 108095 - RNA, 23 nt, Artificial Sequence
  Synthetic
acuuucauuacuauccuccacug

SEQ ID NO: 108096 - RNA, 24 nt, Artificial Sequence
  Synthetic
cacuuucauuacuauccuccacug

SEQ ID NO: 108097 - RNA, 18 nt, Artificial Sequence
  Synthetic
uaaauaauauguccacug

SEQ ID NO: 108098 - RNA, 19 nt, Artificial Sequence
  Synthetic
uuaaauaauauguccacug

SEQ ID NO: 108099 - RNA, 20 nt, Artificial Sequence
  Synthetic
uuuaaauaauauguccacug

SEQ ID NO: 108100 - RNA, 21 nt, Artificial Sequence
  Synthetic
uuuuaaauaauauguccacug

SEQ ID NO: 108101 - RNA, 22 nt, Artificial Sequence
  Synthetic
auuuuaaauaauauguccacug

SEQ ID NO: 108102 - RNA, 24 nt, Artificial Sequence
  Synthetic
agauuuuaaauaauauguccacug

SEQ ID NO: 108103 - RNA, 18 nt, Artificial Sequence
  Synthetic
accuuacacaaagcacug

SEQ ID NO: 108104 - RNA, 19 nt, Artificial Sequence
  Synthetic
uaccuuacacaaagcacug

SEQ ID NO: 108105 - RNA, 20 nt, Artificial Sequence
  Synthetic
uuaccuuacacaaagcacug

SEQ ID NO: 108106 - RNA, 22 nt, Artificial Sequence
  Synthetic
uguuaccuuacacaaagcacug

SEQ ID NO: 108107 - RNA, 23 nt, Artificial Sequence
  Synthetic
cuguuaccuuacacaaagcacug

SEQ ID NO: 108108 - RNA, 24 nt, Artificial Sequence
  Synthetic
ccuguuaccuuacacaaagcacug

SEQ ID NO: 108109 - RNA, 18 nt, Artificial Sequence
  Synthetic
uaauacucagagucacug

SEQ ID NO: 108110 - RNA, 19 nt, Artificial Sequence
  Synthetic
cuaauacucagagucacug

SEQ ID NO: 108111 - RNA, 21 nt, Artificial Sequence
  Synthetic
agcuaauacucagagucacug

SEQ ID NO: 108112 - RNA, 22 nt, Artificial Sequence
  Synthetic
cagcuaauacucagagucacug

SEQ ID NO: 108113 - RNA, 24 nt, Artificial Sequence
  Synthetic
agcagcuaauacucagagucacug

SEQ ID NO: 108114 - RNA, 18 nt, Artificial Sequence
  Synthetic
caaagcugagugucacug

SEQ ID NO: 108115 - RNA, 19 nt, Artificial Sequence
  Synthetic
ccaaagcugagugucacug

SEQ ID NO: 108116 - RNA, 20 nt, Artificial Sequence
  Synthetic
uccaaagcugagugucacug

SEQ ID NO: 108117 - RNA, 21 nt, Artificial Sequence
  Synthetic
auccaaagcugagugucacug

SEQ ID NO: 108118 - RNA, 23 nt, Artificial Sequence
  Synthetic
agauccaaagcugagugucacug

SEQ ID NO: 108119 - RNA, 24 nt, Artificial Sequence
  Synthetic
cagauccaaagcugagugucacug

SEQ ID NO: 108120 - RNA, 18 nt, Artificial Sequence
  Synthetic
uuuuuccucuauucacug

SEQ ID NO: 108121 - RNA, 21 nt, Artificial Sequence
  Synthetic
ugguuuuuccucuauucacug

SEQ ID NO: 108122 - RNA, 22 nt, Artificial Sequence
  Synthetic
uugguuuuuccucuauucacug

SEQ ID NO: 108123 - RNA, 23 nt, Artificial Sequence
  Synthetic
auugguuuuuccucuauucacug

SEQ ID NO: 108124 - RNA, 24 nt, Artificial Sequence
  Synthetic
cauugguuuuuccucuauucacug

SEQ ID NO: 108125 - RNA, 18 nt, Artificial Sequence
  Synthetic
aaauauagaaguucacug

SEQ ID NO: 108126 - RNA, 19 nt, Artificial Sequence
  Synthetic
uaaauauagaaguucacug

SEQ ID NO: 108127 - RNA, 20 nt, Artificial Sequence
  Synthetic
cuaaauauagaaguucacug

SEQ ID NO: 108128 - RNA, 21 nt, Artificial Sequence
  Synthetic
ucuaaauauagaaguucacug

SEQ ID NO: 108129 - RNA, 24 nt, Artificial Sequence
  Synthetic
uggucuaaauauagaaguucacug

SEQ ID NO: 108130 - RNA, 19 nt, Artificial Sequence
  Synthetic
agaucuggcuauuucacug

SEQ ID NO: 108131 - RNA, 20 nt, Artificial Sequence
  Synthetic
cagaucuggcuauuucacug

SEQ ID NO: 108132 - RNA, 21 nt, Artificial Sequence
  Synthetic
acagaucuggcuauuucacug

SEQ ID NO: 108133 - RNA, 22 nt, Artificial Sequence
  Synthetic
cacagaucuggcuauuucacug

SEQ ID NO: 108134 - RNA, 18 nt, Artificial Sequence
  Synthetic
uacuucaaggcaagacug

SEQ ID NO: 108135 - RNA, 19 nt, Artificial Sequence
  Synthetic
cuacuucaaggcaagacug

SEQ ID NO: 108136 - RNA, 20 nt, Artificial Sequence
  Synthetic
ccuacuucaaggcaagacug

SEQ ID NO: 108137 - RNA, 21 nt, Artificial Sequence
  Synthetic
cccuacuucaaggcaagacug

SEQ ID NO: 108138 - RNA, 22 nt, Artificial Sequence
  Synthetic
ucccuacuucaaggcaagacug

SEQ ID NO: 108139 - RNA, 24 nt, Artificial Sequence
  Synthetic
ugucccuacuucaaggcaagacug

SEQ ID NO: 108140 - RNA, 18 nt, Artificial Sequence
  Synthetic
ccaguggugaagagacug

SEQ ID NO: 108141 - RNA, 20 nt, Artificial Sequence
  Synthetic
agccaguggugaagagacug

SEQ ID NO: 108142 - RNA, 22 nt, Artificial Sequence
  Synthetic
agagccaguggugaagagacug

SEQ ID NO: 108143 - RNA, 18 nt, Artificial Sequence
  Synthetic
auccaagauaagagacug

SEQ ID NO: 108144 - RNA, 19 nt, Artificial Sequence
  Synthetic
cauccaagauaagagacug

SEQ ID NO: 108145 - RNA, 22 nt, Artificial Sequence
  Synthetic
aggcauccaagauaagagacug

SEQ ID NO: 108146 - RNA, 23 nt, Artificial Sequence
  Synthetic
uaggcauccaagauaagagacug

SEQ ID NO: 108147 - RNA, 24 nt, Artificial Sequence
  Synthetic
uuaggcauccaagauaagagacug

SEQ ID NO: 108148 - RNA, 21 nt, Artificial Sequence
  Synthetic
acuuagccuguccauagacug

SEQ ID NO: 108149 - RNA, 22 nt, Artificial Sequence
  Synthetic
aacuuagccuguccauagacug

SEQ ID NO: 108150 - RNA, 23 nt, Artificial Sequence
  Synthetic
caacuuagccuguccauagacug

SEQ ID NO: 108151 - RNA, 24 nt, Artificial Sequence
  Synthetic
ucaacuuagccuguccauagacug

SEQ ID NO: 108152 - RNA, 23 nt, Artificial Sequence
  Synthetic
uggagggaagaaacaguagacug

SEQ ID NO: 108153 - RNA, 24 nt, Artificial Sequence
  Synthetic
auggagggaagaaacaguagacug

SEQ ID NO: 108154 - RNA, 22 nt, Artificial Sequence
  Synthetic
uggccacucuaucuuuagacug

SEQ ID NO: 108155 - RNA, 23 nt, Artificial Sequence
  Synthetic
uuggccacucuaucuuuagacug

SEQ ID NO: 108156 - RNA, 24 nt, Artificial Sequence
  Synthetic
uuuggccacucuaucuuuagacug

SEQ ID NO: 108157 - RNA, 18 nt, Artificial Sequence
  Synthetic
uuuuagucaggaggacug

SEQ ID NO: 108158 - RNA, 19 nt, Artificial Sequence
  Synthetic
auuuuagucaggaggacug

SEQ ID NO: 108159 - RNA, 20 nt, Artificial Sequence
  Synthetic
cauuuuagucaggaggacug

SEQ ID NO: 108160 - RNA, 21 nt, Artificial Sequence
  Synthetic
acauuuuagucaggaggacug

SEQ ID NO: 108161 - RNA, 22 nt, Artificial Sequence
  Synthetic
aacauuuuagucaggaggacug

SEQ ID NO: 108162 - RNA, 23 nt, Artificial Sequence
  Synthetic
uaacauuuuagucaggaggacug

SEQ ID NO: 108163 - RNA, 24 nt, Artificial Sequence
  Synthetic
cuaacauuuuagucaggaggacug

SEQ ID NO: 108164 - RNA, 18 nt, Artificial Sequence
  Synthetic
aucuaacucugaugacug

SEQ ID NO: 108165 - RNA, 19 nt, Artificial Sequence
  Synthetic
aaucuaacucugaugacug

SEQ ID NO: 108166 - RNA, 20 nt, Artificial Sequence
  Synthetic
aaaucuaacucugaugacug

SEQ ID NO: 108167 - RNA, 21 nt, Artificial Sequence
  Synthetic
uaaaucuaacucugaugacug

SEQ ID NO: 108168 - RNA, 22 nt, Artificial Sequence
  Synthetic
uuaaaucuaacucugaugacug

SEQ ID NO: 108169 - RNA, 24 nt, Artificial Sequence
  Synthetic
cguuaaaucuaacucugaugacug

SEQ ID NO: 108170 - RNA, 18 nt, Artificial Sequence
  Synthetic
uaugagcagaacugacug

SEQ ID NO: 108171 - RNA, 19 nt, Artificial Sequence
  Synthetic
auaugagcagaacugacug

SEQ ID NO: 108172 - RNA, 20 nt, Artificial Sequence
  Synthetic
uauaugagcagaacugacug

SEQ ID NO: 108173 - RNA, 21 nt, Artificial Sequence
  Synthetic
cuauaugagcagaacugacug

SEQ ID NO: 108174 - RNA, 23 nt, Artificial Sequence
  Synthetic
ugcuauaugagcagaacugacug

SEQ ID NO: 108175 - RNA, 24 nt, Artificial Sequence
  Synthetic
cugcuauaugagcagaacugacug

SEQ ID NO: 108176 - RNA, 18 nt, Artificial Sequence
  Synthetic
aauugaaaaaauauacug

SEQ ID NO: 108177 - RNA, 19 nt, Artificial Sequence
  Synthetic
uaauugaaaaaauauacug

SEQ ID NO: 108178 - RNA, 21 nt, Artificial Sequence
  Synthetic
uguaauugaaaaaauauacug

SEQ ID NO: 108179 - RNA, 22 nt, Artificial Sequence
  Synthetic
auguaauugaaaaaauauacug

SEQ ID NO: 108180 - RNA, 18 nt, Artificial Sequence
  Synthetic
cagugcacugauauacug

SEQ ID NO: 108181 - RNA, 19 nt, Artificial Sequence
  Synthetic
acagugcacugauauacug

SEQ ID NO: 108182 - RNA, 20 nt, Artificial Sequence
  Synthetic
cacagugcacugauauacug

SEQ ID NO: 108183 - RNA, 22 nt, Artificial Sequence
  Synthetic
agcacagugcacugauauacug

SEQ ID NO: 108184 - RNA, 23 nt, Artificial Sequence
  Synthetic
uagcacagugcacugauauacug

SEQ ID NO: 108185 - RNA, 24 nt, Artificial Sequence
  Synthetic
uuagcacagugcacugauauacug

SEQ ID NO: 108186 - RNA, 18 nt, Artificial Sequence
  Synthetic
uaucggugcauuauacug

SEQ ID NO: 108187 - RNA, 19 nt, Artificial Sequence
  Synthetic
uuaucggugcauuauacug

SEQ ID NO: 108188 - RNA, 20 nt, Artificial Sequence
  Synthetic
uuuaucggugcauuauacug

SEQ ID NO: 108189 - RNA, 21 nt, Artificial Sequence
  Synthetic
cuuuaucggugcauuauacug

SEQ ID NO: 108190 - RNA, 22 nt, Artificial Sequence
  Synthetic
acuuuaucggugcauuauacug

SEQ ID NO: 108191 - RNA, 23 nt, Artificial Sequence
  Synthetic
uacuuuaucggugcauuauacug

SEQ ID NO: 108192 - RNA, 24 nt, Artificial Sequence
  Synthetic
auacuuuaucggugcauuauacug

SEQ ID NO: 108193 - RNA, 18 nt, Artificial Sequence
  Synthetic
uguuauauuacccuacug

SEQ ID NO: 108194 - RNA, 19 nt, Artificial Sequence
  Synthetic
auguuauauuacccuacug

SEQ ID NO: 108195 - RNA, 21 nt, Artificial Sequence
  Synthetic
agauguuauauuacccuacug

SEQ ID NO: 108196 - RNA, 22 nt, Artificial Sequence
  Synthetic
uagauguuauauuacccuacug

SEQ ID NO: 108197 - RNA, 23 nt, Artificial Sequence
  Synthetic
auagauguuauauuacccuacug

SEQ ID NO: 108198 - RNA, 24 nt, Artificial Sequence
  Synthetic
cauagauguuauauuacccuacug

SEQ ID NO: 108199 - RNA, 19 nt, Artificial Sequence
  Synthetic
aggcuacgggaagcuacug

SEQ ID NO: 108200 - RNA, 22 nt, Artificial Sequence
  Synthetic
uggaggcuacgggaagcuacug

SEQ ID NO: 108201 - RNA, 23 nt, Artificial Sequence
  Synthetic
cuggaggcuacgggaagcuacug

SEQ ID NO: 108202 - RNA, 18 nt, Artificial Sequence
  Synthetic
auggauaugaaucuacug

SEQ ID NO: 108203 - RNA, 19 nt, Artificial Sequence
  Synthetic
aauggauaugaaucuacug

SEQ ID NO: 108204 - RNA, 21 nt, Artificial Sequence
  Synthetic
ugaauggauaugaaucuacug

SEQ ID NO: 108205 - RNA, 22 nt, Artificial Sequence
  Synthetic
augaauggauaugaaucuacug

SEQ ID NO: 108206 - RNA, 24 nt, Artificial Sequence
  Synthetic
agaugaauggauaugaaucuacug

SEQ ID NO: 108207 - RNA, 20 nt, Artificial Sequence
  Synthetic
uggccugagguauaguacug

SEQ ID NO: 108208 - RNA, 22 nt, Artificial Sequence
  Synthetic
uguggccugagguauaguacug

SEQ ID NO: 108209 - RNA, 23 nt, Artificial Sequence
  Synthetic
auguggccugagguauaguacug

SEQ ID NO: 108210 - RNA, 24 nt, Artificial Sequence
  Synthetic
cauguggccugagguauaguacug

SEQ ID NO: 108211 - RNA, 18 nt, Artificial Sequence
  Synthetic
caagaguuugguguacug

SEQ ID NO: 108212 - RNA, 19 nt, Artificial Sequence
  Synthetic
ucaagaguuugguguacug

SEQ ID NO: 108213 - RNA, 20 nt, Artificial Sequence
  Synthetic
uucaagaguuugguguacug

SEQ ID NO: 108214 - RNA, 21 nt, Artificial Sequence
  Synthetic
uuucaagaguuugguguacug

SEQ ID NO: 108215 - RNA, 22 nt, Artificial Sequence
  Synthetic
uuuucaagaguuugguguacug

SEQ ID NO: 108216 - RNA, 23 nt, Artificial Sequence
  Synthetic
uuuuucaagaguuugguguacug

SEQ ID NO: 108217 - RNA, 24 nt, Artificial Sequence
  Synthetic
cuuuuucaagaguuugguguacug

SEQ ID NO: 108218 - RNA, 21 nt, Artificial Sequence
  Synthetic
cgggagcuacccuguguacug

SEQ ID NO: 108219 - RNA, 22 nt, Artificial Sequence
  Synthetic
ucgggagcuacccuguguacug

SEQ ID NO: 108220 - RNA, 24 nt, Artificial Sequence
  Synthetic
ugucgggagcuacccuguguacug

SEQ ID NO: 108221 - RNA, 18 nt, Artificial Sequence
  Synthetic
auauaauguuguguacug

SEQ ID NO: 108222 - RNA, 19 nt, Artificial Sequence
  Synthetic
cauauaauguuguguacug

SEQ ID NO: 108223 - RNA, 20 nt, Artificial Sequence
  Synthetic
acauauaauguuguguacug

SEQ ID NO: 108224 - RNA, 22 nt, Artificial Sequence
  Synthetic
agacauauaauguuguguacug

SEQ ID NO: 108225 - RNA, 23 nt, Artificial Sequence
  Synthetic
aagacauauaauguuguguacug

SEQ ID NO: 108226 - RNA, 24 nt, Artificial Sequence
  Synthetic
caagacauauaauguuguguacug

SEQ ID NO: 108227 - RNA, 18 nt, Artificial Sequence
  Synthetic
ugagauguaauuguacug

SEQ ID NO: 108228 - RNA, 19 nt, Artificial Sequence
  Synthetic
augagauguaauuguacug

SEQ ID NO: 108229 - RNA, 20 nt, Artificial Sequence
  Synthetic
caugagauguaauuguacug

SEQ ID NO: 108230 - RNA, 21 nt, Artificial Sequence
  Synthetic
ucaugagauguaauuguacug

SEQ ID NO: 108231 - RNA, 22 nt, Artificial Sequence
  Synthetic
uucaugagauguaauuguacug

SEQ ID NO: 108232 - RNA, 23 nt, Artificial Sequence
  Synthetic
auucaugagauguaauuguacug

SEQ ID NO: 108233 - RNA, 24 nt, Artificial Sequence
  Synthetic
uauucaugagauguaauuguacug

SEQ ID NO: 108234 - RNA, 18 nt, Artificial Sequence
  Synthetic
uucaugcaggcauuacug

SEQ ID NO: 108235 - RNA, 19 nt, Artificial Sequence
  Synthetic
uuucaugcaggcauuacug

SEQ ID NO: 108236 - RNA, 21 nt, Artificial Sequence
  Synthetic
uguuucaugcaggcauuacug

SEQ ID NO: 108237 - RNA, 22 nt, Artificial Sequence
  Synthetic
uuguuucaugcaggcauuacug

SEQ ID NO: 108238 - RNA, 23 nt, Artificial Sequence
  Synthetic
uuuguuucaugcaggcauuacug

SEQ ID NO: 108239 - RNA, 18 nt, Artificial Sequence
  Synthetic
caagucaauggauuacug

SEQ ID NO: 108240 - RNA, 19 nt, Artificial Sequence
  Synthetic
ucaagucaauggauuacug

SEQ ID NO: 108241 - RNA, 20 nt, Artificial Sequence
  Synthetic
uucaagucaauggauuacug

SEQ ID NO: 108242 - RNA, 21 nt, Artificial Sequence
  Synthetic
uuucaagucaauggauuacug

SEQ ID NO: 108243 - RNA, 22 nt, Artificial Sequence
  Synthetic
uuuucaagucaauggauuacug

SEQ ID NO: 108244 - RNA, 24 nt, Artificial Sequence
  Synthetic
aguuuucaagucaauggauuacug

SEQ ID NO: 108245 - RNA, 18 nt, Artificial Sequence
  Synthetic
ucuggaaaggucuuacug

SEQ ID NO: 108246 - RNA, 19 nt, Artificial Sequence
  Synthetic
aucuggaaaggucuuacug

SEQ ID NO: 108247 - RNA, 20 nt, Artificial Sequence
  Synthetic
aaucuggaaaggucuuacug

SEQ ID NO: 108248 - RNA, 21 nt, Artificial Sequence
  Synthetic
caaucuggaaaggucuuacug

SEQ ID NO: 108249 - RNA, 22 nt, Artificial Sequence
  Synthetic
ccaaucuggaaaggucuuacug

SEQ ID NO: 108250 - RNA, 23 nt, Artificial Sequence
  Synthetic
cccaaucuggaaaggucuuacug

SEQ ID NO: 108251 - RNA, 24 nt, Artificial Sequence
  Synthetic
ccccaaucuggaaaggucuuacug

SEQ ID NO: 108252 - RNA, 19 nt, Artificial Sequence
  Synthetic
ugcagguaucuaagaccug

SEQ ID NO: 108253 - RNA, 20 nt, Artificial Sequence
  Synthetic
cugcagguaucuaagaccug

SEQ ID NO: 108254 - RNA, 21 nt, Artificial Sequence
  Synthetic
acugcagguaucuaagaccug

SEQ ID NO: 108255 - RNA, 22 nt, Artificial Sequence
  Synthetic
uacugcagguaucuaagaccug

SEQ ID NO: 108256 - RNA, 23 nt, Artificial Sequence
  Synthetic
cuacugcagguaucuaagaccug

SEQ ID NO: 108257 - RNA, 24 nt, Artificial Sequence
  Synthetic
ccuacugcagguaucuaagaccug

SEQ ID NO: 108258 - RNA, 19 nt, Artificial Sequence
  Synthetic
ugucauauuucaauaccug

SEQ ID NO: 108259 - RNA, 20 nt, Artificial Sequence
  Synthetic
augucauauuucaauaccug

SEQ ID NO: 108260 - RNA, 21 nt, Artificial Sequence
  Synthetic
caugucauauuucaauaccug

SEQ ID NO: 108261 - RNA, 22 nt, Artificial Sequence
  Synthetic
acaugucauauuucaauaccug

SEQ ID NO: 108262 - RNA, 24 nt, Artificial Sequence
  Synthetic
agacaugucauauuucaauaccug

SEQ ID NO: 108263 - RNA, 21 nt, Artificial Sequence
  Synthetic
ugaaauaauaauacauaccug

SEQ ID NO: 108264 - RNA, 22 nt, Artificial Sequence
  Synthetic
augaaauaauaauacauaccug

SEQ ID NO: 108265 - RNA, 23 nt, Artificial Sequence
  Synthetic
caugaaauaauaauacauaccug

SEQ ID NO: 108266 - RNA, 24 nt, Artificial Sequence
  Synthetic
acaugaaauaauaauacauaccug

SEQ ID NO: 108267 - RNA, 19 nt, Artificial Sequence
  Synthetic
agcaaacaagguaacccug

SEQ ID NO: 108268 - RNA, 20 nt, Artificial Sequence
  Synthetic
aagcaaacaagguaacccug

SEQ ID NO: 108269 - RNA, 21 nt, Artificial Sequence
  Synthetic
aaagcaaacaagguaacccug

SEQ ID NO: 108270 - RNA, 24 nt, Artificial Sequence
  Synthetic
uggaaagcaaacaagguaacccug

SEQ ID NO: 108271 - RNA, 18 nt, Artificial Sequence
  Synthetic
uuaugcaagcaggcccug

SEQ ID NO: 108272 - RNA, 19 nt, Artificial Sequence
  Synthetic
uuuaugcaagcaggcccug

SEQ ID NO: 108273 - RNA, 20 nt, Artificial Sequence
  Synthetic
cuuuaugcaagcaggcccug

SEQ ID NO: 108274 - RNA, 21 nt, Artificial Sequence
  Synthetic
ucuuuaugcaagcaggcccug

SEQ ID NO: 108275 - RNA, 22 nt, Artificial Sequence
  Synthetic
uucuuuaugcaagcaggcccug

SEQ ID NO: 108276 - RNA, 23 nt, Artificial Sequence
  Synthetic
cuucuuuaugcaagcaggcccug

SEQ ID NO: 108277 - RNA, 24 nt, Artificial Sequence
  Synthetic
acuucuuuaugcaagcaggcccug

SEQ ID NO: 108278 - RNA, 18 nt, Artificial Sequence
  Synthetic
ugugucuuauuuucccug

SEQ ID NO: 108279 - RNA, 20 nt, Artificial Sequence
  Synthetic
agugugucuuauuuucccug

SEQ ID NO: 108280 - RNA, 21 nt, Artificial Sequence
  Synthetic
uagugugucuuauuuucccug

SEQ ID NO: 108281 - RNA, 22 nt, Artificial Sequence
  Synthetic
auagugugucuuauuuucccug

SEQ ID NO: 108282 - RNA, 23 nt, Artificial Sequence
  Synthetic
aauagugugucuuauuuucccug

SEQ ID NO: 108283 - RNA, 24 nt, Artificial Sequence
  Synthetic
aaauagugugucuuauuuucccug

SEQ ID NO: 108284 - RNA, 18 nt, Artificial Sequence
  Synthetic
aguugagaagaaagccug

SEQ ID NO: 108285 - RNA, 19 nt, Artificial Sequence
  Synthetic
uaguugagaagaaagccug

SEQ ID NO: 108286 - RNA, 20 nt, Artificial Sequence
  Synthetic
auaguugagaagaaagccug

SEQ ID NO: 108287 - RNA, 22 nt, Artificial Sequence
  Synthetic
agauaguugagaagaaagccug

SEQ ID NO: 108288 - RNA, 23 nt, Artificial Sequence
  Synthetic
aagauaguugagaagaaagccug

SEQ ID NO: 108289 - RNA, 18 nt, Artificial Sequence
  Synthetic
uuuaugaauucaagccug

SEQ ID NO: 108290 - RNA, 19 nt, Artificial Sequence
  Synthetic
uuuuaugaauucaagccug

SEQ ID NO: 108291 - RNA, 20 nt, Artificial Sequence
  Synthetic
uuuuuaugaauucaagccug

SEQ ID NO: 108292 - RNA, 21 nt, Artificial Sequence
  Synthetic
auuuuuaugaauucaagccug

SEQ ID NO: 108293 - RNA, 22 nt, Artificial Sequence
  Synthetic
aauuuuuaugaauucaagccug

SEQ ID NO: 108294 - RNA, 23 nt, Artificial Sequence
  Synthetic
uaauuuuuaugaauucaagccug

SEQ ID NO: 108295 - RNA, 24 nt, Artificial Sequence
  Synthetic
auaauuuuuaugaauucaagccug

SEQ ID NO: 108296 - RNA, 21 nt, Artificial Sequence
  Synthetic
cugagcaauacaaugagccug

SEQ ID NO: 108297 - RNA, 22 nt, Artificial Sequence
  Synthetic
ccugagcaauacaaugagccug

SEQ ID NO: 108298 - RNA, 24 nt, Artificial Sequence
  Synthetic
agccugagcaauacaaugagccug

SEQ ID NO: 108299 - RNA, 18 nt, Artificial Sequence
  Synthetic
uggaacuaugcuagccug

SEQ ID NO: 108300 - RNA, 19 nt, Artificial Sequence
  Synthetic
auggaacuaugcuagccug

SEQ ID NO: 108301 - RNA, 20 nt, Artificial Sequence
  Synthetic
uauggaacuaugcuagccug

SEQ ID NO: 108302 - RNA, 21 nt, Artificial Sequence
  Synthetic
cuauggaacuaugcuagccug

SEQ ID NO: 108303 - RNA, 23 nt, Artificial Sequence
  Synthetic
cgcuauggaacuaugcuagccug

SEQ ID NO: 108304 - RNA, 24 nt, Artificial Sequence
  Synthetic
ccgcuauggaacuaugcuagccug

SEQ ID NO: 108305 - RNA, 18 nt, Artificial Sequence
  Synthetic
cuaaaauucauaggccug

SEQ ID NO: 108306 - RNA, 19 nt, Artificial Sequence
  Synthetic
acuaaaauucauaggccug

SEQ ID NO: 108307 - RNA, 20 nt, Artificial Sequence
  Synthetic
uacuaaaauucauaggccug

SEQ ID NO: 108308 - RNA, 21 nt, Artificial Sequence
  Synthetic
auacuaaaauucauaggccug

SEQ ID NO: 108309 - RNA, 22 nt, Artificial Sequence
  Synthetic
uauacuaaaauucauaggccug

SEQ ID NO: 108310 - RNA, 23 nt, Artificial Sequence
  Synthetic
uuauacuaaaauucauaggccug

SEQ ID NO: 108311 - RNA, 24 nt, Artificial Sequence
  Synthetic
auuauacuaaaauucauaggccug

SEQ ID NO: 108312 - RNA, 18 nt, Artificial Sequence
  Synthetic
uguccuugcuugggccug

SEQ ID NO: 108313 - RNA, 19 nt, Artificial Sequence
  Synthetic
auguccuugcuugggccug

SEQ ID NO: 108314 - RNA, 20 nt, Artificial Sequence
  Synthetic
aauguccuugcuugggccug

SEQ ID NO: 108315 - RNA, 21 nt, Artificial Sequence
  Synthetic
aaauguccuugcuugggccug

SEQ ID NO: 108316 - RNA, 22 nt, Artificial Sequence
  Synthetic
aaaauguccuugcuugggccug

SEQ ID NO: 108317 - RNA, 23 nt, Artificial Sequence
  Synthetic
aaaaauguccuugcuugggccug

SEQ ID NO: 108318 - RNA, 24 nt, Artificial Sequence
  Synthetic
aaaaaauguccuugcuugggccug

SEQ ID NO: 108319 - RNA, 18 nt, Artificial Sequence
  Synthetic
ucagucacagguugccug

SEQ ID NO: 108320 - RNA, 19 nt, Artificial Sequence
  Synthetic
aucagucacagguugccug

SEQ ID NO: 108321 - RNA, 20 nt, Artificial Sequence
  Synthetic
caucagucacagguugccug

SEQ ID NO: 108322 - RNA, 21 nt, Artificial Sequence
  Synthetic
ucaucagucacagguugccug

SEQ ID NO: 108323 - RNA, 23 nt, Artificial Sequence
  Synthetic
agucaucagucacagguugccug

SEQ ID NO: 108324 - RNA, 24 nt, Artificial Sequence
  Synthetic
cagucaucagucacagguugccug

SEQ ID NO: 108325 - RNA, 22 nt, Artificial Sequence
  Synthetic
ugucuuuuagcaauguugccug

SEQ ID NO: 108326 - RNA, 23 nt, Artificial Sequence
  Synthetic
cugucuuuuagcaauguugccug

SEQ ID NO: 108327 - RNA, 24 nt, Artificial Sequence
  Synthetic
ucugucuuuuagcaauguugccug

SEQ ID NO: 108328 - RNA, 18 nt, Artificial Sequence
  Synthetic
acacuauacaagauccug

SEQ ID NO: 108329 - RNA, 19 nt, Artificial Sequence
  Synthetic
cacacuauacaagauccug

SEQ ID NO: 108330 - RNA, 20 nt, Artificial Sequence
  Synthetic
ucacacuauacaagauccug

SEQ ID NO: 108331 - RNA, 24 nt, Artificial Sequence
  Synthetic
agggucacacuauacaagauccug

SEQ ID NO: 108332 - RNA, 18 nt, Artificial Sequence
  Synthetic
ucagagacuauuauccug

SEQ ID NO: 108333 - RNA, 19 nt, Artificial Sequence
  Synthetic
cucagagacuauuauccug

SEQ ID NO: 108334 - RNA, 20 nt, Artificial Sequence
  Synthetic
ccucagagacuauuauccug

SEQ ID NO: 108335 - RNA, 21 nt, Artificial Sequence
  Synthetic
uccucagagacuauuauccug

SEQ ID NO: 108336 - RNA, 23 nt, Artificial Sequence
  Synthetic
aguccucagagacuauuauccug

SEQ ID NO: 108337 - RNA, 24 nt, Artificial Sequence
  Synthetic
aaguccucagagacuauuauccug

SEQ ID NO: 108338 - RNA, 18 nt, Artificial Sequence
  Synthetic
ccuuuuucuuuuauccug

SEQ ID NO: 108339 - RNA, 19 nt, Artificial Sequence
  Synthetic
uccuuuuucuuuuauccug

SEQ ID NO: 108340 - RNA, 20 nt, Artificial Sequence
  Synthetic
uuccuuuuucuuuuauccug

SEQ ID NO: 108341 - RNA, 21 nt, Artificial Sequence
  Synthetic
uuuccuuuuucuuuuauccug

SEQ ID NO: 108342 - RNA, 22 nt, Artificial Sequence
  Synthetic
uuuuccuuuuucuuuuauccug

SEQ ID NO: 108343 - RNA, 23 nt, Artificial Sequence
  Synthetic
cuuuuccuuuuucuuuuauccug

SEQ ID NO: 108344 - RNA, 24 nt, Artificial Sequence
  Synthetic
ccuuuuccuuuuucuuuuauccug

SEQ ID NO: 108345 - RNA, 18 nt, Artificial Sequence
  Synthetic
auucguacauaucuccug

SEQ ID NO: 108346 - RNA, 19 nt, Artificial Sequence
  Synthetic
aauucguacauaucuccug

SEQ ID NO: 108347 - RNA, 20 nt, Artificial Sequence
  Synthetic
aaauucguacauaucuccug

SEQ ID NO: 108348 - RNA, 22 nt, Artificial Sequence
  Synthetic
ugaaauucguacauaucuccug

SEQ ID NO: 108349 - RNA, 23 nt, Artificial Sequence
  Synthetic
uugaaauucguacauaucuccug

SEQ ID NO: 108350 - RNA, 24 nt, Artificial Sequence
  Synthetic
cuugaaauucguacauaucuccug

SEQ ID NO: 108351 - RNA, 18 nt, Artificial Sequence
  Synthetic
auaauaaaaccuguccug

SEQ ID NO: 108352 - RNA, 19 nt, Artificial Sequence
  Synthetic
aauaauaaaaccuguccug

SEQ ID NO: 108353 - RNA, 20 nt, Artificial Sequence
  Synthetic
uaauaauaaaaccuguccug

SEQ ID NO: 108354 - RNA, 21 nt, Artificial Sequence
  Synthetic
auaauaauaaaaccuguccug

SEQ ID NO: 108355 - RNA, 22 nt, Artificial Sequence
  Synthetic
uauaauaauaaaaccuguccug

SEQ ID NO: 108356 - RNA, 24 nt, Artificial Sequence
  Synthetic
aguauaauaauaaaaccuguccug

SEQ ID NO: 108357 - RNA, 18 nt, Artificial Sequence
  Synthetic
ugcagucaauauuuccug

SEQ ID NO: 108358 - RNA, 19 nt, Artificial Sequence
  Synthetic
uugcagucaauauuuccug

SEQ ID NO: 108359 - RNA, 20 nt, Artificial Sequence
  Synthetic
uuugcagucaauauuuccug

SEQ ID NO: 108360 - RNA, 21 nt, Artificial Sequence
  Synthetic
uuuugcagucaauauuuccug

SEQ ID NO: 108361 - RNA, 22 nt, Artificial Sequence
  Synthetic
auuuugcagucaauauuuccug

SEQ ID NO: 108362 - RNA, 24 nt, Artificial Sequence
  Synthetic
agauuuugcagucaauauuuccug

SEQ ID NO: 108363 - RNA, 18 nt, Artificial Sequence
  Synthetic
ugugaguuuaguuuccug

SEQ ID NO: 108364 - RNA, 19 nt, Artificial Sequence
  Synthetic
uugugaguuuaguuuccug

SEQ ID NO: 108365 - RNA, 20 nt, Artificial Sequence
  Synthetic
auugugaguuuaguuuccug

SEQ ID NO: 108366 - RNA, 21 nt, Artificial Sequence
  Synthetic
aauugugaguuuaguuuccug

SEQ ID NO: 108367 - RNA, 22 nt, Artificial Sequence
  Synthetic
aaauugugaguuuaguuuccug

SEQ ID NO: 108368 - RNA, 23 nt, Artificial Sequence
  Synthetic
uaaauugugaguuuaguuuccug

SEQ ID NO: 108369 - RNA, 24 nt, Artificial Sequence
  Synthetic
auaaauugugaguuuaguuuccug

SEQ ID NO: 108370 - RNA, 19 nt, Artificial Sequence
  Synthetic
cguaauaggagaaaagcug

SEQ ID NO: 108371 - RNA, 20 nt, Artificial Sequence
  Synthetic
ucguaauaggagaaaagcug

SEQ ID NO: 108372 - RNA, 21 nt, Artificial Sequence
  Synthetic
uucguaauaggagaaaagcug

SEQ ID NO: 108373 - RNA, 22 nt, Artificial Sequence
  Synthetic
uuucguaauaggagaaaagcug

SEQ ID NO: 108374 - RNA, 24 nt, Artificial Sequence
  Synthetic
aguuucguaauaggagaaaagcug

SEQ ID NO: 108375 - RNA, 18 nt, Artificial Sequence
  Synthetic
aacuaaagaagaaagcug

SEQ ID NO: 108376 - RNA, 19 nt, Artificial Sequence
  Synthetic
aaacuaaagaagaaagcug

SEQ ID NO: 108377 - RNA, 20 nt, Artificial Sequence
  Synthetic
uaaacuaaagaagaaagcug

SEQ ID NO: 108378 - RNA, 21 nt, Artificial Sequence
  Synthetic
auaaacuaaagaagaaagcug

SEQ ID NO: 108379 - RNA, 22 nt, Artificial Sequence
  Synthetic
cauaaacuaaagaagaaagcug

SEQ ID NO: 108380 - RNA, 23 nt, Artificial Sequence
  Synthetic
ccauaaacuaaagaagaaagcug

SEQ ID NO: 108381 - RNA, 24 nt, Artificial Sequence
  Synthetic
uccauaaacuaaagaagaaagcug

SEQ ID NO: 108382 - RNA, 22 nt, Artificial Sequence
  Synthetic
aguuauuagaauuuuaaagcug

SEQ ID NO: 108383 - RNA, 24 nt, Artificial Sequence
  Synthetic
agaguuauuagaauuuuaaagcug

SEQ ID NO: 108384 - RNA, 18 nt, Artificial Sequence
  Synthetic
auaccauucaccaagcug

SEQ ID NO: 108385 - RNA, 20 nt, Artificial Sequence
  Synthetic
ugauaccauucaccaagcug

SEQ ID NO: 108386 - RNA, 21 nt, Artificial Sequence
  Synthetic
cugauaccauucaccaagcug

SEQ ID NO: 108387 - RNA, 22 nt, Artificial Sequence
  Synthetic
ucugauaccauucaccaagcug

SEQ ID NO: 108388 - RNA, 23 nt, Artificial Sequence
  Synthetic
aucugauaccauucaccaagcug

SEQ ID NO: 108389 - RNA, 24 nt, Artificial Sequence
  Synthetic
caucugauaccauucaccaagcug

SEQ ID NO: 108390 - RNA, 18 nt, Artificial Sequence
  Synthetic
aacucugugaagaagcug

SEQ ID NO: 108391 - RNA, 19 nt, Artificial Sequence
  Synthetic
aaacucugugaagaagcug

SEQ ID NO: 108392 - RNA, 21 nt, Artificial Sequence
  Synthetic
ugaaacucugugaagaagcug

SEQ ID NO: 108393 - RNA, 22 nt, Artificial Sequence
  Synthetic
augaaacucugugaagaagcug

SEQ ID NO: 108394 - RNA, 23 nt, Artificial Sequence
  Synthetic
uaugaaacucugugaagaagcug

SEQ ID NO: 108395 - RNA, 24 nt, Artificial Sequence
  Synthetic
uuaugaaacucugugaagaagcug

SEQ ID NO: 108396 - RNA, 18 nt, Artificial Sequence
  Synthetic
ccccuuaaaguacagcug

SEQ ID NO: 108397 - RNA, 19 nt, Artificial Sequence
  Synthetic
uccccuuaaaguacagcug

SEQ ID NO: 108398 - RNA, 20 nt, Artificial Sequence
  Synthetic
cuccccuuaaaguacagcug

SEQ ID NO: 108399 - RNA, 22 nt, Artificial Sequence
  Synthetic
agcuccccuuaaaguacagcug

SEQ ID NO: 108400 - RNA, 23 nt, Artificial Sequence
  Synthetic
cagcuccccuuaaaguacagcug

SEQ ID NO: 108401 - RNA, 24 nt, Artificial Sequence
  Synthetic
ucagcuccccuuaaaguacagcug

SEQ ID NO: 108402 - RNA, 18 nt, Artificial Sequence
  Synthetic
aacauuaagcagcagcug

SEQ ID NO: 108403 - RNA, 19 nt, Artificial Sequence
  Synthetic
caacauuaagcagcagcug

SEQ ID NO: 108404 - RNA, 20 nt, Artificial Sequence
  Synthetic
ucaacauuaagcagcagcug

SEQ ID NO: 108405 - RNA, 21 nt, Artificial Sequence
  Synthetic
aucaacauuaagcagcagcug

SEQ ID NO: 108406 - RNA, 22 nt, Artificial Sequence
  Synthetic
uaucaacauuaagcagcagcug

SEQ ID NO: 108407 - RNA, 23 nt, Artificial Sequence
  Synthetic
auaucaacauuaagcagcagcug

SEQ ID NO: 108408 - RNA, 18 nt, Artificial Sequence
  Synthetic
uuuguuguggugcagcug

SEQ ID NO: 108409 - RNA, 19 nt, Artificial Sequence
  Synthetic
cuuuguuguggugcagcug

SEQ ID NO: 108410 - RNA, 20 nt, Artificial Sequence
  Synthetic
ccuuuguuguggugcagcug

SEQ ID NO: 108411 - RNA, 21 nt, Artificial Sequence
  Synthetic
accuuuguuguggugcagcug

SEQ ID NO: 108412 - RNA, 22 nt, Artificial Sequence
  Synthetic
uaccuuuguuguggugcagcug

SEQ ID NO: 108413 - RNA, 23 nt, Artificial Sequence
  Synthetic
cuaccuuuguuguggugcagcug

SEQ ID NO: 108414 - RNA, 24 nt, Artificial Sequence
  Synthetic
ucuaccuuuguuguggugcagcug

SEQ ID NO: 108415 - RNA, 18 nt, Artificial Sequence
  Synthetic
aguggcauaagucagcug

SEQ ID NO: 108416 - RNA, 19 nt, Artificial Sequence
  Synthetic
aaguggcauaagucagcug

SEQ ID NO: 108417 - RNA, 20 nt, Artificial Sequence
  Synthetic
uaaguggcauaagucagcug

SEQ ID NO: 108418 - RNA, 22 nt, Artificial Sequence
  Synthetic
aguaaguggcauaagucagcug

SEQ ID NO: 108419 - RNA, 23 nt, Artificial Sequence
  Synthetic
aaguaaguggcauaagucagcug

SEQ ID NO: 108420 - RNA, 18 nt, Artificial Sequence
  Synthetic
acauuccucagagagcug

SEQ ID NO: 108421 - RNA, 19 nt, Artificial Sequence
  Synthetic
aacauuccucagagagcug

SEQ ID NO: 108422 - RNA, 23 nt, Artificial Sequence
  Synthetic
agggaacauuccucagagagcug

SEQ ID NO: 108423 - RNA, 24 nt, Artificial Sequence
  Synthetic
aagggaacauuccucagagagcug

SEQ ID NO: 108424 - RNA, 18 nt, Artificial Sequence
  Synthetic
auuuaccuaccauagcug

SEQ ID NO: 108425 - RNA, 19 nt, Artificial Sequence
  Synthetic
uauuuaccuaccauagcug

SEQ ID NO: 108426 - RNA, 20 nt, Artificial Sequence
  Synthetic
uuauuuaccuaccauagcug

SEQ ID NO: 108427 - RNA, 21 nt, Artificial Sequence
  Synthetic
auuauuuaccuaccauagcug

SEQ ID NO: 108428 - RNA, 22 nt, Artificial Sequence
  Synthetic
uauuauuuaccuaccauagcug

SEQ ID NO: 108429 - RNA, 23 nt, Artificial Sequence
  Synthetic
uuauuauuuaccuaccauagcug

SEQ ID NO: 108430 - RNA, 24 nt, Artificial Sequence
  Synthetic
cuuauuauuuaccuaccauagcug

SEQ ID NO: 108431 - RNA, 18 nt, Artificial Sequence
  Synthetic
cagaaguaggcauagcug

SEQ ID NO: 108432 - RNA, 19 nt, Artificial Sequence
  Synthetic
ucagaaguaggcauagcug

SEQ ID NO: 108433 - RNA, 20 nt, Artificial Sequence
  Synthetic
cucagaaguaggcauagcug

SEQ ID NO: 108434 - RNA, 21 nt, Artificial Sequence
  Synthetic
ccucagaaguaggcauagcug

SEQ ID NO: 108435 - RNA, 23 nt, Artificial Sequence
  Synthetic
agccucagaaguaggcauagcug

SEQ ID NO: 108436 - RNA, 24 nt, Artificial Sequence
  Synthetic
aagccucagaaguaggcauagcug

SEQ ID NO: 108437 - RNA, 18 nt, Artificial Sequence
  Synthetic
ucacaauaacauuagcug

SEQ ID NO: 108438 - RNA, 19 nt, Artificial Sequence
  Synthetic
uucacaauaacauuagcug

SEQ ID NO: 108439 - RNA, 20 nt, Artificial Sequence
  Synthetic
uuucacaauaacauuagcug

SEQ ID NO: 108440 - RNA, 22 nt, Artificial Sequence
  Synthetic
uguuucacaauaacauuagcug

SEQ ID NO: 108441 - RNA, 24 nt, Artificial Sequence
  Synthetic
aguguuucacaauaacauuagcug

SEQ ID NO: 108442 - RNA, 18 nt, Artificial Sequence
  Synthetic
aauauagcauucccgcug

SEQ ID NO: 108443 - RNA, 19 nt, Artificial Sequence
  Synthetic
uaauauagcauucccgcug

SEQ ID NO: 108444 - RNA, 20 nt, Artificial Sequence
  Synthetic
auaauauagcauucccgcug

SEQ ID NO: 108445 - RNA, 21 nt, Artificial Sequence
  Synthetic
uauaauauagcauucccgcug

SEQ ID NO: 108446 - RNA, 22 nt, Artificial Sequence
  Synthetic
auauaauauagcauucccgcug

SEQ ID NO: 108447 - RNA, 23 nt, Artificial Sequence
  Synthetic
cauauaauauagcauucccgcug

SEQ ID NO: 108448 - RNA, 24 nt, Artificial Sequence
  Synthetic
ccauauaauauagcauucccgcug

SEQ ID NO: 108449 - RNA, 18 nt, Artificial Sequence
  Synthetic
auauaaccccaaaggcug

SEQ ID NO: 108450 - RNA, 21 nt, Artificial Sequence
  Synthetic
aggauauaaccccaaaggcug

SEQ ID NO: 108451 - RNA, 23 nt, Artificial Sequence
  Synthetic
agaggauauaaccccaaaggcug

SEQ ID NO: 108452 - RNA, 24 nt, Artificial Sequence
  Synthetic
uagaggauauaaccccaaaggcug

SEQ ID NO: 108453 - RNA, 19 nt, Artificial Sequence
  Synthetic
aguaaacuuggaaaggcug

SEQ ID NO: 108454 - RNA, 21 nt, Artificial Sequence
  Synthetic
agaguaaacuuggaaaggcug

SEQ ID NO: 108455 - RNA, 22 nt, Artificial Sequence
  Synthetic
aagaguaaacuuggaaaggcug

SEQ ID NO: 108456 - RNA, 24 nt, Artificial Sequence
  Synthetic
agaagaguaaacuuggaaaggcug

SEQ ID NO: 108457 - RNA, 18 nt, Artificial Sequence
  Synthetic
ucugacaaaugaaggcug

SEQ ID NO: 108458 - RNA, 19 nt, Artificial Sequence
  Synthetic
cucugacaaaugaaggcug

SEQ ID NO: 108459 - RNA, 20 nt, Artificial Sequence
  Synthetic
acucugacaaaugaaggcug

SEQ ID NO: 108460 - RNA, 22 nt, Artificial Sequence
  Synthetic
agacucugacaaaugaaggcug

SEQ ID NO: 108461 - RNA, 23 nt, Artificial Sequence
  Synthetic
cagacucugacaaaugaaggcug

SEQ ID NO: 108462 - RNA, 24 nt, Artificial Sequence
  Synthetic
ucagacucugacaaaugaaggcug

SEQ ID NO: 108463 - RNA, 20 nt, Artificial Sequence
  Synthetic
aggcacugccaaauaugcug

SEQ ID NO: 108464 - RNA, 21 nt, Artificial Sequence
  Synthetic
aaggcacugccaaauaugcug

SEQ ID NO: 108465 - RNA, 22 nt, Artificial Sequence
  Synthetic
caaggcacugccaaauaugcug

SEQ ID NO: 108466 - RNA, 23 nt, Artificial Sequence
  Synthetic
ucaaggcacugccaaauaugcug

SEQ ID NO: 108467 - RNA, 24 nt, Artificial Sequence
  Synthetic
uucaaggcacugccaaauaugcug

SEQ ID NO: 108468 - RNA, 21 nt, Artificial Sequence
  Synthetic
acagucuuggugcagcugcug

SEQ ID NO: 108469 - RNA, 22 nt, Artificial Sequence
  Synthetic
uacagucuuggugcagcugcug

SEQ ID NO: 108470 - RNA, 18 nt, Artificial Sequence
  Synthetic
augacaacaucucugcug

SEQ ID NO: 108471 - RNA, 19 nt, Artificial Sequence
  Synthetic
aaugacaacaucucugcug

SEQ ID NO: 108472 - RNA, 20 nt, Artificial Sequence
  Synthetic
aaaugacaacaucucugcug

SEQ ID NO: 108473 - RNA, 21 nt, Artificial Sequence
  Synthetic
aaaaugacaacaucucugcug

SEQ ID NO: 108474 - RNA, 22 nt, Artificial Sequence
  Synthetic
aaaaaugacaacaucucugcug

SEQ ID NO: 108475 - RNA, 23 nt, Artificial Sequence
  Synthetic
caaaaaugacaacaucucugcug

SEQ ID NO: 108476 - RNA, 24 nt, Artificial Sequence
  Synthetic
acaaaaaugacaacaucucugcug

SEQ ID NO: 108477 - RNA, 18 nt, Artificial Sequence
  Synthetic
agucaucauucucugcug

SEQ ID NO: 108478 - RNA, 19 nt, Artificial Sequence
  Synthetic
uagucaucauucucugcug

SEQ ID NO: 108479 - RNA, 20 nt, Artificial Sequence
  Synthetic
cuagucaucauucucugcug

SEQ ID NO: 108480 - RNA, 22 nt, Artificial Sequence
  Synthetic
ugcuagucaucauucucugcug

SEQ ID NO: 108481 - RNA, 18 nt, Artificial Sequence
  Synthetic
aguuuucacugagugcug

SEQ ID NO: 108482 - RNA, 19 nt, Artificial Sequence
  Synthetic
uaguuuucacugagugcug

SEQ ID NO: 108483 - RNA, 20 nt, Artificial Sequence
  Synthetic
uuaguuuucacugagugcug

SEQ ID NO: 108484 - RNA, 22 nt, Artificial Sequence
  Synthetic
aguuaguuuucacugagugcug

SEQ ID NO: 108485 - RNA, 24 nt, Artificial Sequence
  Synthetic
ugaguuaguuuucacugagugcug

SEQ ID NO: 108486 - RNA, 21 nt, Artificial Sequence
  Synthetic
aacaagaaaaauauauugcug

SEQ ID NO: 108487 - RNA, 22 nt, Artificial Sequence
  Synthetic
uaacaagaaaaauauauugcug

SEQ ID NO: 108488 - RNA, 24 nt, Artificial Sequence
  Synthetic
aguaacaagaaaaauauauugcug

SEQ ID NO: 108489 - RNA, 18 nt, Artificial Sequence
  Synthetic
aauaaguacauuuugcug

SEQ ID NO: 108490 - RNA, 19 nt, Artificial Sequence
  Synthetic
aaauaaguacauuuugcug

SEQ ID NO: 108491 - RNA, 20 nt, Artificial Sequence
  Synthetic
aaaauaaguacauuuugcug

SEQ ID NO: 108492 - RNA, 22 nt, Artificial Sequence
  Synthetic
agaaaauaaguacauuuugcug

SEQ ID NO: 108493 - RNA, 24 nt, Artificial Sequence
  Synthetic
agagaaaauaaguacauuuugcug

SEQ ID NO: 108494 - RNA, 18 nt, Artificial Sequence
  Synthetic
uugccuagaugaaaucug

SEQ ID NO: 108495 - RNA, 19 nt, Artificial Sequence
  Synthetic
cuugccuagaugaaaucug

SEQ ID NO: 108496 - RNA, 20 nt, Artificial Sequence
  Synthetic
acuugccuagaugaaaucug

SEQ ID NO: 108497 - RNA, 21 nt, Artificial Sequence
  Synthetic
aacuugccuagaugaaaucug

SEQ ID NO: 108498 - RNA, 22 nt, Artificial Sequence
  Synthetic
uaacuugccuagaugaaaucug

SEQ ID NO: 108499 - RNA, 23 nt, Artificial Sequence
  Synthetic
auaacuugccuagaugaaaucug

SEQ ID NO: 108500 - RNA, 24 nt, Artificial Sequence
  Synthetic
aauaacuugccuagaugaaaucug

SEQ ID NO: 108501 - RNA, 18 nt, Artificial Sequence
  Synthetic
aaaucauaauuaaaucug

SEQ ID NO: 108502 - RNA, 19 nt, Artificial Sequence
  Synthetic
aaaaucauaauuaaaucug

SEQ ID NO: 108503 - RNA, 21 nt, Artificial Sequence
  Synthetic
agaaaaucauaauuaaaucug

SEQ ID NO: 108504 - RNA, 22 nt, Artificial Sequence
  Synthetic
aagaaaaucauaauuaaaucug

SEQ ID NO: 108505 - RNA, 23 nt, Artificial Sequence
  Synthetic
aaagaaaaucauaauuaaaucug

SEQ ID NO: 108506 - RNA, 24 nt, Artificial Sequence
  Synthetic
aaaagaaaaucauaauuaaaucug

SEQ ID NO: 108507 - RNA, 18 nt, Artificial Sequence
  Synthetic
uuucuuaucugcaaucug

SEQ ID NO: 108508 - RNA, 19 nt, Artificial Sequence
  Synthetic
auuucuuaucugcaaucug

SEQ ID NO: 108509 - RNA, 20 nt, Artificial Sequence
  Synthetic
cauuucuuaucugcaaucug

SEQ ID NO: 108510 - RNA, 21 nt, Artificial Sequence
  Synthetic
ucauuucuuaucugcaaucug

SEQ ID NO: 108511 - RNA, 22 nt, Artificial Sequence
  Synthetic
cucauuucuuaucugcaaucug

SEQ ID NO: 108512 - RNA, 18 nt, Artificial Sequence
  Synthetic
acuuauuuacauaaucug

SEQ ID NO: 108513 - RNA, 19 nt, Artificial Sequence
  Synthetic
aacuuauuuacauaaucug

SEQ ID NO: 108514 - RNA, 20 nt, Artificial Sequence
  Synthetic
uaacuuauuuacauaaucug

SEQ ID NO: 108515 - RNA, 21 nt, Artificial Sequence
  Synthetic
uuaacuuauuuacauaaucug

SEQ ID NO: 108516 - RNA, 23 nt, Artificial Sequence
  Synthetic
aguuaacuuauuuacauaaucug

SEQ ID NO: 108517 - RNA, 24 nt, Artificial Sequence
  Synthetic
aaguuaacuuauuuacauaaucug

SEQ ID NO: 108518 - RNA, 18 nt, Artificial Sequence
  Synthetic
uauuuacguaguaaucug

SEQ ID NO: 108519 - RNA, 19 nt, Artificial Sequence
  Synthetic
cuauuuacguaguaaucug

SEQ ID NO: 108520 - RNA, 20 nt, Artificial Sequence
  Synthetic
ucuauuuacguaguaaucug

SEQ ID NO: 108521 - RNA, 21 nt, Artificial Sequence
  Synthetic
uucuauuuacguaguaaucug

SEQ ID NO: 108522 - RNA, 22 nt, Artificial Sequence
  Synthetic
uuucuauuuacguaguaaucug

SEQ ID NO: 108523 - RNA, 23 nt, Artificial Sequence
  Synthetic
uuuucuauuuacguaguaaucug

SEQ ID NO: 108524 - RNA, 24 nt, Artificial Sequence
  Synthetic
auuuucuauuuacguaguaaucug

SEQ ID NO: 108525 - RNA, 18 nt, Artificial Sequence
  Synthetic
uucagugcccaacaucug

SEQ ID NO: 108526 - RNA, 19 nt, Artificial Sequence
  Synthetic
auucagugcccaacaucug

SEQ ID NO: 108527 - RNA, 20 nt, Artificial Sequence
  Synthetic
cauucagugcccaacaucug

SEQ ID NO: 108528 - RNA, 21 nt, Artificial Sequence
  Synthetic
ccauucagugcccaacaucug

SEQ ID NO: 108529 - RNA, 23 nt, Artificial Sequence
  Synthetic
agccauucagugcccaacaucug

SEQ ID NO: 108530 - RNA, 24 nt, Artificial Sequence
  Synthetic
aagccauucagugcccaacaucug

SEQ ID NO: 108531 - RNA, 21 nt, Artificial Sequence
  Synthetic
ugaagaaaaaaauaccaucug

SEQ ID NO: 108532 - RNA, 22 nt, Artificial Sequence
  Synthetic
augaagaaaaaaauaccaucug

SEQ ID NO: 108533 - RNA, 23 nt, Artificial Sequence
  Synthetic
aaugaagaaaaaaauaccaucug

SEQ ID NO: 108534 - RNA, 24 nt, Artificial Sequence
  Synthetic
caaugaagaaaaaaauaccaucug

SEQ ID NO: 108535 - RNA, 18 nt, Artificial Sequence
  Synthetic
cuuucuuaaauugaucug

SEQ ID NO: 108536 - RNA, 19 nt, Artificial Sequence
  Synthetic
ucuuucuuaaauugaucug

SEQ ID NO: 108537 - RNA, 20 nt, Artificial Sequence
  Synthetic
aucuuucuuaaauugaucug

SEQ ID NO: 108538 - RNA, 21 nt, Artificial Sequence
  Synthetic
caucuuucuuaaauugaucug

SEQ ID NO: 108539 - RNA, 22 nt, Artificial Sequence
  Synthetic
ucaucuuucuuaaauugaucug

SEQ ID NO: 108540 - RNA, 23 nt, Artificial Sequence
  Synthetic
uucaucuuucuuaaauugaucug

SEQ ID NO: 108541 - RNA, 24 nt, Artificial Sequence
  Synthetic
auucaucuuucuuaaauugaucug

SEQ ID NO: 108542 - RNA, 19 nt, Artificial Sequence
  Synthetic
uguacuucacaaauaucug

SEQ ID NO: 108543 - RNA, 20 nt, Artificial Sequence
  Synthetic
auguacuucacaaauaucug

SEQ ID NO: 108544 - RNA, 21 nt, Artificial Sequence
  Synthetic
cauguacuucacaaauaucug

SEQ ID NO: 108545 - RNA, 22 nt, Artificial Sequence
  Synthetic
ucauguacuucacaaauaucug

SEQ ID NO: 108546 - RNA, 23 nt, Artificial Sequence
  Synthetic
aucauguacuucacaaauaucug

SEQ ID NO: 108547 - RNA, 24 nt, Artificial Sequence
  Synthetic
uaucauguacuucacaaauaucug

SEQ ID NO: 108548 - RNA, 18 nt, Artificial Sequence
  Synthetic
uccugggcugaaacucug

SEQ ID NO: 108549 - RNA, 19 nt, Artificial Sequence
  Synthetic
auccugggcugaaacucug

SEQ ID NO: 108550 - RNA, 20 nt, Artificial Sequence
  Synthetic
aauccugggcugaaacucug

SEQ ID NO: 108551 - RNA, 21 nt, Artificial Sequence
  Synthetic
aaauccugggcugaaacucug

SEQ ID NO: 108552 - RNA, 23 nt, Artificial Sequence
  Synthetic
agaaauccugggcugaaacucug

SEQ ID NO: 108553 - RNA, 24 nt, Artificial Sequence
  Synthetic
aagaaauccugggcugaaacucug

SEQ ID NO: 108554 - RNA, 18 nt, Artificial Sequence
  Synthetic
accaggccaaauacucug

SEQ ID NO: 108555 - RNA, 19 nt, Artificial Sequence
  Synthetic
aaccaggccaaauacucug

SEQ ID NO: 108556 - RNA, 20 nt, Artificial Sequence
  Synthetic
aaaccaggccaaauacucug

SEQ ID NO: 108557 - RNA, 21 nt, Artificial Sequence
  Synthetic
aaaaccaggccaaauacucug

SEQ ID NO: 108558 - RNA, 22 nt, Artificial Sequence
  Synthetic
aaaaaccaggccaaauacucug

SEQ ID NO: 108559 - RNA, 23 nt, Artificial Sequence
  Synthetic
uaaaaaccaggccaaauacucug

SEQ ID NO: 108560 - RNA, 24 nt, Artificial Sequence
  Synthetic
auaaaaaccaggccaaauacucug

SEQ ID NO: 108561 - RNA, 19 nt, Artificial Sequence
  Synthetic
uguucucaggacuacucug

SEQ ID NO: 108562 - RNA, 20 nt, Artificial Sequence
  Synthetic
cuguucucaggacuacucug

SEQ ID NO: 108563 - RNA, 21 nt, Artificial Sequence
  Synthetic
acuguucucaggacuacucug

SEQ ID NO: 108564 - RNA, 22 nt, Artificial Sequence
  Synthetic
cacuguucucaggacuacucug

SEQ ID NO: 108565 - RNA, 23 nt, Artificial Sequence
  Synthetic
ucacuguucucaggacuacucug

SEQ ID NO: 108566 - RNA, 24 nt, Artificial Sequence
  Synthetic
cucacuguucucaggacuacucug

SEQ ID NO: 108567 - RNA, 18 nt, Artificial Sequence
  Synthetic
ccuagauuuaguccucug

SEQ ID NO: 108568 - RNA, 19 nt, Artificial Sequence
  Synthetic
cccuagauuuaguccucug

SEQ ID NO: 108569 - RNA, 21 nt, Artificial Sequence
  Synthetic
agcccuagauuuaguccucug

SEQ ID NO: 108570 - RNA, 22 nt, Artificial Sequence
  Synthetic
uagcccuagauuuaguccucug

SEQ ID NO: 108571 - RNA, 23 nt, Artificial Sequence
  Synthetic
auagcccuagauuuaguccucug

SEQ ID NO: 108572 - RNA, 24 nt, Artificial Sequence
  Synthetic
aauagcccuagauuuaguccucug

SEQ ID NO: 108573 - RNA, 18 nt, Artificial Sequence
  Synthetic
uugccucacuguccucug

SEQ ID NO: 108574 - RNA, 22 nt, Artificial Sequence
  Synthetic
uggguugccucacuguccucug

SEQ ID NO: 108575 - RNA, 23 nt, Artificial Sequence
  Synthetic
cuggguugccucacuguccucug

SEQ ID NO: 108576 - RNA, 24 nt, Artificial Sequence
  Synthetic
ucuggguugccucacuguccucug

SEQ ID NO: 108577 - RNA, 21 nt, Artificial Sequence
  Synthetic
aggguggaaugaagagcucug

SEQ ID NO: 108578 - RNA, 22 nt, Artificial Sequence
  Synthetic
uaggguggaaugaagagcucug

SEQ ID NO: 108579 - RNA, 23 nt, Artificial Sequence
  Synthetic
uuaggguggaaugaagagcucug

SEQ ID NO: 108580 - RNA, 24 nt, Artificial Sequence
  Synthetic
auuaggguggaaugaagagcucug

SEQ ID NO: 108581 - RNA, 18 nt, Artificial Sequence
  Synthetic
ucagugaaaaaugcucug

SEQ ID NO: 108582 - RNA, 19 nt, Artificial Sequence
  Synthetic
aucagugaaaaaugcucug

SEQ ID NO: 108583 - RNA, 20 nt, Artificial Sequence
  Synthetic
caucagugaaaaaugcucug

SEQ ID NO: 108584 - RNA, 21 nt, Artificial Sequence
  Synthetic
ccaucagugaaaaaugcucug

SEQ ID NO: 108585 - RNA, 23 nt, Artificial Sequence
  Synthetic
agccaucagugaaaaaugcucug

SEQ ID NO: 108586 - RNA, 24 nt, Artificial Sequence
  Synthetic
aagccaucagugaaaaaugcucug

SEQ ID NO: 108587 - RNA, 18 nt, Artificial Sequence
  Synthetic
uuucagcgacccucucug

SEQ ID NO: 108588 - RNA, 19 nt, Artificial Sequence
  Synthetic
auuucagcgacccucucug

SEQ ID NO: 108589 - RNA, 21 nt, Artificial Sequence
  Synthetic
agauuucagcgacccucucug

SEQ ID NO: 108590 - RNA, 23 nt, Artificial Sequence
  Synthetic
ugagauuucagcgacccucucug

SEQ ID NO: 108591 - RNA, 18 nt, Artificial Sequence
  Synthetic
cuuuacauauucucucug

SEQ ID NO: 108592 - RNA, 19 nt, Artificial Sequence
  Synthetic
acuuuacauauucucucug

SEQ ID NO: 108593 - RNA, 20 nt, Artificial Sequence
  Synthetic
cacuuuacauauucucucug

SEQ ID NO: 108594 - RNA, 21 nt, Artificial Sequence
  Synthetic
ucacuuuacauauucucucug

SEQ ID NO: 108595 - RNA, 22 nt, Artificial Sequence
  Synthetic
uucacuuuacauauucucucug

SEQ ID NO: 108596 - RNA, 23 nt, Artificial Sequence
  Synthetic
uuucacuuuacauauucucucug

SEQ ID NO: 108597 - RNA, 24 nt, Artificial Sequence
  Synthetic
uuuucacuuuacauauucucucug

SEQ ID NO: 108598 - RNA, 18 nt, Artificial Sequence
  Synthetic
acgauaagggagucucug

SEQ ID NO: 108599 - RNA, 20 nt, Artificial Sequence
  Synthetic
agacgauaagggagucucug

SEQ ID NO: 108600 - RNA, 22 nt, Artificial Sequence
  Synthetic
ugagacgauaagggagucucug

SEQ ID NO: 108601 - RNA, 18 nt, Artificial Sequence
  Synthetic
uguaggcagaacagucug

SEQ ID NO: 108602 - RNA, 19 nt, Artificial Sequence
  Synthetic
cuguaggcagaacagucug

SEQ ID NO: 108603 - RNA, 20 nt, Artificial Sequence
  Synthetic
ucuguaggcagaacagucug

SEQ ID NO: 108604 - RNA, 21 nt, Artificial Sequence
  Synthetic
aucuguaggcagaacagucug

SEQ ID NO: 108605 - RNA, 22 nt, Artificial Sequence
  Synthetic
uaucuguaggcagaacagucug

SEQ ID NO: 108606 - RNA, 23 nt, Artificial Sequence
  Synthetic
cuaucuguaggcagaacagucug

SEQ ID NO: 108607 - RNA, 24 nt, Artificial Sequence
  Synthetic
acuaucuguaggcagaacagucug

SEQ ID NO: 108608 - RNA, 18 nt, Artificial Sequence
  Synthetic
uuuaacaaagccagucug

SEQ ID NO: 108609 - RNA, 19 nt, Artificial Sequence
  Synthetic
uuuuaacaaagccagucug

SEQ ID NO: 108610 - RNA, 20 nt, Artificial Sequence
  Synthetic
uuuuuaacaaagccagucug

SEQ ID NO: 108611 - RNA, 19 nt, Artificial Sequence
  Synthetic
agccaggugaaggagucug

SEQ ID NO: 108612 - RNA, 21 nt, Artificial Sequence
  Synthetic
agagccaggugaaggagucug

SEQ ID NO: 108613 - RNA, 24 nt, Artificial Sequence
  Synthetic
uggagagccaggugaaggagucug

SEQ ID NO: 108614 - RNA, 18 nt, Artificial Sequence
  Synthetic
aauugcauuucuagucug

SEQ ID NO: 108615 - RNA, 19 nt, Artificial Sequence
  Synthetic
aaauugcauuucuagucug

SEQ ID NO: 108616 - RNA, 21 nt, Artificial Sequence
  Synthetic
agaaauugcauuucuagucug

SEQ ID NO: 108617 - RNA, 22 nt, Artificial Sequence
  Synthetic
cagaaauugcauuucuagucug

SEQ ID NO: 108618 - RNA, 24 nt, Artificial Sequence
  Synthetic
agcagaaauugcauuucuagucug

SEQ ID NO: 108619 - RNA, 21 nt, Artificial Sequence
  Synthetic
uggggcuuuuucuguagucug

SEQ ID NO: 108620 - RNA, 22 nt, Artificial Sequence
  Synthetic
uuggggcuuuuucuguagucug

SEQ ID NO: 108621 - RNA, 23 nt, Artificial Sequence
  Synthetic
cuuggggcuuuuucuguagucug

SEQ ID NO: 108622 - RNA, 18 nt, Artificial Sequence
  Synthetic
ccccuccccccaggucug

SEQ ID NO: 108623 - RNA, 19 nt, Artificial Sequence
  Synthetic
cccccuccccccaggucug

SEQ ID NO: 108624 - RNA, 20 nt, Artificial Sequence
  Synthetic
ucccccuccccccaggucug

SEQ ID NO: 108625 - RNA, 21 nt, Artificial Sequence
  Synthetic
aucccccuccccccaggucug

SEQ ID NO: 108626 - RNA, 22 nt, Artificial Sequence
  Synthetic
caucccccuccccccaggucug

SEQ ID NO: 108627 - RNA, 23 nt, Artificial Sequence
  Synthetic
acaucccccuccccccaggucug

SEQ ID NO: 108628 - RNA, 24 nt, Artificial Sequence
  Synthetic
uacaucccccuccccccaggucug

SEQ ID NO: 108629 - RNA, 18 nt, Artificial Sequence
  Synthetic
aguguauuaaauggucug

SEQ ID NO: 108630 - RNA, 20 nt, Artificial Sequence
  Synthetic
agaguguauuaaauggucug

SEQ ID NO: 108631 - RNA, 21 nt, Artificial Sequence
  Synthetic
cagaguguauuaaauggucug

SEQ ID NO: 108632 - RNA, 18 nt, Artificial Sequence
  Synthetic
cuuucgacuucuggucug

SEQ ID NO: 108633 - RNA, 19 nt, Artificial Sequence
  Synthetic
ccuuucgacuucuggucug

SEQ ID NO: 108634 - RNA, 20 nt, Artificial Sequence
  Synthetic
cccuuucgacuucuggucug

SEQ ID NO: 108635 - RNA, 22 nt, Artificial Sequence
  Synthetic
agcccuuucgacuucuggucug

SEQ ID NO: 108636 - RNA, 23 nt, Artificial Sequence
  Synthetic
aagcccuuucgacuucuggucug

SEQ ID NO: 108637 - RNA, 21 nt, Artificial Sequence
  Synthetic
uaugguccccaaauaugucug

SEQ ID NO: 108638 - RNA, 22 nt, Artificial Sequence
  Synthetic
cuaugguccccaaauaugucug

SEQ ID NO: 108639 - RNA, 23 nt, Artificial Sequence
  Synthetic
acuaugguccccaaauaugucug

SEQ ID NO: 108640 - RNA, 18 nt, Artificial Sequence
  Synthetic
agaggucaaaagugucug

SEQ ID NO: 108641 - RNA, 19 nt, Artificial Sequence
  Synthetic
aagaggucaaaagugucug

SEQ ID NO: 108642 - RNA, 22 nt, Artificial Sequence
  Synthetic
aggaagaggucaaaagugucug

SEQ ID NO: 108643 - RNA, 23 nt, Artificial Sequence
  Synthetic
caggaagaggucaaaagugucug

SEQ ID NO: 108644 - RNA, 24 nt, Artificial Sequence
  Synthetic
acaggaagaggucaaaagugucug

SEQ ID NO: 108645 - RNA, 18 nt, Artificial Sequence
  Synthetic
uaaauguacuaaauucug

SEQ ID NO: 108646 - RNA, 19 nt, Artificial Sequence
  Synthetic
uuaaauguacuaaauucug

SEQ ID NO: 108647 - RNA, 20 nt, Artificial Sequence
  Synthetic
cuuaaauguacuaaauucug

SEQ ID NO: 108648 - RNA, 21 nt, Artificial Sequence
  Synthetic
ucuuaaauguacuaaauucug

SEQ ID NO: 108649 - RNA, 22 nt, Artificial Sequence
  Synthetic
cucuuaaauguacuaaauucug

SEQ ID NO: 108650 - RNA, 23 nt, Artificial Sequence
  Synthetic
ucucuuaaauguacuaaauucug

SEQ ID NO: 108651 - RNA, 18 nt, Artificial Sequence
  Synthetic
cggauuaacuucauucug

SEQ ID NO: 108652 - RNA, 19 nt, Artificial Sequence
  Synthetic
acggauuaacuucauucug

SEQ ID NO: 108653 - RNA, 24 nt, Artificial Sequence
  Synthetic
uggggacggauuaacuucauucug

SEQ ID NO: 108654 - RNA, 19 nt, Artificial Sequence
  Synthetic
agaccaggccuucauucug

SEQ ID NO: 108655 - RNA, 21 nt, Artificial Sequence
  Synthetic
ugagaccaggccuucauucug

SEQ ID NO: 108656 - RNA, 22 nt, Artificial Sequence
  Synthetic
augagaccaggccuucauucug

SEQ ID NO: 108657 - RNA, 23 nt, Artificial Sequence
  Synthetic
caugagaccaggccuucauucug

SEQ ID NO: 108658 - RNA, 18 nt, Artificial Sequence
  Synthetic
caaaugaagccgauucug

SEQ ID NO: 108659 - RNA, 19 nt, Artificial Sequence
  Synthetic
acaaaugaagccgauucug

SEQ ID NO: 108660 - RNA, 20 nt, Artificial Sequence
  Synthetic
cacaaaugaagccgauucug

SEQ ID NO: 108661 - RNA, 23 nt, Artificial Sequence
  Synthetic
uggcacaaaugaagccgauucug

SEQ ID NO: 108662 - RNA, 24 nt, Artificial Sequence
  Synthetic
auggcacaaaugaagccgauucug

SEQ ID NO: 108663 - RNA, 18 nt, Artificial Sequence
  Synthetic
cguuuccuagcacuucug

SEQ ID NO: 108664 - RNA, 19 nt, Artificial Sequence
  Synthetic
ucguuuccuagcacuucug

SEQ ID NO: 108665 - RNA, 20 nt, Artificial Sequence
  Synthetic
uucguuuccuagcacuucug

SEQ ID NO: 108666 - RNA, 21 nt, Artificial Sequence
  Synthetic
cuucguuuccuagcacuucug

SEQ ID NO: 108667 - RNA, 22 nt, Artificial Sequence
  Synthetic
ucuucguuuccuagcacuucug

SEQ ID NO: 108668 - RNA, 23 nt, Artificial Sequence
  Synthetic
uucuucguuuccuagcacuucug

SEQ ID NO: 108669 - RNA, 24 nt, Artificial Sequence
  Synthetic
uuucuucguuuccuagcacuucug

SEQ ID NO: 108670 - RNA, 18 nt, Artificial Sequence
  Synthetic
cugcuuguuucacuucug

SEQ ID NO: 108671 - RNA, 20 nt, Artificial Sequence
  Synthetic
ugcugcuuguuucacuucug

SEQ ID NO: 108672 - RNA, 22 nt, Artificial Sequence
  Synthetic
agugcugcuuguuucacuucug

SEQ ID NO: 108673 - RNA, 23 nt, Artificial Sequence
  Synthetic
uagugcugcuuguuucacuucug

SEQ ID NO: 108674 - RNA, 24 nt, Artificial Sequence
  Synthetic
uuagugcugcuuguuucacuucug

SEQ ID NO: 108675 - RNA, 18 nt, Artificial Sequence
  Synthetic
uggaaagacuuccuucug

SEQ ID NO: 108676 - RNA, 19 nt, Artificial Sequence
  Synthetic
auggaaagacuuccuucug

SEQ ID NO: 108677 - RNA, 20 nt, Artificial Sequence
  Synthetic
cauggaaagacuuccuucug

SEQ ID NO: 108678 - RNA, 21 nt, Artificial Sequence
  Synthetic
ucauggaaagacuuccuucug

SEQ ID NO: 108679 - RNA, 22 nt, Artificial Sequence
  Synthetic
uucauggaaagacuuccuucug

SEQ ID NO: 108680 - RNA, 23 nt, Artificial Sequence
  Synthetic
cuucauggaaagacuuccuucug

SEQ ID NO: 108681 - RNA, 24 nt, Artificial Sequence
  Synthetic
ccuucauggaaagacuuccuucug

SEQ ID NO: 108682 - RNA, 18 nt, Artificial Sequence
  Synthetic
cuuccaaauuuccuucug

SEQ ID NO: 108683 - RNA, 19 nt, Artificial Sequence
  Synthetic
ucuuccaaauuuccuucug

SEQ ID NO: 108684 - RNA, 20 nt, Artificial Sequence
  Synthetic
aucuuccaaauuuccuucug

SEQ ID NO: 108685 - RNA, 21 nt, Artificial Sequence
  Synthetic
uaucuuccaaauuuccuucug

SEQ ID NO: 108686 - RNA, 22 nt, Artificial Sequence
  Synthetic
auaucuuccaaauuuccuucug

SEQ ID NO: 108687 - RNA, 24 nt, Artificial Sequence
  Synthetic
ugauaucuuccaaauuuccuucug

SEQ ID NO: 108688 - RNA, 18 nt, Artificial Sequence
  Synthetic
ugaugaacccaucuucug

SEQ ID NO: 108689 - RNA, 19 nt, Artificial Sequence
  Synthetic
augaugaacccaucuucug

SEQ ID NO: 108690 - RNA, 21 nt, Artificial Sequence
  Synthetic
cgaugaugaacccaucuucug

SEQ ID NO: 108691 - RNA, 22 nt, Artificial Sequence
  Synthetic
acgaugaugaacccaucuucug

SEQ ID NO: 108692 - RNA, 23 nt, Artificial Sequence
  Synthetic
cacgaugaugaacccaucuucug

SEQ ID NO: 108693 - RNA, 24 nt, Artificial Sequence
  Synthetic
acacgaugaugaacccaucuucug

SEQ ID NO: 108694 - RNA, 18 nt, Artificial Sequence
  Synthetic
agaugcauaguucuucug

SEQ ID NO: 108695 - RNA, 19 nt, Artificial Sequence
  Synthetic
cagaugcauaguucuucug

SEQ ID NO: 108696 - RNA, 20 nt, Artificial Sequence
  Synthetic
ccagaugcauaguucuucug

SEQ ID NO: 108697 - RNA, 21 nt, Artificial Sequence
  Synthetic
uccagaugcauaguucuucug

SEQ ID NO: 108698 - RNA, 22 nt, Artificial Sequence
  Synthetic
cuccagaugcauaguucuucug

SEQ ID NO: 108699 - RNA, 23 nt, Artificial Sequence
  Synthetic
ccuccagaugcauaguucuucug

SEQ ID NO: 108700 - RNA, 24 nt, Artificial Sequence
  Synthetic
uccuccagaugcauaguucuucug

SEQ ID NO: 108701 - RNA, 21 nt, Artificial Sequence
  Synthetic
uagagcaaauucuuucuucug

SEQ ID NO: 108702 - RNA, 23 nt, Artificial Sequence
  Synthetic
aguagagcaaauucuuucuucug

SEQ ID NO: 108703 - RNA, 24 nt, Artificial Sequence
  Synthetic
aaguagagcaaauucuuucuucug

SEQ ID NO: 108704 - RNA, 19 nt, Artificial Sequence
  Synthetic
aggcuuuaaguagguucug

SEQ ID NO: 108705 - RNA, 20 nt, Artificial Sequence
  Synthetic
caggcuuuaaguagguucug

SEQ ID NO: 108706 - RNA, 22 nt, Artificial Sequence
  Synthetic
ugcaggcuuuaaguagguucug

SEQ ID NO: 108707 - RNA, 23 nt, Artificial Sequence
  Synthetic
cugcaggcuuuaaguagguucug

SEQ ID NO: 108708 - RNA, 24 nt, Artificial Sequence
  Synthetic
acugcaggcuuuaaguagguucug

SEQ ID NO: 108709 - RNA, 18 nt, Artificial Sequence
  Synthetic
cauuugagugugguucug

SEQ ID NO: 108710 - RNA, 19 nt, Artificial Sequence
  Synthetic
ucauuugagugugguucug

SEQ ID NO: 108711 - RNA, 20 nt, Artificial Sequence
  Synthetic
uucauuugagugugguucug

SEQ ID NO: 108712 - RNA, 21 nt, Artificial Sequence
  Synthetic
auucauuugagugugguucug

SEQ ID NO: 108713 - RNA, 22 nt, Artificial Sequence
  Synthetic
cauucauuugagugugguucug

SEQ ID NO: 108714 - RNA, 23 nt, Artificial Sequence
  Synthetic
acauucauuugagugugguucug

SEQ ID NO: 108715 - RNA, 24 nt, Artificial Sequence
  Synthetic
aacauucauuugagugugguucug

SEQ ID NO: 108716 - RNA, 19 nt, Artificial Sequence
  Synthetic
ugugcuauucaaauuucug

SEQ ID NO: 108717 - RNA, 21 nt, Artificial Sequence
  Synthetic
ugugugcuauucaaauuucug

SEQ ID NO: 108718 - RNA, 22 nt, Artificial Sequence
  Synthetic
cugugugcuauucaaauuucug

SEQ ID NO: 108719 - RNA, 23 nt, Artificial Sequence
  Synthetic
acugugugcuauucaaauuucug

SEQ ID NO: 108720 - RNA, 24 nt, Artificial Sequence
  Synthetic
uacugugugcuauucaaauuucug

SEQ ID NO: 108721 - RNA, 18 nt, Artificial Sequence
  Synthetic
uagucuuucuaauuucug

SEQ ID NO: 108722 - RNA, 19 nt, Artificial Sequence
  Synthetic
cuagucuuucuaauuucug

SEQ ID NO: 108723 - RNA, 20 nt, Artificial Sequence
  Synthetic
ucuagucuuucuaauuucug

SEQ ID NO: 108724 - RNA, 21 nt, Artificial Sequence
  Synthetic
uucuagucuuucuaauuucug

SEQ ID NO: 108725 - RNA, 22 nt, Artificial Sequence
  Synthetic
auucuagucuuucuaauuucug

SEQ ID NO: 108726 - RNA, 23 nt, Artificial Sequence
  Synthetic
cauucuagucuuucuaauuucug

SEQ ID NO: 108727 - RNA, 24 nt, Artificial Sequence
  Synthetic
acauucuagucuuucuaauuucug

SEQ ID NO: 108728 - RNA, 19 nt, Artificial Sequence
  Synthetic
uguucuuuguuaauuucug

SEQ ID NO: 108729 - RNA, 21 nt, Artificial Sequence
  Synthetic
uguguucuuuguuaauuucug

SEQ ID NO: 108730 - RNA, 22 nt, Artificial Sequence
  Synthetic
auguguucuuuguuaauuucug

SEQ ID NO: 108731 - RNA, 23 nt, Artificial Sequence
  Synthetic
aauguguucuuuguuaauuucug

SEQ ID NO: 108732 - RNA, 24 nt, Artificial Sequence
  Synthetic
caauguguucuuuguuaauuucug

SEQ ID NO: 108733 - RNA, 21 nt, Artificial Sequence
  Synthetic
auaugaacauaugcauuucug

SEQ ID NO: 108734 - RNA, 22 nt, Artificial Sequence
  Synthetic
aauaugaacauaugcauuucug

SEQ ID NO: 108735 - RNA, 18 nt, Artificial Sequence
  Synthetic
uucucuccuauauuucug

SEQ ID NO: 108736 - RNA, 19 nt, Artificial Sequence
  Synthetic
cuucucuccuauauuucug

SEQ ID NO: 108737 - RNA, 20 nt, Artificial Sequence
  Synthetic
acuucucuccuauauuucug

SEQ ID NO: 108738 - RNA, 21 nt, Artificial Sequence
  Synthetic
uacuucucuccuauauuucug

SEQ ID NO: 108739 - RNA, 22 nt, Artificial Sequence
  Synthetic
uuacuucucuccuauauuucug

SEQ ID NO: 108740 - RNA, 23 nt, Artificial Sequence
  Synthetic
auuacuucucuccuauauuucug

SEQ ID NO: 108741 - RNA, 24 nt, Artificial Sequence
  Synthetic
aauuacuucucuccuauauuucug

SEQ ID NO: 108742 - RNA, 18 nt, Artificial Sequence
  Synthetic
uguaauagccacuuucug

SEQ ID NO: 108743 - RNA, 19 nt, Artificial Sequence
  Synthetic
uuguaauagccacuuucug

SEQ ID NO: 108744 - RNA, 20 nt, Artificial Sequence
  Synthetic
auuguaauagccacuuucug

SEQ ID NO: 108745 - RNA, 21 nt, Artificial Sequence
  Synthetic
uauuguaauagccacuuucug

SEQ ID NO: 108746 - RNA, 22 nt, Artificial Sequence
  Synthetic
cuauuguaauagccacuuucug

SEQ ID NO: 108747 - RNA, 23 nt, Artificial Sequence
  Synthetic
acuauuguaauagccacuuucug

SEQ ID NO: 108748 - RNA, 24 nt, Artificial Sequence
  Synthetic
aacuauuguaauagccacuuucug

SEQ ID NO: 108749 - RNA, 19 nt, Artificial Sequence
  Synthetic
ugagagauaaggcuuucug

SEQ ID NO: 108750 - RNA, 20 nt, Artificial Sequence
  Synthetic
augagagauaaggcuuucug

SEQ ID NO: 108751 - RNA, 21 nt, Artificial Sequence
  Synthetic
aaugagagauaaggcuuucug

SEQ ID NO: 108752 - RNA, 22 nt, Artificial Sequence
  Synthetic
aaaugagagauaaggcuuucug

SEQ ID NO: 108753 - RNA, 24 nt, Artificial Sequence
  Synthetic
ugaaaugagagauaaggcuuucug

SEQ ID NO: 108754 - RNA, 21 nt, Artificial Sequence
  Synthetic
accuaauguauauauuuucug

SEQ ID NO: 108755 - RNA, 22 nt, Artificial Sequence
  Synthetic
caccuaauguauauauuuucug

SEQ ID NO: 108756 - RNA, 23 nt, Artificial Sequence
  Synthetic
acaccuaauguauauauuuucug

SEQ ID NO: 108757 - RNA, 24 nt, Artificial Sequence
  Synthetic
aacaccuaauguauauauuuucug

SEQ ID NO: 108758 - RNA, 19 nt, Artificial Sequence
  Synthetic
uggcucuacuauuuuucug

SEQ ID NO: 108759 - RNA, 21 nt, Artificial Sequence
  Synthetic
aguggcucuacuauuuuucug

SEQ ID NO: 108760 - RNA, 22 nt, Artificial Sequence
  Synthetic
caguggcucuacuauuuuucug

SEQ ID NO: 108761 - RNA, 23 nt, Artificial Sequence
  Synthetic
ccaguggcucuacuauuuuucug

SEQ ID NO: 108762 - RNA, 24 nt, Artificial Sequence
  Synthetic
uccaguggcucuacuauuuuucug

SEQ ID NO: 108763 - RNA, 18 nt, Artificial Sequence
  Synthetic
aaagugaauaacaaagug

SEQ ID NO: 108764 - RNA, 19 nt, Artificial Sequence
  Synthetic
caaagugaauaacaaagug

SEQ ID NO: 108765 - RNA, 20 nt, Artificial Sequence
  Synthetic
ucaaagugaauaacaaagug

SEQ ID NO: 108766 - RNA, 21 nt, Artificial Sequence
  Synthetic
aucaaagugaauaacaaagug

SEQ ID NO: 108767 - RNA, 22 nt, Artificial Sequence
  Synthetic
aaucaaagugaauaacaaagug

SEQ ID NO: 108768 - RNA, 23 nt, Artificial Sequence
  Synthetic
uaaucaaagugaauaacaaagug

SEQ ID NO: 108769 - RNA, 24 nt, Artificial Sequence
  Synthetic
auaaucaaagugaauaacaaagug

SEQ ID NO: 108770 - RNA, 18 nt, Artificial Sequence
  Synthetic
cugaguguuagcaaagug

SEQ ID NO: 108771 - RNA, 19 nt, Artificial Sequence
  Synthetic
ccugaguguuagcaaagug

SEQ ID NO: 108772 - RNA, 20 nt, Artificial Sequence
  Synthetic
uccugaguguuagcaaagug

SEQ ID NO: 108773 - RNA, 21 nt, Artificial Sequence
  Synthetic
uuccugaguguuagcaaagug

SEQ ID NO: 108774 - RNA, 22 nt, Artificial Sequence
  Synthetic
cuuccugaguguuagcaaagug

SEQ ID NO: 108775 - RNA, 23 nt, Artificial Sequence
  Synthetic
ccuuccugaguguuagcaaagug

SEQ ID NO: 108776 - RNA, 24 nt, Artificial Sequence
  Synthetic
cccuuccugaguguuagcaaagug

SEQ ID NO: 108777 - RNA, 19 nt, Artificial Sequence
  Synthetic
aggagggagagucaaagug

SEQ ID NO: 108778 - RNA, 21 nt, Artificial Sequence
  Synthetic
agggaaacgacaaagaaagug

SEQ ID NO: 108779 - RNA, 22 nt, Artificial Sequence
  Synthetic
uagggaaacgacaaagaaagug

SEQ ID NO: 108780 - RNA, 24 nt, Artificial Sequence
  Synthetic
aguagggaaacgacaaagaaagug

SEQ ID NO: 108781 - RNA, 21 nt, Artificial Sequence
  Synthetic
uaugagaaaacaaggaaagug

SEQ ID NO: 108782 - RNA, 22 nt, Artificial Sequence
  Synthetic
auaugagaaaacaaggaaagug

SEQ ID NO: 108783 - RNA, 23 nt, Artificial Sequence
  Synthetic
cauaugagaaaacaaggaaagug

SEQ ID NO: 108784 - RNA, 24 nt, Artificial Sequence
  Synthetic
acauaugagaaaacaaggaaagug

SEQ ID NO: 108785 - RNA, 18 nt, Artificial Sequence
  Synthetic
cuaaauuucaauaaagug

SEQ ID NO: 108786 - RNA, 19 nt, Artificial Sequence
  Synthetic
acuaaauuucaauaaagug

SEQ ID NO: 108787 - RNA, 20 nt, Artificial Sequence
  Synthetic
cacuaaauuucaauaaagug

SEQ ID NO: 108788 - RNA, 21 nt, Artificial Sequence
  Synthetic
acacuaaauuucaauaaagug

SEQ ID NO: 108789 - RNA, 22 nt, Artificial Sequence
  Synthetic
cacacuaaauuucaauaaagug

SEQ ID NO: 108790 - RNA, 23 nt, Artificial Sequence
  Synthetic
ucacacuaaauuucaauaaagug

SEQ ID NO: 108791 - RNA, 18 nt, Artificial Sequence
  Synthetic
caagucggcccuaaagug

SEQ ID NO: 108792 - RNA, 19 nt, Artificial Sequence
  Synthetic
ucaagucggcccuaaagug

SEQ ID NO: 108793 - RNA, 20 nt, Artificial Sequence
  Synthetic
uucaagucggcccuaaagug

SEQ ID NO: 108794 - RNA, 22 nt, Artificial Sequence
  Synthetic
uguucaagucggcccuaaagug

SEQ ID NO: 108795 - RNA, 23 nt, Artificial Sequence
  Synthetic
auguucaagucggcccuaaagug

SEQ ID NO: 108796 - RNA, 24 nt, Artificial Sequence
  Synthetic
cauguucaagucggcccuaaagug

SEQ ID NO: 108797 - RNA, 20 nt, Artificial Sequence
  Synthetic
uggcagaacgauguaaagug

SEQ ID NO: 108798 - RNA, 21 nt, Artificial Sequence
  Synthetic
auggcagaacgauguaaagug

SEQ ID NO: 108799 - RNA, 22 nt, Artificial Sequence
  Synthetic
uauggcagaacgauguaaagug

SEQ ID NO: 108800 - RNA, 23 nt, Artificial Sequence
  Synthetic
auauggcagaacgauguaaagug

SEQ ID NO: 108801 - RNA, 24 nt, Artificial Sequence
  Synthetic
cauauggcagaacgauguaaagug

SEQ ID NO: 108802 - RNA, 18 nt, Artificial Sequence
  Synthetic
cuaccuauuauuaaagug

SEQ ID NO: 108803 - RNA, 20 nt, Artificial Sequence
  Synthetic
ugcuaccuauuauuaaagug

SEQ ID NO: 108804 - RNA, 21 nt, Artificial Sequence
  Synthetic
augcuaccuauuauuaaagug

SEQ ID NO: 108805 - RNA, 22 nt, Artificial Sequence
  Synthetic
aaugcuaccuauuauuaaagug

SEQ ID NO: 108806 - RNA, 23 nt, Artificial Sequence
  Synthetic
uaaugcuaccuauuauuaaagug

SEQ ID NO: 108807 - RNA, 24 nt, Artificial Sequence
  Synthetic
auaaugcuaccuauuauuaaagug

SEQ ID NO: 108808 - RNA, 18 nt, Artificial Sequence
  Synthetic
acuuuacaaaaacaagug

SEQ ID NO: 108809 - RNA, 19 nt, Artificial Sequence
  Synthetic
uacuuuacaaaaacaagug

SEQ ID NO: 108810 - RNA, 20 nt, Artificial Sequence
  Synthetic
cuacuuuacaaaaacaagug

SEQ ID NO: 108811 - RNA, 21 nt, Artificial Sequence
  Synthetic
acuacuuuacaaaaacaagug

SEQ ID NO: 108812 - RNA, 22 nt, Artificial Sequence
  Synthetic
uacuacuuuacaaaaacaagug

SEQ ID NO: 108813 - RNA, 23 nt, Artificial Sequence
  Synthetic
auacuacuuuacaaaaacaagug

SEQ ID NO: 108814 - RNA, 24 nt, Artificial Sequence
  Synthetic
aauacuacuuuacaaaaacaagug

SEQ ID NO: 108815 - RNA, 19 nt, Artificial Sequence
  Synthetic
agaauucaauuaccaagug

SEQ ID NO: 108816 - RNA, 20 nt, Artificial Sequence
  Synthetic
cagaauucaauuaccaagug

SEQ ID NO: 108817 - RNA, 21 nt, Artificial Sequence
  Synthetic
acagaauucaauuaccaagug

SEQ ID NO: 108818 - RNA, 22 nt, Artificial Sequence
  Synthetic
cacagaauucaauuaccaagug

SEQ ID NO: 108819 - RNA, 23 nt, Artificial Sequence
  Synthetic
acacagaauucaauuaccaagug

SEQ ID NO: 108820 - RNA, 24 nt, Artificial Sequence
  Synthetic
aacacagaauucaauuaccaagug

SEQ ID NO: 108821 - RNA, 21 nt, Artificial Sequence
  Synthetic
aagaagaggaaaaugcaagug

SEQ ID NO: 108822 - RNA, 22 nt, Artificial Sequence
  Synthetic
caagaagaggaaaaugcaagug

SEQ ID NO: 108823 - RNA, 23 nt, Artificial Sequence
  Synthetic
ccaagaagaggaaaaugcaagug

SEQ ID NO: 108824 - RNA, 24 nt, Artificial Sequence
  Synthetic
uccaagaagaggaaaaugcaagug

SEQ ID NO: 108825 - RNA, 18 nt, Artificial Sequence
  Synthetic
acaugacaucgagaagug

SEQ ID NO: 108826 - RNA, 19 nt, Artificial Sequence
  Synthetic
cacaugacaucgagaagug

SEQ ID NO: 108827 - RNA, 21 nt, Artificial Sequence
  Synthetic
ugcacaugacaucgagaagug

SEQ ID NO: 108828 - RNA, 22 nt, Artificial Sequence
  Synthetic
uugcacaugacaucgagaagug

SEQ ID NO: 108829 - RNA, 23 nt, Artificial Sequence
  Synthetic
auugcacaugacaucgagaagug

SEQ ID NO: 108830 - RNA, 24 nt, Artificial Sequence
  Synthetic
uauugcacaugacaucgagaagug

SEQ ID NO: 108831 - RNA, 19 nt, Artificial Sequence
  Synthetic
agauguagacguagaagug

SEQ ID NO: 108832 - RNA, 20 nt, Artificial Sequence
  Synthetic
aagauguagacguagaagug

SEQ ID NO: 108833 - RNA, 21 nt, Artificial Sequence
  Synthetic
caagauguagacguagaagug

SEQ ID NO: 108834 - RNA, 22 nt, Artificial Sequence
  Synthetic
ccaagauguagacguagaagug

SEQ ID NO: 108835 - RNA, 23 nt, Artificial Sequence
  Synthetic
uccaagauguagacguagaagug

SEQ ID NO: 108836 - RNA, 24 nt, Artificial Sequence
  Synthetic
auccaagauguagacguagaagug

SEQ ID NO: 108837 - RNA, 18 nt, Artificial Sequence
  Synthetic
acgcaguguaaggaagug

SEQ ID NO: 108838 - RNA, 19 nt, Artificial Sequence
  Synthetic
aacgcaguguaaggaagug

SEQ ID NO: 108839 - RNA, 20 nt, Artificial Sequence
  Synthetic
aaacgcaguguaaggaagug

SEQ ID NO: 108840 - RNA, 21 nt, Artificial Sequence
  Synthetic
aaaacgcaguguaaggaagug

SEQ ID NO: 108841 - RNA, 22 nt, Artificial Sequence
  Synthetic
uaaaacgcaguguaaggaagug

SEQ ID NO: 108842 - RNA, 23 nt, Artificial Sequence
  Synthetic
uuaaaacgcaguguaaggaagug

SEQ ID NO: 108843 - RNA, 24 nt, Artificial Sequence
  Synthetic
cuuaaaacgcaguguaaggaagug

SEQ ID NO: 108844 - RNA, 18 nt, Artificial Sequence
  Synthetic
auaaugggaaaugaagug

SEQ ID NO: 108845 - RNA, 19 nt, Artificial Sequence
  Synthetic
uauaaugggaaaugaagug

SEQ ID NO: 108846 - RNA, 20 nt, Artificial Sequence
  Synthetic
auauaaugggaaaugaagug

SEQ ID NO: 108847 - RNA, 21 nt, Artificial Sequence
  Synthetic
uauauaaugggaaaugaagug

SEQ ID NO: 108848 - RNA, 22 nt, Artificial Sequence
  Synthetic
auauauaaugggaaaugaagug

SEQ ID NO: 108849 - RNA, 23 nt, Artificial Sequence
  Synthetic
cauauauaaugggaaaugaagug

SEQ ID NO: 108850 - RNA, 24 nt, Artificial Sequence
  Synthetic
ucauauauaaugggaaaugaagug

SEQ ID NO: 108851 - RNA, 18 nt, Artificial Sequence
  Synthetic
aagcacuuuaaugaagug

SEQ ID NO: 108852 - RNA, 20 nt, Artificial Sequence
  Synthetic
ugaagcacuuuaaugaagug

SEQ ID NO: 108853 - RNA, 22 nt, Artificial Sequence
  Synthetic
agugaagcacuuuaaugaagug

SEQ ID NO: 108854 - RNA, 23 nt, Artificial Sequence
  Synthetic
aagugaagcacuuuaaugaagug

SEQ ID NO: 108855 - RNA, 21 nt, Artificial Sequence
  Synthetic
caaaaaagaauuaaauaagug

SEQ ID NO: 108856 - RNA, 23 nt, Artificial Sequence
  Synthetic
ugcaaaaaagaauuaaauaagug

SEQ ID NO: 108857 - RNA, 20 nt, Artificial Sequence
  Synthetic
aggugaauaaugguuaagug

SEQ ID NO: 108858 - RNA, 21 nt, Artificial Sequence
  Synthetic
aaggugaauaaugguuaagug

SEQ ID NO: 108859 - RNA, 22 nt, Artificial Sequence
  Synthetic
aaaggugaauaaugguuaagug

SEQ ID NO: 108860 - RNA, 18 nt, Artificial Sequence
  Synthetic
acagaguuccucacagug

SEQ ID NO: 108861 - RNA, 19 nt, Artificial Sequence
  Synthetic
cacagaguuccucacagug

SEQ ID NO: 108862 - RNA, 21 nt, Artificial Sequence
  Synthetic
ugcacagaguuccucacagug

SEQ ID NO: 108863 - RNA, 23 nt, Artificial Sequence
  Synthetic
ugugcacagaguuccucacagug

SEQ ID NO: 108864 - RNA, 24 nt, Artificial Sequence
  Synthetic
augugcacagaguuccucacagug

SEQ ID NO: 108865 - RNA, 21 nt, Artificial Sequence
  Synthetic
accauguauguuauuccagug

SEQ ID NO: 108866 - RNA, 22 nt, Artificial Sequence
  Synthetic
uaccauguauguuauuccagug

SEQ ID NO: 108867 - RNA, 23 nt, Artificial Sequence
  Synthetic
auaccauguauguuauuccagug

SEQ ID NO: 108868 - RNA, 24 nt, Artificial Sequence
  Synthetic
cauaccauguauguuauuccagug

SEQ ID NO: 108869 - RNA, 18 nt, Artificial Sequence
  Synthetic
cuuccaagguuagcagug

SEQ ID NO: 108870 - RNA, 20 nt, Artificial Sequence
  Synthetic
ugcuuccaagguuagcagug

SEQ ID NO: 108871 - RNA, 21 nt, Artificial Sequence
  Synthetic
augcuuccaagguuagcagug

SEQ ID NO: 108872 - RNA, 22 nt, Artificial Sequence
  Synthetic
aaugcuuccaagguuagcagug

SEQ ID NO: 108873 - RNA, 18 nt, Artificial Sequence
  Synthetic
acuucaagaaaggcagug

SEQ ID NO: 108874 - RNA, 19 nt, Artificial Sequence
  Synthetic
aacuucaagaaaggcagug

SEQ ID NO: 108875 - RNA, 22 nt, Artificial Sequence
  Synthetic
aggaacuucaagaaaggcagug

SEQ ID NO: 108876 - RNA, 23 nt, Artificial Sequence
  Synthetic
aaggaacuucaagaaaggcagug

SEQ ID NO: 108877 - RNA, 24 nt, Artificial Sequence
  Synthetic
aaaggaacuucaagaaaggcagug

SEQ ID NO: 108878 - RNA, 18 nt, Artificial Sequence
  Synthetic
acagcagggacggcagug

SEQ ID NO: 108879 - RNA, 20 nt, Artificial Sequence
  Synthetic
agacagcagggacggcagug

SEQ ID NO: 108880 - RNA, 21 nt, Artificial Sequence
  Synthetic
uagacagcagggacggcagug

SEQ ID NO: 108881 - RNA, 22 nt, Artificial Sequence
  Synthetic
auagacagcagggacggcagug

SEQ ID NO: 108882 - RNA, 23 nt, Artificial Sequence
  Synthetic
aauagacagcagggacggcagug

SEQ ID NO: 108883 - RNA, 24 nt, Artificial Sequence
  Synthetic
aaauagacagcagggacggcagug

SEQ ID NO: 108884 - RNA, 18 nt, Artificial Sequence
  Synthetic
ugaucaaaagcugcagug

SEQ ID NO: 108885 - RNA, 21 nt, Artificial Sequence
  Synthetic
uggugaucaaaagcugcagug

SEQ ID NO: 108886 - RNA, 24 nt, Artificial Sequence
  Synthetic
ugguggugaucaaaagcugcagug

SEQ ID NO: 108887 - RNA, 18 nt, Artificial Sequence
  Synthetic
aauaucucuuucucagug

SEQ ID NO: 108888 - RNA, 20 nt, Artificial Sequence
  Synthetic
ugaauaucucuuucucagug

SEQ ID NO: 108889 - RNA, 21 nt, Artificial Sequence
  Synthetic
cugaauaucucuuucucagug

SEQ ID NO: 108890 - RNA, 22 nt, Artificial Sequence
  Synthetic
acugaauaucucuuucucagug

SEQ ID NO: 108891 - RNA, 23 nt, Artificial Sequence
  Synthetic
uacugaauaucucuuucucagug

SEQ ID NO: 108892 - RNA, 24 nt, Artificial Sequence
  Synthetic
auacugaauaucucuuucucagug

SEQ ID NO: 108893 - RNA, 19 nt, Artificial Sequence
  Synthetic
ugguucuaugaauucagug

SEQ ID NO: 108894 - RNA, 21 nt, Artificial Sequence
  Synthetic
ugugguucuaugaauucagug

SEQ ID NO: 108895 - RNA, 22 nt, Artificial Sequence
  Synthetic
cugugguucuaugaauucagug

SEQ ID NO: 108896 - RNA, 23 nt, Artificial Sequence
  Synthetic
acugugguucuaugaauucagug

SEQ ID NO: 108897 - RNA, 24 nt, Artificial Sequence
  Synthetic
uacugugguucuaugaauucagug

SEQ ID NO: 108898 - RNA, 18 nt, Artificial Sequence
  Synthetic
caaaucaagaaaagagug

SEQ ID NO: 108899 - RNA, 19 nt, Artificial Sequence
  Synthetic
ucaaaucaagaaaagagug

SEQ ID NO: 108900 - RNA, 21 nt, Artificial Sequence
  Synthetic
agucaaaucaagaaaagagug

SEQ ID NO: 108901 - RNA, 23 nt, Artificial Sequence
  Synthetic
cgagucaaaucaagaaaagagug

SEQ ID NO: 108902 - RNA, 24 nt, Artificial Sequence
  Synthetic
ucgagucaaaucaagaaaagagug

SEQ ID NO: 108903 - RNA, 18 nt, Artificial Sequence
  Synthetic
uucccuuauugaagagug

SEQ ID NO: 108904 - RNA, 19 nt, Artificial Sequence
  Synthetic
auucccuuauugaagagug

SEQ ID NO: 108905 - RNA, 20 nt, Artificial Sequence
  Synthetic
aauucccuuauugaagagug

SEQ ID NO: 108906 - RNA, 21 nt, Artificial Sequence
  Synthetic
aaauucccuuauugaagagug

SEQ ID NO: 108907 - RNA, 22 nt, Artificial Sequence
  Synthetic
aaaauucccuuauugaagagug

SEQ ID NO: 108908 - RNA, 24 nt, Artificial Sequence
  Synthetic
ugaaaauucccuuauugaagagug

SEQ ID NO: 108909 - RNA, 18 nt, Artificial Sequence
  Synthetic
acaaaggaguuaagagug

SEQ ID NO: 108910 - RNA, 19 nt, Artificial Sequence
  Synthetic
cacaaaggaguuaagagug

SEQ ID NO: 108911 - RNA, 20 nt, Artificial Sequence
  Synthetic
ucacaaaggaguuaagagug

SEQ ID NO: 108912 - RNA, 21 nt, Artificial Sequence
  Synthetic
uucacaaaggaguuaagagug

SEQ ID NO: 108913 - RNA, 22 nt, Artificial Sequence
  Synthetic
auucacaaaggaguuaagagug

SEQ ID NO: 108914 - RNA, 23 nt, Artificial Sequence
  Synthetic
aauucacaaaggaguuaagagug

SEQ ID NO: 108915 - RNA, 18 nt, Artificial Sequence
  Synthetic
uuaucucaaaauagagug

SEQ ID NO: 108916 - RNA, 19 nt, Artificial Sequence
  Synthetic
uuuaucucaaaauagagug

SEQ ID NO: 108917 - RNA, 20 nt, Artificial Sequence
  Synthetic
cuuuaucucaaaauagagug

SEQ ID NO: 108918 - RNA, 23 nt, Artificial Sequence
  Synthetic
aggcuuuaucucaaaauagagug

SEQ ID NO: 108919 - RNA, 24 nt, Artificial Sequence
  Synthetic
aaggcuuuaucucaaaauagagug

SEQ ID NO: 108920 - RNA, 18 nt, Artificial Sequence
  Synthetic
cuugaaugaaggggagug

SEQ ID NO: 108921 - RNA, 19 nt, Artificial Sequence
  Synthetic
ccuugaaugaaggggagug

SEQ ID NO: 108922 - RNA, 20 nt, Artificial Sequence
  Synthetic
cccuugaaugaaggggagug

SEQ ID NO: 108923 - RNA, 21 nt, Artificial Sequence
  Synthetic
ccccuugaaugaaggggagug

SEQ ID NO: 108924 - RNA, 23 nt, Artificial Sequence
  Synthetic
agccccuugaaugaaggggagug

SEQ ID NO: 108925 - RNA, 21 nt, Artificial Sequence
  Synthetic
uugaaaacucagaauggagug

SEQ ID NO: 108926 - RNA, 22 nt, Artificial Sequence
  Synthetic
uuugaaaacucagaauggagug

SEQ ID NO: 108927 - RNA, 23 nt, Artificial Sequence
  Synthetic
auuugaaaacucagaauggagug

SEQ ID NO: 108928 - RNA, 24 nt, Artificial Sequence
  Synthetic
cauuugaaaacucagaauggagug

SEQ ID NO: 108929 - RNA, 22 nt, Artificial Sequence
  Synthetic
aggacauuuaauucaaugagug

SEQ ID NO: 108930 - RNA, 23 nt, Artificial Sequence
  Synthetic
caggacauuuaauucaaugagug

SEQ ID NO: 108931 - RNA, 24 nt, Artificial Sequence
  Synthetic
acaggacauuuaauucaaugagug

SEQ ID NO: 108932 - RNA, 18 nt, Artificial Sequence
  Synthetic
auuagcugaagaugagug

SEQ ID NO: 108933 - RNA, 19 nt, Artificial Sequence
  Synthetic
cauuagcugaagaugagug

SEQ ID NO: 108934 - RNA, 20 nt, Artificial Sequence
  Synthetic
ccauuagcugaagaugagug

SEQ ID NO: 108935 - RNA, 21 nt, Artificial Sequence
  Synthetic
accauuagcugaagaugagug

SEQ ID NO: 108936 - RNA, 22 nt, Artificial Sequence
  Synthetic
aaccauuagcugaagaugagug

SEQ ID NO: 108937 - RNA, 23 nt, Artificial Sequence
  Synthetic
uaaccauuagcugaagaugagug

SEQ ID NO: 108938 - RNA, 18 nt, Artificial Sequence
  Synthetic
caaaggcaaaucugagug

SEQ ID NO: 108939 - RNA, 19 nt, Artificial Sequence
  Synthetic
ccaaaggcaaaucugagug

SEQ ID NO: 108940 - RNA, 20 nt, Artificial Sequence
  Synthetic
cccaaaggcaaaucugagug

SEQ ID NO: 108941 - RNA, 21 nt, Artificial Sequence
  Synthetic
ucccaaaggcaaaucugagug

SEQ ID NO: 108942 - RNA, 22 nt, Artificial Sequence
  Synthetic
uucccaaaggcaaaucugagug

SEQ ID NO: 108943 - RNA, 23 nt, Artificial Sequence
  Synthetic
uuucccaaaggcaaaucugagug

SEQ ID NO: 108944 - RNA, 24 nt, Artificial Sequence
  Synthetic
uuuucccaaaggcaaaucugagug

SEQ ID NO: 108945 - RNA, 18 nt, Artificial Sequence
  Synthetic
aggucauuugagugagug

SEQ ID NO: 108946 - RNA, 20 nt, Artificial Sequence
  Synthetic
ugaggucauuugagugagug

SEQ ID NO: 108947 - RNA, 21 nt, Artificial Sequence
  Synthetic
uugaggucauuugagugagug

SEQ ID NO: 108948 - RNA, 22 nt, Artificial Sequence
  Synthetic
uuugaggucauuugagugagug

SEQ ID NO: 108949 - RNA, 23 nt, Artificial Sequence
  Synthetic
uuuugaggucauuugagugagug

SEQ ID NO: 108950 - RNA, 24 nt, Artificial Sequence
  Synthetic
cuuuugaggucauuugagugagug

SEQ ID NO: 108951 - RNA, 18 nt, Artificial Sequence
  Synthetic
uuaugguagaauugagug

SEQ ID NO: 108952 - RNA, 19 nt, Artificial Sequence
  Synthetic
auuaugguagaauugagug

SEQ ID NO: 108953 - RNA, 20 nt, Artificial Sequence
  Synthetic
aauuaugguagaauugagug

SEQ ID NO: 108954 - RNA, 21 nt, Artificial Sequence
  Synthetic
uaauuaugguagaauugagug

SEQ ID NO: 108955 - RNA, 22 nt, Artificial Sequence
  Synthetic
auaauuaugguagaauugagug

SEQ ID NO: 108956 - RNA, 23 nt, Artificial Sequence
  Synthetic
cauaauuaugguagaauugagug

SEQ ID NO: 108957 - RNA, 24 nt, Artificial Sequence
  Synthetic
acauaauuaugguagaauugagug

SEQ ID NO: 108958 - RNA, 18 nt, Artificial Sequence
  Synthetic
aguuacugaaaaauagug

SEQ ID NO: 108959 - RNA, 20 nt, Artificial Sequence
  Synthetic
cgaguuacugaaaaauagug

SEQ ID NO: 108960 - RNA, 21 nt, Artificial Sequence
  Synthetic
acgaguuacugaaaaauagug

SEQ ID NO: 108961 - RNA, 22 nt, Artificial Sequence
  Synthetic
aacgaguuacugaaaaauagug

SEQ ID NO: 108962 - RNA, 23 nt, Artificial Sequence
  Synthetic
uaacgaguuacugaaaaauagug

SEQ ID NO: 108963 - RNA, 24 nt, Artificial Sequence
  Synthetic
uuaacgaguuacugaaaaauagug

SEQ ID NO: 108964 - RNA, 19 nt, Artificial Sequence
  Synthetic
ugucuuugaaugaauagug

SEQ ID NO: 108965 - RNA, 20 nt, Artificial Sequence
  Synthetic
uugucuuugaaugaauagug

SEQ ID NO: 108966 - RNA, 21 nt, Artificial Sequence
  Synthetic
auugucuuugaaugaauagug

SEQ ID NO: 108967 - RNA, 23 nt, Artificial Sequence
  Synthetic
ugauugucuuugaaugaauagug

SEQ ID NO: 108968 - RNA, 24 nt, Artificial Sequence
  Synthetic
augauugucuuugaaugaauagug

SEQ ID NO: 108969 - RNA, 18 nt, Artificial Sequence
  Synthetic
uuaacuugauucauagug

SEQ ID NO: 108970 - RNA, 19 nt, Artificial Sequence
  Synthetic
cuuaacuugauucauagug

SEQ ID NO: 108971 - RNA, 20 nt, Artificial Sequence
  Synthetic
ccuuaacuugauucauagug

SEQ ID NO: 108972 - RNA, 21 nt, Artificial Sequence
  Synthetic
accuuaacuugauucauagug

SEQ ID NO: 108973 - RNA, 23 nt, Artificial Sequence
  Synthetic
agaccuuaacuugauucauagug

SEQ ID NO: 108974 - RNA, 24 nt, Artificial Sequence
  Synthetic
aagaccuuaacuugauucauagug

SEQ ID NO: 108975 - RNA, 18 nt, Artificial Sequence
  Synthetic
uacuaaacauagauagug

SEQ ID NO: 108976 - RNA, 20 nt, Artificial Sequence
  Synthetic
uguacuaaacauagauagug

SEQ ID NO: 108977 - RNA, 22 nt, Artificial Sequence
  Synthetic
uguguacuaaacauagauagug

SEQ ID NO: 108978 - RNA, 24 nt, Artificial Sequence
  Synthetic
uguguguacuaaacauagauagug

SEQ ID NO: 108979 - RNA, 18 nt, Artificial Sequence
  Synthetic
uauagagagaggauagug

SEQ ID NO: 108980 - RNA, 19 nt, Artificial Sequence
  Synthetic
cuauagagagaggauagug

SEQ ID NO: 108981 - RNA, 20 nt, Artificial Sequence
  Synthetic
ucuauagagagaggauagug

SEQ ID NO: 108982 - RNA, 21 nt, Artificial Sequence
  Synthetic
aucuauagagagaggauagug

SEQ ID NO: 108983 - RNA, 22 nt, Artificial Sequence
  Synthetic
aaucuauagagagaggauagug

SEQ ID NO: 108984 - RNA, 23 nt, Artificial Sequence
  Synthetic
aaaucuauagagagaggauagug

SEQ ID NO: 108985 - RNA, 24 nt, Artificial Sequence
  Synthetic
caaaucuauagagagaggauagug

SEQ ID NO: 108986 - RNA, 19 nt, Artificial Sequence
  Synthetic
agcugucauucauauagug

SEQ ID NO: 108987 - RNA, 21 nt, Artificial Sequence
  Synthetic
agagcugucauucauauagug

SEQ ID NO: 108988 - RNA, 23 nt, Artificial Sequence
  Synthetic
ugagagcugucauucauauagug

SEQ ID NO: 108989 - RNA, 24 nt, Artificial Sequence
  Synthetic
uugagagcugucauucauauagug

SEQ ID NO: 108990 - RNA, 18 nt, Artificial Sequence
  Synthetic
ugugauguauauauagug

SEQ ID NO: 108991 - RNA, 19 nt, Artificial Sequence
  Synthetic
uugugauguauauauagug

SEQ ID NO: 108992 - RNA, 20 nt, Artificial Sequence
  Synthetic
uuugugauguauauauagug

SEQ ID NO: 108993 - RNA, 21 nt, Artificial Sequence
  Synthetic
uuuugugauguauauauagug

SEQ ID NO: 108994 - RNA, 22 nt, Artificial Sequence
  Synthetic
cuuuugugauguauauauagug

SEQ ID NO: 108995 - RNA, 23 nt, Artificial Sequence
  Synthetic
acuuuugugauguauauauagug

SEQ ID NO: 108996 - RNA, 18 nt, Artificial Sequence
  Synthetic
cacagcugaaagguagug

SEQ ID NO: 108997 - RNA, 20 nt, Artificial Sequence
  Synthetic
ugcacagcugaaagguagug

SEQ ID NO: 108998 - RNA, 21 nt, Artificial Sequence
  Synthetic
cugcacagcugaaagguagug

SEQ ID NO: 108999 - RNA, 22 nt, Artificial Sequence
  Synthetic
acugcacagcugaaagguagug

SEQ ID NO: 109000 - RNA, 23 nt, Artificial Sequence
  Synthetic
uacugcacagcugaaagguagug

SEQ ID NO: 109001 - RNA, 24 nt, Artificial Sequence
  Synthetic
auacugcacagcugaaagguagug

SEQ ID NO: 109002 - RNA, 18 nt, Artificial Sequence
  Synthetic
auaaucauaaauguagug

SEQ ID NO: 109003 - RNA, 19 nt, Artificial Sequence
  Synthetic
aauaaucauaaauguagug

SEQ ID NO: 109004 - RNA, 20 nt, Artificial Sequence
  Synthetic
aaauaaucauaaauguagug

SEQ ID NO: 109005 - RNA, 21 nt, Artificial Sequence
  Synthetic
caaauaaucauaaauguagug

SEQ ID NO: 109006 - RNA, 24 nt, Artificial Sequence
  Synthetic
uggcaaauaaucauaaauguagug

SEQ ID NO: 109007 - RNA, 18 nt, Artificial Sequence
  Synthetic
accaauguaauauuagug

SEQ ID NO: 109008 - RNA, 19 nt, Artificial Sequence
  Synthetic
uaccaauguaauauuagug

SEQ ID NO: 109009 - RNA, 20 nt, Artificial Sequence
  Synthetic
uuaccaauguaauauuagug

SEQ ID NO: 109010 - RNA, 21 nt, Artificial Sequence
  Synthetic
uuuaccaauguaauauuagug

SEQ ID NO: 109011 - RNA, 22 nt, Artificial Sequence
  Synthetic
cuuuaccaauguaauauuagug

SEQ ID NO: 109012 - RNA, 23 nt, Artificial Sequence
  Synthetic
ucuuuaccaauguaauauuagug

SEQ ID NO: 109013 - RNA, 18 nt, Artificial Sequence
  Synthetic
aaucaacugaacuuagug

SEQ ID NO: 109014 - RNA, 19 nt, Artificial Sequence
  Synthetic
aaaucaacugaacuuagug

SEQ ID NO: 109015 - RNA, 20 nt, Artificial Sequence
  Synthetic
aaaaucaacugaacuuagug

SEQ ID NO: 109016 - RNA, 21 nt, Artificial Sequence
  Synthetic
aaaaaucaacugaacuuagug

SEQ ID NO: 109017 - RNA, 22 nt, Artificial Sequence
  Synthetic
aaaaaaucaacugaacuuagug

SEQ ID NO: 109018 - RNA, 23 nt, Artificial Sequence
  Synthetic
aaaaaaaucaacugaacuuagug

SEQ ID NO: 109019 - RNA, 24 nt, Artificial Sequence
  Synthetic
caaaaaaaucaacugaacuuagug

SEQ ID NO: 109020 - RNA, 18 nt, Artificial Sequence
  Synthetic
ucaacccuaagguuagug

SEQ ID NO: 109021 - RNA, 19 nt, Artificial Sequence
  Synthetic
cucaacccuaagguuagug

SEQ ID NO: 109022 - RNA, 20 nt, Artificial Sequence
  Synthetic
ccucaacccuaagguuagug

SEQ ID NO: 109023 - RNA, 21 nt, Artificial Sequence
  Synthetic
accucaacccuaagguuagug

SEQ ID NO: 109024 - RNA, 23 nt, Artificial Sequence
  Synthetic
ugaccucaacccuaagguuagug

SEQ ID NO: 109025 - RNA, 18 nt, Artificial Sequence
  Synthetic
uaggcuuaugccuacgug

SEQ ID NO: 109026 - RNA, 19 nt, Artificial Sequence
  Synthetic
auaggcuuaugccuacgug

SEQ ID NO: 109027 - RNA, 20 nt, Artificial Sequence
  Synthetic
uauaggcuuaugccuacgug

SEQ ID NO: 109028 - RNA, 22 nt, Artificial Sequence
  Synthetic
uguauaggcuuaugccuacgug

SEQ ID NO: 109029 - RNA, 23 nt, Artificial Sequence
  Synthetic
auguauaggcuuaugccuacgug

SEQ ID NO: 109030 - RNA, 24 nt, Artificial Sequence
  Synthetic
aauguauaggcuuaugccuacgug

SEQ ID NO: 109031 - RNA, 18 nt, Artificial Sequence
  Synthetic
aggugcccucucaccgug

SEQ ID NO: 109032 - RNA, 19 nt, Artificial Sequence
  Synthetic
caggugcccucucaccgug

SEQ ID NO: 109033 - RNA, 20 nt, Artificial Sequence
  Synthetic
ccaggugcccucucaccgug

SEQ ID NO: 109034 - RNA, 21 nt, Artificial Sequence
  Synthetic
cccaggugcccucucaccgug

SEQ ID NO: 109035 - RNA, 22 nt, Artificial Sequence
  Synthetic
acccaggugcccucucaccgug

SEQ ID NO: 109036 - RNA, 23 nt, Artificial Sequence
  Synthetic
cacccaggugcccucucaccgug

SEQ ID NO: 109037 - RNA, 18 nt, Artificial Sequence
  Synthetic
caucuaagcagaagcgug

SEQ ID NO: 109038 - RNA, 19 nt, Artificial Sequence
  Synthetic
acaucuaagcagaagcgug

SEQ ID NO: 109039 - RNA, 20 nt, Artificial Sequence
  Synthetic
uacaucuaagcagaagcgug

SEQ ID NO: 109040 - RNA, 21 nt, Artificial Sequence
  Synthetic
uuacaucuaagcagaagcgug

SEQ ID NO: 109041 - RNA, 22 nt, Artificial Sequence
  Synthetic
uuuacaucuaagcagaagcgug

SEQ ID NO: 109042 - RNA, 23 nt, Artificial Sequence
  Synthetic
auuuacaucuaagcagaagcgug

SEQ ID NO: 109043 - RNA, 24 nt, Artificial Sequence
  Synthetic
cauuuacaucuaagcagaagcgug

SEQ ID NO: 109044 - RNA, 18 nt, Artificial Sequence
  Synthetic
uugaaaaguuucuucgug

SEQ ID NO: 109045 - RNA, 19 nt, Artificial Sequence
  Synthetic
auugaaaaguuucuucgug

SEQ ID NO: 109046 - RNA, 20 nt, Artificial Sequence
  Synthetic
cauugaaaaguuucuucgug

SEQ ID NO: 109047 - RNA, 21 nt, Artificial Sequence
  Synthetic
acauugaaaaguuucuucgug

SEQ ID NO: 109048 - RNA, 22 nt, Artificial Sequence
  Synthetic
aacauugaaaaguuucuucgug

SEQ ID NO: 109049 - RNA, 23 nt, Artificial Sequence
  Synthetic
aaacauugaaaaguuucuucgug

SEQ ID NO: 109050 - RNA, 24 nt, Artificial Sequence
  Synthetic
caaacauugaaaaguuucuucgug

SEQ ID NO: 109051 - RNA, 19 nt, Artificial Sequence
  Synthetic
agaucuuuguugaaaggug

SEQ ID NO: 109052 - RNA, 20 nt, Artificial Sequence
  Synthetic
aagaucuuuguugaaaggug

SEQ ID NO: 109053 - RNA, 21 nt, Artificial Sequence
  Synthetic
aaagaucuuuguugaaaggug

SEQ ID NO: 109054 - RNA, 23 nt, Artificial Sequence
  Synthetic
ugaaagaucuuuguugaaaggug

SEQ ID NO: 109055 - RNA, 24 nt, Artificial Sequence
  Synthetic
cugaaagaucuuuguugaaaggug

SEQ ID NO: 109056 - RNA, 18 nt, Artificial Sequence
  Synthetic
aauggcaaaguauaggug

SEQ ID NO: 109057 - RNA, 19 nt, Artificial Sequence
  Synthetic
caauggcaaaguauaggug

SEQ ID NO: 109058 - RNA, 20 nt, Artificial Sequence
  Synthetic
ucaauggcaaaguauaggug

SEQ ID NO: 109059 - RNA, 21 nt, Artificial Sequence
  Synthetic
uucaauggcaaaguauaggug

SEQ ID NO: 109060 - RNA, 22 nt, Artificial Sequence
  Synthetic
uuucaauggcaaaguauaggug

SEQ ID NO: 109061 - RNA, 23 nt, Artificial Sequence
  Synthetic
auuucaauggcaaaguauaggug

SEQ ID NO: 109062 - RNA, 24 nt, Artificial Sequence
  Synthetic
aauuucaauggcaaaguauaggug

SEQ ID NO: 109063 - RNA, 18 nt, Artificial Sequence
  Synthetic
uucuucaaaucuuaggug

SEQ ID NO: 109064 - RNA, 19 nt, Artificial Sequence
  Synthetic
auucuucaaaucuuaggug

SEQ ID NO: 109065 - RNA, 20 nt, Artificial Sequence
  Synthetic
aauucuucaaaucuuaggug

SEQ ID NO: 109066 - RNA, 21 nt, Artificial Sequence
  Synthetic
aaauucuucaaaucuuaggug

SEQ ID NO: 109067 - RNA, 18 nt, Artificial Sequence
  Synthetic
cauugccaaaaggcggug

SEQ ID NO: 109068 - RNA, 19 nt, Artificial Sequence
  Synthetic
ccauugccaaaaggcggug

SEQ ID NO: 109069 - RNA, 20 nt, Artificial Sequence
  Synthetic
uccauugccaaaaggcggug

SEQ ID NO: 109070 - RNA, 21 nt, Artificial Sequence
  Synthetic
uuccauugccaaaaggcggug

SEQ ID NO: 109071 - RNA, 23 nt, Artificial Sequence
  Synthetic
aguuccauugccaaaaggcggug

SEQ ID NO: 109072 - RNA, 24 nt, Artificial Sequence
  Synthetic
aaguuccauugccaaaaggcggug

SEQ ID NO: 109073 - RNA, 18 nt, Artificial Sequence
  Synthetic
auccauuuugcugcggug

SEQ ID NO: 109074 - RNA, 20 nt, Artificial Sequence
  Synthetic
agauccauuuugcugcggug

SEQ ID NO: 109075 - RNA, 21 nt, Artificial Sequence
  Synthetic
aagauccauuuugcugcggug

SEQ ID NO: 109076 - RNA, 23 nt, Artificial Sequence
  Synthetic
agaagauccauuuugcugcggug

SEQ ID NO: 109077 - RNA, 19 nt, Artificial Sequence
  Synthetic
ugaaucagaaagcagggug

SEQ ID NO: 109078 - RNA, 20 nt, Artificial Sequence
  Synthetic
cugaaucagaaagcagggug

SEQ ID NO: 109079 - RNA, 21 nt, Artificial Sequence
  Synthetic
ucugaaucagaaagcagggug

SEQ ID NO: 109080 - RNA, 22 nt, Artificial Sequence
  Synthetic
cucugaaucagaaagcagggug

SEQ ID NO: 109081 - RNA, 24 nt, Artificial Sequence
  Synthetic
agcucugaaucagaaagcagggug

SEQ ID NO: 109082 - RNA, 18 nt, Artificial Sequence
  Synthetic
aggaucuacucuagggug

SEQ ID NO: 109083 - RNA, 19 nt, Artificial Sequence
  Synthetic
caggaucuacucuagggug

SEQ ID NO: 109084 - RNA, 20 nt, Artificial Sequence
  Synthetic
ccaggaucuacucuagggug

SEQ ID NO: 109085 - RNA, 21 nt, Artificial Sequence
  Synthetic
accaggaucuacucuagggug

SEQ ID NO: 109086 - RNA, 22 nt, Artificial Sequence
  Synthetic
aaccaggaucuacucuagggug

SEQ ID NO: 109087 - RNA, 23 nt, Artificial Sequence
  Synthetic
aaaccaggaucuacucuagggug

SEQ ID NO: 109088 - RNA, 19 nt, Artificial Sequence
  Synthetic
agcuauucaugguagggug

SEQ ID NO: 109089 - RNA, 20 nt, Artificial Sequence
  Synthetic
aagcuauucaugguagggug

SEQ ID NO: 109090 - RNA, 21 nt, Artificial Sequence
  Synthetic
caagcuauucaugguagggug

SEQ ID NO: 109091 - RNA, 22 nt, Artificial Sequence
  Synthetic
ucaagcuauucaugguagggug

SEQ ID NO: 109092 - RNA, 23 nt, Artificial Sequence
  Synthetic
aucaagcuauucaugguagggug

SEQ ID NO: 109093 - RNA, 24 nt, Artificial Sequence
  Synthetic
uaucaagcuauucaugguagggug

SEQ ID NO: 109094 - RNA, 18 nt, Artificial Sequence
  Synthetic
ucugagggaaaccgggug

SEQ ID NO: 109095 - RNA, 19 nt, Artificial Sequence
  Synthetic
cucugagggaaaccgggug

SEQ ID NO: 109096 - RNA, 20 nt, Artificial Sequence
  Synthetic
ucucugagggaaaccgggug

SEQ ID NO: 109097 - RNA, 21 nt, Artificial Sequence
  Synthetic
aucucugagggaaaccgggug

SEQ ID NO: 109098 - RNA, 22 nt, Artificial Sequence
  Synthetic
aaucucugagggaaaccgggug

SEQ ID NO: 109099 - RNA, 24 nt, Artificial Sequence
  Synthetic
agaaucucugagggaaaccgggug

SEQ ID NO: 109100 - RNA, 18 nt, Artificial Sequence
  Synthetic
aaauggcuuugaggggug

SEQ ID NO: 109101 - RNA, 20 nt, Artificial Sequence
  Synthetic
agaaauggcuuugaggggug

SEQ ID NO: 109102 - RNA, 21 nt, Artificial Sequence
  Synthetic
cagaaauggcuuugaggggug

SEQ ID NO: 109103 - RNA, 22 nt, Artificial Sequence
  Synthetic
acagaaauggcuuugaggggug

SEQ ID NO: 109104 - RNA, 23 nt, Artificial Sequence
  Synthetic
aacagaaauggcuuugaggggug

SEQ ID NO: 109105 - RNA, 18 nt, Artificial Sequence
  Synthetic
auuugaagugagggggug

SEQ ID NO: 109106 - RNA, 19 nt, Artificial Sequence
  Synthetic
cauuugaagugagggggug

SEQ ID NO: 109107 - RNA, 21 nt, Artificial Sequence
  Synthetic
cgcauuugaagugagggggug

SEQ ID NO: 109108 - RNA, 22 nt, Artificial Sequence
  Synthetic
acgcauuugaagugagggggug

SEQ ID NO: 109109 - RNA, 23 nt, Artificial Sequence
  Synthetic
cacgcauuugaagugagggggug

SEQ ID NO: 109110 - RNA, 24 nt, Artificial Sequence
  Synthetic
ccacgcauuugaagugagggggug

SEQ ID NO: 109111 - RNA, 18 nt, Artificial Sequence
  Synthetic
cacaguauagcuggggug

SEQ ID NO: 109112 - RNA, 19 nt, Artificial Sequence
  Synthetic
acacaguauagcuggggug

SEQ ID NO: 109113 - RNA, 20 nt, Artificial Sequence
  Synthetic
aacacaguauagcuggggug

SEQ ID NO: 109114 - RNA, 21 nt, Artificial Sequence
  Synthetic
caacacaguauagcuggggug

SEQ ID NO: 109115 - RNA, 23 nt, Artificial Sequence
  Synthetic
agcaacacaguauagcuggggug

SEQ ID NO: 109116 - RNA, 24 nt, Artificial Sequence
  Synthetic
uagcaacacaguauagcuggggug

SEQ ID NO: 109117 - RNA, 18 nt, Artificial Sequence
  Synthetic
uaaagacaaaauugggug

SEQ ID NO: 109118 - RNA, 19 nt, Artificial Sequence
  Synthetic
auaaagacaaaauugggug

SEQ ID NO: 109119 - RNA, 20 nt, Artificial Sequence
  Synthetic
uauaaagacaaaauugggug

SEQ ID NO: 109120 - RNA, 21 nt, Artificial Sequence
  Synthetic
auauaaagacaaaauugggug

SEQ ID NO: 109121 - RNA, 22 nt, Artificial Sequence
  Synthetic
cauauaaagacaaaauugggug

SEQ ID NO: 109122 - RNA, 23 nt, Artificial Sequence
  Synthetic
ucauauaaagacaaaauugggug

SEQ ID NO: 109123 - RNA, 24 nt, Artificial Sequence
  Synthetic
aucauauaaagacaaaauugggug

SEQ ID NO: 109124 - RNA, 19 nt, Artificial Sequence
  Synthetic
agacucucucuucauggug

SEQ ID NO: 109125 - RNA, 20 nt, Artificial Sequence
  Synthetic
cagacucucucuucauggug

SEQ ID NO: 109126 - RNA, 21 nt, Artificial Sequence
  Synthetic
ucagacucucucuucauggug

SEQ ID NO: 109127 - RNA, 22 nt, Artificial Sequence
  Synthetic
cucagacucucucuucauggug

SEQ ID NO: 109128 - RNA, 23 nt, Artificial Sequence
  Synthetic
ccucagacucucucuucauggug

SEQ ID NO: 109129 - RNA, 24 nt, Artificial Sequence
  Synthetic
uccucagacucucucuucauggug

SEQ ID NO: 109130 - RNA, 18 nt, Artificial Sequence
  Synthetic
uuuauaacuguuauggug

SEQ ID NO: 109131 - RNA, 19 nt, Artificial Sequence
  Synthetic
uuuuauaacuguuauggug

SEQ ID NO: 109132 - RNA, 20 nt, Artificial Sequence
  Synthetic
uuuuuauaacuguuauggug

SEQ ID NO: 109133 - RNA, 21 nt, Artificial Sequence
  Synthetic
auuuuuauaacuguuauggug

SEQ ID NO: 109134 - RNA, 22 nt, Artificial Sequence
  Synthetic
uauuuuuauaacuguuauggug

SEQ ID NO: 109135 - RNA, 23 nt, Artificial Sequence
  Synthetic
auauuuuuauaacuguuauggug

SEQ ID NO: 109136 - RNA, 24 nt, Artificial Sequence
  Synthetic
aauauuuuuauaacuguuauggug

SEQ ID NO: 109137 - RNA, 18 nt, Artificial Sequence
  Synthetic
ugucugcauuaacuggug

SEQ ID NO: 109138 - RNA, 19 nt, Artificial Sequence
  Synthetic
cugucugcauuaacuggug

SEQ ID NO: 109139 - RNA, 20 nt, Artificial Sequence
  Synthetic
ucugucugcauuaacuggug

SEQ ID NO: 109140 - RNA, 21 nt, Artificial Sequence
  Synthetic
uucugucugcauuaacuggug

SEQ ID NO: 109141 - RNA, 22 nt, Artificial Sequence
  Synthetic
cuucugucugcauuaacuggug

SEQ ID NO: 109142 - RNA, 23 nt, Artificial Sequence
  Synthetic
ucuucugucugcauuaacuggug

SEQ ID NO: 109143 - RNA, 24 nt, Artificial Sequence
  Synthetic
aucuucugucugcauuaacuggug

SEQ ID NO: 109144 - RNA, 18 nt, Artificial Sequence
  Synthetic
ccuaaguccuuacuggug

SEQ ID NO: 109145 - RNA, 19 nt, Artificial Sequence
  Synthetic
uccuaaguccuuacuggug

SEQ ID NO: 109146 - RNA, 20 nt, Artificial Sequence
  Synthetic
uuccuaaguccuuacuggug

SEQ ID NO: 109147 - RNA, 21 nt, Artificial Sequence
  Synthetic
cuuccuaaguccuuacuggug

SEQ ID NO: 109148 - RNA, 22 nt, Artificial Sequence
  Synthetic
ccuuccuaaguccuuacuggug

SEQ ID NO: 109149 - RNA, 24 nt, Artificial Sequence
  Synthetic
ugccuuccuaaguccuuacuggug

SEQ ID NO: 109150 - RNA, 19 nt, Artificial Sequence
  Synthetic
ugcuagugucucucuggug

SEQ ID NO: 109151 - RNA, 20 nt, Artificial Sequence
  Synthetic
augcuagugucucucuggug

SEQ ID NO: 109152 - RNA, 21 nt, Artificial Sequence
  Synthetic
caugcuagugucucucuggug

SEQ ID NO: 109153 - RNA, 22 nt, Artificial Sequence
  Synthetic
ccaugcuagugucucucuggug

SEQ ID NO: 109154 - RNA, 24 nt, Artificial Sequence
  Synthetic
agccaugcuagugucucucuggug

SEQ ID NO: 109155 - RNA, 20 nt, Artificial Sequence
  Synthetic
aggagaagacaagaguggug

SEQ ID NO: 109156 - RNA, 21 nt, Artificial Sequence
  Synthetic
uaggagaagacaagaguggug

SEQ ID NO: 109157 - RNA, 22 nt, Artificial Sequence
  Synthetic
auaggagaagacaagaguggug

SEQ ID NO: 109158 - RNA, 23 nt, Artificial Sequence
  Synthetic
cauaggagaagacaagaguggug

SEQ ID NO: 109159 - RNA, 24 nt, Artificial Sequence
  Synthetic
acauaggagaagacaagaguggug

SEQ ID NO: 109160 - RNA, 21 nt, Artificial Sequence
  Synthetic
uaauaugacugaguuguggug

SEQ ID NO: 109161 - RNA, 22 nt, Artificial Sequence
  Synthetic
uuaauaugacugaguuguggug

SEQ ID NO: 109162 - RNA, 23 nt, Artificial Sequence
  Synthetic
auuaauaugacugaguuguggug

SEQ ID NO: 109163 - RNA, 18 nt, Artificial Sequence
  Synthetic
ugacaauacugauuggug

SEQ ID NO: 109164 - RNA, 19 nt, Artificial Sequence
  Synthetic
cugacaauacugauuggug

SEQ ID NO: 109165 - RNA, 21 nt, Artificial Sequence
  Synthetic
agcugacaauacugauuggug

SEQ ID NO: 109166 - RNA, 22 nt, Artificial Sequence
  Synthetic
cagcugacaauacugauuggug

SEQ ID NO: 109167 - RNA, 23 nt, Artificial Sequence
  Synthetic
acagcugacaauacugauuggug

SEQ ID NO: 109168 - RNA, 24 nt, Artificial Sequence
  Synthetic
aacagcugacaauacugauuggug

SEQ ID NO: 109169 - RNA, 21 nt, Artificial Sequence
  Synthetic
ccucuuucucucucuuuggug

SEQ ID NO: 109170 - RNA, 22 nt, Artificial Sequence
  Synthetic
accucuuucucucucuuuggug

SEQ ID NO: 109171 - RNA, 24 nt, Artificial Sequence
  Synthetic
ugaccucuuucucucucuuuggug

SEQ ID NO: 109172 - RNA, 19 nt, Artificial Sequence
  Synthetic
agcaucuguauacaaugug

SEQ ID NO: 109173 - RNA, 22 nt, Artificial Sequence
  Synthetic
aggagcaucuguauacaaugug

SEQ ID NO: 109174 - RNA, 24 nt, Artificial Sequence
  Synthetic
ugaggagcaucuguauacaaugug

SEQ ID NO: 109175 - RNA, 18 nt, Artificial Sequence
  Synthetic
uaggcacuuuggaaugug

SEQ ID NO: 109176 - RNA, 19 nt, Artificial Sequence
  Synthetic
cuaggcacuuuggaaugug

SEQ ID NO: 109177 - RNA, 20 nt, Artificial Sequence
  Synthetic
acuaggcacuuuggaaugug

SEQ ID NO: 109178 - RNA, 21 nt, Artificial Sequence
  Synthetic
uacuaggcacuuuggaaugug

SEQ ID NO: 109179 - RNA, 22 nt, Artificial Sequence
  Synthetic
auacuaggcacuuuggaaugug

SEQ ID NO: 109180 - RNA, 23 nt, Artificial Sequence
  Synthetic
uauacuaggcacuuuggaaugug

SEQ ID NO: 109181 - RNA, 18 nt, Artificial Sequence
  Synthetic
aacaugauucauaaugug

SEQ ID NO: 109182 - RNA, 19 nt, Artificial Sequence
  Synthetic
uaacaugauucauaaugug

SEQ ID NO: 109183 - RNA, 20 nt, Artificial Sequence
  Synthetic
auaacaugauucauaaugug

SEQ ID NO: 109184 - RNA, 21 nt, Artificial Sequence
  Synthetic
aauaacaugauucauaaugug

SEQ ID NO: 109185 - RNA, 22 nt, Artificial Sequence
  Synthetic
aaauaacaugauucauaaugug

SEQ ID NO: 109186 - RNA, 23 nt, Artificial Sequence
  Synthetic
caaauaacaugauucauaaugug

SEQ ID NO: 109187 - RNA, 24 nt, Artificial Sequence
  Synthetic
acaaauaacaugauucauaaugug

SEQ ID NO: 109188 - RNA, 18 nt, Artificial Sequence
  Synthetic
aaagggagguggcaugug

SEQ ID NO: 109189 - RNA, 19 nt, Artificial Sequence
  Synthetic
caaagggagguggcaugug

SEQ ID NO: 109190 - RNA, 24 nt, Artificial Sequence
  Synthetic
uggggcaaagggagguggcaugug

SEQ ID NO: 109191 - RNA, 18 nt, Artificial Sequence
  Synthetic
cugagaaagauagaugug

SEQ ID NO: 109192 - RNA, 19 nt, Artificial Sequence
  Synthetic
ucugagaaagauagaugug

SEQ ID NO: 109193 - RNA, 21 nt, Artificial Sequence
  Synthetic
ugucugagaaagauagaugug

SEQ ID NO: 109194 - RNA, 22 nt, Artificial Sequence
  Synthetic
augucugagaaagauagaugug

SEQ ID NO: 109195 - RNA, 23 nt, Artificial Sequence
  Synthetic
uaugucugagaaagauagaugug

SEQ ID NO: 109196 - RNA, 24 nt, Artificial Sequence
  Synthetic
auaugucugagaaagauagaugug

SEQ ID NO: 109197 - RNA, 18 nt, Artificial Sequence
  Synthetic
cuagugaaauuugaugug

SEQ ID NO: 109198 - RNA, 19 nt, Artificial Sequence
  Synthetic
acuagugaaauuugaugug

SEQ ID NO: 109199 - RNA, 22 nt, Artificial Sequence
  Synthetic
uggacuagugaaauuugaugug

SEQ ID NO: 109200 - RNA, 23 nt, Artificial Sequence
  Synthetic
cuggacuagugaaauuugaugug

SEQ ID NO: 109201 - RNA, 18 nt, Artificial Sequence
  Synthetic
cuaaauugcuuugaugug

SEQ ID NO: 109202 - RNA, 20 nt, Artificial Sequence
  Synthetic
agcuaaauugcuuugaugug

SEQ ID NO: 109203 - RNA, 21 nt, Artificial Sequence
  Synthetic
aagcuaaauugcuuugaugug

SEQ ID NO: 109204 - RNA, 22 nt, Artificial Sequence
  Synthetic
uaagcuaaauugcuuugaugug

SEQ ID NO: 109205 - RNA, 23 nt, Artificial Sequence
  Synthetic
auaagcuaaauugcuuugaugug

SEQ ID NO: 109206 - RNA, 24 nt, Artificial Sequence
  Synthetic
aauaagcuaaauugcuuugaugug

SEQ ID NO: 109207 - RNA, 21 nt, Artificial Sequence
  Synthetic
cagcaggaagaagaauaugug

SEQ ID NO: 109208 - RNA, 22 nt, Artificial Sequence
  Synthetic
acagcaggaagaagaauaugug

SEQ ID NO: 109209 - RNA, 21 nt, Artificial Sequence
  Synthetic
cucaagugguguguguaugug

SEQ ID NO: 109210 - RNA, 22 nt, Artificial Sequence
  Synthetic
ucucaagugguguguguaugug

SEQ ID NO: 109211 - RNA, 18 nt, Artificial Sequence
  Synthetic
cuaaggacucucccugug

SEQ ID NO: 109212 - RNA, 19 nt, Artificial Sequence
  Synthetic
ucuaaggacucucccugug

SEQ ID NO: 109213 - RNA, 20 nt, Artificial Sequence
  Synthetic
cucuaaggacucucccugug

SEQ ID NO: 109214 - RNA, 18 nt, Artificial Sequence
  Synthetic
auuauaauuaagccugug

SEQ ID NO: 109215 - RNA, 19 nt, Artificial Sequence
  Synthetic
uauuauaauuaagccugug

SEQ ID NO: 109216 - RNA, 20 nt, Artificial Sequence
  Synthetic
uuauuauaauuaagccugug

SEQ ID NO: 109217 - RNA, 21 nt, Artificial Sequence
  Synthetic
uuuauuauaauuaagccugug

SEQ ID NO: 109218 - RNA, 22 nt, Artificial Sequence
  Synthetic
auuuauuauaauuaagccugug

SEQ ID NO: 109219 - RNA, 23 nt, Artificial Sequence
  Synthetic
uauuuauuauaauuaagccugug

SEQ ID NO: 109220 - RNA, 24 nt, Artificial Sequence
  Synthetic
auauuuauuauaauuaagccugug

SEQ ID NO: 109221 - RNA, 19 nt, Artificial Sequence
  Synthetic
ugguuuauaaccugcugug

SEQ ID NO: 109222 - RNA, 20 nt, Artificial Sequence
  Synthetic
uugguuuauaaccugcugug

SEQ ID NO: 109223 - RNA, 21 nt, Artificial Sequence
  Synthetic
auugguuuauaaccugcugug

SEQ ID NO: 109224 - RNA, 22 nt, Artificial Sequence
  Synthetic
aauugguuuauaaccugcugug

SEQ ID NO: 109225 - RNA, 23 nt, Artificial Sequence
  Synthetic
uaauugguuuauaaccugcugug

SEQ ID NO: 109226 - RNA, 24 nt, Artificial Sequence
  Synthetic
cuaauugguuuauaaccugcugug

SEQ ID NO: 109227 - RNA, 18 nt, Artificial Sequence
  Synthetic
ucuugguuaggcucugug

SEQ ID NO: 109228 - RNA, 19 nt, Artificial Sequence
  Synthetic
aucuugguuaggcucugug

SEQ ID NO: 109229 - RNA, 20 nt, Artificial Sequence
  Synthetic
caucuugguuaggcucugug

SEQ ID NO: 109230 - RNA, 21 nt, Artificial Sequence
  Synthetic
ucaucuugguuaggcucugug

SEQ ID NO: 109231 - RNA, 22 nt, Artificial Sequence
  Synthetic
uucaucuugguuaggcucugug

SEQ ID NO: 109232 - RNA, 23 nt, Artificial Sequence
  Synthetic
cuucaucuugguuaggcucugug

SEQ ID NO: 109233 - RNA, 24 nt, Artificial Sequence
  Synthetic
ccuucaucuugguuaggcucugug

SEQ ID NO: 109234 - RNA, 18 nt, Artificial Sequence
  Synthetic
acguacacauaaagugug

SEQ ID NO: 109235 - RNA, 19 nt, Artificial Sequence
  Synthetic
aacguacacauaaagugug

SEQ ID NO: 109236 - RNA, 21 nt, Artificial Sequence
  Synthetic
agaacguacacauaaagugug

SEQ ID NO: 109237 - RNA, 22 nt, Artificial Sequence
  Synthetic
uagaacguacacauaaagugug

SEQ ID NO: 109238 - RNA, 23 nt, Artificial Sequence
  Synthetic
auagaacguacacauaaagugug

SEQ ID NO: 109239 - RNA, 24 nt, Artificial Sequence
  Synthetic
cauagaacguacacauaaagugug

SEQ ID NO: 109240 - RNA, 18 nt, Artificial Sequence
  Synthetic
ccugaggcuagcagugug

SEQ ID NO: 109241 - RNA, 19 nt, Artificial Sequence
  Synthetic
uccugaggcuagcagugug

SEQ ID NO: 109242 - RNA, 21 nt, Artificial Sequence
  Synthetic
aguccugaggcuagcagugug

SEQ ID NO: 109243 - RNA, 22 nt, Artificial Sequence
  Synthetic
uaguccugaggcuagcagugug

SEQ ID NO: 109244 - RNA, 23 nt, Artificial Sequence
  Synthetic
uuaguccugaggcuagcagugug

SEQ ID NO: 109245 - RNA, 24 nt, Artificial Sequence
  Synthetic
cuuaguccugaggcuagcagugug

SEQ ID NO: 109246 - RNA, 22 nt, Artificial Sequence
  Synthetic
ugcuagggacuauuagagugug

SEQ ID NO: 109247 - RNA, 23 nt, Artificial Sequence
  Synthetic
augcuagggacuauuagagugug

SEQ ID NO: 109248 - RNA, 24 nt, Artificial Sequence
  Synthetic
caugcuagggacuauuagagugug

SEQ ID NO: 109249 - RNA, 18 nt, Artificial Sequence
  Synthetic
caggaaaacgugagugug

SEQ ID NO: 109250 - RNA, 22 nt, Artificial Sequence
  Synthetic
cgggcaggaaaacgugagugug

SEQ ID NO: 109251 - RNA, 23 nt, Artificial Sequence
  Synthetic
acgggcaggaaaacgugagugug

SEQ ID NO: 109252 - RNA, 18 nt, Artificial Sequence
  Synthetic
uuauugacacauagugug

SEQ ID NO: 109253 - RNA, 19 nt, Artificial Sequence
  Synthetic
uuuauugacacauagugug

SEQ ID NO: 109254 - RNA, 20 nt, Artificial Sequence
  Synthetic
uuuuauugacacauagugug

SEQ ID NO: 109255 - RNA, 21 nt, Artificial Sequence
  Synthetic
auuuuauugacacauagugug

SEQ ID NO: 109256 - RNA, 23 nt, Artificial Sequence
  Synthetic
agauuuuauugacacauagugug

SEQ ID NO: 109257 - RNA, 24 nt, Artificial Sequence
  Synthetic
aagauuuuauugacacauagugug

SEQ ID NO: 109258 - RNA, 18 nt, Artificial Sequence
  Synthetic
uuuagacgguauagugug

SEQ ID NO: 109259 - RNA, 19 nt, Artificial Sequence
  Synthetic
auuuagacgguauagugug

SEQ ID NO: 109260 - RNA, 20 nt, Artificial Sequence
  Synthetic
aauuuagacgguauagugug

SEQ ID NO: 109261 - RNA, 21 nt, Artificial Sequence
  Synthetic
uaauuuagacgguauagugug

SEQ ID NO: 109262 - RNA, 22 nt, Artificial Sequence
  Synthetic
cuaauuuagacgguauagugug

SEQ ID NO: 109263 - RNA, 23 nt, Artificial Sequence
  Synthetic
ucuaauuuagacgguauagugug

SEQ ID NO: 109264 - RNA, 24 nt, Artificial Sequence
  Synthetic
aucuaauuuagacgguauagugug

SEQ ID NO: 109265 - RNA, 18 nt, Artificial Sequence
  Synthetic
uuccuuguacguagugug

SEQ ID NO: 109266 - RNA, 19 nt, Artificial Sequence
  Synthetic
cuuccuuguacguagugug

SEQ ID NO: 109267 - RNA, 21 nt, Artificial Sequence
  Synthetic
ugcuuccuuguacguagugug

SEQ ID NO: 109268 - RNA, 22 nt, Artificial Sequence
  Synthetic
augcuuccuuguacguagugug

SEQ ID NO: 109269 - RNA, 23 nt, Artificial Sequence
  Synthetic
uaugcuuccuuguacguagugug

SEQ ID NO: 109270 - RNA, 24 nt, Artificial Sequence
  Synthetic
cuaugcuuccuuguacguagugug

SEQ ID NO: 109271 - RNA, 18 nt, Artificial Sequence
  Synthetic
cugacaauauuaggugug

SEQ ID NO: 109272 - RNA, 20 nt, Artificial Sequence
  Synthetic
ugcugacaauauuaggugug

SEQ ID NO: 109273 - RNA, 21 nt, Artificial Sequence
  Synthetic
augcugacaauauuaggugug

SEQ ID NO: 109274 - RNA, 22 nt, Artificial Sequence
  Synthetic
uaugcugacaauauuaggugug

SEQ ID NO: 109275 - RNA, 23 nt, Artificial Sequence
  Synthetic
uuaugcugacaauauuaggugug

SEQ ID NO: 109276 - RNA, 24 nt, Artificial Sequence
  Synthetic
auuaugcugacaauauuaggugug

SEQ ID NO: 109277 - RNA, 18 nt, Artificial Sequence
  Synthetic
auuuucccauugggugug

SEQ ID NO: 109278 - RNA, 19 nt, Artificial Sequence
  Synthetic
aauuuucccauugggugug

SEQ ID NO: 109279 - RNA, 20 nt, Artificial Sequence
  Synthetic
aaauuuucccauugggugug

SEQ ID NO: 109280 - RNA, 21 nt, Artificial Sequence
  Synthetic
caaauuuucccauugggugug

SEQ ID NO: 109281 - RNA, 22 nt, Artificial Sequence
  Synthetic
acaaauuuucccauugggugug

SEQ ID NO: 109282 - RNA, 23 nt, Artificial Sequence
  Synthetic
cacaaauuuucccauugggugug

SEQ ID NO: 109283 - RNA, 24 nt, Artificial Sequence
  Synthetic
ccacaaauuuucccauugggugug

SEQ ID NO: 109284 - RNA, 19 nt, Artificial Sequence
  Synthetic
agaauucagugacugugug

SEQ ID NO: 109285 - RNA, 20 nt, Artificial Sequence
  Synthetic
cagaauucagugacugugug

SEQ ID NO: 109286 - RNA, 22 nt, Artificial Sequence
  Synthetic
agcagaauucagugacugugug

SEQ ID NO: 109287 - RNA, 23 nt, Artificial Sequence
  Synthetic
cagcagaauucagugacugugug

SEQ ID NO: 109288 - RNA, 24 nt, Artificial Sequence
  Synthetic
ucagcagaauucagugacugugug

SEQ ID NO: 109289 - RNA, 18 nt, Artificial Sequence
  Synthetic
uugcauacuaagugugug

SEQ ID NO: 109290 - RNA, 19 nt, Artificial Sequence
  Synthetic
auugcauacuaagugugug

SEQ ID NO: 109291 - RNA, 20 nt, Artificial Sequence
  Synthetic
uauugcauacuaagugugug

SEQ ID NO: 109292 - RNA, 21 nt, Artificial Sequence
  Synthetic
auauugcauacuaagugugug

SEQ ID NO: 109293 - RNA, 23 nt, Artificial Sequence
  Synthetic
agauauugcauacuaagugugug

SEQ ID NO: 109294 - RNA, 24 nt, Artificial Sequence
  Synthetic
uagauauugcauacuaagugugug

SEQ ID NO: 109295 - RNA, 18 nt, Artificial Sequence
  Synthetic
uacaacagaaauugugug

SEQ ID NO: 109296 - RNA, 19 nt, Artificial Sequence
  Synthetic
auacaacagaaauugugug

SEQ ID NO: 109297 - RNA, 20 nt, Artificial Sequence
  Synthetic
cauacaacagaaauugugug

SEQ ID NO: 109298 - RNA, 21 nt, Artificial Sequence
  Synthetic
ucauacaacagaaauugugug

SEQ ID NO: 109299 - RNA, 22 nt, Artificial Sequence
  Synthetic
cucauacaacagaaauugugug

SEQ ID NO: 109300 - RNA, 23 nt, Artificial Sequence
  Synthetic
ucucauacaacagaaauugugug

SEQ ID NO: 109301 - RNA, 18 nt, Artificial Sequence
  Synthetic
aggguuggggguugugug

SEQ ID NO: 109302 - RNA, 19 nt, Artificial Sequence
  Synthetic
caggguuggggguugugug

SEQ ID NO: 109303 - RNA, 22 nt, Artificial Sequence
  Synthetic
uggcaggguuggggguugugug

SEQ ID NO: 109304 - RNA, 23 nt, Artificial Sequence
  Synthetic
uuggcaggguuggggguugugug

SEQ ID NO: 109305 - RNA, 19 nt, Artificial Sequence
  Synthetic
aguuuguugcugcauugug

SEQ ID NO: 109306 - RNA, 20 nt, Artificial Sequence
  Synthetic
aaguuuguugcugcauugug

SEQ ID NO: 109307 - RNA, 21 nt, Artificial Sequence
  Synthetic
aaaguuuguugcugcauugug

SEQ ID NO: 109308 - RNA, 23 nt, Artificial Sequence
  Synthetic
agaaaguuuguugcugcauugug

SEQ ID NO: 109309 - RNA, 24 nt, Artificial Sequence
  Synthetic
aagaaaguuuguugcugcauugug

SEQ ID NO: 109310 - RNA, 18 nt, Artificial Sequence
  Synthetic
ucugggaucaagauugug

SEQ ID NO: 109311 - RNA, 19 nt, Artificial Sequence
  Synthetic
uucugggaucaagauugug

SEQ ID NO: 109312 - RNA, 20 nt, Artificial Sequence
  Synthetic
uuucugggaucaagauugug

SEQ ID NO: 109313 - RNA, 21 nt, Artificial Sequence
  Synthetic
uuuucugggaucaagauugug

SEQ ID NO: 109314 - RNA, 23 nt, Artificial Sequence
  Synthetic
uguuuucugggaucaagauugug

SEQ ID NO: 109315 - RNA, 18 nt, Artificial Sequence
  Synthetic
acccuugacugacuugug

SEQ ID NO: 109316 - RNA, 19 nt, Artificial Sequence
  Synthetic
aacccuugacugacuugug

SEQ ID NO: 109317 - RNA, 21 nt, Artificial Sequence
  Synthetic
agaacccuugacugacuugug

SEQ ID NO: 109318 - RNA, 22 nt, Artificial Sequence
  Synthetic
cagaacccuugacugacuugug

SEQ ID NO: 109319 - RNA, 23 nt, Artificial Sequence
  Synthetic
ucagaacccuugacugacuugug

SEQ ID NO: 109320 - RNA, 24 nt, Artificial Sequence
  Synthetic
aucagaacccuugacugacuugug

SEQ ID NO: 109321 - RNA, 18 nt, Artificial Sequence
  Synthetic
ucaagaaauuggcuugug

SEQ ID NO: 109322 - RNA, 19 nt, Artificial Sequence
  Synthetic
uucaagaaauuggcuugug

SEQ ID NO: 109323 - RNA, 21 nt, Artificial Sequence
  Synthetic
cguucaagaaauuggcuugug

SEQ ID NO: 109324 - RNA, 22 nt, Artificial Sequence
  Synthetic
ucguucaagaaauuggcuugug

SEQ ID NO: 109325 - RNA, 24 nt, Artificial Sequence
  Synthetic
ugucguucaagaaauuggcuugug

SEQ ID NO: 109326 - RNA, 18 nt, Artificial Sequence
  Synthetic
ucaauaaguuaauuugug

SEQ ID NO: 109327 - RNA, 19 nt, Artificial Sequence
  Synthetic
aucaauaaguuaauuugug

SEQ ID NO: 109328 - RNA, 20 nt, Artificial Sequence
  Synthetic
uaucaauaaguuaauuugug

SEQ ID NO: 109329 - RNA, 21 nt, Artificial Sequence
  Synthetic
auaucaauaaguuaauuugug

SEQ ID NO: 109330 - RNA, 22 nt, Artificial Sequence
  Synthetic
uauaucaauaaguuaauuugug

SEQ ID NO: 109331 - RNA, 23 nt, Artificial Sequence
  Synthetic
uuauaucaauaaguuaauuugug

SEQ ID NO: 109332 - RNA, 24 nt, Artificial Sequence
  Synthetic
auuauaucaauaaguuaauuugug

SEQ ID NO: 109333 - RNA, 19 nt, Artificial Sequence
  Synthetic
ugcauagugaacauuugug

SEQ ID NO: 109334 - RNA, 20 nt, Artificial Sequence
  Synthetic
augcauagugaacauuugug

SEQ ID NO: 109335 - RNA, 21 nt, Artificial Sequence
  Synthetic
uaugcauagugaacauuugug

SEQ ID NO: 109336 - RNA, 23 nt, Artificial Sequence
  Synthetic
aguaugcauagugaacauuugug

SEQ ID NO: 109337 - RNA, 24 nt, Artificial Sequence
  Synthetic
aaguaugcauagugaacauuugug

SEQ ID NO: 109338 - RNA, 18 nt, Artificial Sequence
  Synthetic
uauacuuuuccauuugug

SEQ ID NO: 109339 - RNA, 19 nt, Artificial Sequence
  Synthetic
uuauacuuuuccauuugug

SEQ ID NO: 109340 - RNA, 21 nt, Artificial Sequence
  Synthetic
uguuauacuuuuccauuugug

SEQ ID NO: 109341 - RNA, 22 nt, Artificial Sequence
  Synthetic
auguuauacuuuuccauuugug

SEQ ID NO: 109342 - RNA, 23 nt, Artificial Sequence
  Synthetic
cauguuauacuuuuccauuugug

SEQ ID NO: 109343 - RNA, 24 nt, Artificial Sequence
  Synthetic
acauguuauacuuuuccauuugug

SEQ ID NO: 109344 - RNA, 19 nt, Artificial Sequence
  Synthetic
ugugaaacaucuauuugug

SEQ ID NO: 109345 - RNA, 20 nt, Artificial Sequence
  Synthetic
cugugaaacaucuauuugug

SEQ ID NO: 109346 - RNA, 21 nt, Artificial Sequence
  Synthetic
ucugugaaacaucuauuugug

SEQ ID NO: 109347 - RNA, 22 nt, Artificial Sequence
  Synthetic
aucugugaaacaucuauuugug

SEQ ID NO: 109348 - RNA, 23 nt, Artificial Sequence
  Synthetic
aaucugugaaacaucuauuugug

SEQ ID NO: 109349 - RNA, 24 nt, Artificial Sequence
  Synthetic
aaaucugugaaacaucuauuugug

SEQ ID NO: 109350 - RNA, 18 nt, Artificial Sequence
  Synthetic
agugguugagauuuugug

SEQ ID NO: 109351 - RNA, 19 nt, Artificial Sequence
  Synthetic
cagugguugagauuuugug

SEQ ID NO: 109352 - RNA, 21 nt, Artificial Sequence
  Synthetic
ugcagugguugagauuuugug

SEQ ID NO: 109353 - RNA, 23 nt, Artificial Sequence
  Synthetic
agugcagugguugagauuuugug

SEQ ID NO: 109354 - RNA, 24 nt, Artificial Sequence
  Synthetic
aagugcagugguugagauuuugug

SEQ ID NO: 109355 - RNA, 18 nt, Artificial Sequence
  Synthetic
ugacauccugguuuugug

SEQ ID NO: 109356 - RNA, 19 nt, Artificial Sequence
  Synthetic
uugacauccugguuuugug

SEQ ID NO: 109357 - RNA, 20 nt, Artificial Sequence
  Synthetic
uuugacauccugguuuugug

SEQ ID NO: 109358 - RNA, 21 nt, Artificial Sequence
  Synthetic
uuuugacauccugguuuugug

SEQ ID NO: 109359 - RNA, 22 nt, Artificial Sequence
  Synthetic
auuuugacauccugguuuugug

SEQ ID NO: 109360 - RNA, 24 nt, Artificial Sequence
  Synthetic
agauuuugacauccugguuuugug

SEQ ID NO: 109361 - RNA, 21 nt, Artificial Sequence
  Synthetic
uaguaaaaggaaaaaaaauug

SEQ ID NO: 109362 - RNA, 22 nt, Artificial Sequence
  Synthetic
auaguaaaaggaaaaaaaauug

SEQ ID NO: 109363 - RNA, 23 nt, Artificial Sequence
  Synthetic
cauaguaaaaggaaaaaaaauug

SEQ ID NO: 109364 - RNA, 24 nt, Artificial Sequence
  Synthetic
ccauaguaaaaggaaaaaaaauug

SEQ ID NO: 109365 - RNA, 18 nt, Artificial Sequence
  Synthetic
auuuccacaacaaaauug

SEQ ID NO: 109366 - RNA, 19 nt, Artificial Sequence
  Synthetic
cauuuccacaacaaaauug

SEQ ID NO: 109367 - RNA, 20 nt, Artificial Sequence
  Synthetic
ucauuuccacaacaaaauug

SEQ ID NO: 109368 - RNA, 21 nt, Artificial Sequence
  Synthetic
uucauuuccacaacaaaauug

SEQ ID NO: 109369 - RNA, 22 nt, Artificial Sequence
  Synthetic
uuucauuuccacaacaaaauug

SEQ ID NO: 109370 - RNA, 23 nt, Artificial Sequence
  Synthetic
cuuucauuuccacaacaaaauug

SEQ ID NO: 109371 - RNA, 21 nt, Artificial Sequence
  Synthetic
uucauaaaaauuagaaaauug

SEQ ID NO: 109372 - RNA, 22 nt, Artificial Sequence
  Synthetic
cuucauaaaaauuagaaaauug

SEQ ID NO: 109373 - RNA, 23 nt, Artificial Sequence
  Synthetic
ucuucauaaaaauuagaaaauug

SEQ ID NO: 109374 - RNA, 19 nt, Artificial Sequence
  Synthetic
uguugagaauuacaaauug

SEQ ID NO: 109375 - RNA, 20 nt, Artificial Sequence
  Synthetic
auguugagaauuacaaauug

SEQ ID NO: 109376 - RNA, 21 nt, Artificial Sequence
  Synthetic
aauguugagaauuacaaauug

SEQ ID NO: 109377 - RNA, 22 nt, Artificial Sequence
  Synthetic
aaauguugagaauuacaaauug

SEQ ID NO: 109378 - RNA, 23 nt, Artificial Sequence
  Synthetic
caaauguugagaauuacaaauug

SEQ ID NO: 109379 - RNA, 24 nt, Artificial Sequence
  Synthetic
ucaaauguugagaauuacaaauug

SEQ ID NO: 109380 - RNA, 18 nt, Artificial Sequence
  Synthetic
auguuuuugcccaaauug

SEQ ID NO: 109381 - RNA, 19 nt, Artificial Sequence
  Synthetic
aauguuuuugcccaaauug

SEQ ID NO: 109382 - RNA, 22 nt, Artificial Sequence
  Synthetic
uggaauguuuuugcccaaauug

SEQ ID NO: 109383 - RNA, 23 nt, Artificial Sequence
  Synthetic
cuggaauguuuuugcccaaauug

SEQ ID NO: 109384 - RNA, 24 nt, Artificial Sequence
  Synthetic
ccuggaauguuuuugcccaaauug

SEQ ID NO: 109385 - RNA, 18 nt, Artificial Sequence
  Synthetic
augucuauuagcaaauug

SEQ ID NO: 109386 - RNA, 19 nt, Artificial Sequence
  Synthetic
aaugucuauuagcaaauug

SEQ ID NO: 109387 - RNA, 20 nt, Artificial Sequence
  Synthetic
uaaugucuauuagcaaauug

SEQ ID NO: 109388 - RNA, 21 nt, Artificial Sequence
  Synthetic
auaaugucuauuagcaaauug

SEQ ID NO: 109389 - RNA, 22 nt, Artificial Sequence
  Synthetic
cauaaugucuauuagcaaauug

SEQ ID NO: 109390 - RNA, 23 nt, Artificial Sequence
  Synthetic
ucauaaugucuauuagcaaauug

SEQ ID NO: 109391 - RNA, 24 nt, Artificial Sequence
  Synthetic
aucauaaugucuauuagcaaauug

SEQ ID NO: 109392 - RNA, 19 nt, Artificial Sequence
  Synthetic
ugcgguguauaucaaauug

SEQ ID NO: 109393 - RNA, 20 nt, Artificial Sequence
  Synthetic
uugcgguguauaucaaauug

SEQ ID NO: 109394 - RNA, 21 nt, Artificial Sequence
  Synthetic
uuugcgguguauaucaaauug

SEQ ID NO: 109395 - RNA, 22 nt, Artificial Sequence
  Synthetic
cuuugcgguguauaucaaauug

SEQ ID NO: 109396 - RNA, 24 nt, Artificial Sequence
  Synthetic
cgcuuugcgguguauaucaaauug

SEQ ID NO: 109397 - RNA, 18 nt, Artificial Sequence
  Synthetic
caauggaaauggaaauug

SEQ ID NO: 109398 - RNA, 19 nt, Artificial Sequence
  Synthetic
acaauggaaauggaaauug

SEQ ID NO: 109399 - RNA, 20 nt, Artificial Sequence
  Synthetic
cacaauggaaauggaaauug

SEQ ID NO: 109400 - RNA, 21 nt, Artificial Sequence
  Synthetic
ccacaauggaaauggaaauug

SEQ ID NO: 109401 - RNA, 22 nt, Artificial Sequence
  Synthetic
uccacaauggaaauggaaauug

SEQ ID NO: 109402 - RNA, 23 nt, Artificial Sequence
  Synthetic
auccacaauggaaauggaaauug

SEQ ID NO: 109403 - RNA, 24 nt, Artificial Sequence
  Synthetic
uauccacaauggaaauggaaauug

SEQ ID NO: 109404 - RNA, 18 nt, Artificial Sequence
  Synthetic
auugcuauauauaaauug

SEQ ID NO: 109405 - RNA, 19 nt, Artificial Sequence
  Synthetic
aauugcuauauauaaauug

SEQ ID NO: 109406 - RNA, 21 nt, Artificial Sequence
  Synthetic
ugaauugcuauauauaaauug

SEQ ID NO: 109407 - RNA, 22 nt, Artificial Sequence
  Synthetic
uugaauugcuauauauaaauug

SEQ ID NO: 109408 - RNA, 23 nt, Artificial Sequence
  Synthetic
uuugaauugcuauauauaaauug

SEQ ID NO: 109409 - RNA, 24 nt, Artificial Sequence
  Synthetic
auuugaauugcuauauauaaauug

SEQ ID NO: 109410 - RNA, 21 nt, Artificial Sequence
  Synthetic
auucauaaaauguauaaauug

SEQ ID NO: 109411 - RNA, 22 nt, Artificial Sequence
  Synthetic
aauucauaaaauguauaaauug

SEQ ID NO: 109412 - RNA, 23 nt, Artificial Sequence
  Synthetic
aaauucauaaaauguauaaauug

SEQ ID NO: 109413 - RNA, 24 nt, Artificial Sequence
  Synthetic
uaaauucauaaaauguauaaauug

SEQ ID NO: 109414 - RNA, 18 nt, Artificial Sequence
  Synthetic
cucugagggcuuaaauug

SEQ ID NO: 109415 - RNA, 19 nt, Artificial Sequence
  Synthetic
ccucugagggcuuaaauug

SEQ ID NO: 109416 - RNA, 20 nt, Artificial Sequence
  Synthetic
uccucugagggcuuaaauug

SEQ ID NO: 109417 - RNA, 21 nt, Artificial Sequence
  Synthetic
auccucugagggcuuaaauug

SEQ ID NO: 109418 - RNA, 22 nt, Artificial Sequence
  Synthetic
aauccucugagggcuuaaauug

SEQ ID NO: 109419 - RNA, 24 nt, Artificial Sequence
  Synthetic
ugaauccucugagggcuuaaauug

SEQ ID NO: 109420 - RNA, 19 nt, Artificial Sequence
  Synthetic
ugauggaugcuuccaauug

SEQ ID NO: 109421 - RNA, 20 nt, Artificial Sequence
  Synthetic
augauggaugcuuccaauug

SEQ ID NO: 109422 - RNA, 21 nt, Artificial Sequence
  Synthetic
uaugauggaugcuuccaauug

SEQ ID NO: 109423 - RNA, 22 nt, Artificial Sequence
  Synthetic
auaugauggaugcuuccaauug

SEQ ID NO: 109424 - RNA, 24 nt, Artificial Sequence
  Synthetic
ugauaugauggaugcuuccaauug

SEQ ID NO: 109425 - RNA, 18 nt, Artificial Sequence
  Synthetic
uaauccaauauugaauug

SEQ ID NO: 109426 - RNA, 19 nt, Artificial Sequence
  Synthetic
uuaauccaauauugaauug

SEQ ID NO: 109427 - RNA, 20 nt, Artificial Sequence
  Synthetic
uuuaauccaauauugaauug

SEQ ID NO: 109428 - RNA, 21 nt, Artificial Sequence
  Synthetic
auuuaauccaauauugaauug

SEQ ID NO: 109429 - RNA, 22 nt, Artificial Sequence
  Synthetic
aauuuaauccaauauugaauug

SEQ ID NO: 109430 - RNA, 24 nt, Artificial Sequence
  Synthetic
ugaauuuaauccaauauugaauug

SEQ ID NO: 109431 - RNA, 19 nt, Artificial Sequence
  Synthetic
agugggugguaaauaauug

SEQ ID NO: 109432 - RNA, 20 nt, Artificial Sequence
  Synthetic
aagugggugguaaauaauug

SEQ ID NO: 109433 - RNA, 21 nt, Artificial Sequence
  Synthetic
uaagugggugguaaauaauug

SEQ ID NO: 109434 - RNA, 22 nt, Artificial Sequence
  Synthetic
auaagugggugguaaauaauug

SEQ ID NO: 109435 - RNA, 23 nt, Artificial Sequence
  Synthetic
aauaagugggugguaaauaauug

SEQ ID NO: 109436 - RNA, 24 nt, Artificial Sequence
  Synthetic
uaauaagugggugguaaauaauug

SEQ ID NO: 109437 - RNA, 18 nt, Artificial Sequence
  Synthetic
aacaauauugcauaauug

SEQ ID NO: 109438 - RNA, 19 nt, Artificial Sequence
  Synthetic
uaacaauauugcauaauug

SEQ ID NO: 109439 - RNA, 21 nt, Artificial Sequence
  Synthetic
uguaacaauauugcauaauug

SEQ ID NO: 109440 - RNA, 22 nt, Artificial Sequence
  Synthetic
auguaacaauauugcauaauug

SEQ ID NO: 109441 - RNA, 23 nt, Artificial Sequence
  Synthetic
uauguaacaauauugcauaauug

SEQ ID NO: 109442 - RNA, 24 nt, Artificial Sequence
  Synthetic
cuauguaacaauauugcauaauug

SEQ ID NO: 109443 - RNA, 18 nt, Artificial Sequence
  Synthetic
uaagcucauauauaauug

SEQ ID NO: 109444 - RNA, 19 nt, Artificial Sequence
  Synthetic
auaagcucauauauaauug

SEQ ID NO: 109445 - RNA, 20 nt, Artificial Sequence
  Synthetic
aauaagcucauauauaauug

SEQ ID NO: 109446 - RNA, 21 nt, Artificial Sequence
  Synthetic
aaauaagcucauauauaauug

SEQ ID NO: 109447 - RNA, 22 nt, Artificial Sequence
  Synthetic
aaaauaagcucauauauaauug

SEQ ID NO: 109448 - RNA, 23 nt, Artificial Sequence
  Synthetic
aaaaauaagcucauauauaauug

SEQ ID NO: 109449 - RNA, 24 nt, Artificial Sequence
  Synthetic
caaaaauaagcucauauauaauug

SEQ ID NO: 109450 - RNA, 18 nt, Artificial Sequence
  Synthetic
acuuuuacaaccuaauug

SEQ ID NO: 109451 - RNA, 20 nt, Artificial Sequence
  Synthetic
ugacuuuuacaaccuaauug

SEQ ID NO: 109452 - RNA, 23 nt, Artificial Sequence
  Synthetic
cggugacuuuuacaaccuaauug

SEQ ID NO: 109453 - RNA, 24 nt, Artificial Sequence
  Synthetic
acggugacuuuuacaaccuaauug

SEQ ID NO: 109454 - RNA, 18 nt, Artificial Sequence
  Synthetic
uagucauguugcuaauug

SEQ ID NO: 109455 - RNA, 19 nt, Artificial Sequence
  Synthetic
uuagucauguugcuaauug

SEQ ID NO: 109456 - RNA, 20 nt, Artificial Sequence
  Synthetic
auuagucauguugcuaauug

SEQ ID NO: 109457 - RNA, 21 nt, Artificial Sequence
  Synthetic
cauuagucauguugcuaauug

SEQ ID NO: 109458 - RNA, 22 nt, Artificial Sequence
  Synthetic
acauuagucauguugcuaauug

SEQ ID NO: 109459 - RNA, 23 nt, Artificial Sequence
  Synthetic
aacauuagucauguugcuaauug

SEQ ID NO: 109460 - RNA, 24 nt, Artificial Sequence
  Synthetic
aaacauuagucauguugcuaauug

SEQ ID NO: 109461 - RNA, 22 nt, Artificial Sequence
  Synthetic
ugggggucauuuuuucuaauug

SEQ ID NO: 109462 - RNA, 23 nt, Artificial Sequence
  Synthetic
augggggucauuuuuucuaauug

SEQ ID NO: 109463 - RNA, 18 nt, Artificial Sequence
  Synthetic
auaagucaaauuuaauug

SEQ ID NO: 109464 - RNA, 19 nt, Artificial Sequence
  Synthetic
aauaagucaaauuuaauug

SEQ ID NO: 109465 - RNA, 20 nt, Artificial Sequence
  Synthetic
caauaagucaaauuuaauug

SEQ ID NO: 109466 - RNA, 21 nt, Artificial Sequence
  Synthetic
acaauaagucaaauuuaauug

SEQ ID NO: 109467 - RNA, 22 nt, Artificial Sequence
  Synthetic
aacaauaagucaaauuuaauug

SEQ ID NO: 109468 - RNA, 23 nt, Artificial Sequence
  Synthetic
uaacaauaagucaaauuuaauug

SEQ ID NO: 109469 - RNA, 24 nt, Artificial Sequence
  Synthetic
auaacaauaagucaaauuuaauug

SEQ ID NO: 109470 - RNA, 18 nt, Artificial Sequence
  Synthetic
uccauguaagcaacauug

SEQ ID NO: 109471 - RNA, 19 nt, Artificial Sequence
  Synthetic
cuccauguaagcaacauug

SEQ ID NO: 109472 - RNA, 20 nt, Artificial Sequence
  Synthetic
ccuccauguaagcaacauug

SEQ ID NO: 109473 - RNA, 21 nt, Artificial Sequence
  Synthetic
uccuccauguaagcaacauug

SEQ ID NO: 109474 - RNA, 22 nt, Artificial Sequence
  Synthetic
cuccuccauguaagcaacauug

SEQ ID NO: 109475 - RNA, 23 nt, Artificial Sequence
  Synthetic
ucuccuccauguaagcaacauug

SEQ ID NO: 109476 - RNA, 24 nt, Artificial Sequence
  Synthetic
cucuccuccauguaagcaacauug

SEQ ID NO: 109477 - RNA, 18 nt, Artificial Sequence
  Synthetic
acugcauuucuaacauug

SEQ ID NO: 109478 - RNA, 19 nt, Artificial Sequence
  Synthetic
uacugcauuucuaacauug

SEQ ID NO: 109479 - RNA, 20 nt, Artificial Sequence
  Synthetic
auacugcauuucuaacauug

SEQ ID NO: 109480 - RNA, 21 nt, Artificial Sequence
  Synthetic
uauacugcauuucuaacauug

SEQ ID NO: 109481 - RNA, 22 nt, Artificial Sequence
  Synthetic
uuauacugcauuucuaacauug

SEQ ID NO: 109482 - RNA, 23 nt, Artificial Sequence
  Synthetic
auuauacugcauuucuaacauug

SEQ ID NO: 109483 - RNA, 24 nt, Artificial Sequence
  Synthetic
cauuauacugcauuucuaacauug

SEQ ID NO: 109484 - RNA, 19 nt, Artificial Sequence
  Synthetic
aggauuuagauacacauug

SEQ ID NO: 109485 - RNA, 20 nt, Artificial Sequence
  Synthetic
aaggauuuagauacacauug

SEQ ID NO: 109486 - RNA, 21 nt, Artificial Sequence
  Synthetic
uaaggauuuagauacacauug

SEQ ID NO: 109487 - RNA, 22 nt, Artificial Sequence
  Synthetic
cuaaggauuuagauacacauug

SEQ ID NO: 109488 - RNA, 23 nt, Artificial Sequence
  Synthetic
ccuaaggauuuagauacacauug

SEQ ID NO: 109489 - RNA, 24 nt, Artificial Sequence
  Synthetic
uccuaaggauuuagauacacauug

SEQ ID NO: 109490 - RNA, 20 nt, Artificial Sequence
  Synthetic
uggccccaugcuggacauug

SEQ ID NO: 109491 - RNA, 18 nt, Artificial Sequence
  Synthetic
agucucuaggauacauug

SEQ ID NO: 109492 - RNA, 19 nt, Artificial Sequence
  Synthetic
aagucucuaggauacauug

SEQ ID NO: 109493 - RNA, 20 nt, Artificial Sequence
  Synthetic
uaagucucuaggauacauug

SEQ ID NO: 109494 - RNA, 21 nt, Artificial Sequence
  Synthetic
cuaagucucuaggauacauug

SEQ ID NO: 109495 - RNA, 22 nt, Artificial Sequence
  Synthetic
ccuaagucucuaggauacauug

SEQ ID NO: 109496 - RNA, 23 nt, Artificial Sequence
  Synthetic
cccuaagucucuaggauacauug

SEQ ID NO: 109497 - RNA, 24 nt, Artificial Sequence
  Synthetic
ccccuaagucucuaggauacauug

SEQ ID NO: 109498 - RNA, 18 nt, Artificial Sequence
  Synthetic
aaaguaagaucagcauug

SEQ ID NO: 109499 - RNA, 19 nt, Artificial Sequence
  Synthetic
uaaaguaagaucagcauug

SEQ ID NO: 109500 - RNA, 21 nt, Artificial Sequence
  Synthetic
aguaaaguaagaucagcauug

SEQ ID NO: 109501 - RNA, 22 nt, Artificial Sequence
  Synthetic
aaguaaaguaagaucagcauug

SEQ ID NO: 109502 - RNA, 24 nt, Artificial Sequence
  Synthetic
agaaguaaaguaagaucagcauug

SEQ ID NO: 109503 - RNA, 18 nt, Artificial Sequence
  Synthetic
cagcuauccucugcauug

SEQ ID NO: 109504 - RNA, 20 nt, Artificial Sequence
  Synthetic
agcagcuauccucugcauug

SEQ ID NO: 109505 - RNA, 18 nt, Artificial Sequence
  Synthetic
aauguagagauugcauug

SEQ ID NO: 109506 - RNA, 19 nt, Artificial Sequence
  Synthetic
aaauguagagauugcauug

SEQ ID NO: 109507 - RNA, 21 nt, Artificial Sequence
  Synthetic
ugaaauguagagauugcauug

SEQ ID NO: 109508 - RNA, 22 nt, Artificial Sequence
  Synthetic
cugaaauguagagauugcauug

SEQ ID NO: 109509 - RNA, 23 nt, Artificial Sequence
  Synthetic
acugaaauguagagauugcauug

SEQ ID NO: 109510 - RNA, 18 nt, Artificial Sequence
  Synthetic
caauuuuuuuuugcauug

SEQ ID NO: 109511 - RNA, 19 nt, Artificial Sequence
  Synthetic
acaauuuuuuuuugcauug

SEQ ID NO: 109512 - RNA, 21 nt, Artificial Sequence
  Synthetic
agacaauuuuuuuuugcauug

SEQ ID NO: 109513 - RNA, 22 nt, Artificial Sequence
  Synthetic
aagacaauuuuuuuuugcauug

SEQ ID NO: 109514 - RNA, 23 nt, Artificial Sequence
  Synthetic
aaagacaauuuuuuuuugcauug

SEQ ID NO: 109515 - RNA, 24 nt, Artificial Sequence
  Synthetic
aaaagacaauuuuuuuuugcauug

SEQ ID NO: 109516 - RNA, 18 nt, Artificial Sequence
  Synthetic
agucuuaaguaaucauug

SEQ ID NO: 109517 - RNA, 20 nt, Artificial Sequence
  Synthetic
agagucuuaaguaaucauug

SEQ ID NO: 109518 - RNA, 22 nt, Artificial Sequence
  Synthetic
ugagagucuuaaguaaucauug

SEQ ID NO: 109519 - RNA, 23 nt, Artificial Sequence
  Synthetic
augagagucuuaaguaaucauug

SEQ ID NO: 109520 - RNA, 24 nt, Artificial Sequence
  Synthetic
aaugagagucuuaaguaaucauug

SEQ ID NO: 109521 - RNA, 19 nt, Artificial Sequence
  Synthetic
uggacccucaaagucauug

SEQ ID NO: 109522 - RNA, 20 nt, Artificial Sequence
  Synthetic
uuggacccucaaagucauug

SEQ ID NO: 109523 - RNA, 21 nt, Artificial Sequence
  Synthetic
cuuggacccucaaagucauug

SEQ ID NO: 109524 - RNA, 22 nt, Artificial Sequence
  Synthetic
ucuuggacccucaaagucauug

SEQ ID NO: 109525 - RNA, 24 nt, Artificial Sequence
  Synthetic
agucuuggacccucaaagucauug

SEQ ID NO: 109526 - RNA, 18 nt, Artificial Sequence
  Synthetic
auagaugggaauucauug

SEQ ID NO: 109527 - RNA, 19 nt, Artificial Sequence
  Synthetic
aauagaugggaauucauug

SEQ ID NO: 109528 - RNA, 20 nt, Artificial Sequence
  Synthetic
aaauagaugggaauucauug

SEQ ID NO: 109529 - RNA, 19 nt, Artificial Sequence
  Synthetic
agccauacuuguuucauug

SEQ ID NO: 109530 - RNA, 20 nt, Artificial Sequence
  Synthetic
aagccauacuuguuucauug

SEQ ID NO: 109531 - RNA, 22 nt, Artificial Sequence
  Synthetic
agaagccauacuuguuucauug

SEQ ID NO: 109532 - RNA, 23 nt, Artificial Sequence
  Synthetic
aagaagccauacuuguuucauug

SEQ ID NO: 109533 - RNA, 24 nt, Artificial Sequence
  Synthetic
uaagaagccauacuuguuucauug

SEQ ID NO: 109534 - RNA, 18 nt, Artificial Sequence
  Synthetic
uuugcugacuaaagauug

SEQ ID NO: 109535 - RNA, 20 nt, Artificial Sequence
  Synthetic
uguuugcugacuaaagauug

SEQ ID NO: 109536 - RNA, 22 nt, Artificial Sequence
  Synthetic
aguguuugcugacuaaagauug

SEQ ID NO: 109537 - RNA, 23 nt, Artificial Sequence
  Synthetic
aaguguuugcugacuaaagauug

SEQ ID NO: 109538 - RNA, 24 nt, Artificial Sequence
  Synthetic
uaaguguuugcugacuaaagauug

SEQ ID NO: 109539 - RNA, 18 nt, Artificial Sequence
  Synthetic
caagaggaaauaagauug

SEQ ID NO: 109540 - RNA, 19 nt, Artificial Sequence
  Synthetic
acaagaggaaauaagauug

SEQ ID NO: 109541 - RNA, 20 nt, Artificial Sequence
  Synthetic
aacaagaggaaauaagauug

SEQ ID NO: 109542 - RNA, 22 nt, Artificial Sequence
  Synthetic
agaacaagaggaaauaagauug

SEQ ID NO: 109543 - RNA, 23 nt, Artificial Sequence
  Synthetic
cagaacaagaggaaauaagauug

SEQ ID NO: 109544 - RNA, 24 nt, Artificial Sequence
  Synthetic
acagaacaagaggaaauaagauug

SEQ ID NO: 109545 - RNA, 19 nt, Artificial Sequence
  Synthetic
ugccuccuucaccagauug

SEQ ID NO: 109546 - RNA, 20 nt, Artificial Sequence
  Synthetic
cugccuccuucaccagauug

SEQ ID NO: 109547 - RNA, 21 nt, Artificial Sequence
  Synthetic
ucugccuccuucaccagauug

SEQ ID NO: 109548 - RNA, 23 nt, Artificial Sequence
  Synthetic
ugucugccuccuucaccagauug

SEQ ID NO: 109549 - RNA, 24 nt, Artificial Sequence
  Synthetic
augucugccuccuucaccagauug

SEQ ID NO: 109550 - RNA, 18 nt, Artificial Sequence
  Synthetic
uagcauggcuauggauug

SEQ ID NO: 109551 - RNA, 19 nt, Artificial Sequence
  Synthetic
auagcauggcuauggauug

SEQ ID NO: 109552 - RNA, 21 nt, Artificial Sequence
  Synthetic
ugauagcauggcuauggauug

SEQ ID NO: 109553 - RNA, 22 nt, Artificial Sequence
  Synthetic
uugauagcauggcuauggauug

SEQ ID NO: 109554 - RNA, 24 nt, Artificial Sequence
  Synthetic
uguugauagcauggcuauggauug

SEQ ID NO: 109555 - RNA, 18 nt, Artificial Sequence
  Synthetic
uuauuaaacgaaugauug

SEQ ID NO: 109556 - RNA, 19 nt, Artificial Sequence
  Synthetic
uuuauuaaacgaaugauug

SEQ ID NO: 109557 - RNA, 20 nt, Artificial Sequence
  Synthetic
auuuauuaaacgaaugauug

SEQ ID NO: 109558 - RNA, 21 nt, Artificial Sequence
  Synthetic
uauuuauuaaacgaaugauug

SEQ ID NO: 109559 - RNA, 22 nt, Artificial Sequence
  Synthetic
auauuuauuaaacgaaugauug

SEQ ID NO: 109560 - RNA, 23 nt, Artificial Sequence
  Synthetic
aauauuuauuaaacgaaugauug

SEQ ID NO: 109561 - RNA, 18 nt, Artificial Sequence
  Synthetic
cauguauauuacugauug

SEQ ID NO: 109562 - RNA, 19 nt, Artificial Sequence
  Synthetic
acauguauauuacugauug

SEQ ID NO: 109563 - RNA, 20 nt, Artificial Sequence
  Synthetic
cacauguauauuacugauug

SEQ ID NO: 109564 - RNA, 21 nt, Artificial Sequence
  Synthetic
ucacauguauauuacugauug

SEQ ID NO: 109565 - RNA, 22 nt, Artificial Sequence
  Synthetic
uucacauguauauuacugauug

SEQ ID NO: 109566 - RNA, 23 nt, Artificial Sequence
  Synthetic
cuucacauguauauuacugauug

SEQ ID NO: 109567 - RNA, 18 nt, Artificial Sequence
  Synthetic
ugacuaucacagugauug

SEQ ID NO: 109568 - RNA, 19 nt, Artificial Sequence
  Synthetic
uugacuaucacagugauug

SEQ ID NO: 109569 - RNA, 20 nt, Artificial Sequence
  Synthetic
uuugacuaucacagugauug

SEQ ID NO: 109570 - RNA, 21 nt, Artificial Sequence
  Synthetic
auuugacuaucacagugauug

SEQ ID NO: 109571 - RNA, 22 nt, Artificial Sequence
  Synthetic
cauuugacuaucacagugauug

SEQ ID NO: 109572 - RNA, 23 nt, Artificial Sequence
  Synthetic
acauuugacuaucacagugauug

SEQ ID NO: 109573 - RNA, 18 nt, Artificial Sequence
  Synthetic
agauauuuuauuugauug

SEQ ID NO: 109574 - RNA, 19 nt, Artificial Sequence
  Synthetic
aagauauuuuauuugauug

SEQ ID NO: 109575 - RNA, 20 nt, Artificial Sequence
  Synthetic
aaagauauuuuauuugauug

SEQ ID NO: 109576 - RNA, 21 nt, Artificial Sequence
  Synthetic
caaagauauuuuauuugauug

SEQ ID NO: 109577 - RNA, 22 nt, Artificial Sequence
  Synthetic
acaaagauauuuuauuugauug

SEQ ID NO: 109578 - RNA, 23 nt, Artificial Sequence
  Synthetic
aacaaagauauuuuauuugauug

SEQ ID NO: 109579 - RNA, 24 nt, Artificial Sequence
  Synthetic
aaacaaagauauuuuauuugauug

SEQ ID NO: 109580 - RNA, 18 nt, Artificial Sequence
  Synthetic
ucuagaaugaaaauauug

SEQ ID NO: 109581 - RNA, 19 nt, Artificial Sequence
  Synthetic
uucuagaaugaaaauauug

SEQ ID NO: 109582 - RNA, 20 nt, Artificial Sequence
  Synthetic
auucuagaaugaaaauauug

SEQ ID NO: 109583 - RNA, 21 nt, Artificial Sequence
  Synthetic
cauucuagaaugaaaauauug

SEQ ID NO: 109584 - RNA, 22 nt, Artificial Sequence
  Synthetic
acauucuagaaugaaaauauug

SEQ ID NO: 109585 - RNA, 24 nt, Artificial Sequence
  Synthetic
agacauucuagaaugaaaauauug

SEQ ID NO: 109586 - RNA, 19 nt, Artificial Sequence
  Synthetic
agaaaaugguauaauauug

SEQ ID NO: 109587 - RNA, 22 nt, Artificial Sequence
  Synthetic
aggagaaaaugguauaauauug

SEQ ID NO: 109588 - RNA, 23 nt, Artificial Sequence
  Synthetic
uaggagaaaaugguauaauauug

SEQ ID NO: 109589 - RNA, 24 nt, Artificial Sequence
  Synthetic
uuaggagaaaaugguauaauauug

SEQ ID NO: 109590 - RNA, 18 nt, Artificial Sequence
  Synthetic
ucacugcuguacauauug

SEQ ID NO: 109591 - RNA, 19 nt, Artificial Sequence
  Synthetic
uucacugcuguacauauug

SEQ ID NO: 109592 - RNA, 20 nt, Artificial Sequence
  Synthetic
auucacugcuguacauauug

SEQ ID NO: 109593 - RNA, 21 nt, Artificial Sequence
  Synthetic
uauucacugcuguacauauug

SEQ ID NO: 109594 - RNA, 22 nt, Artificial Sequence
  Synthetic
auauucacugcuguacauauug

SEQ ID NO: 109595 - RNA, 23 nt, Artificial Sequence
  Synthetic
aauauucacugcuguacauauug

SEQ ID NO: 109596 - RNA, 18 nt, Artificial Sequence
  Synthetic
uguacaauuuauauauug

SEQ ID NO: 109597 - RNA, 22 nt, Artificial Sequence
  Synthetic
aggguguacaauuuauauauug

SEQ ID NO: 109598 - RNA, 23 nt, Artificial Sequence
  Synthetic
caggguguacaauuuauauauug

SEQ ID NO: 109599 - RNA, 24 nt, Artificial Sequence
  Synthetic
ucaggguguacaauuuauauauug

SEQ ID NO: 109600 - RNA, 18 nt, Artificial Sequence
  Synthetic
uggauuuucugucuauug

SEQ ID NO: 109601 - RNA, 20 nt, Artificial Sequence
  Synthetic
uguggauuuucugucuauug

SEQ ID NO: 109602 - RNA, 21 nt, Artificial Sequence
  Synthetic
auguggauuuucugucuauug

SEQ ID NO: 109603 - RNA, 22 nt, Artificial Sequence
  Synthetic
aauguggauuuucugucuauug

SEQ ID NO: 109604 - RNA, 23 nt, Artificial Sequence
  Synthetic
uaauguggauuuucugucuauug

SEQ ID NO: 109605 - RNA, 24 nt, Artificial Sequence
  Synthetic
uuaauguggauuuucugucuauug

SEQ ID NO: 109606 - RNA, 24 nt, Artificial Sequence
  Synthetic
ugggaauuuaucuuaaagguauug

SEQ ID NO: 109607 - RNA, 18 nt, Artificial Sequence
  Synthetic
agugggaaagguguauug

SEQ ID NO: 109608 - RNA, 19 nt, Artificial Sequence
  Synthetic
aagugggaaagguguauug

SEQ ID NO: 109609 - RNA, 22 nt, Artificial Sequence
  Synthetic
cggaagugggaaagguguauug

SEQ ID NO: 109610 - RNA, 23 nt, Artificial Sequence
  Synthetic
ccggaagugggaaagguguauug

SEQ ID NO: 109611 - RNA, 24 nt, Artificial Sequence
  Synthetic
uccggaagugggaaagguguauug

SEQ ID NO: 109612 - RNA, 19 nt, Artificial Sequence
  Synthetic
agcuuucugccuuguauug

SEQ ID NO: 109613 - RNA, 20 nt, Artificial Sequence
  Synthetic
cagcuuucugccuuguauug

SEQ ID NO: 109614 - RNA, 21 nt, Artificial Sequence
  Synthetic
acagcuuucugccuuguauug

SEQ ID NO: 109615 - RNA, 22 nt, Artificial Sequence
  Synthetic
cacagcuuucugccuuguauug

SEQ ID NO: 109616 - RNA, 23 nt, Artificial Sequence
  Synthetic
ucacagcuuucugccuuguauug

SEQ ID NO: 109617 - RNA, 24 nt, Artificial Sequence
  Synthetic
cucacagcuuucugccuuguauug

SEQ ID NO: 109618 - RNA, 18 nt, Artificial Sequence
  Synthetic
uucaggauaaaauuauug

SEQ ID NO: 109619 - RNA, 19 nt, Artificial Sequence
  Synthetic
auucaggauaaaauuauug

SEQ ID NO: 109620 - RNA, 20 nt, Artificial Sequence
  Synthetic
cauucaggauaaaauuauug

SEQ ID NO: 109621 - RNA, 21 nt, Artificial Sequence
  Synthetic
ucauucaggauaaaauuauug

SEQ ID NO: 109622 - RNA, 22 nt, Artificial Sequence
  Synthetic
cucauucaggauaaaauuauug

SEQ ID NO: 109623 - RNA, 24 nt, Artificial Sequence
  Synthetic
ugcucauucaggauaaaauuauug

SEQ ID NO: 109624 - RNA, 18 nt, Artificial Sequence
  Synthetic
uaagcccgaucauuauug

SEQ ID NO: 109625 - RNA, 20 nt, Artificial Sequence
  Synthetic
aguaagcccgaucauuauug

SEQ ID NO: 109626 - RNA, 22 nt, Artificial Sequence
  Synthetic
agaguaagcccgaucauuauug

SEQ ID NO: 109627 - RNA, 24 nt, Artificial Sequence
  Synthetic
ugagaguaagcccgaucauuauug

SEQ ID NO: 109628 - RNA, 18 nt, Artificial Sequence
  Synthetic
ucccucuucauuaacuug

SEQ ID NO: 109629 - RNA, 19 nt, Artificial Sequence
  Synthetic
uucccucuucauuaacuug

SEQ ID NO: 109630 - RNA, 20 nt, Artificial Sequence
  Synthetic
uuucccucuucauuaacuug

SEQ ID NO: 109631 - RNA, 21 nt, Artificial Sequence
  Synthetic
cuuucccucuucauuaacuug

SEQ ID NO: 109632 - RNA, 22 nt, Artificial Sequence
  Synthetic
ucuuucccucuucauuaacuug

SEQ ID NO: 109633 - RNA, 23 nt, Artificial Sequence
  Synthetic
uucuuucccucuucauuaacuug

SEQ ID NO: 109634 - RNA, 24 nt, Artificial Sequence
  Synthetic
uuucuuucccucuucauuaacuug

SEQ ID NO: 109635 - RNA, 18 nt, Artificial Sequence
  Synthetic
uuguuuuacuugcacuug

SEQ ID NO: 109636 - RNA, 19 nt, Artificial Sequence
  Synthetic
auuguuuuacuugcacuug

SEQ ID NO: 109637 - RNA, 20 nt, Artificial Sequence
  Synthetic
cauuguuuuacuugcacuug

SEQ ID NO: 109638 - RNA, 21 nt, Artificial Sequence
  Synthetic
ucauuguuuuacuugcacuug

SEQ ID NO: 109639 - RNA, 22 nt, Artificial Sequence
  Synthetic
uucauuguuuuacuugcacuug

SEQ ID NO: 109640 - RNA, 23 nt, Artificial Sequence
  Synthetic
uuucauuguuuuacuugcacuug

SEQ ID NO: 109641 - RNA, 21 nt, Artificial Sequence
  Synthetic
agggagcagcagaaucacuug

SEQ ID NO: 109642 - RNA, 23 nt, Artificial Sequence
  Synthetic
ugagggagcagcagaaucacuug

SEQ ID NO: 109643 - RNA, 24 nt, Artificial Sequence
  Synthetic
augagggagcagcagaaucacuug

SEQ ID NO: 109644 - RNA, 18 nt, Artificial Sequence
  Synthetic
caaaaugugaaauacuug

SEQ ID NO: 109645 - RNA, 19 nt, Artificial Sequence
  Synthetic
ccaaaaugugaaauacuug

SEQ ID NO: 109646 - RNA, 20 nt, Artificial Sequence
  Synthetic
cccaaaaugugaaauacuug

SEQ ID NO: 109647 - RNA, 21 nt, Artificial Sequence
  Synthetic
ccccaaaaugugaaauacuug

SEQ ID NO: 109648 - RNA, 24 nt, Artificial Sequence
  Synthetic
aggccccaaaaugugaaauacuug

SEQ ID NO: 109649 - RNA, 18 nt, Artificial Sequence
  Synthetic
uggcacucuaaauacuug

SEQ ID NO: 109650 - RNA, 20 nt, Artificial Sequence
  Synthetic
aguggcacucuaaauacuug

SEQ ID NO: 109651 - RNA, 21 nt, Artificial Sequence
  Synthetic
aaguggcacucuaaauacuug

SEQ ID NO: 109652 - RNA, 22 nt, Artificial Sequence
  Synthetic
aaaguggcacucuaaauacuug

SEQ ID NO: 109653 - RNA, 23 nt, Artificial Sequence
  Synthetic
aaaaguggcacucuaaauacuug

SEQ ID NO: 109654 - RNA, 24 nt, Artificial Sequence
  Synthetic
aaaaaguggcacucuaaauacuug

SEQ ID NO: 109655 - RNA, 18 nt, Artificial Sequence
  Synthetic
uugucccagugauacuug

SEQ ID NO: 109656 - RNA, 19 nt, Artificial Sequence
  Synthetic
auugucccagugauacuug

SEQ ID NO: 109657 - RNA, 20 nt, Artificial Sequence
  Synthetic
uauugucccagugauacuug

SEQ ID NO: 109658 - RNA, 21 nt, Artificial Sequence
  Synthetic
auauugucccagugauacuug

SEQ ID NO: 109659 - RNA, 22 nt, Artificial Sequence
  Synthetic
aauauugucccagugauacuug

SEQ ID NO: 109660 - RNA, 23 nt, Artificial Sequence
  Synthetic
caauauugucccagugauacuug

SEQ ID NO: 109661 - RNA, 24 nt, Artificial Sequence
  Synthetic
acaauauugucccagugauacuug

SEQ ID NO: 109662 - RNA, 21 nt, Artificial Sequence
  Synthetic
cauaguaaguguauguacuug

SEQ ID NO: 109663 - RNA, 22 nt, Artificial Sequence
  Synthetic
acauaguaaguguauguacuug

SEQ ID NO: 109664 - RNA, 18 nt, Artificial Sequence
  Synthetic
cacuucaacuuuuacuug

SEQ ID NO: 109665 - RNA, 19 nt, Artificial Sequence
  Synthetic
ccacuucaacuuuuacuug

SEQ ID NO: 109666 - RNA, 21 nt, Artificial Sequence
  Synthetic
ugccacuucaacuuuuacuug

SEQ ID NO: 109667 - RNA, 22 nt, Artificial Sequence
  Synthetic
uugccacuucaacuuuuacuug

SEQ ID NO: 109668 - RNA, 23 nt, Artificial Sequence
  Synthetic
cuugccacuucaacuuuuacuug

SEQ ID NO: 109669 - RNA, 24 nt, Artificial Sequence
  Synthetic
ccuugccacuucaacuuuuacuug

SEQ ID NO: 109670 - RNA, 19 nt, Artificial Sequence
  Synthetic
aguguuguuucuaaccuug

SEQ ID NO: 109671 - RNA, 20 nt, Artificial Sequence
  Synthetic
uaguguuguuucuaaccuug

SEQ ID NO: 109672 - RNA, 21 nt, Artificial Sequence
  Synthetic
auaguguuguuucuaaccuug

SEQ ID NO: 109673 - RNA, 22 nt, Artificial Sequence
  Synthetic
uauaguguuguuucuaaccuug

SEQ ID NO: 109674 - RNA, 23 nt, Artificial Sequence
  Synthetic
auauaguguuguuucuaaccuug

SEQ ID NO: 109675 - RNA, 24 nt, Artificial Sequence
  Synthetic
uauauaguguuguuucuaaccuug

SEQ ID NO: 109676 - RNA, 19 nt, Artificial Sequence
  Synthetic
ugauuaugucacuaccuug

SEQ ID NO: 109677 - RNA, 20 nt, Artificial Sequence
  Synthetic
augauuaugucacuaccuug

SEQ ID NO: 109678 - RNA, 21 nt, Artificial Sequence
  Synthetic
aaugauuaugucacuaccuug

SEQ ID NO: 109679 - RNA, 22 nt, Artificial Sequence
  Synthetic
caaugauuaugucacuaccuug

SEQ ID NO: 109680 - RNA, 23 nt, Artificial Sequence
  Synthetic
acaaugauuaugucacuaccuug

SEQ ID NO: 109681 - RNA, 24 nt, Artificial Sequence
  Synthetic
aacaaugauuaugucacuaccuug

SEQ ID NO: 109682 - RNA, 18 nt, Artificial Sequence
  Synthetic
aguuucuuacuacccuug

SEQ ID NO: 109683 - RNA, 19 nt, Artificial Sequence
  Synthetic
uaguuucuuacuacccuug

SEQ ID NO: 109684 - RNA, 20 nt, Artificial Sequence
  Synthetic
auaguuucuuacuacccuug

SEQ ID NO: 109685 - RNA, 21 nt, Artificial Sequence
  Synthetic
uauaguuucuuacuacccuug

SEQ ID NO: 109686 - RNA, 22 nt, Artificial Sequence
  Synthetic
auauaguuucuuacuacccuug

SEQ ID NO: 109687 - RNA, 23 nt, Artificial Sequence
  Synthetic
cauauaguuucuuacuacccuug

SEQ ID NO: 109688 - RNA, 24 nt, Artificial Sequence
  Synthetic
ucauauaguuucuuacuacccuug

SEQ ID NO: 109689 - RNA, 18 nt, Artificial Sequence
  Synthetic
aaucuagcccuucccuug

SEQ ID NO: 109690 - RNA, 20 nt, Artificial Sequence
  Synthetic
agaaucuagcccuucccuug

SEQ ID NO: 109691 - RNA, 21 nt, Artificial Sequence
  Synthetic
cagaaucuagcccuucccuug

SEQ ID NO: 109692 - RNA, 22 nt, Artificial Sequence
  Synthetic
ucagaaucuagcccuucccuug

SEQ ID NO: 109693 - RNA, 23 nt, Artificial Sequence
  Synthetic
aucagaaucuagcccuucccuug

SEQ ID NO: 109694 - RNA, 24 nt, Artificial Sequence
  Synthetic
aaucagaaucuagcccuucccuug

SEQ ID NO: 109695 - RNA, 20 nt, Artificial Sequence
  Synthetic
aggacuuggcuugagccuug

SEQ ID NO: 109696 - RNA, 21 nt, Artificial Sequence
  Synthetic
caggacuuggcuugagccuug

SEQ ID NO: 109697 - RNA, 22 nt, Artificial Sequence
  Synthetic
acaggacuuggcuugagccuug

SEQ ID NO: 109698 - RNA, 23 nt, Artificial Sequence
  Synthetic
uacaggacuuggcuugagccuug

SEQ ID NO: 109699 - RNA, 24 nt, Artificial Sequence
  Synthetic
uuacaggacuuggcuugagccuug

SEQ ID NO: 109700 - RNA, 18 nt, Artificial Sequence
  Synthetic
cauucaguuugguccuug

SEQ ID NO: 109701 - RNA, 19 nt, Artificial Sequence
  Synthetic
acauucaguuugguccuug

SEQ ID NO: 109702 - RNA, 20 nt, Artificial Sequence
  Synthetic
aacauucaguuugguccuug

SEQ ID NO: 109703 - RNA, 22 nt, Artificial Sequence
  Synthetic
cgaacauucaguuugguccuug

SEQ ID NO: 109704 - RNA, 23 nt, Artificial Sequence
  Synthetic
ucgaacauucaguuugguccuug

SEQ ID NO: 109705 - RNA, 21 nt, Artificial Sequence
  Synthetic
ucucucccucucucuuccuug

SEQ ID NO: 109706 - RNA, 22 nt, Artificial Sequence
  Synthetic
uucucucccucucucuuccuug

SEQ ID NO: 109707 - RNA, 23 nt, Artificial Sequence
  Synthetic
cuucucucccucucucuuccuug

SEQ ID NO: 109708 - RNA, 24 nt, Artificial Sequence
  Synthetic
ccuucucucccucucucuuccuug

SEQ ID NO: 109709 - RNA, 18 nt, Artificial Sequence
  Synthetic
uuuaaugaacacagcuug

SEQ ID NO: 109710 - RNA, 19 nt, Artificial Sequence
  Synthetic
auuuaaugaacacagcuug

SEQ ID NO: 109711 - RNA, 20 nt, Artificial Sequence
  Synthetic
cauuuaaugaacacagcuug

SEQ ID NO: 109712 - RNA, 18 nt, Artificial Sequence
  Synthetic
ugagucagaaguagcuug

SEQ ID NO: 109713 - RNA, 19 nt, Artificial Sequence
  Synthetic
augagucagaaguagcuug

SEQ ID NO: 109714 - RNA, 20 nt, Artificial Sequence
  Synthetic
caugagucagaaguagcuug

SEQ ID NO: 109715 - RNA, 21 nt, Artificial Sequence
  Synthetic
acaugagucagaaguagcuug

SEQ ID NO: 109716 - RNA, 23 nt, Artificial Sequence
  Synthetic
agacaugagucagaaguagcuug

SEQ ID NO: 109717 - RNA, 24 nt, Artificial Sequence
  Synthetic
uagacaugagucagaaguagcuug

SEQ ID NO: 109718 - RNA, 18 nt, Artificial Sequence
  Synthetic
ucaaaucuuaaaggcuug

SEQ ID NO: 109719 - RNA, 19 nt, Artificial Sequence
  Synthetic
uucaaaucuuaaaggcuug

SEQ ID NO: 109720 - RNA, 20 nt, Artificial Sequence
  Synthetic
uuucaaaucuuaaaggcuug

SEQ ID NO: 109721 - RNA, 21 nt, Artificial Sequence
  Synthetic
auuucaaaucuuaaaggcuug

SEQ ID NO: 109722 - RNA, 23 nt, Artificial Sequence
  Synthetic
agauuucaaaucuuaaaggcuug

SEQ ID NO: 109723 - RNA, 24 nt, Artificial Sequence
  Synthetic
cagauuucaaaucuuaaaggcuug

SEQ ID NO: 109724 - RNA, 18 nt, Artificial Sequence
  Synthetic
acauuaggaaugggcuug

SEQ ID NO: 109725 - RNA, 19 nt, Artificial Sequence
  Synthetic
cacauuaggaaugggcuug

SEQ ID NO: 109726 - RNA, 20 nt, Artificial Sequence
  Synthetic
ucacauuaggaaugggcuug

SEQ ID NO: 109727 - RNA, 21 nt, Artificial Sequence
  Synthetic
cucacauuaggaaugggcuug

SEQ ID NO: 109728 - RNA, 22 nt, Artificial Sequence
  Synthetic
acucacauuaggaaugggcuug

SEQ ID NO: 109729 - RNA, 23 nt, Artificial Sequence
  Synthetic
aacucacauuaggaaugggcuug

SEQ ID NO: 109730 - RNA, 24 nt, Artificial Sequence
  Synthetic
aaacucacauuaggaaugggcuug

SEQ ID NO: 109731 - RNA, 18 nt, Artificial Sequence
  Synthetic
aaaugauagaaaugcuug

SEQ ID NO: 109732 - RNA, 19 nt, Artificial Sequence
  Synthetic
aaaaugauagaaaugcuug

SEQ ID NO: 109733 - RNA, 21 nt, Artificial Sequence
  Synthetic
agaaaaugauagaaaugcuug

SEQ ID NO: 109734 - RNA, 22 nt, Artificial Sequence
  Synthetic
aagaaaaugauagaaaugcuug

SEQ ID NO: 109735 - RNA, 23 nt, Artificial Sequence
  Synthetic
aaagaaaaugauagaaaugcuug

SEQ ID NO: 109736 - RNA, 24 nt, Artificial Sequence
  Synthetic
uaaagaaaaugauagaaaugcuug

SEQ ID NO: 109737 - RNA, 18 nt, Artificial Sequence
  Synthetic
auuuaauacucaugcuug

SEQ ID NO: 109738 - RNA, 19 nt, Artificial Sequence
  Synthetic
cauuuaauacucaugcuug

SEQ ID NO: 109739 - RNA, 21 nt, Artificial Sequence
  Synthetic
agcauuuaauacucaugcuug

SEQ ID NO: 109740 - RNA, 22 nt, Artificial Sequence
  Synthetic
uagcauuuaauacucaugcuug

SEQ ID NO: 109741 - RNA, 23 nt, Artificial Sequence
  Synthetic
auagcauuuaauacucaugcuug

SEQ ID NO: 109742 - RNA, 24 nt, Artificial Sequence
  Synthetic
aauagcauuuaauacucaugcuug

SEQ ID NO: 109743 - RNA, 20 nt, Artificial Sequence
  Synthetic
aggaccaucuccucugcuug

SEQ ID NO: 109744 - RNA, 21 nt, Artificial Sequence
  Synthetic
aaggaccaucuccucugcuug

SEQ ID NO: 109745 - RNA, 22 nt, Artificial Sequence
  Synthetic
caaggaccaucuccucugcuug

SEQ ID NO: 109746 - RNA, 24 nt, Artificial Sequence
  Synthetic
ugcaaggaccaucuccucugcuug

SEQ ID NO: 109747 - RNA, 21 nt, Artificial Sequence
  Synthetic
agggcaagauacuauugcuug

SEQ ID NO: 109748 - RNA, 22 nt, Artificial Sequence
  Synthetic
aagggcaagauacuauugcuug

SEQ ID NO: 109749 - RNA, 23 nt, Artificial Sequence
  Synthetic
uaagggcaagauacuauugcuug

SEQ ID NO: 109750 - RNA, 24 nt, Artificial Sequence
  Synthetic
uuaagggcaagauacuauugcuug

SEQ ID NO: 109751 - RNA, 18 nt, Artificial Sequence
  Synthetic
acaaaaaucauaaucuug

SEQ ID NO: 109752 - RNA, 19 nt, Artificial Sequence
  Synthetic
uacaaaaaucauaaucuug

SEQ ID NO: 109753 - RNA, 20 nt, Artificial Sequence
  Synthetic
cuacaaaaaucauaaucuug

SEQ ID NO: 109754 - RNA, 21 nt, Artificial Sequence
  Synthetic
ccuacaaaaaucauaaucuug

SEQ ID NO: 109755 - RNA, 22 nt, Artificial Sequence
  Synthetic
accuacaaaaaucauaaucuug

SEQ ID NO: 109756 - RNA, 23 nt, Artificial Sequence
  Synthetic
aaccuacaaaaaucauaaucuug

SEQ ID NO: 109757 - RNA, 24 nt, Artificial Sequence
  Synthetic
uaaccuacaaaaaucauaaucuug

SEQ ID NO: 109758 - RNA, 18 nt, Artificial Sequence
  Synthetic
acccagauaagcaucuug

SEQ ID NO: 109759 - RNA, 19 nt, Artificial Sequence
  Synthetic
cacccagauaagcaucuug

SEQ ID NO: 109760 - RNA, 21 nt, Artificial Sequence
  Synthetic
ugcacccagauaagcaucuug

SEQ ID NO: 109761 - RNA, 22 nt, Artificial Sequence
  Synthetic
cugcacccagauaagcaucuug

SEQ ID NO: 109762 - RNA, 23 nt, Artificial Sequence
  Synthetic
ucugcacccagauaagcaucuug

SEQ ID NO: 109763 - RNA, 24 nt, Artificial Sequence
  Synthetic
cucugcacccagauaagcaucuug

SEQ ID NO: 109764 - RNA, 18 nt, Artificial Sequence
  Synthetic
uauuccucucugaucuug

SEQ ID NO: 109765 - RNA, 20 nt, Artificial Sequence
  Synthetic
cguauuccucucugaucuug

SEQ ID NO: 109766 - RNA, 21 nt, Artificial Sequence
  Synthetic
acguauuccucucugaucuug

SEQ ID NO: 109767 - RNA, 22 nt, Artificial Sequence
  Synthetic
uacguauuccucucugaucuug

SEQ ID NO: 109768 - RNA, 23 nt, Artificial Sequence
  Synthetic
auacguauuccucucugaucuug

SEQ ID NO: 109769 - RNA, 24 nt, Artificial Sequence
  Synthetic
uauacguauuccucucugaucuug

SEQ ID NO: 109770 - RNA, 18 nt, Artificial Sequence
  Synthetic
uauuacccgagacucuug

SEQ ID NO: 109771 - RNA, 19 nt, Artificial Sequence
  Synthetic
uuauuacccgagacucuug

SEQ ID NO: 109772 - RNA, 20 nt, Artificial Sequence
  Synthetic
uuuauuacccgagacucuug

SEQ ID NO: 109773 - RNA, 21 nt, Artificial Sequence
  Synthetic
uuuuauuacccgagacucuug

SEQ ID NO: 109774 - RNA, 22 nt, Artificial Sequence
  Synthetic
cuuuuauuacccgagacucuug

SEQ ID NO: 109775 - RNA, 23 nt, Artificial Sequence
  Synthetic
ucuuuuauuacccgagacucuug

SEQ ID NO: 109776 - RNA, 24 nt, Artificial Sequence
  Synthetic
aucuuuuauuacccgagacucuug

SEQ ID NO: 109777 - RNA, 18 nt, Artificial Sequence
  Synthetic
ugaaaauacauacucuug

SEQ ID NO: 109778 - RNA, 19 nt, Artificial Sequence
  Synthetic
uugaaaauacauacucuug

SEQ ID NO: 109779 - RNA, 22 nt, Artificial Sequence
  Synthetic
agguugaaaauacauacucuug

SEQ ID NO: 109780 - RNA, 23 nt, Artificial Sequence
  Synthetic
aagguugaaaauacauacucuug

SEQ ID NO: 109781 - RNA, 24 nt, Artificial Sequence
  Synthetic
aaagguugaaaauacauacucuug

SEQ ID NO: 109782 - RNA, 18 nt, Artificial Sequence
  Synthetic
cagugccaucugcucuug

SEQ ID NO: 109783 - RNA, 19 nt, Artificial Sequence
  Synthetic
acagugccaucugcucuug

SEQ ID NO: 109784 - RNA, 20 nt, Artificial Sequence
  Synthetic
cacagugccaucugcucuug

SEQ ID NO: 109785 - RNA, 21 nt, Artificial Sequence
  Synthetic
ccacagugccaucugcucuug

SEQ ID NO: 109786 - RNA, 22 nt, Artificial Sequence
  Synthetic
uccacagugccaucugcucuug

SEQ ID NO: 109787 - RNA, 23 nt, Artificial Sequence
  Synthetic
uuccacagugccaucugcucuug

SEQ ID NO: 109788 - RNA, 24 nt, Artificial Sequence
  Synthetic
cuuccacagugccaucugcucuug

SEQ ID NO: 109789 - RNA, 18 nt, Artificial Sequence
  Synthetic
uacauccaucuucucuug

SEQ ID NO: 109790 - RNA, 19 nt, Artificial Sequence
  Synthetic
auacauccaucuucucuug

SEQ ID NO: 109791 - RNA, 20 nt, Artificial Sequence
  Synthetic
aauacauccaucuucucuug

SEQ ID NO: 109792 - RNA, 21 nt, Artificial Sequence
  Synthetic
caauacauccaucuucucuug

SEQ ID NO: 109793 - RNA, 22 nt, Artificial Sequence
  Synthetic
ucaauacauccaucuucucuug

SEQ ID NO: 109794 - RNA, 23 nt, Artificial Sequence
  Synthetic
aucaauacauccaucuucucuug

SEQ ID NO: 109795 - RNA, 24 nt, Artificial Sequence
  Synthetic
aaucaauacauccaucuucucuug

SEQ ID NO: 109796 - RNA, 18 nt, Artificial Sequence
  Synthetic
uauuuuauuagggucuug

SEQ ID NO: 109797 - RNA, 19 nt, Artificial Sequence
  Synthetic
cuauuuuauuagggucuug

SEQ ID NO: 109798 - RNA, 20 nt, Artificial Sequence
  Synthetic
ucuauuuuauuagggucuug

SEQ ID NO: 109799 - RNA, 21 nt, Artificial Sequence
  Synthetic
aucuauuuuauuagggucuug

SEQ ID NO: 109800 - RNA, 22 nt, Artificial Sequence
  Synthetic
caucuauuuuauuagggucuug

SEQ ID NO: 109801 - RNA, 23 nt, Artificial Sequence
  Synthetic
ucaucuauuuuauuagggucuug

SEQ ID NO: 109802 - RNA, 24 nt, Artificial Sequence
  Synthetic
cucaucuauuuuauuagggucuug

SEQ ID NO: 109803 - RNA, 18 nt, Artificial Sequence
  Synthetic
auaauuguugaugucuug

SEQ ID NO: 109804 - RNA, 20 nt, Artificial Sequence
  Synthetic
ugauaauuguugaugucuug

SEQ ID NO: 109805 - RNA, 21 nt, Artificial Sequence
  Synthetic
uugauaauuguugaugucuug

SEQ ID NO: 109806 - RNA, 22 nt, Artificial Sequence
  Synthetic
uuugauaauuguugaugucuug

SEQ ID NO: 109807 - RNA, 23 nt, Artificial Sequence
  Synthetic
auuugauaauuguugaugucuug

SEQ ID NO: 109808 - RNA, 21 nt, Artificial Sequence
  Synthetic
aagcacagagacucugucuug

SEQ ID NO: 109809 - RNA, 22 nt, Artificial Sequence
  Synthetic
aaagcacagagacucugucuug

SEQ ID NO: 109810 - RNA, 23 nt, Artificial Sequence
  Synthetic
aaaagcacagagacucugucuug

SEQ ID NO: 109811 - RNA, 24 nt, Artificial Sequence
  Synthetic
caaaagcacagagacucugucuug

SEQ ID NO: 109812 - RNA, 18 nt, Artificial Sequence
  Synthetic
caacuagcuuaauucuug

SEQ ID NO: 109813 - RNA, 20 nt, Artificial Sequence
  Synthetic
agcaacuagcuuaauucuug

SEQ ID NO: 109814 - RNA, 21 nt, Artificial Sequence
  Synthetic
cagcaacuagcuuaauucuug

SEQ ID NO: 109815 - RNA, 22 nt, Artificial Sequence
  Synthetic
ucagcaacuagcuuaauucuug

SEQ ID NO: 109816 - RNA, 23 nt, Artificial Sequence
  Synthetic
cucagcaacuagcuuaauucuug

SEQ ID NO: 109817 - RNA, 24 nt, Artificial Sequence
  Synthetic
ucucagcaacuagcuuaauucuug

SEQ ID NO: 109818 - RNA, 21 nt, Artificial Sequence
  Synthetic
agggaaaaaaaaaauuucuug

SEQ ID NO: 109819 - RNA, 22 nt, Artificial Sequence
  Synthetic
cagggaaaaaaaaaauuucuug

SEQ ID NO: 109820 - RNA, 23 nt, Artificial Sequence
  Synthetic
ccagggaaaaaaaaaauuucuug

SEQ ID NO: 109821 - RNA, 24 nt, Artificial Sequence
  Synthetic
accagggaaaaaaaaaauuucuug

SEQ ID NO: 109822 - RNA, 18 nt, Artificial Sequence
  Synthetic
cggacccacaauuucuug

SEQ ID NO: 109823 - RNA, 19 nt, Artificial Sequence
  Synthetic
acggacccacaauuucuug

SEQ ID NO: 109824 - RNA, 20 nt, Artificial Sequence
  Synthetic
cacggacccacaauuucuug

SEQ ID NO: 109825 - RNA, 21 nt, Artificial Sequence
  Synthetic
acacggacccacaauuucuug

SEQ ID NO: 109826 - RNA, 22 nt, Artificial Sequence
  Synthetic
aacacggacccacaauuucuug

SEQ ID NO: 109827 - RNA, 23 nt, Artificial Sequence
  Synthetic
caacacggacccacaauuucuug

SEQ ID NO: 109828 - RNA, 24 nt, Artificial Sequence
  Synthetic
ucaacacggacccacaauuucuug

SEQ ID NO: 109829 - RNA, 18 nt, Artificial Sequence
  Synthetic
agcaaaaguccuuucuug

SEQ ID NO: 109830 - RNA, 19 nt, Artificial Sequence
  Synthetic
aagcaaaaguccuuucuug

SEQ ID NO: 109831 - RNA, 20 nt, Artificial Sequence
  Synthetic
caagcaaaaguccuuucuug

SEQ ID NO: 109832 - RNA, 21 nt, Artificial Sequence
  Synthetic
ucaagcaaaaguccuuucuug

SEQ ID NO: 109833 - RNA, 22 nt, Artificial Sequence
  Synthetic
uucaagcaaaaguccuuucuug

SEQ ID NO: 109834 - RNA, 23 nt, Artificial Sequence
  Synthetic
uuucaagcaaaaguccuuucuug

SEQ ID NO: 109835 - RNA, 24 nt, Artificial Sequence
  Synthetic
auuucaagcaaaaguccuuucuug

SEQ ID NO: 109836 - RNA, 18 nt, Artificial Sequence
  Synthetic
ucccaucuacuuuucuug

SEQ ID NO: 109837 - RNA, 19 nt, Artificial Sequence
  Synthetic
aucccaucuacuuuucuug

SEQ ID NO: 109838 - RNA, 20 nt, Artificial Sequence
  Synthetic
aaucccaucuacuuuucuug

SEQ ID NO: 109839 - RNA, 21 nt, Artificial Sequence
  Synthetic
uaaucccaucuacuuuucuug

SEQ ID NO: 109840 - RNA, 22 nt, Artificial Sequence
  Synthetic
auaaucccaucuacuuuucuug

SEQ ID NO: 109841 - RNA, 23 nt, Artificial Sequence
  Synthetic
aauaaucccaucuacuuuucuug

SEQ ID NO: 109842 - RNA, 24 nt, Artificial Sequence
  Synthetic
aaauaaucccaucuacuuuucuug

SEQ ID NO: 109843 - RNA, 18 nt, Artificial Sequence
  Synthetic
uaagucagacaaaaguug

SEQ ID NO: 109844 - RNA, 19 nt, Artificial Sequence
  Synthetic
cuaagucagacaaaaguug

SEQ ID NO: 109845 - RNA, 20 nt, Artificial Sequence
  Synthetic
ucuaagucagacaaaaguug

SEQ ID NO: 109846 - RNA, 21 nt, Artificial Sequence
  Synthetic
aucuaagucagacaaaaguug

SEQ ID NO: 109847 - RNA, 22 nt, Artificial Sequence
  Synthetic
aaucuaagucagacaaaaguug

SEQ ID NO: 109848 - RNA, 23 nt, Artificial Sequence
  Synthetic
aaaucuaagucagacaaaaguug

SEQ ID NO: 109849 - RNA, 24 nt, Artificial Sequence
  Synthetic
uaaaucuaagucagacaaaaguug

SEQ ID NO: 109850 - RNA, 18 nt, Artificial Sequence
  Synthetic
ugucugacaagaaaguug

SEQ ID NO: 109851 - RNA, 19 nt, Artificial Sequence
  Synthetic
augucugacaagaaaguug

SEQ ID NO: 109852 - RNA, 20 nt, Artificial Sequence
  Synthetic
uaugucugacaagaaaguug

SEQ ID NO: 109853 - RNA, 21 nt, Artificial Sequence
  Synthetic
cuaugucugacaagaaaguug

SEQ ID NO: 109854 - RNA, 22 nt, Artificial Sequence
  Synthetic
ucuaugucugacaagaaaguug

SEQ ID NO: 109855 - RNA, 23 nt, Artificial Sequence
  Synthetic
uucuaugucugacaagaaaguug

SEQ ID NO: 109856 - RNA, 24 nt, Artificial Sequence
  Synthetic
uuucuaugucugacaagaaaguug

SEQ ID NO: 109857 - RNA, 18 nt, Artificial Sequence
  Synthetic
aaaguguuaaacaaguug

SEQ ID NO: 109858 - RNA, 19 nt, Artificial Sequence
  Synthetic
aaaaguguuaaacaaguug

SEQ ID NO: 109859 - RNA, 20 nt, Artificial Sequence
  Synthetic
uaaaaguguuaaacaaguug

SEQ ID NO: 109860 - RNA, 21 nt, Artificial Sequence
  Synthetic
cuaaaaguguuaaacaaguug

SEQ ID NO: 109861 - RNA, 22 nt, Artificial Sequence
  Synthetic
ccuaaaaguguuaaacaaguug

SEQ ID NO: 109862 - RNA, 23 nt, Artificial Sequence
  Synthetic
uccuaaaaguguuaaacaaguug

SEQ ID NO: 109863 - RNA, 24 nt, Artificial Sequence
  Synthetic
auccuaaaaguguuaaacaaguug

SEQ ID NO: 109864 - RNA, 18 nt, Artificial Sequence
  Synthetic
caauggauuuagaaguug

SEQ ID NO: 109865 - RNA, 19 nt, Artificial Sequence
  Synthetic
ccaauggauuuagaaguug

SEQ ID NO: 109866 - RNA, 20 nt, Artificial Sequence
  Synthetic
accaauggauuuagaaguug

SEQ ID NO: 109867 - RNA, 21 nt, Artificial Sequence
  Synthetic
aaccaauggauuuagaaguug

SEQ ID NO: 109868 - RNA, 22 nt, Artificial Sequence
  Synthetic
uaaccaauggauuuagaaguug

SEQ ID NO: 109869 - RNA, 23 nt, Artificial Sequence
  Synthetic
uuaaccaauggauuuagaaguug

SEQ ID NO: 109870 - RNA, 24 nt, Artificial Sequence
  Synthetic
uuuaaccaauggauuuagaaguug

SEQ ID NO: 109871 - RNA, 18 nt, Artificial Sequence
  Synthetic
uaaauaauggugaaguug

SEQ ID NO: 109872 - RNA, 19 nt, Artificial Sequence
  Synthetic
uuaaauaauggugaaguug

SEQ ID NO: 109873 - RNA, 20 nt, Artificial Sequence
  Synthetic
auuaaauaauggugaaguug

SEQ ID NO: 109874 - RNA, 21 nt, Artificial Sequence
  Synthetic
aauuaaauaauggugaaguug

SEQ ID NO: 109875 - RNA, 22 nt, Artificial Sequence
  Synthetic
aaauuaaauaauggugaaguug

SEQ ID NO: 109876 - RNA, 23 nt, Artificial Sequence
  Synthetic
aaaauuaaauaauggugaaguug

SEQ ID NO: 109877 - RNA, 24 nt, Artificial Sequence
  Synthetic
aaaaauuaaauaauggugaaguug

SEQ ID NO: 109878 - RNA, 18 nt, Artificial Sequence
  Synthetic
aaaaacaaauuuaaguug

SEQ ID NO: 109879 - RNA, 19 nt, Artificial Sequence
  Synthetic
aaaaaacaaauuuaaguug

SEQ ID NO: 109880 - RNA, 20 nt, Artificial Sequence
  Synthetic
caaaaaacaaauuuaaguug

SEQ ID NO: 109881 - RNA, 21 nt, Artificial Sequence
  Synthetic
acaaaaaacaaauuuaaguug

SEQ ID NO: 109882 - RNA, 22 nt, Artificial Sequence
  Synthetic
cacaaaaaacaaauuuaaguug

SEQ ID NO: 109883 - RNA, 23 nt, Artificial Sequence
  Synthetic
ccacaaaaaacaaauuuaaguug

SEQ ID NO: 109884 - RNA, 24 nt, Artificial Sequence
  Synthetic
uccacaaaaaacaaauuuaaguug

SEQ ID NO: 109885 - RNA, 18 nt, Artificial Sequence
  Synthetic
augacucauaaacaguug

SEQ ID NO: 109886 - RNA, 19 nt, Artificial Sequence
  Synthetic
aaugacucauaaacaguug

SEQ ID NO: 109887 - RNA, 20 nt, Artificial Sequence
  Synthetic
uaaugacucauaaacaguug

SEQ ID NO: 109888 - RNA, 21 nt, Artificial Sequence
  Synthetic
auaaugacucauaaacaguug

SEQ ID NO: 109889 - RNA, 22 nt, Artificial Sequence
  Synthetic
uauaaugacucauaaacaguug

SEQ ID NO: 109890 - RNA, 23 nt, Artificial Sequence
  Synthetic
auauaaugacucauaaacaguug

SEQ ID NO: 109891 - RNA, 24 nt, Artificial Sequence
  Synthetic
uauauaaugacucauaaacaguug

SEQ ID NO: 109892 - RNA, 21 nt, Artificial Sequence
  Synthetic
ucaaauuguuucuuccaguug

SEQ ID NO: 109893 - RNA, 22 nt, Artificial Sequence
  Synthetic
aucaaauuguuucuuccaguug

SEQ ID NO: 109894 - RNA, 23 nt, Artificial Sequence
  Synthetic
caucaaauuguuucuuccaguug

SEQ ID NO: 109895 - RNA, 24 nt, Artificial Sequence
  Synthetic
ccaucaaauuguuucuuccaguug

SEQ ID NO: 109896 - RNA, 18 nt, Artificial Sequence
  Synthetic
caugguuuuaaagaguug

SEQ ID NO: 109897 - RNA, 19 nt, Artificial Sequence
  Synthetic
acaugguuuuaaagaguug

SEQ ID NO: 109898 - RNA, 21 nt, Artificial Sequence
  Synthetic
ugacaugguuuuaaagaguug

SEQ ID NO: 109899 - RNA, 24 nt, Artificial Sequence
  Synthetic
cggugacaugguuuuaaagaguug

SEQ ID NO: 109900 - RNA, 18 nt, Artificial Sequence
  Synthetic
ugguugaugggagaguug

SEQ ID NO: 109901 - RNA, 19 nt, Artificial Sequence
  Synthetic
uugguugaugggagaguug

SEQ ID NO: 109902 - RNA, 20 nt, Artificial Sequence
  Synthetic
auugguugaugggagaguug

SEQ ID NO: 109903 - RNA, 21 nt, Artificial Sequence
  Synthetic
uauugguugaugggagaguug

SEQ ID NO: 109904 - RNA, 23 nt, Artificial Sequence
  Synthetic
cguauugguugaugggagaguug

SEQ ID NO: 109905 - RNA, 24 nt, Artificial Sequence
  Synthetic
acguauugguugaugggagaguug

SEQ ID NO: 109906 - RNA, 18 nt, Artificial Sequence
  Synthetic
aaagggaagugagaguug

SEQ ID NO: 109907 - RNA, 19 nt, Artificial Sequence
  Synthetic
aaaagggaagugagaguug

SEQ ID NO: 109908 - RNA, 20 nt, Artificial Sequence
  Synthetic
aaaaagggaagugagaguug

SEQ ID NO: 109909 - RNA, 22 nt, Artificial Sequence
  Synthetic
cgaaaaagggaagugagaguug

SEQ ID NO: 109910 - RNA, 18 nt, Artificial Sequence
  Synthetic
ucaggaaaacaggaguug

SEQ ID NO: 109911 - RNA, 19 nt, Artificial Sequence
  Synthetic
aucaggaaaacaggaguug

SEQ ID NO: 109912 - RNA, 20 nt, Artificial Sequence
  Synthetic
caucaggaaaacaggaguug

SEQ ID NO: 109913 - RNA, 21 nt, Artificial Sequence
  Synthetic
ccaucaggaaaacaggaguug

SEQ ID NO: 109914 - RNA, 22 nt, Artificial Sequence
  Synthetic
uccaucaggaaaacaggaguug

SEQ ID NO: 109915 - RNA, 24 nt, Artificial Sequence
  Synthetic
aguccaucaggaaaacaggaguug

SEQ ID NO: 109916 - RNA, 19 nt, Artificial Sequence
  Synthetic
cgcuuuaacgggugaguug

SEQ ID NO: 109917 - RNA, 20 nt, Artificial Sequence
  Synthetic
ccgcuuuaacgggugaguug

SEQ ID NO: 109918 - RNA, 22 nt, Artificial Sequence
  Synthetic
agccgcuuuaacgggugaguug

SEQ ID NO: 109919 - RNA, 24 nt, Artificial Sequence
  Synthetic
agagccgcuuuaacgggugaguug

SEQ ID NO: 109920 - RNA, 18 nt, Artificial Sequence
  Synthetic
ugccagagacccuaguug

SEQ ID NO: 109921 - RNA, 19 nt, Artificial Sequence
  Synthetic
cugccagagacccuaguug

SEQ ID NO: 109922 - RNA, 20 nt, Artificial Sequence
  Synthetic
ucugccagagacccuaguug

SEQ ID NO: 109923 - RNA, 21 nt, Artificial Sequence
  Synthetic
uucugccagagacccuaguug

SEQ ID NO: 109924 - RNA, 22 nt, Artificial Sequence
  Synthetic
cuucugccagagacccuaguug

SEQ ID NO: 109925 - RNA, 24 nt, Artificial Sequence
  Synthetic
ugcuucugccagagacccuaguug

SEQ ID NO: 109926 - RNA, 18 nt, Artificial Sequence
  Synthetic
uucuucacacaguaguug

SEQ ID NO: 109927 - RNA, 19 nt, Artificial Sequence
  Synthetic
cuucuucacacaguaguug

SEQ ID NO: 109928 - RNA, 21 nt, Artificial Sequence
  Synthetic
ugcuucuucacacaguaguug

SEQ ID NO: 109929 - RNA, 22 nt, Artificial Sequence
  Synthetic
cugcuucuucacacaguaguug

SEQ ID NO: 109930 - RNA, 23 nt, Artificial Sequence
  Synthetic
ccugcuucuucacacaguaguug

SEQ ID NO: 109931 - RNA, 24 nt, Artificial Sequence
  Synthetic
cccugcuucuucacacaguaguug

SEQ ID NO: 109932 - RNA, 18 nt, Artificial Sequence
  Synthetic
cuaugaggccaguaguug

SEQ ID NO: 109933 - RNA, 19 nt, Artificial Sequence
  Synthetic
ccuaugaggccaguaguug

SEQ ID NO: 109934 - RNA, 20 nt, Artificial Sequence
  Synthetic
uccuaugaggccaguaguug

SEQ ID NO: 109935 - RNA, 21 nt, Artificial Sequence
  Synthetic
auccuaugaggccaguaguug

SEQ ID NO: 109936 - RNA, 22 nt, Artificial Sequence
  Synthetic
aauccuaugaggccaguaguug

SEQ ID NO: 109937 - RNA, 23 nt, Artificial Sequence
  Synthetic
caauccuaugaggccaguaguug

SEQ ID NO: 109938 - RNA, 24 nt, Artificial Sequence
  Synthetic
acaauccuaugaggccaguaguug

SEQ ID NO: 109939 - RNA, 18 nt, Artificial Sequence
  Synthetic
uaauucugcaacacguug

SEQ ID NO: 109940 - RNA, 19 nt, Artificial Sequence
  Synthetic
uuaauucugcaacacguug

SEQ ID NO: 109941 - RNA, 20 nt, Artificial Sequence
  Synthetic
uuuaauucugcaacacguug

SEQ ID NO: 109942 - RNA, 22 nt, Artificial Sequence
  Synthetic
uguuuaauucugcaacacguug

SEQ ID NO: 109943 - RNA, 23 nt, Artificial Sequence
  Synthetic
auguuuaauucugcaacacguug

SEQ ID NO: 109944 - RNA, 24 nt, Artificial Sequence
  Synthetic
aauguuuaauucugcaacacguug

SEQ ID NO: 109945 - RNA, 18 nt, Artificial Sequence
  Synthetic
uugugacagcggccguug

SEQ ID NO: 109946 - RNA, 20 nt, Artificial Sequence
  Synthetic
uguugugacagcggccguug

SEQ ID NO: 109947 - RNA, 21 nt, Artificial Sequence
  Synthetic
cuguugugacagcggccguug

SEQ ID NO: 109948 - RNA, 22 nt, Artificial Sequence
  Synthetic
acuguugugacagcggccguug

SEQ ID NO: 109949 - RNA, 23 nt, Artificial Sequence
  Synthetic
aacuguugugacagcggccguug

SEQ ID NO: 109950 - RNA, 24 nt, Artificial Sequence
  Synthetic
uaacuguugugacagcggccguug

SEQ ID NO: 109951 - RNA, 18 nt, Artificial Sequence
  Synthetic
aauaauuggucaucguug

SEQ ID NO: 109952 - RNA, 19 nt, Artificial Sequence
  Synthetic
aaauaauuggucaucguug

SEQ ID NO: 109953 - RNA, 21 nt, Artificial Sequence
  Synthetic
agaaauaauuggucaucguug

SEQ ID NO: 109954 - RNA, 22 nt, Artificial Sequence
  Synthetic
aagaaauaauuggucaucguug

SEQ ID NO: 109955 - RNA, 23 nt, Artificial Sequence
  Synthetic
aaagaaauaauuggucaucguug

SEQ ID NO: 109956 - RNA, 24 nt, Artificial Sequence
  Synthetic
caaagaaauaauuggucaucguug

SEQ ID NO: 109957 - RNA, 18 nt, Artificial Sequence
  Synthetic
uuaauaugguacagguug

SEQ ID NO: 109958 - RNA, 19 nt, Artificial Sequence
  Synthetic
uuuaauaugguacagguug

SEQ ID NO: 109959 - RNA, 20 nt, Artificial Sequence
  Synthetic
auuuaauaugguacagguug

SEQ ID NO: 109960 - RNA, 21 nt, Artificial Sequence
  Synthetic
aauuuaauaugguacagguug

SEQ ID NO: 109961 - RNA, 22 nt, Artificial Sequence
  Synthetic
aaauuuaauaugguacagguug

SEQ ID NO: 109962 - RNA, 23 nt, Artificial Sequence
  Synthetic
aaaauuuaauaugguacagguug

SEQ ID NO: 109963 - RNA, 24 nt, Artificial Sequence
  Synthetic
caaaauuuaauaugguacagguug

SEQ ID NO: 109964 - RNA, 18 nt, Artificial Sequence
  Synthetic
auauuugacucaggguug

SEQ ID NO: 109965 - RNA, 19 nt, Artificial Sequence
  Synthetic
uauauuugacucaggguug

SEQ ID NO: 109966 - RNA, 20 nt, Artificial Sequence
  Synthetic
cuauauuugacucaggguug

SEQ ID NO: 109967 - RNA, 21 nt, Artificial Sequence
  Synthetic
ccuauauuugacucaggguug

SEQ ID NO: 109968 - RNA, 22 nt, Artificial Sequence
  Synthetic
accuauauuugacucaggguug

SEQ ID NO: 109969 - RNA, 23 nt, Artificial Sequence
  Synthetic
aaccuauauuugacucaggguug

SEQ ID NO: 109970 - RNA, 24 nt, Artificial Sequence
  Synthetic
caaccuauauuugacucaggguug

SEQ ID NO: 109971 - RNA, 21 nt, Artificial Sequence
  Synthetic
aucagaaaauaauagggguug

SEQ ID NO: 109972 - RNA, 22 nt, Artificial Sequence
  Synthetic
caucagaaaauaauagggguug

SEQ ID NO: 109973 - RNA, 18 nt, Artificial Sequence
  Synthetic
auaccuauaccuggguug

SEQ ID NO: 109974 - RNA, 19 nt, Artificial Sequence
  Synthetic
uauaccuauaccuggguug

SEQ ID NO: 109975 - RNA, 20 nt, Artificial Sequence
  Synthetic
auauaccuauaccuggguug

SEQ ID NO: 109976 - RNA, 21 nt, Artificial Sequence
  Synthetic
cauauaccuauaccuggguug

SEQ ID NO: 109977 - RNA, 22 nt, Artificial Sequence
  Synthetic
acauauaccuauaccuggguug

SEQ ID NO: 109978 - RNA, 23 nt, Artificial Sequence
  Synthetic
cacauauaccuauaccuggguug

SEQ ID NO: 109979 - RNA, 18 nt, Artificial Sequence
  Synthetic
ccuucccuugcuggguug

SEQ ID NO: 109980 - RNA, 19 nt, Artificial Sequence
  Synthetic
cccuucccuugcuggguug

SEQ ID NO: 109981 - RNA, 21 nt, Artificial Sequence
  Synthetic
agcccuucccuugcuggguug

SEQ ID NO: 109982 - RNA, 22 nt, Artificial Sequence
  Synthetic
uagcccuucccuugcuggguug

SEQ ID NO: 109983 - RNA, 23 nt, Artificial Sequence
  Synthetic
cuagcccuucccuugcuggguug

SEQ ID NO: 109984 - RNA, 24 nt, Artificial Sequence
  Synthetic
ucuagcccuucccuugcuggguug

SEQ ID NO: 109985 - RNA, 18 nt, Artificial Sequence
  Synthetic
acaauucauuuuggguug

SEQ ID NO: 109986 - RNA, 19 nt, Artificial Sequence
  Synthetic
cacaauucauuuuggguug

SEQ ID NO: 109987 - RNA, 20 nt, Artificial Sequence
  Synthetic
acacaauucauuuuggguug

SEQ ID NO: 109988 - RNA, 21 nt, Artificial Sequence
  Synthetic
cacacaauucauuuuggguug

SEQ ID NO: 109989 - RNA, 22 nt, Artificial Sequence
  Synthetic
ucacacaauucauuuuggguug

SEQ ID NO: 109990 - RNA, 23 nt, Artificial Sequence
  Synthetic
aucacacaauucauuuuggguug

SEQ ID NO: 109991 - RNA, 24 nt, Artificial Sequence
  Synthetic
aaucacacaauucauuuuggguug

SEQ ID NO: 109992 - RNA, 20 nt, Artificial Sequence
  Synthetic
uggguuuuuaccacugguug

SEQ ID NO: 109993 - RNA, 21 nt, Artificial Sequence
  Synthetic
uuggguuuuuaccacugguug

SEQ ID NO: 109994 - RNA, 22 nt, Artificial Sequence
  Synthetic
auuggguuuuuaccacugguug

SEQ ID NO: 109995 - RNA, 18 nt, Artificial Sequence
  Synthetic
uacuaaaacaacauguug

SEQ ID NO: 109996 - RNA, 19 nt, Artificial Sequence
  Synthetic
uuacuaaaacaacauguug

SEQ ID NO: 109997 - RNA, 20 nt, Artificial Sequence
  Synthetic
auuacuaaaacaacauguug

SEQ ID NO: 109998 - RNA, 21 nt, Artificial Sequence
  Synthetic
aauuacuaaaacaacauguug

SEQ ID NO: 109999 - RNA, 22 nt, Artificial Sequence
  Synthetic
uaauuacuaaaacaacauguug

SEQ ID NO: 110000 - RNA, 23 nt, Artificial Sequence
  Synthetic
auaauuacuaaaacaacauguug

SEQ ID NO: 110001 - RNA, 24 nt, Artificial Sequence
  Synthetic
aauaauuacuaaaacaacauguug

SEQ ID NO: 110002 - RNA, 18 nt, Artificial Sequence
  Synthetic
ugcggcuaauacauguug

SEQ ID NO: 110003 - RNA, 19 nt, Artificial Sequence
  Synthetic
cugcggcuaauacauguug

SEQ ID NO: 110004 - RNA, 20 nt, Artificial Sequence
  Synthetic
ucugcggcuaauacauguug

SEQ ID NO: 110005 - RNA, 21 nt, Artificial Sequence
  Synthetic
cucugcggcuaauacauguug

SEQ ID NO: 110006 - RNA, 22 nt, Artificial Sequence
  Synthetic
acucugcggcuaauacauguug

SEQ ID NO: 110007 - RNA, 23 nt, Artificial Sequence
  Synthetic
aacucugcggcuaauacauguug

SEQ ID NO: 110008 - RNA, 24 nt, Artificial Sequence
  Synthetic
caacucugcggcuaauacauguug

SEQ ID NO: 110009 - RNA, 18 nt, Artificial Sequence
  Synthetic
cucagagaaucuauguug

SEQ ID NO: 110010 - RNA, 21 nt, Artificial Sequence
  Synthetic
uggcucagagaaucuauguug

SEQ ID NO: 110011 - RNA, 22 nt, Artificial Sequence
  Synthetic
uuggcucagagaaucuauguug

SEQ ID NO: 110012 - RNA, 23 nt, Artificial Sequence
  Synthetic
cuuggcucagagaaucuauguug

SEQ ID NO: 110013 - RNA, 24 nt, Artificial Sequence
  Synthetic
ucuuggcucagagaaucuauguug

SEQ ID NO: 110014 - RNA, 19 nt, Artificial Sequence
  Synthetic
uggccgcaggggccuguug

SEQ ID NO: 110015 - RNA, 20 nt, Artificial Sequence
  Synthetic
auggccgcaggggccuguug

SEQ ID NO: 110016 - RNA, 21 nt, Artificial Sequence
  Synthetic
uauggccgcaggggccuguug

SEQ ID NO: 110017 - RNA, 22 nt, Artificial Sequence
  Synthetic
auauggccgcaggggccuguug

SEQ ID NO: 110018 - RNA, 23 nt, Artificial Sequence
  Synthetic
cauauggccgcaggggccuguug

SEQ ID NO: 110019 - RNA, 24 nt, Artificial Sequence
  Synthetic
acauauggccgcaggggccuguug

SEQ ID NO: 110020 - RNA, 18 nt, Artificial Sequence
  Synthetic
aauucacgucuucuguug

SEQ ID NO: 110021 - RNA, 19 nt, Artificial Sequence
  Synthetic
aaauucacgucuucuguug

SEQ ID NO: 110022 - RNA, 20 nt, Artificial Sequence
  Synthetic
aaaauucacgucuucuguug

SEQ ID NO: 110023 - RNA, 21 nt, Artificial Sequence
  Synthetic
caaaauucacgucuucuguug

SEQ ID NO: 110024 - RNA, 22 nt, Artificial Sequence
  Synthetic
acaaaauucacgucuucuguug

SEQ ID NO: 110025 - RNA, 23 nt, Artificial Sequence
  Synthetic
aacaaaauucacgucuucuguug

SEQ ID NO: 110026 - RNA, 24 nt, Artificial Sequence
  Synthetic
aaacaaaauucacgucuucuguug

SEQ ID NO: 110027 - RNA, 22 nt, Artificial Sequence
  Synthetic
ugcuuuguuuauucaaguguug

SEQ ID NO: 110028 - RNA, 23 nt, Artificial Sequence
  Synthetic
augcuuuguuuauucaaguguug

SEQ ID NO: 110029 - RNA, 24 nt, Artificial Sequence
  Synthetic
aaugcuuuguuuauucaaguguug

SEQ ID NO: 110030 - RNA, 18 nt, Artificial Sequence
  Synthetic
aacuucugaaaauuguug

SEQ ID NO: 110031 - RNA, 19 nt, Artificial Sequence
  Synthetic
uaacuucugaaaauuguug

SEQ ID NO: 110032 - RNA, 20 nt, Artificial Sequence
  Synthetic
uuaacuucugaaaauuguug

SEQ ID NO: 110033 - RNA, 21 nt, Artificial Sequence
  Synthetic
auuaacuucugaaaauuguug

SEQ ID NO: 110034 - RNA, 22 nt, Artificial Sequence
  Synthetic
aauuaacuucugaaaauuguug

SEQ ID NO: 110035 - RNA, 22 nt, Artificial Sequence
  Synthetic
ugggagagugaggaaauuguug

SEQ ID NO: 110036 - RNA, 23 nt, Artificial Sequence
  Synthetic
augggagagugaggaaauuguug

SEQ ID NO: 110037 - RNA, 24 nt, Artificial Sequence
  Synthetic
uaugggagagugaggaaauuguug

SEQ ID NO: 110038 - RNA, 19 nt, Artificial Sequence
  Synthetic
uggcauucauccuuuguug

SEQ ID NO: 110039 - RNA, 20 nt, Artificial Sequence
  Synthetic
uuggcauucauccuuuguug

SEQ ID NO: 110040 - RNA, 21 nt, Artificial Sequence
  Synthetic
auuggcauucauccuuuguug

SEQ ID NO: 110041 - RNA, 22 nt, Artificial Sequence
  Synthetic
aauuggcauucauccuuuguug

SEQ ID NO: 110042 - RNA, 23 nt, Artificial Sequence
  Synthetic
uaauuggcauucauccuuuguug

SEQ ID NO: 110043 - RNA, 24 nt, Artificial Sequence
  Synthetic
uuaauuggcauucauccuuuguug

SEQ ID NO: 110044 - RNA, 18 nt, Artificial Sequence
  Synthetic
augauaauaucuuuguug

SEQ ID NO: 110045 - RNA, 19 nt, Artificial Sequence
  Synthetic
aaugauaauaucuuuguug

SEQ ID NO: 110046 - RNA, 20 nt, Artificial Sequence
  Synthetic
caaugauaauaucuuuguug

SEQ ID NO: 110047 - RNA, 22 nt, Artificial Sequence
  Synthetic
agcaaugauaauaucuuuguug

SEQ ID NO: 110048 - RNA, 23 nt, Artificial Sequence
  Synthetic
uagcaaugauaauaucuuuguug

SEQ ID NO: 110049 - RNA, 24 nt, Artificial Sequence
  Synthetic
auagcaaugauaauaucuuuguug

SEQ ID NO: 110050 - RNA, 18 nt, Artificial Sequence
  Synthetic
cauuuauccuuuuuguug

SEQ ID NO: 110051 - RNA, 19 nt, Artificial Sequence
  Synthetic
ucauuuauccuuuuuguug

SEQ ID NO: 110052 - RNA, 21 nt, Artificial Sequence
  Synthetic
agucauuuauccuuuuuguug

SEQ ID NO: 110053 - RNA, 22 nt, Artificial Sequence
  Synthetic
aagucauuuauccuuuuuguug

SEQ ID NO: 110054 - RNA, 23 nt, Artificial Sequence
  Synthetic
uaagucauuuauccuuuuuguug

SEQ ID NO: 110055 - RNA, 24 nt, Artificial Sequence
  Synthetic
uuaagucauuuauccuuuuuguug

SEQ ID NO: 110056 - RNA, 18 nt, Artificial Sequence
  Synthetic
aauaugaaucaaaauuug

SEQ ID NO: 110057 - RNA, 21 nt, Artificial Sequence
  Synthetic
uggaauaugaaucaaaauuug

SEQ ID NO: 110058 - RNA, 22 nt, Artificial Sequence
  Synthetic
auggaauaugaaucaaaauuug

SEQ ID NO: 110059 - RNA, 23 nt, Artificial Sequence
  Synthetic
uauggaauaugaaucaaaauuug

SEQ ID NO: 110060 - RNA, 24 nt, Artificial Sequence
  Synthetic
uuauggaauaugaaucaaaauuug

SEQ ID NO: 110061 - RNA, 18 nt, Artificial Sequence
  Synthetic
ucuagccuggaaaauuug

SEQ ID NO: 110062 - RNA, 19 nt, Artificial Sequence
  Synthetic
uucuagccuggaaaauuug

SEQ ID NO: 110063 - RNA, 20 nt, Artificial Sequence
  Synthetic
uuucuagccuggaaaauuug

SEQ ID NO: 110064 - RNA, 22 nt, Artificial Sequence
  Synthetic
aguuucuagccuggaaaauuug

SEQ ID NO: 110065 - RNA, 23 nt, Artificial Sequence
  Synthetic
aaguuucuagccuggaaaauuug

SEQ ID NO: 110066 - RNA, 24 nt, Artificial Sequence
  Synthetic
aaaguuucuagccuggaaaauuug

SEQ ID NO: 110067 - RNA, 21 nt, Artificial Sequence
  Synthetic
uaagucaaaucaugcaauuug

SEQ ID NO: 110068 - RNA, 22 nt, Artificial Sequence
  Synthetic
auaagucaaaucaugcaauuug

SEQ ID NO: 110069 - RNA, 23 nt, Artificial Sequence
  Synthetic
aauaagucaaaucaugcaauuug

SEQ ID NO: 110070 - RNA, 24 nt, Artificial Sequence
  Synthetic
aaauaagucaaaucaugcaauuug

SEQ ID NO: 110071 - RNA, 18 nt, Artificial Sequence
  Synthetic
uacuuccauaagaauuug

SEQ ID NO: 110072 - RNA, 19 nt, Artificial Sequence
  Synthetic
auacuuccauaagaauuug

SEQ ID NO: 110073 - RNA, 20 nt, Artificial Sequence
  Synthetic
uauacuuccauaagaauuug

SEQ ID NO: 110074 - RNA, 21 nt, Artificial Sequence
  Synthetic
uuauacuuccauaagaauuug

SEQ ID NO: 110075 - RNA, 22 nt, Artificial Sequence
  Synthetic
uuuauacuuccauaagaauuug

SEQ ID NO: 110076 - RNA, 23 nt, Artificial Sequence
  Synthetic
cuuuauacuuccauaagaauuug

SEQ ID NO: 110077 - RNA, 24 nt, Artificial Sequence
  Synthetic
ucuuuauacuuccauaagaauuug

SEQ ID NO: 110078 - RNA, 19 nt, Artificial Sequence
  Synthetic
agcgaugaaugugaauuug

SEQ ID NO: 110079 - RNA, 20 nt, Artificial Sequence
  Synthetic
aagcgaugaaugugaauuug

SEQ ID NO: 110080 - RNA, 21 nt, Artificial Sequence
  Synthetic
caagcgaugaaugugaauuug

SEQ ID NO: 110081 - RNA, 22 nt, Artificial Sequence
  Synthetic
acaagcgaugaaugugaauuug

SEQ ID NO: 110082 - RNA, 23 nt, Artificial Sequence
  Synthetic
aacaagcgaugaaugugaauuug

SEQ ID NO: 110083 - RNA, 24 nt, Artificial Sequence
  Synthetic
aaacaagcgaugaaugugaauuug

SEQ ID NO: 110084 - RNA, 18 nt, Artificial Sequence
  Synthetic
cuuagguuuuguaauuug

SEQ ID NO: 110085 - RNA, 19 nt, Artificial Sequence
  Synthetic
acuuagguuuuguaauuug

SEQ ID NO: 110086 - RNA, 20 nt, Artificial Sequence
  Synthetic
uacuuagguuuuguaauuug

SEQ ID NO: 110087 - RNA, 21 nt, Artificial Sequence
  Synthetic
auacuuagguuuuguaauuug

SEQ ID NO: 110088 - RNA, 22 nt, Artificial Sequence
  Synthetic
cauacuuagguuuuguaauuug

SEQ ID NO: 110089 - RNA, 23 nt, Artificial Sequence
  Synthetic
ucauacuuagguuuuguaauuug

SEQ ID NO: 110090 - RNA, 24 nt, Artificial Sequence
  Synthetic
uucauacuuagguuuuguaauuug

SEQ ID NO: 110091 - RNA, 19 nt, Artificial Sequence
  Synthetic
agcacauaaucaacauuug

SEQ ID NO: 110092 - RNA, 20 nt, Artificial Sequence
  Synthetic
aagcacauaaucaacauuug

SEQ ID NO: 110093 - RNA, 21 nt, Artificial Sequence
  Synthetic
uaagcacauaaucaacauuug

SEQ ID NO: 110094 - RNA, 23 nt, Artificial Sequence
  Synthetic
uguaagcacauaaucaacauuug

SEQ ID NO: 110095 - RNA, 24 nt, Artificial Sequence
  Synthetic
cuguaagcacauaaucaacauuug

SEQ ID NO: 110096 - RNA, 18 nt, Artificial Sequence
  Synthetic
uucuucaaaagccauuug

SEQ ID NO: 110097 - RNA, 19 nt, Artificial Sequence
  Synthetic
cuucuucaaaagccauuug

SEQ ID NO: 110098 - RNA, 20 nt, Artificial Sequence
  Synthetic
acuucuucaaaagccauuug

SEQ ID NO: 110099 - RNA, 21 nt, Artificial Sequence
  Synthetic
uacuucuucaaaagccauuug

SEQ ID NO: 110100 - RNA, 22 nt, Artificial Sequence
  Synthetic
auacuucuucaaaagccauuug

SEQ ID NO: 110101 - RNA, 23 nt, Artificial Sequence
  Synthetic
aauacuucuucaaaagccauuug

SEQ ID NO: 110102 - RNA, 24 nt, Artificial Sequence
  Synthetic
aaauacuucuucaaaagccauuug

SEQ ID NO: 110103 - RNA, 18 nt, Artificial Sequence
  Synthetic
aacaucuuaauccauuug

SEQ ID NO: 110104 - RNA, 20 nt, Artificial Sequence
  Synthetic
ugaacaucuuaauccauuug

SEQ ID NO: 110105 - RNA, 21 nt, Artificial Sequence
  Synthetic
augaacaucuuaauccauuug

SEQ ID NO: 110106 - RNA, 22 nt, Artificial Sequence
  Synthetic
caugaacaucuuaauccauuug

SEQ ID NO: 110107 - RNA, 23 nt, Artificial Sequence
  Synthetic
ucaugaacaucuuaauccauuug

SEQ ID NO: 110108 - RNA, 24 nt, Artificial Sequence
  Synthetic
uucaugaacaucuuaauccauuug

SEQ ID NO: 110109 - RNA, 18 nt, Artificial Sequence
  Synthetic
auuuuaauaguccauuug

SEQ ID NO: 110110 - RNA, 19 nt, Artificial Sequence
  Synthetic
cauuuuaauaguccauuug

SEQ ID NO: 110111 - RNA, 20 nt, Artificial Sequence
  Synthetic
ucauuuuaauaguccauuug

SEQ ID NO: 110112 - RNA, 22 nt, Artificial Sequence
  Synthetic
agucauuuuaauaguccauuug

SEQ ID NO: 110113 - RNA, 23 nt, Artificial Sequence
  Synthetic
aagucauuuuaauaguccauuug

SEQ ID NO: 110114 - RNA, 24 nt, Artificial Sequence
  Synthetic
uaagucauuuuaauaguccauuug

SEQ ID NO: 110115 - RNA, 23 nt, Artificial Sequence
  Synthetic
uggaagguuucaguaagcauuug

SEQ ID NO: 110116 - RNA, 24 nt, Artificial Sequence
  Synthetic
auggaagguuucaguaagcauuug

SEQ ID NO: 110117 - RNA, 19 nt, Artificial Sequence
  Synthetic
ugauaguuuccugcauuug

SEQ ID NO: 110118 - RNA, 20 nt, Artificial Sequence
  Synthetic
cugauaguuuccugcauuug

SEQ ID NO: 110119 - RNA, 21 nt, Artificial Sequence
  Synthetic
ucugauaguuuccugcauuug

SEQ ID NO: 110120 - RNA, 22 nt, Artificial Sequence
  Synthetic
cucugauaguuuccugcauuug

SEQ ID NO: 110121 - RNA, 23 nt, Artificial Sequence
  Synthetic
acucugauaguuuccugcauuug

SEQ ID NO: 110122 - RNA, 24 nt, Artificial Sequence
  Synthetic
cacucugauaguuuccugcauuug

SEQ ID NO: 110123 - RNA, 18 nt, Artificial Sequence
  Synthetic
uauaacuucucucauuug

SEQ ID NO: 110124 - RNA, 19 nt, Artificial Sequence
  Synthetic
cuauaacuucucucauuug

SEQ ID NO: 110125 - RNA, 20 nt, Artificial Sequence
  Synthetic
ucuauaacuucucucauuug

SEQ ID NO: 110126 - RNA, 22 nt, Artificial Sequence
  Synthetic
ugucuauaacuucucucauuug

SEQ ID NO: 110127 - RNA, 23 nt, Artificial Sequence
  Synthetic
uugucuauaacuucucucauuug

SEQ ID NO: 110128 - RNA, 24 nt, Artificial Sequence
  Synthetic
auugucuauaacuucucucauuug

SEQ ID NO: 110129 - RNA, 18 nt, Artificial Sequence
  Synthetic
uauaugcauauagauuug

SEQ ID NO: 110130 - RNA, 19 nt, Artificial Sequence
  Synthetic
uuauaugcauauagauuug

SEQ ID NO: 110131 - RNA, 20 nt, Artificial Sequence
  Synthetic
cuuauaugcauauagauuug

SEQ ID NO: 110132 - RNA, 18 nt, Artificial Sequence
  Synthetic
ugcucccuuguggauuug

SEQ ID NO: 110133 - RNA, 19 nt, Artificial Sequence
  Synthetic
uugcucccuuguggauuug

SEQ ID NO: 110134 - RNA, 20 nt, Artificial Sequence
  Synthetic
cuugcucccuuguggauuug

SEQ ID NO: 110135 - RNA, 21 nt, Artificial Sequence
  Synthetic
acuugcucccuuguggauuug

SEQ ID NO: 110136 - RNA, 22 nt, Artificial Sequence
  Synthetic
aacuugcucccuuguggauuug

SEQ ID NO: 110137 - RNA, 23 nt, Artificial Sequence
  Synthetic
aaacuugcucccuuguggauuug

SEQ ID NO: 110138 - RNA, 24 nt, Artificial Sequence
  Synthetic
uaaacuugcucccuuguggauuug

SEQ ID NO: 110139 - RNA, 18 nt, Artificial Sequence
  Synthetic
ccagcugaauaugauuug

SEQ ID NO: 110140 - RNA, 19 nt, Artificial Sequence
  Synthetic
accagcugaauaugauuug

SEQ ID NO: 110141 - RNA, 20 nt, Artificial Sequence
  Synthetic
uaccagcugaauaugauuug

SEQ ID NO: 110142 - RNA, 21 nt, Artificial Sequence
  Synthetic
auaccagcugaauaugauuug

SEQ ID NO: 110143 - RNA, 22 nt, Artificial Sequence
  Synthetic
aauaccagcugaauaugauuug

SEQ ID NO: 110144 - RNA, 23 nt, Artificial Sequence
  Synthetic
caauaccagcugaauaugauuug

SEQ ID NO: 110145 - RNA, 24 nt, Artificial Sequence
  Synthetic
acaauaccagcugaauaugauuug

SEQ ID NO: 110146 - RNA, 19 nt, Artificial Sequence
  Synthetic
ugcaauguauuaugauuug

SEQ ID NO: 110147 - RNA, 20 nt, Artificial Sequence
  Synthetic
uugcaauguauuaugauuug

SEQ ID NO: 110148 - RNA, 21 nt, Artificial Sequence
  Synthetic
auugcaauguauuaugauuug

SEQ ID NO: 110149 - RNA, 22 nt, Artificial Sequence
  Synthetic
aauugcaauguauuaugauuug

SEQ ID NO: 110150 - RNA, 23 nt, Artificial Sequence
  Synthetic
uaauugcaauguauuaugauuug

SEQ ID NO: 110151 - RNA, 24 nt, Artificial Sequence
  Synthetic
cuaauugcaauguauuaugauuug

SEQ ID NO: 110152 - RNA, 18 nt, Artificial Sequence
  Synthetic
agcucaucuuuugauuug

SEQ ID NO: 110153 - RNA, 19 nt, Artificial Sequence
  Synthetic
uagcucaucuuuugauuug

SEQ ID NO: 110154 - RNA, 20 nt, Artificial Sequence
  Synthetic
uuagcucaucuuuugauuug

SEQ ID NO: 110155 - RNA, 21 nt, Artificial Sequence
  Synthetic
auuagcucaucuuuugauuug

SEQ ID NO: 110156 - RNA, 22 nt, Artificial Sequence
  Synthetic
uauuagcucaucuuuugauuug

SEQ ID NO: 110157 - RNA, 23 nt, Artificial Sequence
  Synthetic
auauuagcucaucuuuugauuug

SEQ ID NO: 110158 - RNA, 24 nt, Artificial Sequence
  Synthetic
cauauuagcucaucuuuugauuug

SEQ ID NO: 110159 - RNA, 22 nt, Artificial Sequence
  Synthetic
aguauguuaucaaaaauauuug

SEQ ID NO: 110160 - RNA, 23 nt, Artificial Sequence
  Synthetic
caguauguuaucaaaaauauuug

SEQ ID NO: 110161 - RNA, 24 nt, Artificial Sequence
  Synthetic
acaguauguuaucaaaaauauuug

SEQ ID NO: 110162 - RNA, 21 nt, Artificial Sequence
  Synthetic
uagucacucuacaaauauuug

SEQ ID NO: 110163 - RNA, 22 nt, Artificial Sequence
  Synthetic
auagucacucuacaaauauuug

SEQ ID NO: 110164 - RNA, 23 nt, Artificial Sequence
  Synthetic
aauagucacucuacaaauauuug

SEQ ID NO: 110165 - RNA, 24 nt, Artificial Sequence
  Synthetic
caauagucacucuacaaauauuug

SEQ ID NO: 110166 - RNA, 18 nt, Artificial Sequence
  Synthetic
cguaguaugaaauauuug

SEQ ID NO: 110167 - RNA, 19 nt, Artificial Sequence
  Synthetic
acguaguaugaaauauuug

SEQ ID NO: 110168 - RNA, 20 nt, Artificial Sequence
  Synthetic
cacguaguaugaaauauuug

SEQ ID NO: 110169 - RNA, 22 nt, Artificial Sequence
  Synthetic
ugcacguaguaugaaauauuug

SEQ ID NO: 110170 - RNA, 23 nt, Artificial Sequence
  Synthetic
augcacguaguaugaaauauuug

SEQ ID NO: 110171 - RNA, 24 nt, Artificial Sequence
  Synthetic
aaugcacguaguaugaaauauuug

SEQ ID NO: 110172 - RNA, 18 nt, Artificial Sequence
  Synthetic
uccucauugcaauauuug

SEQ ID NO: 110173 - RNA, 19 nt, Artificial Sequence
  Synthetic
auccucauugcaauauuug

SEQ ID NO: 110174 - RNA, 20 nt, Artificial Sequence
  Synthetic
cauccucauugcaauauuug

SEQ ID NO: 110175 - RNA, 22 nt, Artificial Sequence
  Synthetic
ugcauccucauugcaauauuug

SEQ ID NO: 110176 - RNA, 23 nt, Artificial Sequence
  Synthetic
uugcauccucauugcaauauuug

SEQ ID NO: 110177 - RNA, 24 nt, Artificial Sequence
  Synthetic
cuugcauccucauugcaauauuug

SEQ ID NO: 110178 - RNA, 20 nt, Artificial Sequence
  Synthetic
aggcuaaaccaugauauuug

SEQ ID NO: 110179 - RNA, 19 nt, Artificial Sequence
  Synthetic
agaugaauauugcuauuug

SEQ ID NO: 110180 - RNA, 20 nt, Artificial Sequence
  Synthetic
aagaugaauauugcuauuug

SEQ ID NO: 110181 - RNA, 21 nt, Artificial Sequence
  Synthetic
caagaugaauauugcuauuug

SEQ ID NO: 110182 - RNA, 22 nt, Artificial Sequence
  Synthetic
ucaagaugaauauugcuauuug

SEQ ID NO: 110183 - RNA, 23 nt, Artificial Sequence
  Synthetic
uucaagaugaauauugcuauuug

SEQ ID NO: 110184 - RNA, 24 nt, Artificial Sequence
  Synthetic
uuucaagaugaauauugcuauuug

SEQ ID NO: 110185 - RNA, 18 nt, Artificial Sequence
  Synthetic
uucauacaaaaguauuug

SEQ ID NO: 110186 - RNA, 19 nt, Artificial Sequence
  Synthetic
cuucauacaaaaguauuug

SEQ ID NO: 110187 - RNA, 20 nt, Artificial Sequence
  Synthetic
acuucauacaaaaguauuug

SEQ ID NO: 110188 - RNA, 21 nt, Artificial Sequence
  Synthetic
aacuucauacaaaaguauuug

SEQ ID NO: 110189 - RNA, 22 nt, Artificial Sequence
  Synthetic
aaacuucauacaaaaguauuug

SEQ ID NO: 110190 - RNA, 23 nt, Artificial Sequence
  Synthetic
caaacuucauacaaaaguauuug

SEQ ID NO: 110191 - RNA, 24 nt, Artificial Sequence
  Synthetic
acaaacuucauacaaaaguauuug

SEQ ID NO: 110192 - RNA, 18 nt, Artificial Sequence
  Synthetic
ugggcacaacaguauuug

SEQ ID NO: 110193 - RNA, 19 nt, Artificial Sequence
  Synthetic
uugggcacaacaguauuug

SEQ ID NO: 110194 - RNA, 20 nt, Artificial Sequence
  Synthetic
cuugggcacaacaguauuug

SEQ ID NO: 110195 - RNA, 21 nt, Artificial Sequence
  Synthetic
acuugggcacaacaguauuug

SEQ ID NO: 110196 - RNA, 22 nt, Artificial Sequence
  Synthetic
aacuugggcacaacaguauuug

SEQ ID NO: 110197 - RNA, 23 nt, Artificial Sequence
  Synthetic
aaacuugggcacaacaguauuug

SEQ ID NO: 110198 - RNA, 21 nt, Artificial Sequence
  Synthetic
agggagcuaaauacuuauuug

SEQ ID NO: 110199 - RNA, 23 nt, Artificial Sequence
  Synthetic
ugagggagcuaaauacuuauuug

SEQ ID NO: 110200 - RNA, 24 nt, Artificial Sequence
  Synthetic
cugagggagcuaaauacuuauuug

SEQ ID NO: 110201 - RNA, 18 nt, Artificial Sequence
  Synthetic
aaaaguagguuuuauuug

SEQ ID NO: 110202 - RNA, 19 nt, Artificial Sequence
  Synthetic
aaaaaguagguuuuauuug

SEQ ID NO: 110203 - RNA, 20 nt, Artificial Sequence
  Synthetic
uaaaaaguagguuuuauuug

SEQ ID NO: 110204 - RNA, 21 nt, Artificial Sequence
  Synthetic
auaaaaaguagguuuuauuug

SEQ ID NO: 110205 - RNA, 22 nt, Artificial Sequence
  Synthetic
aauaaaaaguagguuuuauuug

SEQ ID NO: 110206 - RNA, 23 nt, Artificial Sequence
  Synthetic
caauaaaaaguagguuuuauuug

SEQ ID NO: 110207 - RNA, 24 nt, Artificial Sequence
  Synthetic
ccaauaaaaaguagguuuuauuug

SEQ ID NO: 110208 - RNA, 18 nt, Artificial Sequence
  Synthetic
accaauuuuauaacuuug

SEQ ID NO: 110209 - RNA, 19 nt, Artificial Sequence
  Synthetic
uaccaauuuuauaacuuug

SEQ ID NO: 110210 - RNA, 20 nt, Artificial Sequence
  Synthetic
auaccaauuuuauaacuuug

SEQ ID NO: 110211 - RNA, 21 nt, Artificial Sequence
  Synthetic
uauaccaauuuuauaacuuug

SEQ ID NO: 110212 - RNA, 22 nt, Artificial Sequence
  Synthetic
uuauaccaauuuuauaacuuug

SEQ ID NO: 110213 - RNA, 23 nt, Artificial Sequence
  Synthetic
uuuauaccaauuuuauaacuuug

SEQ ID NO: 110214 - RNA, 24 nt, Artificial Sequence
  Synthetic
uuuuauaccaauuuuauaacuuug

SEQ ID NO: 110215 - RNA, 18 nt, Artificial Sequence
  Synthetic
cuaaaugauuacacuuug

SEQ ID NO: 110216 - RNA, 19 nt, Artificial Sequence
  Synthetic
acuaaaugauuacacuuug

SEQ ID NO: 110217 - RNA, 20 nt, Artificial Sequence
  Synthetic
aacuaaaugauuacacuuug

SEQ ID NO: 110218 - RNA, 21 nt, Artificial Sequence
  Synthetic
uaacuaaaugauuacacuuug

SEQ ID NO: 110219 - RNA, 22 nt, Artificial Sequence
  Synthetic
auaacuaaaugauuacacuuug

SEQ ID NO: 110220 - RNA, 23 nt, Artificial Sequence
  Synthetic
cauaacuaaaugauuacacuuug

SEQ ID NO: 110221 - RNA, 24 nt, Artificial Sequence
  Synthetic
ucauaacuaaaugauuacacuuug

SEQ ID NO: 110222 - RNA, 18 nt, Artificial Sequence
  Synthetic
aacuaugcuaucacuuug

SEQ ID NO: 110223 - RNA, 19 nt, Artificial Sequence
  Synthetic
uaacuaugcuaucacuuug

SEQ ID NO: 110224 - RNA, 20 nt, Artificial Sequence
  Synthetic
auaacuaugcuaucacuuug

SEQ ID NO: 110225 - RNA, 21 nt, Artificial Sequence
  Synthetic
aauaacuaugcuaucacuuug

SEQ ID NO: 110226 - RNA, 22 nt, Artificial Sequence
  Synthetic
uaauaacuaugcuaucacuuug

SEQ ID NO: 110227 - RNA, 23 nt, Artificial Sequence
  Synthetic
auaauaacuaugcuaucacuuug

SEQ ID NO: 110228 - RNA, 24 nt, Artificial Sequence
  Synthetic
uauaauaacuaugcuaucacuuug

SEQ ID NO: 110229 - RNA, 19 nt, Artificial Sequence
  Synthetic
ugguuuuagggacccuuug

SEQ ID NO: 110230 - RNA, 21 nt, Artificial Sequence
  Synthetic
ugugguuuuagggacccuuug

SEQ ID NO: 110231 - RNA, 22 nt, Artificial Sequence
  Synthetic
uugugguuuuagggacccuuug

SEQ ID NO: 110232 - RNA, 24 nt, Artificial Sequence
  Synthetic
aguugugguuuuagggacccuuug

SEQ ID NO: 110233 - RNA, 18 nt, Artificial Sequence
  Synthetic
acagacuaagauccuuug

SEQ ID NO: 110234 - RNA, 19 nt, Artificial Sequence
  Synthetic
cacagacuaagauccuuug

SEQ ID NO: 110235 - RNA, 20 nt, Artificial Sequence
  Synthetic
ucacagacuaagauccuuug

SEQ ID NO: 110236 - RNA, 22 nt, Artificial Sequence
  Synthetic
agucacagacuaagauccuuug

SEQ ID NO: 110237 - RNA, 24 nt, Artificial Sequence
  Synthetic
agagucacagacuaagauccuuug

SEQ ID NO: 110238 - RNA, 18 nt, Artificial Sequence
  Synthetic
cucuucugcuuuccuuug

SEQ ID NO: 110239 - RNA, 19 nt, Artificial Sequence
  Synthetic
ccucuucugcuuuccuuug

SEQ ID NO: 110240 - RNA, 20 nt, Artificial Sequence
  Synthetic
accucuucugcuuuccuuug

SEQ ID NO: 110241 - RNA, 22 nt, Artificial Sequence
  Synthetic
ugaccucuucugcuuuccuuug

SEQ ID NO: 110242 - RNA, 23 nt, Artificial Sequence
  Synthetic
cugaccucuucugcuuuccuuug

SEQ ID NO: 110243 - RNA, 24 nt, Artificial Sequence
  Synthetic
ccugaccucuucugcuuuccuuug

SEQ ID NO: 110244 - RNA, 21 nt, Artificial Sequence
  Synthetic
cauaaauacugucaagcuuug

SEQ ID NO: 110245 - RNA, 23 nt, Artificial Sequence
  Synthetic
ugcauaaauacugucaagcuuug

SEQ ID NO: 110246 - RNA, 18 nt, Artificial Sequence
  Synthetic
auaacaccuacagcuuug

SEQ ID NO: 110247 - RNA, 19 nt, Artificial Sequence
  Synthetic
aauaacaccuacagcuuug

SEQ ID NO: 110248 - RNA, 20 nt, Artificial Sequence
  Synthetic
aaauaacaccuacagcuuug

SEQ ID NO: 110249 - RNA, 21 nt, Artificial Sequence
  Synthetic
aaaauaacaccuacagcuuug

SEQ ID NO: 110250 - RNA, 22 nt, Artificial Sequence
  Synthetic
aaaaauaacaccuacagcuuug

SEQ ID NO: 110251 - RNA, 23 nt, Artificial Sequence
  Synthetic
aaaaaauaacaccuacagcuuug

SEQ ID NO: 110252 - RNA, 24 nt, Artificial Sequence
  Synthetic
aaaaaaauaacaccuacagcuuug

SEQ ID NO: 110253 - RNA, 18 nt, Artificial Sequence
  Synthetic
uauuuuaacugagcuuug

SEQ ID NO: 110254 - RNA, 19 nt, Artificial Sequence
  Synthetic
uuauuuuaacugagcuuug

SEQ ID NO: 110255 - RNA, 20 nt, Artificial Sequence
  Synthetic
uuuauuuuaacugagcuuug

SEQ ID NO: 110256 - RNA, 24 nt, Artificial Sequence
  Synthetic
uggguuuauuuuaacugagcuuug

SEQ ID NO: 110257 - RNA, 18 nt, Artificial Sequence
  Synthetic
acucuauuucuagcuuug

SEQ ID NO: 110258 - RNA, 19 nt, Artificial Sequence
  Synthetic
uacucuauuucuagcuuug

SEQ ID NO: 110259 - RNA, 20 nt, Artificial Sequence
  Synthetic
auacucuauuucuagcuuug

SEQ ID NO: 110260 - RNA, 21 nt, Artificial Sequence
  Synthetic
cauacucuauuucuagcuuug

SEQ ID NO: 110261 - RNA, 22 nt, Artificial Sequence
  Synthetic
acauacucuauuucuagcuuug

SEQ ID NO: 110262 - RNA, 23 nt, Artificial Sequence
  Synthetic
cacauacucuauuucuagcuuug

SEQ ID NO: 110263 - RNA, 18 nt, Artificial Sequence
  Synthetic
agaacagaaauggcuuug

SEQ ID NO: 110264 - RNA, 19 nt, Artificial Sequence
  Synthetic
aagaacagaaauggcuuug

SEQ ID NO: 110265 - RNA, 20 nt, Artificial Sequence
  Synthetic
aaagaacagaaauggcuuug

SEQ ID NO: 110266 - RNA, 21 nt, Artificial Sequence
  Synthetic
caaagaacagaaauggcuuug

SEQ ID NO: 110267 - RNA, 22 nt, Artificial Sequence
  Synthetic
acaaagaacagaaauggcuuug

SEQ ID NO: 110268 - RNA, 23 nt, Artificial Sequence
  Synthetic
aacaaagaacagaaauggcuuug

SEQ ID NO: 110269 - RNA, 24 nt, Artificial Sequence
  Synthetic
aaacaaagaacagaaauggcuuug

SEQ ID NO: 110270 - RNA, 18 nt, Artificial Sequence
  Synthetic
agaaauuaaggugcuuug

SEQ ID NO: 110271 - RNA, 20 nt, Artificial Sequence
  Synthetic
agagaaauuaaggugcuuug

SEQ ID NO: 110272 - RNA, 21 nt, Artificial Sequence
  Synthetic
aagagaaauuaaggugcuuug

SEQ ID NO: 110273 - RNA, 22 nt, Artificial Sequence
  Synthetic
aaagagaaauuaaggugcuuug

SEQ ID NO: 110274 - RNA, 23 nt, Artificial Sequence
  Synthetic
aaaagagaaauuaaggugcuuug

SEQ ID NO: 110275 - RNA, 24 nt, Artificial Sequence
  Synthetic
uaaaagagaaauuaaggugcuuug

SEQ ID NO: 110276 - RNA, 20 nt, Artificial Sequence
  Synthetic
ugggugugaaaauugcuuug

SEQ ID NO: 110277 - RNA, 21 nt, Artificial Sequence
  Synthetic
augggugugaaaauugcuuug

SEQ ID NO: 110278 - RNA, 22 nt, Artificial Sequence
  Synthetic
caugggugugaaaauugcuuug

SEQ ID NO: 110279 - RNA, 23 nt, Artificial Sequence
  Synthetic
ccaugggugugaaaauugcuuug

SEQ ID NO: 110280 - RNA, 24 nt, Artificial Sequence
  Synthetic
cccaugggugugaaaauugcuuug

SEQ ID NO: 110281 - RNA, 19 nt, Artificial Sequence
  Synthetic
agggucacacuaaucuuug

SEQ ID NO: 110282 - RNA, 20 nt, Artificial Sequence
  Synthetic
uagggucacacuaaucuuug

SEQ ID NO: 110283 - RNA, 22 nt, Artificial Sequence
  Synthetic
aguagggucacacuaaucuuug

SEQ ID NO: 110284 - RNA, 23 nt, Artificial Sequence
  Synthetic
uaguagggucacacuaaucuuug

SEQ ID NO: 110285 - RNA, 24 nt, Artificial Sequence
  Synthetic
auaguagggucacacuaaucuuug

SEQ ID NO: 110286 - RNA, 18 nt, Artificial Sequence
  Synthetic
aaguaucuccacucuuug

SEQ ID NO: 110287 - RNA, 19 nt, Artificial Sequence
  Synthetic
uaaguaucuccacucuuug

SEQ ID NO: 110288 - RNA, 20 nt, Artificial Sequence
  Synthetic
auaaguaucuccacucuuug

SEQ ID NO: 110289 - RNA, 21 nt, Artificial Sequence
  Synthetic
aauaaguaucuccacucuuug

SEQ ID NO: 110290 - RNA, 23 nt, Artificial Sequence
  Synthetic
ugaauaaguaucuccacucuuug

SEQ ID NO: 110291 - RNA, 24 nt, Artificial Sequence
  Synthetic
cugaauaaguaucuccacucuuug

SEQ ID NO: 110292 - RNA, 21 nt, Artificial Sequence
  Synthetic
ccacucugaggcuucucuuug

SEQ ID NO: 110293 - RNA, 24 nt, Artificial Sequence
  Synthetic
uggccacucugaggcuucucuuug

SEQ ID NO: 110294 - RNA, 21 nt, Artificial Sequence
  Synthetic
auccucacauuccagucuuug

SEQ ID NO: 110295 - RNA, 22 nt, Artificial Sequence
  Synthetic
aauccucacauuccagucuuug

SEQ ID NO: 110296 - RNA, 23 nt, Artificial Sequence
  Synthetic
uaauccucacauuccagucuuug

SEQ ID NO: 110297 - RNA, 24 nt, Artificial Sequence
  Synthetic
auaauccucacauuccagucuuug

SEQ ID NO: 110298 - RNA, 18 nt, Artificial Sequence
  Synthetic
ugcccugaccauucuuug

SEQ ID NO: 110299 - RNA, 19 nt, Artificial Sequence
  Synthetic
uugcccugaccauucuuug

SEQ ID NO: 110300 - RNA, 20 nt, Artificial Sequence
  Synthetic
auugcccugaccauucuuug

SEQ ID NO: 110301 - RNA, 21 nt, Artificial Sequence
  Synthetic
aauugcccugaccauucuuug

SEQ ID NO: 110302 - RNA, 22 nt, Artificial Sequence
  Synthetic
aaauugcccugaccauucuuug

SEQ ID NO: 110303 - RNA, 23 nt, Artificial Sequence
  Synthetic
uaaauugcccugaccauucuuug

SEQ ID NO: 110304 - RNA, 24 nt, Artificial Sequence
  Synthetic
uuaaauugcccugaccauucuuug

SEQ ID NO: 110305 - RNA, 18 nt, Artificial Sequence
  Synthetic
uuguucaccuuuucuuug

SEQ ID NO: 110306 - RNA, 19 nt, Artificial Sequence
  Synthetic
auuguucaccuuuucuuug

SEQ ID NO: 110307 - RNA, 20 nt, Artificial Sequence
  Synthetic
uauuguucaccuuuucuuug

SEQ ID NO: 110308 - RNA, 21 nt, Artificial Sequence
  Synthetic
auauuguucaccuuuucuuug

SEQ ID NO: 110309 - RNA, 22 nt, Artificial Sequence
  Synthetic
aauauuguucaccuuuucuuug

SEQ ID NO: 110310 - RNA, 23 nt, Artificial Sequence
  Synthetic
aaauauuguucaccuuuucuuug

SEQ ID NO: 110311 - RNA, 24 nt, Artificial Sequence
  Synthetic
aaaauauuguucaccuuuucuuug

SEQ ID NO: 110312 - RNA, 18 nt, Artificial Sequence
  Synthetic
uuuaucuauuuuucuuug

SEQ ID NO: 110313 - RNA, 19 nt, Artificial Sequence
  Synthetic
cuuuaucuauuuuucuuug

SEQ ID NO: 110314 - RNA, 21 nt, Artificial Sequence
  Synthetic
ugcuuuaucuauuuuucuuug

SEQ ID NO: 110315 - RNA, 22 nt, Artificial Sequence
  Synthetic
uugcuuuaucuauuuuucuuug

SEQ ID NO: 110316 - RNA, 23 nt, Artificial Sequence
  Synthetic
auugcuuuaucuauuuuucuuug

SEQ ID NO: 110317 - RNA, 24 nt, Artificial Sequence
  Synthetic
aauugcuuuaucuauuuuucuuug

SEQ ID NO: 110318 - RNA, 18 nt, Artificial Sequence
  Synthetic
caagugucaauagguuug

SEQ ID NO: 110319 - RNA, 19 nt, Artificial Sequence
  Synthetic
acaagugucaauagguuug

SEQ ID NO: 110320 - RNA, 20 nt, Artificial Sequence
  Synthetic
uacaagugucaauagguuug

SEQ ID NO: 110321 - RNA, 22 nt, Artificial Sequence
  Synthetic
uguacaagugucaauagguuug

SEQ ID NO: 110322 - RNA, 23 nt, Artificial Sequence
  Synthetic
auguacaagugucaauagguuug

SEQ ID NO: 110323 - RNA, 24 nt, Artificial Sequence
  Synthetic
uauguacaagugucaauagguuug

SEQ ID NO: 110324 - RNA, 18 nt, Artificial Sequence
  Synthetic
acaaaaaaauuagguuug

SEQ ID NO: 110325 - RNA, 19 nt, Artificial Sequence
  Synthetic
uacaaaaaaauuagguuug

SEQ ID NO: 110326 - RNA, 20 nt, Artificial Sequence
  Synthetic
auacaaaaaaauuagguuug

SEQ ID NO: 110327 - RNA, 21 nt, Artificial Sequence
  Synthetic
uauacaaaaaaauuagguuug

SEQ ID NO: 110328 - RNA, 22 nt, Artificial Sequence
  Synthetic
uuauacaaaaaaauuagguuug

SEQ ID NO: 110329 - RNA, 23 nt, Artificial Sequence
  Synthetic
auuauacaaaaaaauuagguuug

SEQ ID NO: 110330 - RNA, 24 nt, Artificial Sequence
  Synthetic
aauuauacaaaaaaauuagguuug

SEQ ID NO: 110331 - RNA, 18 nt, Artificial Sequence
  Synthetic
aagaaaggauaugguuug

SEQ ID NO: 110332 - RNA, 19 nt, Artificial Sequence
  Synthetic
uaagaaaggauaugguuug

SEQ ID NO: 110333 - RNA, 21 nt, Artificial Sequence
  Synthetic
aguaagaaaggauaugguuug

SEQ ID NO: 110334 - RNA, 22 nt, Artificial Sequence
  Synthetic
uaguaagaaaggauaugguuug

SEQ ID NO: 110335 - RNA, 24 nt, Artificial Sequence
  Synthetic
aguaguaagaaaggauaugguuug

SEQ ID NO: 110336 - RNA, 18 nt, Artificial Sequence
  Synthetic
auuucacgcagauguuug

SEQ ID NO: 110337 - RNA, 19 nt, Artificial Sequence
  Synthetic
uauuucacgcagauguuug

SEQ ID NO: 110338 - RNA, 20 nt, Artificial Sequence
  Synthetic
uuauuucacgcagauguuug

SEQ ID NO: 110339 - RNA, 21 nt, Artificial Sequence
  Synthetic
cuuauuucacgcagauguuug

SEQ ID NO: 110340 - RNA, 22 nt, Artificial Sequence
  Synthetic
acuuauuucacgcagauguuug

SEQ ID NO: 110341 - RNA, 23 nt, Artificial Sequence
  Synthetic
aacuuauuucacgcagauguuug

SEQ ID NO: 110342 - RNA, 24 nt, Artificial Sequence
  Synthetic
aaacuuauuucacgcagauguuug

SEQ ID NO: 110343 - RNA, 21 nt, Artificial Sequence
  Synthetic
aagaaauaccuuaacuguuug

SEQ ID NO: 110344 - RNA, 22 nt, Artificial Sequence
  Synthetic
aaagaaauaccuuaacuguuug

SEQ ID NO: 110345 - RNA, 18 nt, Artificial Sequence
  Synthetic
aaccaauagguuuguuug

SEQ ID NO: 110346 - RNA, 19 nt, Artificial Sequence
  Synthetic
uaaccaauagguuuguuug

SEQ ID NO: 110347 - RNA, 20 nt, Artificial Sequence
  Synthetic
uuaaccaauagguuuguuug

SEQ ID NO: 110348 - RNA, 21 nt, Artificial Sequence
  Synthetic
uuuaaccaauagguuuguuug

SEQ ID NO: 110349 - RNA, 22 nt, Artificial Sequence
  Synthetic
auuuaaccaauagguuuguuug

SEQ ID NO: 110350 - RNA, 23 nt, Artificial Sequence
  Synthetic
uauuuaaccaauagguuuguuug

SEQ ID NO: 110351 - RNA, 24 nt, Artificial Sequence
  Synthetic
auauuuaaccaauagguuuguuug

SEQ ID NO: 110352 - RNA, 21 nt, Artificial Sequence
  Synthetic
uuuagcacaauauuuuguuug

SEQ ID NO: 110353 - RNA, 22 nt, Artificial Sequence
  Synthetic
auuuagcacaauauuuuguuug

SEQ ID NO: 110354 - RNA, 23 nt, Artificial Sequence
  Synthetic
cauuuagcacaauauuuuguuug

SEQ ID NO: 110355 - RNA, 24 nt, Artificial Sequence
  Synthetic
ucauuuagcacaauauuuuguuug

SEQ ID NO: 110356 - RNA, 21 nt, Artificial Sequence
  Synthetic
uuucaauuuguugauauuuug

SEQ ID NO: 110357 - RNA, 23 nt, Artificial Sequence
  Synthetic
uguuucaauuuguugauauuuug

SEQ ID NO: 110358 - RNA, 24 nt, Artificial Sequence
  Synthetic
auguuucaauuuguugauauuuug

SEQ ID NO: 110359 - RNA, 18 nt, Artificial Sequence
  Synthetic
cagaggccagguauuuug

SEQ ID NO: 110360 - RNA, 19 nt, Artificial Sequence
  Synthetic
acagaggccagguauuuug

SEQ ID NO: 110361 - RNA, 20 nt, Artificial Sequence
  Synthetic
aacagaggccagguauuuug

SEQ ID NO: 110362 - RNA, 21 nt, Artificial Sequence
  Synthetic
caacagaggccagguauuuug

SEQ ID NO: 110363 - RNA, 22 nt, Artificial Sequence
  Synthetic
ccaacagaggccagguauuuug

SEQ ID NO: 110364 - RNA, 23 nt, Artificial Sequence
  Synthetic
accaacagaggccagguauuuug

SEQ ID NO: 110365 - RNA, 19 nt, Artificial Sequence
  Synthetic
ugauaguugauaacuuuug

SEQ ID NO: 110366 - RNA, 20 nt, Artificial Sequence
  Synthetic
uugauaguugauaacuuuug

SEQ ID NO: 110367 - RNA, 22 nt, Artificial Sequence
  Synthetic
aguugauaguugauaacuuuug

SEQ ID NO: 110368 - RNA, 23 nt, Artificial Sequence
  Synthetic
uaguugauaguugauaacuuuug

SEQ ID NO: 110369 - RNA, 24 nt, Artificial Sequence
  Synthetic
auaguugauaguugauaacuuuug

SEQ ID NO: 110370 - RNA, 18 nt, Artificial Sequence
  Synthetic
ugggcaugaucacuuuug

SEQ ID NO: 110371 - RNA, 19 nt, Artificial Sequence
  Synthetic
uugggcaugaucacuuuug

SEQ ID NO: 110372 - RNA, 20 nt, Artificial Sequence
  Synthetic
uuugggcaugaucacuuuug

SEQ ID NO: 110373 - RNA, 21 nt, Artificial Sequence
  Synthetic
auuugggcaugaucacuuuug

SEQ ID NO: 110374 - RNA, 22 nt, Artificial Sequence
  Synthetic
uauuugggcaugaucacuuuug

SEQ ID NO: 110375 - RNA, 23 nt, Artificial Sequence
  Synthetic
auauuugggcaugaucacuuuug

SEQ ID NO: 110376 - RNA, 24 nt, Artificial Sequence
  Synthetic
cauauuugggcaugaucacuuuug

SEQ ID NO: 110377 - RNA, 18 nt, Artificial Sequence
  Synthetic
aagaaggugagacuuuug

SEQ ID NO: 110378 - RNA, 19 nt, Artificial Sequence
  Synthetic
uaagaaggugagacuuuug

SEQ ID NO: 110379 - RNA, 20 nt, Artificial Sequence
  Synthetic
uuaagaaggugagacuuuug

SEQ ID NO: 110380 - RNA, 21 nt, Artificial Sequence
  Synthetic
auuaagaaggugagacuuuug

SEQ ID NO: 110381 - RNA, 23 nt, Artificial Sequence
  Synthetic
ugauuaagaaggugagacuuuug

SEQ ID NO: 110382 - RNA, 24 nt, Artificial Sequence
  Synthetic
uugauuaagaaggugagacuuuug

SEQ ID NO: 110383 - RNA, 18 nt, Artificial Sequence
  Synthetic
auugucuuaauccuuuug

SEQ ID NO: 110384 - RNA, 19 nt, Artificial Sequence
  Synthetic
cauugucuuaauccuuuug

SEQ ID NO: 110385 - RNA, 20 nt, Artificial Sequence
  Synthetic
ucauugucuuaauccuuuug

SEQ ID NO: 110386 - RNA, 21 nt, Artificial Sequence
  Synthetic
cucauugucuuaauccuuuug

SEQ ID NO: 110387 - RNA, 22 nt, Artificial Sequence
  Synthetic
ucucauugucuuaauccuuuug

SEQ ID NO: 110388 - RNA, 23 nt, Artificial Sequence
  Synthetic
aucucauugucuuaauccuuuug

SEQ ID NO: 110389 - RNA, 24 nt, Artificial Sequence
  Synthetic
aaucucauugucuuaauccuuuug

SEQ ID NO: 110390 - RNA, 18 nt, Artificial Sequence
  Synthetic
caaaagaaccaucuuuug

SEQ ID NO: 110391 - RNA, 19 nt, Artificial Sequence
  Synthetic
ucaaaagaaccaucuuuug

SEQ ID NO: 110392 - RNA, 20 nt, Artificial Sequence
  Synthetic
uucaaaagaaccaucuuuug

SEQ ID NO: 110393 - RNA, 21 nt, Artificial Sequence
  Synthetic
cuucaaaagaaccaucuuuug

SEQ ID NO: 110394 - RNA, 18 nt, Artificial Sequence
  Synthetic
uaaagcucuuaucuuuug

SEQ ID NO: 110395 - RNA, 19 nt, Artificial Sequence
  Synthetic
auaaagcucuuaucuuuug

SEQ ID NO: 110396 - RNA, 21 nt, Artificial Sequence
  Synthetic
agauaaagcucuuaucuuuug

SEQ ID NO: 110397 - RNA, 22 nt, Artificial Sequence
  Synthetic
cagauaaagcucuuaucuuuug

SEQ ID NO: 110398 - RNA, 23 nt, Artificial Sequence
  Synthetic
ucagauaaagcucuuaucuuuug

SEQ ID NO: 110399 - RNA, 24 nt, Artificial Sequence
  Synthetic
uucagauaaagcucuuaucuuuug

SEQ ID NO: 110400 - RNA, 18 nt, Artificial Sequence
  Synthetic
augacuaccccucuuuug

SEQ ID NO: 110401 - RNA, 19 nt, Artificial Sequence
  Synthetic
aaugacuaccccucuuuug

SEQ ID NO: 110402 - RNA, 20 nt, Artificial Sequence
  Synthetic
uaaugacuaccccucuuuug

SEQ ID NO: 110403 - RNA, 21 nt, Artificial Sequence
  Synthetic
uuaaugacuaccccucuuuug

SEQ ID NO: 110404 - RNA, 22 nt, Artificial Sequence
  Synthetic
cuuaaugacuaccccucuuuug

SEQ ID NO: 110405 - RNA, 23 nt, Artificial Sequence
  Synthetic
ccuuaaugacuaccccucuuuug

SEQ ID NO: 110406 - RNA, 24 nt, Artificial Sequence
  Synthetic
uccuuaaugacuaccccucuuuug

SEQ ID NO: 110407 - RNA, 18 nt, Artificial Sequence
  Synthetic
cggagcuauaaaguuuug

SEQ ID NO: 110408 - RNA, 19 nt, Artificial Sequence
  Synthetic
ccggagcuauaaaguuuug

SEQ ID NO: 110409 - RNA, 20 nt, Artificial Sequence
  Synthetic
cccggagcuauaaaguuuug

SEQ ID NO: 110410 - RNA, 21 nt, Artificial Sequence
  Synthetic
ucccggagcuauaaaguuuug

SEQ ID NO: 110411 - RNA, 23 nt, Artificial Sequence
  Synthetic
ugucccggagcuauaaaguuuug

SEQ ID NO: 110412 - RNA, 24 nt, Artificial Sequence
  Synthetic
augucccggagcuauaaaguuuug

SEQ ID NO: 110413 - RNA, 18 nt, Artificial Sequence
  Synthetic
uuuuuugauguaguuuug

SEQ ID NO: 110414 - RNA, 19 nt, Artificial Sequence
  Synthetic
uuuuuuugauguaguuuug

SEQ ID NO: 110415 - RNA, 22 nt, Artificial Sequence
  Synthetic
agguuuuuuugauguaguuuug

SEQ ID NO: 110416 - RNA, 23 nt, Artificial Sequence
  Synthetic
aagguuuuuuugauguaguuuug

SEQ ID NO: 110417 - RNA, 24 nt, Artificial Sequence
  Synthetic
aaagguuuuuuugauguaguuuug

SEQ ID NO: 110418 - RNA, 18 nt, Artificial Sequence
  Synthetic
ugcauuggggagguuuug

SEQ ID NO: 110419 - RNA, 20 nt, Artificial Sequence
  Synthetic
ugugcauuggggagguuuug

SEQ ID NO: 110420 - RNA, 21 nt, Artificial Sequence
  Synthetic
augugcauuggggagguuuug

SEQ ID NO: 110421 - RNA, 22 nt, Artificial Sequence
  Synthetic
uaugugcauuggggagguuuug

SEQ ID NO: 110422 - RNA, 23 nt, Artificial Sequence
  Synthetic
auaugugcauuggggagguuuug

SEQ ID NO: 110423 - RNA, 24 nt, Artificial Sequence
  Synthetic
aauaugugcauuggggagguuuug

SEQ ID NO: 110424 - RNA, 18 nt, Artificial Sequence
  Synthetic
caccacuauuagguuuug

SEQ ID NO: 110425 - RNA, 20 nt, Artificial Sequence
  Synthetic
ugcaccacuauuagguuuug

SEQ ID NO: 110426 - RNA, 21 nt, Artificial Sequence
  Synthetic
uugcaccacuauuagguuuug

SEQ ID NO: 110427 - RNA, 22 nt, Artificial Sequence
  Synthetic
cuugcaccacuauuagguuuug

SEQ ID NO: 110428 - RNA, 23 nt, Artificial Sequence
  Synthetic
ucuugcaccacuauuagguuuug

SEQ ID NO: 110429 - RNA, 24 nt, Artificial Sequence
  Synthetic
aucuugcaccacuauuagguuuug

SEQ ID NO: 110430 - RNA, 18 nt, Artificial Sequence
  Synthetic
augugaucaaauguuuug

SEQ ID NO: 110431 - RNA, 19 nt, Artificial Sequence
  Synthetic
uaugugaucaaauguuuug

SEQ ID NO: 110432 - RNA, 21 nt, Artificial Sequence
  Synthetic
aguaugugaucaaauguuuug

SEQ ID NO: 110433 - RNA, 22 nt, Artificial Sequence
  Synthetic
aaguaugugaucaaauguuuug

SEQ ID NO: 110434 - RNA, 23 nt, Artificial Sequence
  Synthetic
uaaguaugugaucaaauguuuug

SEQ ID NO: 110435 - RNA, 24 nt, Artificial Sequence
  Synthetic
uuaaguaugugaucaaauguuuug

SEQ ID NO: 110436 - RNA, 18 nt, Artificial Sequence
  Synthetic
uccugcuucaauguuuug

SEQ ID NO: 110437 - RNA, 19 nt, Artificial Sequence
  Synthetic
auccugcuucaauguuuug

SEQ ID NO: 110438 - RNA, 20 nt, Artificial Sequence
  Synthetic
aauccugcuucaauguuuug

SEQ ID NO: 110439 - RNA, 21 nt, Artificial Sequence
  Synthetic
uaauccugcuucaauguuuug

SEQ ID NO: 110440 - RNA, 22 nt, Artificial Sequence
  Synthetic
uuaauccugcuucaauguuuug

SEQ ID NO: 110441 - RNA, 23 nt, Artificial Sequence
  Synthetic
auuaauccugcuucaauguuuug

SEQ ID NO: 110442 - RNA, 24 nt, Artificial Sequence
  Synthetic
uauuaauccugcuucaauguuuug

SEQ ID NO: 110443 - RNA, 18 nt, Artificial Sequence
  Synthetic
uggauugucacuguuuug

SEQ ID NO: 110444 - RNA, 20 nt, Artificial Sequence
  Synthetic
uguggauugucacuguuuug

SEQ ID NO: 110445 - RNA, 21 nt, Artificial Sequence
  Synthetic
auguggauugucacuguuuug

SEQ ID NO: 110446 - RNA, 22 nt, Artificial Sequence
  Synthetic
cauguggauugucacuguuuug

SEQ ID NO: 110447 - RNA, 23 nt, Artificial Sequence
  Synthetic
ucauguggauugucacuguuuug

SEQ ID NO: 110448 - RNA, 24 nt, Artificial Sequence
  Synthetic
cucauguggauugucacuguuuug

SEQ ID NO: 110449 - RNA, 19 nt, Artificial Sequence
  Synthetic
aggcacuauacuauuuuug

SEQ ID NO: 110450 - RNA, 20 nt, Artificial Sequence
  Synthetic
caggcacuauacuauuuuug

SEQ ID NO: 110451 - RNA, 21 nt, Artificial Sequence
  Synthetic
ccaggcacuauacuauuuuug

SEQ ID NO: 110452 - RNA, 20 nt, Artificial Sequence
  Synthetic
aggaaaaauccaacuuuuug

SEQ ID NO: 110453 - RNA, 21 nt, Artificial Sequence
  Synthetic
caggaaaaauccaacuuuuug

SEQ ID NO: 110454 - RNA, 22 nt, Artificial Sequence
  Synthetic
ccaggaaaaauccaacuuuuug

SEQ ID NO: 110455 - RNA, 23 nt, Artificial Sequence
  Synthetic
uccaggaaaaauccaacuuuuug

SEQ ID NO: 110456 - RNA, 18 nt, Artificial Sequence
  Synthetic
auaaaauuggccuuuuug

SEQ ID NO: 110457 - RNA, 19 nt, Artificial Sequence
  Synthetic
aauaaaauuggccuuuuug

SEQ ID NO: 110458 - RNA, 22 nt, Artificial Sequence
  Synthetic
uggaauaaaauuggccuuuuug

SEQ ID NO: 110459 - RNA, 23 nt, Artificial Sequence
  Synthetic
uuggaauaaaauuggccuuuuug

SEQ ID NO: 110460 - RNA, 24 nt, Artificial Sequence
  Synthetic
cuuggaauaaaauuggccuuuuug

SEQ ID NO: 110461 - RNA, 18 nt, Artificial Sequence
  Synthetic
uauuuagauggcuuuuug

SEQ ID NO: 110462 - RNA, 19 nt, Artificial Sequence
  Synthetic
auauuuagauggcuuuuug

SEQ ID NO: 110463 - RNA, 21 nt, Artificial Sequence
  Synthetic
ugauauuuagauggcuuuuug

SEQ ID NO: 110464 - RNA, 22 nt, Artificial Sequence
  Synthetic
cugauauuuagauggcuuuuug

SEQ ID NO: 110465 - RNA, 23 nt, Artificial Sequence
  Synthetic
ucugauauuuagauggcuuuuug

SEQ ID NO: 110466 - RNA, 24 nt, Artificial Sequence
  Synthetic
uucugauauuuagauggcuuuuug

SEQ ID NO: 110467 - RNA, 18 nt, Artificial Sequence
  Synthetic
cuagucacgaauuuuuug

SEQ ID NO: 110468 - RNA, 19 nt, Artificial Sequence
  Synthetic
ucuagucacgaauuuuuug

SEQ ID NO: 110469 - RNA, 20 nt, Artificial Sequence
  Synthetic
uucuagucacgaauuuuuug

SEQ ID NO: 110470 - RNA, 21 nt, Artificial Sequence
  Synthetic
auucuagucacgaauuuuuug

SEQ ID NO: 110471 - RNA, 22 nt, Artificial Sequence
  Synthetic
uauucuagucacgaauuuuuug

SEQ ID NO: 110472 - RNA, 23 nt, Artificial Sequence
  Synthetic
uuauucuagucacgaauuuuuug

SEQ ID NO: 110473 - RNA, 18 nt, Artificial Sequence
  Synthetic
auggcaaaagcuuuuuug

SEQ ID NO: 110474 - RNA, 20 nt, Artificial Sequence
  Synthetic
agauggcaaaagcuuuuuug

SEQ ID NO: 110475 - RNA, 21 nt, Artificial Sequence
  Synthetic
uagauggcaaaagcuuuuuug

SEQ ID NO: 110476 - RNA, 22 nt, Artificial Sequence
  Synthetic
auagauggcaaaagcuuuuuug

SEQ ID NO: 110477 - RNA, 24 nt, Artificial Sequence
  Synthetic
ugauagauggcaaaagcuuuuuug

SEQ ID NO: 110478 - RNA, 18 nt, Artificial Sequence
  Synthetic
aaagccuuuucuuuuuug

SEQ ID NO: 110479 - RNA, 20 nt, Artificial Sequence
  Synthetic
agaaagccuuuucuuuuuug

SEQ ID NO: 110480 - RNA, 23 nt, Artificial Sequence
  Synthetic
uggagaaagccuuuucuuuuuug

SEQ ID NO: 110481 - RNA, 24 nt, Artificial Sequence
  Synthetic
auggagaaagccuuuucuuuuuug

SEQ ID NO: 110482 - RNA, 21 nt, Artificial Sequence
  Synthetic
uaguagauuuaagaaaaaaau

SEQ ID NO: 110483 - RNA, 22 nt, Artificial Sequence
  Synthetic
uuaguagauuuaagaaaaaaau

SEQ ID NO: 110484 - RNA, 24 nt, Artificial Sequence
  Synthetic
aguuaguagauuuaagaaaaaaau

SEQ ID NO: 110485 - RNA, 21 nt, Artificial Sequence
  Synthetic
ugaaaauauuuagaaaaaaau

SEQ ID NO: 110486 - RNA, 22 nt, Artificial Sequence
  Synthetic
uugaaaauauuuagaaaaaaau

SEQ ID NO: 110487 - RNA, 23 nt, Artificial Sequence
  Synthetic
cuugaaaauauuuagaaaaaaau

SEQ ID NO: 110488 - RNA, 24 nt, Artificial Sequence
  Synthetic
ucuugaaaauauuuagaaaaaaau

SEQ ID NO: 110489 - RNA, 18 nt, Artificial Sequence
  Synthetic
cagcuauccugaaaaaau

SEQ ID NO: 110490 - RNA, 19 nt, Artificial Sequence
  Synthetic
ucagcuauccugaaaaaau

SEQ ID NO: 110491 - RNA, 20 nt, Artificial Sequence
  Synthetic
uucagcuauccugaaaaaau

SEQ ID NO: 110492 - RNA, 21 nt, Artificial Sequence
  Synthetic
uuucagcuauccugaaaaaau

SEQ ID NO: 110493 - RNA, 22 nt, Artificial Sequence
  Synthetic
auuucagcuauccugaaaaaau

SEQ ID NO: 110494 - RNA, 23 nt, Artificial Sequence
  Synthetic
uauuucagcuauccugaaaaaau

SEQ ID NO: 110495 - RNA, 24 nt, Artificial Sequence
  Synthetic
auauuucagcuauccugaaaaaau

SEQ ID NO: 110496 - RNA, 21 nt, Artificial Sequence
  Synthetic
auugucauuguauuaaaaaau

SEQ ID NO: 110497 - RNA, 22 nt, Artificial Sequence
  Synthetic
uauugucauuguauuaaaaaau

SEQ ID NO: 110498 - RNA, 23 nt, Artificial Sequence
  Synthetic
auauugucauuguauuaaaaaau

SEQ ID NO: 110499 - RNA, 24 nt, Artificial Sequence
  Synthetic
aauauugucauuguauuaaaaaau

SEQ ID NO: 110500 - RNA, 18 nt, Artificial Sequence
  Synthetic
cuaagauguuagaaaaau

SEQ ID NO: 110501 - RNA, 19 nt, Artificial Sequence
  Synthetic
ucuaagauguuagaaaaau

SEQ ID NO: 110502 - RNA, 20 nt, Artificial Sequence
  Synthetic
uucuaagauguuagaaaaau

SEQ ID NO: 110503 - RNA, 22 nt, Artificial Sequence
  Synthetic
uguucuaagauguuagaaaaau

SEQ ID NO: 110504 - RNA, 23 nt, Artificial Sequence
  Synthetic
auguucuaagauguuagaaaaau

SEQ ID NO: 110505 - RNA, 24 nt, Artificial Sequence
  Synthetic
aauguucuaagauguuagaaaaau

SEQ ID NO: 110506 - RNA, 18 nt, Artificial Sequence
  Synthetic
uuauuacuuuagaaaaau

SEQ ID NO: 110507 - RNA, 19 nt, Artificial Sequence
  Synthetic
uuuauuacuuuagaaaaau

SEQ ID NO: 110508 - RNA, 21 nt, Artificial Sequence
  Synthetic
aguuuauuacuuuagaaaaau

SEQ ID NO: 110509 - RNA, 22 nt, Artificial Sequence
  Synthetic
uaguuuauuacuuuagaaaaau

SEQ ID NO: 110510 - RNA, 23 nt, Artificial Sequence
  Synthetic
auaguuuauuacuuuagaaaaau

SEQ ID NO: 110511 - RNA, 24 nt, Artificial Sequence
  Synthetic
uauaguuuauuacuuuagaaaaau

SEQ ID NO: 110512 - RNA, 18 nt, Artificial Sequence
  Synthetic
ucaauccaacugaaaaau

SEQ ID NO: 110513 - RNA, 19 nt, Artificial Sequence
  Synthetic
uucaauccaacugaaaaau

SEQ ID NO: 110514 - RNA, 20 nt, Artificial Sequence
  Synthetic
uuucaauccaacugaaaaau

SEQ ID NO: 110515 - RNA, 21 nt, Artificial Sequence
  Synthetic
cuuucaauccaacugaaaaau

SEQ ID NO: 110516 - RNA, 22 nt, Artificial Sequence
  Synthetic
ccuuucaauccaacugaaaaau

SEQ ID NO: 110517 - RNA, 23 nt, Artificial Sequence
  Synthetic
cccuuucaauccaacugaaaaau

SEQ ID NO: 110518 - RNA, 24 nt, Artificial Sequence
  Synthetic
ucccuuucaauccaacugaaaaau

SEQ ID NO: 110519 - RNA, 18 nt, Artificial Sequence
  Synthetic
cuguaguuagugaaaaau

SEQ ID NO: 110520 - RNA, 19 nt, Artificial Sequence
  Synthetic
acuguaguuagugaaaaau

SEQ ID NO: 110521 - RNA, 20 nt, Artificial Sequence
  Synthetic
aacuguaguuagugaaaaau

SEQ ID NO: 110522 - RNA, 21 nt, Artificial Sequence
  Synthetic
uaacuguaguuagugaaaaau

SEQ ID NO: 110523 - RNA, 22 nt, Artificial Sequence
  Synthetic
cuaacuguaguuagugaaaaau

SEQ ID NO: 110524 - RNA, 23 nt, Artificial Sequence
  Synthetic
ucuaacuguaguuagugaaaaau

SEQ ID NO: 110525 - RNA, 24 nt, Artificial Sequence
  Synthetic
cucuaacuguaguuagugaaaaau

SEQ ID NO: 110526 - RNA, 22 nt, Artificial Sequence
  Synthetic
aguauuuucucagaauaaaaau

SEQ ID NO: 110527 - RNA, 23 nt, Artificial Sequence
  Synthetic
caguauuuucucagaauaaaaau

SEQ ID NO: 110528 - RNA, 24 nt, Artificial Sequence
  Synthetic
acaguauuuucucagaauaaaaau

SEQ ID NO: 110529 - RNA, 18 nt, Artificial Sequence
  Synthetic
ugauauagcuauaaaaau

SEQ ID NO: 110530 - RNA, 19 nt, Artificial Sequence
  Synthetic
uugauauagcuauaaaaau

SEQ ID NO: 110531 - RNA, 20 nt, Artificial Sequence
  Synthetic
uuugauauagcuauaaaaau

SEQ ID NO: 110532 - RNA, 21 nt, Artificial Sequence
  Synthetic
auuugauauagcuauaaaaau

SEQ ID NO: 110533 - RNA, 22 nt, Artificial Sequence
  Synthetic
cauuugauauagcuauaaaaau

SEQ ID NO: 110534 - RNA, 23 nt, Artificial Sequence
  Synthetic
ucauuugauauagcuauaaaaau

SEQ ID NO: 110535 - RNA, 24 nt, Artificial Sequence
  Synthetic
aucauuugauauagcuauaaaaau

SEQ ID NO: 110536 - RNA, 18 nt, Artificial Sequence
  Synthetic
ucuguacaggcuaaaaau

SEQ ID NO: 110537 - RNA, 19 nt, Artificial Sequence
  Synthetic
uucuguacaggcuaaaaau

SEQ ID NO: 110538 - RNA, 20 nt, Artificial Sequence
  Synthetic
auucuguacaggcuaaaaau

SEQ ID NO: 110539 - RNA, 22 nt, Artificial Sequence
  Synthetic
agauucuguacaggcuaaaaau

SEQ ID NO: 110540 - RNA, 23 nt, Artificial Sequence
  Synthetic
cagauucuguacaggcuaaaaau

SEQ ID NO: 110541 - RNA, 18 nt, Artificial Sequence
  Synthetic
ucuaaccaugcuaaaaau

SEQ ID NO: 110542 - RNA, 20 nt, Artificial Sequence
  Synthetic
ugucuaaccaugcuaaaaau

SEQ ID NO: 110543 - RNA, 21 nt, Artificial Sequence
  Synthetic
uugucuaaccaugcuaaaaau

SEQ ID NO: 110544 - RNA, 22 nt, Artificial Sequence
  Synthetic
uuugucuaaccaugcuaaaaau

SEQ ID NO: 110545 - RNA, 23 nt, Artificial Sequence
  Synthetic
uuuugucuaaccaugcuaaaaau

SEQ ID NO: 110546 - RNA, 24 nt, Artificial Sequence
  Synthetic
uuuuugucuaaccaugcuaaaaau

SEQ ID NO: 110547 - RNA, 21 nt, Artificial Sequence
  Synthetic
ugauaaguaaaauguaaaaau

SEQ ID NO: 110548 - RNA, 22 nt, Artificial Sequence
  Synthetic
augauaaguaaaauguaaaaau

SEQ ID NO: 110549 - RNA, 23 nt, Artificial Sequence
  Synthetic
uaugauaaguaaaauguaaaaau

SEQ ID NO: 110550 - RNA, 24 nt, Artificial Sequence
  Synthetic
auaugauaaguaaaauguaaaaau

SEQ ID NO: 110551 - RNA, 21 nt, Artificial Sequence
  Synthetic
auauaugauaaaauuaaaaau

SEQ ID NO: 110552 - RNA, 22 nt, Artificial Sequence
  Synthetic
aauauaugauaaaauuaaaaau

SEQ ID NO: 110553 - RNA, 23 nt, Artificial Sequence
  Synthetic
caauauaugauaaaauuaaaaau

SEQ ID NO: 110554 - RNA, 21 nt, Artificial Sequence
  Synthetic
auucauuucuaucuuaaaaau

SEQ ID NO: 110555 - RNA, 22 nt, Artificial Sequence
  Synthetic
cauucauuucuaucuuaaaaau

SEQ ID NO: 110556 - RNA, 23 nt, Artificial Sequence
  Synthetic
ucauucauuucuaucuuaaaaau

SEQ ID NO: 110557 - RNA, 24 nt, Artificial Sequence
  Synthetic
uucauucauuucuaucuuaaaaau

SEQ ID NO: 110558 - RNA, 21 nt, Artificial Sequence
  Synthetic
auacaauauuuucuuaaaaau

SEQ ID NO: 110559 - RNA, 23 nt, Artificial Sequence
  Synthetic
agauacaauauuuucuuaaaaau

SEQ ID NO: 110560 - RNA, 24 nt, Artificial Sequence
  Synthetic
aagauacaauauuuucuuaaaaau

SEQ ID NO: 110561 - RNA, 18 nt, Artificial Sequence
  Synthetic
uuaacuauuguuaaaaau

SEQ ID NO: 110562 - RNA, 21 nt, Artificial Sequence
  Synthetic
agguuaacuauuguuaaaaau

SEQ ID NO: 110563 - RNA, 23 nt, Artificial Sequence
  Synthetic
ugagguuaacuauuguuaaaaau

SEQ ID NO: 110564 - RNA, 24 nt, Artificial Sequence
  Synthetic
augagguuaacuauuguuaaaaau

SEQ ID NO: 110565 - RNA, 18 nt, Artificial Sequence
  Synthetic
accaagauguuuaaaaau

SEQ ID NO: 110566 - RNA, 19 nt, Artificial Sequence
  Synthetic
aaccaagauguuuaaaaau

SEQ ID NO: 110567 - RNA, 20 nt, Artificial Sequence
  Synthetic
uaaccaagauguuuaaaaau

SEQ ID NO: 110568 - RNA, 21 nt, Artificial Sequence
  Synthetic
auaaccaagauguuuaaaaau

SEQ ID NO: 110569 - RNA, 22 nt, Artificial Sequence
  Synthetic
uauaaccaagauguuuaaaaau

SEQ ID NO: 110570 - RNA, 23 nt, Artificial Sequence
  Synthetic
uuauaaccaagauguuuaaaaau

SEQ ID NO: 110571 - RNA, 18 nt, Artificial Sequence
  Synthetic
cucauaaauuuuaaaaau

SEQ ID NO: 110572 - RNA, 19 nt, Artificial Sequence
  Synthetic
ccucauaaauuuuaaaaau

SEQ ID NO: 110573 - RNA, 20 nt, Artificial Sequence
  Synthetic
accucauaaauuuuaaaaau

SEQ ID NO: 110574 - RNA, 21 nt, Artificial Sequence
  Synthetic
aaccucauaaauuuuaaaaau

SEQ ID NO: 110575 - RNA, 23 nt, Artificial Sequence
  Synthetic
ugaaccucauaaauuuuaaaaau

SEQ ID NO: 110576 - RNA, 24 nt, Artificial Sequence
  Synthetic
augaaccucauaaauuuuaaaaau

SEQ ID NO: 110577 - RNA, 18 nt, Artificial Sequence
  Synthetic
cauauccuucaacaaaau

SEQ ID NO: 110578 - RNA, 19 nt, Artificial Sequence
  Synthetic
ccauauccuucaacaaaau

SEQ ID NO: 110579 - RNA, 20 nt, Artificial Sequence
  Synthetic
uccauauccuucaacaaaau

SEQ ID NO: 110580 - RNA, 21 nt, Artificial Sequence
  Synthetic
auccauauccuucaacaaaau

SEQ ID NO: 110581 - RNA, 22 nt, Artificial Sequence
  Synthetic
uauccauauccuucaacaaaau

SEQ ID NO: 110582 - RNA, 23 nt, Artificial Sequence
  Synthetic
auauccauauccuucaacaaaau

SEQ ID NO: 110583 - RNA, 24 nt, Artificial Sequence
  Synthetic
uauauccauauccuucaacaaaau

SEQ ID NO: 110584 - RNA, 19 nt, Artificial Sequence
  Synthetic
ugagcaguaauaacaaaau

SEQ ID NO: 110585 - RNA, 21 nt, Artificial Sequence
  Synthetic
agugagcaguaauaacaaaau

SEQ ID NO: 110586 - RNA, 22 nt, Artificial Sequence
  Synthetic
uagugagcaguaauaacaaaau

SEQ ID NO: 110587 - RNA, 24 nt, Artificial Sequence
  Synthetic
uguagugagcaguaauaacaaaau

SEQ ID NO: 110588 - RNA, 20 nt, Artificial Sequence
  Synthetic
aggaagguauaggacaaaau

SEQ ID NO: 110589 - RNA, 19 nt, Artificial Sequence
  Synthetic
uguuuauuuuguacaaaau

SEQ ID NO: 110590 - RNA, 21 nt, Artificial Sequence
  Synthetic
uguguuuauuuuguacaaaau

SEQ ID NO: 110591 - RNA, 22 nt, Artificial Sequence
  Synthetic
auguguuuauuuuguacaaaau

SEQ ID NO: 110592 - RNA, 23 nt, Artificial Sequence
  Synthetic
aauguguuuauuuuguacaaaau

SEQ ID NO: 110593 - RNA, 24 nt, Artificial Sequence
  Synthetic
uaauguguuuauuuuguacaaaau

SEQ ID NO: 110594 - RNA, 18 nt, Artificial Sequence
  Synthetic
cucuguuuuuuacaaaau

SEQ ID NO: 110595 - RNA, 19 nt, Artificial Sequence
  Synthetic
ucucuguuuuuuacaaaau

SEQ ID NO: 110596 - RNA, 20 nt, Artificial Sequence
  Synthetic
uucucuguuuuuuacaaaau

SEQ ID NO: 110597 - RNA, 21 nt, Artificial Sequence
  Synthetic
uuucucuguuuuuuacaaaau

SEQ ID NO: 110598 - RNA, 22 nt, Artificial Sequence
  Synthetic
uuuucucuguuuuuuacaaaau

SEQ ID NO: 110599 - RNA, 18 nt, Artificial Sequence
  Synthetic
agauccugggggcaaaau

SEQ ID NO: 110600 - RNA, 19 nt, Artificial Sequence
  Synthetic
cagauccugggggcaaaau

SEQ ID NO: 110601 - RNA, 20 nt, Artificial Sequence
  Synthetic
acagauccugggggcaaaau

SEQ ID NO: 110602 - RNA, 24 nt, Artificial Sequence
  Synthetic
cgggacagauccugggggcaaaau

SEQ ID NO: 110603 - RNA, 18 nt, Artificial Sequence
  Synthetic
aguaccauguaucaaaau

SEQ ID NO: 110604 - RNA, 19 nt, Artificial Sequence
  Synthetic
caguaccauguaucaaaau

SEQ ID NO: 110605 - RNA, 20 nt, Artificial Sequence
  Synthetic
ucaguaccauguaucaaaau

SEQ ID NO: 110606 - RNA, 21 nt, Artificial Sequence
  Synthetic
uucaguaccauguaucaaaau

SEQ ID NO: 110607 - RNA, 22 nt, Artificial Sequence
  Synthetic
auucaguaccauguaucaaaau

SEQ ID NO: 110608 - RNA, 23 nt, Artificial Sequence
  Synthetic
uauucaguaccauguaucaaaau

SEQ ID NO: 110609 - RNA, 24 nt, Artificial Sequence
  Synthetic
cuauucaguaccauguaucaaaau

SEQ ID NO: 110610 - RNA, 22 nt, Artificial Sequence
  Synthetic
agacuuuuuucuuuuucaaaau

SEQ ID NO: 110611 - RNA, 23 nt, Artificial Sequence
  Synthetic
uagacuuuuuucuuuuucaaaau

SEQ ID NO: 110612 - RNA, 24 nt, Artificial Sequence
  Synthetic
auagacuuuuuucuuuuucaaaau

SEQ ID NO: 110613 - RNA, 21 nt, Artificial Sequence
  Synthetic
acaaaauucauuaaagaaaau

SEQ ID NO: 110614 - RNA, 22 nt, Artificial Sequence
  Synthetic
uacaaaauucauuaaagaaaau

SEQ ID NO: 110615 - RNA, 23 nt, Artificial Sequence
  Synthetic
auacaaaauucauuaaagaaaau

SEQ ID NO: 110616 - RNA, 24 nt, Artificial Sequence
  Synthetic
cauacaaaauucauuaaagaaaau

SEQ ID NO: 110617 - RNA, 22 nt, Artificial Sequence
  Synthetic
uguauaugaaacaugagaaaau

SEQ ID NO: 110618 - RNA, 23 nt, Artificial Sequence
  Synthetic
auguauaugaaacaugagaaaau

SEQ ID NO: 110619 - RNA, 24 nt, Artificial Sequence
  Synthetic
cauguauaugaaacaugagaaaau

SEQ ID NO: 110620 - RNA, 18 nt, Artificial Sequence
  Synthetic
auuuaacuggaggaaaau

SEQ ID NO: 110621 - RNA, 19 nt, Artificial Sequence
  Synthetic
aauuuaacuggaggaaaau

SEQ ID NO: 110622 - RNA, 21 nt, Artificial Sequence
  Synthetic
agaauuuaacuggaggaaaau

SEQ ID NO: 110623 - RNA, 22 nt, Artificial Sequence
  Synthetic
cagaauuuaacuggaggaaaau

SEQ ID NO: 110624 - RNA, 24 nt, Artificial Sequence
  Synthetic
cgcagaauuuaacuggaggaaaau

SEQ ID NO: 110625 - RNA, 18 nt, Artificial Sequence
  Synthetic
aacaauccaacggaaaau

SEQ ID NO: 110626 - RNA, 19 nt, Artificial Sequence
  Synthetic
aaacaauccaacggaaaau

SEQ ID NO: 110627 - RNA, 20 nt, Artificial Sequence
  Synthetic
uaaacaauccaacggaaaau

SEQ ID NO: 110628 - RNA, 22 nt, Artificial Sequence
  Synthetic
aguaaacaauccaacggaaaau

SEQ ID NO: 110629 - RNA, 23 nt, Artificial Sequence
  Synthetic
aaguaaacaauccaacggaaaau

SEQ ID NO: 110630 - RNA, 24 nt, Artificial Sequence
  Synthetic
aaaguaaacaauccaacggaaaau

SEQ ID NO: 110631 - RNA, 23 nt, Artificial Sequence
  Synthetic
aggagguacaaaaaagggaaaau

SEQ ID NO: 110632 - RNA, 24 nt, Artificial Sequence
  Synthetic
aaggagguacaaaaaagggaaaau

SEQ ID NO: 110633 - RNA, 18 nt, Artificial Sequence
  Synthetic
ucaagaccuggggaaaau

SEQ ID NO: 110634 - RNA, 20 nt, Artificial Sequence
  Synthetic
ugucaagaccuggggaaaau

SEQ ID NO: 110635 - RNA, 22 nt, Artificial Sequence
  Synthetic
ugugucaagaccuggggaaaau

SEQ ID NO: 110636 - RNA, 20 nt, Artificial Sequence
  Synthetic
aggcaaagcauaaugaaaau

SEQ ID NO: 110637 - RNA, 21 nt, Artificial Sequence
  Synthetic
aaggcaaagcauaaugaaaau

SEQ ID NO: 110638 - RNA, 22 nt, Artificial Sequence
  Synthetic
aaaggcaaagcauaaugaaaau

SEQ ID NO: 110639 - RNA, 23 nt, Artificial Sequence
  Synthetic
aaaaggcaaagcauaaugaaaau

SEQ ID NO: 110640 - RNA, 24 nt, Artificial Sequence
  Synthetic
uaaaaggcaaagcauaaugaaaau

SEQ ID NO: 110641 - RNA, 18 nt, Artificial Sequence
  Synthetic
agcauuuuccaugaaaau

SEQ ID NO: 110642 - RNA, 20 nt, Artificial Sequence
  Synthetic
agagcauuuuccaugaaaau

SEQ ID NO: 110643 - RNA, 22 nt, Artificial Sequence
  Synthetic
agagagcauuuuccaugaaaau

SEQ ID NO: 110644 - RNA, 24 nt, Artificial Sequence
  Synthetic
agagagagcauuuuccaugaaaau

SEQ ID NO: 110645 - RNA, 18 nt, Artificial Sequence
  Synthetic
acuucaaccucugaaaau

SEQ ID NO: 110646 - RNA, 20 nt, Artificial Sequence
  Synthetic
ugacuucaaccucugaaaau

SEQ ID NO: 110647 - RNA, 21 nt, Artificial Sequence
  Synthetic
augacuucaaccucugaaaau

SEQ ID NO: 110648 - RNA, 22 nt, Artificial Sequence
  Synthetic
uaugacuucaaccucugaaaau

SEQ ID NO: 110649 - RNA, 23 nt, Artificial Sequence
  Synthetic
uuaugacuucaaccucugaaaau

SEQ ID NO: 110650 - RNA, 24 nt, Artificial Sequence
  Synthetic
cuuaugacuucaaccucugaaaau

SEQ ID NO: 110651 - RNA, 18 nt, Artificial Sequence
  Synthetic
uugucagcaggugaaaau

SEQ ID NO: 110652 - RNA, 19 nt, Artificial Sequence
  Synthetic
cuugucagcaggugaaaau

SEQ ID NO: 110653 - RNA, 21 nt, Artificial Sequence
  Synthetic
agcuugucagcaggugaaaau

SEQ ID NO: 110654 - RNA, 22 nt, Artificial Sequence
  Synthetic
uagcuugucagcaggugaaaau

SEQ ID NO: 110655 - RNA, 18 nt, Artificial Sequence
  Synthetic
cuguucuugggugaaaau

SEQ ID NO: 110656 - RNA, 19 nt, Artificial Sequence
  Synthetic
ucuguucuugggugaaaau

SEQ ID NO: 110657 - RNA, 20 nt, Artificial Sequence
  Synthetic
uucuguucuugggugaaaau

SEQ ID NO: 110658 - RNA, 22 nt, Artificial Sequence
  Synthetic
uguucuguucuugggugaaaau

SEQ ID NO: 110659 - RNA, 23 nt, Artificial Sequence
  Synthetic
cuguucuguucuugggugaaaau

SEQ ID NO: 110660 - RNA, 24 nt, Artificial Sequence
  Synthetic
ucuguucuguucuugggugaaaau

SEQ ID NO: 110661 - RNA, 18 nt, Artificial Sequence
  Synthetic
acuaccuuguuugaaaau

SEQ ID NO: 110662 - RNA, 19 nt, Artificial Sequence
  Synthetic
aacuaccuuguuugaaaau

SEQ ID NO: 110663 - RNA, 20 nt, Artificial Sequence
  Synthetic
aaacuaccuuguuugaaaau

SEQ ID NO: 110664 - RNA, 21 nt, Artificial Sequence
  Synthetic
uaaacuaccuuguuugaaaau

SEQ ID NO: 110665 - RNA, 22 nt, Artificial Sequence
  Synthetic
auaaacuaccuuguuugaaaau

SEQ ID NO: 110666 - RNA, 23 nt, Artificial Sequence
  Synthetic
cauaaacuaccuuguuugaaaau

SEQ ID NO: 110667 - RNA, 24 nt, Artificial Sequence
  Synthetic
ucauaaacuaccuuguuugaaaau

SEQ ID NO: 110668 - RNA, 19 nt, Artificial Sequence
  Synthetic
ugaucuucgucuauaaaau

SEQ ID NO: 110669 - RNA, 20 nt, Artificial Sequence
  Synthetic
augaucuucgucuauaaaau

SEQ ID NO: 110670 - RNA, 21 nt, Artificial Sequence
  Synthetic
uaugaucuucgucuauaaaau

SEQ ID NO: 110671 - RNA, 22 nt, Artificial Sequence
  Synthetic
uuaugaucuucgucuauaaaau

SEQ ID NO: 110672 - RNA, 23 nt, Artificial Sequence
  Synthetic
cuuaugaucuucgucuauaaaau

SEQ ID NO: 110673 - RNA, 24 nt, Artificial Sequence
  Synthetic
ucuuaugaucuucgucuauaaaau

SEQ ID NO: 110674 - RNA, 18 nt, Artificial Sequence
  Synthetic
uaaaccaagaacuaaaau

SEQ ID NO: 110675 - RNA, 20 nt, Artificial Sequence
  Synthetic
aguaaaccaagaacuaaaau

SEQ ID NO: 110676 - RNA, 21 nt, Artificial Sequence
  Synthetic
uaguaaaccaagaacuaaaau

SEQ ID NO: 110677 - RNA, 23 nt, Artificial Sequence
  Synthetic
uguaguaaaccaagaacuaaaau

SEQ ID NO: 110678 - RNA, 24 nt, Artificial Sequence
  Synthetic
auguaguaaaccaagaacuaaaau

SEQ ID NO: 110679 - RNA, 21 nt, Artificial Sequence
  Synthetic
auauuggaaaguaacuaaaau

SEQ ID NO: 110680 - RNA, 23 nt, Artificial Sequence
  Synthetic
ugauauuggaaaguaacuaaaau

SEQ ID NO: 110681 - RNA, 24 nt, Artificial Sequence
  Synthetic
uugauauuggaaaguaacuaaaau

SEQ ID NO: 110682 - RNA, 18 nt, Artificial Sequence
  Synthetic
agcccaaggcccuaaaau

SEQ ID NO: 110683 - RNA, 23 nt, Artificial Sequence
  Synthetic
aggggagcccaaggcccuaaaau

SEQ ID NO: 110684 - RNA, 18 nt, Artificial Sequence
  Synthetic
uaugugaccguguaaaau

SEQ ID NO: 110685 - RNA, 19 nt, Artificial Sequence
  Synthetic
uuaugugaccguguaaaau

SEQ ID NO: 110686 - RNA, 20 nt, Artificial Sequence
  Synthetic
auuaugugaccguguaaaau

SEQ ID NO: 110687 - RNA, 22 nt, Artificial Sequence
  Synthetic
ugauuaugugaccguguaaaau

SEQ ID NO: 110688 - RNA, 23 nt, Artificial Sequence
  Synthetic
uugauuaugugaccguguaaaau

SEQ ID NO: 110689 - RNA, 24 nt, Artificial Sequence
  Synthetic
uuugauuaugugaccguguaaaau

SEQ ID NO: 110690 - RNA, 18 nt, Artificial Sequence
  Synthetic
augaucaccuuguaaaau

SEQ ID NO: 110691 - RNA, 19 nt, Artificial Sequence
  Synthetic
uaugaucaccuuguaaaau

SEQ ID NO: 110692 - RNA, 21 nt, Artificial Sequence
  Synthetic
aguaugaucaccuuguaaaau

SEQ ID NO: 110693 - RNA, 22 nt, Artificial Sequence
  Synthetic
caguaugaucaccuuguaaaau

SEQ ID NO: 110694 - RNA, 23 nt, Artificial Sequence
  Synthetic
ucaguaugaucaccuuguaaaau

SEQ ID NO: 110695 - RNA, 24 nt, Artificial Sequence
  Synthetic
aucaguaugaucaccuuguaaaau

SEQ ID NO: 110696 - RNA, 18 nt, Artificial Sequence
  Synthetic
auaucgagacauuaaaau

SEQ ID NO: 110697 - RNA, 19 nt, Artificial Sequence
  Synthetic
cauaucgagacauuaaaau

SEQ ID NO: 110698 - RNA, 20 nt, Artificial Sequence
  Synthetic
ccauaucgagacauuaaaau

SEQ ID NO: 110699 - RNA, 21 nt, Artificial Sequence
  Synthetic
uccauaucgagacauuaaaau

SEQ ID NO: 110700 - RNA, 22 nt, Artificial Sequence
  Synthetic
cuccauaucgagacauuaaaau

SEQ ID NO: 110701 - RNA, 24 nt, Artificial Sequence
  Synthetic
ugcuccauaucgagacauuaaaau

SEQ ID NO: 110702 - RNA, 18 nt, Artificial Sequence
  Synthetic
aacacuuguccuuaaaau

SEQ ID NO: 110703 - RNA, 19 nt, Artificial Sequence
  Synthetic
uaacacuuguccuuaaaau

SEQ ID NO: 110704 - RNA, 20 nt, Artificial Sequence
  Synthetic
auaacacuuguccuuaaaau

SEQ ID NO: 110705 - RNA, 21 nt, Artificial Sequence
  Synthetic
uauaacacuuguccuuaaaau

SEQ ID NO: 110706 - RNA, 22 nt, Artificial Sequence
  Synthetic
cuauaacacuuguccuuaaaau

SEQ ID NO: 110707 - RNA, 24 nt, Artificial Sequence
  Synthetic
agcuauaacacuuguccuuaaaau

SEQ ID NO: 110708 - RNA, 18 nt, Artificial Sequence
  Synthetic
ugauacccuauuuaaaau

SEQ ID NO: 110709 - RNA, 19 nt, Artificial Sequence
  Synthetic
augauacccuauuuaaaau

SEQ ID NO: 110710 - RNA, 20 nt, Artificial Sequence
  Synthetic
caugauacccuauuuaaaau

SEQ ID NO: 110711 - RNA, 21 nt, Artificial Sequence
  Synthetic
ccaugauacccuauuuaaaau

SEQ ID NO: 110712 - RNA, 22 nt, Artificial Sequence
  Synthetic
accaugauacccuauuuaaaau

SEQ ID NO: 110713 - RNA, 23 nt, Artificial Sequence
  Synthetic
uaccaugauacccuauuuaaaau

SEQ ID NO: 110714 - RNA, 24 nt, Artificial Sequence
  Synthetic
auaccaugauacccuauuuaaaau

SEQ ID NO: 110715 - RNA, 21 nt, Artificial Sequence
  Synthetic
ugaaaauaaagacuuuaaaau

SEQ ID NO: 110716 - RNA, 22 nt, Artificial Sequence
  Synthetic
augaaaauaaagacuuuaaaau

SEQ ID NO: 110717 - RNA, 23 nt, Artificial Sequence
  Synthetic
uaugaaaauaaagacuuuaaaau

SEQ ID NO: 110718 - RNA, 24 nt, Artificial Sequence
  Synthetic
auaugaaaauaaagacuuuaaaau

SEQ ID NO: 110719 - RNA, 18 nt, Artificial Sequence
  Synthetic
uaugagauacuuuaaaau

SEQ ID NO: 110720 - RNA, 19 nt, Artificial Sequence
  Synthetic
uuaugagauacuuuaaaau

SEQ ID NO: 110721 - RNA, 20 nt, Artificial Sequence
  Synthetic
uuuaugagauacuuuaaaau

SEQ ID NO: 110722 - RNA, 21 nt, Artificial Sequence
  Synthetic
uuuuaugagauacuuuaaaau

SEQ ID NO: 110723 - RNA, 22 nt, Artificial Sequence
  Synthetic
cuuuuaugagauacuuuaaaau

SEQ ID NO: 110724 - RNA, 23 nt, Artificial Sequence
  Synthetic
ucuuuuaugagauacuuuaaaau

SEQ ID NO: 110725 - RNA, 24 nt, Artificial Sequence
  Synthetic
cucuuuuaugagauacuuuaaaau

SEQ ID NO: 110726 - RNA, 18 nt, Artificial Sequence
  Synthetic
aucccuggaagaacaaau

SEQ ID NO: 110727 - RNA, 19 nt, Artificial Sequence
  Synthetic
uaucccuggaagaacaaau

SEQ ID NO: 110728 - RNA, 20 nt, Artificial Sequence
  Synthetic
cuaucccuggaagaacaaau

SEQ ID NO: 110729 - RNA, 21 nt, Artificial Sequence
  Synthetic
ucuaucccuggaagaacaaau

SEQ ID NO: 110730 - RNA, 22 nt, Artificial Sequence
  Synthetic
cucuaucccuggaagaacaaau

SEQ ID NO: 110731 - RNA, 23 nt, Artificial Sequence
  Synthetic
acucuaucccuggaagaacaaau

SEQ ID NO: 110732 - RNA, 24 nt, Artificial Sequence
  Synthetic
uacucuaucccuggaagaacaaau

SEQ ID NO: 110733 - RNA, 18 nt, Artificial Sequence
  Synthetic
agucgccucugcacaaau

SEQ ID NO: 110734 - RNA, 19 nt, Artificial Sequence
  Synthetic
aagucgccucugcacaaau

SEQ ID NO: 110735 - RNA, 20 nt, Artificial Sequence
  Synthetic
caagucgccucugcacaaau

SEQ ID NO: 110736 - RNA, 21 nt, Artificial Sequence
  Synthetic
ccaagucgccucugcacaaau

SEQ ID NO: 110737 - RNA, 22 nt, Artificial Sequence
  Synthetic
accaagucgccucugcacaaau

SEQ ID NO: 110738 - RNA, 23 nt, Artificial Sequence
  Synthetic
aaccaagucgccucugcacaaau

SEQ ID NO: 110739 - RNA, 24 nt, Artificial Sequence
  Synthetic
caaccaagucgccucugcacaaau

SEQ ID NO: 110740 - RNA, 20 nt, Artificial Sequence
  Synthetic
ugggacagccggagacaaau

SEQ ID NO: 110741 - RNA, 21 nt, Artificial Sequence
  Synthetic
cugggacagccggagacaaau

SEQ ID NO: 110742 - RNA, 22 nt, Artificial Sequence
  Synthetic
acugggacagccggagacaaau

SEQ ID NO: 110743 - RNA, 23 nt, Artificial Sequence
  Synthetic
aacugggacagccggagacaaau

SEQ ID NO: 110744 - RNA, 24 nt, Artificial Sequence
  Synthetic
aaacugggacagccggagacaaau

SEQ ID NO: 110745 - RNA, 18 nt, Artificial Sequence
  Synthetic
cagugccagacgacaaau

SEQ ID NO: 110746 - RNA, 19 nt, Artificial Sequence
  Synthetic
ccagugccagacgacaaau

SEQ ID NO: 110747 - RNA, 20 nt, Artificial Sequence
  Synthetic
accagugccagacgacaaau

SEQ ID NO: 110748 - RNA, 21 nt, Artificial Sequence
  Synthetic
caccagugccagacgacaaau

SEQ ID NO: 110749 - RNA, 23 nt, Artificial Sequence
  Synthetic
agcaccagugccagacgacaaau

SEQ ID NO: 110750 - RNA, 24 nt, Artificial Sequence
  Synthetic
cagcaccagugccagacgacaaau

SEQ ID NO: 110751 - RNA, 21 nt, Artificial Sequence
  Synthetic
accucacugauacauacaaau

SEQ ID NO: 110752 - RNA, 22 nt, Artificial Sequence
  Synthetic
uaccucacugauacauacaaau

SEQ ID NO: 110753 - RNA, 23 nt, Artificial Sequence
  Synthetic
uuaccucacugauacauacaaau

SEQ ID NO: 110754 - RNA, 24 nt, Artificial Sequence
  Synthetic
cuuaccucacugauacauacaaau

SEQ ID NO: 110755 - RNA, 21 nt, Artificial Sequence
  Synthetic
ugcaauauuaaguuuacaaau

SEQ ID NO: 110756 - RNA, 22 nt, Artificial Sequence
  Synthetic
augcaauauuaaguuuacaaau

SEQ ID NO: 110757 - RNA, 23 nt, Artificial Sequence
  Synthetic
uaugcaauauuaaguuuacaaau

SEQ ID NO: 110758 - RNA, 24 nt, Artificial Sequence
  Synthetic
uuaugcaauauuaaguuuacaaau

SEQ ID NO: 110759 - RNA, 18 nt, Artificial Sequence
  Synthetic
ugaucccuagaaccaaau

SEQ ID NO: 110760 - RNA, 19 nt, Artificial Sequence
  Synthetic
uugaucccuagaaccaaau

SEQ ID NO: 110761 - RNA, 20 nt, Artificial Sequence
  Synthetic
cuugaucccuagaaccaaau

SEQ ID NO: 110762 - RNA, 21 nt, Artificial Sequence
  Synthetic
ucuugaucccuagaaccaaau

SEQ ID NO: 110763 - RNA, 22 nt, Artificial Sequence
  Synthetic
uucuugaucccuagaaccaaau

SEQ ID NO: 110764 - RNA, 23 nt, Artificial Sequence
  Synthetic
auucuugaucccuagaaccaaau

SEQ ID NO: 110765 - RNA, 24 nt, Artificial Sequence
  Synthetic
aauucuugaucccuagaaccaaau

SEQ ID NO: 110766 - RNA, 19 nt, Artificial Sequence
  Synthetic
uguagaauaucccccaaau

SEQ ID NO: 110767 - RNA, 20 nt, Artificial Sequence
  Synthetic
uuguagaauaucccccaaau

SEQ ID NO: 110768 - RNA, 18 nt, Artificial Sequence
  Synthetic
cuuauguagucuccaaau

SEQ ID NO: 110769 - RNA, 19 nt, Artificial Sequence
  Synthetic
ucuuauguagucuccaaau

SEQ ID NO: 110770 - RNA, 20 nt, Artificial Sequence
  Synthetic
uucuuauguagucuccaaau

SEQ ID NO: 110771 - RNA, 21 nt, Artificial Sequence
  Synthetic
cuucuuauguagucuccaaau

SEQ ID NO: 110772 - RNA, 23 nt, Artificial Sequence
  Synthetic
ugcuucuuauguagucuccaaau

SEQ ID NO: 110773 - RNA, 24 nt, Artificial Sequence
  Synthetic
cugcuucuuauguagucuccaaau

SEQ ID NO: 110774 - RNA, 18 nt, Artificial Sequence
  Synthetic
ugaauacugaaagcaaau

SEQ ID NO: 110775 - RNA, 20 nt, Artificial Sequence
  Synthetic
ugugaauacugaaagcaaau

SEQ ID NO: 110776 - RNA, 21 nt, Artificial Sequence
  Synthetic
cugugaauacugaaagcaaau

SEQ ID NO: 110777 - RNA, 22 nt, Artificial Sequence
  Synthetic
ucugugaauacugaaagcaaau

SEQ ID NO: 110778 - RNA, 23 nt, Artificial Sequence
  Synthetic
uucugugaauacugaaagcaaau

SEQ ID NO: 110779 - RNA, 24 nt, Artificial Sequence
  Synthetic
cuucugugaauacugaaagcaaau

SEQ ID NO: 110780 - RNA, 18 nt, Artificial Sequence
  Synthetic
auuaaacuuugagcaaau

SEQ ID NO: 110781 - RNA, 20 nt, Artificial Sequence
  Synthetic
ugauuaaacuuugagcaaau

SEQ ID NO: 110782 - RNA, 21 nt, Artificial Sequence
  Synthetic
cugauuaaacuuugagcaaau

SEQ ID NO: 110783 - RNA, 22 nt, Artificial Sequence
  Synthetic
acugauuaaacuuugagcaaau

SEQ ID NO: 110784 - RNA, 23 nt, Artificial Sequence
  Synthetic
aacugauuaaacuuugagcaaau

SEQ ID NO: 110785 - RNA, 24 nt, Artificial Sequence
  Synthetic
aaacugauuaaacuuugagcaaau

SEQ ID NO: 110786 - RNA, 18 nt, Artificial Sequence
  Synthetic
auuuucccaaaggcaaau

SEQ ID NO: 110787 - RNA, 21 nt, Artificial Sequence
  Synthetic
uggauuuucccaaaggcaaau

SEQ ID NO: 110788 - RNA, 22 nt, Artificial Sequence
  Synthetic
cuggauuuucccaaaggcaaau

SEQ ID NO: 110789 - RNA, 23 nt, Artificial Sequence
  Synthetic
ccuggauuuucccaaaggcaaau

SEQ ID NO: 110790 - RNA, 21 nt, Artificial Sequence
  Synthetic
agggagauaaaagaggcaaau

SEQ ID NO: 110791 - RNA, 22 nt, Artificial Sequence
  Synthetic
aagggagauaaaagaggcaaau

SEQ ID NO: 110792 - RNA, 23 nt, Artificial Sequence
  Synthetic
uaagggagauaaaagaggcaaau

SEQ ID NO: 110793 - RNA, 18 nt, Artificial Sequence
  Synthetic
ccaggcugacuggcaaau

SEQ ID NO: 110794 - RNA, 19 nt, Artificial Sequence
  Synthetic
accaggcugacuggcaaau

SEQ ID NO: 110795 - RNA, 20 nt, Artificial Sequence
  Synthetic
caccaggcugacuggcaaau

SEQ ID NO: 110796 - RNA, 21 nt, Artificial Sequence
  Synthetic
acaccaggcugacuggcaaau

SEQ ID NO: 110797 - RNA, 22 nt, Artificial Sequence
  Synthetic
aacaccaggcugacuggcaaau

SEQ ID NO: 110798 - RNA, 24 nt, Artificial Sequence
  Synthetic
agaacaccaggcugacuggcaaau

SEQ ID NO: 110799 - RNA, 19 nt, Artificial Sequence
  Synthetic
cgcaccagaaaaaucaaau

SEQ ID NO: 110800 - RNA, 20 nt, Artificial Sequence
  Synthetic
ucgcaccagaaaaaucaaau

SEQ ID NO: 110801 - RNA, 21 nt, Artificial Sequence
  Synthetic
cucgcaccagaaaaaucaaau

SEQ ID NO: 110802 - RNA, 22 nt, Artificial Sequence
  Synthetic
ucucgcaccagaaaaaucaaau

SEQ ID NO: 110803 - RNA, 18 nt, Artificial Sequence
  Synthetic
uucucacacaaaucaaau

SEQ ID NO: 110804 - RNA, 19 nt, Artificial Sequence
  Synthetic
uuucucacacaaaucaaau

SEQ ID NO: 110805 - RNA, 21 nt, Artificial Sequence
  Synthetic
aguuucucacacaaaucaaau

SEQ ID NO: 110806 - RNA, 22 nt, Artificial Sequence
  Synthetic
uaguuucucacacaaaucaaau

SEQ ID NO: 110807 - RNA, 24 nt, Artificial Sequence
  Synthetic
aguaguuucucacacaaaucaaau

SEQ ID NO: 110808 - RNA, 18 nt, Artificial Sequence
  Synthetic
auugcucaaugaucaaau

SEQ ID NO: 110809 - RNA, 20 nt, Artificial Sequence
  Synthetic
agauugcucaaugaucaaau

SEQ ID NO: 110810 - RNA, 21 nt, Artificial Sequence
  Synthetic
uagauugcucaaugaucaaau

SEQ ID NO: 110811 - RNA, 22 nt, Artificial Sequence
  Synthetic
uuagauugcucaaugaucaaau

SEQ ID NO: 110812 - RNA, 23 nt, Artificial Sequence
  Synthetic
uuuagauugcucaaugaucaaau

SEQ ID NO: 110813 - RNA, 24 nt, Artificial Sequence
  Synthetic
uuuuagauugcucaaugaucaaau

SEQ ID NO: 110814 - RNA, 21 nt, Artificial Sequence
  Synthetic
aauuuuucucaacucucaaau

SEQ ID NO: 110815 - RNA, 22 nt, Artificial Sequence
  Synthetic
uaauuuuucucaacucucaaau

SEQ ID NO: 110816 - RNA, 18 nt, Artificial Sequence
  Synthetic
uaagacuagcauucaaau

SEQ ID NO: 110817 - RNA, 19 nt, Artificial Sequence
  Synthetic
auaagacuagcauucaaau

SEQ ID NO: 110818 - RNA, 20 nt, Artificial Sequence
  Synthetic
uauaagacuagcauucaaau

SEQ ID NO: 110819 - RNA, 21 nt, Artificial Sequence
  Synthetic
auauaagacuagcauucaaau

SEQ ID NO: 110820 - RNA, 22 nt, Artificial Sequence
  Synthetic
uauauaagacuagcauucaaau

SEQ ID NO: 110821 - RNA, 24 nt, Artificial Sequence
  Synthetic
uguauauaagacuagcauucaaau

SEQ ID NO: 110822 - RNA, 18 nt, Artificial Sequence
  Synthetic
uaugaagaagauucaaau

SEQ ID NO: 110823 - RNA, 19 nt, Artificial Sequence
  Synthetic
cuaugaagaagauucaaau

SEQ ID NO: 110824 - RNA, 20 nt, Artificial Sequence
  Synthetic
acuaugaagaagauucaaau

SEQ ID NO: 110825 - RNA, 21 nt, Artificial Sequence
  Synthetic
aacuaugaagaagauucaaau

SEQ ID NO: 110826 - RNA, 22 nt, Artificial Sequence
  Synthetic
uaacuaugaagaagauucaaau

SEQ ID NO: 110827 - RNA, 23 nt, Artificial Sequence
  Synthetic
cuaacuaugaagaagauucaaau

SEQ ID NO: 110828 - RNA, 24 nt, Artificial Sequence
  Synthetic
acuaacuaugaagaagauucaaau

SEQ ID NO: 110829 - RNA, 18 nt, Artificial Sequence
  Synthetic
uugauaucagguucaaau

SEQ ID NO: 110830 - RNA, 19 nt, Artificial Sequence
  Synthetic
auugauaucagguucaaau

SEQ ID NO: 110831 - RNA, 20 nt, Artificial Sequence
  Synthetic
aauugauaucagguucaaau

SEQ ID NO: 110832 - RNA, 21 nt, Artificial Sequence
  Synthetic
caauugauaucagguucaaau

SEQ ID NO: 110833 - RNA, 22 nt, Artificial Sequence
  Synthetic
ucaauugauaucagguucaaau

SEQ ID NO: 110834 - RNA, 23 nt, Artificial Sequence
  Synthetic
cucaauugauaucagguucaaau

SEQ ID NO: 110835 - RNA, 18 nt, Artificial Sequence
  Synthetic
caaaggugugguucaaau

SEQ ID NO: 110836 - RNA, 19 nt, Artificial Sequence
  Synthetic
acaaaggugugguucaaau

SEQ ID NO: 110837 - RNA, 20 nt, Artificial Sequence
  Synthetic
aacaaaggugugguucaaau

SEQ ID NO: 110838 - RNA, 21 nt, Artificial Sequence
  Synthetic
caacaaaggugugguucaaau

SEQ ID NO: 110839 - RNA, 23 nt, Artificial Sequence
  Synthetic
agcaacaaaggugugguucaaau

SEQ ID NO: 110840 - RNA, 24 nt, Artificial Sequence
  Synthetic
aagcaacaaaggugugguucaaau

SEQ ID NO: 110841 - RNA, 18 nt, Artificial Sequence
  Synthetic
uaugacugauuuucaaau

SEQ ID NO: 110842 - RNA, 19 nt, Artificial Sequence
  Synthetic
auaugacugauuuucaaau

SEQ ID NO: 110843 - RNA, 20 nt, Artificial Sequence
  Synthetic
aauaugacugauuuucaaau

SEQ ID NO: 110844 - RNA, 21 nt, Artificial Sequence
  Synthetic
uaauaugacugauuuucaaau

SEQ ID NO: 110845 - RNA, 22 nt, Artificial Sequence
  Synthetic
uuaauaugacugauuuucaaau

SEQ ID NO: 110846 - RNA, 23 nt, Artificial Sequence
  Synthetic
uuuaauaugacugauuuucaaau

SEQ ID NO: 110847 - RNA, 24 nt, Artificial Sequence
  Synthetic
auuuaauaugacugauuuucaaau

SEQ ID NO: 110848 - RNA, 18 nt, Artificial Sequence
  Synthetic
auuuuaccuuaaagaaau

SEQ ID NO: 110849 - RNA, 19 nt, Artificial Sequence
  Synthetic
uauuuuaccuuaaagaaau

SEQ ID NO: 110850 - RNA, 20 nt, Artificial Sequence
  Synthetic
auauuuuaccuuaaagaaau

SEQ ID NO: 110851 - RNA, 21 nt, Artificial Sequence
  Synthetic
cauauuuuaccuuaaagaaau

SEQ ID NO: 110852 - RNA, 18 nt, Artificial Sequence
  Synthetic
uguuaggaagcaagaaau

SEQ ID NO: 110853 - RNA, 19 nt, Artificial Sequence
  Synthetic
auguuaggaagcaagaaau

SEQ ID NO: 110854 - RNA, 20 nt, Artificial Sequence
  Synthetic
aauguuaggaagcaagaaau

SEQ ID NO: 110855 - RNA, 21 nt, Artificial Sequence
  Synthetic
uaauguuaggaagcaagaaau

SEQ ID NO: 110856 - RNA, 22 nt, Artificial Sequence
  Synthetic
uuaauguuaggaagcaagaaau

SEQ ID NO: 110857 - RNA, 23 nt, Artificial Sequence
  Synthetic
uuuaauguuaggaagcaagaaau

SEQ ID NO: 110858 - RNA, 24 nt, Artificial Sequence
  Synthetic
auuuaauguuaggaagcaagaaau

SEQ ID NO: 110859 - RNA, 18 nt, Artificial Sequence
  Synthetic
aauaggccuucaagaaau

SEQ ID NO: 110860 - RNA, 19 nt, Artificial Sequence
  Synthetic
uaauaggccuucaagaaau

SEQ ID NO: 110861 - RNA, 20 nt, Artificial Sequence
  Synthetic
auaauaggccuucaagaaau

SEQ ID NO: 110862 - RNA, 21 nt, Artificial Sequence
  Synthetic
uauaauaggccuucaagaaau

SEQ ID NO: 110863 - RNA, 23 nt, Artificial Sequence
  Synthetic
uguauaauaggccuucaagaaau

SEQ ID NO: 110864 - RNA, 18 nt, Artificial Sequence
  Synthetic
uuggcaguaagaagaaau

SEQ ID NO: 110865 - RNA, 19 nt, Artificial Sequence
  Synthetic
cuuggcaguaagaagaaau

SEQ ID NO: 110866 - RNA, 20 nt, Artificial Sequence
  Synthetic
ucuuggcaguaagaagaaau

SEQ ID NO: 110867 - RNA, 21 nt, Artificial Sequence
  Synthetic
uucuuggcaguaagaagaaau

SEQ ID NO: 110868 - RNA, 22 nt, Artificial Sequence
  Synthetic
uuucuuggcaguaagaagaaau

SEQ ID NO: 110869 - RNA, 23 nt, Artificial Sequence
  Synthetic
uuuucuuggcaguaagaagaaau

SEQ ID NO: 110870 - RNA, 24 nt, Artificial Sequence
  Synthetic
uuuuucuuggcaguaagaagaaau

SEQ ID NO: 110871 - RNA, 21 nt, Artificial Sequence
  Synthetic
uguauauauaaauacagaaau

SEQ ID NO: 110872 - RNA, 22 nt, Artificial Sequence
  Synthetic
cuguauauauaaauacagaaau

SEQ ID NO: 110873 - RNA, 23 nt, Artificial Sequence
  Synthetic
ucuguauauauaaauacagaaau

SEQ ID NO: 110874 - RNA, 24 nt, Artificial Sequence
  Synthetic
uucuguauauauaaauacagaaau

SEQ ID NO: 110875 - RNA, 18 nt, Artificial Sequence
  Synthetic
uaggggaaagccagaaau

SEQ ID NO: 110876 - RNA, 19 nt, Artificial Sequence
  Synthetic
auaggggaaagccagaaau

SEQ ID NO: 110877 - RNA, 20 nt, Artificial Sequence
  Synthetic
uauaggggaaagccagaaau

SEQ ID NO: 110878 - RNA, 21 nt, Artificial Sequence
  Synthetic
auauaggggaaagccagaaau

SEQ ID NO: 110879 - RNA, 22 nt, Artificial Sequence
  Synthetic
uauauaggggaaagccagaaau

SEQ ID NO: 110880 - RNA, 23 nt, Artificial Sequence
  Synthetic
auauauaggggaaagccagaaau

SEQ ID NO: 110881 - RNA, 21 nt, Artificial Sequence
  Synthetic
cagaaaacuugaaagagaaau

SEQ ID NO: 110882 - RNA, 22 nt, Artificial Sequence
  Synthetic
ucagaaaacuugaaagagaaau

SEQ ID NO: 110883 - RNA, 23 nt, Artificial Sequence
  Synthetic
aucagaaaacuugaaagagaaau

SEQ ID NO: 110884 - RNA, 24 nt, Artificial Sequence
  Synthetic
caucagaaaacuugaaagagaaau

SEQ ID NO: 110885 - RNA, 18 nt, Artificial Sequence
  Synthetic
uaaguuaaacauagaaau

SEQ ID NO: 110886 - RNA, 19 nt, Artificial Sequence
  Synthetic
uuaaguuaaacauagaaau

SEQ ID NO: 110887 - RNA, 20 nt, Artificial Sequence
  Synthetic
uuuaaguuaaacauagaaau

SEQ ID NO: 110888 - RNA, 21 nt, Artificial Sequence
  Synthetic
cuuuaaguuaaacauagaaau

SEQ ID NO: 110889 - RNA, 22 nt, Artificial Sequence
  Synthetic
ucuuuaaguuaaacauagaaau

SEQ ID NO: 110890 - RNA, 23 nt, Artificial Sequence
  Synthetic
aucuuuaaguuaaacauagaaau

SEQ ID NO: 110891 - RNA, 24 nt, Artificial Sequence
  Synthetic
uaucuuuaaguuaaacauagaaau

SEQ ID NO: 110892 - RNA, 21 nt, Artificial Sequence
  Synthetic
auggaaaacaaauauagaaau

SEQ ID NO: 110893 - RNA, 22 nt, Artificial Sequence
  Synthetic
aauggaaaacaaauauagaaau

SEQ ID NO: 110894 - RNA, 24 nt, Artificial Sequence
  Synthetic
agaauggaaaacaaauauagaaau

SEQ ID NO: 110895 - RNA, 18 nt, Artificial Sequence
  Synthetic
aagucccuaacuagaaau

SEQ ID NO: 110896 - RNA, 20 nt, Artificial Sequence
  Synthetic
ugaagucccuaacuagaaau

SEQ ID NO: 110897 - RNA, 21 nt, Artificial Sequence
  Synthetic
uugaagucccuaacuagaaau

SEQ ID NO: 110898 - RNA, 23 nt, Artificial Sequence
  Synthetic
uguugaagucccuaacuagaaau

SEQ ID NO: 110899 - RNA, 18 nt, Artificial Sequence
  Synthetic
auucucuucauuagaaau

SEQ ID NO: 110900 - RNA, 19 nt, Artificial Sequence
  Synthetic
uauucucuucauuagaaau

SEQ ID NO: 110901 - RNA, 21 nt, Artificial Sequence
  Synthetic
aguauucucuucauuagaaau

SEQ ID NO: 110902 - RNA, 22 nt, Artificial Sequence
  Synthetic
aaguauucucuucauuagaaau

SEQ ID NO: 110903 - RNA, 20 nt, Artificial Sequence
  Synthetic
aggauuaguugauuagaaau

SEQ ID NO: 110904 - RNA, 21 nt, Artificial Sequence
  Synthetic
caggauuaguugauuagaaau

SEQ ID NO: 110905 - RNA, 22 nt, Artificial Sequence
  Synthetic
ucaggauuaguugauuagaaau

SEQ ID NO: 110906 - RNA, 23 nt, Artificial Sequence
  Synthetic
aucaggauuaguugauuagaaau

SEQ ID NO: 110907 - RNA, 24 nt, Artificial Sequence
  Synthetic
aaucaggauuaguugauuagaaau

SEQ ID NO: 110908 - RNA, 18 nt, Artificial Sequence
  Synthetic
ccaauuacauuuagaaau

SEQ ID NO: 110909 - RNA, 20 nt, Artificial Sequence
  Synthetic
ugccaauuacauuuagaaau

SEQ ID NO: 110910 - RNA, 21 nt, Artificial Sequence
  Synthetic
augccaauuacauuuagaaau

SEQ ID NO: 110911 - RNA, 22 nt, Artificial Sequence
  Synthetic
uaugccaauuacauuuagaaau

SEQ ID NO: 110912 - RNA, 23 nt, Artificial Sequence
  Synthetic
uuaugccaauuacauuuagaaau

SEQ ID NO: 110913 - RNA, 24 nt, Artificial Sequence
  Synthetic
uuuaugccaauuacauuuagaaau

SEQ ID NO: 110914 - RNA, 18 nt, Artificial Sequence
  Synthetic
uugaacuauuaaggaaau

SEQ ID NO: 110915 - RNA, 19 nt, Artificial Sequence
  Synthetic
uuugaacuauuaaggaaau

SEQ ID NO: 110916 - RNA, 20 nt, Artificial Sequence
  Synthetic
uuuugaacuauuaaggaaau

SEQ ID NO: 110917 - RNA, 21 nt, Artificial Sequence
  Synthetic
uuuuugaacuauuaaggaaau

SEQ ID NO: 110918 - RNA, 22 nt, Artificial Sequence
  Synthetic
auuuuugaacuauuaaggaaau

SEQ ID NO: 110919 - RNA, 23 nt, Artificial Sequence
  Synthetic
cauuuuugaacuauuaaggaaau

SEQ ID NO: 110920 - RNA, 24 nt, Artificial Sequence
  Synthetic
acauuuuugaacuauuaaggaaau

SEQ ID NO: 110921 - RNA, 21 nt, Artificial Sequence
  Synthetic
auguaugagaaaaauggaaau

SEQ ID NO: 110922 - RNA, 22 nt, Artificial Sequence
  Synthetic
uauguaugagaaaaauggaaau

SEQ ID NO: 110923 - RNA, 23 nt, Artificial Sequence
  Synthetic
auauguaugagaaaaauggaaau

SEQ ID NO: 110924 - RNA, 24 nt, Artificial Sequence
  Synthetic
aauauguaugagaaaaauggaaau

SEQ ID NO: 110925 - RNA, 18 nt, Artificial Sequence
  Synthetic
aucaccuauaguggaaau

SEQ ID NO: 110926 - RNA, 19 nt, Artificial Sequence
  Synthetic
aaucaccuauaguggaaau

SEQ ID NO: 110927 - RNA, 20 nt, Artificial Sequence
  Synthetic
aaaucaccuauaguggaaau

SEQ ID NO: 110928 - RNA, 21 nt, Artificial Sequence
  Synthetic
caaaucaccuauaguggaaau

SEQ ID NO: 110929 - RNA, 22 nt, Artificial Sequence
  Synthetic
acaaaucaccuauaguggaaau

SEQ ID NO: 110930 - RNA, 23 nt, Artificial Sequence
  Synthetic
uacaaaucaccuauaguggaaau

SEQ ID NO: 110931 - RNA, 24 nt, Artificial Sequence
  Synthetic
auacaaaucaccuauaguggaaau

SEQ ID NO: 110932 - RNA, 19 nt, Artificial Sequence
  Synthetic
uggcaagcacuuuggaaau

SEQ ID NO: 110933 - RNA, 20 nt, Artificial Sequence
  Synthetic
cuggcaagcacuuuggaaau

SEQ ID NO: 110934 - RNA, 24 nt, Artificial Sequence
  Synthetic
ugggcuggcaagcacuuuggaaau

SEQ ID NO: 110935 - RNA, 18 nt, Artificial Sequence
  Synthetic
auuccuacaaaaugaaau

SEQ ID NO: 110936 - RNA, 19 nt, Artificial Sequence
  Synthetic
aauuccuacaaaaugaaau

SEQ ID NO: 110937 - RNA, 20 nt, Artificial Sequence
  Synthetic
aaauuccuacaaaaugaaau

SEQ ID NO: 110938 - RNA, 21 nt, Artificial Sequence
  Synthetic
uaaauuccuacaaaaugaaau

SEQ ID NO: 110939 - RNA, 22 nt, Artificial Sequence
  Synthetic
auaaauuccuacaaaaugaaau

SEQ ID NO: 110940 - RNA, 23 nt, Artificial Sequence
  Synthetic
aauaaauuccuacaaaaugaaau

SEQ ID NO: 110941 - RNA, 24 nt, Artificial Sequence
  Synthetic
aaauaaauuccuacaaaaugaaau

SEQ ID NO: 110942 - RNA, 18 nt, Artificial Sequence
  Synthetic
acauacuugaaaugaaau

SEQ ID NO: 110943 - RNA, 19 nt, Artificial Sequence
  Synthetic
aacauacuugaaaugaaau

SEQ ID NO: 110944 - RNA, 20 nt, Artificial Sequence
  Synthetic
uaacauacuugaaaugaaau

SEQ ID NO: 110945 - RNA, 21 nt, Artificial Sequence
  Synthetic
auaacauacuugaaaugaaau

SEQ ID NO: 110946 - RNA, 22 nt, Artificial Sequence
  Synthetic
cauaacauacuugaaaugaaau

SEQ ID NO: 110947 - RNA, 23 nt, Artificial Sequence
  Synthetic
acauaacauacuugaaaugaaau

SEQ ID NO: 110948 - RNA, 24 nt, Artificial Sequence
  Synthetic
uacauaacauacuugaaaugaaau

SEQ ID NO: 110949 - RNA, 21 nt, Artificial Sequence
  Synthetic
aaucuaauuuuucaaugaaau

SEQ ID NO: 110950 - RNA, 23 nt, Artificial Sequence
  Synthetic
agaaucuaauuuuucaaugaaau

SEQ ID NO: 110951 - RNA, 24 nt, Artificial Sequence
  Synthetic
aagaaucuaauuuuucaaugaaau

SEQ ID NO: 110952 - RNA, 20 nt, Artificial Sequence
  Synthetic
aggcaauuugcucaugaaau

SEQ ID NO: 110953 - RNA, 21 nt, Artificial Sequence
  Synthetic
uaggcaauuugcucaugaaau

SEQ ID NO: 110954 - RNA, 23 nt, Artificial Sequence
  Synthetic
aguaggcaauuugcucaugaaau

SEQ ID NO: 110955 - RNA, 24 nt, Artificial Sequence
  Synthetic
uaguaggcaauuugcucaugaaau

SEQ ID NO: 110956 - RNA, 18 nt, Artificial Sequence
  Synthetic
uuagccugcugaugaaau

SEQ ID NO: 110957 - RNA, 19 nt, Artificial Sequence
  Synthetic
auuagccugcugaugaaau

SEQ ID NO: 110958 - RNA, 20 nt, Artificial Sequence
  Synthetic
cauuagccugcugaugaaau

SEQ ID NO: 110959 - RNA, 21 nt, Artificial Sequence
  Synthetic
ucauuagccugcugaugaaau

SEQ ID NO: 110960 - RNA, 23 nt, Artificial Sequence
  Synthetic
ugucauuagccugcugaugaaau

SEQ ID NO: 110961 - RNA, 18 nt, Artificial Sequence
  Synthetic
uaguaagauaccugaaau

SEQ ID NO: 110962 - RNA, 19 nt, Artificial Sequence
  Synthetic
auaguaagauaccugaaau

SEQ ID NO: 110963 - RNA, 21 nt, Artificial Sequence
  Synthetic
agauaguaagauaccugaaau

SEQ ID NO: 110964 - RNA, 22 nt, Artificial Sequence
  Synthetic
aagauaguaagauaccugaaau

SEQ ID NO: 110965 - RNA, 23 nt, Artificial Sequence
  Synthetic
uaagauaguaagauaccugaaau

SEQ ID NO: 110966 - RNA, 24 nt, Artificial Sequence
  Synthetic
auaagauaguaagauaccugaaau

SEQ ID NO: 110967 - RNA, 18 nt, Artificial Sequence
  Synthetic
cugucagagagcugaaau

SEQ ID NO: 110968 - RNA, 19 nt, Artificial Sequence
  Synthetic
acugucagagagcugaaau

SEQ ID NO: 110969 - RNA, 20 nt, Artificial Sequence
  Synthetic
cacugucagagagcugaaau

SEQ ID NO: 110970 - RNA, 21 nt, Artificial Sequence
  Synthetic
ccacugucagagagcugaaau

SEQ ID NO: 110971 - RNA, 22 nt, Artificial Sequence
  Synthetic
uccacugucagagagcugaaau

SEQ ID NO: 110972 - RNA, 23 nt, Artificial Sequence
  Synthetic
uuccacugucagagagcugaaau

SEQ ID NO: 110973 - RNA, 24 nt, Artificial Sequence
  Synthetic
cuuccacugucagagagcugaaau

SEQ ID NO: 110974 - RNA, 18 nt, Artificial Sequence
  Synthetic
uaugauacuugcugaaau

SEQ ID NO: 110975 - RNA, 19 nt, Artificial Sequence
  Synthetic
uuaugauacuugcugaaau

SEQ ID NO: 110976 - RNA, 20 nt, Artificial Sequence
  Synthetic
auuaugauacuugcugaaau

SEQ ID NO: 110977 - RNA, 21 nt, Artificial Sequence
  Synthetic
uauuaugauacuugcugaaau

SEQ ID NO: 110978 - RNA, 22 nt, Artificial Sequence
  Synthetic
auauuaugauacuugcugaaau

SEQ ID NO: 110979 - RNA, 23 nt, Artificial Sequence
  Synthetic
aauauuaugauacuugcugaaau

SEQ ID NO: 110980 - RNA, 24 nt, Artificial Sequence
  Synthetic
aaauauuaugauacuugcugaaau

SEQ ID NO: 110981 - RNA, 18 nt, Artificial Sequence
  Synthetic
uuuauggguccgugaaau

SEQ ID NO: 110982 - RNA, 19 nt, Artificial Sequence
  Synthetic
uuuuauggguccgugaaau

SEQ ID NO: 110983 - RNA, 20 nt, Artificial Sequence
  Synthetic
auuuuauggguccgugaaau

SEQ ID NO: 110984 - RNA, 21 nt, Artificial Sequence
  Synthetic
cauuuuauggguccgugaaau

SEQ ID NO: 110985 - RNA, 22 nt, Artificial Sequence
  Synthetic
ucauuuuauggguccgugaaau

SEQ ID NO: 110986 - RNA, 23 nt, Artificial Sequence
  Synthetic
aucauuuuauggguccgugaaau

SEQ ID NO: 110987 - RNA, 24 nt, Artificial Sequence
  Synthetic
aaucauuuuauggguccgugaaau

SEQ ID NO: 110988 - RNA, 21 nt, Artificial Sequence
  Synthetic
auuuuucuuauuuggugaaau

SEQ ID NO: 110989 - RNA, 22 nt, Artificial Sequence
  Synthetic
cauuuuucuuauuuggugaaau

SEQ ID NO: 110990 - RNA, 23 nt, Artificial Sequence
  Synthetic
ucauuuuucuuauuuggugaaau

SEQ ID NO: 110991 - RNA, 24 nt, Artificial Sequence
  Synthetic
uucauuuuucuuauuuggugaaau

SEQ ID NO: 110992 - RNA, 18 nt, Artificial Sequence
  Synthetic
acaugguagaugugaaau

SEQ ID NO: 110993 - RNA, 19 nt, Artificial Sequence
  Synthetic
cacaugguagaugugaaau

SEQ ID NO: 110994 - RNA, 20 nt, Artificial Sequence
  Synthetic
ucacaugguagaugugaaau

SEQ ID NO: 110995 - RNA, 21 nt, Artificial Sequence
  Synthetic
uucacaugguagaugugaaau

SEQ ID NO: 110996 - RNA, 22 nt, Artificial Sequence
  Synthetic
cuucacaugguagaugugaaau

SEQ ID NO: 110997 - RNA, 23 nt, Artificial Sequence
  Synthetic
ucuucacaugguagaugugaaau

SEQ ID NO: 110998 - RNA, 21 nt, Artificial Sequence
  Synthetic
cucuuuccuucucugugaaau

SEQ ID NO: 110999 - RNA, 22 nt, Artificial Sequence
  Synthetic
ucucuuuccuucucugugaaau

SEQ ID NO: 111000 - RNA, 23 nt, Artificial Sequence
  Synthetic
aucucuuuccuucucugugaaau

SEQ ID NO: 111001 - RNA, 24 nt, Artificial Sequence
  Synthetic
uaucucuuuccuucucugugaaau

SEQ ID NO: 111002 - RNA, 21 nt, Artificial Sequence
  Synthetic
acugcacauuuaaaaauaaau

SEQ ID NO: 111003 - RNA, 22 nt, Artificial Sequence
  Synthetic
aacugcacauuuaaaaauaaau

SEQ ID NO: 111004 - RNA, 23 nt, Artificial Sequence
  Synthetic
uaacugcacauuuaaaaauaaau

SEQ ID NO: 111005 - RNA, 18 nt, Artificial Sequence
  Synthetic
ccuuggggccaaauaaau

SEQ ID NO: 111006 - RNA, 19 nt, Artificial Sequence
  Synthetic
accuuggggccaaauaaau

SEQ ID NO: 111007 - RNA, 20 nt, Artificial Sequence
  Synthetic
caccuuggggccaaauaaau

SEQ ID NO: 111008 - RNA, 21 nt, Artificial Sequence
  Synthetic
acaccuuggggccaaauaaau

SEQ ID NO: 111009 - RNA, 22 nt, Artificial Sequence
  Synthetic
cacaccuuggggccaaauaaau

SEQ ID NO: 111010 - RNA, 23 nt, Artificial Sequence
  Synthetic
acacaccuuggggccaaauaaau

SEQ ID NO: 111011 - RNA, 24 nt, Artificial Sequence
  Synthetic
cacacaccuuggggccaaauaaau

SEQ ID NO: 111012 - RNA, 18 nt, Artificial Sequence
  Synthetic
ucaccagcauaaauaaau

SEQ ID NO: 111013 - RNA, 21 nt, Artificial Sequence
  Synthetic
uggucaccagcauaaauaaau

SEQ ID NO: 111014 - RNA, 22 nt, Artificial Sequence
  Synthetic
uuggucaccagcauaaauaaau

SEQ ID NO: 111015 - RNA, 23 nt, Artificial Sequence
  Synthetic
uuuggucaccagcauaaauaaau

SEQ ID NO: 111016 - RNA, 24 nt, Artificial Sequence
  Synthetic
cuuuggucaccagcauaaauaaau

SEQ ID NO: 111017 - RNA, 19 nt, Artificial Sequence
  Synthetic
cguuagcacuugaauaaau

SEQ ID NO: 111018 - RNA, 21 nt, Artificial Sequence
  Synthetic
cgcguuagcacuugaauaaau

SEQ ID NO: 111019 - RNA, 22 nt, Artificial Sequence
  Synthetic
acgcguuagcacuugaauaaau

SEQ ID NO: 111020 - RNA, 23 nt, Artificial Sequence
  Synthetic
cacgcguuagcacuugaauaaau

SEQ ID NO: 111021 - RNA, 24 nt, Artificial Sequence
  Synthetic
acacgcguuagcacuugaauaaau

SEQ ID NO: 111022 - RNA, 22 nt, Artificial Sequence
  Synthetic
aguaauuuuuccaauaauaaau

SEQ ID NO: 111023 - RNA, 23 nt, Artificial Sequence
  Synthetic
aaguaauuuuuccaauaauaaau

SEQ ID NO: 111024 - RNA, 21 nt, Artificial Sequence
  Synthetic
cuuuccauuauaaagauaaau

SEQ ID NO: 111025 - RNA, 22 nt, Artificial Sequence
  Synthetic
ucuuuccauuauaaagauaaau

SEQ ID NO: 111026 - RNA, 23 nt, Artificial Sequence
  Synthetic
uucuuuccauuauaaagauaaau

SEQ ID NO: 111027 - RNA, 24 nt, Artificial Sequence
  Synthetic
uuucuuuccauuauaaagauaaau

SEQ ID NO: 111028 - RNA, 18 nt, Artificial Sequence
  Synthetic
ugaaugcugaagauaaau

SEQ ID NO: 111029 - RNA, 20 nt, Artificial Sequence
  Synthetic
ugugaaugcugaagauaaau

SEQ ID NO: 111030 - RNA, 21 nt, Artificial Sequence
  Synthetic
augugaaugcugaagauaaau

SEQ ID NO: 111031 - RNA, 23 nt, Artificial Sequence
  Synthetic
agaugugaaugcugaagauaaau

SEQ ID NO: 111032 - RNA, 24 nt, Artificial Sequence
  Synthetic
uagaugugaaugcugaagauaaau

SEQ ID NO: 111033 - RNA, 21 nt, Artificial Sequence
  Synthetic
aagaaagaaaauuauauaaau

SEQ ID NO: 111034 - RNA, 22 nt, Artificial Sequence
  Synthetic
aaagaaagaaaauuauauaaau

SEQ ID NO: 111035 - RNA, 23 nt, Artificial Sequence
  Synthetic
uaaagaaagaaaauuauauaaau

SEQ ID NO: 111036 - RNA, 19 nt, Artificial Sequence
  Synthetic
agugcuuugaacuauaaau

SEQ ID NO: 111037 - RNA, 20 nt, Artificial Sequence
  Synthetic
aagugcuuugaacuauaaau

SEQ ID NO: 111038 - RNA, 21 nt, Artificial Sequence
  Synthetic
uaagugcuuugaacuauaaau

SEQ ID NO: 111039 - RNA, 22 nt, Artificial Sequence
  Synthetic
uuaagugcuuugaacuauaaau

SEQ ID NO: 111040 - RNA, 23 nt, Artificial Sequence
  Synthetic
cuuaagugcuuugaacuauaaau

SEQ ID NO: 111041 - RNA, 24 nt, Artificial Sequence
  Synthetic
ucuuaagugcuuugaacuauaaau

SEQ ID NO: 111042 - RNA, 18 nt, Artificial Sequence
  Synthetic
agaacgcuaguuauaaau

SEQ ID NO: 111043 - RNA, 20 nt, Artificial Sequence
  Synthetic
agagaacgcuaguuauaaau

SEQ ID NO: 111044 - RNA, 22 nt, Artificial Sequence
  Synthetic
agagagaacgcuaguuauaaau

SEQ ID NO: 111045 - RNA, 23 nt, Artificial Sequence
  Synthetic
aagagagaacgcuaguuauaaau

SEQ ID NO: 111046 - RNA, 18 nt, Artificial Sequence
  Synthetic
auaauugacuuuauaaau

SEQ ID NO: 111047 - RNA, 19 nt, Artificial Sequence
  Synthetic
aauaauugacuuuauaaau

SEQ ID NO: 111048 - RNA, 20 nt, Artificial Sequence
  Synthetic
caauaauugacuuuauaaau

SEQ ID NO: 111049 - RNA, 21 nt, Artificial Sequence
  Synthetic
ccaauaauugacuuuauaaau

SEQ ID NO: 111050 - RNA, 22 nt, Artificial Sequence
  Synthetic
accaauaauugacuuuauaaau

SEQ ID NO: 111051 - RNA, 23 nt, Artificial Sequence
  Synthetic
aaccaauaauugacuuuauaaau

SEQ ID NO: 111052 - RNA, 24 nt, Artificial Sequence
  Synthetic
aaaccaauaauugacuuuauaaau

SEQ ID NO: 111053 - RNA, 18 nt, Artificial Sequence
  Synthetic
uaaaguaugcuacuaaau

SEQ ID NO: 111054 - RNA, 20 nt, Artificial Sequence
  Synthetic
uguaaaguaugcuacuaaau

SEQ ID NO: 111055 - RNA, 22 nt, Artificial Sequence
  Synthetic
cguguaaaguaugcuacuaaau

SEQ ID NO: 111056 - RNA, 23 nt, Artificial Sequence
  Synthetic
acguguaaaguaugcuacuaaau

SEQ ID NO: 111057 - RNA, 24 nt, Artificial Sequence
  Synthetic
cacguguaaaguaugcuacuaaau

SEQ ID NO: 111058 - RNA, 18 nt, Artificial Sequence
  Synthetic
aacauccaauuacuaaau

SEQ ID NO: 111059 - RNA, 19 nt, Artificial Sequence
  Synthetic
caacauccaauuacuaaau

SEQ ID NO: 111060 - RNA, 20 nt, Artificial Sequence
  Synthetic
ucaacauccaauuacuaaau

SEQ ID NO: 111061 - RNA, 21 nt, Artificial Sequence
  Synthetic
uucaacauccaauuacuaaau

SEQ ID NO: 111062 - RNA, 22 nt, Artificial Sequence
  Synthetic
cuucaacauccaauuacuaaau

SEQ ID NO: 111063 - RNA, 23 nt, Artificial Sequence
  Synthetic
ucuucaacauccaauuacuaaau

SEQ ID NO: 111064 - RNA, 24 nt, Artificial Sequence
  Synthetic
aucuucaacauccaauuacuaaau

SEQ ID NO: 111065 - RNA, 20 nt, Artificial Sequence
  Synthetic
uggugguggcauaccuaaau

SEQ ID NO: 111066 - RNA, 21 nt, Artificial Sequence
  Synthetic
cuggugguggcauaccuaaau

SEQ ID NO: 111067 - RNA, 23 nt, Artificial Sequence
  Synthetic
cgcuggugguggcauaccuaaau

SEQ ID NO: 111068 - RNA, 24 nt, Artificial Sequence
  Synthetic
ccgcuggugguggcauaccuaaau

SEQ ID NO: 111069 - RNA, 18 nt, Artificial Sequence
  Synthetic
acucaacuuuggcuaaau

SEQ ID NO: 111070 - RNA, 20 nt, Artificial Sequence
  Synthetic
agacucaacuuuggcuaaau

SEQ ID NO: 111071 - RNA, 22 nt, Artificial Sequence
  Synthetic
ugagacucaacuuuggcuaaau

SEQ ID NO: 111072 - RNA, 23 nt, Artificial Sequence
  Synthetic
uugagacucaacuuuggcuaaau

SEQ ID NO: 111073 - RNA, 19 nt, Artificial Sequence
  Synthetic
ugccacagaccugcuaaau

SEQ ID NO: 111074 - RNA, 20 nt, Artificial Sequence
  Synthetic
uugccacagaccugcuaaau

SEQ ID NO: 111075 - RNA, 18 nt, Artificial Sequence
  Synthetic
acugaaaccauaguaaau

SEQ ID NO: 111076 - RNA, 20 nt, Artificial Sequence
  Synthetic
ugacugaaaccauaguaaau

SEQ ID NO: 111077 - RNA, 21 nt, Artificial Sequence
  Synthetic
augacugaaaccauaguaaau

SEQ ID NO: 111078 - RNA, 22 nt, Artificial Sequence
  Synthetic
aaugacugaaaccauaguaaau

SEQ ID NO: 111079 - RNA, 23 nt, Artificial Sequence
  Synthetic
aaaugacugaaaccauaguaaau

SEQ ID NO: 111080 - RNA, 24 nt, Artificial Sequence
  Synthetic
aaaaugacugaaaccauaguaaau

SEQ ID NO: 111081 - RNA, 18 nt, Artificial Sequence
  Synthetic
auaauaaaaaugguaaau

SEQ ID NO: 111082 - RNA, 19 nt, Artificial Sequence
  Synthetic
cauaauaaaaaugguaaau

SEQ ID NO: 111083 - RNA, 20 nt, Artificial Sequence
  Synthetic
acauaauaaaaaugguaaau

SEQ ID NO: 111084 - RNA, 21 nt, Artificial Sequence
  Synthetic
cacauaauaaaaaugguaaau

SEQ ID NO: 111085 - RNA, 22 nt, Artificial Sequence
  Synthetic
acacauaauaaaaaugguaaau

SEQ ID NO: 111086 - RNA, 23 nt, Artificial Sequence
  Synthetic
aacacauaauaaaaaugguaaau

SEQ ID NO: 111087 - RNA, 24 nt, Artificial Sequence
  Synthetic
aaacacauaauaaaaaugguaaau

SEQ ID NO: 111088 - RNA, 18 nt, Artificial Sequence
  Synthetic
ugcgaucauucuguaaau

SEQ ID NO: 111089 - RNA, 19 nt, Artificial Sequence
  Synthetic
uugcgaucauucuguaaau

SEQ ID NO: 111090 - RNA, 21 nt, Artificial Sequence
  Synthetic
aguugcgaucauucuguaaau

SEQ ID NO: 111091 - RNA, 22 nt, Artificial Sequence
  Synthetic
caguugcgaucauucuguaaau

SEQ ID NO: 111092 - RNA, 23 nt, Artificial Sequence
  Synthetic
acaguugcgaucauucuguaaau

SEQ ID NO: 111093 - RNA, 24 nt, Artificial Sequence
  Synthetic
uacaguugcgaucauucuguaaau

SEQ ID NO: 111094 - RNA, 18 nt, Artificial Sequence
  Synthetic
auguuaucaaguguaaau

SEQ ID NO: 111095 - RNA, 19 nt, Artificial Sequence
  Synthetic
cauguuaucaaguguaaau

SEQ ID NO: 111096 - RNA, 20 nt, Artificial Sequence
  Synthetic
acauguuaucaaguguaaau

SEQ ID NO: 111097 - RNA, 21 nt, Artificial Sequence
  Synthetic
aacauguuaucaaguguaaau

SEQ ID NO: 111098 - RNA, 22 nt, Artificial Sequence
  Synthetic
aaacauguuaucaaguguaaau

SEQ ID NO: 111099 - RNA, 24 nt, Artificial Sequence
  Synthetic
agaaacauguuaucaaguguaaau

SEQ ID NO: 111100 - RNA, 18 nt, Artificial Sequence
  Synthetic
ccaauacuacaauuaaau

SEQ ID NO: 111101 - RNA, 19 nt, Artificial Sequence
  Synthetic
cccaauacuacaauuaaau

SEQ ID NO: 111102 - RNA, 20 nt, Artificial Sequence
  Synthetic
ucccaauacuacaauuaaau

SEQ ID NO: 111103 - RNA, 21 nt, Artificial Sequence
  Synthetic
aucccaauacuacaauuaaau

SEQ ID NO: 111104 - RNA, 18 nt, Artificial Sequence
  Synthetic
acucauauugcauuaaau

SEQ ID NO: 111105 - RNA, 19 nt, Artificial Sequence
  Synthetic
aacucauauugcauuaaau

SEQ ID NO: 111106 - RNA, 20 nt, Artificial Sequence
  Synthetic
aaacucauauugcauuaaau

SEQ ID NO: 111107 - RNA, 21 nt, Artificial Sequence
  Synthetic
uaaacucauauugcauuaaau

SEQ ID NO: 111108 - RNA, 22 nt, Artificial Sequence
  Synthetic
cuaaacucauauugcauuaaau

SEQ ID NO: 111109 - RNA, 24 nt, Artificial Sequence
  Synthetic
agcuaaacucauauugcauuaaau

SEQ ID NO: 111110 - RNA, 18 nt, Artificial Sequence
  Synthetic
uaacaugaugacuuaaau

SEQ ID NO: 111111 - RNA, 19 nt, Artificial Sequence
  Synthetic
auaacaugaugacuuaaau

SEQ ID NO: 111112 - RNA, 20 nt, Artificial Sequence
  Synthetic
cauaacaugaugacuuaaau

SEQ ID NO: 111113 - RNA, 23 nt, Artificial Sequence
  Synthetic
uggcauaacaugaugacuuaaau

SEQ ID NO: 111114 - RNA, 24 nt, Artificial Sequence
  Synthetic
auggcauaacaugaugacuuaaau

SEQ ID NO: 111115 - RNA, 18 nt, Artificial Sequence
  Synthetic
acaguucauuucuuaaau

SEQ ID NO: 111116 - RNA, 19 nt, Artificial Sequence
  Synthetic
cacaguucauuucuuaaau

SEQ ID NO: 111117 - RNA, 21 nt, Artificial Sequence
  Synthetic
ugcacaguucauuucuuaaau

SEQ ID NO: 111118 - RNA, 22 nt, Artificial Sequence
  Synthetic
cugcacaguucauuucuuaaau

SEQ ID NO: 111119 - RNA, 24 nt, Artificial Sequence
  Synthetic
agcugcacaguucauuucuuaaau

SEQ ID NO: 111120 - RNA, 18 nt, Artificial Sequence
  Synthetic
uaccuaccguauuuaaau

SEQ ID NO: 111121 - RNA, 21 nt, Artificial Sequence
  Synthetic
agguaccuaccguauuuaaau

SEQ ID NO: 111122 - RNA, 23 nt, Artificial Sequence
  Synthetic
ugagguaccuaccguauuuaaau

SEQ ID NO: 111123 - RNA, 24 nt, Artificial Sequence
  Synthetic
uugagguaccuaccguauuuaaau

SEQ ID NO: 111124 - RNA, 18 nt, Artificial Sequence
  Synthetic
acuacaaacucuuuaaau

SEQ ID NO: 111125 - RNA, 19 nt, Artificial Sequence
  Synthetic
aacuacaaacucuuuaaau

SEQ ID NO: 111126 - RNA, 20 nt, Artificial Sequence
  Synthetic
aaacuacaaacucuuuaaau

SEQ ID NO: 111127 - RNA, 22 nt, Artificial Sequence
  Synthetic
agaaacuacaaacucuuuaaau

SEQ ID NO: 111128 - RNA, 23 nt, Artificial Sequence
  Synthetic
cagaaacuacaaacucuuuaaau

SEQ ID NO: 111129 - RNA, 24 nt, Artificial Sequence
  Synthetic
ccagaaacuacaaacucuuuaaau

SEQ ID NO: 111130 - RNA, 18 nt, Artificial Sequence
  Synthetic
auuaugugaauaaacaau

SEQ ID NO: 111131 - RNA, 19 nt, Artificial Sequence
  Synthetic
cauuaugugaauaaacaau

SEQ ID NO: 111132 - RNA, 20 nt, Artificial Sequence
  Synthetic
ucauuaugugaauaaacaau

SEQ ID NO: 111133 - RNA, 21 nt, Artificial Sequence
  Synthetic
aucauuaugugaauaaacaau

SEQ ID NO: 111134 - RNA, 22 nt, Artificial Sequence
  Synthetic
aaucauuaugugaauaaacaau

SEQ ID NO: 111135 - RNA, 23 nt, Artificial Sequence
  Synthetic
uaaucauuaugugaauaaacaau

SEQ ID NO: 111136 - RNA, 24 nt, Artificial Sequence
  Synthetic
auaaucauuaugugaauaaacaau

SEQ ID NO: 111137 - RNA, 18 nt, Artificial Sequence
  Synthetic
acaaucuaugacaacaau

SEQ ID NO: 111138 - RNA, 19 nt, Artificial Sequence
  Synthetic
uacaaucuaugacaacaau

SEQ ID NO: 111139 - RNA, 21 nt, Artificial Sequence
  Synthetic
uguacaaucuaugacaacaau

SEQ ID NO: 111140 - RNA, 22 nt, Artificial Sequence
  Synthetic
cuguacaaucuaugacaacaau

SEQ ID NO: 111141 - RNA, 23 nt, Artificial Sequence
  Synthetic
ccuguacaaucuaugacaacaau

SEQ ID NO: 111142 - RNA, 24 nt, Artificial Sequence
  Synthetic
accuguacaaucuaugacaacaau

SEQ ID NO: 111143 - RNA, 18 nt, Artificial Sequence
  Synthetic
uaauuaauugacaacaau

SEQ ID NO: 111144 - RNA, 19 nt, Artificial Sequence
  Synthetic
uuaauuaauugacaacaau

SEQ ID NO: 111145 - RNA, 20 nt, Artificial Sequence
  Synthetic
uuuaauuaauugacaacaau

SEQ ID NO: 111146 - RNA, 21 nt, Artificial Sequence
  Synthetic
auuuaauuaauugacaacaau

SEQ ID NO: 111147 - RNA, 22 nt, Artificial Sequence
  Synthetic
uauuuaauuaauugacaacaau

SEQ ID NO: 111148 - RNA, 23 nt, Artificial Sequence
  Synthetic
cuauuuaauuaauugacaacaau

SEQ ID NO: 111149 - RNA, 24 nt, Artificial Sequence
  Synthetic
acuauuuaauuaauugacaacaau

SEQ ID NO: 111150 - RNA, 18 nt, Artificial Sequence
  Synthetic
uuaagauuggucaacaau

SEQ ID NO: 111151 - RNA, 19 nt, Artificial Sequence
  Synthetic
uuuaagauuggucaacaau

SEQ ID NO: 111152 - RNA, 20 nt, Artificial Sequence
  Synthetic
cuuuaagauuggucaacaau

SEQ ID NO: 111153 - RNA, 21 nt, Artificial Sequence
  Synthetic
ccuuuaagauuggucaacaau

SEQ ID NO: 111154 - RNA, 22 nt, Artificial Sequence
  Synthetic
uccuuuaagauuggucaacaau

SEQ ID NO: 111155 - RNA, 23 nt, Artificial Sequence
  Synthetic
cuccuuuaagauuggucaacaau

SEQ ID NO: 111156 - RNA, 24 nt, Artificial Sequence
  Synthetic
ucuccuuuaagauuggucaacaau

SEQ ID NO: 111157 - RNA, 18 nt, Artificial Sequence
  Synthetic
aaagauuugaagaacaau

SEQ ID NO: 111158 - RNA, 19 nt, Artificial Sequence
  Synthetic
caaagauuugaagaacaau

SEQ ID NO: 111159 - RNA, 20 nt, Artificial Sequence
  Synthetic
acaaagauuugaagaacaau

SEQ ID NO: 111160 - RNA, 22 nt, Artificial Sequence
  Synthetic
agacaaagauuugaagaacaau

SEQ ID NO: 111161 - RNA, 24 nt, Artificial Sequence
  Synthetic
ugagacaaagauuugaagaacaau

SEQ ID NO: 111162 - RNA, 18 nt, Artificial Sequence
  Synthetic
ugacuguuagugaacaau

SEQ ID NO: 111163 - RNA, 19 nt, Artificial Sequence
  Synthetic
uugacuguuagugaacaau

SEQ ID NO: 111164 - RNA, 21 nt, Artificial Sequence
  Synthetic
uguugacuguuagugaacaau

SEQ ID NO: 111165 - RNA, 23 nt, Artificial Sequence
  Synthetic
uguguugacuguuagugaacaau

SEQ ID NO: 111166 - RNA, 24 nt, Artificial Sequence
  Synthetic
cuguguugacuguuagugaacaau

SEQ ID NO: 111167 - RNA, 18 nt, Artificial Sequence
  Synthetic
auaucuuuuucuaacaau

SEQ ID NO: 111168 - RNA, 19 nt, Artificial Sequence
  Synthetic
uauaucuuuuucuaacaau

SEQ ID NO: 111169 - RNA, 20 nt, Artificial Sequence
  Synthetic
auauaucuuuuucuaacaau

SEQ ID NO: 111170 - RNA, 21 nt, Artificial Sequence
  Synthetic
uauauaucuuuuucuaacaau

SEQ ID NO: 111171 - RNA, 22 nt, Artificial Sequence
  Synthetic
uuauauaucuuuuucuaacaau

SEQ ID NO: 111172 - RNA, 23 nt, Artificial Sequence
  Synthetic
auuauauaucuuuuucuaacaau

SEQ ID NO: 111173 - RNA, 24 nt, Artificial Sequence
  Synthetic
cauuauauaucuuuuucuaacaau

SEQ ID NO: 111174 - RNA, 19 nt, Artificial Sequence
  Synthetic
agaaugaaaaguuaacaau

SEQ ID NO: 111175 - RNA, 21 nt, Artificial Sequence
  Synthetic
ugagaaugaaaaguuaacaau

SEQ ID NO: 111176 - RNA, 22 nt, Artificial Sequence
  Synthetic
augagaaugaaaaguuaacaau

SEQ ID NO: 111177 - RNA, 23 nt, Artificial Sequence
  Synthetic
aaugagaaugaaaaguuaacaau

SEQ ID NO: 111178 - RNA, 18 nt, Artificial Sequence
  Synthetic
agaaauguuaaacacaau

SEQ ID NO: 111179 - RNA, 19 nt, Artificial Sequence
  Synthetic
aagaaauguuaaacacaau

SEQ ID NO: 111180 - RNA, 21 nt, Artificial Sequence
  Synthetic
ugaagaaauguuaaacacaau

SEQ ID NO: 111181 - RNA, 22 nt, Artificial Sequence
  Synthetic
augaagaaauguuaaacacaau

SEQ ID NO: 111182 - RNA, 23 nt, Artificial Sequence
  Synthetic
uaugaagaaauguuaaacacaau

SEQ ID NO: 111183 - RNA, 18 nt, Artificial Sequence
  Synthetic
aucuuuaauucacacaau

SEQ ID NO: 111184 - RNA, 19 nt, Artificial Sequence
  Synthetic
uaucuuuaauucacacaau

SEQ ID NO: 111185 - RNA, 20 nt, Artificial Sequence
  Synthetic
uuaucuuuaauucacacaau

SEQ ID NO: 111186 - RNA, 21 nt, Artificial Sequence
  Synthetic
auuaucuuuaauucacacaau

SEQ ID NO: 111187 - RNA, 22 nt, Artificial Sequence
  Synthetic
uauuaucuuuaauucacacaau

SEQ ID NO: 111188 - RNA, 23 nt, Artificial Sequence
  Synthetic
auauuaucuuuaauucacacaau

SEQ ID NO: 111189 - RNA, 24 nt, Artificial Sequence
  Synthetic
cauauuaucuuuaauucacacaau

SEQ ID NO: 111190 - RNA, 21 nt, Artificial Sequence
  Synthetic
aggggaaaacagauacacaau

SEQ ID NO: 111191 - RNA, 22 nt, Artificial Sequence
  Synthetic
aaggggaaaacagauacacaau

SEQ ID NO: 111192 - RNA, 24 nt, Artificial Sequence
  Synthetic
agaaggggaaaacagauacacaau

SEQ ID NO: 111193 - RNA, 18 nt, Artificial Sequence
  Synthetic
auuauacucuuacacaau

SEQ ID NO: 111194 - RNA, 19 nt, Artificial Sequence
  Synthetic
uauuauacucuuacacaau

SEQ ID NO: 111195 - RNA, 20 nt, Artificial Sequence
  Synthetic
auauuauacucuuacacaau

SEQ ID NO: 111196 - RNA, 21 nt, Artificial Sequence
  Synthetic
uauauuauacucuuacacaau

SEQ ID NO: 111197 - RNA, 22 nt, Artificial Sequence
  Synthetic
auauauuauacucuuacacaau

SEQ ID NO: 111198 - RNA, 23 nt, Artificial Sequence
  Synthetic
cauauauuauacucuuacacaau

SEQ ID NO: 111199 - RNA, 24 nt, Artificial Sequence
  Synthetic
ucauauauuauacucuuacacaau

SEQ ID NO: 111200 - RNA, 18 nt, Artificial Sequence
  Synthetic
uaucuuccauuccacaau

SEQ ID NO: 111201 - RNA, 19 nt, Artificial Sequence
  Synthetic
auaucuuccauuccacaau

SEQ ID NO: 111202 - RNA, 20 nt, Artificial Sequence
  Synthetic
uauaucuuccauuccacaau

SEQ ID NO: 111203 - RNA, 22 nt, Artificial Sequence
  Synthetic
uguauaucuuccauuccacaau

SEQ ID NO: 111204 - RNA, 23 nt, Artificial Sequence
  Synthetic
cuguauaucuuccauuccacaau

SEQ ID NO: 111205 - RNA, 24 nt, Artificial Sequence
  Synthetic
acuguauaucuuccauuccacaau

SEQ ID NO: 111206 - RNA, 18 nt, Artificial Sequence
  Synthetic
uaaaugaguaaucacaau

SEQ ID NO: 111207 - RNA, 19 nt, Artificial Sequence
  Synthetic
uuaaaugaguaaucacaau

SEQ ID NO: 111208 - RNA, 21 nt, Artificial Sequence
  Synthetic
uguuaaaugaguaaucacaau

SEQ ID NO: 111209 - RNA, 22 nt, Artificial Sequence
  Synthetic
uuguuaaaugaguaaucacaau

SEQ ID NO: 111210 - RNA, 24 nt, Artificial Sequence
  Synthetic
uguuguuaaaugaguaaucacaau

SEQ ID NO: 111211 - RNA, 18 nt, Artificial Sequence
  Synthetic
ccggcucaccaucacaau

SEQ ID NO: 111212 - RNA, 19 nt, Artificial Sequence
  Synthetic
uccggcucaccaucacaau

SEQ ID NO: 111213 - RNA, 20 nt, Artificial Sequence
  Synthetic
uuccggcucaccaucacaau

SEQ ID NO: 111214 - RNA, 21 nt, Artificial Sequence
  Synthetic
auuccggcucaccaucacaau

SEQ ID NO: 111215 - RNA, 22 nt, Artificial Sequence
  Synthetic
cauuccggcucaccaucacaau

SEQ ID NO: 111216 - RNA, 23 nt, Artificial Sequence
  Synthetic
ucauuccggcucaccaucacaau

SEQ ID NO: 111217 - RNA, 24 nt, Artificial Sequence
  Synthetic
cucauuccggcucaccaucacaau

SEQ ID NO: 111218 - RNA, 21 nt, Artificial Sequence
  Synthetic
auuuguuguuguuuucacaau

SEQ ID NO: 111219 - RNA, 22 nt, Artificial Sequence
  Synthetic
aauuuguuguuguuuucacaau

SEQ ID NO: 111220 - RNA, 23 nt, Artificial Sequence
  Synthetic
aaauuuguuguuguuuucacaau

SEQ ID NO: 111221 - RNA, 24 nt, Artificial Sequence
  Synthetic
aaaauuuguuguuguuuucacaau

SEQ ID NO: 111222 - RNA, 18 nt, Artificial Sequence
  Synthetic
cucaauaauuuagacaau

SEQ ID NO: 111223 - RNA, 19 nt, Artificial Sequence
  Synthetic
ucucaauaauuuagacaau

SEQ ID NO: 111224 - RNA, 20 nt, Artificial Sequence
  Synthetic
aucucaauaauuuagacaau

SEQ ID NO: 111225 - RNA, 21 nt, Artificial Sequence
  Synthetic
uaucucaauaauuuagacaau

SEQ ID NO: 111226 - RNA, 22 nt, Artificial Sequence
  Synthetic
uuaucucaauaauuuagacaau

SEQ ID NO: 111227 - RNA, 23 nt, Artificial Sequence
  Synthetic
uuuaucucaauaauuuagacaau

SEQ ID NO: 111228 - RNA, 24 nt, Artificial Sequence
  Synthetic
uuuuaucucaauaauuuagacaau

SEQ ID NO: 111229 - RNA, 18 nt, Artificial Sequence
  Synthetic
cugauuggaauggacaau

SEQ ID NO: 111230 - RNA, 19 nt, Artificial Sequence
  Synthetic
ccugauuggaauggacaau

SEQ ID NO: 111231 - RNA, 20 nt, Artificial Sequence
  Synthetic
accugauuggaauggacaau

SEQ ID NO: 111232 - RNA, 21 nt, Artificial Sequence
  Synthetic
aaccugauuggaauggacaau

SEQ ID NO: 111233 - RNA, 22 nt, Artificial Sequence
  Synthetic
caaccugauuggaauggacaau

SEQ ID NO: 111234 - RNA, 23 nt, Artificial Sequence
  Synthetic
acaaccugauuggaauggacaau

SEQ ID NO: 111235 - RNA, 24 nt, Artificial Sequence
  Synthetic
cacaaccugauuggaauggacaau

SEQ ID NO: 111236 - RNA, 18 nt, Artificial Sequence
  Synthetic
uuaggaugaggugacaau

SEQ ID NO: 111237 - RNA, 19 nt, Artificial Sequence
  Synthetic
uuuaggaugaggugacaau

SEQ ID NO: 111238 - RNA, 20 nt, Artificial Sequence
  Synthetic
cuuuaggaugaggugacaau

SEQ ID NO: 111239 - RNA, 23 nt, Artificial Sequence
  Synthetic
aggcuuuaggaugaggugacaau

SEQ ID NO: 111240 - RNA, 19 nt, Artificial Sequence
  Synthetic
agaauauguuccauacaau

SEQ ID NO: 111241 - RNA, 20 nt, Artificial Sequence
  Synthetic
cagaauauguuccauacaau

SEQ ID NO: 111242 - RNA, 18 nt, Artificial Sequence
  Synthetic
uaagaaagcugcuacaau

SEQ ID NO: 111243 - RNA, 19 nt, Artificial Sequence
  Synthetic
auaagaaagcugcuacaau

SEQ ID NO: 111244 - RNA, 20 nt, Artificial Sequence
  Synthetic
aauaagaaagcugcuacaau

SEQ ID NO: 111245 - RNA, 18 nt, Artificial Sequence
  Synthetic
uuugauaguuucuacaau

SEQ ID NO: 111246 - RNA, 19 nt, Artificial Sequence
  Synthetic
uuuugauaguuucuacaau

SEQ ID NO: 111247 - RNA, 20 nt, Artificial Sequence
  Synthetic
uuuuugauaguuucuacaau

SEQ ID NO: 111248 - RNA, 21 nt, Artificial Sequence
  Synthetic
auuuuugauaguuucuacaau

SEQ ID NO: 111249 - RNA, 22 nt, Artificial Sequence
  Synthetic
aauuuuugauaguuucuacaau

SEQ ID NO: 111250 - RNA, 23 nt, Artificial Sequence
  Synthetic
aaauuuuugauaguuucuacaau

SEQ ID NO: 111251 - RNA, 24 nt, Artificial Sequence
  Synthetic
uaaauuuuugauaguuucuacaau

SEQ ID NO: 111252 - RNA, 19 nt, Artificial Sequence
  Synthetic
agccuaauaaauguacaau

SEQ ID NO: 111253 - RNA, 22 nt, Artificial Sequence
  Synthetic
aggagccuaauaaauguacaau

SEQ ID NO: 111254 - RNA, 23 nt, Artificial Sequence
  Synthetic
aaggagccuaauaaauguacaau

SEQ ID NO: 111255 - RNA, 24 nt, Artificial Sequence
  Synthetic
uaaggagccuaauaaauguacaau

SEQ ID NO: 111256 - RNA, 18 nt, Artificial Sequence
  Synthetic
ucacaaaagaauuacaau

SEQ ID NO: 111257 - RNA, 19 nt, Artificial Sequence
  Synthetic
uucacaaaagaauuacaau

SEQ ID NO: 111258 - RNA, 20 nt, Artificial Sequence
  Synthetic
cuucacaaaagaauuacaau

SEQ ID NO: 111259 - RNA, 21 nt, Artificial Sequence
  Synthetic
acuucacaaaagaauuacaau

SEQ ID NO: 111260 - RNA, 23 nt, Artificial Sequence
  Synthetic
agacuucacaaaagaauuacaau

SEQ ID NO: 111261 - RNA, 24 nt, Artificial Sequence
  Synthetic
uagacuucacaaaagaauuacaau

SEQ ID NO: 111262 - RNA, 18 nt, Artificial Sequence
  Synthetic
aaauuuucaauuuacaau

SEQ ID NO: 111263 - RNA, 19 nt, Artificial Sequence
  Synthetic
aaaauuuucaauuuacaau

SEQ ID NO: 111264 - RNA, 21 nt, Artificial Sequence
  Synthetic
agaaaauuuucaauuuacaau

SEQ ID NO: 111265 - RNA, 22 nt, Artificial Sequence
  Synthetic
uagaaaauuuucaauuuacaau

SEQ ID NO: 111266 - RNA, 23 nt, Artificial Sequence
  Synthetic
cuagaaaauuuucaauuuacaau

SEQ ID NO: 111267 - RNA, 24 nt, Artificial Sequence
  Synthetic
acuagaaaauuuucaauuuacaau

SEQ ID NO: 111268 - RNA, 19 nt, Artificial Sequence
  Synthetic
ugaguuaaaccaaaccaau

SEQ ID NO: 111269 - RNA, 20 nt, Artificial Sequence
  Synthetic
cugaguuaaaccaaaccaau

SEQ ID NO: 111270 - RNA, 22 nt, Artificial Sequence
  Synthetic
agcugaguuaaaccaaaccaau

SEQ ID NO: 111271 - RNA, 23 nt, Artificial Sequence
  Synthetic
aagcugaguuaaaccaaaccaau

SEQ ID NO: 111272 - RNA, 18 nt, Artificial Sequence
  Synthetic
cgaauuuaauaaaccaau

SEQ ID NO: 111273 - RNA, 19 nt, Artificial Sequence
  Synthetic
acgaauuuaauaaaccaau

SEQ ID NO: 111274 - RNA, 20 nt, Artificial Sequence
  Synthetic
aacgaauuuaauaaaccaau

SEQ ID NO: 111275 - RNA, 21 nt, Artificial Sequence
  Synthetic
caacgaauuuaauaaaccaau

SEQ ID NO: 111276 - RNA, 22 nt, Artificial Sequence
  Synthetic
ucaacgaauuuaauaaaccaau

SEQ ID NO: 111277 - RNA, 23 nt, Artificial Sequence
  Synthetic
uucaacgaauuuaauaaaccaau

SEQ ID NO: 111278 - RNA, 24 nt, Artificial Sequence
  Synthetic
auucaacgaauuuaauaaaccaau

SEQ ID NO: 111279 - RNA, 18 nt, Artificial Sequence
  Synthetic
aaccuuuccuuaaccaau

SEQ ID NO: 111280 - RNA, 19 nt, Artificial Sequence
  Synthetic
aaaccuuuccuuaaccaau

SEQ ID NO: 111281 - RNA, 20 nt, Artificial Sequence
  Synthetic
aaaaccuuuccuuaaccaau

SEQ ID NO: 111282 - RNA, 22 nt, Artificial Sequence
  Synthetic
agaaaaccuuuccuuaaccaau

SEQ ID NO: 111283 - RNA, 23 nt, Artificial Sequence
  Synthetic
cagaaaaccuuuccuuaaccaau

SEQ ID NO: 111284 - RNA, 24 nt, Artificial Sequence
  Synthetic
ccagaaaaccuuuccuuaaccaau

SEQ ID NO: 111285 - RNA, 18 nt, Artificial Sequence
  Synthetic
aaugagaguuuuaccaau

SEQ ID NO: 111286 - RNA, 20 nt, Artificial Sequence
  Synthetic
agaaugagaguuuuaccaau

SEQ ID NO: 111287 - RNA, 21 nt, Artificial Sequence
  Synthetic
cagaaugagaguuuuaccaau

SEQ ID NO: 111288 - RNA, 22 nt, Artificial Sequence
  Synthetic
ucagaaugagaguuuuaccaau

SEQ ID NO: 111289 - RNA, 23 nt, Artificial Sequence
  Synthetic
aucagaaugagaguuuuaccaau

SEQ ID NO: 111290 - RNA, 18 nt, Artificial Sequence
  Synthetic
uaggaagagccucccaau

SEQ ID NO: 111291 - RNA, 19 nt, Artificial Sequence
  Synthetic
uuaggaagagccucccaau

SEQ ID NO: 111292 - RNA, 20 nt, Artificial Sequence
  Synthetic
uuuaggaagagccucccaau

SEQ ID NO: 111293 - RNA, 21 nt, Artificial Sequence
  Synthetic
auuuaggaagagccucccaau

SEQ ID NO: 111294 - RNA, 22 nt, Artificial Sequence
  Synthetic
aauuuaggaagagccucccaau

SEQ ID NO: 111295 - RNA, 23 nt, Artificial Sequence
  Synthetic
aaauuuaggaagagccucccaau

SEQ ID NO: 111296 - RNA, 18 nt, Artificial Sequence
  Synthetic
uuugcucaguuucccaau

SEQ ID NO: 111297 - RNA, 19 nt, Artificial Sequence
  Synthetic
auuugcucaguuucccaau

SEQ ID NO: 111298 - RNA, 21 nt, Artificial Sequence
  Synthetic
agauuugcucaguuucccaau

SEQ ID NO: 111299 - RNA, 22 nt, Artificial Sequence
  Synthetic
cagauuugcucaguuucccaau

SEQ ID NO: 111300 - RNA, 23 nt, Artificial Sequence
  Synthetic
ucagauuugcucaguuucccaau

SEQ ID NO: 111301 - RNA, 24 nt, Artificial Sequence
  Synthetic
uucagauuugcucaguuucccaau

SEQ ID NO: 111302 - RNA, 18 nt, Artificial Sequence
  Synthetic
ugcuuaugaaaauccaau

SEQ ID NO: 111303 - RNA, 19 nt, Artificial Sequence
  Synthetic
uugcuuaugaaaauccaau

SEQ ID NO: 111304 - RNA, 20 nt, Artificial Sequence
  Synthetic
cuugcuuaugaaaauccaau

SEQ ID NO: 111305 - RNA, 21 nt, Artificial Sequence
  Synthetic
acuugcuuaugaaaauccaau

SEQ ID NO: 111306 - RNA, 22 nt, Artificial Sequence
  Synthetic
aacuugcuuaugaaaauccaau

SEQ ID NO: 111307 - RNA, 24 nt, Artificial Sequence
  Synthetic
ugaacuugcuuaugaaaauccaau

SEQ ID NO: 111308 - RNA, 18 nt, Artificial Sequence
  Synthetic
auaacucaaauuuccaau

SEQ ID NO: 111309 - RNA, 20 nt, Artificial Sequence
  Synthetic
cgauaacucaaauuuccaau

SEQ ID NO: 111310 - RNA, 22 nt, Artificial Sequence
  Synthetic
agcgauaacucaaauuuccaau

SEQ ID NO: 111311 - RNA, 23 nt, Artificial Sequence
  Synthetic
aagcgauaacucaaauuuccaau

SEQ ID NO: 111312 - RNA, 24 nt, Artificial Sequence
  Synthetic
aaagcgauaacucaaauuuccaau

SEQ ID NO: 111313 - RNA, 18 nt, Artificial Sequence
  Synthetic
accagcuuuauuuccaau

SEQ ID NO: 111314 - RNA, 19 nt, Artificial Sequence
  Synthetic
aaccagcuuuauuuccaau

SEQ ID NO: 111315 - RNA, 20 nt, Artificial Sequence
  Synthetic
uaaccagcuuuauuuccaau

SEQ ID NO: 111316 - RNA, 21 nt, Artificial Sequence
  Synthetic
uuaaccagcuuuauuuccaau

SEQ ID NO: 111317 - RNA, 22 nt, Artificial Sequence
  Synthetic
cuuaaccagcuuuauuuccaau

SEQ ID NO: 111318 - RNA, 23 nt, Artificial Sequence
  Synthetic
ccuuaaccagcuuuauuuccaau

SEQ ID NO: 111319 - RNA, 24 nt, Artificial Sequence
  Synthetic
cccuuaaccagcuuuauuuccaau

SEQ ID NO: 111320 - RNA, 18 nt, Artificial Sequence
  Synthetic
cugauucucaaaagcaau

SEQ ID NO: 111321 - RNA, 19 nt, Artificial Sequence
  Synthetic
ucugauucucaaaagcaau

SEQ ID NO: 111322 - RNA, 21 nt, Artificial Sequence
  Synthetic
agucugauucucaaaagcaau

SEQ ID NO: 111323 - RNA, 22 nt, Artificial Sequence
  Synthetic
uagucugauucucaaaagcaau

SEQ ID NO: 111324 - RNA, 23 nt, Artificial Sequence
  Synthetic
auagucugauucucaaaagcaau

SEQ ID NO: 111325 - RNA, 24 nt, Artificial Sequence
  Synthetic
cauagucugauucucaaaagcaau

SEQ ID NO: 111326 - RNA, 19 nt, Artificial Sequence
  Synthetic
aggaagcgcauagagcaau

SEQ ID NO: 111327 - RNA, 20 nt, Artificial Sequence
  Synthetic
aaggaagcgcauagagcaau

SEQ ID NO: 111328 - RNA, 21 nt, Artificial Sequence
  Synthetic
caaggaagcgcauagagcaau

SEQ ID NO: 111329 - RNA, 22 nt, Artificial Sequence
  Synthetic
acaaggaagcgcauagagcaau

SEQ ID NO: 111330 - RNA, 23 nt, Artificial Sequence
  Synthetic
uacaaggaagcgcauagagcaau

SEQ ID NO: 111331 - RNA, 24 nt, Artificial Sequence
  Synthetic
uuacaaggaagcgcauagagcaau

SEQ ID NO: 111332 - RNA, 19 nt, Artificial Sequence
  Synthetic
aggguauauguagagcaau

SEQ ID NO: 111333 - RNA, 20 nt, Artificial Sequence
  Synthetic
aaggguauauguagagcaau

SEQ ID NO: 111334 - RNA, 21 nt, Artificial Sequence
  Synthetic
uaaggguauauguagagcaau

SEQ ID NO: 111335 - RNA, 22 nt, Artificial Sequence
  Synthetic
auaaggguauauguagagcaau

SEQ ID NO: 111336 - RNA, 18 nt, Artificial Sequence
  Synthetic
uaaagaaaaaugagcaau

SEQ ID NO: 111337 - RNA, 19 nt, Artificial Sequence
  Synthetic
uuaaagaaaaaugagcaau

SEQ ID NO: 111338 - RNA, 21 nt, Artificial Sequence
  Synthetic
aguuaaagaaaaaugagcaau

SEQ ID NO: 111339 - RNA, 23 nt, Artificial Sequence
  Synthetic
agaguuaaagaaaaaugagcaau

SEQ ID NO: 111340 - RNA, 24 nt, Artificial Sequence
  Synthetic
aagaguuaaagaaaaaugagcaau

SEQ ID NO: 111341 - RNA, 18 nt, Artificial Sequence
  Synthetic
uggaaauuugugagcaau

SEQ ID NO: 111342 - RNA, 19 nt, Artificial Sequence
  Synthetic
cuggaaauuugugagcaau

SEQ ID NO: 111343 - RNA, 20 nt, Artificial Sequence
  Synthetic
acuggaaauuugugagcaau

SEQ ID NO: 111344 - RNA, 21 nt, Artificial Sequence
  Synthetic
aacuggaaauuugugagcaau

SEQ ID NO: 111345 - RNA, 22 nt, Artificial Sequence
  Synthetic
caacuggaaauuugugagcaau

SEQ ID NO: 111346 - RNA, 23 nt, Artificial Sequence
  Synthetic
ucaacuggaaauuugugagcaau

SEQ ID NO: 111347 - RNA, 24 nt, Artificial Sequence
  Synthetic
aucaacuggaaauuugugagcaau

SEQ ID NO: 111348 - RNA, 19 nt, Artificial Sequence
  Synthetic
ugaagaacaaaauagcaau

SEQ ID NO: 111349 - RNA, 20 nt, Artificial Sequence
  Synthetic
uugaagaacaaaauagcaau

SEQ ID NO: 111350 - RNA, 22 nt, Artificial Sequence
  Synthetic
aguugaagaacaaaauagcaau

SEQ ID NO: 111351 - RNA, 23 nt, Artificial Sequence
  Synthetic
caguugaagaacaaaauagcaau

SEQ ID NO: 111352 - RNA, 24 nt, Artificial Sequence
  Synthetic
acaguugaagaacaaaauagcaau

SEQ ID NO: 111353 - RNA, 18 nt, Artificial Sequence
  Synthetic
aaccugaagguuagcaau

SEQ ID NO: 111354 - RNA, 19 nt, Artificial Sequence
  Synthetic
aaaccugaagguuagcaau

SEQ ID NO: 111355 - RNA, 20 nt, Artificial Sequence
  Synthetic
aaaaccugaagguuagcaau

SEQ ID NO: 111356 - RNA, 21 nt, Artificial Sequence
  Synthetic
aaaaaccugaagguuagcaau

SEQ ID NO: 111357 - RNA, 18 nt, Artificial Sequence
  Synthetic
cuucuugucagaggcaau

SEQ ID NO: 111358 - RNA, 20 nt, Artificial Sequence
  Synthetic
ugcuucuugucagaggcaau

SEQ ID NO: 111359 - RNA, 21 nt, Artificial Sequence
  Synthetic
augcuucuugucagaggcaau

SEQ ID NO: 111360 - RNA, 22 nt, Artificial Sequence
  Synthetic
uaugcuucuugucagaggcaau

SEQ ID NO: 111361 - RNA, 23 nt, Artificial Sequence
  Synthetic
uuaugcuucuugucagaggcaau

SEQ ID NO: 111362 - RNA, 24 nt, Artificial Sequence
  Synthetic
auuaugcuucuugucagaggcaau

SEQ ID NO: 111363 - RNA, 18 nt, Artificial Sequence
  Synthetic
aguucuugaaauggcaau

SEQ ID NO: 111364 - RNA, 19 nt, Artificial Sequence
  Synthetic
uaguucuugaaauggcaau

SEQ ID NO: 111365 - RNA, 20 nt, Artificial Sequence
  Synthetic
auaguucuugaaauggcaau

SEQ ID NO: 111366 - RNA, 21 nt, Artificial Sequence
  Synthetic
cauaguucuugaaauggcaau

SEQ ID NO: 111367 - RNA, 22 nt, Artificial Sequence
  Synthetic
acauaguucuugaaauggcaau

SEQ ID NO: 111368 - RNA, 23 nt, Artificial Sequence
  Synthetic
uacauaguucuugaaauggcaau

SEQ ID NO: 111369 - RNA, 24 nt, Artificial Sequence
  Synthetic
auacauaguucuugaaauggcaau

SEQ ID NO: 111370 - RNA, 18 nt, Artificial Sequence
  Synthetic
aaaauauuacacugcaau

SEQ ID NO: 111371 - RNA, 19 nt, Artificial Sequence
  Synthetic
caaaauauuacacugcaau

SEQ ID NO: 111372 - RNA, 20 nt, Artificial Sequence
  Synthetic
acaaaauauuacacugcaau

SEQ ID NO: 111373 - RNA, 21 nt, Artificial Sequence
  Synthetic
uacaaaauauuacacugcaau

SEQ ID NO: 111374 - RNA, 22 nt, Artificial Sequence
  Synthetic
auacaaaauauuacacugcaau

SEQ ID NO: 111375 - RNA, 23 nt, Artificial Sequence
  Synthetic
aauacaaaauauuacacugcaau

SEQ ID NO: 111376 - RNA, 24 nt, Artificial Sequence
  Synthetic
uaauacaaaauauuacacugcaau

SEQ ID NO: 111377 - RNA, 18 nt, Artificial Sequence
  Synthetic
aguuuuaaaagcugcaau

SEQ ID NO: 111378 - RNA, 19 nt, Artificial Sequence
  Synthetic
aaguuuuaaaagcugcaau

SEQ ID NO: 111379 - RNA, 21 nt, Artificial Sequence
  Synthetic
ugaaguuuuaaaagcugcaau

SEQ ID NO: 111380 - RNA, 22 nt, Artificial Sequence
  Synthetic
uugaaguuuuaaaagcugcaau

SEQ ID NO: 111381 - RNA, 23 nt, Artificial Sequence
  Synthetic
uuugaaguuuuaaaagcugcaau

SEQ ID NO: 111382 - RNA, 24 nt, Artificial Sequence
  Synthetic
auuugaaguuuuaaaagcugcaau

SEQ ID NO: 111383 - RNA, 18 nt, Artificial Sequence
  Synthetic
cuucaaccucagugcaau

SEQ ID NO: 111384 - RNA, 19 nt, Artificial Sequence
  Synthetic
ucuucaaccucagugcaau

SEQ ID NO: 111385 - RNA, 22 nt, Artificial Sequence
  Synthetic
uggucuucaaccucagugcaau

SEQ ID NO: 111386 - RNA, 23 nt, Artificial Sequence
  Synthetic
uuggucuucaaccucagugcaau

SEQ ID NO: 111387 - RNA, 24 nt, Artificial Sequence
  Synthetic
uuuggucuucaaccucagugcaau

SEQ ID NO: 111388 - RNA, 18 nt, Artificial Sequence
  Synthetic
cauucauggcaaaucaau

SEQ ID NO: 111389 - RNA, 19 nt, Artificial Sequence
  Synthetic
acauucauggcaaaucaau

SEQ ID NO: 111390 - RNA, 21 nt, Artificial Sequence
  Synthetic
agacauucauggcaaaucaau

SEQ ID NO: 111391 - RNA, 23 nt, Artificial Sequence
  Synthetic
agagacauucauggcaaaucaau

SEQ ID NO: 111392 - RNA, 24 nt, Artificial Sequence
  Synthetic
aagagacauucauggcaaaucaau

SEQ ID NO: 111393 - RNA, 18 nt, Artificial Sequence
  Synthetic
uagcugcauuucaucaau

SEQ ID NO: 111394 - RNA, 19 nt, Artificial Sequence
  Synthetic
cuagcugcauuucaucaau

SEQ ID NO: 111395 - RNA, 21 nt, Artificial Sequence
  Synthetic
agcuagcugcauuucaucaau

SEQ ID NO: 111396 - RNA, 22 nt, Artificial Sequence
  Synthetic
cagcuagcugcauuucaucaau

SEQ ID NO: 111397 - RNA, 23 nt, Artificial Sequence
  Synthetic
acagcuagcugcauuucaucaau

SEQ ID NO: 111398 - RNA, 24 nt, Artificial Sequence
  Synthetic
cacagcuagcugcauuucaucaau

SEQ ID NO: 111399 - RNA, 18 nt, Artificial Sequence
  Synthetic
caccuuaaauaccucaau

SEQ ID NO: 111400 - RNA, 19 nt, Artificial Sequence
  Synthetic
ucaccuuaaauaccucaau

SEQ ID NO: 111401 - RNA, 20 nt, Artificial Sequence
  Synthetic
uucaccuuaaauaccucaau

SEQ ID NO: 111402 - RNA, 21 nt, Artificial Sequence
  Synthetic
auucaccuuaaauaccucaau

SEQ ID NO: 111403 - RNA, 22 nt, Artificial Sequence
  Synthetic
cauucaccuuaaauaccucaau

SEQ ID NO: 111404 - RNA, 23 nt, Artificial Sequence
  Synthetic
ucauucaccuuaaauaccucaau

SEQ ID NO: 111405 - RNA, 24 nt, Artificial Sequence
  Synthetic
aucauucaccuuaaauaccucaau

SEQ ID NO: 111406 - RNA, 18 nt, Artificial Sequence
  Synthetic
cauuaaaucaaucucaau

SEQ ID NO: 111407 - RNA, 19 nt, Artificial Sequence
  Synthetic
ucauuaaaucaaucucaau

SEQ ID NO: 111408 - RNA, 20 nt, Artificial Sequence
  Synthetic
aucauuaaaucaaucucaau

SEQ ID NO: 111409 - RNA, 21 nt, Artificial Sequence
  Synthetic
caucauuaaaucaaucucaau

SEQ ID NO: 111410 - RNA, 22 nt, Artificial Sequence
  Synthetic
acaucauuaaaucaaucucaau

SEQ ID NO: 111411 - RNA, 23 nt, Artificial Sequence
  Synthetic
cacaucauuaaaucaaucucaau

SEQ ID NO: 111412 - RNA, 24 nt, Artificial Sequence
  Synthetic
acacaucauuaaaucaaucucaau

SEQ ID NO: 111413 - RNA, 18 nt, Artificial Sequence
  Synthetic
aaauaugaucacuucaau

SEQ ID NO: 111414 - RNA, 19 nt, Artificial Sequence
  Synthetic
uaaauaugaucacuucaau

SEQ ID NO: 111415 - RNA, 20 nt, Artificial Sequence
  Synthetic
cuaaauaugaucacuucaau

SEQ ID NO: 111416 - RNA, 18 nt, Artificial Sequence
  Synthetic
ccuagcaucaccuucaau

SEQ ID NO: 111417 - RNA, 19 nt, Artificial Sequence
  Synthetic
accuagcaucaccuucaau

SEQ ID NO: 111418 - RNA, 20 nt, Artificial Sequence
  Synthetic
aaccuagcaucaccuucaau

SEQ ID NO: 111419 - RNA, 21 nt, Artificial Sequence
  Synthetic
aaaccuagcaucaccuucaau

SEQ ID NO: 111420 - RNA, 22 nt, Artificial Sequence
  Synthetic
uaaaccuagcaucaccuucaau

SEQ ID NO: 111421 - RNA, 23 nt, Artificial Sequence
  Synthetic
auaaaccuagcaucaccuucaau

SEQ ID NO: 111422 - RNA, 24 nt, Artificial Sequence
  Synthetic
aauaaaccuagcaucaccuucaau

SEQ ID NO: 111423 - RNA, 18 nt, Artificial Sequence
  Synthetic
uauauggauucuuucaau

SEQ ID NO: 111424 - RNA, 19 nt, Artificial Sequence
  Synthetic
cuauauggauucuuucaau

SEQ ID NO: 111425 - RNA, 20 nt, Artificial Sequence
  Synthetic
ucuauauggauucuuucaau

SEQ ID NO: 111426 - RNA, 21 nt, Artificial Sequence
  Synthetic
uucuauauggauucuuucaau

SEQ ID NO: 111427 - RNA, 22 nt, Artificial Sequence
  Synthetic
uuucuauauggauucuuucaau

SEQ ID NO: 111428 - RNA, 23 nt, Artificial Sequence
  Synthetic
auuucuauauggauucuuucaau

SEQ ID NO: 111429 - RNA, 24 nt, Artificial Sequence
  Synthetic
aauuucuauauggauucuuucaau

SEQ ID NO: 111430 - RNA, 18 nt, Artificial Sequence
  Synthetic
uguaaugugaguuucaau

SEQ ID NO: 111431 - RNA, 19 nt, Artificial Sequence
  Synthetic
auguaaugugaguuucaau

SEQ ID NO: 111432 - RNA, 22 nt, Artificial Sequence
  Synthetic
aggauguaaugugaguuucaau

SEQ ID NO: 111433 - RNA, 23 nt, Artificial Sequence
  Synthetic
uaggauguaaugugaguuucaau

SEQ ID NO: 111434 - RNA, 24 nt, Artificial Sequence
  Synthetic
uuaggauguaaugugaguuucaau

SEQ ID NO: 111435 - RNA, 18 nt, Artificial Sequence
  Synthetic
uacuuaccauuuuucaau

SEQ ID NO: 111436 - RNA, 19 nt, Artificial Sequence
  Synthetic
uuacuuaccauuuuucaau

SEQ ID NO: 111437 - RNA, 20 nt, Artificial Sequence
  Synthetic
uuuacuuaccauuuuucaau

SEQ ID NO: 111438 - RNA, 21 nt, Artificial Sequence
  Synthetic
uuuuacuuaccauuuuucaau

SEQ ID NO: 111439 - RNA, 22 nt, Artificial Sequence
  Synthetic
auuuuacuuaccauuuuucaau

SEQ ID NO: 111440 - RNA, 23 nt, Artificial Sequence
  Synthetic
cauuuuacuuaccauuuuucaau

SEQ ID NO: 111441 - RNA, 24 nt, Artificial Sequence
  Synthetic
ucauuuuacuuaccauuuuucaau

SEQ ID NO: 111442 - RNA, 18 nt, Artificial Sequence
  Synthetic
ccacaguaaaaaaagaau

SEQ ID NO: 111443 - RNA, 19 nt, Artificial Sequence
  Synthetic
uccacaguaaaaaaagaau

SEQ ID NO: 111444 - RNA, 20 nt, Artificial Sequence
  Synthetic
uuccacaguaaaaaaagaau

SEQ ID NO: 111445 - RNA, 21 nt, Artificial Sequence
  Synthetic
uuuccacaguaaaaaaagaau

SEQ ID NO: 111446 - RNA, 23 nt, Artificial Sequence
  Synthetic
aguuuccacaguaaaaaaagaau

SEQ ID NO: 111447 - RNA, 24 nt, Artificial Sequence
  Synthetic
uaguuuccacaguaaaaaaagaau

SEQ ID NO: 111448 - RNA, 19 nt, Artificial Sequence
  Synthetic
agaccccgaagcaaagaau

SEQ ID NO: 111449 - RNA, 21 nt, Artificial Sequence
  Synthetic
agagaccccgaagcaaagaau

SEQ ID NO: 111450 - RNA, 23 nt, Artificial Sequence
  Synthetic
ugagagaccccgaagcaaagaau

SEQ ID NO: 111451 - RNA, 22 nt, Artificial Sequence
  Synthetic
agguuauuuuuaaagaaagaau

SEQ ID NO: 111452 - RNA, 24 nt, Artificial Sequence
  Synthetic
ugagguuauuuuuaaagaaagaau

SEQ ID NO: 111453 - RNA, 18 nt, Artificial Sequence
  Synthetic
aauguauuuugaaagaau

SEQ ID NO: 111454 - RNA, 19 nt, Artificial Sequence
  Synthetic
uaauguauuuugaaagaau

SEQ ID NO: 111455 - RNA, 22 nt, Artificial Sequence
  Synthetic
agguaauguauuuugaaagaau

SEQ ID NO: 111456 - RNA, 23 nt, Artificial Sequence
  Synthetic
uagguaauguauuuugaaagaau

SEQ ID NO: 111457 - RNA, 24 nt, Artificial Sequence
  Synthetic
uuagguaauguauuuugaaagaau

SEQ ID NO: 111458 - RNA, 18 nt, Artificial Sequence
  Synthetic
uuaaauuucuacaagaau

SEQ ID NO: 111459 - RNA, 19 nt, Artificial Sequence
  Synthetic
cuuaaauuucuacaagaau

SEQ ID NO: 111460 - RNA, 20 nt, Artificial Sequence
  Synthetic
acuuaaauuucuacaagaau

SEQ ID NO: 111461 - RNA, 21 nt, Artificial Sequence
  Synthetic
aacuuaaauuucuacaagaau

SEQ ID NO: 111462 - RNA, 22 nt, Artificial Sequence
  Synthetic
caacuuaaauuucuacaagaau

SEQ ID NO: 111463 - RNA, 23 nt, Artificial Sequence
  Synthetic
ccaacuuaaauuucuacaagaau

SEQ ID NO: 111464 - RNA, 24 nt, Artificial Sequence
  Synthetic
accaacuuaaauuucuacaagaau

SEQ ID NO: 111465 - RNA, 18 nt, Artificial Sequence
  Synthetic
aauccagaaaucaagaau

SEQ ID NO: 111466 - RNA, 19 nt, Artificial Sequence
  Synthetic
uaauccagaaaucaagaau

SEQ ID NO: 111467 - RNA, 20 nt, Artificial Sequence
  Synthetic
cuaauccagaaaucaagaau

SEQ ID NO: 111468 - RNA, 21 nt, Artificial Sequence
  Synthetic
ucuaauccagaaaucaagaau

SEQ ID NO: 111469 - RNA, 22 nt, Artificial Sequence
  Synthetic
cucuaauccagaaaucaagaau

SEQ ID NO: 111470 - RNA, 23 nt, Artificial Sequence
  Synthetic
ccucuaauccagaaaucaagaau

SEQ ID NO: 111471 - RNA, 24 nt, Artificial Sequence
  Synthetic
uccucuaauccagaaaucaagaau

SEQ ID NO: 111472 - RNA, 18 nt, Artificial Sequence
  Synthetic
caagacacagucaagaau

SEQ ID NO: 111473 - RNA, 19 nt, Artificial Sequence
  Synthetic
ucaagacacagucaagaau

SEQ ID NO: 111474 - RNA, 20 nt, Artificial Sequence
  Synthetic
uucaagacacagucaagaau

SEQ ID NO: 111475 - RNA, 21 nt, Artificial Sequence
  Synthetic
uuucaagacacagucaagaau

SEQ ID NO: 111476 - RNA, 22 nt, Artificial Sequence
  Synthetic
auuucaagacacagucaagaau

SEQ ID NO: 111477 - RNA, 24 nt, Artificial Sequence
  Synthetic
ugauuucaagacacagucaagaau

SEQ ID NO: 111478 - RNA, 18 nt, Artificial Sequence
  Synthetic
uuaacagcugagaagaau

SEQ ID NO: 111479 - RNA, 19 nt, Artificial Sequence
  Synthetic
cuuaacagcugagaagaau

SEQ ID NO: 111480 - RNA, 20 nt, Artificial Sequence
  Synthetic
acuuaacagcugagaagaau

SEQ ID NO: 111481 - RNA, 21 nt, Artificial Sequence
  Synthetic
uacuuaacagcugagaagaau

SEQ ID NO: 111482 - RNA, 22 nt, Artificial Sequence
  Synthetic
auacuuaacagcugagaagaau

SEQ ID NO: 111483 - RNA, 23 nt, Artificial Sequence
  Synthetic
aauacuuaacagcugagaagaau

SEQ ID NO: 111484 - RNA, 24 nt, Artificial Sequence
  Synthetic
caauacuuaacagcugagaagaau

SEQ ID NO: 111485 - RNA, 18 nt, Artificial Sequence
  Synthetic
auuucuagucugaagaau

SEQ ID NO: 111486 - RNA, 19 nt, Artificial Sequence
  Synthetic
cauuucuagucugaagaau

SEQ ID NO: 111487 - RNA, 21 nt, Artificial Sequence
  Synthetic
ugcauuucuagucugaagaau

SEQ ID NO: 111488 - RNA, 22 nt, Artificial Sequence
  Synthetic
uugcauuucuagucugaagaau

SEQ ID NO: 111489 - RNA, 23 nt, Artificial Sequence
  Synthetic
auugcauuucuagucugaagaau

SEQ ID NO: 111490 - RNA, 24 nt, Artificial Sequence
  Synthetic
aauugcauuucuagucugaagaau

SEQ ID NO: 111491 - RNA, 18 nt, Artificial Sequence
  Synthetic
aaguaaucauugaagaau

SEQ ID NO: 111492 - RNA, 19 nt, Artificial Sequence
  Synthetic
uaaguaaucauugaagaau

SEQ ID NO: 111493 - RNA, 20 nt, Artificial Sequence
  Synthetic
uuaaguaaucauugaagaau

SEQ ID NO: 111494 - RNA, 21 nt, Artificial Sequence
  Synthetic
cuuaaguaaucauugaagaau

SEQ ID NO: 111495 - RNA, 22 nt, Artificial Sequence
  Synthetic
ucuuaaguaaucauugaagaau

SEQ ID NO: 111496 - RNA, 24 nt, Artificial Sequence
  Synthetic
agucuuaaguaaucauugaagaau

SEQ ID NO: 111497 - RNA, 18 nt, Artificial Sequence
  Synthetic
auuucaugcucuaagaau

SEQ ID NO: 111498 - RNA, 19 nt, Artificial Sequence
  Synthetic
aauuucaugcucuaagaau

SEQ ID NO: 111499 - RNA, 20 nt, Artificial Sequence
  Synthetic
uaauuucaugcucuaagaau

SEQ ID NO: 111500 - RNA, 21 nt, Artificial Sequence
  Synthetic
auaauuucaugcucuaagaau

SEQ ID NO: 111501 - RNA, 23 nt, Artificial Sequence
  Synthetic
ugauaauuucaugcucuaagaau

SEQ ID NO: 111502 - RNA, 24 nt, Artificial Sequence
  Synthetic
uugauaauuucaugcucuaagaau

SEQ ID NO: 111503 - RNA, 21 nt, Artificial Sequence
  Synthetic
uacaacauuuucucacagaau

SEQ ID NO: 111504 - RNA, 22 nt, Artificial Sequence
  Synthetic
cuacaacauuuucucacagaau

SEQ ID NO: 111505 - RNA, 24 nt, Artificial Sequence
  Synthetic
agcuacaacauuuucucacagaau

SEQ ID NO: 111506 - RNA, 18 nt, Artificial Sequence
  Synthetic
uuuagugagucacagaau

SEQ ID NO: 111507 - RNA, 19 nt, Artificial Sequence
  Synthetic
uuuuagugagucacagaau

SEQ ID NO: 111508 - RNA, 20 nt, Artificial Sequence
  Synthetic
uuuuuagugagucacagaau

SEQ ID NO: 111509 - RNA, 21 nt, Artificial Sequence
  Synthetic
uuuuuuagugagucacagaau

SEQ ID NO: 111510 - RNA, 22 nt, Artificial Sequence
  Synthetic
uuuuuuuagugagucacagaau

SEQ ID NO: 111511 - RNA, 23 nt, Artificial Sequence
  Synthetic
uuuuuuuuagugagucacagaau

SEQ ID NO: 111512 - RNA, 24 nt, Artificial Sequence
  Synthetic
uuuuuuuuuagugagucacagaau

SEQ ID NO: 111513 - RNA, 18 nt, Artificial Sequence
  Synthetic
acuuugguugcccagaau

SEQ ID NO: 111514 - RNA, 19 nt, Artificial Sequence
  Synthetic
aacuuugguugcccagaau

SEQ ID NO: 111515 - RNA, 20 nt, Artificial Sequence
  Synthetic
uaacuuugguugcccagaau

SEQ ID NO: 111516 - RNA, 21 nt, Artificial Sequence
  Synthetic
uuaacuuugguugcccagaau

SEQ ID NO: 111517 - RNA, 23 nt, Artificial Sequence
  Synthetic
uguuaacuuugguugcccagaau

SEQ ID NO: 111518 - RNA, 24 nt, Artificial Sequence
  Synthetic
uuguuaacuuugguugcccagaau

SEQ ID NO: 111519 - RNA, 20 nt, Artificial Sequence
  Synthetic
aggccaaagccauccagaau

SEQ ID NO: 111520 - RNA, 21 nt, Artificial Sequence
  Synthetic
aaggccaaagccauccagaau

SEQ ID NO: 111521 - RNA, 22 nt, Artificial Sequence
  Synthetic
uaaggccaaagccauccagaau

SEQ ID NO: 111522 - RNA, 23 nt, Artificial Sequence
  Synthetic
auaaggccaaagccauccagaau

SEQ ID NO: 111523 - RNA, 24 nt, Artificial Sequence
  Synthetic
cauaaggccaaagccauccagaau

SEQ ID NO: 111524 - RNA, 18 nt, Artificial Sequence
  Synthetic
cuuuuaguauagcagaau

SEQ ID NO: 111525 - RNA, 19 nt, Artificial Sequence
  Synthetic
ucuuuuaguauagcagaau

SEQ ID NO: 111526 - RNA, 22 nt, Artificial Sequence
  Synthetic
uggucuuuuaguauagcagaau

SEQ ID NO: 111527 - RNA, 24 nt, Artificial Sequence
  Synthetic
aguggucuuuuaguauagcagaau

SEQ ID NO: 111528 - RNA, 18 nt, Artificial Sequence
  Synthetic
augaaaauauugcagaau

SEQ ID NO: 111529 - RNA, 19 nt, Artificial Sequence
  Synthetic
aaugaaaauauugcagaau

SEQ ID NO: 111530 - RNA, 21 nt, Artificial Sequence
  Synthetic
agaaugaaaauauugcagaau

SEQ ID NO: 111531 - RNA, 22 nt, Artificial Sequence
  Synthetic
uagaaugaaaauauugcagaau

SEQ ID NO: 111532 - RNA, 23 nt, Artificial Sequence
  Synthetic
cuagaaugaaaauauugcagaau

SEQ ID NO: 111533 - RNA, 24 nt, Artificial Sequence
  Synthetic
ucuagaaugaaaauauugcagaau

SEQ ID NO: 111534 - RNA, 18 nt, Artificial Sequence
  Synthetic
uaucauugggaucagaau

SEQ ID NO: 111535 - RNA, 19 nt, Artificial Sequence
  Synthetic
cuaucauugggaucagaau

SEQ ID NO: 111536 - RNA, 21 nt, Artificial Sequence
  Synthetic
ugcuaucauugggaucagaau

SEQ ID NO: 111537 - RNA, 22 nt, Artificial Sequence
  Synthetic
uugcuaucauugggaucagaau

SEQ ID NO: 111538 - RNA, 23 nt, Artificial Sequence
  Synthetic
uuugcuaucauugggaucagaau

SEQ ID NO: 111539 - RNA, 24 nt, Artificial Sequence
  Synthetic
uuuugcuaucauugggaucagaau

SEQ ID NO: 111540 - RNA, 18 nt, Artificial Sequence
  Synthetic
cauauugccccucagaau

SEQ ID NO: 111541 - RNA, 20 nt, Artificial Sequence
  Synthetic
agcauauugccccucagaau

SEQ ID NO: 111542 - RNA, 21 nt, Artificial Sequence
  Synthetic
aagcauauugccccucagaau

SEQ ID NO: 111543 - RNA, 22 nt, Artificial Sequence
  Synthetic
uaagcauauugccccucagaau

SEQ ID NO: 111544 - RNA, 24 nt, Artificial Sequence
  Synthetic
aguaagcauauugccccucagaau

SEQ ID NO: 111545 - RNA, 18 nt, Artificial Sequence
  Synthetic
aucacuguacuucagaau

SEQ ID NO: 111546 - RNA, 19 nt, Artificial Sequence
  Synthetic
aaucacuguacuucagaau

SEQ ID NO: 111547 - RNA, 20 nt, Artificial Sequence
  Synthetic
aaaucacuguacuucagaau

SEQ ID NO: 111548 - RNA, 21 nt, Artificial Sequence
  Synthetic
uaaaucacuguacuucagaau

SEQ ID NO: 111549 - RNA, 22 nt, Artificial Sequence
  Synthetic
auaaaucacuguacuucagaau

SEQ ID NO: 111550 - RNA, 23 nt, Artificial Sequence
  Synthetic
uauaaaucacuguacuucagaau

SEQ ID NO: 111551 - RNA, 24 nt, Artificial Sequence
  Synthetic
auauaaaucacuguacuucagaau

SEQ ID NO: 111552 - RNA, 18 nt, Artificial Sequence
  Synthetic
uggccaaaagcagagaau

SEQ ID NO: 111553 - RNA, 20 nt, Artificial Sequence
  Synthetic
aguggccaaaagcagagaau

SEQ ID NO: 111554 - RNA, 21 nt, Artificial Sequence
  Synthetic
aaguggccaaaagcagagaau

SEQ ID NO: 111555 - RNA, 22 nt, Artificial Sequence
  Synthetic
aaaguggccaaaagcagagaau

SEQ ID NO: 111556 - RNA, 23 nt, Artificial Sequence
  Synthetic
aaaaguggccaaaagcagagaau

SEQ ID NO: 111557 - RNA, 18 nt, Artificial Sequence
  Synthetic
aauuuuucaggagagaau

SEQ ID NO: 111558 - RNA, 20 nt, Artificial Sequence
  Synthetic
agaauuuuucaggagagaau

SEQ ID NO: 111559 - RNA, 21 nt, Artificial Sequence
  Synthetic
uagaauuuuucaggagagaau

SEQ ID NO: 111560 - RNA, 22 nt, Artificial Sequence
  Synthetic
auagaauuuuucaggagagaau

SEQ ID NO: 111561 - RNA, 23 nt, Artificial Sequence
  Synthetic
aauagaauuuuucaggagagaau

SEQ ID NO: 111562 - RNA, 24 nt, Artificial Sequence
  Synthetic
uaauagaauuuuucaggagagaau

SEQ ID NO: 111563 - RNA, 18 nt, Artificial Sequence
  Synthetic
ucaauauuacgugagaau

SEQ ID NO: 111564 - RNA, 20 nt, Artificial Sequence
  Synthetic
ugucaauauuacgugagaau

SEQ ID NO: 111565 - RNA, 22 nt, Artificial Sequence
  Synthetic
ugugucaauauuacgugagaau

SEQ ID NO: 111566 - RNA, 23 nt, Artificial Sequence
  Synthetic
cugugucaauauuacgugagaau

SEQ ID NO: 111567 - RNA, 24 nt, Artificial Sequence
  Synthetic
acugugucaauauuacgugagaau

SEQ ID NO: 111568 - RNA, 18 nt, Artificial Sequence
  Synthetic
caaaaguauggugagaau

SEQ ID NO: 111569 - RNA, 19 nt, Artificial Sequence
  Synthetic
ccaaaaguauggugagaau

SEQ ID NO: 111570 - RNA, 20 nt, Artificial Sequence
  Synthetic
cccaaaaguauggugagaau

SEQ ID NO: 111571 - RNA, 21 nt, Artificial Sequence
  Synthetic
ucccaaaaguauggugagaau

SEQ ID NO: 111572 - RNA, 22 nt, Artificial Sequence
  Synthetic
uucccaaaaguauggugagaau

SEQ ID NO: 111573 - RNA, 23 nt, Artificial Sequence
  Synthetic
cuucccaaaaguauggugagaau

SEQ ID NO: 111574 - RNA, 24 nt, Artificial Sequence
  Synthetic
ucuucccaaaaguauggugagaau

SEQ ID NO: 111575 - RNA, 18 nt, Artificial Sequence
  Synthetic
agaucaugaugauagaau

SEQ ID NO: 111576 - RNA, 19 nt, Artificial Sequence
  Synthetic
aagaucaugaugauagaau

SEQ ID NO: 111577 - RNA, 20 nt, Artificial Sequence
  Synthetic
uaagaucaugaugauagaau

SEQ ID NO: 111578 - RNA, 21 nt, Artificial Sequence
  Synthetic
uuaagaucaugaugauagaau

SEQ ID NO: 111579 - RNA, 23 nt, Artificial Sequence
  Synthetic
uguuaagaucaugaugauagaau

SEQ ID NO: 111580 - RNA, 19 nt, Artificial Sequence
  Synthetic
agaggacaacuucuagaau

SEQ ID NO: 111581 - RNA, 20 nt, Artificial Sequence
  Synthetic
aagaggacaacuucuagaau

SEQ ID NO: 111582 - RNA, 23 nt, Artificial Sequence
  Synthetic
aggaagaggacaacuucuagaau

SEQ ID NO: 111583 - RNA, 24 nt, Artificial Sequence
  Synthetic
aaggaagaggacaacuucuagaau

SEQ ID NO: 111584 - RNA, 18 nt, Artificial Sequence
  Synthetic
agcaucgcccccaggaau

SEQ ID NO: 111585 - RNA, 19 nt, Artificial Sequence
  Synthetic
aagcaucgcccccaggaau

SEQ ID NO: 111586 - RNA, 20 nt, Artificial Sequence
  Synthetic
caagcaucgcccccaggaau

SEQ ID NO: 111587 - RNA, 21 nt, Artificial Sequence
  Synthetic
ccaagcaucgcccccaggaau

SEQ ID NO: 111588 - RNA, 22 nt, Artificial Sequence
  Synthetic
uccaagcaucgcccccaggaau

SEQ ID NO: 111589 - RNA, 24 nt, Artificial Sequence
  Synthetic
uguccaagcaucgcccccaggaau

SEQ ID NO: 111590 - RNA, 18 nt, Artificial Sequence
  Synthetic
aggacccaagagaggaau

SEQ ID NO: 111591 - RNA, 19 nt, Artificial Sequence
  Synthetic
caggacccaagagaggaau

SEQ ID NO: 111592 - RNA, 20 nt, Artificial Sequence
  Synthetic
ucaggacccaagagaggaau

SEQ ID NO: 111593 - RNA, 21 nt, Artificial Sequence
  Synthetic
aucaggacccaagagaggaau

SEQ ID NO: 111594 - RNA, 24 nt, Artificial Sequence
  Synthetic
aggaucaggacccaagagaggaau

SEQ ID NO: 111595 - RNA, 18 nt, Artificial Sequence
  Synthetic
ugaggguuaacuaggaau

SEQ ID NO: 111596 - RNA, 19 nt, Artificial Sequence
  Synthetic
uugaggguuaacuaggaau

SEQ ID NO: 111597 - RNA, 20 nt, Artificial Sequence
  Synthetic
uuugaggguuaacuaggaau

SEQ ID NO: 111598 - RNA, 21 nt, Artificial Sequence
  Synthetic
cuuugaggguuaacuaggaau

SEQ ID NO: 111599 - RNA, 22 nt, Artificial Sequence
  Synthetic
acuuugaggguuaacuaggaau

SEQ ID NO: 111600 - RNA, 23 nt, Artificial Sequence
  Synthetic
aacuuugaggguuaacuaggaau

SEQ ID NO: 111601 - RNA, 24 nt, Artificial Sequence
  Synthetic
aaacuuugaggguuaacuaggaau

SEQ ID NO: 111602 - RNA, 18 nt, Artificial Sequence
  Synthetic
ucucuguuuacuaggaau

SEQ ID NO: 111603 - RNA, 19 nt, Artificial Sequence
  Synthetic
uucucuguuuacuaggaau

SEQ ID NO: 111604 - RNA, 20 nt, Artificial Sequence
  Synthetic
cuucucuguuuacuaggaau

SEQ ID NO: 111605 - RNA, 21 nt, Artificial Sequence
  Synthetic
ccuucucuguuuacuaggaau

SEQ ID NO: 111606 - RNA, 22 nt, Artificial Sequence
  Synthetic
cccuucucuguuuacuaggaau

SEQ ID NO: 111607 - RNA, 23 nt, Artificial Sequence
  Synthetic
ucccuucucuguuuacuaggaau

SEQ ID NO: 111608 - RNA, 24 nt, Artificial Sequence
  Synthetic
uucccuucucuguuuacuaggaau

SEQ ID NO: 111609 - RNA, 18 nt, Artificial Sequence
  Synthetic
ccaauaaauucuaggaau

SEQ ID NO: 111610 - RNA, 19 nt, Artificial Sequence
  Synthetic
accaauaaauucuaggaau

SEQ ID NO: 111611 - RNA, 20 nt, Artificial Sequence
  Synthetic
aaccaauaaauucuaggaau

SEQ ID NO: 111612 - RNA, 22 nt, Artificial Sequence
  Synthetic
agaaccaauaaauucuaggaau

SEQ ID NO: 111613 - RNA, 23 nt, Artificial Sequence
  Synthetic
aagaaccaauaaauucuaggaau

SEQ ID NO: 111614 - RNA, 24 nt, Artificial Sequence
  Synthetic
aaagaaccaauaaauucuaggaau

SEQ ID NO: 111615 - RNA, 21 nt, Artificial Sequence
  Synthetic
auaaugacuaauuguaggaau

SEQ ID NO: 111616 - RNA, 22 nt, Artificial Sequence
  Synthetic
uauaaugacuaauuguaggaau

SEQ ID NO: 111617 - RNA, 23 nt, Artificial Sequence
  Synthetic
auauaaugacuaauuguaggaau

SEQ ID NO: 111618 - RNA, 24 nt, Artificial Sequence
  Synthetic
uauauaaugacuaauuguaggaau

SEQ ID NO: 111619 - RNA, 20 nt, Artificial Sequence
  Synthetic
ugggagacaggcaggggaau

SEQ ID NO: 111620 - RNA, 21 nt, Artificial Sequence
  Synthetic
cugggagacaggcaggggaau

SEQ ID NO: 111621 - RNA, 22 nt, Artificial Sequence
  Synthetic
acugggagacaggcaggggaau

SEQ ID NO: 111622 - RNA, 24 nt, Artificial Sequence
  Synthetic
ugacugggagacaggcaggggaau

SEQ ID NO: 111623 - RNA, 19 nt, Artificial Sequence
  Synthetic
ugagaagacaauggggaau

SEQ ID NO: 111624 - RNA, 20 nt, Artificial Sequence
  Synthetic
augagaagacaauggggaau

SEQ ID NO: 111625 - RNA, 21 nt, Artificial Sequence
  Synthetic
aaugagaagacaauggggaau

SEQ ID NO: 111626 - RNA, 23 nt, Artificial Sequence
  Synthetic
agaaugagaagacaauggggaau

SEQ ID NO: 111627 - RNA, 24 nt, Artificial Sequence
  Synthetic
uagaaugagaagacaauggggaau

SEQ ID NO: 111628 - RNA, 18 nt, Artificial Sequence
  Synthetic
uuacauacauuugggaau

SEQ ID NO: 111629 - RNA, 20 nt, Artificial Sequence
  Synthetic
aguuacauacauuugggaau

SEQ ID NO: 111630 - RNA, 21 nt, Artificial Sequence
  Synthetic
caguuacauacauuugggaau

SEQ ID NO: 111631 - RNA, 22 nt, Artificial Sequence
  Synthetic
acaguuacauacauuugggaau

SEQ ID NO: 111632 - RNA, 23 nt, Artificial Sequence
  Synthetic
uacaguuacauacauuugggaau

SEQ ID NO: 111633 - RNA, 18 nt, Artificial Sequence
  Synthetic
uugcuuguaugauggaau

SEQ ID NO: 111634 - RNA, 19 nt, Artificial Sequence
  Synthetic
uuugcuuguaugauggaau

SEQ ID NO: 111635 - RNA, 23 nt, Artificial Sequence
  Synthetic
uggguuugcuuguaugauggaau

SEQ ID NO: 111636 - RNA, 18 nt, Artificial Sequence
  Synthetic
uccaaagaaguauggaau

SEQ ID NO: 111637 - RNA, 19 nt, Artificial Sequence
  Synthetic
cuccaaagaaguauggaau

SEQ ID NO: 111638 - RNA, 20 nt, Artificial Sequence
  Synthetic
acuccaaagaaguauggaau

SEQ ID NO: 111639 - RNA, 21 nt, Artificial Sequence
  Synthetic
cacuccaaagaaguauggaau

SEQ ID NO: 111640 - RNA, 22 nt, Artificial Sequence
  Synthetic
acacuccaaagaaguauggaau

SEQ ID NO: 111641 - RNA, 23 nt, Artificial Sequence
  Synthetic
uacacuccaaagaaguauggaau

SEQ ID NO: 111642 - RNA, 24 nt, Artificial Sequence
  Synthetic
uuacacuccaaagaaguauggaau

SEQ ID NO: 111643 - RNA, 21 nt, Artificial Sequence
  Synthetic
agaaaagauuuguuauggaau

SEQ ID NO: 111644 - RNA, 22 nt, Artificial Sequence
  Synthetic
aagaaaagauuuguuauggaau

SEQ ID NO: 111645 - RNA, 23 nt, Artificial Sequence
  Synthetic
aaagaaaagauuuguuauggaau

SEQ ID NO: 111646 - RNA, 24 nt, Artificial Sequence
  Synthetic
aaaagaaaagauuuguuauggaau

SEQ ID NO: 111647 - RNA, 18 nt, Artificial Sequence
  Synthetic
ucauguaucugcuggaau

SEQ ID NO: 111648 - RNA, 19 nt, Artificial Sequence
  Synthetic
aucauguaucugcuggaau

SEQ ID NO: 111649 - RNA, 20 nt, Artificial Sequence
  Synthetic
aaucauguaucugcuggaau

SEQ ID NO: 111650 - RNA, 22 nt, Artificial Sequence
  Synthetic
ugaaucauguaucugcuggaau

SEQ ID NO: 111651 - RNA, 23 nt, Artificial Sequence
  Synthetic
uugaaucauguaucugcuggaau

SEQ ID NO: 111652 - RNA, 24 nt, Artificial Sequence
  Synthetic
uuugaaucauguaucugcuggaau

SEQ ID NO: 111653 - RNA, 18 nt, Artificial Sequence
  Synthetic
uacuuaacucucuggaau

SEQ ID NO: 111654 - RNA, 19 nt, Artificial Sequence
  Synthetic
uuacuuaacucucuggaau

SEQ ID NO: 111655 - RNA, 21 nt, Artificial Sequence
  Synthetic
aguuacuuaacucucuggaau

SEQ ID NO: 111656 - RNA, 22 nt, Artificial Sequence
  Synthetic
aaguuacuuaacucucuggaau

SEQ ID NO: 111657 - RNA, 23 nt, Artificial Sequence
  Synthetic
aaaguuacuuaacucucuggaau

SEQ ID NO: 111658 - RNA, 19 nt, Artificial Sequence
  Synthetic
uguauguuuccaguggaau

SEQ ID NO: 111659 - RNA, 20 nt, Artificial Sequence
  Synthetic
auguauguuuccaguggaau

SEQ ID NO: 111660 - RNA, 21 nt, Artificial Sequence
  Synthetic
uauguauguuuccaguggaau

SEQ ID NO: 111661 - RNA, 22 nt, Artificial Sequence
  Synthetic
cuauguauguuuccaguggaau

SEQ ID NO: 111662 - RNA, 23 nt, Artificial Sequence
  Synthetic
acuauguauguuuccaguggaau

SEQ ID NO: 111663 - RNA, 24 nt, Artificial Sequence
  Synthetic
aacuauguauguuuccaguggaau

SEQ ID NO: 111664 - RNA, 18 nt, Artificial Sequence
  Synthetic
uuacauccuucuuggaau

SEQ ID NO: 111665 - RNA, 19 nt, Artificial Sequence
  Synthetic
cuuacauccuucuuggaau

SEQ ID NO: 111666 - RNA, 20 nt, Artificial Sequence
  Synthetic
ucuuacauccuucuuggaau

SEQ ID NO: 111667 - RNA, 21 nt, Artificial Sequence
  Synthetic
uucuuacauccuucuuggaau

SEQ ID NO: 111668 - RNA, 22 nt, Artificial Sequence
  Synthetic
cuucuuacauccuucuuggaau

SEQ ID NO: 111669 - RNA, 23 nt, Artificial Sequence
  Synthetic
ccuucuuacauccuucuuggaau

SEQ ID NO: 111670 - RNA, 18 nt, Artificial Sequence
  Synthetic
cauuaauuggaaaugaau

SEQ ID NO: 111671 - RNA, 19 nt, Artificial Sequence
  Synthetic
acauuaauuggaaaugaau

SEQ ID NO: 111672 - RNA, 21 nt, Artificial Sequence
  Synthetic
ugacauuaauuggaaaugaau

SEQ ID NO: 111673 - RNA, 22 nt, Artificial Sequence
  Synthetic
cugacauuaauuggaaaugaau

SEQ ID NO: 111674 - RNA, 24 nt, Artificial Sequence
  Synthetic
agcugacauuaauuggaaaugaau

SEQ ID NO: 111675 - RNA, 18 nt, Artificial Sequence
  Synthetic
cauuuucaguaaaugaau

SEQ ID NO: 111676 - RNA, 19 nt, Artificial Sequence
  Synthetic
ccauuuucaguaaaugaau

SEQ ID NO: 111677 - RNA, 20 nt, Artificial Sequence
  Synthetic
cccauuuucaguaaaugaau

SEQ ID NO: 111678 - RNA, 21 nt, Artificial Sequence
  Synthetic
ucccauuuucaguaaaugaau

SEQ ID NO: 111679 - RNA, 22 nt, Artificial Sequence
  Synthetic
uucccauuuucaguaaaugaau

SEQ ID NO: 111680 - RNA, 24 nt, Artificial Sequence
  Synthetic
uguucccauuuucaguaaaugaau

SEQ ID NO: 111681 - RNA, 21 nt, Artificial Sequence
  Synthetic
uucuagcuuuguugaaugaau

SEQ ID NO: 111682 - RNA, 22 nt, Artificial Sequence
  Synthetic
uuucuagcuuuguugaaugaau

SEQ ID NO: 111683 - RNA, 23 nt, Artificial Sequence
  Synthetic
auuucuagcuuuguugaaugaau

SEQ ID NO: 111684 - RNA, 24 nt, Artificial Sequence
  Synthetic
uauuucuagcuuuguugaaugaau

SEQ ID NO: 111685 - RNA, 18 nt, Artificial Sequence
  Synthetic
ucaaauuuugacaugaau

SEQ ID NO: 111686 - RNA, 19 nt, Artificial Sequence
  Synthetic
uucaaauuuugacaugaau

SEQ ID NO: 111687 - RNA, 20 nt, Artificial Sequence
  Synthetic
uuucaaauuuugacaugaau

SEQ ID NO: 111688 - RNA, 21 nt, Artificial Sequence
  Synthetic
uuuucaaauuuugacaugaau

SEQ ID NO: 111689 - RNA, 22 nt, Artificial Sequence
  Synthetic
cuuuucaaauuuugacaugaau

SEQ ID NO: 111690 - RNA, 24 nt, Artificial Sequence
  Synthetic
cgcuuuucaaauuuugacaugaau

SEQ ID NO: 111691 - RNA, 18 nt, Artificial Sequence
  Synthetic
auguuuguuaucaugaau

SEQ ID NO: 111692 - RNA, 19 nt, Artificial Sequence
  Synthetic
uauguuuguuaucaugaau

SEQ ID NO: 111693 - RNA, 20 nt, Artificial Sequence
  Synthetic
auauguuuguuaucaugaau

SEQ ID NO: 111694 - RNA, 21 nt, Artificial Sequence
  Synthetic
aauauguuuguuaucaugaau

SEQ ID NO: 111695 - RNA, 22 nt, Artificial Sequence
  Synthetic
uaauauguuuguuaucaugaau

SEQ ID NO: 111696 - RNA, 23 nt, Artificial Sequence
  Synthetic
auaauauguuuguuaucaugaau

SEQ ID NO: 111697 - RNA, 24 nt, Artificial Sequence
  Synthetic
uauaauauguuuguuaucaugaau

SEQ ID NO: 111698 - RNA, 21 nt, Artificial Sequence
  Synthetic
caaaagaaacaagcgaugaau

SEQ ID NO: 111699 - RNA, 22 nt, Artificial Sequence
  Synthetic
acaaaagaaacaagcgaugaau

SEQ ID NO: 111700 - RNA, 23 nt, Artificial Sequence
  Synthetic
aacaaaagaaacaagcgaugaau

SEQ ID NO: 111701 - RNA, 24 nt, Artificial Sequence
  Synthetic
aaacaaaagaaacaagcgaugaau

SEQ ID NO: 111702 - RNA, 19 nt, Artificial Sequence
  Synthetic
agaaagacaugggaugaau

SEQ ID NO: 111703 - RNA, 20 nt, Artificial Sequence
  Synthetic
aagaaagacaugggaugaau

SEQ ID NO: 111704 - RNA, 21 nt, Artificial Sequence
  Synthetic
uaagaaagacaugggaugaau

SEQ ID NO: 111705 - RNA, 22 nt, Artificial Sequence
  Synthetic
uuaagaaagacaugggaugaau

SEQ ID NO: 111706 - RNA, 23 nt, Artificial Sequence
  Synthetic
uuuaagaaagacaugggaugaau

SEQ ID NO: 111707 - RNA, 24 nt, Artificial Sequence
  Synthetic
cuuuaagaaagacaugggaugaau

SEQ ID NO: 111708 - RNA, 18 nt, Artificial Sequence
  Synthetic
uuuuucaucuggaugaau

SEQ ID NO: 111709 - RNA, 19 nt, Artificial Sequence
  Synthetic
uuuuuucaucuggaugaau

SEQ ID NO: 111710 - RNA, 20 nt, Artificial Sequence
  Synthetic
uuuuuuucaucuggaugaau

SEQ ID NO: 111711 - RNA, 21 nt, Artificial Sequence
  Synthetic
auuuuuuucaucuggaugaau

SEQ ID NO: 111712 - RNA, 22 nt, Artificial Sequence
  Synthetic
uauuuuuuucaucuggaugaau

SEQ ID NO: 111713 - RNA, 24 nt, Artificial Sequence
  Synthetic
uguauuuuuuucaucuggaugaau

SEQ ID NO: 111714 - RNA, 21 nt, Artificial Sequence
  Synthetic
ucuguauacaaugugaugaau

SEQ ID NO: 111715 - RNA, 22 nt, Artificial Sequence
  Synthetic
aucuguauacaaugugaugaau

SEQ ID NO: 111716 - RNA, 23 nt, Artificial Sequence
  Synthetic
caucuguauacaaugugaugaau

SEQ ID NO: 111717 - RNA, 18 nt, Artificial Sequence
  Synthetic
uguuauuauuauaugaau

SEQ ID NO: 111718 - RNA, 19 nt, Artificial Sequence
  Synthetic
cuguuauuauuauaugaau

SEQ ID NO: 111719 - RNA, 20 nt, Artificial Sequence
  Synthetic
ucuguuauuauuauaugaau

SEQ ID NO: 111720 - RNA, 21 nt, Artificial Sequence
  Synthetic
uucuguuauuauuauaugaau

SEQ ID NO: 111721 - RNA, 22 nt, Artificial Sequence
  Synthetic
uuucuguuauuauuauaugaau

SEQ ID NO: 111722 - RNA, 23 nt, Artificial Sequence
  Synthetic
uuuucuguuauuauuauaugaau

SEQ ID NO: 111723 - RNA, 18 nt, Artificial Sequence
  Synthetic
aguguucugauuaugaau

SEQ ID NO: 111724 - RNA, 19 nt, Artificial Sequence
  Synthetic
uaguguucugauuaugaau

SEQ ID NO: 111725 - RNA, 20 nt, Artificial Sequence
  Synthetic
cuaguguucugauuaugaau

SEQ ID NO: 111726 - RNA, 22 nt, Artificial Sequence
  Synthetic
agcuaguguucugauuaugaau

SEQ ID NO: 111727 - RNA, 23 nt, Artificial Sequence
  Synthetic
cagcuaguguucugauuaugaau

SEQ ID NO: 111728 - RNA, 18 nt, Artificial Sequence
  Synthetic
auucuaagucuacugaau

SEQ ID NO: 111729 - RNA, 19 nt, Artificial Sequence
  Synthetic
cauucuaagucuacugaau

SEQ ID NO: 111730 - RNA, 20 nt, Artificial Sequence
  Synthetic
ccauucuaagucuacugaau

SEQ ID NO: 111731 - RNA, 21 nt, Artificial Sequence
  Synthetic
uccauucuaagucuacugaau

SEQ ID NO: 111732 - RNA, 22 nt, Artificial Sequence
  Synthetic
uuccauucuaagucuacugaau

SEQ ID NO: 111733 - RNA, 23 nt, Artificial Sequence
  Synthetic
auuccauucuaagucuacugaau

SEQ ID NO: 111734 - RNA, 24 nt, Artificial Sequence
  Synthetic
aauuccauucuaagucuacugaau

SEQ ID NO: 111735 - RNA, 21 nt, Artificial Sequence
  Synthetic
ucuacccuaaacuuacugaau

SEQ ID NO: 111736 - RNA, 22 nt, Artificial Sequence
  Synthetic
uucuacccuaaacuuacugaau

SEQ ID NO: 111737 - RNA, 23 nt, Artificial Sequence
  Synthetic
uuucuacccuaaacuuacugaau

SEQ ID NO: 111738 - RNA, 24 nt, Artificial Sequence
  Synthetic
uuuucuacccuaaacuuacugaau

SEQ ID NO: 111739 - RNA, 18 nt, Artificial Sequence
  Synthetic
uugcaggauuuccugaau

SEQ ID NO: 111740 - RNA, 19 nt, Artificial Sequence
  Synthetic
uuugcaggauuuccugaau

SEQ ID NO: 111741 - RNA, 20 nt, Artificial Sequence
  Synthetic
auuugcaggauuuccugaau

SEQ ID NO: 111742 - RNA, 21 nt, Artificial Sequence
  Synthetic
uauuugcaggauuuccugaau

SEQ ID NO: 111743 - RNA, 22 nt, Artificial Sequence
  Synthetic
cuauuugcaggauuuccugaau

SEQ ID NO: 111744 - RNA, 24 nt, Artificial Sequence
  Synthetic
ugcuauuugcaggauuuccugaau

SEQ ID NO: 111745 - RNA, 18 nt, Artificial Sequence
  Synthetic
acaauaacauagcugaau

SEQ ID NO: 111746 - RNA, 20 nt, Artificial Sequence
  Synthetic
agacaauaacauagcugaau

SEQ ID NO: 111747 - RNA, 21 nt, Artificial Sequence
  Synthetic
aagacaauaacauagcugaau

SEQ ID NO: 111748 - RNA, 22 nt, Artificial Sequence
  Synthetic
caagacaauaacauagcugaau

SEQ ID NO: 111749 - RNA, 24 nt, Artificial Sequence
  Synthetic
ugcaagacaauaacauagcugaau

SEQ ID NO: 111750 - RNA, 19 nt, Artificial Sequence
  Synthetic
aguaagaugcgggcugaau

SEQ ID NO: 111751 - RNA, 21 nt, Artificial Sequence
  Synthetic
agaguaagaugcgggcugaau

SEQ ID NO: 111752 - RNA, 22 nt, Artificial Sequence
  Synthetic
cagaguaagaugcgggcugaau

SEQ ID NO: 111753 - RNA, 23 nt, Artificial Sequence
  Synthetic
ccagaguaagaugcgggcugaau

SEQ ID NO: 111754 - RNA, 21 nt, Artificial Sequence
  Synthetic
aacagaugcguuuggcugaau

SEQ ID NO: 111755 - RNA, 22 nt, Artificial Sequence
  Synthetic
aaacagaugcguuuggcugaau

SEQ ID NO: 111756 - RNA, 24 nt, Artificial Sequence
  Synthetic
ugaaacagaugcguuuggcugaau

SEQ ID NO: 111757 - RNA, 18 nt, Artificial Sequence
  Synthetic
cuucaguuuaaucugaau

SEQ ID NO: 111758 - RNA, 19 nt, Artificial Sequence
  Synthetic
ucuucaguuuaaucugaau

SEQ ID NO: 111759 - RNA, 20 nt, Artificial Sequence
  Synthetic
aucuucaguuuaaucugaau

SEQ ID NO: 111760 - RNA, 21 nt, Artificial Sequence
  Synthetic
aaucuucaguuuaaucugaau

SEQ ID NO: 111761 - RNA, 22 nt, Artificial Sequence
  Synthetic
aaaucuucaguuuaaucugaau

SEQ ID NO: 111762 - RNA, 23 nt, Artificial Sequence
  Synthetic
uaaaucuucaguuuaaucugaau

SEQ ID NO: 111763 - RNA, 24 nt, Artificial Sequence
  Synthetic
uuaaaucuucaguuuaaucugaau

SEQ ID NO: 111764 - RNA, 18 nt, Artificial Sequence
  Synthetic
ucuaaguuuauucugaau

SEQ ID NO: 111765 - RNA, 19 nt, Artificial Sequence
  Synthetic
aucuaaguuuauucugaau

SEQ ID NO: 111766 - RNA, 20 nt, Artificial Sequence
  Synthetic
caucuaaguuuauucugaau

SEQ ID NO: 111767 - RNA, 21 nt, Artificial Sequence
  Synthetic
acaucuaaguuuauucugaau

SEQ ID NO: 111768 - RNA, 22 nt, Artificial Sequence
  Synthetic
aacaucuaaguuuauucugaau

SEQ ID NO: 111769 - RNA, 23 nt, Artificial Sequence
  Synthetic
uaacaucuaaguuuauucugaau

SEQ ID NO: 111770 - RNA, 24 nt, Artificial Sequence
  Synthetic
auaacaucuaaguuuauucugaau

SEQ ID NO: 111771 - RNA, 20 nt, Artificial Sequence
  Synthetic
uggaaccuuguguagugaau

SEQ ID NO: 111772 - RNA, 21 nt, Artificial Sequence
  Synthetic
uuggaaccuuguguagugaau

SEQ ID NO: 111773 - RNA, 22 nt, Artificial Sequence
  Synthetic
uuuggaaccuuguguagugaau

SEQ ID NO: 111774 - RNA, 23 nt, Artificial Sequence
  Synthetic
cuuuggaaccuuguguagugaau

SEQ ID NO: 111775 - RNA, 24 nt, Artificial Sequence
  Synthetic
ucuuuggaaccuuguguagugaau

SEQ ID NO: 111776 - RNA, 21 nt, Artificial Sequence
  Synthetic
aaaaaagaaaauaacgugaau

SEQ ID NO: 111777 - RNA, 22 nt, Artificial Sequence
  Synthetic
aaaaaaagaaaauaacgugaau

SEQ ID NO: 111778 - RNA, 18 nt, Artificial Sequence
  Synthetic
uugaaaauucaggugaau

SEQ ID NO: 111779 - RNA, 19 nt, Artificial Sequence
  Synthetic
uuugaaaauucaggugaau

SEQ ID NO: 111780 - RNA, 20 nt, Artificial Sequence
  Synthetic
uuuugaaaauucaggugaau

SEQ ID NO: 111781 - RNA, 21 nt, Artificial Sequence
  Synthetic
auuuugaaaauucaggugaau

SEQ ID NO: 111782 - RNA, 23 nt, Artificial Sequence
  Synthetic
agauuuugaaaauucaggugaau

SEQ ID NO: 111783 - RNA, 24 nt, Artificial Sequence
  Synthetic
aagauuuugaaaauucaggugaau

SEQ ID NO: 111784 - RNA, 18 nt, Artificial Sequence
  Synthetic
caaaagcugauggugaau

SEQ ID NO: 111785 - RNA, 19 nt, Artificial Sequence
  Synthetic
acaaaagcugauggugaau

SEQ ID NO: 111786 - RNA, 20 nt, Artificial Sequence
  Synthetic
uacaaaagcugauggugaau

SEQ ID NO: 111787 - RNA, 21 nt, Artificial Sequence
  Synthetic
auacaaaagcugauggugaau

SEQ ID NO: 111788 - RNA, 22 nt, Artificial Sequence
  Synthetic
aauacaaaagcugauggugaau

SEQ ID NO: 111789 - RNA, 24 nt, Artificial Sequence
  Synthetic
agaauacaaaagcugauggugaau

SEQ ID NO: 111790 - RNA, 18 nt, Artificial Sequence
  Synthetic
aauaguaagagugugaau

SEQ ID NO: 111791 - RNA, 19 nt, Artificial Sequence
  Synthetic
aaauaguaagagugugaau

SEQ ID NO: 111792 - RNA, 20 nt, Artificial Sequence
  Synthetic
aaaauaguaagagugugaau

SEQ ID NO: 111793 - RNA, 21 nt, Artificial Sequence
  Synthetic
aaaaauaguaagagugugaau

SEQ ID NO: 111794 - RNA, 22 nt, Artificial Sequence
  Synthetic
aaaaaauaguaagagugugaau

SEQ ID NO: 111795 - RNA, 23 nt, Artificial Sequence
  Synthetic
uaaaaaauaguaagagugugaau

SEQ ID NO: 111796 - RNA, 18 nt, Artificial Sequence
  Synthetic
cauaacuauauugugaau

SEQ ID NO: 111797 - RNA, 19 nt, Artificial Sequence
  Synthetic
ccauaacuauauugugaau

SEQ ID NO: 111798 - RNA, 20 nt, Artificial Sequence
  Synthetic
uccauaacuauauugugaau

SEQ ID NO: 111799 - RNA, 21 nt, Artificial Sequence
  Synthetic
auccauaacuauauugugaau

SEQ ID NO: 111800 - RNA, 22 nt, Artificial Sequence
  Synthetic
uauccauaacuauauugugaau

SEQ ID NO: 111801 - RNA, 23 nt, Artificial Sequence
  Synthetic
auauccauaacuauauugugaau

SEQ ID NO: 111802 - RNA, 24 nt, Artificial Sequence
  Synthetic
cauauccauaacuauauugugaau

SEQ ID NO: 111803 - RNA, 19 nt, Artificial Sequence
  Synthetic
agacaguaguauugugaau

SEQ ID NO: 111804 - RNA, 21 nt, Artificial Sequence
  Synthetic
agagacaguaguauugugaau

SEQ ID NO: 111805 - RNA, 22 nt, Artificial Sequence
  Synthetic
uagagacaguaguauugugaau

SEQ ID NO: 111806 - RNA, 19 nt, Artificial Sequence
  Synthetic
ugauggugccaaauugaau

SEQ ID NO: 111807 - RNA, 20 nt, Artificial Sequence
  Synthetic
augauggugccaaauugaau

SEQ ID NO: 111808 - RNA, 22 nt, Artificial Sequence
  Synthetic
agaugauggugccaaauugaau

SEQ ID NO: 111809 - RNA, 23 nt, Artificial Sequence
  Synthetic
uagaugauggugccaaauugaau

SEQ ID NO: 111810 - RNA, 24 nt, Artificial Sequence
  Synthetic
auagaugauggugccaaauugaau

SEQ ID NO: 111811 - RNA, 18 nt, Artificial Sequence
  Synthetic
agaucauaacgauugaau

SEQ ID NO: 111812 - RNA, 21 nt, Artificial Sequence
  Synthetic
aggagaucauaacgauugaau

SEQ ID NO: 111813 - RNA, 22 nt, Artificial Sequence
  Synthetic
aaggagaucauaacgauugaau

SEQ ID NO: 111814 - RNA, 23 nt, Artificial Sequence
  Synthetic
aaaggagaucauaacgauugaau

SEQ ID NO: 111815 - RNA, 24 nt, Artificial Sequence
  Synthetic
uaaaggagaucauaacgauugaau

SEQ ID NO: 111816 - RNA, 18 nt, Artificial Sequence
  Synthetic
uuccaaggggacuugaau

SEQ ID NO: 111817 - RNA, 19 nt, Artificial Sequence
  Synthetic
auuccaaggggacuugaau

SEQ ID NO: 111818 - RNA, 20 nt, Artificial Sequence
  Synthetic
cauuccaaggggacuugaau

SEQ ID NO: 111819 - RNA, 21 nt, Artificial Sequence
  Synthetic
ucauuccaaggggacuugaau

SEQ ID NO: 111820 - RNA, 22 nt, Artificial Sequence
  Synthetic
uucauuccaaggggacuugaau

SEQ ID NO: 111821 - RNA, 23 nt, Artificial Sequence
  Synthetic
auucauuccaaggggacuugaau

SEQ ID NO: 111822 - RNA, 24 nt, Artificial Sequence
  Synthetic
cauucauuccaaggggacuugaau

SEQ ID NO: 111823 - RNA, 19 nt, Artificial Sequence
  Synthetic
agggaguuacuauuugaau

SEQ ID NO: 111824 - RNA, 20 nt, Artificial Sequence
  Synthetic
aagggaguuacuauuugaau

SEQ ID NO: 111825 - RNA, 21 nt, Artificial Sequence
  Synthetic
uaagggaguuacuauuugaau

SEQ ID NO: 111826 - RNA, 22 nt, Artificial Sequence
  Synthetic
cuaagggaguuacuauuugaau

SEQ ID NO: 111827 - RNA, 23 nt, Artificial Sequence
  Synthetic
ucuaagggaguuacuauuugaau

SEQ ID NO: 111828 - RNA, 24 nt, Artificial Sequence
  Synthetic
aucuaagggaguuacuauuugaau

SEQ ID NO: 111829 - RNA, 18 nt, Artificial Sequence
  Synthetic
ucaugcaacacuuugaau

SEQ ID NO: 111830 - RNA, 20 nt, Artificial Sequence
  Synthetic
ugucaugcaacacuuugaau

SEQ ID NO: 111831 - RNA, 21 nt, Artificial Sequence
  Synthetic
uugucaugcaacacuuugaau

SEQ ID NO: 111832 - RNA, 23 nt, Artificial Sequence
  Synthetic
cguugucaugcaacacuuugaau

SEQ ID NO: 111833 - RNA, 24 nt, Artificial Sequence
  Synthetic
ccguugucaugcaacacuuugaau

SEQ ID NO: 111834 - RNA, 18 nt, Artificial Sequence
  Synthetic
aacucugcacuuuugaau

SEQ ID NO: 111835 - RNA, 20 nt, Artificial Sequence
  Synthetic
ugaacucugcacuuuugaau

SEQ ID NO: 111836 - RNA, 22 nt, Artificial Sequence
  Synthetic
ugugaacucugcacuuuugaau

SEQ ID NO: 111837 - RNA, 23 nt, Artificial Sequence
  Synthetic
cugugaacucugcacuuuugaau

SEQ ID NO: 111838 - RNA, 24 nt, Artificial Sequence
  Synthetic
acugugaacucugcacuuuugaau

SEQ ID NO: 111839 - RNA, 18 nt, Artificial Sequence
  Synthetic
aaagaguugcuuuugaau

SEQ ID NO: 111840 - RNA, 19 nt, Artificial Sequence
  Synthetic
caaagaguugcuuuugaau

SEQ ID NO: 111841 - RNA, 20 nt, Artificial Sequence
  Synthetic
ucaaagaguugcuuuugaau

SEQ ID NO: 111842 - RNA, 22 nt, Artificial Sequence
  Synthetic
agucaaagaguugcuuuugaau

SEQ ID NO: 111843 - RNA, 21 nt, Artificial Sequence
  Synthetic
caauacuuuugaaaaaauaau

SEQ ID NO: 111844 - RNA, 22 nt, Artificial Sequence
  Synthetic
acaauacuuuugaaaaaauaau

SEQ ID NO: 111845 - RNA, 23 nt, Artificial Sequence
  Synthetic
cacaauacuuuugaaaaaauaau

SEQ ID NO: 111846 - RNA, 24 nt, Artificial Sequence
  Synthetic
ccacaauacuuuugaaaaaauaau

SEQ ID NO: 111847 - RNA, 21 nt, Artificial Sequence
  Synthetic
agaaucaacaauaaaaauaau

SEQ ID NO: 111848 - RNA, 22 nt, Artificial Sequence
  Synthetic
aagaaucaacaauaaaaauaau

SEQ ID NO: 111849 - RNA, 23 nt, Artificial Sequence
  Synthetic
uaagaaucaacaauaaaaauaau

SEQ ID NO: 111850 - RNA, 24 nt, Artificial Sequence
  Synthetic
auaagaaucaacaauaaaaauaau

SEQ ID NO: 111851 - RNA, 18 nt, Artificial Sequence
  Synthetic
agggcaucagaaaauaau

SEQ ID NO: 111852 - RNA, 19 nt, Artificial Sequence
  Synthetic
aagggcaucagaaaauaau

SEQ ID NO: 111853 - RNA, 21 nt, Artificial Sequence
  Synthetic
ugaagggcaucagaaaauaau

SEQ ID NO: 111854 - RNA, 22 nt, Artificial Sequence
  Synthetic
uugaagggcaucagaaaauaau

SEQ ID NO: 111855 - RNA, 23 nt, Artificial Sequence
  Synthetic
uuugaagggcaucagaaaauaau

SEQ ID NO: 111856 - RNA, 24 nt, Artificial Sequence
  Synthetic
cuuugaagggcaucagaaaauaau

SEQ ID NO: 111857 - RNA, 18 nt, Artificial Sequence
  Synthetic
uacuaucucuaaaauaau

SEQ ID NO: 111858 - RNA, 19 nt, Artificial Sequence
  Synthetic
uuacuaucucuaaaauaau

SEQ ID NO: 111859 - RNA, 20 nt, Artificial Sequence
  Synthetic
uuuacuaucucuaaaauaau

SEQ ID NO: 111860 - RNA, 21 nt, Artificial Sequence
  Synthetic
auuuacuaucucuaaaauaau

SEQ ID NO: 111861 - RNA, 22 nt, Artificial Sequence
  Synthetic
cauuuacuaucucuaaaauaau

SEQ ID NO: 111862 - RNA, 23 nt, Artificial Sequence
  Synthetic
ucauuuacuaucucuaaaauaau

SEQ ID NO: 111863 - RNA, 24 nt, Artificial Sequence
  Synthetic
uucauuuacuaucucuaaaauaau

SEQ ID NO: 111864 - RNA, 19 nt, Artificial Sequence
  Synthetic
uguuuacauaagaaauaau

SEQ ID NO: 111865 - RNA, 20 nt, Artificial Sequence
  Synthetic
uuguuuacauaagaaauaau

SEQ ID NO: 111866 - RNA, 21 nt, Artificial Sequence
  Synthetic
auuguuuacauaagaaauaau

SEQ ID NO: 111867 - RNA, 22 nt, Artificial Sequence
  Synthetic
cauuguuuacauaagaaauaau

SEQ ID NO: 111868 - RNA, 23 nt, Artificial Sequence
  Synthetic
ccauuguuuacauaagaaauaau

SEQ ID NO: 111869 - RNA, 24 nt, Artificial Sequence
  Synthetic
uccauuguuuacauaagaaauaau

SEQ ID NO: 111870 - RNA, 21 nt, Artificial Sequence
  Synthetic
ucaaaugaaaauggaaauaau

SEQ ID NO: 111871 - RNA, 22 nt, Artificial Sequence
  Synthetic
cucaaaugaaaauggaaauaau

SEQ ID NO: 111872 - RNA, 23 nt, Artificial Sequence
  Synthetic
ucucaaaugaaaauggaaauaau

SEQ ID NO: 111873 - RNA, 24 nt, Artificial Sequence
  Synthetic
uucucaaaugaaaauggaaauaau

SEQ ID NO: 111874 - RNA, 18 nt, Artificial Sequence
  Synthetic
ucuuggccaguaaauaau

SEQ ID NO: 111875 - RNA, 19 nt, Artificial Sequence
  Synthetic
aucuuggccaguaaauaau

SEQ ID NO: 111876 - RNA, 20 nt, Artificial Sequence
  Synthetic
aaucuuggccaguaaauaau

SEQ ID NO: 111877 - RNA, 21 nt, Artificial Sequence
  Synthetic
aaaucuuggccaguaaauaau

SEQ ID NO: 111878 - RNA, 24 nt, Artificial Sequence
  Synthetic
uggaaaucuuggccaguaaauaau

SEQ ID NO: 111879 - RNA, 19 nt, Artificial Sequence
  Synthetic
ugacuuuaaagacaauaau

SEQ ID NO: 111880 - RNA, 20 nt, Artificial Sequence
  Synthetic
uugacuuuaaagacaauaau

SEQ ID NO: 111881 - RNA, 21 nt, Artificial Sequence
  Synthetic
uuugacuuuaaagacaauaau

SEQ ID NO: 111882 - RNA, 22 nt, Artificial Sequence
  Synthetic
cuuugacuuuaaagacaauaau

SEQ ID NO: 111883 - RNA, 23 nt, Artificial Sequence
  Synthetic
ccuuugacuuuaaagacaauaau

SEQ ID NO: 111884 - RNA, 24 nt, Artificial Sequence
  Synthetic
uccuuugacuuuaaagacaauaau

SEQ ID NO: 111885 - RNA, 18 nt, Artificial Sequence
  Synthetic
acaacuacauacaauaau

SEQ ID NO: 111886 - RNA, 19 nt, Artificial Sequence
  Synthetic
cacaacuacauacaauaau

SEQ ID NO: 111887 - RNA, 20 nt, Artificial Sequence
  Synthetic
ccacaacuacauacaauaau

SEQ ID NO: 111888 - RNA, 21 nt, Artificial Sequence
  Synthetic
uccacaacuacauacaauaau

SEQ ID NO: 111889 - RNA, 22 nt, Artificial Sequence
  Synthetic
auccacaacuacauacaauaau

SEQ ID NO: 111890 - RNA, 23 nt, Artificial Sequence
  Synthetic
aauccacaacuacauacaauaau

SEQ ID NO: 111891 - RNA, 24 nt, Artificial Sequence
  Synthetic
caauccacaacuacauacaauaau

SEQ ID NO: 111892 - RNA, 18 nt, Artificial Sequence
  Synthetic
aguggaacucucaauaau

SEQ ID NO: 111893 - RNA, 19 nt, Artificial Sequence
  Synthetic
uaguggaacucucaauaau

SEQ ID NO: 111894 - RNA, 20 nt, Artificial Sequence
  Synthetic
cuaguggaacucucaauaau

SEQ ID NO: 111895 - RNA, 21 nt, Artificial Sequence
  Synthetic
ccuaguggaacucucaauaau

SEQ ID NO: 111896 - RNA, 24 nt, Artificial Sequence
  Synthetic
aggccuaguggaacucucaauaau

SEQ ID NO: 111897 - RNA, 18 nt, Artificial Sequence
  Synthetic
agacaguacuucaauaau

SEQ ID NO: 111898 - RNA, 22 nt, Artificial Sequence
  Synthetic
cgggagacaguacuucaauaau

SEQ ID NO: 111899 - RNA, 24 nt, Artificial Sequence
  Synthetic
ugcgggagacaguacuucaauaau

SEQ ID NO: 111900 - RNA, 18 nt, Artificial Sequence
  Synthetic
uugcuauaaaagaauaau

SEQ ID NO: 111901 - RNA, 21 nt, Artificial Sequence
  Synthetic
ugguugcuauaaaagaauaau

SEQ ID NO: 111902 - RNA, 22 nt, Artificial Sequence
  Synthetic
augguugcuauaaaagaauaau

SEQ ID NO: 111903 - RNA, 23 nt, Artificial Sequence
  Synthetic
aaugguugcuauaaaagaauaau

SEQ ID NO: 111904 - RNA, 24 nt, Artificial Sequence
  Synthetic
uaaugguugcuauaaaagaauaau

SEQ ID NO: 111905 - RNA, 21 nt, Artificial Sequence
  Synthetic
ucucugcaaacuaagaauaau

SEQ ID NO: 111906 - RNA, 22 nt, Artificial Sequence
  Synthetic
uucucugcaaacuaagaauaau

SEQ ID NO: 111907 - RNA, 23 nt, Artificial Sequence
  Synthetic
cuucucugcaaacuaagaauaau

SEQ ID NO: 111908 - RNA, 24 nt, Artificial Sequence
  Synthetic
ucuucucugcaaacuaagaauaau

SEQ ID NO: 111909 - RNA, 18 nt, Artificial Sequence
  Synthetic
cuucucuugaggaauaau

SEQ ID NO: 111910 - RNA, 19 nt, Artificial Sequence
  Synthetic
ucuucucuugaggaauaau

SEQ ID NO: 111911 - RNA, 20 nt, Artificial Sequence
  Synthetic
aucuucucuugaggaauaau

SEQ ID NO: 111912 - RNA, 21 nt, Artificial Sequence
  Synthetic
caucuucucuugaggaauaau

SEQ ID NO: 111913 - RNA, 22 nt, Artificial Sequence
  Synthetic
ccaucuucucuugaggaauaau

SEQ ID NO: 111914 - RNA, 23 nt, Artificial Sequence
  Synthetic
uccaucuucucuugaggaauaau

SEQ ID NO: 111915 - RNA, 24 nt, Artificial Sequence
  Synthetic
auccaucuucucuugaggaauaau

SEQ ID NO: 111916 - RNA, 18 nt, Artificial Sequence
  Synthetic
caucaacagaugaauaau

SEQ ID NO: 111917 - RNA, 19 nt, Artificial Sequence
  Synthetic
ucaucaacagaugaauaau

SEQ ID NO: 111918 - RNA, 21 nt, Artificial Sequence
  Synthetic
ugucaucaacagaugaauaau

SEQ ID NO: 111919 - RNA, 18 nt, Artificial Sequence
  Synthetic
ucaaagaaggcuaauaau

SEQ ID NO: 111920 - RNA, 19 nt, Artificial Sequence
  Synthetic
aucaaagaaggcuaauaau

SEQ ID NO: 111921 - RNA, 20 nt, Artificial Sequence
  Synthetic
caucaaagaaggcuaauaau

SEQ ID NO: 111922 - RNA, 21 nt, Artificial Sequence
  Synthetic
acaucaaagaaggcuaauaau

SEQ ID NO: 111923 - RNA, 22 nt, Artificial Sequence
  Synthetic
aacaucaaagaaggcuaauaau

SEQ ID NO: 111924 - RNA, 24 nt, Artificial Sequence
  Synthetic
agaacaucaaagaaggcuaauaau

SEQ ID NO: 111925 - RNA, 18 nt, Artificial Sequence
  Synthetic
uuaacuaucucuaauaau

SEQ ID NO: 111926 - RNA, 19 nt, Artificial Sequence
  Synthetic
auuaacuaucucuaauaau

SEQ ID NO: 111927 - RNA, 20 nt, Artificial Sequence
  Synthetic
uauuaacuaucucuaauaau

SEQ ID NO: 111928 - RNA, 21 nt, Artificial Sequence
  Synthetic
uuauuaacuaucucuaauaau

SEQ ID NO: 111929 - RNA, 22 nt, Artificial Sequence
  Synthetic
auuauuaacuaucucuaauaau

SEQ ID NO: 111930 - RNA, 23 nt, Artificial Sequence
  Synthetic
aauuauuaacuaucucuaauaau

SEQ ID NO: 111931 - RNA, 24 nt, Artificial Sequence
  Synthetic
aaauuauuaacuaucucuaauaau

SEQ ID NO: 111932 - RNA, 21 nt, Artificial Sequence
  Synthetic
ccaauuuagaaauguaauaau

SEQ ID NO: 111933 - RNA, 23 nt, Artificial Sequence
  Synthetic
ugccaauuuagaaauguaauaau

SEQ ID NO: 111934 - RNA, 24 nt, Artificial Sequence
  Synthetic
uugccaauuuagaaauguaauaau

SEQ ID NO: 111935 - RNA, 18 nt, Artificial Sequence
  Synthetic
ugagugaacuuuaauaau

SEQ ID NO: 111936 - RNA, 19 nt, Artificial Sequence
  Synthetic
cugagugaacuuuaauaau

SEQ ID NO: 111937 - RNA, 20 nt, Artificial Sequence
  Synthetic
ccugagugaacuuuaauaau

SEQ ID NO: 111938 - RNA, 21 nt, Artificial Sequence
  Synthetic
uccugagugaacuuuaauaau

SEQ ID NO: 111939 - RNA, 22 nt, Artificial Sequence
  Synthetic
cuccugagugaacuuuaauaau

SEQ ID NO: 111940 - RNA, 23 nt, Artificial Sequence
  Synthetic
ucuccugagugaacuuuaauaau

SEQ ID NO: 111941 - RNA, 24 nt, Artificial Sequence
  Synthetic
aucuccugagugaacuuuaauaau

SEQ ID NO: 111942 - RNA, 18 nt, Artificial Sequence
  Synthetic
uaggacaauuuuaauaau

SEQ ID NO: 111943 - RNA, 19 nt, Artificial Sequence
  Synthetic
auaggacaauuuuaauaau

SEQ ID NO: 111944 - RNA, 20 nt, Artificial Sequence
  Synthetic
aauaggacaauuuuaauaau

SEQ ID NO: 111945 - RNA, 21 nt, Artificial Sequence
  Synthetic
aaauaggacaauuuuaauaau

SEQ ID NO: 111946 - RNA, 22 nt, Artificial Sequence
  Synthetic
uaaauaggacaauuuuaauaau

SEQ ID NO: 111947 - RNA, 23 nt, Artificial Sequence
  Synthetic
uuaaauaggacaauuuuaauaau

SEQ ID NO: 111948 - RNA, 24 nt, Artificial Sequence
  Synthetic
auuaaauaggacaauuuuaauaau

SEQ ID NO: 111949 - RNA, 21 nt, Artificial Sequence
  Synthetic
aagauucuuuuaaaacauaau

SEQ ID NO: 111950 - RNA, 22 nt, Artificial Sequence
  Synthetic
aaagauucuuuuaaaacauaau

SEQ ID NO: 111951 - RNA, 23 nt, Artificial Sequence
  Synthetic
aaaagauucuuuuaaaacauaau

SEQ ID NO: 111952 - RNA, 18 nt, Artificial Sequence
  Synthetic
aaauuaaauucacauaau

SEQ ID NO: 111953 - RNA, 19 nt, Artificial Sequence
  Synthetic
uaaauuaaauucacauaau

SEQ ID NO: 111954 - RNA, 20 nt, Artificial Sequence
  Synthetic
uuaaauuaaauucacauaau

SEQ ID NO: 111955 - RNA, 21 nt, Artificial Sequence
  Synthetic
auuaaauuaaauucacauaau

SEQ ID NO: 111956 - RNA, 23 nt, Artificial Sequence
  Synthetic
agauuaaauuaaauucacauaau

SEQ ID NO: 111957 - RNA, 24 nt, Artificial Sequence
  Synthetic
uagauuaaauuaaauucacauaau

SEQ ID NO: 111958 - RNA, 18 nt, Artificial Sequence
  Synthetic
cccauagcuaaagauaau

SEQ ID NO: 111959 - RNA, 19 nt, Artificial Sequence
  Synthetic
ccccauagcuaaagauaau

SEQ ID NO: 111960 - RNA, 20 nt, Artificial Sequence
  Synthetic
accccauagcuaaagauaau

SEQ ID NO: 111961 - RNA, 22 nt, Artificial Sequence
  Synthetic
agaccccauagcuaaagauaau

SEQ ID NO: 111962 - RNA, 23 nt, Artificial Sequence
  Synthetic
cagaccccauagcuaaagauaau

SEQ ID NO: 111963 - RNA, 24 nt, Artificial Sequence
  Synthetic
acagaccccauagcuaaagauaau

SEQ ID NO: 111964 - RNA, 18 nt, Artificial Sequence
  Synthetic
ugucgugucuuugauaau

SEQ ID NO: 111965 - RNA, 19 nt, Artificial Sequence
  Synthetic
cugucgugucuuugauaau

SEQ ID NO: 111966 - RNA, 20 nt, Artificial Sequence
  Synthetic
ucugucgugucuuugauaau

SEQ ID NO: 111967 - RNA, 21 nt, Artificial Sequence
  Synthetic
uucugucgugucuuugauaau

SEQ ID NO: 111968 - RNA, 22 nt, Artificial Sequence
  Synthetic
uuucugucgugucuuugauaau

SEQ ID NO: 111969 - RNA, 23 nt, Artificial Sequence
  Synthetic
uuuucugucgugucuuugauaau

SEQ ID NO: 111970 - RNA, 18 nt, Artificial Sequence
  Synthetic
uucuuuaugcaauauaau

SEQ ID NO: 111971 - RNA, 20 nt, Artificial Sequence
  Synthetic
aguucuuuaugcaauauaau

SEQ ID NO: 111972 - RNA, 21 nt, Artificial Sequence
  Synthetic
caguucuuuaugcaauauaau

SEQ ID NO: 111973 - RNA, 22 nt, Artificial Sequence
  Synthetic
ccaguucuuuaugcaauauaau

SEQ ID NO: 111974 - RNA, 23 nt, Artificial Sequence
  Synthetic
accaguucuuuaugcaauauaau

SEQ ID NO: 111975 - RNA, 24 nt, Artificial Sequence
  Synthetic
uaccaguucuuuaugcaauauaau

SEQ ID NO: 111976 - RNA, 21 nt, Artificial Sequence
  Synthetic
ucugaaaucucugccuauaau

SEQ ID NO: 111977 - RNA, 23 nt, Artificial Sequence
  Synthetic
ugucugaaaucucugccuauaau

SEQ ID NO: 111978 - RNA, 24 nt, Artificial Sequence
  Synthetic
cugucugaaaucucugccuauaau

SEQ ID NO: 111979 - RNA, 18 nt, Artificial Sequence
  Synthetic
uugaccuucgucuauaau

SEQ ID NO: 111980 - RNA, 19 nt, Artificial Sequence
  Synthetic
cuugaccuucgucuauaau

SEQ ID NO: 111981 - RNA, 20 nt, Artificial Sequence
  Synthetic
acuugaccuucgucuauaau

SEQ ID NO: 111982 - RNA, 23 nt, Artificial Sequence
  Synthetic
uggacuugaccuucgucuauaau

SEQ ID NO: 111983 - RNA, 24 nt, Artificial Sequence
  Synthetic
auggacuugaccuucgucuauaau

SEQ ID NO: 111984 - RNA, 19 nt, Artificial Sequence
  Synthetic
agaucaagagagguauaau

SEQ ID NO: 111985 - RNA, 21 nt, Artificial Sequence
  Synthetic
agagaucaagagagguauaau

SEQ ID NO: 111986 - RNA, 22 nt, Artificial Sequence
  Synthetic
uagagaucaagagagguauaau

SEQ ID NO: 111987 - RNA, 23 nt, Artificial Sequence
  Synthetic
cuagagaucaagagagguauaau

SEQ ID NO: 111988 - RNA, 24 nt, Artificial Sequence
  Synthetic
acuagagaucaagagagguauaau

SEQ ID NO: 111989 - RNA, 21 nt, Artificial Sequence
  Synthetic
auucucaaugauuuguauaau

SEQ ID NO: 111990 - RNA, 22 nt, Artificial Sequence
  Synthetic
aauucucaaugauuuguauaau

SEQ ID NO: 111991 - RNA, 23 nt, Artificial Sequence
  Synthetic
aaauucucaaugauuuguauaau

SEQ ID NO: 111992 - RNA, 24 nt, Artificial Sequence
  Synthetic
uaaauucucaaugauuuguauaau

SEQ ID NO: 111993 - RNA, 18 nt, Artificial Sequence
  Synthetic
uucaccaaaaguuauaau

SEQ ID NO: 111994 - RNA, 19 nt, Artificial Sequence
  Synthetic
auucaccaaaaguuauaau

SEQ ID NO: 111995 - RNA, 20 nt, Artificial Sequence
  Synthetic
uauucaccaaaaguuauaau

SEQ ID NO: 111996 - RNA, 21 nt, Artificial Sequence
  Synthetic
cuauucaccaaaaguuauaau

SEQ ID NO: 111997 - RNA, 22 nt, Artificial Sequence
  Synthetic
ucuauucaccaaaaguuauaau

SEQ ID NO: 111998 - RNA, 23 nt, Artificial Sequence
  Synthetic
aucuauucaccaaaaguuauaau

SEQ ID NO: 111999 - RNA, 24 nt, Artificial Sequence
  Synthetic
aaucuauucaccaaaaguuauaau

SEQ ID NO: 112000 - RNA, 18 nt, Artificial Sequence
  Synthetic
uggaugacauguuauaau

SEQ ID NO: 112001 - RNA, 19 nt, Artificial Sequence
  Synthetic
cuggaugacauguuauaau

SEQ ID NO: 112002 - RNA, 20 nt, Artificial Sequence
  Synthetic
ucuggaugacauguuauaau

SEQ ID NO: 112003 - RNA, 21 nt, Artificial Sequence
  Synthetic
uucuggaugacauguuauaau

SEQ ID NO: 112004 - RNA, 22 nt, Artificial Sequence
  Synthetic
cuucuggaugacauguuauaau

SEQ ID NO: 112005 - RNA, 23 nt, Artificial Sequence
  Synthetic
ccuucuggaugacauguuauaau

SEQ ID NO: 112006 - RNA, 24 nt, Artificial Sequence
  Synthetic
cccuucuggaugacauguuauaau

SEQ ID NO: 112007 - RNA, 21 nt, Artificial Sequence
  Synthetic
uuugcuuuguuuuguuauaau

SEQ ID NO: 112008 - RNA, 23 nt, Artificial Sequence
  Synthetic
uguuugcuuuguuuuguuauaau

SEQ ID NO: 112009 - RNA, 24 nt, Artificial Sequence
  Synthetic
auguuugcuuuguuuuguuauaau

SEQ ID NO: 112010 - RNA, 18 nt, Artificial Sequence
  Synthetic
aguuaaacaauuuauaau

SEQ ID NO: 112011 - RNA, 20 nt, Artificial Sequence
  Synthetic
agaguuaaacaauuuauaau

SEQ ID NO: 112012 - RNA, 21 nt, Artificial Sequence
  Synthetic
aagaguuaaacaauuuauaau

SEQ ID NO: 112013 - RNA, 22 nt, Artificial Sequence
  Synthetic
aaagaguuaaacaauuuauaau

SEQ ID NO: 112014 - RNA, 24 nt, Artificial Sequence
  Synthetic
agaaagaguuaaacaauuuauaau

SEQ ID NO: 112015 - RNA, 21 nt, Artificial Sequence
  Synthetic
aacauauuuauuaaaacuaau

SEQ ID NO: 112016 - RNA, 22 nt, Artificial Sequence
  Synthetic
caacauauuuauuaaaacuaau

SEQ ID NO: 112017 - RNA, 23 nt, Artificial Sequence
  Synthetic
acaacauauuuauuaaaacuaau

SEQ ID NO: 112018 - RNA, 18 nt, Artificial Sequence
  Synthetic
ugccuucauuuaacuaau

SEQ ID NO: 112019 - RNA, 19 nt, Artificial Sequence
  Synthetic
uugccuucauuuaacuaau

SEQ ID NO: 112020 - RNA, 20 nt, Artificial Sequence
  Synthetic
uuugccuucauuuaacuaau

SEQ ID NO: 112021 - RNA, 21 nt, Artificial Sequence
  Synthetic
uuuugccuucauuuaacuaau

SEQ ID NO: 112022 - RNA, 22 nt, Artificial Sequence
  Synthetic
auuuugccuucauuuaacuaau

SEQ ID NO: 112023 - RNA, 23 nt, Artificial Sequence
  Synthetic
aauuuugccuucauuuaacuaau

SEQ ID NO: 112024 - RNA, 24 nt, Artificial Sequence
  Synthetic
uaauuuugccuucauuuaacuaau

SEQ ID NO: 112025 - RNA, 18 nt, Artificial Sequence
  Synthetic
aguaaaccugacacuaau

SEQ ID NO: 112026 - RNA, 19 nt, Artificial Sequence
  Synthetic
caguaaaccugacacuaau

SEQ ID NO: 112027 - RNA, 20 nt, Artificial Sequence
  Synthetic
ucaguaaaccugacacuaau

SEQ ID NO: 112028 - RNA, 21 nt, Artificial Sequence
  Synthetic
uucaguaaaccugacacuaau

SEQ ID NO: 112029 - RNA, 22 nt, Artificial Sequence
  Synthetic
uuucaguaaaccugacacuaau

SEQ ID NO: 112030 - RNA, 24 nt, Artificial Sequence
  Synthetic
uguuucaguaaaccugacacuaau

SEQ ID NO: 112031 - RNA, 18 nt, Artificial Sequence
  Synthetic
aacuaaaggcucacuaau

SEQ ID NO: 112032 - RNA, 19 nt, Artificial Sequence
  Synthetic
aaacuaaaggcucacuaau

SEQ ID NO: 112033 - RNA, 20 nt, Artificial Sequence
  Synthetic
caaacuaaaggcucacuaau

SEQ ID NO: 112034 - RNA, 21 nt, Artificial Sequence
  Synthetic
acaaacuaaaggcucacuaau

SEQ ID NO: 112035 - RNA, 22 nt, Artificial Sequence
  Synthetic
aacaaacuaaaggcucacuaau

SEQ ID NO: 112036 - RNA, 23 nt, Artificial Sequence
  Synthetic
aaacaaacuaaaggcucacuaau

SEQ ID NO: 112037 - RNA, 18 nt, Artificial Sequence
  Synthetic
ucauuacugcucacuaau

SEQ ID NO: 112038 - RNA, 19 nt, Artificial Sequence
  Synthetic
cucauuacugcucacuaau

SEQ ID NO: 112039 - RNA, 22 nt, Artificial Sequence
  Synthetic
uggcucauuacugcucacuaau

SEQ ID NO: 112040 - RNA, 23 nt, Artificial Sequence
  Synthetic
auggcucauuacugcucacuaau

SEQ ID NO: 112041 - RNA, 24 nt, Artificial Sequence
  Synthetic
cauggcucauuacugcucacuaau

SEQ ID NO: 112042 - RNA, 18 nt, Artificial Sequence
  Synthetic
aaaauaaugguuacuaau

SEQ ID NO: 112043 - RNA, 19 nt, Artificial Sequence
  Synthetic
aaaaauaaugguuacuaau

SEQ ID NO: 112044 - RNA, 22 nt, Artificial Sequence
  Synthetic
agacuccucaacuuacccuaau

SEQ ID NO: 112045 - RNA, 23 nt, Artificial Sequence
  Synthetic
aagacuccucaacuuacccuaau

SEQ ID NO: 112046 - RNA, 24 nt, Artificial Sequence
  Synthetic
aaagacuccucaacuuacccuaau

SEQ ID NO: 112047 - RNA, 21 nt, Artificial Sequence
  Synthetic
agggacugucuuauuccuaau

SEQ ID NO: 112048 - RNA, 22 nt, Artificial Sequence
  Synthetic
cagggacugucuuauuccuaau

SEQ ID NO: 112049 - RNA, 23 nt, Artificial Sequence
  Synthetic
acagggacugucuuauuccuaau

SEQ ID NO: 112050 - RNA, 24 nt, Artificial Sequence
  Synthetic
uacagggacugucuuauuccuaau

SEQ ID NO: 112051 - RNA, 18 nt, Artificial Sequence
  Synthetic
aacguggaggcagcuaau

SEQ ID NO: 112052 - RNA, 19 nt, Artificial Sequence
  Synthetic
caacguggaggcagcuaau

SEQ ID NO: 112053 - RNA, 20 nt, Artificial Sequence
  Synthetic
acaacguggaggcagcuaau

SEQ ID NO: 112054 - RNA, 22 nt, Artificial Sequence
  Synthetic
agacaacguggaggcagcuaau

SEQ ID NO: 112055 - RNA, 23 nt, Artificial Sequence
  Synthetic
aagacaacguggaggcagcuaau

SEQ ID NO: 112056 - RNA, 24 nt, Artificial Sequence
  Synthetic
aaagacaacguggaggcagcuaau

SEQ ID NO: 112057 - RNA, 18 nt, Artificial Sequence
  Synthetic
aacaaccuuauggcuaau

SEQ ID NO: 112058 - RNA, 19 nt, Artificial Sequence
  Synthetic
caacaaccuuauggcuaau

SEQ ID NO: 112059 - RNA, 20 nt, Artificial Sequence
  Synthetic
acaacaaccuuauggcuaau

SEQ ID NO: 112060 - RNA, 21 nt, Artificial Sequence
  Synthetic
uacaacaaccuuauggcuaau

SEQ ID NO: 112061 - RNA, 22 nt, Artificial Sequence
  Synthetic
uuacaacaaccuuauggcuaau

SEQ ID NO: 112062 - RNA, 23 nt, Artificial Sequence
  Synthetic
cuuacaacaaccuuauggcuaau

SEQ ID NO: 112063 - RNA, 24 nt, Artificial Sequence
  Synthetic
ucuuacaacaaccuuauggcuaau

SEQ ID NO: 112064 - RNA, 18 nt, Artificial Sequence
  Synthetic
uuaccacuuuaaucuaau

SEQ ID NO: 112065 - RNA, 19 nt, Artificial Sequence
  Synthetic
auuaccacuuuaaucuaau

SEQ ID NO: 112066 - RNA, 20 nt, Artificial Sequence
  Synthetic
cauuaccacuuuaaucuaau

SEQ ID NO: 112067 - RNA, 21 nt, Artificial Sequence
  Synthetic
acauuaccacuuuaaucuaau

SEQ ID NO: 112068 - RNA, 22 nt, Artificial Sequence
  Synthetic
aacauuaccacuuuaaucuaau

SEQ ID NO: 112069 - RNA, 23 nt, Artificial Sequence
  Synthetic
aaacauuaccacuuuaaucuaau

SEQ ID NO: 112070 - RNA, 24 nt, Artificial Sequence
  Synthetic
aaaacauuaccacuuuaaucuaau

SEQ ID NO: 112071 - RNA, 18 nt, Artificial Sequence
  Synthetic
uuugugggagugucuaau

SEQ ID NO: 112072 - RNA, 19 nt, Artificial Sequence
  Synthetic
auuugugggagugucuaau

SEQ ID NO: 112073 - RNA, 20 nt, Artificial Sequence
  Synthetic
cauuugugggagugucuaau

SEQ ID NO: 112074 - RNA, 21 nt, Artificial Sequence
  Synthetic
acauuugugggagugucuaau

SEQ ID NO: 112075 - RNA, 23 nt, Artificial Sequence
  Synthetic
ugacauuugugggagugucuaau

SEQ ID NO: 112076 - RNA, 24 nt, Artificial Sequence
  Synthetic
uugacauuugugggagugucuaau

SEQ ID NO: 112077 - RNA, 18 nt, Artificial Sequence
  Synthetic
aaagguaguacaaguaau

SEQ ID NO: 112078 - RNA, 19 nt, Artificial Sequence
  Synthetic
aaaagguaguacaaguaau

SEQ ID NO: 112079 - RNA, 21 nt, Artificial Sequence
  Synthetic
ugaaaagguaguacaaguaau

SEQ ID NO: 112080 - RNA, 22 nt, Artificial Sequence
  Synthetic
cugaaaagguaguacaaguaau

SEQ ID NO: 112081 - RNA, 23 nt, Artificial Sequence
  Synthetic
ucugaaaagguaguacaaguaau

SEQ ID NO: 112082 - RNA, 24 nt, Artificial Sequence
  Synthetic
uucugaaaagguaguacaaguaau

SEQ ID NO: 112083 - RNA, 18 nt, Artificial Sequence
  Synthetic
auuuugauucucaguaau

SEQ ID NO: 112084 - RNA, 20 nt, Artificial Sequence
  Synthetic
agauuuugauucucaguaau

SEQ ID NO: 112085 - RNA, 21 nt, Artificial Sequence
  Synthetic
cagauuuugauucucaguaau

SEQ ID NO: 112086 - RNA, 22 nt, Artificial Sequence
  Synthetic
ucagauuuugauucucaguaau

SEQ ID NO: 112087 - RNA, 23 nt, Artificial Sequence
  Synthetic
aucagauuuugauucucaguaau

SEQ ID NO: 112088 - RNA, 24 nt, Artificial Sequence
  Synthetic
caucagauuuugauucucaguaau

SEQ ID NO: 112089 - RNA, 18 nt, Artificial Sequence
  Synthetic
auaaucgcaacagguaau

SEQ ID NO: 112090 - RNA, 19 nt, Artificial Sequence
  Synthetic
uauaaucgcaacagguaau

SEQ ID NO: 112091 - RNA, 20 nt, Artificial Sequence
  Synthetic
auauaaucgcaacagguaau

SEQ ID NO: 112092 - RNA, 21 nt, Artificial Sequence
  Synthetic
aauauaaucgcaacagguaau

SEQ ID NO: 112093 - RNA, 22 nt, Artificial Sequence
  Synthetic
aaauauaaucgcaacagguaau

SEQ ID NO: 112094 - RNA, 23 nt, Artificial Sequence
  Synthetic
uaaauauaaucgcaacagguaau

SEQ ID NO: 112095 - RNA, 24 nt, Artificial Sequence
  Synthetic
uuaaauauaaucgcaacagguaau

SEQ ID NO: 112096 - RNA, 18 nt, Artificial Sequence
  Synthetic
cauucauucccagguaau

SEQ ID NO: 112097 - RNA, 19 nt, Artificial Sequence
  Synthetic
ucauucauucccagguaau

SEQ ID NO: 112098 - RNA, 20 nt, Artificial Sequence
  Synthetic
cucauucauucccagguaau

SEQ ID NO: 112099 - RNA, 21 nt, Artificial Sequence
  Synthetic
ccucauucauucccagguaau

SEQ ID NO: 112100 - RNA, 22 nt, Artificial Sequence
  Synthetic
uccucauucauucccagguaau

SEQ ID NO: 112101 - RNA, 23 nt, Artificial Sequence
  Synthetic
uuccucauucauucccagguaau

SEQ ID NO: 112102 - RNA, 24 nt, Artificial Sequence
  Synthetic
cuuccucauucauucccagguaau

SEQ ID NO: 112103 - RNA, 18 nt, Artificial Sequence
  Synthetic
uuucuaauccuugguaau

SEQ ID NO: 112104 - RNA, 19 nt, Artificial Sequence
  Synthetic
uuuucuaauccuugguaau

SEQ ID NO: 112105 - RNA, 20 nt, Artificial Sequence
  Synthetic
cuuuucuaauccuugguaau

SEQ ID NO: 112106 - RNA, 21 nt, Artificial Sequence
  Synthetic
ucuuuucuaauccuugguaau

SEQ ID NO: 112107 - RNA, 23 nt, Artificial Sequence
  Synthetic
agucuuuucuaauccuugguaau

SEQ ID NO: 112108 - RNA, 24 nt, Artificial Sequence
  Synthetic
cagucuuuucuaauccuugguaau

SEQ ID NO: 112109 - RNA, 18 nt, Artificial Sequence
  Synthetic
cucuuaaucucauguaau

SEQ ID NO: 112110 - RNA, 19 nt, Artificial Sequence
  Synthetic
acucuuaaucucauguaau

SEQ ID NO: 112111 - RNA, 20 nt, Artificial Sequence
  Synthetic
uacucuuaaucucauguaau

SEQ ID NO: 112112 - RNA, 21 nt, Artificial Sequence
  Synthetic
cuacucuuaaucucauguaau

SEQ ID NO: 112113 - RNA, 22 nt, Artificial Sequence
  Synthetic
ucuacucuuaaucucauguaau

SEQ ID NO: 112114 - RNA, 23 nt, Artificial Sequence
  Synthetic
cucuacucuuaaucucauguaau

SEQ ID NO: 112115 - RNA, 24 nt, Artificial Sequence
  Synthetic
ucucuacucuuaaucucauguaau

SEQ ID NO: 112116 - RNA, 18 nt, Artificial Sequence
  Synthetic
uuucgauuaggauguaau

SEQ ID NO: 112117 - RNA, 20 nt, Artificial Sequence
  Synthetic
aguuucgauuaggauguaau

SEQ ID NO: 112118 - RNA, 21 nt, Artificial Sequence
  Synthetic
uaguuucgauuaggauguaau

SEQ ID NO: 112119 - RNA, 23 nt, Artificial Sequence
  Synthetic
aguaguuucgauuaggauguaau

SEQ ID NO: 112120 - RNA, 24 nt, Artificial Sequence
  Synthetic
aaguaguuucgauuaggauguaau

SEQ ID NO: 112121 - RNA, 18 nt, Artificial Sequence
  Synthetic
uacuuuuucuuauguaau

SEQ ID NO: 112122 - RNA, 19 nt, Artificial Sequence
  Synthetic
auacuuuuucuuauguaau

SEQ ID NO: 112123 - RNA, 20 nt, Artificial Sequence
  Synthetic
cauacuuuuucuuauguaau

SEQ ID NO: 112124 - RNA, 21 nt, Artificial Sequence
  Synthetic
ucauacuuuuucuuauguaau

SEQ ID NO: 112125 - RNA, 22 nt, Artificial Sequence
  Synthetic
cucauacuuuuucuuauguaau

SEQ ID NO: 112126 - RNA, 23 nt, Artificial Sequence
  Synthetic
acucauacuuuuucuuauguaau

SEQ ID NO: 112127 - RNA, 24 nt, Artificial Sequence
  Synthetic
aacucauacuuuuucuuauguaau

SEQ ID NO: 112128 - RNA, 18 nt, Artificial Sequence
  Synthetic
ccaagcaugcacuguaau

SEQ ID NO: 112129 - RNA, 19 nt, Artificial Sequence
  Synthetic
accaagcaugcacuguaau

SEQ ID NO: 112130 - RNA, 20 nt, Artificial Sequence
  Synthetic
caccaagcaugcacuguaau

SEQ ID NO: 112131 - RNA, 21 nt, Artificial Sequence
  Synthetic
ucaccaagcaugcacuguaau

SEQ ID NO: 112132 - RNA, 22 nt, Artificial Sequence
  Synthetic
uucaccaagcaugcacuguaau

SEQ ID NO: 112133 - RNA, 23 nt, Artificial Sequence
  Synthetic
auucaccaagcaugcacuguaau

SEQ ID NO: 112134 - RNA, 18 nt, Artificial Sequence
  Synthetic
aucacuuaccuguguaau

SEQ ID NO: 112135 - RNA, 20 nt, Artificial Sequence
  Synthetic
ugaucacuuaccuguguaau

SEQ ID NO: 112136 - RNA, 21 nt, Artificial Sequence
  Synthetic
cugaucacuuaccuguguaau

SEQ ID NO: 112137 - RNA, 22 nt, Artificial Sequence
  Synthetic
acugaucacuuaccuguguaau

SEQ ID NO: 112138 - RNA, 23 nt, Artificial Sequence
  Synthetic
aacugaucacuuaccuguguaau

SEQ ID NO: 112139 - RNA, 24 nt, Artificial Sequence
  Synthetic
aaacugaucacuuaccuguguaau

SEQ ID NO: 112140 - RNA, 18 nt, Artificial Sequence
  Synthetic
auauaauaucuuuguaau

SEQ ID NO: 112141 - RNA, 19 nt, Artificial Sequence
  Synthetic
cauauaauaucuuuguaau

SEQ ID NO: 112142 - RNA, 20 nt, Artificial Sequence
  Synthetic
ccauauaauaucuuuguaau

SEQ ID NO: 112143 - RNA, 21 nt, Artificial Sequence
  Synthetic
accauauaauaucuuuguaau

SEQ ID NO: 112144 - RNA, 22 nt, Artificial Sequence
  Synthetic
aaccauauaauaucuuuguaau

SEQ ID NO: 112145 - RNA, 23 nt, Artificial Sequence
  Synthetic
caaccauauaauaucuuuguaau

SEQ ID NO: 112146 - RNA, 19 nt, Artificial Sequence
  Synthetic
ugcauuuauagucauuaau

SEQ ID NO: 112147 - RNA, 20 nt, Artificial Sequence
  Synthetic
uugcauuuauagucauuaau

SEQ ID NO: 112148 - RNA, 21 nt, Artificial Sequence
  Synthetic
auuuugaaaaugaauauuaau

SEQ ID NO: 112149 - RNA, 22 nt, Artificial Sequence
  Synthetic
uauuuugaaaaugaauauuaau

SEQ ID NO: 112150 - RNA, 23 nt, Artificial Sequence
  Synthetic
auauuuugaaaaugaauauuaau

SEQ ID NO: 112151 - RNA, 24 nt, Artificial Sequence
  Synthetic
cauauuuugaaaaugaauauuaau

SEQ ID NO: 112152 - RNA, 18 nt, Artificial Sequence
  Synthetic
uauaauuaggauauuaau

SEQ ID NO: 112153 - RNA, 19 nt, Artificial Sequence
  Synthetic
uuauaauuaggauauuaau

SEQ ID NO: 112154 - RNA, 21 nt, Artificial Sequence
  Synthetic
uguuauaauuaggauauuaau

SEQ ID NO: 112155 - RNA, 22 nt, Artificial Sequence
  Synthetic
auguuauaauuaggauauuaau

SEQ ID NO: 112156 - RNA, 23 nt, Artificial Sequence
  Synthetic
cauguuauaauuaggauauuaau

SEQ ID NO: 112157 - RNA, 24 nt, Artificial Sequence
  Synthetic
acauguuauaauuaggauauuaau

SEQ ID NO: 112158 - RNA, 18 nt, Artificial Sequence
  Synthetic
agcucauuugcuauuaau

SEQ ID NO: 112159 - RNA, 19 nt, Artificial Sequence
  Synthetic
aagcucauuugcuauuaau

SEQ ID NO: 112160 - RNA, 20 nt, Artificial Sequence
  Synthetic
aaagcucauuugcuauuaau

SEQ ID NO: 112161 - RNA, 24 nt, Artificial Sequence
  Synthetic
agggaaagcucauuugcuauuaau

SEQ ID NO: 112162 - RNA, 18 nt, Artificial Sequence
  Synthetic
caugugaugacacuuaau

SEQ ID NO: 112163 - RNA, 19 nt, Artificial Sequence
  Synthetic
acaugugaugacacuuaau

SEQ ID NO: 112164 - RNA, 20 nt, Artificial Sequence
  Synthetic
uacaugugaugacacuuaau

SEQ ID NO: 112165 - RNA, 21 nt, Artificial Sequence
  Synthetic
uuacaugugaugacacuuaau

SEQ ID NO: 112166 - RNA, 22 nt, Artificial Sequence
  Synthetic
uuuacaugugaugacacuuaau

SEQ ID NO: 112167 - RNA, 23 nt, Artificial Sequence
  Synthetic
cuuuacaugugaugacacuuaau

SEQ ID NO: 112168 - RNA, 21 nt, Artificial Sequence
  Synthetic
agucauuaaauaaaucuuaau

SEQ ID NO: 112169 - RNA, 22 nt, Artificial Sequence
  Synthetic
aagucauuaaauaaaucuuaau

SEQ ID NO: 112170 - RNA, 23 nt, Artificial Sequence
  Synthetic
aaagucauuaaauaaaucuuaau

SEQ ID NO: 112171 - RNA, 24 nt, Artificial Sequence
  Synthetic
caaagucauuaaauaaaucuuaau

SEQ ID NO: 112172 - RNA, 18 nt, Artificial Sequence
  Synthetic
auuucuuaccaucuuaau

SEQ ID NO: 112173 - RNA, 19 nt, Artificial Sequence
  Synthetic
cauuucuuaccaucuuaau

SEQ ID NO: 112174 - RNA, 20 nt, Artificial Sequence
  Synthetic
ucauuucuuaccaucuuaau

SEQ ID NO: 112175 - RNA, 21 nt, Artificial Sequence
  Synthetic
cucauuucuuaccaucuuaau

SEQ ID NO: 112176 - RNA, 22 nt, Artificial Sequence
  Synthetic
ucucauuucuuaccaucuuaau

SEQ ID NO: 112177 - RNA, 23 nt, Artificial Sequence
  Synthetic
uucucauuucuuaccaucuuaau

SEQ ID NO: 112178 - RNA, 24 nt, Artificial Sequence
  Synthetic
uuucucauuucuuaccaucuuaau

SEQ ID NO: 112179 - RNA, 18 nt, Artificial Sequence
  Synthetic
aucaauggcaaaguuaau

SEQ ID NO: 112180 - RNA, 19 nt, Artificial Sequence
  Synthetic
aaucaauggcaaaguuaau

SEQ ID NO: 112181 - RNA, 20 nt, Artificial Sequence
  Synthetic
uaaucaauggcaaaguuaau

SEQ ID NO: 112182 - RNA, 22 nt, Artificial Sequence
  Synthetic
aguaaucaauggcaaaguuaau

SEQ ID NO: 112183 - RNA, 23 nt, Artificial Sequence
  Synthetic
caguaaucaauggcaaaguuaau

SEQ ID NO: 112184 - RNA, 24 nt, Artificial Sequence
  Synthetic
acaguaaucaauggcaaaguuaau

SEQ ID NO: 112185 - RNA, 18 nt, Artificial Sequence
  Synthetic
cucaugaacacaguuaau

SEQ ID NO: 112186 - RNA, 19 nt, Artificial Sequence
  Synthetic
acucaugaacacaguuaau

SEQ ID NO: 112187 - RNA, 20 nt, Artificial Sequence
  Synthetic
cacucaugaacacaguuaau

SEQ ID NO: 112188 - RNA, 21 nt, Artificial Sequence
  Synthetic
acacucaugaacacaguuaau

SEQ ID NO: 112189 - RNA, 22 nt, Artificial Sequence
  Synthetic
uacacucaugaacacaguuaau

SEQ ID NO: 112190 - RNA, 23 nt, Artificial Sequence
  Synthetic
uuacacucaugaacacaguuaau

SEQ ID NO: 112191 - RNA, 24 nt, Artificial Sequence
  Synthetic
auuacacucaugaacacaguuaau

SEQ ID NO: 112192 - RNA, 18 nt, Artificial Sequence
  Synthetic
acccuaacaaggguuaau

SEQ ID NO: 112193 - RNA, 19 nt, Artificial Sequence
  Synthetic
cacccuaacaaggguuaau

SEQ ID NO: 112194 - RNA, 20 nt, Artificial Sequence
  Synthetic
ucacccuaacaaggguuaau

SEQ ID NO: 112195 - RNA, 21 nt, Artificial Sequence
  Synthetic
cucacccuaacaaggguuaau

SEQ ID NO: 112196 - RNA, 22 nt, Artificial Sequence
  Synthetic
ucucacccuaacaaggguuaau

SEQ ID NO: 112197 - RNA, 23 nt, Artificial Sequence
  Synthetic
uucucacccuaacaaggguuaau

SEQ ID NO: 112198 - RNA, 24 nt, Artificial Sequence
  Synthetic
uuucucacccuaacaaggguuaau

SEQ ID NO: 112199 - RNA, 18 nt, Artificial Sequence
  Synthetic
cagcuccagaggguuaau

SEQ ID NO: 112200 - RNA, 19 nt, Artificial Sequence
  Synthetic
acagcuccagaggguuaau

SEQ ID NO: 112201 - RNA, 20 nt, Artificial Sequence
  Synthetic
aacagcuccagaggguuaau

SEQ ID NO: 112202 - RNA, 22 nt, Artificial Sequence
  Synthetic
ugaacagcuccagaggguuaau

SEQ ID NO: 112203 - RNA, 23 nt, Artificial Sequence
  Synthetic
cugaacagcuccagaggguuaau

SEQ ID NO: 112204 - RNA, 18 nt, Artificial Sequence
  Synthetic
agaauuguauuuguuaau

SEQ ID NO: 112205 - RNA, 19 nt, Artificial Sequence
  Synthetic
uagaauuguauuuguuaau

SEQ ID NO: 112206 - RNA, 20 nt, Artificial Sequence
  Synthetic
auagaauuguauuuguuaau

SEQ ID NO: 112207 - RNA, 21 nt, Artificial Sequence
  Synthetic
aauagaauuguauuuguuaau

SEQ ID NO: 112208 - RNA, 22 nt, Artificial Sequence
  Synthetic
aaauagaauuguauuuguuaau

SEQ ID NO: 112209 - RNA, 23 nt, Artificial Sequence
  Synthetic
aaaauagaauuguauuuguuaau

SEQ ID NO: 112210 - RNA, 24 nt, Artificial Sequence
  Synthetic
uaaaauagaauuguauuuguuaau

SEQ ID NO: 112211 - RNA, 19 nt, Artificial Sequence
  Synthetic
ugcuaaucauuaauuuaau

SEQ ID NO: 112212 - RNA, 20 nt, Artificial Sequence
  Synthetic
augcuaaucauuaauuuaau

SEQ ID NO: 112213 - RNA, 21 nt, Artificial Sequence
  Synthetic
aaugcuaaucauuaauuuaau

SEQ ID NO: 112214 - RNA, 22 nt, Artificial Sequence
  Synthetic
uaaugcuaaucauuaauuuaau

SEQ ID NO: 112215 - RNA, 23 nt, Artificial Sequence
  Synthetic
uuaaugcuaaucauuaauuuaau

SEQ ID NO: 112216 - RNA, 24 nt, Artificial Sequence
  Synthetic
uuuaaugcuaaucauuaauuuaau

SEQ ID NO: 112217 - RNA, 21 nt, Artificial Sequence
  Synthetic
uuuuauucaguuuacuuuaau

SEQ ID NO: 112218 - RNA, 22 nt, Artificial Sequence
  Synthetic
auuuuauucaguuuacuuuaau

SEQ ID NO: 112219 - RNA, 23 nt, Artificial Sequence
  Synthetic
cauuuuauucaguuuacuuuaau

SEQ ID NO: 112220 - RNA, 18 nt, Artificial Sequence
  Synthetic
cccugaugugucuuuaau

SEQ ID NO: 112221 - RNA, 19 nt, Artificial Sequence
  Synthetic
ucccugaugugucuuuaau

SEQ ID NO: 112222 - RNA, 20 nt, Artificial Sequence
  Synthetic
cucccugaugugucuuuaau

SEQ ID NO: 112223 - RNA, 22 nt, Artificial Sequence
  Synthetic
ugcucccugaugugucuuuaau

SEQ ID NO: 112224 - RNA, 23 nt, Artificial Sequence
  Synthetic
uugcucccugaugugucuuuaau

SEQ ID NO: 112225 - RNA, 24 nt, Artificial Sequence
  Synthetic
auugcucccugaugugucuuuaau

SEQ ID NO: 112226 - RNA, 18 nt, Artificial Sequence
  Synthetic
ccaaauauucaguuuaau

SEQ ID NO: 112227 - RNA, 20 nt, Artificial Sequence
  Synthetic
ugccaaauauucaguuuaau

SEQ ID NO: 112228 - RNA, 21 nt, Artificial Sequence
  Synthetic
augccaaauauucaguuuaau

SEQ ID NO: 112229 - RNA, 22 nt, Artificial Sequence
  Synthetic
aaugccaaauauucaguuuaau

SEQ ID NO: 112230 - RNA, 23 nt, Artificial Sequence
  Synthetic
aaaugccaaauauucaguuuaau

SEQ ID NO: 112231 - RNA, 24 nt, Artificial Sequence
  Synthetic
aaaaugccaaauauucaguuuaau

SEQ ID NO: 112232 - RNA, 22 nt, Artificial Sequence
  Synthetic
agauuuaaaucuucaguuuaau

SEQ ID NO: 112233 - RNA, 23 nt, Artificial Sequence
  Synthetic
aagauuuaaaucuucaguuuaau

SEQ ID NO: 112234 - RNA, 24 nt, Artificial Sequence
  Synthetic
aaagauuuaaaucuucaguuuaau

SEQ ID NO: 112235 - RNA, 21 nt, Artificial Sequence
  Synthetic
uucuuuuccuuuugguuuaau

SEQ ID NO: 112236 - RNA, 23 nt, Artificial Sequence
  Synthetic
aguucuuuuccuuuugguuuaau

SEQ ID NO: 112237 - RNA, 24 nt, Artificial Sequence
  Synthetic
aaguucuuuuccuuuugguuuaau

SEQ ID NO: 112238 - RNA, 18 nt, Artificial Sequence
  Synthetic
ucagcaucuauguuuaau

SEQ ID NO: 112239 - RNA, 19 nt, Artificial Sequence
  Synthetic
uucagcaucuauguuuaau

SEQ ID NO: 112240 - RNA, 20 nt, Artificial Sequence
  Synthetic
uuucagcaucuauguuuaau

SEQ ID NO: 112241 - RNA, 21 nt, Artificial Sequence
  Synthetic
uuuucagcaucuauguuuaau

SEQ ID NO: 112242 - RNA, 22 nt, Artificial Sequence
  Synthetic
uuuuucagcaucuauguuuaau

SEQ ID NO: 112243 - RNA, 23 nt, Artificial Sequence
  Synthetic
uuuuuucagcaucuauguuuaau

SEQ ID NO: 112244 - RNA, 24 nt, Artificial Sequence
  Synthetic
uuuuuuucagcaucuauguuuaau

SEQ ID NO: 112245 - RNA, 18 nt, Artificial Sequence
  Synthetic
aagcuuccugauuuuaau

SEQ ID NO: 112246 - RNA, 19 nt, Artificial Sequence
  Synthetic
aaagcuuccugauuuuaau

SEQ ID NO: 112247 - RNA, 20 nt, Artificial Sequence
  Synthetic
caaagcuuccugauuuuaau

SEQ ID NO: 112248 - RNA, 22 nt, Artificial Sequence
  Synthetic
ugcaaagcuuccugauuuuaau

SEQ ID NO: 112249 - RNA, 23 nt, Artificial Sequence
  Synthetic
uugcaaagcuuccugauuuuaau

SEQ ID NO: 112250 - RNA, 24 nt, Artificial Sequence
  Synthetic
cuugcaaagcuuccugauuuuaau

SEQ ID NO: 112251 - RNA, 18 nt, Artificial Sequence
  Synthetic
uggaaaacugguuuuaau

SEQ ID NO: 112252 - RNA, 20 nt, Artificial Sequence
  Synthetic
uguggaaaacugguuuuaau

SEQ ID NO: 112253 - RNA, 21 nt, Artificial Sequence
  Synthetic
auguggaaaacugguuuuaau

SEQ ID NO: 112254 - RNA, 22 nt, Artificial Sequence
  Synthetic
aauguggaaaacugguuuuaau

SEQ ID NO: 112255 - RNA, 23 nt, Artificial Sequence
  Synthetic
uaauguggaaaacugguuuuaau

SEQ ID NO: 112256 - RNA, 24 nt, Artificial Sequence
  Synthetic
uuaauguggaaaacugguuuuaau

SEQ ID NO: 112257 - RNA, 21 nt, Artificial Sequence
  Synthetic
cauucuuauugauuuuuuaau

SEQ ID NO: 112258 - RNA, 23 nt, Artificial Sequence
  Synthetic
ugcauucuuauugauuuuuuaau

SEQ ID NO: 112259 - RNA, 24 nt, Artificial Sequence
  Synthetic
augcauucuuauugauuuuuuaau

SEQ ID NO: 112260 - RNA, 18 nt, Artificial Sequence
  Synthetic
ucauaugccaaaaaacau

SEQ ID NO: 112261 - RNA, 19 nt, Artificial Sequence
  Synthetic
uucauaugccaaaaaacau

SEQ ID NO: 112262 - RNA, 20 nt, Artificial Sequence
  Synthetic
cuucauaugccaaaaaacau

SEQ ID NO: 112263 - RNA, 23 nt, Artificial Sequence
  Synthetic
aggcuucauaugccaaaaaacau

SEQ ID NO: 112264 - RNA, 24 nt, Artificial Sequence
  Synthetic
uaggcuucauaugccaaaaaacau

SEQ ID NO: 112265 - RNA, 19 nt, Artificial Sequence
  Synthetic
ugagaacaagggaaaacau

SEQ ID NO: 112266 - RNA, 20 nt, Artificial Sequence
  Synthetic
uugagaacaagggaaaacau

SEQ ID NO: 112267 - RNA, 22 nt, Artificial Sequence
  Synthetic
aguugagaacaagggaaaacau

SEQ ID NO: 112268 - RNA, 23 nt, Artificial Sequence
  Synthetic
caguugagaacaagggaaaacau

SEQ ID NO: 112269 - RNA, 24 nt, Artificial Sequence
  Synthetic
ucaguugagaacaagggaaaacau

SEQ ID NO: 112270 - RNA, 21 nt, Artificial Sequence
  Synthetic
agacauggggucauaaaacau

SEQ ID NO: 112271 - RNA, 22 nt, Artificial Sequence
  Synthetic
uagacauggggucauaaaacau

SEQ ID NO: 112272 - RNA, 23 nt, Artificial Sequence
  Synthetic
uuagacauggggucauaaaacau

SEQ ID NO: 112273 - RNA, 18 nt, Artificial Sequence
  Synthetic
aguguguauaagaaacau

SEQ ID NO: 112274 - RNA, 19 nt, Artificial Sequence
  Synthetic
uaguguguauaagaaacau

SEQ ID NO: 112275 - RNA, 20 nt, Artificial Sequence
  Synthetic
auaguguguauaagaaacau

SEQ ID NO: 112276 - RNA, 21 nt, Artificial Sequence
  Synthetic
uauaguguguauaagaaacau

SEQ ID NO: 112277 - RNA, 22 nt, Artificial Sequence
  Synthetic
cuauaguguguauaagaaacau

SEQ ID NO: 112278 - RNA, 23 nt, Artificial Sequence
  Synthetic
acuauaguguguauaagaaacau

SEQ ID NO: 112279 - RNA, 24 nt, Artificial Sequence
  Synthetic
aacuauaguguguauaagaaacau

SEQ ID NO: 112280 - RNA, 18 nt, Artificial Sequence
  Synthetic
cauguccuagagaaacau

SEQ ID NO: 112281 - RNA, 19 nt, Artificial Sequence
  Synthetic
acauguccuagagaaacau

SEQ ID NO: 112282 - RNA, 20 nt, Artificial Sequence
  Synthetic
aacauguccuagagaaacau

SEQ ID NO: 112283 - RNA, 22 nt, Artificial Sequence
  Synthetic
agaacauguccuagagaaacau

SEQ ID NO: 112284 - RNA, 23 nt, Artificial Sequence
  Synthetic
cagaacauguccuagagaaacau

SEQ ID NO: 112285 - RNA, 24 nt, Artificial Sequence
  Synthetic
ucagaacauguccuagagaaacau

SEQ ID NO: 112286 - RNA, 18 nt, Artificial Sequence
  Synthetic
uugccuuuucauaaacau

SEQ ID NO: 112287 - RNA, 19 nt, Artificial Sequence
  Synthetic
auugccuuuucauaaacau

SEQ ID NO: 112288 - RNA, 20 nt, Artificial Sequence
  Synthetic
uauugccuuuucauaaacau

SEQ ID NO: 112289 - RNA, 21 nt, Artificial Sequence
  Synthetic
uuauugccuuuucauaaacau

SEQ ID NO: 112290 - RNA, 22 nt, Artificial Sequence
  Synthetic
cuuauugccuuuucauaaacau

SEQ ID NO: 112291 - RNA, 23 nt, Artificial Sequence
  Synthetic
ucuuauugccuuuucauaaacau

SEQ ID NO: 112292 - RNA, 24 nt, Artificial Sequence
  Synthetic
aucuuauugccuuuucauaaacau

SEQ ID NO: 112293 - RNA, 18 nt, Artificial Sequence
  Synthetic
agaaccacuuauaaacau

SEQ ID NO: 112294 - RNA, 19 nt, Artificial Sequence
  Synthetic
aagaaccacuuauaaacau

SEQ ID NO: 112295 - RNA, 21 nt, Artificial Sequence
  Synthetic
agaagaaccacuuauaaacau

SEQ ID NO: 112296 - RNA, 23 nt, Artificial Sequence
  Synthetic
agagaagaaccacuuauaaacau

SEQ ID NO: 112297 - RNA, 24 nt, Artificial Sequence
  Synthetic
cagagaagaaccacuuauaaacau

SEQ ID NO: 112298 - RNA, 18 nt, Artificial Sequence
  Synthetic
uguuccacuucuaaacau

SEQ ID NO: 112299 - RNA, 19 nt, Artificial Sequence
  Synthetic
cuguuccacuucuaaacau

SEQ ID NO: 112300 - RNA, 20 nt, Artificial Sequence
  Synthetic
ucuguuccacuucuaaacau

SEQ ID NO: 112301 - RNA, 21 nt, Artificial Sequence
  Synthetic
uucuguuccacuucuaaacau

SEQ ID NO: 112302 - RNA, 22 nt, Artificial Sequence
  Synthetic
cuucuguuccacuucuaaacau

SEQ ID NO: 112303 - RNA, 23 nt, Artificial Sequence
  Synthetic
ucuucuguuccacuucuaaacau

SEQ ID NO: 112304 - RNA, 24 nt, Artificial Sequence
  Synthetic
cucuucuguuccacuucuaaacau

SEQ ID NO: 112305 - RNA, 18 nt, Artificial Sequence
  Synthetic
cacucacacagacaacau

SEQ ID NO: 112306 - RNA, 20 nt, Artificial Sequence
  Synthetic
agcacucacacagacaacau

SEQ ID NO: 112307 - RNA, 18 nt, Artificial Sequence
  Synthetic
ccaggacucuuacaacau

SEQ ID NO: 112308 - RNA, 20 nt, Artificial Sequence
  Synthetic
agccaggacucuuacaacau

SEQ ID NO: 112309 - RNA, 21 nt, Artificial Sequence
  Synthetic
aagccaggacucuuacaacau

SEQ ID NO: 112310 - RNA, 23 nt, Artificial Sequence
  Synthetic
agaagccaggacucuuacaacau

SEQ ID NO: 112311 - RNA, 24 nt, Artificial Sequence
  Synthetic
aagaagccaggacucuuacaacau

SEQ ID NO: 112312 - RNA, 18 nt, Artificial Sequence
  Synthetic
auuuuauauaaccaacau

SEQ ID NO: 112313 - RNA, 19 nt, Artificial Sequence
  Synthetic
uauuuuauauaaccaacau

SEQ ID NO: 112314 - RNA, 20 nt, Artificial Sequence
  Synthetic
auauuuuauauaaccaacau

SEQ ID NO: 112315 - RNA, 21 nt, Artificial Sequence
  Synthetic
aauauuuuauauaaccaacau

SEQ ID NO: 112316 - RNA, 23 nt, Artificial Sequence
  Synthetic
ugaauauuuuauauaaccaacau

SEQ ID NO: 112317 - RNA, 24 nt, Artificial Sequence
  Synthetic
augaauauuuuauauaaccaacau

SEQ ID NO: 112318 - RNA, 18 nt, Artificial Sequence
  Synthetic
uuugccguucaccaacau

SEQ ID NO: 112319 - RNA, 21 nt, Artificial Sequence
  Synthetic
ugguuugccguucaccaacau

SEQ ID NO: 112320 - RNA, 22 nt, Artificial Sequence
  Synthetic
cugguuugccguucaccaacau

SEQ ID NO: 112321 - RNA, 24 nt, Artificial Sequence
  Synthetic
ugcugguuugccguucaccaacau

SEQ ID NO: 112322 - RNA, 22 nt, Artificial Sequence
  Synthetic
ugagagcuccaucuugcaacau

SEQ ID NO: 112323 - RNA, 23 nt, Artificial Sequence
  Synthetic
augagagcuccaucuugcaacau

SEQ ID NO: 112324 - RNA, 24 nt, Artificial Sequence
  Synthetic
caugagagcuccaucuugcaacau

SEQ ID NO: 112325 - RNA, 18 nt, Artificial Sequence
  Synthetic
auuaaauagcaucaacau

SEQ ID NO: 112326 - RNA, 19 nt, Artificial Sequence
  Synthetic
uauuaaauagcaucaacau

SEQ ID NO: 112327 - RNA, 20 nt, Artificial Sequence
  Synthetic
cuauuaaauagcaucaacau

SEQ ID NO: 112328 - RNA, 22 nt, Artificial Sequence
  Synthetic
cgcuauuaaauagcaucaacau

SEQ ID NO: 112329 - RNA, 23 nt, Artificial Sequence
  Synthetic
ccgcuauuaaauagcaucaacau

SEQ ID NO: 112330 - RNA, 24 nt, Artificial Sequence
  Synthetic
cccgcuauuaaauagcaucaacau

SEQ ID NO: 112331 - RNA, 18 nt, Artificial Sequence
  Synthetic
cuuaagggucaucaacau

SEQ ID NO: 112332 - RNA, 20 nt, Artificial Sequence
  Synthetic
agcuuaagggucaucaacau

SEQ ID NO: 112333 - RNA, 21 nt, Artificial Sequence
  Synthetic
uagcuuaagggucaucaacau

SEQ ID NO: 112334 - RNA, 22 nt, Artificial Sequence
  Synthetic
auagcuuaagggucaucaacau

SEQ ID NO: 112335 - RNA, 23 nt, Artificial Sequence
  Synthetic
uauagcuuaagggucaucaacau

SEQ ID NO: 112336 - RNA, 24 nt, Artificial Sequence
  Synthetic
uuauagcuuaagggucaucaacau

SEQ ID NO: 112337 - RNA, 22 nt, Artificial Sequence
  Synthetic
agaugagaaguaaaaagaacau

SEQ ID NO: 112338 - RNA, 24 nt, Artificial Sequence
  Synthetic
ugagaugagaaguaaaaagaacau

SEQ ID NO: 112339 - RNA, 19 nt, Artificial Sequence
  Synthetic
agucuagaaauaagaacau

SEQ ID NO: 112340 - RNA, 20 nt, Artificial Sequence
  Synthetic
cagucuagaaauaagaacau

SEQ ID NO: 112341 - RNA, 21 nt, Artificial Sequence
  Synthetic
ucagucuagaaauaagaacau

SEQ ID NO: 112342 - RNA, 22 nt, Artificial Sequence
  Synthetic
aucagucuagaaauaagaacau

SEQ ID NO: 112343 - RNA, 23 nt, Artificial Sequence
  Synthetic
aaucagucuagaaauaagaacau

SEQ ID NO: 112344 - RNA, 24 nt, Artificial Sequence
  Synthetic
uaaucagucuagaaauaagaacau

SEQ ID NO: 112345 - RNA, 22 nt, Artificial Sequence
  Synthetic
uguauagugcugcgacgaacau

SEQ ID NO: 112346 - RNA, 23 nt, Artificial Sequence
  Synthetic
cuguauagugcugcgacgaacau

SEQ ID NO: 112347 - RNA, 24 nt, Artificial Sequence
  Synthetic
acuguauagugcugcgacgaacau

SEQ ID NO: 112348 - RNA, 18 nt, Artificial Sequence
  Synthetic
aaggguaagugggaacau

SEQ ID NO: 112349 - RNA, 19 nt, Artificial Sequence
  Synthetic
uaaggguaagugggaacau

SEQ ID NO: 112350 - RNA, 20 nt, Artificial Sequence
  Synthetic
uuaaggguaagugggaacau

SEQ ID NO: 112351 - RNA, 21 nt, Artificial Sequence
  Synthetic
auuaaggguaagugggaacau

SEQ ID NO: 112352 - RNA, 22 nt, Artificial Sequence
  Synthetic
aauuaaggguaagugggaacau

SEQ ID NO: 112353 - RNA, 24 nt, Artificial Sequence
  Synthetic
ugaauuaaggguaagugggaacau

SEQ ID NO: 112354 - RNA, 18 nt, Artificial Sequence
  Synthetic
ugggaaaaacuugaacau

SEQ ID NO: 112355 - RNA, 20 nt, Artificial Sequence
  Synthetic
agugggaaaaacuugaacau

SEQ ID NO: 112356 - RNA, 22 nt, Artificial Sequence
  Synthetic
ugagugggaaaaacuugaacau

SEQ ID NO: 112357 - RNA, 18 nt, Artificial Sequence
  Synthetic
aucuaagaaagauaacau

SEQ ID NO: 112358 - RNA, 19 nt, Artificial Sequence
  Synthetic
uaucuaagaaagauaacau

SEQ ID NO: 112359 - RNA, 20 nt, Artificial Sequence
  Synthetic
uuaucuaagaaagauaacau

SEQ ID NO: 112360 - RNA, 21 nt, Artificial Sequence
  Synthetic
auuaucuaagaaagauaacau

SEQ ID NO: 112361 - RNA, 22 nt, Artificial Sequence
  Synthetic
aauuaucuaagaaagauaacau

SEQ ID NO: 112362 - RNA, 24 nt, Artificial Sequence
  Synthetic
ugaauuaucuaagaaagauaacau

SEQ ID NO: 112363 - RNA, 18 nt, Artificial Sequence
  Synthetic
ccguaagucauauaacau

SEQ ID NO: 112364 - RNA, 19 nt, Artificial Sequence
  Synthetic
accguaagucauauaacau

SEQ ID NO: 112365 - RNA, 20 nt, Artificial Sequence
  Synthetic
uaccguaagucauauaacau

SEQ ID NO: 112366 - RNA, 21 nt, Artificial Sequence
  Synthetic
auaccguaagucauauaacau

SEQ ID NO: 112367 - RNA, 22 nt, Artificial Sequence
  Synthetic
cauaccguaagucauauaacau

SEQ ID NO: 112368 - RNA, 23 nt, Artificial Sequence
  Synthetic
acauaccguaagucauauaacau

SEQ ID NO: 112369 - RNA, 24 nt, Artificial Sequence
  Synthetic
uacauaccguaagucauauaacau

SEQ ID NO: 112370 - RNA, 18 nt, Artificial Sequence
  Synthetic
acccacaaaagcuaacau

SEQ ID NO: 112371 - RNA, 19 nt, Artificial Sequence
  Synthetic
uacccacaaaagcuaacau

SEQ ID NO: 112372 - RNA, 20 nt, Artificial Sequence
  Synthetic
uuacccacaaaagcuaacau

SEQ ID NO: 112373 - RNA, 23 nt, Artificial Sequence
  Synthetic
agguuacccacaaaagcuaacau

SEQ ID NO: 112374 - RNA, 24 nt, Artificial Sequence
  Synthetic
uagguuacccacaaaagcuaacau

SEQ ID NO: 112375 - RNA, 18 nt, Artificial Sequence
  Synthetic
aaaaguuauuauuaacau

SEQ ID NO: 112376 - RNA, 19 nt, Artificial Sequence
  Synthetic
uaaaaguuauuauuaacau

SEQ ID NO: 112377 - RNA, 20 nt, Artificial Sequence
  Synthetic
cuaaaaguuauuauuaacau

SEQ ID NO: 112378 - RNA, 21 nt, Artificial Sequence
  Synthetic
acuaaaaguuauuauuaacau

SEQ ID NO: 112379 - RNA, 22 nt, Artificial Sequence
  Synthetic
cacuaaaaguuauuauuaacau

SEQ ID NO: 112380 - RNA, 23 nt, Artificial Sequence
  Synthetic
ucacuaaaaguuauuauuaacau

SEQ ID NO: 112381 - RNA, 24 nt, Artificial Sequence
  Synthetic
uucacuaaaaguuauuauuaacau

SEQ ID NO: 112382 - RNA, 18 nt, Artificial Sequence
  Synthetic
auugagucucaaacacau

SEQ ID NO: 112383 - RNA, 19 nt, Artificial Sequence
  Synthetic
uauugagucucaaacacau

SEQ ID NO: 112384 - RNA, 20 nt, Artificial Sequence
  Synthetic
uuauugagucucaaacacau

SEQ ID NO: 112385 - RNA, 21 nt, Artificial Sequence
  Synthetic
uuuauugagucucaaacacau

SEQ ID NO: 112386 - RNA, 22 nt, Artificial Sequence
  Synthetic
auuuauugagucucaaacacau

SEQ ID NO: 112387 - RNA, 23 nt, Artificial Sequence
  Synthetic
uauuuauugagucucaaacacau

SEQ ID NO: 112388 - RNA, 24 nt, Artificial Sequence
  Synthetic
auauuuauugagucucaaacacau

SEQ ID NO: 112389 - RNA, 18 nt, Artificial Sequence
  Synthetic
agagagacaugaacacau

SEQ ID NO: 112390 - RNA, 19 nt, Artificial Sequence
  Synthetic
aagagagacaugaacacau

SEQ ID NO: 112391 - RNA, 22 nt, Artificial Sequence
  Synthetic
aggaagagagacaugaacacau

SEQ ID NO: 112392 - RNA, 23 nt, Artificial Sequence
  Synthetic
caggaagagagacaugaacacau

SEQ ID NO: 112393 - RNA, 24 nt, Artificial Sequence
  Synthetic
acaggaagagagacaugaacacau

SEQ ID NO: 112394 - RNA, 21 nt, Artificial Sequence
  Synthetic
aaaauaugucaaaagacacau

SEQ ID NO: 112395 - RNA, 22 nt, Artificial Sequence
  Synthetic
aaaaauaugucaaaagacacau

SEQ ID NO: 112396 - RNA, 23 nt, Artificial Sequence
  Synthetic
uaaaaauaugucaaaagacacau

SEQ ID NO: 112397 - RNA, 24 nt, Artificial Sequence
  Synthetic
auaaaaauaugucaaaagacacau

SEQ ID NO: 112398 - RNA, 18 nt, Artificial Sequence
  Synthetic
uuucaucugaagacacau

SEQ ID NO: 112399 - RNA, 19 nt, Artificial Sequence
  Synthetic
cuuucaucugaagacacau

SEQ ID NO: 112400 - RNA, 20 nt, Artificial Sequence
  Synthetic
ccuuucaucugaagacacau

SEQ ID NO: 112401 - RNA, 21 nt, Artificial Sequence
  Synthetic
uccuuucaucugaagacacau

SEQ ID NO: 112402 - RNA, 22 nt, Artificial Sequence
  Synthetic
uuccuuucaucugaagacacau

SEQ ID NO: 112403 - RNA, 23 nt, Artificial Sequence
  Synthetic
uuuccuuucaucugaagacacau

SEQ ID NO: 112404 - RNA, 24 nt, Artificial Sequence
  Synthetic
uuuuccuuucaucugaagacacau

SEQ ID NO: 112405 - RNA, 18 nt, Artificial Sequence
  Synthetic
uuccauaauuguccacau

SEQ ID NO: 112406 - RNA, 19 nt, Artificial Sequence
  Synthetic
auuccauaauuguccacau

SEQ ID NO: 112407 - RNA, 20 nt, Artificial Sequence
  Synthetic
aauuccauaauuguccacau

SEQ ID NO: 112408 - RNA, 21 nt, Artificial Sequence
  Synthetic
caauuccauaauuguccacau

SEQ ID NO: 112409 - RNA, 23 nt, Artificial Sequence
  Synthetic
agcaauuccauaauuguccacau

SEQ ID NO: 112410 - RNA, 18 nt, Artificial Sequence
  Synthetic
uuguagcuauaagcacau

SEQ ID NO: 112411 - RNA, 19 nt, Artificial Sequence
  Synthetic
auuguagcuauaagcacau

SEQ ID NO: 112412 - RNA, 20 nt, Artificial Sequence
  Synthetic
uauuguagcuauaagcacau

SEQ ID NO: 112413 - RNA, 21 nt, Artificial Sequence
  Synthetic
uuauuguagcuauaagcacau

SEQ ID NO: 112414 - RNA, 22 nt, Artificial Sequence
  Synthetic
auuauuguagcuauaagcacau

SEQ ID NO: 112415 - RNA, 23 nt, Artificial Sequence
  Synthetic
aauuauuguagcuauaagcacau

SEQ ID NO: 112416 - RNA, 24 nt, Artificial Sequence
  Synthetic
caauuauuguagcuauaagcacau

SEQ ID NO: 112417 - RNA, 18 nt, Artificial Sequence
  Synthetic
uuggaaagaagggcacau

SEQ ID NO: 112418 - RNA, 19 nt, Artificial Sequence
  Synthetic
uuuggaaagaagggcacau

SEQ ID NO: 112419 - RNA, 21 nt, Artificial Sequence
  Synthetic
uguuuggaaagaagggcacau

SEQ ID NO: 112420 - RNA, 22 nt, Artificial Sequence
  Synthetic
cuguuuggaaagaagggcacau

SEQ ID NO: 112421 - RNA, 23 nt, Artificial Sequence
  Synthetic
ccuguuuggaaagaagggcacau

SEQ ID NO: 112422 - RNA, 24 nt, Artificial Sequence
  Synthetic
accuguuuggaaagaagggcacau

SEQ ID NO: 112423 - RNA, 18 nt, Artificial Sequence
  Synthetic
aaauauaaacuggcacau

SEQ ID NO: 112424 - RNA, 20 nt, Artificial Sequence
  Synthetic
agaaauauaaacuggcacau

SEQ ID NO: 112425 - RNA, 21 nt, Artificial Sequence
  Synthetic
aagaaauauaaacuggcacau

SEQ ID NO: 112426 - RNA, 22 nt, Artificial Sequence
  Synthetic
caagaaauauaaacuggcacau

SEQ ID NO: 112427 - RNA, 23 nt, Artificial Sequence
  Synthetic
acaagaaauauaaacuggcacau

SEQ ID NO: 112428 - RNA, 18 nt, Artificial Sequence
  Synthetic
cugaaagucacugcacau

SEQ ID NO: 112429 - RNA, 19 nt, Artificial Sequence
  Synthetic
ucugaaagucacugcacau

SEQ ID NO: 112430 - RNA, 20 nt, Artificial Sequence
  Synthetic
aucugaaagucacugcacau

SEQ ID NO: 112431 - RNA, 22 nt, Artificial Sequence
  Synthetic
agaucugaaagucacugcacau

SEQ ID NO: 112432 - RNA, 23 nt, Artificial Sequence
  Synthetic
cagaucugaaagucacugcacau

SEQ ID NO: 112433 - RNA, 24 nt, Artificial Sequence
  Synthetic
ccagaucugaaagucacugcacau

SEQ ID NO: 112434 - RNA, 18 nt, Artificial Sequence
  Synthetic
ccuaagacaguugcacau

SEQ ID NO: 112435 - RNA, 19 nt, Artificial Sequence
  Synthetic
accuaagacaguugcacau

SEQ ID NO: 112436 - RNA, 20 nt, Artificial Sequence
  Synthetic
uaccuaagacaguugcacau

SEQ ID NO: 112437 - RNA, 21 nt, Artificial Sequence
  Synthetic
uuaccuaagacaguugcacau

SEQ ID NO: 112438 - RNA, 22 nt, Artificial Sequence
  Synthetic
uuuaccuaagacaguugcacau

SEQ ID NO: 112439 - RNA, 24 nt, Artificial Sequence
  Synthetic
uguuuaccuaagacaguugcacau

SEQ ID NO: 112440 - RNA, 18 nt, Artificial Sequence
  Synthetic
aucacauauuuaucacau

SEQ ID NO: 112441 - RNA, 19 nt, Artificial Sequence
  Synthetic
uaucacauauuuaucacau

SEQ ID NO: 112442 - RNA, 21 nt, Artificial Sequence
  Synthetic
uguaucacauauuuaucacau

SEQ ID NO: 112443 - RNA, 22 nt, Artificial Sequence
  Synthetic
auguaucacauauuuaucacau

SEQ ID NO: 112444 - RNA, 23 nt, Artificial Sequence
  Synthetic
uauguaucacauauuuaucacau

SEQ ID NO: 112445 - RNA, 24 nt, Artificial Sequence
  Synthetic
auauguaucacauauuuaucacau

SEQ ID NO: 112446 - RNA, 18 nt, Artificial Sequence
  Synthetic
ccauacauauuuucacau

SEQ ID NO: 112447 - RNA, 20 nt, Artificial Sequence
  Synthetic
agccauacauauuuucacau

SEQ ID NO: 112448 - RNA, 22 nt, Artificial Sequence
  Synthetic
ugagccauacauauuuucacau

SEQ ID NO: 112449 - RNA, 23 nt, Artificial Sequence
  Synthetic
cugagccauacauauuuucacau

SEQ ID NO: 112450 - RNA, 18 nt, Artificial Sequence
  Synthetic
aaaaguuauaccagacau

SEQ ID NO: 112451 - RNA, 19 nt, Artificial Sequence
  Synthetic
aaaaaguuauaccagacau

SEQ ID NO: 112452 - RNA, 20 nt, Artificial Sequence
  Synthetic
caaaaaguuauaccagacau

SEQ ID NO: 112453 - RNA, 21 nt, Artificial Sequence
  Synthetic
ccaaaaaguuauaccagacau

SEQ ID NO: 112454 - RNA, 22 nt, Artificial Sequence
  Synthetic
accaaaaaguuauaccagacau

SEQ ID NO: 112455 - RNA, 23 nt, Artificial Sequence
  Synthetic
aaccaaaaaguuauaccagacau

SEQ ID NO: 112456 - RNA, 24 nt, Artificial Sequence
  Synthetic
uaaccaaaaaguuauaccagacau

SEQ ID NO: 112457 - RNA, 19 nt, Artificial Sequence
  Synthetic
aguuauuaccaagagacau

SEQ ID NO: 112458 - RNA, 20 nt, Artificial Sequence
  Synthetic
uaguuauuaccaagagacau

SEQ ID NO: 112459 - RNA, 21 nt, Artificial Sequence
  Synthetic
auaguuauuaccaagagacau

SEQ ID NO: 112460 - RNA, 22 nt, Artificial Sequence
  Synthetic
cauaguuauuaccaagagacau

SEQ ID NO: 112461 - RNA, 23 nt, Artificial Sequence
  Synthetic
ccauaguuauuaccaagagacau

SEQ ID NO: 112462 - RNA, 24 nt, Artificial Sequence
  Synthetic
uccauaguuauuaccaagagacau

SEQ ID NO: 112463 - RNA, 18 nt, Artificial Sequence
  Synthetic
augucauuugugagacau

SEQ ID NO: 112464 - RNA, 19 nt, Artificial Sequence
  Synthetic
uaugucauuugugagacau

SEQ ID NO: 112465 - RNA, 20 nt, Artificial Sequence
  Synthetic
uuaugucauuugugagacau

SEQ ID NO: 112466 - RNA, 21 nt, Artificial Sequence
  Synthetic
uuuaugucauuugugagacau

SEQ ID NO: 112467 - RNA, 22 nt, Artificial Sequence
  Synthetic
auuuaugucauuugugagacau

SEQ ID NO: 112468 - RNA, 23 nt, Artificial Sequence
  Synthetic
aauuuaugucauuugugagacau

SEQ ID NO: 112469 - RNA, 18 nt, Artificial Sequence
  Synthetic
uauggaagaaauagacau

SEQ ID NO: 112470 - RNA, 19 nt, Artificial Sequence
  Synthetic
auauggaagaaauagacau

SEQ ID NO: 112471 - RNA, 20 nt, Artificial Sequence
  Synthetic
cauauggaagaaauagacau

SEQ ID NO: 112472 - RNA, 21 nt, Artificial Sequence
  Synthetic
ccauauggaagaaauagacau

SEQ ID NO: 112473 - RNA, 22 nt, Artificial Sequence
  Synthetic
cccauauggaagaaauagacau

SEQ ID NO: 112474 - RNA, 23 nt, Artificial Sequence
  Synthetic
ucccauauggaagaaauagacau

SEQ ID NO: 112475 - RNA, 24 nt, Artificial Sequence
  Synthetic
uucccauauggaagaaauagacau

SEQ ID NO: 112476 - RNA, 21 nt, Artificial Sequence
  Synthetic
acuucugcuuuaagaggacau

SEQ ID NO: 112477 - RNA, 22 nt, Artificial Sequence
  Synthetic
aacuucugcuuuaagaggacau

SEQ ID NO: 112478 - RNA, 18 nt, Artificial Sequence
  Synthetic
aauuuguaaaauggacau

SEQ ID NO: 112479 - RNA, 19 nt, Artificial Sequence
  Synthetic
uaauuuguaaaauggacau

SEQ ID NO: 112480 - RNA, 22 nt, Artificial Sequence
  Synthetic
ugguaauuuguaaaauggacau

SEQ ID NO: 112481 - RNA, 24 nt, Artificial Sequence
  Synthetic
ugugguaauuuguaaaauggacau

SEQ ID NO: 112482 - RNA, 18 nt, Artificial Sequence
  Synthetic
cacacucacacaugacau

SEQ ID NO: 112483 - RNA, 19 nt, Artificial Sequence
  Synthetic
ucacacucacacaugacau

SEQ ID NO: 112484 - RNA, 20 nt, Artificial Sequence
  Synthetic
aucacacucacacaugacau

SEQ ID NO: 112485 - RNA, 22 nt, Artificial Sequence
  Synthetic
agaucacacucacacaugacau

SEQ ID NO: 112486 - RNA, 23 nt, Artificial Sequence
  Synthetic
cagaucacacucacacaugacau

SEQ ID NO: 112487 - RNA, 18 nt, Artificial Sequence
  Synthetic
cugcagccuaauugacau

SEQ ID NO: 112488 - RNA, 19 nt, Artificial Sequence
  Synthetic
acugcagccuaauugacau

SEQ ID NO: 112489 - RNA, 21 nt, Artificial Sequence
  Synthetic
ugacugcagccuaauugacau

SEQ ID NO: 112490 - RNA, 22 nt, Artificial Sequence
  Synthetic
augacugcagccuaauugacau

SEQ ID NO: 112491 - RNA, 23 nt, Artificial Sequence
  Synthetic
uaugacugcagccuaauugacau

SEQ ID NO: 112492 - RNA, 24 nt, Artificial Sequence
  Synthetic
auaugacugcagccuaauugacau

SEQ ID NO: 112493 - RNA, 18 nt, Artificial Sequence
  Synthetic
cauuaaaacuaaauacau

SEQ ID NO: 112494 - RNA, 20 nt, Artificial Sequence
  Synthetic
ugcauuaaaacuaaauacau

SEQ ID NO: 112495 - RNA, 21 nt, Artificial Sequence
  Synthetic
uugcauuaaaacuaaauacau

SEQ ID NO: 112496 - RNA, 22 nt, Artificial Sequence
  Synthetic
uuugcauuaaaacuaaauacau

SEQ ID NO: 112497 - RNA, 23 nt, Artificial Sequence
  Synthetic
cuuugcauuaaaacuaaauacau

SEQ ID NO: 112498 - RNA, 18 nt, Artificial Sequence
  Synthetic
uaccaccucucaauacau

SEQ ID NO: 112499 - RNA, 19 nt, Artificial Sequence
  Synthetic
auaccaccucucaauacau

SEQ ID NO: 112500 - RNA, 20 nt, Artificial Sequence
  Synthetic
aauaccaccucucaauacau

SEQ ID NO: 112501 - RNA, 22 nt, Artificial Sequence
  Synthetic
agaauaccaccucucaauacau

SEQ ID NO: 112502 - RNA, 23 nt, Artificial Sequence
  Synthetic
aagaauaccaccucucaauacau

SEQ ID NO: 112503 - RNA, 24 nt, Artificial Sequence
  Synthetic
uaagaauaccaccucucaauacau

SEQ ID NO: 112504 - RNA, 18 nt, Artificial Sequence
  Synthetic
uuagaaaucugaauacau

SEQ ID NO: 112505 - RNA, 19 nt, Artificial Sequence
  Synthetic
auuagaaaucugaauacau

SEQ ID NO: 112506 - RNA, 21 nt, Artificial Sequence
  Synthetic
ugauuagaaaucugaauacau

SEQ ID NO: 112507 - RNA, 22 nt, Artificial Sequence
  Synthetic
uugauuagaaaucugaauacau

SEQ ID NO: 112508 - RNA, 24 nt, Artificial Sequence
  Synthetic
aguugauuagaaaucugaauacau

SEQ ID NO: 112509 - RNA, 18 nt, Artificial Sequence
  Synthetic
auuaacaguauaauacau

SEQ ID NO: 112510 - RNA, 19 nt, Artificial Sequence
  Synthetic
cauuaacaguauaauacau

SEQ ID NO: 112511 - RNA, 20 nt, Artificial Sequence
  Synthetic
ucauuaacaguauaauacau

SEQ ID NO: 112512 - RNA, 21 nt, Artificial Sequence
  Synthetic
uucauuaacaguauaauacau

SEQ ID NO: 112513 - RNA, 22 nt, Artificial Sequence
  Synthetic
cuucauuaacaguauaauacau

SEQ ID NO: 112514 - RNA, 24 nt, Artificial Sequence
  Synthetic
ugcuucauuaacaguauaauacau

SEQ ID NO: 112515 - RNA, 18 nt, Artificial Sequence
  Synthetic
cacuuuaaaguaauacau

SEQ ID NO: 112516 - RNA, 20 nt, Artificial Sequence
  Synthetic
agcacuuuaaaguaauacau

SEQ ID NO: 112517 - RNA, 21 nt, Artificial Sequence
  Synthetic
uagcacuuuaaaguaauacau

SEQ ID NO: 112518 - RNA, 22 nt, Artificial Sequence
  Synthetic
auagcacuuuaaaguaauacau

SEQ ID NO: 112519 - RNA, 23 nt, Artificial Sequence
  Synthetic
aauagcacuuuaaaguaauacau

SEQ ID NO: 112520 - RNA, 24 nt, Artificial Sequence
  Synthetic
uaauagcacuuuaaaguaauacau

SEQ ID NO: 112521 - RNA, 21 nt, Artificial Sequence
  Synthetic
uguauauauacaggcauacau

SEQ ID NO: 112522 - RNA, 22 nt, Artificial Sequence
  Synthetic
cuguauauauacaggcauacau

SEQ ID NO: 112523 - RNA, 18 nt, Artificial Sequence
  Synthetic
uacaaagugaagauacau

SEQ ID NO: 112524 - RNA, 19 nt, Artificial Sequence
  Synthetic
cuacaaagugaagauacau

SEQ ID NO: 112525 - RNA, 21 nt, Artificial Sequence
  Synthetic
ugcuacaaagugaagauacau

SEQ ID NO: 112526 - RNA, 23 nt, Artificial Sequence
  Synthetic
agugcuacaaagugaagauacau

SEQ ID NO: 112527 - RNA, 18 nt, Artificial Sequence
  Synthetic
agguaaucuguccuacau

SEQ ID NO: 112528 - RNA, 20 nt, Artificial Sequence
  Synthetic
agagguaaucuguccuacau

SEQ ID NO: 112529 - RNA, 21 nt, Artificial Sequence
  Synthetic
aagagguaaucuguccuacau

SEQ ID NO: 112530 - RNA, 23 nt, Artificial Sequence
  Synthetic
agaagagguaaucuguccuacau

SEQ ID NO: 112531 - RNA, 24 nt, Artificial Sequence
  Synthetic
cagaagagguaaucuguccuacau

SEQ ID NO: 112532 - RNA, 18 nt, Artificial Sequence
  Synthetic
acaugagauuuccuacau

SEQ ID NO: 112533 - RNA, 19 nt, Artificial Sequence
  Synthetic
aacaugagauuuccuacau

SEQ ID NO: 112534 - RNA, 20 nt, Artificial Sequence
  Synthetic
aaacaugagauuuccuacau

SEQ ID NO: 112535 - RNA, 22 nt, Artificial Sequence
  Synthetic
agaaacaugagauuuccuacau

SEQ ID NO: 112536 - RNA, 23 nt, Artificial Sequence
  Synthetic
aagaaacaugagauuuccuacau

SEQ ID NO: 112537 - RNA, 24 nt, Artificial Sequence
  Synthetic
aaagaaacaugagauuuccuacau

SEQ ID NO: 112538 - RNA, 19 nt, Artificial Sequence
  Synthetic
agaauuugauaaucuacau

SEQ ID NO: 112539 - RNA, 20 nt, Artificial Sequence
  Synthetic
cagaauuugauaaucuacau

SEQ ID NO: 112540 - RNA, 21 nt, Artificial Sequence
  Synthetic
acagaauuugauaaucuacau

SEQ ID NO: 112541 - RNA, 22 nt, Artificial Sequence
  Synthetic
aacagaauuugauaaucuacau

SEQ ID NO: 112542 - RNA, 23 nt, Artificial Sequence
  Synthetic
uaacagaauuugauaaucuacau

SEQ ID NO: 112543 - RNA, 24 nt, Artificial Sequence
  Synthetic
cuaacagaauuugauaaucuacau

SEQ ID NO: 112544 - RNA, 18 nt, Artificial Sequence
  Synthetic
aaccaaaggugaguacau

SEQ ID NO: 112545 - RNA, 19 nt, Artificial Sequence
  Synthetic
uaaccaaaggugaguacau

SEQ ID NO: 112546 - RNA, 20 nt, Artificial Sequence
  Synthetic
cuaaccaaaggugaguacau

SEQ ID NO: 112547 - RNA, 22 nt, Artificial Sequence
  Synthetic
agcuaaccaaaggugaguacau

SEQ ID NO: 112548 - RNA, 24 nt, Artificial Sequence
  Synthetic
agagcuaaccaaaggugaguacau

SEQ ID NO: 112549 - RNA, 18 nt, Artificial Sequence
  Synthetic
uugcucugcaugguacau

SEQ ID NO: 112550 - RNA, 19 nt, Artificial Sequence
  Synthetic
auugcucugcaugguacau

SEQ ID NO: 112551 - RNA, 20 nt, Artificial Sequence
  Synthetic
cauugcucugcaugguacau

SEQ ID NO: 112552 - RNA, 21 nt, Artificial Sequence
  Synthetic
acauugcucugcaugguacau

SEQ ID NO: 112553 - RNA, 22 nt, Artificial Sequence
  Synthetic
uacauugcucugcaugguacau

SEQ ID NO: 112554 - RNA, 23 nt, Artificial Sequence
  Synthetic
auacauugcucugcaugguacau

SEQ ID NO: 112555 - RNA, 18 nt, Artificial Sequence
  Synthetic
uuuggcuauuugguacau

SEQ ID NO: 112556 - RNA, 19 nt, Artificial Sequence
  Synthetic
uuuuggcuauuugguacau

SEQ ID NO: 112557 - RNA, 21 nt, Artificial Sequence
  Synthetic
uguuuuggcuauuugguacau

SEQ ID NO: 112558 - RNA, 22 nt, Artificial Sequence
  Synthetic
uuguuuuggcuauuugguacau

SEQ ID NO: 112559 - RNA, 23 nt, Artificial Sequence
  Synthetic
auuguuuuggcuauuugguacau

SEQ ID NO: 112560 - RNA, 24 nt, Artificial Sequence
  Synthetic
aauuguuuuggcuauuugguacau

SEQ ID NO: 112561 - RNA, 18 nt, Artificial Sequence
  Synthetic
aucaugggaauuguacau

SEQ ID NO: 112562 - RNA, 19 nt, Artificial Sequence
  Synthetic
aaucaugggaauuguacau

SEQ ID NO: 112563 - RNA, 21 nt, Artificial Sequence
  Synthetic
agaaucaugggaauuguacau

SEQ ID NO: 112564 - RNA, 22 nt, Artificial Sequence
  Synthetic
aagaaucaugggaauuguacau

SEQ ID NO: 112565 - RNA, 23 nt, Artificial Sequence
  Synthetic
caagaaucaugggaauuguacau

SEQ ID NO: 112566 - RNA, 24 nt, Artificial Sequence
  Synthetic
acaagaaucaugggaauuguacau

SEQ ID NO: 112567 - RNA, 18 nt, Artificial Sequence
  Synthetic
caacaugaacuauuacau

SEQ ID NO: 112568 - RNA, 21 nt, Artificial Sequence
  Synthetic
aggcaacaugaacuauuacau

SEQ ID NO: 112569 - RNA, 22 nt, Artificial Sequence
  Synthetic
aaggcaacaugaacuauuacau

SEQ ID NO: 112570 - RNA, 23 nt, Artificial Sequence
  Synthetic
uaaggcaacaugaacuauuacau

SEQ ID NO: 112571 - RNA, 24 nt, Artificial Sequence
  Synthetic
uuaaggcaacaugaacuauuacau

SEQ ID NO: 112572 - RNA, 19 nt, Artificial Sequence
  Synthetic
cguugaucauauuuuacau

SEQ ID NO: 112573 - RNA, 22 nt, Artificial Sequence
  Synthetic
aggcguugaucauauuuuacau

SEQ ID NO: 112574 - RNA, 23 nt, Artificial Sequence
  Synthetic
caggcguugaucauauuuuacau

SEQ ID NO: 112575 - RNA, 24 nt, Artificial Sequence
  Synthetic
ccaggcguugaucauauuuuacau

SEQ ID NO: 112576 - RNA, 21 nt, Artificial Sequence
  Synthetic
auuuuacaagaauuuuuacau

SEQ ID NO: 112577 - RNA, 22 nt, Artificial Sequence
  Synthetic
uauuuuacaagaauuuuuacau

SEQ ID NO: 112578 - RNA, 23 nt, Artificial Sequence
  Synthetic
uuauuuuacaagaauuuuuacau

SEQ ID NO: 112579 - RNA, 24 nt, Artificial Sequence
  Synthetic
auuauuuuacaagaauuuuuacau

SEQ ID NO: 112580 - RNA, 18 nt, Artificial Sequence
  Synthetic
acucauuacacaaaccau

SEQ ID NO: 112581 - RNA, 19 nt, Artificial Sequence
  Synthetic
cacucauuacacaaaccau

SEQ ID NO: 112582 - RNA, 22 nt, Artificial Sequence
  Synthetic
uggcacucauuacacaaaccau

SEQ ID NO: 112583 - RNA, 19 nt, Artificial Sequence
  Synthetic
ugagcuuccaggaaaccau

SEQ ID NO: 112584 - RNA, 20 nt, Artificial Sequence
  Synthetic
augagcuuccaggaaaccau

SEQ ID NO: 112585 - RNA, 21 nt, Artificial Sequence
  Synthetic
aaugagcuuccaggaaaccau

SEQ ID NO: 112586 - RNA, 23 nt, Artificial Sequence
  Synthetic
agaaugagcuuccaggaaaccau

SEQ ID NO: 112587 - RNA, 24 nt, Artificial Sequence
  Synthetic
uagaaugagcuuccaggaaaccau

SEQ ID NO: 112588 - RNA, 18 nt, Artificial Sequence
  Synthetic
cauuaaaauaucaaccau

SEQ ID NO: 112589 - RNA, 19 nt, Artificial Sequence
  Synthetic
ccauuaaaauaucaaccau

SEQ ID NO: 112590 - RNA, 20 nt, Artificial Sequence
  Synthetic
accauuaaaauaucaaccau

SEQ ID NO: 112591 - RNA, 21 nt, Artificial Sequence
  Synthetic
aaccauuaaaauaucaaccau

SEQ ID NO: 112592 - RNA, 22 nt, Artificial Sequence
  Synthetic
aaaccauuaaaauaucaaccau

SEQ ID NO: 112593 - RNA, 23 nt, Artificial Sequence
  Synthetic
uaaaccauuaaaauaucaaccau

SEQ ID NO: 112594 - RNA, 24 nt, Artificial Sequence
  Synthetic
auaaaccauuaaaauaucaaccau

SEQ ID NO: 112595 - RNA, 18 nt, Artificial Sequence
  Synthetic
uaaauuuuccggaaccau

SEQ ID NO: 112596 - RNA, 19 nt, Artificial Sequence
  Synthetic
uuaaauuuuccggaaccau

SEQ ID NO: 112597 - RNA, 20 nt, Artificial Sequence
  Synthetic
uuuaaauuuuccggaaccau

SEQ ID NO: 112598 - RNA, 21 nt, Artificial Sequence
  Synthetic
uuuuaaauuuuccggaaccau

SEQ ID NO: 112599 - RNA, 23 nt, Artificial Sequence
  Synthetic
aguuuuaaauuuuccggaaccau

SEQ ID NO: 112600 - RNA, 24 nt, Artificial Sequence
  Synthetic
uaguuuuaaauuuuccggaaccau

SEQ ID NO: 112601 - RNA, 18 nt, Artificial Sequence
  Synthetic
acacagaguaauaaccau

SEQ ID NO: 112602 - RNA, 19 nt, Artificial Sequence
  Synthetic
cacacagaguaauaaccau

SEQ ID NO: 112603 - RNA, 20 nt, Artificial Sequence
  Synthetic
ucacacagaguaauaaccau

SEQ ID NO: 112604 - RNA, 21 nt, Artificial Sequence
  Synthetic
uucacacagaguaauaaccau

SEQ ID NO: 112605 - RNA, 22 nt, Artificial Sequence
  Synthetic
auucacacagaguaauaaccau

SEQ ID NO: 112606 - RNA, 24 nt, Artificial Sequence
  Synthetic
agauucacacagaguaauaaccau

SEQ ID NO: 112607 - RNA, 18 nt, Artificial Sequence
  Synthetic
uaaaauccauauaaccau

SEQ ID NO: 112608 - RNA, 19 nt, Artificial Sequence
  Synthetic
auaaaauccauauaaccau

SEQ ID NO: 112609 - RNA, 20 nt, Artificial Sequence
  Synthetic
aauaaaauccauauaaccau

SEQ ID NO: 112610 - RNA, 22 nt, Artificial Sequence
  Synthetic
agaauaaaauccauauaaccau

SEQ ID NO: 112611 - RNA, 23 nt, Artificial Sequence
  Synthetic
cagaauaaaauccauauaaccau

SEQ ID NO: 112612 - RNA, 24 nt, Artificial Sequence
  Synthetic
ucagaauaaaauccauauaaccau

SEQ ID NO: 112613 - RNA, 18 nt, Artificial Sequence
  Synthetic
uacccaaguggccaccau

SEQ ID NO: 112614 - RNA, 19 nt, Artificial Sequence
  Synthetic
auacccaaguggccaccau

SEQ ID NO: 112615 - RNA, 20 nt, Artificial Sequence
  Synthetic
cauacccaaguggccaccau

SEQ ID NO: 112616 - RNA, 21 nt, Artificial Sequence
  Synthetic
ucauacccaaguggccaccau

SEQ ID NO: 112617 - RNA, 22 nt, Artificial Sequence
  Synthetic
cucauacccaaguggccaccau

SEQ ID NO: 112618 - RNA, 23 nt, Artificial Sequence
  Synthetic
ccucauacccaaguggccaccau

SEQ ID NO: 112619 - RNA, 24 nt, Artificial Sequence
  Synthetic
uccucauacccaaguggccaccau

SEQ ID NO: 112620 - RNA, 18 nt, Artificial Sequence
  Synthetic
ccugaccauaagcaccau

SEQ ID NO: 112621 - RNA, 19 nt, Artificial Sequence
  Synthetic
cccugaccauaagcaccau

SEQ ID NO: 112622 - RNA, 21 nt, Artificial Sequence
  Synthetic
agcccugaccauaagcaccau

SEQ ID NO: 112623 - RNA, 22 nt, Artificial Sequence
  Synthetic
uagcccugaccauaagcaccau

SEQ ID NO: 112624 - RNA, 23 nt, Artificial Sequence
  Synthetic
cuagcccugaccauaagcaccau

SEQ ID NO: 112625 - RNA, 18 nt, Artificial Sequence
  Synthetic
aaauuuuacuuucaccau

SEQ ID NO: 112626 - RNA, 20 nt, Artificial Sequence
  Synthetic
agaaauuuuacuuucaccau

SEQ ID NO: 112627 - RNA, 21 nt, Artificial Sequence
  Synthetic
aagaaauuuuacuuucaccau

SEQ ID NO: 112628 - RNA, 22 nt, Artificial Sequence
  Synthetic
uaagaaauuuuacuuucaccau

SEQ ID NO: 112629 - RNA, 23 nt, Artificial Sequence
  Synthetic
uuaagaaauuuuacuuucaccau

SEQ ID NO: 112630 - RNA, 24 nt, Artificial Sequence
  Synthetic
auuaagaaauuuuacuuucaccau

SEQ ID NO: 112631 - RNA, 18 nt, Artificial Sequence
  Synthetic
cuguaaccaaaagaccau

SEQ ID NO: 112632 - RNA, 19 nt, Artificial Sequence
  Synthetic
ccuguaaccaaaagaccau

SEQ ID NO: 112633 - RNA, 20 nt, Artificial Sequence
  Synthetic
cccuguaaccaaaagaccau

SEQ ID NO: 112634 - RNA, 21 nt, Artificial Sequence
  Synthetic
acccuguaaccaaaagaccau

SEQ ID NO: 112635 - RNA, 22 nt, Artificial Sequence
  Synthetic
cacccuguaaccaaaagaccau

SEQ ID NO: 112636 - RNA, 23 nt, Artificial Sequence
  Synthetic
ucacccuguaaccaaaagaccau

SEQ ID NO: 112637 - RNA, 24 nt, Artificial Sequence
  Synthetic
uucacccuguaaccaaaagaccau

SEQ ID NO: 112638 - RNA, 18 nt, Artificial Sequence
  Synthetic
aacaccaagcaagaccau

SEQ ID NO: 112639 - RNA, 19 nt, Artificial Sequence
  Synthetic
uaacaccaagcaagaccau

SEQ ID NO: 112640 - RNA, 21 nt, Artificial Sequence
  Synthetic
aguaacaccaagcaagaccau

SEQ ID NO: 112641 - RNA, 22 nt, Artificial Sequence
  Synthetic
aaguaacaccaagcaagaccau

SEQ ID NO: 112642 - RNA, 23 nt, Artificial Sequence
  Synthetic
uaaguaacaccaagcaagaccau

SEQ ID NO: 112643 - RNA, 24 nt, Artificial Sequence
  Synthetic
auaaguaacaccaagcaagaccau

SEQ ID NO: 112644 - RNA, 19 nt, Artificial Sequence
  Synthetic
ugucugaguaggggaccau

SEQ ID NO: 112645 - RNA, 20 nt, Artificial Sequence
  Synthetic
cugucugaguaggggaccau

SEQ ID NO: 112646 - RNA, 23 nt, Artificial Sequence
  Synthetic
aggcugucugaguaggggaccau

SEQ ID NO: 112647 - RNA, 18 nt, Artificial Sequence
  Synthetic
aaugcuuucuuggaccau

SEQ ID NO: 112648 - RNA, 19 nt, Artificial Sequence
  Synthetic
aaaugcuuucuuggaccau

SEQ ID NO: 112649 - RNA, 20 nt, Artificial Sequence
  Synthetic
aaaaugcuuucuuggaccau

SEQ ID NO: 112650 - RNA, 22 nt, Artificial Sequence
  Synthetic
agaaaaugcuuucuuggaccau

SEQ ID NO: 112651 - RNA, 23 nt, Artificial Sequence
  Synthetic
aagaaaaugcuuucuuggaccau

SEQ ID NO: 112652 - RNA, 24 nt, Artificial Sequence
  Synthetic
uaagaaaaugcuuucuuggaccau

SEQ ID NO: 112653 - RNA, 18 nt, Artificial Sequence
  Synthetic
ucuuggagaaaauaccau

SEQ ID NO: 112654 - RNA, 19 nt, Artificial Sequence
  Synthetic
cucuuggagaaaauaccau

SEQ ID NO: 112655 - RNA, 20 nt, Artificial Sequence
  Synthetic
ucucuuggagaaaauaccau

SEQ ID NO: 112656 - RNA, 21 nt, Artificial Sequence
  Synthetic
uucucuuggagaaaauaccau

SEQ ID NO: 112657 - RNA, 22 nt, Artificial Sequence
  Synthetic
cuucucuuggagaaaauaccau

SEQ ID NO: 112658 - RNA, 23 nt, Artificial Sequence
  Synthetic
ucuucucuuggagaaaauaccau

SEQ ID NO: 112659 - RNA, 18 nt, Artificial Sequence
  Synthetic
auaucuauuaaauaccau

SEQ ID NO: 112660 - RNA, 19 nt, Artificial Sequence
  Synthetic
cauaucuauuaaauaccau

SEQ ID NO: 112661 - RNA, 20 nt, Artificial Sequence
  Synthetic
ccauaucuauuaaauaccau

SEQ ID NO: 112662 - RNA, 21 nt, Artificial Sequence
  Synthetic
uccauaucuauuaaauaccau

SEQ ID NO: 112663 - RNA, 22 nt, Artificial Sequence
  Synthetic
auccauaucuauuaaauaccau

SEQ ID NO: 112664 - RNA, 23 nt, Artificial Sequence
  Synthetic
cauccauaucuauuaaauaccau

SEQ ID NO: 112665 - RNA, 21 nt, Artificial Sequence
  Synthetic
auuaaagcaaaauaauaccau

SEQ ID NO: 112666 - RNA, 22 nt, Artificial Sequence
  Synthetic
aauuaaagcaaaauaauaccau

SEQ ID NO: 112667 - RNA, 23 nt, Artificial Sequence
  Synthetic
aaauuaaagcaaaauaauaccau

SEQ ID NO: 112668 - RNA, 24 nt, Artificial Sequence
  Synthetic
aaaauuaaagcaaaauaauaccau

SEQ ID NO: 112669 - RNA, 18 nt, Artificial Sequence
  Synthetic
uauaagagguuauaccau

SEQ ID NO: 112670 - RNA, 19 nt, Artificial Sequence
  Synthetic
auauaagagguuauaccau

SEQ ID NO: 112671 - RNA, 21 nt, Artificial Sequence
  Synthetic
agauauaagagguuauaccau

SEQ ID NO: 112672 - RNA, 22 nt, Artificial Sequence
  Synthetic
uagauauaagagguuauaccau

SEQ ID NO: 112673 - RNA, 23 nt, Artificial Sequence
  Synthetic
cuagauauaagagguuauaccau

SEQ ID NO: 112674 - RNA, 24 nt, Artificial Sequence
  Synthetic
ucuagauauaagagguuauaccau

SEQ ID NO: 112675 - RNA, 18 nt, Artificial Sequence
  Synthetic
auucccaugcucuaccau

SEQ ID NO: 112676 - RNA, 19 nt, Artificial Sequence
  Synthetic
cauucccaugcucuaccau

SEQ ID NO: 112677 - RNA, 20 nt, Artificial Sequence
  Synthetic
ucauucccaugcucuaccau

SEQ ID NO: 112678 - RNA, 21 nt, Artificial Sequence
  Synthetic
uucauucccaugcucuaccau

SEQ ID NO: 112679 - RNA, 22 nt, Artificial Sequence
  Synthetic
auucauucccaugcucuaccau

SEQ ID NO: 112680 - RNA, 23 nt, Artificial Sequence
  Synthetic
cauucauucccaugcucuaccau

SEQ ID NO: 112681 - RNA, 24 nt, Artificial Sequence
  Synthetic
ucauucauucccaugcucuaccau

SEQ ID NO: 112682 - RNA, 18 nt, Artificial Sequence
  Synthetic
ucaaacagagauuaccau

SEQ ID NO: 112683 - RNA, 19 nt, Artificial Sequence
  Synthetic
aucaaacagagauuaccau

SEQ ID NO: 112684 - RNA, 20 nt, Artificial Sequence
  Synthetic
uaucaaacagagauuaccau

SEQ ID NO: 112685 - RNA, 21 nt, Artificial Sequence
  Synthetic
auaucaaacagagauuaccau

SEQ ID NO: 112686 - RNA, 22 nt, Artificial Sequence
  Synthetic
uauaucaaacagagauuaccau

SEQ ID NO: 112687 - RNA, 23 nt, Artificial Sequence
  Synthetic
auauaucaaacagagauuaccau

SEQ ID NO: 112688 - RNA, 24 nt, Artificial Sequence
  Synthetic
uauauaucaaacagagauuaccau

SEQ ID NO: 112689 - RNA, 18 nt, Artificial Sequence
  Synthetic
uguuaucggccaacccau

SEQ ID NO: 112690 - RNA, 20 nt, Artificial Sequence
  Synthetic
uguguuaucggccaacccau

SEQ ID NO: 112691 - RNA, 21 nt, Artificial Sequence
  Synthetic
auguguuaucggccaacccau

SEQ ID NO: 112692 - RNA, 22 nt, Artificial Sequence
  Synthetic
aauguguuaucggccaacccau

SEQ ID NO: 112693 - RNA, 23 nt, Artificial Sequence
  Synthetic
aaauguguuaucggccaacccau

SEQ ID NO: 112694 - RNA, 24 nt, Artificial Sequence
  Synthetic
uaaauguguuaucggccaacccau

SEQ ID NO: 112695 - RNA, 18 nt, Artificial Sequence
  Synthetic
aauuuaacagccacccau

SEQ ID NO: 112696 - RNA, 19 nt, Artificial Sequence
  Synthetic
aaauuuaacagccacccau

SEQ ID NO: 112697 - RNA, 20 nt, Artificial Sequence
  Synthetic
aaaauuuaacagccacccau

SEQ ID NO: 112698 - RNA, 21 nt, Artificial Sequence
  Synthetic
uaaaauuuaacagccacccau

SEQ ID NO: 112699 - RNA, 22 nt, Artificial Sequence
  Synthetic
cuaaaauuuaacagccacccau

SEQ ID NO: 112700 - RNA, 23 nt, Artificial Sequence
  Synthetic
acuaaaauuuaacagccacccau

SEQ ID NO: 112701 - RNA, 24 nt, Artificial Sequence
  Synthetic
uacuaaaauuuaacagccacccau

SEQ ID NO: 112702 - RNA, 19 nt, Artificial Sequence
  Synthetic
agcaucaaucuggccccau

SEQ ID NO: 112703 - RNA, 20 nt, Artificial Sequence
  Synthetic
cagcaucaaucuggccccau

SEQ ID NO: 112704 - RNA, 21 nt, Artificial Sequence
  Synthetic
ccagcaucaaucuggccccau

SEQ ID NO: 112705 - RNA, 22 nt, Artificial Sequence
  Synthetic
accagcaucaaucuggccccau

SEQ ID NO: 112706 - RNA, 24 nt, Artificial Sequence
  Synthetic
agaccagcaucaaucuggccccau

SEQ ID NO: 112707 - RNA, 18 nt, Artificial Sequence
  Synthetic
uugacugcuuuuccccau

SEQ ID NO: 112708 - RNA, 20 nt, Artificial Sequence
  Synthetic
uguugacugcuuuuccccau

SEQ ID NO: 112709 - RNA, 21 nt, Artificial Sequence
  Synthetic
uuguugacugcuuuuccccau

SEQ ID NO: 112710 - RNA, 22 nt, Artificial Sequence
  Synthetic
uuuguugacugcuuuuccccau

SEQ ID NO: 112711 - RNA, 23 nt, Artificial Sequence
  Synthetic
uuuuguugacugcuuuuccccau

SEQ ID NO: 112712 - RNA, 24 nt, Artificial Sequence
  Synthetic
cuuuuguugacugcuuuuccccau

SEQ ID NO: 112713 - RNA, 18 nt, Artificial Sequence
  Synthetic
ucauauaaucacgcccau

SEQ ID NO: 112714 - RNA, 19 nt, Artificial Sequence
  Synthetic
aucauauaaucacgcccau

SEQ ID NO: 112715 - RNA, 20 nt, Artificial Sequence
  Synthetic
aaucauauaaucacgcccau

SEQ ID NO: 112716 - RNA, 21 nt, Artificial Sequence
  Synthetic
caaucauauaaucacgcccau

SEQ ID NO: 112717 - RNA, 22 nt, Artificial Sequence
  Synthetic
acaaucauauaaucacgcccau

SEQ ID NO: 112718 - RNA, 23 nt, Artificial Sequence
  Synthetic
aacaaucauauaaucacgcccau

SEQ ID NO: 112719 - RNA, 24 nt, Artificial Sequence
  Synthetic
uaacaaucauauaaucacgcccau

SEQ ID NO: 112720 - RNA, 18 nt, Artificial Sequence
  Synthetic
augaauaacugaagccau

SEQ ID NO: 112721 - RNA, 20 nt, Artificial Sequence
  Synthetic
ugaugaauaacugaagccau

SEQ ID NO: 112722 - RNA, 22 nt, Artificial Sequence
  Synthetic
agugaugaauaacugaagccau

SEQ ID NO: 112723 - RNA, 23 nt, Artificial Sequence
  Synthetic
uagugaugaauaacugaagccau

SEQ ID NO: 112724 - RNA, 24 nt, Artificial Sequence
  Synthetic
auagugaugaauaacugaagccau

SEQ ID NO: 112725 - RNA, 18 nt, Artificial Sequence
  Synthetic
cacacuguaaagagccau

SEQ ID NO: 112726 - RNA, 19 nt, Artificial Sequence
  Synthetic
acacacuguaaagagccau

SEQ ID NO: 112727 - RNA, 20 nt, Artificial Sequence
  Synthetic
cacacacuguaaagagccau

SEQ ID NO: 112728 - RNA, 22 nt, Artificial Sequence
  Synthetic
ugcacacacuguaaagagccau

SEQ ID NO: 112729 - RNA, 23 nt, Artificial Sequence
  Synthetic
uugcacacacuguaaagagccau

SEQ ID NO: 112730 - RNA, 24 nt, Artificial Sequence
  Synthetic
auugcacacacuguaaagagccau

SEQ ID NO: 112731 - RNA, 19 nt, Artificial Sequence
  Synthetic
agggagcagagcaugccau

SEQ ID NO: 112732 - RNA, 20 nt, Artificial Sequence
  Synthetic
uagggagcagagcaugccau

SEQ ID NO: 112733 - RNA, 21 nt, Artificial Sequence
  Synthetic
cuagggagcagagcaugccau

SEQ ID NO: 112734 - RNA, 22 nt, Artificial Sequence
  Synthetic
ucuagggagcagagcaugccau

SEQ ID NO: 112735 - RNA, 24 nt, Artificial Sequence
  Synthetic
agucuagggagcagagcaugccau

SEQ ID NO: 112736 - RNA, 19 nt, Artificial Sequence
  Synthetic
ugaugacuaaauaugccau

SEQ ID NO: 112737 - RNA, 20 nt, Artificial Sequence
  Synthetic
augaugacuaaauaugccau

SEQ ID NO: 112738 - RNA, 21 nt, Artificial Sequence
  Synthetic
caugaugacuaaauaugccau

SEQ ID NO: 112739 - RNA, 22 nt, Artificial Sequence
  Synthetic
ucaugaugacuaaauaugccau

SEQ ID NO: 112740 - RNA, 23 nt, Artificial Sequence
  Synthetic
uucaugaugacuaaauaugccau

SEQ ID NO: 112741 - RNA, 18 nt, Artificial Sequence
  Synthetic
cagcauuaacauugccau

SEQ ID NO: 112742 - RNA, 19 nt, Artificial Sequence
  Synthetic
ccagcauuaacauugccau

SEQ ID NO: 112743 - RNA, 21 nt, Artificial Sequence
  Synthetic
agccagcauuaacauugccau

SEQ ID NO: 112744 - RNA, 22 nt, Artificial Sequence
  Synthetic
aagccagcauuaacauugccau

SEQ ID NO: 112745 - RNA, 23 nt, Artificial Sequence
  Synthetic
aaagccagcauuaacauugccau

SEQ ID NO: 112746 - RNA, 24 nt, Artificial Sequence
  Synthetic
caaagccagcauuaacauugccau

SEQ ID NO: 112747 - RNA, 18 nt, Artificial Sequence
  Synthetic
ugaaccuuuuagauccau

SEQ ID NO: 112748 - RNA, 19 nt, Artificial Sequence
  Synthetic
augaaccuuuuagauccau

SEQ ID NO: 112749 - RNA, 20 nt, Artificial Sequence
  Synthetic
uaugaaccuuuuagauccau

SEQ ID NO: 112750 - RNA, 21 nt, Artificial Sequence
  Synthetic
cuaugaaccuuuuagauccau

SEQ ID NO: 112751 - RNA, 22 nt, Artificial Sequence
  Synthetic
acuaugaaccuuuuagauccau

SEQ ID NO: 112752 - RNA, 23 nt, Artificial Sequence
  Synthetic
cacuaugaaccuuuuagauccau

SEQ ID NO: 112753 - RNA, 24 nt, Artificial Sequence
  Synthetic
ccacuaugaaccuuuuagauccau

SEQ ID NO: 112754 - RNA, 18 nt, Artificial Sequence
  Synthetic
uaucguauuccuauccau

SEQ ID NO: 112755 - RNA, 19 nt, Artificial Sequence
  Synthetic
uuaucguauuccuauccau

SEQ ID NO: 112756 - RNA, 20 nt, Artificial Sequence
  Synthetic
cuuaucguauuccuauccau

SEQ ID NO: 112757 - RNA, 22 nt, Artificial Sequence
  Synthetic
ugcuuaucguauuccuauccau

SEQ ID NO: 112758 - RNA, 23 nt, Artificial Sequence
  Synthetic
cugcuuaucguauuccuauccau

SEQ ID NO: 112759 - RNA, 24 nt, Artificial Sequence
  Synthetic
ccugcuuaucguauuccuauccau

SEQ ID NO: 112760 - RNA, 18 nt, Artificial Sequence
  Synthetic
augacaguaaguauccau

SEQ ID NO: 112761 - RNA, 19 nt, Artificial Sequence
  Synthetic
aaugacaguaaguauccau

SEQ ID NO: 112762 - RNA, 20 nt, Artificial Sequence
  Synthetic
uaaugacaguaaguauccau

SEQ ID NO: 112763 - RNA, 21 nt, Artificial Sequence
  Synthetic
cuaaugacaguaaguauccau

SEQ ID NO: 112764 - RNA, 22 nt, Artificial Sequence
  Synthetic
ucuaaugacaguaaguauccau

SEQ ID NO: 112765 - RNA, 23 nt, Artificial Sequence
  Synthetic
cucuaaugacaguaaguauccau

SEQ ID NO: 112766 - RNA, 24 nt, Artificial Sequence
  Synthetic
ucucuaaugacaguaaguauccau

SEQ ID NO: 112767 - RNA, 18 nt, Artificial Sequence
  Synthetic
acgauaaugcuuauccau

SEQ ID NO: 112768 - RNA, 19 nt, Artificial Sequence
  Synthetic
cacgauaaugcuuauccau

SEQ ID NO: 112769 - RNA, 20 nt, Artificial Sequence
  Synthetic
ucacgauaaugcuuauccau

SEQ ID NO: 112770 - RNA, 21 nt, Artificial Sequence
  Synthetic
aucacgauaaugcuuauccau

SEQ ID NO: 112771 - RNA, 22 nt, Artificial Sequence
  Synthetic
aaucacgauaaugcuuauccau

SEQ ID NO: 112772 - RNA, 23 nt, Artificial Sequence
  Synthetic
aaaucacgauaaugcuuauccau

SEQ ID NO: 112773 - RNA, 18 nt, Artificial Sequence
  Synthetic
ucaagaucuaaucuccau

SEQ ID NO: 112774 - RNA, 19 nt, Artificial Sequence
  Synthetic
aucaagaucuaaucuccau

SEQ ID NO: 112775 - RNA, 20 nt, Artificial Sequence
  Synthetic
aaucaagaucuaaucuccau

SEQ ID NO: 112776 - RNA, 21 nt, Artificial Sequence
  Synthetic
caaucaagaucuaaucuccau

SEQ ID NO: 112777 - RNA, 22 nt, Artificial Sequence
  Synthetic
acaaucaagaucuaaucuccau

SEQ ID NO: 112778 - RNA, 23 nt, Artificial Sequence
  Synthetic
uacaaucaagaucuaaucuccau

SEQ ID NO: 112779 - RNA, 24 nt, Artificial Sequence
  Synthetic
uuacaaucaagaucuaaucuccau

SEQ ID NO: 112780 - RNA, 18 nt, Artificial Sequence
  Synthetic
cuaauuuauuaucuccau

SEQ ID NO: 112781 - RNA, 20 nt, Artificial Sequence
  Synthetic
cgcuaauuuauuaucuccau

SEQ ID NO: 112782 - RNA, 21 nt, Artificial Sequence
  Synthetic
acgcuaauuuauuaucuccau

SEQ ID NO: 112783 - RNA, 22 nt, Artificial Sequence
  Synthetic
cacgcuaauuuauuaucuccau

SEQ ID NO: 112784 - RNA, 23 nt, Artificial Sequence
  Synthetic
ucacgcuaauuuauuaucuccau

SEQ ID NO: 112785 - RNA, 24 nt, Artificial Sequence
  Synthetic
uucacgcuaauuuauuaucuccau

SEQ ID NO: 112786 - RNA, 19 nt, Artificial Sequence
  Synthetic
aggaccuccguuucuccau

SEQ ID NO: 112787 - RNA, 20 nt, Artificial Sequence
  Synthetic
caggaccuccguuucuccau

SEQ ID NO: 112788 - RNA, 21 nt, Artificial Sequence
  Synthetic
ucaggaccuccguuucuccau

SEQ ID NO: 112789 - RNA, 22 nt, Artificial Sequence
  Synthetic
cucaggaccuccguuucuccau

SEQ ID NO: 112790 - RNA, 24 nt, Artificial Sequence
  Synthetic
ugcucaggaccuccguuucuccau

SEQ ID NO: 112791 - RNA, 18 nt, Artificial Sequence
  Synthetic
aaggaugaacauguccau

SEQ ID NO: 112792 - RNA, 19 nt, Artificial Sequence
  Synthetic
uaaggaugaacauguccau

SEQ ID NO: 112793 - RNA, 20 nt, Artificial Sequence
  Synthetic
auaaggaugaacauguccau

SEQ ID NO: 112794 - RNA, 24 nt, Artificial Sequence
  Synthetic
ugggauaaggaugaacauguccau

SEQ ID NO: 112795 - RNA, 18 nt, Artificial Sequence
  Synthetic
ucaaaaauuucuguccau

SEQ ID NO: 112796 - RNA, 20 nt, Artificial Sequence
  Synthetic
agucaaaaauuucuguccau

SEQ ID NO: 112797 - RNA, 21 nt, Artificial Sequence
  Synthetic
cagucaaaaauuucuguccau

SEQ ID NO: 112798 - RNA, 22 nt, Artificial Sequence
  Synthetic
acagucaaaaauuucuguccau

SEQ ID NO: 112799 - RNA, 23 nt, Artificial Sequence
  Synthetic
aacagucaaaaauuucuguccau

SEQ ID NO: 112800 - RNA, 24 nt, Artificial Sequence
  Synthetic
aaacagucaaaaauuucuguccau

SEQ ID NO: 112801 - RNA, 19 nt, Artificial Sequence
  Synthetic
ugauaccaauugauuccau

SEQ ID NO: 112802 - RNA, 20 nt, Artificial Sequence
  Synthetic
cugauaccaauugauuccau

SEQ ID NO: 112803 - RNA, 21 nt, Artificial Sequence
  Synthetic
ucugauaccaauugauuccau

SEQ ID NO: 112804 - RNA, 22 nt, Artificial Sequence
  Synthetic
cucugauaccaauugauuccau

SEQ ID NO: 112805 - RNA, 23 nt, Artificial Sequence
  Synthetic
ucucugauaccaauugauuccau

SEQ ID NO: 112806 - RNA, 24 nt, Artificial Sequence
  Synthetic
cucucugauaccaauugauuccau

SEQ ID NO: 112807 - RNA, 18 nt, Artificial Sequence
  Synthetic
caguacagugacuuccau

SEQ ID NO: 112808 - RNA, 19 nt, Artificial Sequence
  Synthetic
acaguacagugacuuccau

SEQ ID NO: 112809 - RNA, 20 nt, Artificial Sequence
  Synthetic
cacaguacagugacuuccau

SEQ ID NO: 112810 - RNA, 21 nt, Artificial Sequence
  Synthetic
acacaguacagugacuuccau

SEQ ID NO: 112811 - RNA, 22 nt, Artificial Sequence
  Synthetic
aacacaguacagugacuuccau

SEQ ID NO: 112812 - RNA, 23 nt, Artificial Sequence
  Synthetic
aaacacaguacagugacuuccau

SEQ ID NO: 112813 - RNA, 24 nt, Artificial Sequence
  Synthetic
aaaacacaguacagugacuuccau

SEQ ID NO: 112814 - RNA, 18 nt, Artificial Sequence
  Synthetic
aucucuuuauacuuccau

SEQ ID NO: 112815 - RNA, 19 nt, Artificial Sequence
  Synthetic
uaucucuuuauacuuccau

SEQ ID NO: 112816 - RNA, 20 nt, Artificial Sequence
  Synthetic
cuaucucuuuauacuuccau

SEQ ID NO: 112817 - RNA, 21 nt, Artificial Sequence
  Synthetic
acuaucucuuuauacuuccau

SEQ ID NO: 112818 - RNA, 22 nt, Artificial Sequence
  Synthetic
cacuaucucuuuauacuuccau

SEQ ID NO: 112819 - RNA, 23 nt, Artificial Sequence
  Synthetic
ucacuaucucuuuauacuuccau

SEQ ID NO: 112820 - RNA, 24 nt, Artificial Sequence
  Synthetic
uucacuaucucuuuauacuuccau

SEQ ID NO: 112821 - RNA, 21 nt, Artificial Sequence
  Synthetic
aaguucuuguuuuuuuuccau

SEQ ID NO: 112822 - RNA, 22 nt, Artificial Sequence
  Synthetic
aaaguucuuguuuuuuuuccau

SEQ ID NO: 112823 - RNA, 24 nt, Artificial Sequence
  Synthetic
agaaaguucuuguuuuuuuuccau

SEQ ID NO: 112824 - RNA, 19 nt, Artificial Sequence
  Synthetic
cgccugcagguaaaagcau

SEQ ID NO: 112825 - RNA, 20 nt, Artificial Sequence
  Synthetic
ucgccugcagguaaaagcau

SEQ ID NO: 112826 - RNA, 21 nt, Artificial Sequence
  Synthetic
aucgccugcagguaaaagcau

SEQ ID NO: 112827 - RNA, 22 nt, Artificial Sequence
  Synthetic
aaucgccugcagguaaaagcau

SEQ ID NO: 112828 - RNA, 23 nt, Artificial Sequence
  Synthetic
aaaucgccugcagguaaaagcau

SEQ ID NO: 112829 - RNA, 24 nt, Artificial Sequence
  Synthetic
caaaucgccugcagguaaaagcau

SEQ ID NO: 112830 - RNA, 18 nt, Artificial Sequence
  Synthetic
auuuccuuuuuaaagcau

SEQ ID NO: 112831 - RNA, 21 nt, Artificial Sequence
  Synthetic
uggauuuccuuuuuaaagcau

SEQ ID NO: 112832 - RNA, 23 nt, Artificial Sequence
  Synthetic
aguggauuuccuuuuuaaagcau

SEQ ID NO: 112833 - RNA, 24 nt, Artificial Sequence
  Synthetic
aaguggauuuccuuuuuaaagcau

SEQ ID NO: 112834 - RNA, 18 nt, Artificial Sequence
  Synthetic
uaaguuagcaucaagcau

SEQ ID NO: 112835 - RNA, 19 nt, Artificial Sequence
  Synthetic
auaaguuagcaucaagcau

SEQ ID NO: 112836 - RNA, 21 nt, Artificial Sequence
  Synthetic
cgauaaguuagcaucaagcau

SEQ ID NO: 112837 - RNA, 23 nt, Artificial Sequence
  Synthetic
ugcgauaaguuagcaucaagcau

SEQ ID NO: 112838 - RNA, 18 nt, Artificial Sequence
  Synthetic
uaacgggcauugaagcau

SEQ ID NO: 112839 - RNA, 19 nt, Artificial Sequence
  Synthetic
auaacgggcauugaagcau

SEQ ID NO: 112840 - RNA, 21 nt, Artificial Sequence
  Synthetic
ugauaacgggcauugaagcau

SEQ ID NO: 112841 - RNA, 22 nt, Artificial Sequence
  Synthetic
augauaacgggcauugaagcau

SEQ ID NO: 112842 - RNA, 23 nt, Artificial Sequence
  Synthetic
aaugauaacgggcauugaagcau

SEQ ID NO: 112843 - RNA, 18 nt, Artificial Sequence
  Synthetic
acuuccaaaugccagcau

SEQ ID NO: 112844 - RNA, 20 nt, Artificial Sequence
  Synthetic
ugacuuccaaaugccagcau

SEQ ID NO: 112845 - RNA, 21 nt, Artificial Sequence
  Synthetic
uugacuuccaaaugccagcau

SEQ ID NO: 112846 - RNA, 22 nt, Artificial Sequence
  Synthetic
uuugacuuccaaaugccagcau

SEQ ID NO: 112847 - RNA, 18 nt, Artificial Sequence
  Synthetic
aaccuaaaugugcagcau

SEQ ID NO: 112848 - RNA, 19 nt, Artificial Sequence
  Synthetic
aaaccuaaaugugcagcau

SEQ ID NO: 112849 - RNA, 20 nt, Artificial Sequence
  Synthetic
uaaaccuaaaugugcagcau

SEQ ID NO: 112850 - RNA, 21 nt, Artificial Sequence
  Synthetic
auaaaccuaaaugugcagcau

SEQ ID NO: 112851 - RNA, 24 nt, Artificial Sequence
  Synthetic
uggauaaaccuaaaugugcagcau

SEQ ID NO: 112852 - RNA, 18 nt, Artificial Sequence
  Synthetic
caaaguuucuaucagcau

SEQ ID NO: 112853 - RNA, 19 nt, Artificial Sequence
  Synthetic
ucaaaguuucuaucagcau

SEQ ID NO: 112854 - RNA, 20 nt, Artificial Sequence
  Synthetic
aucaaaguuucuaucagcau

SEQ ID NO: 112855 - RNA, 21 nt, Artificial Sequence
  Synthetic
caucaaaguuucuaucagcau

SEQ ID NO: 112856 - RNA, 22 nt, Artificial Sequence
  Synthetic
ccaucaaaguuucuaucagcau

SEQ ID NO: 112857 - RNA, 23 nt, Artificial Sequence
  Synthetic
uccaucaaaguuucuaucagcau

SEQ ID NO: 112858 - RNA, 24 nt, Artificial Sequence
  Synthetic
uuccaucaaaguuucuaucagcau

SEQ ID NO: 112859 - RNA, 18 nt, Artificial Sequence
  Synthetic
uagaaggcgauucagcau

SEQ ID NO: 112860 - RNA, 19 nt, Artificial Sequence
  Synthetic
uuagaaggcgauucagcau

SEQ ID NO: 112861 - RNA, 20 nt, Artificial Sequence
  Synthetic
auuagaaggcgauucagcau

SEQ ID NO: 112862 - RNA, 21 nt, Artificial Sequence
  Synthetic
aauuagaaggcgauucagcau

SEQ ID NO: 112863 - RNA, 22 nt, Artificial Sequence
  Synthetic
aaauuagaaggcgauucagcau

SEQ ID NO: 112864 - RNA, 24 nt, Artificial Sequence
  Synthetic
ugaaauuagaaggcgauucagcau

SEQ ID NO: 112865 - RNA, 18 nt, Artificial Sequence
  Synthetic
ugggccaucaaggagcau

SEQ ID NO: 112866 - RNA, 19 nt, Artificial Sequence
  Synthetic
uugggccaucaaggagcau

SEQ ID NO: 112867 - RNA, 20 nt, Artificial Sequence
  Synthetic
cuugggccaucaaggagcau

SEQ ID NO: 112868 - RNA, 23 nt, Artificial Sequence
  Synthetic
uggcuugggccaucaaggagcau

SEQ ID NO: 112869 - RNA, 18 nt, Artificial Sequence
  Synthetic
agguaaaaagaauagcau

SEQ ID NO: 112870 - RNA, 19 nt, Artificial Sequence
  Synthetic
cagguaaaaagaauagcau

SEQ ID NO: 112871 - RNA, 20 nt, Artificial Sequence
  Synthetic
ccagguaaaaagaauagcau

SEQ ID NO: 112872 - RNA, 21 nt, Artificial Sequence
  Synthetic
uccagguaaaaagaauagcau

SEQ ID NO: 112873 - RNA, 22 nt, Artificial Sequence
  Synthetic
uuccagguaaaaagaauagcau

SEQ ID NO: 112874 - RNA, 23 nt, Artificial Sequence
  Synthetic
auuccagguaaaaagaauagcau

SEQ ID NO: 112875 - RNA, 24 nt, Artificial Sequence
  Synthetic
uauuccagguaaaaagaauagcau

SEQ ID NO: 112876 - RNA, 18 nt, Artificial Sequence
  Synthetic
uugggugauccuuagcau

SEQ ID NO: 112877 - RNA, 19 nt, Artificial Sequence
  Synthetic
uuugggugauccuuagcau

SEQ ID NO: 112878 - RNA, 21 nt, Artificial Sequence
  Synthetic
aguuugggugauccuuagcau

SEQ ID NO: 112879 - RNA, 22 nt, Artificial Sequence
  Synthetic
aaguuugggugauccuuagcau

SEQ ID NO: 112880 - RNA, 23 nt, Artificial Sequence
  Synthetic
aaaguuugggugauccuuagcau

SEQ ID NO: 112881 - RNA, 24 nt, Artificial Sequence
  Synthetic
aaaaguuugggugauccuuagcau

SEQ ID NO: 112882 - RNA, 18 nt, Artificial Sequence
  Synthetic
agaguaagauguuagcau

SEQ ID NO: 112883 - RNA, 19 nt, Artificial Sequence
  Synthetic
cagaguaagauguuagcau

SEQ ID NO: 112884 - RNA, 20 nt, Artificial Sequence
  Synthetic
acagaguaagauguuagcau

SEQ ID NO: 112885 - RNA, 21 nt, Artificial Sequence
  Synthetic
aacagaguaagauguuagcau

SEQ ID NO: 112886 - RNA, 22 nt, Artificial Sequence
  Synthetic
aaacagaguaagauguuagcau

SEQ ID NO: 112887 - RNA, 23 nt, Artificial Sequence
  Synthetic
aaaacagaguaagauguuagcau

SEQ ID NO: 112888 - RNA, 24 nt, Artificial Sequence
  Synthetic
aaaaacagaguaagauguuagcau

SEQ ID NO: 112889 - RNA, 18 nt, Artificial Sequence
  Synthetic
agaaguucuuuuuagcau

SEQ ID NO: 112890 - RNA, 19 nt, Artificial Sequence
  Synthetic
aagaaguucuuuuuagcau

SEQ ID NO: 112891 - RNA, 20 nt, Artificial Sequence
  Synthetic
uaagaaguucuuuuuagcau

SEQ ID NO: 112892 - RNA, 21 nt, Artificial Sequence
  Synthetic
auaagaaguucuuuuuagcau

SEQ ID NO: 112893 - RNA, 19 nt, Artificial Sequence
  Synthetic
agaucuagcaaucccgcau

SEQ ID NO: 112894 - RNA, 20 nt, Artificial Sequence
  Synthetic
aagaucuagcaaucccgcau

SEQ ID NO: 112895 - RNA, 18 nt, Artificial Sequence
  Synthetic
aucauucuguaaaggcau

SEQ ID NO: 112896 - RNA, 19 nt, Artificial Sequence
  Synthetic
aaucauucuguaaaggcau

SEQ ID NO: 112897 - RNA, 20 nt, Artificial Sequence
  Synthetic
caaucauucuguaaaggcau

SEQ ID NO: 112898 - RNA, 21 nt, Artificial Sequence
  Synthetic
ucaaucauucuguaaaggcau

SEQ ID NO: 112899 - RNA, 22 nt, Artificial Sequence
  Synthetic
uucaaucauucuguaaaggcau

SEQ ID NO: 112900 - RNA, 23 nt, Artificial Sequence
  Synthetic
auucaaucauucuguaaaggcau

SEQ ID NO: 112901 - RNA, 24 nt, Artificial Sequence
  Synthetic
cauucaaucauucuguaaaggcau

SEQ ID NO: 112902 - RNA, 18 nt, Artificial Sequence
  Synthetic
uucacauaaucaaggcau

SEQ ID NO: 112903 - RNA, 19 nt, Artificial Sequence
  Synthetic
auucacauaaucaaggcau

SEQ ID NO: 112904 - RNA, 20 nt, Artificial Sequence
  Synthetic
uauucacauaaucaaggcau

SEQ ID NO: 112905 - RNA, 21 nt, Artificial Sequence
  Synthetic
uuauucacauaaucaaggcau

SEQ ID NO: 112906 - RNA, 22 nt, Artificial Sequence
  Synthetic
cuuauucacauaaucaaggcau

SEQ ID NO: 112907 - RNA, 24 nt, Artificial Sequence
  Synthetic
ugcuuauucacauaaucaaggcau

SEQ ID NO: 112908 - RNA, 18 nt, Artificial Sequence
  Synthetic
auuuacucacccaggcau

SEQ ID NO: 112909 - RNA, 19 nt, Artificial Sequence
  Synthetic
uauuuacucacccaggcau

SEQ ID NO: 112910 - RNA, 20 nt, Artificial Sequence
  Synthetic
uuauuuacucacccaggcau

SEQ ID NO: 112911 - RNA, 21 nt, Artificial Sequence
  Synthetic
cuuauuuacucacccaggcau

SEQ ID NO: 112912 - RNA, 22 nt, Artificial Sequence
  Synthetic
ucuuauuuacucacccaggcau

SEQ ID NO: 112913 - RNA, 23 nt, Artificial Sequence
  Synthetic
cucuuauuuacucacccaggcau

SEQ ID NO: 112914 - RNA, 24 nt, Artificial Sequence
  Synthetic
ccucuuauuuacucacccaggcau

SEQ ID NO: 112915 - RNA, 18 nt, Artificial Sequence
  Synthetic
aaaacauauuccaggcau

SEQ ID NO: 112916 - RNA, 20 nt, Artificial Sequence
  Synthetic
ugaaaacauauuccaggcau

SEQ ID NO: 112917 - RNA, 21 nt, Artificial Sequence
  Synthetic
uugaaaacauauuccaggcau

SEQ ID NO: 112918 - RNA, 22 nt, Artificial Sequence
  Synthetic
cuugaaaacauauuccaggcau

SEQ ID NO: 112919 - RNA, 23 nt, Artificial Sequence
  Synthetic
ucuugaaaacauauuccaggcau

SEQ ID NO: 112920 - RNA, 24 nt, Artificial Sequence
  Synthetic
aucuugaaaacauauuccaggcau

SEQ ID NO: 112921 - RNA, 18 nt, Artificial Sequence
  Synthetic
caccuauuuuccaggcau

SEQ ID NO: 112922 - RNA, 20 nt, Artificial Sequence
  Synthetic
agcaccuauuuuccaggcau

SEQ ID NO: 112923 - RNA, 21 nt, Artificial Sequence
  Synthetic
cagcaccuauuuuccaggcau

SEQ ID NO: 112924 - RNA, 22 nt, Artificial Sequence
  Synthetic
ucagcaccuauuuuccaggcau

SEQ ID NO: 112925 - RNA, 24 nt, Artificial Sequence
  Synthetic
agucagcaccuauuuuccaggcau

SEQ ID NO: 112926 - RNA, 18 nt, Artificial Sequence
  Synthetic
ccaccuaaugucaggcau

SEQ ID NO: 112927 - RNA, 19 nt, Artificial Sequence
  Synthetic
accaccuaaugucaggcau

SEQ ID NO: 112928 - RNA, 20 nt, Artificial Sequence
  Synthetic
caccaccuaaugucaggcau

SEQ ID NO: 112929 - RNA, 22 nt, Artificial Sequence
  Synthetic
agcaccaccuaaugucaggcau

SEQ ID NO: 112930 - RNA, 23 nt, Artificial Sequence
  Synthetic
cagcaccaccuaaugucaggcau

SEQ ID NO: 112931 - RNA, 24 nt, Artificial Sequence
  Synthetic
ccagcaccaccuaaugucaggcau

SEQ ID NO: 112932 - RNA, 18 nt, Artificial Sequence
  Synthetic
acagggauacagaggcau

SEQ ID NO: 112933 - RNA, 19 nt, Artificial Sequence
  Synthetic
aacagggauacagaggcau

SEQ ID NO: 112934 - RNA, 20 nt, Artificial Sequence
  Synthetic
uaacagggauacagaggcau

SEQ ID NO: 112935 - RNA, 21 nt, Artificial Sequence
  Synthetic
cuaacagggauacagaggcau

SEQ ID NO: 112936 - RNA, 22 nt, Artificial Sequence
  Synthetic
acuaacagggauacagaggcau

SEQ ID NO: 112937 - RNA, 23 nt, Artificial Sequence
  Synthetic
aacuaacagggauacagaggcau

SEQ ID NO: 112938 - RNA, 24 nt, Artificial Sequence
  Synthetic
aaacuaacagggauacagaggcau

SEQ ID NO: 112939 - RNA, 19 nt, Artificial Sequence
  Synthetic
ugggacauggccagggcau

SEQ ID NO: 112940 - RNA, 20 nt, Artificial Sequence
  Synthetic
uugggacauggccagggcau

SEQ ID NO: 112941 - RNA, 18 nt, Artificial Sequence
  Synthetic
aagagcucaauugggcau

SEQ ID NO: 112942 - RNA, 19 nt, Artificial Sequence
  Synthetic
uaagagcucaauugggcau

SEQ ID NO: 112943 - RNA, 20 nt, Artificial Sequence
  Synthetic
cuaagagcucaauugggcau

SEQ ID NO: 112944 - RNA, 21 nt, Artificial Sequence
  Synthetic
ucuaagagcucaauugggcau

SEQ ID NO: 112945 - RNA, 22 nt, Artificial Sequence
  Synthetic
uucuaagagcucaauugggcau

SEQ ID NO: 112946 - RNA, 23 nt, Artificial Sequence
  Synthetic
cuucuaagagcucaauugggcau

SEQ ID NO: 112947 - RNA, 24 nt, Artificial Sequence
  Synthetic
ccuucuaagagcucaauugggcau

SEQ ID NO: 112948 - RNA, 22 nt, Artificial Sequence
  Synthetic
ugaauauuugaaaggauggcau

SEQ ID NO: 112949 - RNA, 23 nt, Artificial Sequence
  Synthetic
uugaauauuugaaaggauggcau

SEQ ID NO: 112950 - RNA, 24 nt, Artificial Sequence
  Synthetic
uuugaauauuugaaaggauggcau

SEQ ID NO: 112951 - RNA, 18 nt, Artificial Sequence
  Synthetic
accauggcagacuggcau

SEQ ID NO: 112952 - RNA, 21 nt, Artificial Sequence
  Synthetic
uggaccauggcagacuggcau

SEQ ID NO: 112953 - RNA, 22 nt, Artificial Sequence
  Synthetic
cuggaccauggcagacuggcau

SEQ ID NO: 112954 - RNA, 23 nt, Artificial Sequence
  Synthetic
ucuggaccauggcagacuggcau

SEQ ID NO: 112955 - RNA, 24 nt, Artificial Sequence
  Synthetic
uucuggaccauggcagacuggcau

SEQ ID NO: 112956 - RNA, 18 nt, Artificial Sequence
  Synthetic
uggcaacaaggcuggcau

SEQ ID NO: 112957 - RNA, 19 nt, Artificial Sequence
  Synthetic
auggcaacaaggcuggcau

SEQ ID NO: 112958 - RNA, 20 nt, Artificial Sequence
  Synthetic
aauggcaacaaggcuggcau

SEQ ID NO: 112959 - RNA, 21 nt, Artificial Sequence
  Synthetic
aaauggcaacaaggcuggcau

SEQ ID NO: 112960 - RNA, 23 nt, Artificial Sequence
  Synthetic
agaaauggcaacaaggcuggcau

SEQ ID NO: 112961 - RNA, 24 nt, Artificial Sequence
  Synthetic
cagaaauggcaacaaggcuggcau

SEQ ID NO: 112962 - RNA, 18 nt, Artificial Sequence
  Synthetic
ucugcccauuaaaugcau

SEQ ID NO: 112963 - RNA, 19 nt, Artificial Sequence
  Synthetic
aucugcccauuaaaugcau

SEQ ID NO: 112964 - RNA, 20 nt, Artificial Sequence
  Synthetic
caucugcccauuaaaugcau

SEQ ID NO: 112965 - RNA, 21 nt, Artificial Sequence
  Synthetic
ucaucugcccauuaaaugcau

SEQ ID NO: 112966 - RNA, 22 nt, Artificial Sequence
  Synthetic
uucaucugcccauuaaaugcau

SEQ ID NO: 112967 - RNA, 23 nt, Artificial Sequence
  Synthetic
cuucaucugcccauuaaaugcau

SEQ ID NO: 112968 - RNA, 24 nt, Artificial Sequence
  Synthetic
ucuucaucugcccauuaaaugcau

SEQ ID NO: 112969 - RNA, 18 nt, Artificial Sequence
  Synthetic
aaggaagacaauaugcau

SEQ ID NO: 112970 - RNA, 20 nt, Artificial Sequence
  Synthetic
agaaggaagacaauaugcau

SEQ ID NO: 112971 - RNA, 22 nt, Artificial Sequence
  Synthetic
ugagaaggaagacaauaugcau

SEQ ID NO: 112972 - RNA, 18 nt, Artificial Sequence
  Synthetic
cuccucaaguuuaugcau

SEQ ID NO: 112973 - RNA, 19 nt, Artificial Sequence
  Synthetic
ucuccucaaguuuaugcau

SEQ ID NO: 112974 - RNA, 20 nt, Artificial Sequence
  Synthetic
cucuccucaaguuuaugcau

SEQ ID NO: 112975 - RNA, 22 nt, Artificial Sequence
  Synthetic
agcucuccucaaguuuaugcau

SEQ ID NO: 112976 - RNA, 23 nt, Artificial Sequence
  Synthetic
aagcucuccucaaguuuaugcau

SEQ ID NO: 112977 - RNA, 19 nt, Artificial Sequence
  Synthetic
ugcucacacgcuccugcau

SEQ ID NO: 112978 - RNA, 20 nt, Artificial Sequence
  Synthetic
cugcucacacgcuccugcau

SEQ ID NO: 112979 - RNA, 21 nt, Artificial Sequence
  Synthetic
acugcucacacgcuccugcau

SEQ ID NO: 112980 - RNA, 22 nt, Artificial Sequence
  Synthetic
cacugcucacacgcuccugcau

SEQ ID NO: 112981 - RNA, 23 nt, Artificial Sequence
  Synthetic
ccacugcucacacgcuccugcau

SEQ ID NO: 112982 - RNA, 24 nt, Artificial Sequence
  Synthetic
cccacugcucacacgcuccugcau

SEQ ID NO: 112983 - RNA, 19 nt, Artificial Sequence
  Synthetic
ugguucagggccagugcau

SEQ ID NO: 112984 - RNA, 21 nt, Artificial Sequence
  Synthetic
ugugguucagggccagugcau

SEQ ID NO: 112985 - RNA, 23 nt, Artificial Sequence
  Synthetic
agugugguucagggccagugcau

SEQ ID NO: 112986 - RNA, 24 nt, Artificial Sequence
  Synthetic
aagugugguucagggccagugcau

SEQ ID NO: 112987 - RNA, 18 nt, Artificial Sequence
  Synthetic
acaaccuugucugugcau

SEQ ID NO: 112988 - RNA, 19 nt, Artificial Sequence
  Synthetic
cacaaccuugucugugcau

SEQ ID NO: 112989 - RNA, 20 nt, Artificial Sequence
  Synthetic
acacaaccuugucugugcau

SEQ ID NO: 112990 - RNA, 21 nt, Artificial Sequence
  Synthetic
aacacaaccuugucugugcau

SEQ ID NO: 112991 - RNA, 24 nt, Artificial Sequence
  Synthetic
cggaacacaaccuugucugugcau

SEQ ID NO: 112992 - RNA, 18 nt, Artificial Sequence
  Synthetic
uguuuuuagauugugcau

SEQ ID NO: 112993 - RNA, 19 nt, Artificial Sequence
  Synthetic
auguuuuuagauugugcau

SEQ ID NO: 112994 - RNA, 21 nt, Artificial Sequence
  Synthetic
cgauguuuuuagauugugcau

SEQ ID NO: 112995 - RNA, 22 nt, Artificial Sequence
  Synthetic
ucgauguuuuuagauugugcau

SEQ ID NO: 112996 - RNA, 23 nt, Artificial Sequence
  Synthetic
aucgauguuuuuagauugugcau

SEQ ID NO: 112997 - RNA, 18 nt, Artificial Sequence
  Synthetic
ucuaguaggcaauugcau

SEQ ID NO: 112998 - RNA, 19 nt, Artificial Sequence
  Synthetic
uucuaguaggcaauugcau

SEQ ID NO: 112999 - RNA, 20 nt, Artificial Sequence
  Synthetic
auucuaguaggcaauugcau

SEQ ID NO: 113000 - RNA, 21 nt, Artificial Sequence
  Synthetic
cauucuaguaggcaauugcau

SEQ ID NO: 113001 - RNA, 22 nt, Artificial Sequence
  Synthetic
acauucuaguaggcaauugcau

SEQ ID NO: 113002 - RNA, 23 nt, Artificial Sequence
  Synthetic
uacauucuaguaggcaauugcau

SEQ ID NO: 113003 - RNA, 24 nt, Artificial Sequence
  Synthetic
uuacauucuaguaggcaauugcau

SEQ ID NO: 113004 - RNA, 18 nt, Artificial Sequence
  Synthetic
caguugcucuacuugcau

SEQ ID NO: 113005 - RNA, 19 nt, Artificial Sequence
  Synthetic
acaguugcucuacuugcau

SEQ ID NO: 113006 - RNA, 20 nt, Artificial Sequence
  Synthetic
cacaguugcucuacuugcau

SEQ ID NO: 113007 - RNA, 21 nt, Artificial Sequence
  Synthetic
acacaguugcucuacuugcau

SEQ ID NO: 113008 - RNA, 22 nt, Artificial Sequence
  Synthetic
uacacaguugcucuacuugcau

SEQ ID NO: 113009 - RNA, 23 nt, Artificial Sequence
  Synthetic
auacacaguugcucuacuugcau

SEQ ID NO: 113010 - RNA, 19 nt, Artificial Sequence
  Synthetic
uguaauuuguaccuugcau

SEQ ID NO: 113011 - RNA, 23 nt, Artificial Sequence
  Synthetic
uggguguaauuuguaccuugcau

SEQ ID NO: 113012 - RNA, 24 nt, Artificial Sequence
  Synthetic
auggguguaauuuguaccuugcau

SEQ ID NO: 113013 - RNA, 19 nt, Artificial Sequence
  Synthetic
agaauccuguuucuugcau

SEQ ID NO: 113014 - RNA, 20 nt, Artificial Sequence
  Synthetic
uagaauccuguuucuugcau

SEQ ID NO: 113015 - RNA, 21 nt, Artificial Sequence
  Synthetic
uuagaauccuguuucuugcau

SEQ ID NO: 113016 - RNA, 22 nt, Artificial Sequence
  Synthetic
auuagaauccuguuucuugcau

SEQ ID NO: 113017 - RNA, 23 nt, Artificial Sequence
  Synthetic
uauuagaauccuguuucuugcau

SEQ ID NO: 113018 - RNA, 24 nt, Artificial Sequence
  Synthetic
cuauuagaauccuguuucuugcau

SEQ ID NO: 113019 - RNA, 18 nt, Artificial Sequence
  Synthetic
cauugaaagaaaaaucau

SEQ ID NO: 113020 - RNA, 19 nt, Artificial Sequence
  Synthetic
ccauugaaagaaaaaucau

SEQ ID NO: 113021 - RNA, 20 nt, Artificial Sequence
  Synthetic
accauugaaagaaaaaucau

SEQ ID NO: 113022 - RNA, 21 nt, Artificial Sequence
  Synthetic
aaccauugaaagaaaaaucau

SEQ ID NO: 113023 - RNA, 22 nt, Artificial Sequence
  Synthetic
uaaccauugaaagaaaaaucau

SEQ ID NO: 113024 - RNA, 23 nt, Artificial Sequence
  Synthetic
uuaaccauugaaagaaaaaucau

SEQ ID NO: 113025 - RNA, 24 nt, Artificial Sequence
  Synthetic
auuaaccauugaaagaaaaaucau

SEQ ID NO: 113026 - RNA, 21 nt, Artificial Sequence
  Synthetic
auuuuuaauauaagaaaucau

SEQ ID NO: 113027 - RNA, 22 nt, Artificial Sequence
  Synthetic
cauuuuuaauauaagaaaucau

SEQ ID NO: 113028 - RNA, 23 nt, Artificial Sequence
  Synthetic
acauuuuuaauauaagaaaucau

SEQ ID NO: 113029 - RNA, 24 nt, Artificial Sequence
  Synthetic
aacauuuuuaauauaagaaaucau

SEQ ID NO: 113030 - RNA, 19 nt, Artificial Sequence
  Synthetic
agggaaacuucgaaaucau

SEQ ID NO: 113031 - RNA, 20 nt, Artificial Sequence
  Synthetic
aagggaaacuucgaaaucau

SEQ ID NO: 113032 - RNA, 21 nt, Artificial Sequence
  Synthetic
aaagggaaacuucgaaaucau

SEQ ID NO: 113033 - RNA, 22 nt, Artificial Sequence
  Synthetic
caaagggaaacuucgaaaucau

SEQ ID NO: 113034 - RNA, 23 nt, Artificial Sequence
  Synthetic
acaaagggaaacuucgaaaucau

SEQ ID NO: 113035 - RNA, 24 nt, Artificial Sequence
  Synthetic
uacaaagggaaacuucgaaaucau

SEQ ID NO: 113036 - RNA, 18 nt, Artificial Sequence
  Synthetic
uucaaagguauaaaucau

SEQ ID NO: 113037 - RNA, 19 nt, Artificial Sequence
  Synthetic
uuucaaagguauaaaucau

SEQ ID NO: 113038 - RNA, 21 nt, Artificial Sequence
  Synthetic
uguuucaaagguauaaaucau

SEQ ID NO: 113039 - RNA, 22 nt, Artificial Sequence
  Synthetic
auguuucaaagguauaaaucau

SEQ ID NO: 113040 - RNA, 23 nt, Artificial Sequence
  Synthetic
uauguuucaaagguauaaaucau

SEQ ID NO: 113041 - RNA, 24 nt, Artificial Sequence
  Synthetic
cuauguuucaaagguauaaaucau

SEQ ID NO: 113042 - RNA, 18 nt, Artificial Sequence
  Synthetic
uagcaagaagacaaucau

SEQ ID NO: 113043 - RNA, 19 nt, Artificial Sequence
  Synthetic
auagcaagaagacaaucau

SEQ ID NO: 113044 - RNA, 20 nt, Artificial Sequence
  Synthetic
uauagcaagaagacaaucau

SEQ ID NO: 113045 - RNA, 21 nt, Artificial Sequence
  Synthetic
auauagcaagaagacaaucau

SEQ ID NO: 113046 - RNA, 22 nt, Artificial Sequence
  Synthetic
aauauagcaagaagacaaucau

SEQ ID NO: 113047 - RNA, 23 nt, Artificial Sequence
  Synthetic
aaauauagcaagaagacaaucau

SEQ ID NO: 113048 - RNA, 24 nt, Artificial Sequence
  Synthetic
uaaauauagcaagaagacaaucau

SEQ ID NO: 113049 - RNA, 20 nt, Artificial Sequence
  Synthetic
aggaauuguacaagaaucau

SEQ ID NO: 113050 - RNA, 21 nt, Artificial Sequence
  Synthetic
uaggaauuguacaagaaucau

SEQ ID NO: 113051 - RNA, 22 nt, Artificial Sequence
  Synthetic
cuaggaauuguacaagaaucau

SEQ ID NO: 113052 - RNA, 23 nt, Artificial Sequence
  Synthetic
ccuaggaauuguacaagaaucau

SEQ ID NO: 113053 - RNA, 24 nt, Artificial Sequence
  Synthetic
uccuaggaauuguacaagaaucau

SEQ ID NO: 113054 - RNA, 18 nt, Artificial Sequence
  Synthetic
caaaaaaucucuaaucau

SEQ ID NO: 113055 - RNA, 19 nt, Artificial Sequence
  Synthetic
ucaaaaaaucucuaaucau

SEQ ID NO: 113056 - RNA, 20 nt, Artificial Sequence
  Synthetic
aucaaaaaaucucuaaucau

SEQ ID NO: 113057 - RNA, 21 nt, Artificial Sequence
  Synthetic
aaucaaaaaaucucuaaucau

SEQ ID NO: 113058 - RNA, 22 nt, Artificial Sequence
  Synthetic
uaaucaaaaaaucucuaaucau

SEQ ID NO: 113059 - RNA, 18 nt, Artificial Sequence
  Synthetic
uaaugaaacugacaucau

SEQ ID NO: 113060 - RNA, 21 nt, Artificial Sequence
  Synthetic
ugguaaugaaacugacaucau

SEQ ID NO: 113061 - RNA, 22 nt, Artificial Sequence
  Synthetic
augguaaugaaacugacaucau

SEQ ID NO: 113062 - RNA, 24 nt, Artificial Sequence
  Synthetic
agaugguaaugaaacugacaucau

SEQ ID NO: 113063 - RNA, 18 nt, Artificial Sequence
  Synthetic
acacagcuaauagaucau

SEQ ID NO: 113064 - RNA, 19 nt, Artificial Sequence
  Synthetic
uacacagcuaauagaucau

SEQ ID NO: 113065 - RNA, 20 nt, Artificial Sequence
  Synthetic
uuacacagcuaauagaucau

SEQ ID NO: 113066 - RNA, 23 nt, Artificial Sequence
  Synthetic
agguuacacagcuaauagaucau

SEQ ID NO: 113067 - RNA, 24 nt, Artificial Sequence
  Synthetic
aagguuacacagcuaauagaucau

SEQ ID NO: 113068 - RNA, 18 nt, Artificial Sequence
  Synthetic
uuggcaauugaugaucau

SEQ ID NO: 113069 - RNA, 19 nt, Artificial Sequence
  Synthetic
auuggcaauugaugaucau

SEQ ID NO: 113070 - RNA, 20 nt, Artificial Sequence
  Synthetic
uauuggcaauugaugaucau

SEQ ID NO: 113071 - RNA, 21 nt, Artificial Sequence
  Synthetic
uuauuggcaauugaugaucau

SEQ ID NO: 113072 - RNA, 22 nt, Artificial Sequence
  Synthetic
auuauuggcaauugaugaucau

SEQ ID NO: 113073 - RNA, 23 nt, Artificial Sequence
  Synthetic
aauuauuggcaauugaugaucau

SEQ ID NO: 113074 - RNA, 24 nt, Artificial Sequence
  Synthetic
aaauuauuggcaauugaugaucau

SEQ ID NO: 113075 - RNA, 18 nt, Artificial Sequence
  Synthetic
ucaguuuuaugugaucau

SEQ ID NO: 113076 - RNA, 19 nt, Artificial Sequence
  Synthetic
uucaguuuuaugugaucau

SEQ ID NO: 113077 - RNA, 20 nt, Artificial Sequence
  Synthetic
uuucaguuuuaugugaucau

SEQ ID NO: 113078 - RNA, 21 nt, Artificial Sequence
  Synthetic
cuuucaguuuuaugugaucau

SEQ ID NO: 113079 - RNA, 22 nt, Artificial Sequence
  Synthetic
ucuuucaguuuuaugugaucau

SEQ ID NO: 113080 - RNA, 23 nt, Artificial Sequence
  Synthetic
aucuuucaguuuuaugugaucau

SEQ ID NO: 113081 - RNA, 24 nt, Artificial Sequence
  Synthetic
aaucuuucaguuuuaugugaucau

SEQ ID NO: 113082 - RNA, 18 nt, Artificial Sequence
  Synthetic
auuaaacauggauaucau

SEQ ID NO: 113083 - RNA, 20 nt, Artificial Sequence
  Synthetic
ugauuaaacauggauaucau

SEQ ID NO: 113084 - RNA, 21 nt, Artificial Sequence
  Synthetic
cugauuaaacauggauaucau

SEQ ID NO: 113085 - RNA, 22 nt, Artificial Sequence
  Synthetic
ucugauuaaacauggauaucau

SEQ ID NO: 113086 - RNA, 23 nt, Artificial Sequence
  Synthetic
uucugauuaaacauggauaucau

SEQ ID NO: 113087 - RNA, 24 nt, Artificial Sequence
  Synthetic
uuucugauuaaacauggauaucau

SEQ ID NO: 113088 - RNA, 19 nt, Artificial Sequence
  Synthetic
ugcauacuauuacuaucau

SEQ ID NO: 113089 - RNA, 20 nt, Artificial Sequence
  Synthetic
uugcauacuauuacuaucau

SEQ ID NO: 113090 - RNA, 21 nt, Artificial Sequence
  Synthetic
uuugcauacuauuacuaucau

SEQ ID NO: 113091 - RNA, 22 nt, Artificial Sequence
  Synthetic
uuuugcauacuauuacuaucau

SEQ ID NO: 113092 - RNA, 23 nt, Artificial Sequence
  Synthetic
uuuuugcauacuauuacuaucau

SEQ ID NO: 113093 - RNA, 24 nt, Artificial Sequence
  Synthetic
uuuuuugcauacuauuacuaucau

SEQ ID NO: 113094 - RNA, 18 nt, Artificial Sequence
  Synthetic
accuuuuuaggcuaucau

SEQ ID NO: 113095 - RNA, 19 nt, Artificial Sequence
  Synthetic
caccuuuuuaggcuaucau

SEQ ID NO: 113096 - RNA, 20 nt, Artificial Sequence
  Synthetic
ucaccuuuuuaggcuaucau

SEQ ID NO: 113097 - RNA, 21 nt, Artificial Sequence
  Synthetic
uucaccuuuuuaggcuaucau

SEQ ID NO: 113098 - RNA, 22 nt, Artificial Sequence
  Synthetic
uuucaccuuuuuaggcuaucau

SEQ ID NO: 113099 - RNA, 23 nt, Artificial Sequence
  Synthetic
uuuucaccuuuuuaggcuaucau

SEQ ID NO: 113100 - RNA, 24 nt, Artificial Sequence
  Synthetic
auuuucaccuuuuuaggcuaucau

SEQ ID NO: 113101 - RNA, 18 nt, Artificial Sequence
  Synthetic
uauauguuuugcuaucau

SEQ ID NO: 113102 - RNA, 19 nt, Artificial Sequence
  Synthetic
uuauauguuuugcuaucau

SEQ ID NO: 113103 - RNA, 20 nt, Artificial Sequence
  Synthetic
uuuauauguuuugcuaucau

SEQ ID NO: 113104 - RNA, 22 nt, Artificial Sequence
  Synthetic
uguuuauauguuuugcuaucau

SEQ ID NO: 113105 - RNA, 23 nt, Artificial Sequence
  Synthetic
auguuuauauguuuugcuaucau

SEQ ID NO: 113106 - RNA, 24 nt, Artificial Sequence
  Synthetic
aauguuuauauguuuugcuaucau

SEQ ID NO: 113107 - RNA, 18 nt, Artificial Sequence
  Synthetic
agugaacaacaguaucau

SEQ ID NO: 113108 - RNA, 19 nt, Artificial Sequence
  Synthetic
aagugaacaacaguaucau

SEQ ID NO: 113109 - RNA, 20 nt, Artificial Sequence
  Synthetic
aaagugaacaacaguaucau

SEQ ID NO: 113110 - RNA, 21 nt, Artificial Sequence
  Synthetic
caaagugaacaacaguaucau

SEQ ID NO: 113111 - RNA, 23 nt, Artificial Sequence
  Synthetic
ugcaaagugaacaacaguaucau

SEQ ID NO: 113112 - RNA, 18 nt, Artificial Sequence
  Synthetic
ugaguuucaauguaucau

SEQ ID NO: 113113 - RNA, 19 nt, Artificial Sequence
  Synthetic
uugaguuucaauguaucau

SEQ ID NO: 113114 - RNA, 20 nt, Artificial Sequence
  Synthetic
uuugaguuucaauguaucau

SEQ ID NO: 113115 - RNA, 21 nt, Artificial Sequence
  Synthetic
auuugaguuucaauguaucau

SEQ ID NO: 113116 - RNA, 22 nt, Artificial Sequence
  Synthetic
uauuugaguuucaauguaucau

SEQ ID NO: 113117 - RNA, 23 nt, Artificial Sequence
  Synthetic
auauuugaguuucaauguaucau

SEQ ID NO: 113118 - RNA, 24 nt, Artificial Sequence
  Synthetic
uauauuugaguuucaauguaucau

SEQ ID NO: 113119 - RNA, 18 nt, Artificial Sequence
  Synthetic
uggaaaggcuuguaucau

SEQ ID NO: 113120 - RNA, 20 nt, Artificial Sequence
  Synthetic
uguggaaaggcuuguaucau

SEQ ID NO: 113121 - RNA, 22 nt, Artificial Sequence
  Synthetic
uguguggaaaggcuuguaucau

SEQ ID NO: 113122 - RNA, 23 nt, Artificial Sequence
  Synthetic
uuguguggaaaggcuuguaucau

SEQ ID NO: 113123 - RNA, 24 nt, Artificial Sequence
  Synthetic
uuuguguggaaaggcuuguaucau

SEQ ID NO: 113124 - RNA, 18 nt, Artificial Sequence
  Synthetic
cagcaugauauuuaucau

SEQ ID NO: 113125 - RNA, 20 nt, Artificial Sequence
  Synthetic
ugcagcaugauauuuaucau

SEQ ID NO: 113126 - RNA, 21 nt, Artificial Sequence
  Synthetic
uugcagcaugauauuuaucau

SEQ ID NO: 113127 - RNA, 18 nt, Artificial Sequence
  Synthetic
aaguuaucuauaacucau

SEQ ID NO: 113128 - RNA, 19 nt, Artificial Sequence
  Synthetic
uaaguuaucuauaacucau

SEQ ID NO: 113129 - RNA, 20 nt, Artificial Sequence
  Synthetic
uuaaguuaucuauaacucau

SEQ ID NO: 113130 - RNA, 21 nt, Artificial Sequence
  Synthetic
cuuaaguuaucuauaacucau

SEQ ID NO: 113131 - RNA, 22 nt, Artificial Sequence
  Synthetic
ucuuaaguuaucuauaacucau

SEQ ID NO: 113132 - RNA, 23 nt, Artificial Sequence
  Synthetic
cucuuaaguuaucuauaacucau

SEQ ID NO: 113133 - RNA, 24 nt, Artificial Sequence
  Synthetic
ucucuuaaguuaucuauaacucau

SEQ ID NO: 113134 - RNA, 18 nt, Artificial Sequence
  Synthetic
ccucuccauuccacucau

SEQ ID NO: 113135 - RNA, 19 nt, Artificial Sequence
  Synthetic
uccucuccauuccacucau

SEQ ID NO: 113136 - RNA, 20 nt, Artificial Sequence
  Synthetic
cuccucuccauuccacucau

SEQ ID NO: 113137 - RNA, 21 nt, Artificial Sequence
  Synthetic
acuccucuccauuccacucau

SEQ ID NO: 113138 - RNA, 22 nt, Artificial Sequence
  Synthetic
aacuccucuccauuccacucau

SEQ ID NO: 113139 - RNA, 24 nt, Artificial Sequence
  Synthetic
ugaacuccucuccauuccacucau

SEQ ID NO: 113140 - RNA, 18 nt, Artificial Sequence
  Synthetic
uagaucauccuuacucau

SEQ ID NO: 113141 - RNA, 19 nt, Artificial Sequence
  Synthetic
uuagaucauccuuacucau

SEQ ID NO: 113142 - RNA, 21 nt, Artificial Sequence
  Synthetic
uguuagaucauccuuacucau

SEQ ID NO: 113143 - RNA, 22 nt, Artificial Sequence
  Synthetic
uuguuagaucauccuuacucau

SEQ ID NO: 113144 - RNA, 23 nt, Artificial Sequence
  Synthetic
uuuguuagaucauccuuacucau

SEQ ID NO: 113145 - RNA, 24 nt, Artificial Sequence
  Synthetic
cuuuguuagaucauccuuacucau

SEQ ID NO: 113146 - RNA, 18 nt, Artificial Sequence
  Synthetic
cuucuauuagagccucau

SEQ ID NO: 113147 - RNA, 19 nt, Artificial Sequence
  Synthetic
acuucuauuagagccucau

SEQ ID NO: 113148 - RNA, 20 nt, Artificial Sequence
  Synthetic
aacuucuauuagagccucau

SEQ ID NO: 113149 - RNA, 21 nt, Artificial Sequence
  Synthetic
aaacuucuauuagagccucau

SEQ ID NO: 113150 - RNA, 22 nt, Artificial Sequence
  Synthetic
uaaacuucuauuagagccucau

SEQ ID NO: 113151 - RNA, 23 nt, Artificial Sequence
  Synthetic
cuaaacuucuauuagagccucau

SEQ ID NO: 113152 - RNA, 24 nt, Artificial Sequence
  Synthetic
ucuaaacuucuauuagagccucau

SEQ ID NO: 113153 - RNA, 18 nt, Artificial Sequence
  Synthetic
cucauugaccugccucau

SEQ ID NO: 113154 - RNA, 20 nt, Artificial Sequence
  Synthetic
ugcucauugaccugccucau

SEQ ID NO: 113155 - RNA, 21 nt, Artificial Sequence
  Synthetic
cugcucauugaccugccucau

SEQ ID NO: 113156 - RNA, 22 nt, Artificial Sequence
  Synthetic
ccugcucauugaccugccucau

SEQ ID NO: 113157 - RNA, 23 nt, Artificial Sequence
  Synthetic
accugcucauugaccugccucau

SEQ ID NO: 113158 - RNA, 18 nt, Artificial Sequence
  Synthetic
uggugcugggcugcucau

SEQ ID NO: 113159 - RNA, 19 nt, Artificial Sequence
  Synthetic
auggugcugggcugcucau

SEQ ID NO: 113160 - RNA, 21 nt, Artificial Sequence
  Synthetic
ugauggugcugggcugcucau

SEQ ID NO: 113161 - RNA, 23 nt, Artificial Sequence
  Synthetic
agugauggugcugggcugcucau

SEQ ID NO: 113162 - RNA, 18 nt, Artificial Sequence
  Synthetic
auacagaauuaaucucau

SEQ ID NO: 113163 - RNA, 21 nt, Artificial Sequence
  Synthetic
uggauacagaauuaaucucau

SEQ ID NO: 113164 - RNA, 22 nt, Artificial Sequence
  Synthetic
auggauacagaauuaaucucau

SEQ ID NO: 113165 - RNA, 24 nt, Artificial Sequence
  Synthetic
ugauggauacagaauuaaucucau

SEQ ID NO: 113166 - RNA, 18 nt, Artificial Sequence
  Synthetic
caaaguuugccaucucau

SEQ ID NO: 113167 - RNA, 19 nt, Artificial Sequence
  Synthetic
acaaaguuugccaucucau

SEQ ID NO: 113168 - RNA, 20 nt, Artificial Sequence
  Synthetic
cacaaaguuugccaucucau

SEQ ID NO: 113169 - RNA, 21 nt, Artificial Sequence
  Synthetic
ccacaaaguuugccaucucau

SEQ ID NO: 113170 - RNA, 22 nt, Artificial Sequence
  Synthetic
cccacaaaguuugccaucucau

SEQ ID NO: 113171 - RNA, 23 nt, Artificial Sequence
  Synthetic
ccccacaaaguuugccaucucau

SEQ ID NO: 113172 - RNA, 24 nt, Artificial Sequence
  Synthetic
accccacaaaguuugccaucucau

SEQ ID NO: 113173 - RNA, 18 nt, Artificial Sequence
  Synthetic
cacagcacuggaucucau

SEQ ID NO: 113174 - RNA, 19 nt, Artificial Sequence
  Synthetic
ucacagcacuggaucucau

SEQ ID NO: 113175 - RNA, 20 nt, Artificial Sequence
  Synthetic
uucacagcacuggaucucau

SEQ ID NO: 113176 - RNA, 21 nt, Artificial Sequence
  Synthetic
auucacagcacuggaucucau

SEQ ID NO: 113177 - RNA, 22 nt, Artificial Sequence
  Synthetic
cauucacagcacuggaucucau

SEQ ID NO: 113178 - RNA, 24 nt, Artificial Sequence
  Synthetic
agcauucacagcacuggaucucau

SEQ ID NO: 113179 - RNA, 21 nt, Artificial Sequence
  Synthetic
auuucacagaggauaucucau

SEQ ID NO: 113180 - RNA, 23 nt, Artificial Sequence
  Synthetic
ugauuucacagaggauaucucau

SEQ ID NO: 113181 - RNA, 24 nt, Artificial Sequence
  Synthetic
augauuucacagaggauaucucau

SEQ ID NO: 113182 - RNA, 19 nt, Artificial Sequence
  Synthetic
agcuauuauugucucucau

SEQ ID NO: 113183 - RNA, 20 nt, Artificial Sequence
  Synthetic
aagcuauuauugucucucau

SEQ ID NO: 113184 - RNA, 22 nt, Artificial Sequence
  Synthetic
agaagcuauuauugucucucau

SEQ ID NO: 113185 - RNA, 23 nt, Artificial Sequence
  Synthetic
uagaagcuauuauugucucucau

SEQ ID NO: 113186 - RNA, 24 nt, Artificial Sequence
  Synthetic
auagaagcuauuauugucucucau

SEQ ID NO: 113187 - RNA, 21 nt, Artificial Sequence
  Synthetic
agaaucaccauuauuucucau

SEQ ID NO: 113188 - RNA, 22 nt, Artificial Sequence
  Synthetic
uagaaucaccauuauuucucau

SEQ ID NO: 113189 - RNA, 23 nt, Artificial Sequence
  Synthetic
uuagaaucaccauuauuucucau

SEQ ID NO: 113190 - RNA, 24 nt, Artificial Sequence
  Synthetic
uuuagaaucaccauuauuucucau

SEQ ID NO: 113191 - RNA, 18 nt, Artificial Sequence
  Synthetic
auagaugucaaaagucau

SEQ ID NO: 113192 - RNA, 19 nt, Artificial Sequence
  Synthetic
cauagaugucaaaagucau

SEQ ID NO: 113193 - RNA, 20 nt, Artificial Sequence
  Synthetic
ccauagaugucaaaagucau

SEQ ID NO: 113194 - RNA, 21 nt, Artificial Sequence
  Synthetic
uccauagaugucaaaagucau

SEQ ID NO: 113195 - RNA, 22 nt, Artificial Sequence
  Synthetic
auccauagaugucaaaagucau

SEQ ID NO: 113196 - RNA, 23 nt, Artificial Sequence
  Synthetic
cauccauagaugucaaaagucau

SEQ ID NO: 113197 - RNA, 24 nt, Artificial Sequence
  Synthetic
ucauccauagaugucaaaagucau

SEQ ID NO: 113198 - RNA, 18 nt, Artificial Sequence
  Synthetic
uccuauugacacagucau

SEQ ID NO: 113199 - RNA, 19 nt, Artificial Sequence
  Synthetic
uuccuauugacacagucau

SEQ ID NO: 113200 - RNA, 20 nt, Artificial Sequence
  Synthetic
auuccuauugacacagucau

SEQ ID NO: 113201 - RNA, 21 nt, Artificial Sequence
  Synthetic
cauuccuauugacacagucau

SEQ ID NO: 113202 - RNA, 23 nt, Artificial Sequence
  Synthetic
agcauuccuauugacacagucau

SEQ ID NO: 113203 - RNA, 24 nt, Artificial Sequence
  Synthetic
uagcauuccuauugacacagucau

SEQ ID NO: 113204 - RNA, 18 nt, Artificial Sequence
  Synthetic
cuccuaguugggagucau

SEQ ID NO: 113205 - RNA, 19 nt, Artificial Sequence
  Synthetic
acuccuaguugggagucau

SEQ ID NO: 113206 - RNA, 20 nt, Artificial Sequence
  Synthetic
cacuccuaguugggagucau

SEQ ID NO: 113207 - RNA, 21 nt, Artificial Sequence
  Synthetic
ucacuccuaguugggagucau

SEQ ID NO: 113208 - RNA, 22 nt, Artificial Sequence
  Synthetic
cucacuccuaguugggagucau

SEQ ID NO: 113209 - RNA, 23 nt, Artificial Sequence
  Synthetic
ucucacuccuaguugggagucau

SEQ ID NO: 113210 - RNA, 24 nt, Artificial Sequence
  Synthetic
aucucacuccuaguugggagucau

SEQ ID NO: 113211 - RNA, 18 nt, Artificial Sequence
  Synthetic
aaguucuaaaugagucau

SEQ ID NO: 113212 - RNA, 19 nt, Artificial Sequence
  Synthetic
aaaguucuaaaugagucau

SEQ ID NO: 113213 - RNA, 20 nt, Artificial Sequence
  Synthetic
aaaaguucuaaaugagucau

SEQ ID NO: 113214 - RNA, 24 nt, Artificial Sequence
  Synthetic
agggaaaaguucuaaaugagucau

SEQ ID NO: 113215 - RNA, 18 nt, Artificial Sequence
  Synthetic
uuuaaugucaugagucau

SEQ ID NO: 113216 - RNA, 19 nt, Artificial Sequence
  Synthetic
auuuaaugucaugagucau

SEQ ID NO: 113217 - RNA, 20 nt, Artificial Sequence
  Synthetic
aauuuaaugucaugagucau

SEQ ID NO: 113218 - RNA, 21 nt, Artificial Sequence
  Synthetic
uaauuuaaugucaugagucau

SEQ ID NO: 113219 - RNA, 22 nt, Artificial Sequence
  Synthetic
auaauuuaaugucaugagucau

SEQ ID NO: 113220 - RNA, 23 nt, Artificial Sequence
  Synthetic
uauaauuuaaugucaugagucau

SEQ ID NO: 113221 - RNA, 24 nt, Artificial Sequence
  Synthetic
auauaauuuaaugucaugagucau

SEQ ID NO: 113222 - RNA, 18 nt, Artificial Sequence
  Synthetic
uaugagaaguugagucau

SEQ ID NO: 113223 - RNA, 19 nt, Artificial Sequence
  Synthetic
uuaugagaaguugagucau

SEQ ID NO: 113224 - RNA, 20 nt, Artificial Sequence
  Synthetic
auuaugagaaguugagucau

SEQ ID NO: 113225 - RNA, 21 nt, Artificial Sequence
  Synthetic
uauuaugagaaguugagucau

SEQ ID NO: 113226 - RNA, 22 nt, Artificial Sequence
  Synthetic
auauuaugagaaguugagucau

SEQ ID NO: 113227 - RNA, 23 nt, Artificial Sequence
  Synthetic
cauauuaugagaaguugagucau

SEQ ID NO: 113228 - RNA, 24 nt, Artificial Sequence
  Synthetic
ccauauuaugagaaguugagucau

SEQ ID NO: 113229 - RNA, 18 nt, Artificial Sequence
  Synthetic
uagagaauugauagucau

SEQ ID NO: 113230 - RNA, 19 nt, Artificial Sequence
  Synthetic
auagagaauugauagucau

SEQ ID NO: 113231 - RNA, 20 nt, Artificial Sequence
  Synthetic
cauagagaauugauagucau

SEQ ID NO: 113232 - RNA, 21 nt, Artificial Sequence
  Synthetic
acauagagaauugauagucau

SEQ ID NO: 113233 - RNA, 22 nt, Artificial Sequence
  Synthetic
cacauagagaauugauagucau

SEQ ID NO: 113234 - RNA, 23 nt, Artificial Sequence
  Synthetic
ucacauagagaauugauagucau

SEQ ID NO: 113235 - RNA, 24 nt, Artificial Sequence
  Synthetic
uucacauagagaauugauagucau

SEQ ID NO: 113236 - RNA, 18 nt, Artificial Sequence
  Synthetic
uaugggacuuauagucau

SEQ ID NO: 113237 - RNA, 19 nt, Artificial Sequence
  Synthetic
auaugggacuuauagucau

SEQ ID NO: 113238 - RNA, 20 nt, Artificial Sequence
  Synthetic
uauaugggacuuauagucau

SEQ ID NO: 113239 - RNA, 21 nt, Artificial Sequence
  Synthetic
auauaugggacuuauagucau

SEQ ID NO: 113240 - RNA, 22 nt, Artificial Sequence
  Synthetic
aauauaugggacuuauagucau

SEQ ID NO: 113241 - RNA, 23 nt, Artificial Sequence
  Synthetic
aaauauaugggacuuauagucau

SEQ ID NO: 113242 - RNA, 24 nt, Artificial Sequence
  Synthetic
uaaauauaugggacuuauagucau

SEQ ID NO: 113243 - RNA, 18 nt, Artificial Sequence
  Synthetic
uaaaucuuuugaggucau

SEQ ID NO: 113244 - RNA, 21 nt, Artificial Sequence
  Synthetic
agguaaaucuuuugaggucau

SEQ ID NO: 113245 - RNA, 22 nt, Artificial Sequence
  Synthetic
cagguaaaucuuuugaggucau

SEQ ID NO: 113246 - RNA, 24 nt, Artificial Sequence
  Synthetic
ugcagguaaaucuuuugaggucau

SEQ ID NO: 113247 - RNA, 18 nt, Artificial Sequence
  Synthetic
cgggaaguguggggucau

SEQ ID NO: 113248 - RNA, 19 nt, Artificial Sequence
  Synthetic
acgggaaguguggggucau

SEQ ID NO: 113249 - RNA, 20 nt, Artificial Sequence
  Synthetic
aacgggaaguguggggucau

SEQ ID NO: 113250 - RNA, 21 nt, Artificial Sequence
  Synthetic
uaacgggaaguguggggucau

SEQ ID NO: 113251 - RNA, 22 nt, Artificial Sequence
  Synthetic
uuaacgggaaguguggggucau

SEQ ID NO: 113252 - RNA, 23 nt, Artificial Sequence
  Synthetic
cuuaacgggaaguguggggucau

SEQ ID NO: 113253 - RNA, 18 nt, Artificial Sequence
  Synthetic
aagauaacaaagugucau

SEQ ID NO: 113254 - RNA, 21 nt, Artificial Sequence
  Synthetic
uggaagauaacaaagugucau

SEQ ID NO: 113255 - RNA, 22 nt, Artificial Sequence
  Synthetic
uuggaagauaacaaagugucau

SEQ ID NO: 113256 - RNA, 23 nt, Artificial Sequence
  Synthetic
auuggaagauaacaaagugucau

SEQ ID NO: 113257 - RNA, 24 nt, Artificial Sequence
  Synthetic
uauuggaagauaacaaagugucau

SEQ ID NO: 113258 - RNA, 21 nt, Artificial Sequence
  Synthetic
cuuguuuuuuuuaagugucau

SEQ ID NO: 113259 - RNA, 22 nt, Artificial Sequence
  Synthetic
ucuuguuuuuuuuaagugucau

SEQ ID NO: 113260 - RNA, 23 nt, Artificial Sequence
  Synthetic
uucuuguuuuuuuuaagugucau

SEQ ID NO: 113261 - RNA, 24 nt, Artificial Sequence
  Synthetic
uuucuuguuuuuuuuaagugucau

SEQ ID NO: 113262 - RNA, 19 nt, Artificial Sequence
  Synthetic
ugcaguuuggcauugucau

SEQ ID NO: 113263 - RNA, 20 nt, Artificial Sequence
  Synthetic
uugcaguuuggcauugucau

SEQ ID NO: 113264 - RNA, 21 nt, Artificial Sequence
  Synthetic
auugcaguuuggcauugucau

SEQ ID NO: 113265 - RNA, 22 nt, Artificial Sequence
  Synthetic
cauugcaguuuggcauugucau

SEQ ID NO: 113266 - RNA, 23 nt, Artificial Sequence
  Synthetic
ccauugcaguuuggcauugucau

SEQ ID NO: 113267 - RNA, 24 nt, Artificial Sequence
  Synthetic
cccauugcaguuuggcauugucau

SEQ ID NO: 113268 - RNA, 18 nt, Artificial Sequence
  Synthetic
aaucuaaagcaaauucau

SEQ ID NO: 113269 - RNA, 19 nt, Artificial Sequence
  Synthetic
uaaucuaaagcaaauucau

SEQ ID NO: 113270 - RNA, 18 nt, Artificial Sequence
  Synthetic
ucaucaacuguaauucau

SEQ ID NO: 113271 - RNA, 19 nt, Artificial Sequence
  Synthetic
uucaucaacuguaauucau

SEQ ID NO: 113272 - RNA, 20 nt, Artificial Sequence
  Synthetic
auucaucaacuguaauucau

SEQ ID NO: 113273 - RNA, 21 nt, Artificial Sequence
  Synthetic
uauucaucaacuguaauucau

SEQ ID NO: 113274 - RNA, 22 nt, Artificial Sequence
  Synthetic
auauucaucaacuguaauucau

SEQ ID NO: 113275 - RNA, 23 nt, Artificial Sequence
  Synthetic
cauauucaucaacuguaauucau

SEQ ID NO: 113276 - RNA, 24 nt, Artificial Sequence
  Synthetic
ucauauucaucaacuguaauucau

SEQ ID NO: 113277 - RNA, 18 nt, Artificial Sequence
  Synthetic
augucucuuaacauucau

SEQ ID NO: 113278 - RNA, 19 nt, Artificial Sequence
  Synthetic
uaugucucuuaacauucau

SEQ ID NO: 113279 - RNA, 20 nt, Artificial Sequence
  Synthetic
cuaugucucuuaacauucau

SEQ ID NO: 113280 - RNA, 22 nt, Artificial Sequence
  Synthetic
cgcuaugucucuuaacauucau

SEQ ID NO: 113281 - RNA, 23 nt, Artificial Sequence
  Synthetic
acgcuaugucucuuaacauucau

SEQ ID NO: 113282 - RNA, 24 nt, Artificial Sequence
  Synthetic
cacgcuaugucucuuaacauucau

SEQ ID NO: 113283 - RNA, 19 nt, Artificial Sequence
  Synthetic
agucgucauucccauucau

SEQ ID NO: 113284 - RNA, 20 nt, Artificial Sequence
  Synthetic
cagucgucauucccauucau

SEQ ID NO: 113285 - RNA, 21 nt, Artificial Sequence
  Synthetic
acagucgucauucccauucau

SEQ ID NO: 113286 - RNA, 22 nt, Artificial Sequence
  Synthetic
aacagucgucauucccauucau

SEQ ID NO: 113287 - RNA, 23 nt, Artificial Sequence
  Synthetic
caacagucgucauucccauucau

SEQ ID NO: 113288 - RNA, 18 nt, Artificial Sequence
  Synthetic
aacagacuugagauucau

SEQ ID NO: 113289 - RNA, 19 nt, Artificial Sequence
  Synthetic
aaacagacuugagauucau

SEQ ID NO: 113290 - RNA, 20 nt, Artificial Sequence
  Synthetic
aaaacagacuugagauucau

SEQ ID NO: 113291 - RNA, 21 nt, Artificial Sequence
  Synthetic
aaaaacagacuugagauucau

SEQ ID NO: 113292 - RNA, 22 nt, Artificial Sequence
  Synthetic
caaaaacagacuugagauucau

SEQ ID NO: 113293 - RNA, 18 nt, Artificial Sequence
  Synthetic
acuguuuuuuagauucau

SEQ ID NO: 113294 - RNA, 20 nt, Artificial Sequence
  Synthetic
agacuguuuuuuagauucau

SEQ ID NO: 113295 - RNA, 21 nt, Artificial Sequence
  Synthetic
cagacuguuuuuuagauucau

SEQ ID NO: 113296 - RNA, 22 nt, Artificial Sequence
  Synthetic
ucagacuguuuuuuagauucau

SEQ ID NO: 113297 - RNA, 23 nt, Artificial Sequence
  Synthetic
uucagacuguuuuuuagauucau

SEQ ID NO: 113298 - RNA, 24 nt, Artificial Sequence
  Synthetic
cuucagacuguuuuuuagauucau

SEQ ID NO: 113299 - RNA, 18 nt, Artificial Sequence
  Synthetic
uuuuucucaauuauucau

SEQ ID NO: 113300 - RNA, 19 nt, Artificial Sequence
  Synthetic
auuuuucucaauuauucau

SEQ ID NO: 113301 - RNA, 21 nt, Artificial Sequence
  Synthetic
agauuuuucucaauuauucau

SEQ ID NO: 113302 - RNA, 22 nt, Artificial Sequence
  Synthetic
uagauuuuucucaauuauucau

SEQ ID NO: 113303 - RNA, 23 nt, Artificial Sequence
  Synthetic
uuagauuuuucucaauuauucau

SEQ ID NO: 113304 - RNA, 18 nt, Artificial Sequence
  Synthetic
aauauuuuaucacuucau

SEQ ID NO: 113305 - RNA, 19 nt, Artificial Sequence
  Synthetic
caauauuuuaucacuucau

SEQ ID NO: 113306 - RNA, 21 nt, Artificial Sequence
  Synthetic
agcaauauuuuaucacuucau

SEQ ID NO: 113307 - RNA, 22 nt, Artificial Sequence
  Synthetic
aagcaauauuuuaucacuucau

SEQ ID NO: 113308 - RNA, 23 nt, Artificial Sequence
  Synthetic
aaagcaauauuuuaucacuucau

SEQ ID NO: 113309 - RNA, 18 nt, Artificial Sequence
  Synthetic
uagcauugaauacuucau

SEQ ID NO: 113310 - RNA, 19 nt, Artificial Sequence
  Synthetic
uuagcauugaauacuucau

SEQ ID NO: 113311 - RNA, 20 nt, Artificial Sequence
  Synthetic
uuuagcauugaauacuucau

SEQ ID NO: 113312 - RNA, 21 nt, Artificial Sequence
  Synthetic
auuuagcauugaauacuucau

SEQ ID NO: 113313 - RNA, 22 nt, Artificial Sequence
  Synthetic
aauuuagcauugaauacuucau

SEQ ID NO: 113314 - RNA, 23 nt, Artificial Sequence
  Synthetic
uaauuuagcauugaauacuucau

SEQ ID NO: 113315 - RNA, 24 nt, Artificial Sequence
  Synthetic
auaauuuagcauugaauacuucau

SEQ ID NO: 113316 - RNA, 18 nt, Artificial Sequence
  Synthetic
cuauuccuuugccuucau

SEQ ID NO: 113317 - RNA, 19 nt, Artificial Sequence
  Synthetic
ccuauuccuuugccuucau

SEQ ID NO: 113318 - RNA, 20 nt, Artificial Sequence
  Synthetic
uccuauuccuuugccuucau

SEQ ID NO: 113319 - RNA, 21 nt, Artificial Sequence
  Synthetic
auccuauuccuuugccuucau

SEQ ID NO: 113320 - RNA, 22 nt, Artificial Sequence
  Synthetic
aauccuauuccuuugccuucau

SEQ ID NO: 113321 - RNA, 23 nt, Artificial Sequence
  Synthetic
aaauccuauuccuuugccuucau

SEQ ID NO: 113322 - RNA, 18 nt, Artificial Sequence
  Synthetic
cucccagagcuccuucau

SEQ ID NO: 113323 - RNA, 19 nt, Artificial Sequence
  Synthetic
ucucccagagcuccuucau

SEQ ID NO: 113324 - RNA, 20 nt, Artificial Sequence
  Synthetic
aucucccagagcuccuucau

SEQ ID NO: 113325 - RNA, 21 nt, Artificial Sequence
  Synthetic
uaucucccagagcuccuucau

SEQ ID NO: 113326 - RNA, 22 nt, Artificial Sequence
  Synthetic
cuaucucccagagcuccuucau

SEQ ID NO: 113327 - RNA, 23 nt, Artificial Sequence
  Synthetic
acuaucucccagagcuccuucau

SEQ ID NO: 113328 - RNA, 24 nt, Artificial Sequence
  Synthetic
uacuaucucccagagcuccuucau

SEQ ID NO: 113329 - RNA, 19 nt, Artificial Sequence
  Synthetic
ugauucuuuaucucuucau

SEQ ID NO: 113330 - RNA, 21 nt, Artificial Sequence
  Synthetic
ugugauucuuuaucucuucau

SEQ ID NO: 113331 - RNA, 22 nt, Artificial Sequence
  Synthetic
cugugauucuuuaucucuucau

SEQ ID NO: 113332 - RNA, 23 nt, Artificial Sequence
  Synthetic
ucugugauucuuuaucucuucau

SEQ ID NO: 113333 - RNA, 24 nt, Artificial Sequence
  Synthetic
uucugugauucuuuaucucuucau

SEQ ID NO: 113334 - RNA, 18 nt, Artificial Sequence
  Synthetic
cuuuauuuuauucuucau

SEQ ID NO: 113335 - RNA, 20 nt, Artificial Sequence
  Synthetic
agcuuuauuuuauucuucau

SEQ ID NO: 113336 - RNA, 21 nt, Artificial Sequence
  Synthetic
aagcuuuauuuuauucuucau

SEQ ID NO: 113337 - RNA, 22 nt, Artificial Sequence
  Synthetic
aaagcuuuauuuuauucuucau

SEQ ID NO: 113338 - RNA, 24 nt, Artificial Sequence
  Synthetic
agaaagcuuuauuuuauucuucau

SEQ ID NO: 113339 - RNA, 21 nt, Artificial Sequence
  Synthetic
cagacauuuuaauuucuucau

SEQ ID NO: 113340 - RNA, 22 nt, Artificial Sequence
  Synthetic
acagacauuuuaauuucuucau

SEQ ID NO: 113341 - RNA, 24 nt, Artificial Sequence
  Synthetic
agacagacauuuuaauuucuucau

SEQ ID NO: 113342 - RNA, 18 nt, Artificial Sequence
  Synthetic
auauuaaaacacguucau

SEQ ID NO: 113343 - RNA, 19 nt, Artificial Sequence
  Synthetic
uauauuaaaacacguucau

SEQ ID NO: 113344 - RNA, 20 nt, Artificial Sequence
  Synthetic
auauauuaaaacacguucau

SEQ ID NO: 113345 - RNA, 21 nt, Artificial Sequence
  Synthetic
uauauauuaaaacacguucau

SEQ ID NO: 113346 - RNA, 22 nt, Artificial Sequence
  Synthetic
auauauauuaaaacacguucau

SEQ ID NO: 113347 - RNA, 23 nt, Artificial Sequence
  Synthetic
uauauauauuaaaacacguucau

SEQ ID NO: 113348 - RNA, 24 nt, Artificial Sequence
  Synthetic
uuauauauauuaaaacacguucau

SEQ ID NO: 113349 - RNA, 18 nt, Artificial Sequence
  Synthetic
cuuauuugaccuuuucau

SEQ ID NO: 113350 - RNA, 20 nt, Artificial Sequence
  Synthetic
agcuuauuugaccuuuucau

SEQ ID NO: 113351 - RNA, 21 nt, Artificial Sequence
  Synthetic
cagcuuauuugaccuuuucau

SEQ ID NO: 113352 - RNA, 22 nt, Artificial Sequence
  Synthetic
ucagcuuauuugaccuuuucau

SEQ ID NO: 113353 - RNA, 23 nt, Artificial Sequence
  Synthetic
uucagcuuauuugaccuuuucau

SEQ ID NO: 113354 - RNA, 24 nt, Artificial Sequence
  Synthetic
uuucagcuuauuugaccuuuucau

SEQ ID NO: 113355 - RNA, 18 nt, Artificial Sequence
  Synthetic
cagauuaauccuuuucau

SEQ ID NO: 113356 - RNA, 19 nt, Artificial Sequence
  Synthetic
ucagauuaauccuuuucau

SEQ ID NO: 113357 - RNA, 20 nt, Artificial Sequence
  Synthetic
uucagauuaauccuuuucau

SEQ ID NO: 113358 - RNA, 21 nt, Artificial Sequence
  Synthetic
auucagauuaauccuuuucau

SEQ ID NO: 113359 - RNA, 22 nt, Artificial Sequence
  Synthetic
cauucagauuaauccuuuucau

SEQ ID NO: 113360 - RNA, 23 nt, Artificial Sequence
  Synthetic
ucauucagauuaauccuuuucau

SEQ ID NO: 113361 - RNA, 24 nt, Artificial Sequence
  Synthetic
cucauucagauuaauccuuuucau

SEQ ID NO: 113362 - RNA, 18 nt, Artificial Sequence
  Synthetic
cgguuucugguuuuucau

SEQ ID NO: 113363 - RNA, 19 nt, Artificial Sequence
  Synthetic
acgguuucugguuuuucau

SEQ ID NO: 113364 - RNA, 20 nt, Artificial Sequence
  Synthetic
cacgguuucugguuuuucau

SEQ ID NO: 113365 - RNA, 21 nt, Artificial Sequence
  Synthetic
ccacgguuucugguuuuucau

SEQ ID NO: 113366 - RNA, 23 nt, Artificial Sequence
  Synthetic
agccacgguuucugguuuuucau

SEQ ID NO: 113367 - RNA, 24 nt, Artificial Sequence
  Synthetic
cagccacgguuucugguuuuucau

SEQ ID NO: 113368 - RNA, 18 nt, Artificial Sequence
  Synthetic
uacauguauuuuuuucau

SEQ ID NO: 113369 - RNA, 19 nt, Artificial Sequence
  Synthetic
cuacauguauuuuuuucau

SEQ ID NO: 113370 - RNA, 20 nt, Artificial Sequence
  Synthetic
ucuacauguauuuuuuucau

SEQ ID NO: 113371 - RNA, 21 nt, Artificial Sequence
  Synthetic
uucuacauguauuuuuuucau

SEQ ID NO: 113372 - RNA, 22 nt, Artificial Sequence
  Synthetic
uuucuacauguauuuuuuucau

SEQ ID NO: 113373 - RNA, 23 nt, Artificial Sequence
  Synthetic
auuucuacauguauuuuuuucau

SEQ ID NO: 113374 - RNA, 24 nt, Artificial Sequence
  Synthetic
cauuucuacauguauuuuuuucau

SEQ ID NO: 113375 - RNA, 21 nt, Artificial Sequence
  Synthetic
aucagaaaauagacaaaagau

SEQ ID NO: 113376 - RNA, 23 nt, Artificial Sequence
  Synthetic
agaucagaaaauagacaaaagau

SEQ ID NO: 113377 - RNA, 24 nt, Artificial Sequence
  Synthetic
uagaucagaaaauagacaaaagau

SEQ ID NO: 113378 - RNA, 18 nt, Artificial Sequence
  Synthetic
uaguauaacuucaaagau

SEQ ID NO: 113379 - RNA, 19 nt, Artificial Sequence
  Synthetic
uuaguauaacuucaaagau

SEQ ID NO: 113380 - RNA, 20 nt, Artificial Sequence
  Synthetic
uuuaguauaacuucaaagau

SEQ ID NO: 113381 - RNA, 21 nt, Artificial Sequence
  Synthetic
cuuuaguauaacuucaaagau

SEQ ID NO: 113382 - RNA, 23 nt, Artificial Sequence
  Synthetic
agcuuuaguauaacuucaaagau

SEQ ID NO: 113383 - RNA, 24 nt, Artificial Sequence
  Synthetic
aagcuuuaguauaacuucaaagau

SEQ ID NO: 113384 - RNA, 19 nt, Artificial Sequence
  Synthetic
ugugggcuggcagaaagau

SEQ ID NO: 113385 - RNA, 20 nt, Artificial Sequence
  Synthetic
uugugggcuggcagaaagau

SEQ ID NO: 113386 - RNA, 21 nt, Artificial Sequence
  Synthetic
uuugugggcuggcagaaagau

SEQ ID NO: 113387 - RNA, 22 nt, Artificial Sequence
  Synthetic
uuuugugggcuggcagaaagau

SEQ ID NO: 113388 - RNA, 23 nt, Artificial Sequence
  Synthetic
cuuuugugggcuggcagaaagau

SEQ ID NO: 113389 - RNA, 24 nt, Artificial Sequence
  Synthetic
ccuuuugugggcuggcagaaagau

SEQ ID NO: 113390 - RNA, 18 nt, Artificial Sequence
  Synthetic
ucuauuuggaggaaagau

SEQ ID NO: 113391 - RNA, 19 nt, Artificial Sequence
  Synthetic
uucuauuuggaggaaagau

SEQ ID NO: 113392 - RNA, 20 nt, Artificial Sequence
  Synthetic
uuucuauuuggaggaaagau

SEQ ID NO: 113393 - RNA, 21 nt, Artificial Sequence
  Synthetic
auuucuauuuggaggaaagau

SEQ ID NO: 113394 - RNA, 22 nt, Artificial Sequence
  Synthetic
cauuucuauuuggaggaaagau

SEQ ID NO: 113395 - RNA, 23 nt, Artificial Sequence
  Synthetic
ucauuucuauuuggaggaaagau

SEQ ID NO: 113396 - RNA, 19 nt, Artificial Sequence
  Synthetic
ugccuggaauguuaaagau

SEQ ID NO: 113397 - RNA, 20 nt, Artificial Sequence
  Synthetic
uugccuggaauguuaaagau

SEQ ID NO: 113398 - RNA, 21 nt, Artificial Sequence
  Synthetic
cuugccuggaauguuaaagau

SEQ ID NO: 113399 - RNA, 22 nt, Artificial Sequence
  Synthetic
acuugccuggaauguuaaagau

SEQ ID NO: 113400 - RNA, 23 nt, Artificial Sequence
  Synthetic
uacuugccuggaauguuaaagau

SEQ ID NO: 113401 - RNA, 24 nt, Artificial Sequence
  Synthetic
auacuugccuggaauguuaaagau

SEQ ID NO: 113402 - RNA, 18 nt, Artificial Sequence
  Synthetic
aagaggccagaacaagau

SEQ ID NO: 113403 - RNA, 19 nt, Artificial Sequence
  Synthetic
uaagaggccagaacaagau

SEQ ID NO: 113404 - RNA, 20 nt, Artificial Sequence
  Synthetic
auaagaggccagaacaagau

SEQ ID NO: 113405 - RNA, 18 nt, Artificial Sequence
  Synthetic
ugccaacggugacaagau

SEQ ID NO: 113406 - RNA, 19 nt, Artificial Sequence
  Synthetic
uugccaacggugacaagau

SEQ ID NO: 113407 - RNA, 20 nt, Artificial Sequence
  Synthetic
uuugccaacggugacaagau

SEQ ID NO: 113408 - RNA, 21 nt, Artificial Sequence
  Synthetic
auuugccaacggugacaagau

SEQ ID NO: 113409 - RNA, 22 nt, Artificial Sequence
  Synthetic
aauuugccaacggugacaagau

SEQ ID NO: 113410 - RNA, 23 nt, Artificial Sequence
  Synthetic
aaauuugccaacggugacaagau

SEQ ID NO: 113411 - RNA, 24 nt, Artificial Sequence
  Synthetic
aaaauuugccaacggugacaagau

SEQ ID NO: 113412 - RNA, 18 nt, Artificial Sequence
  Synthetic
ugcgucaaagaucaagau

SEQ ID NO: 113413 - RNA, 19 nt, Artificial Sequence
  Synthetic
uugcgucaaagaucaagau

SEQ ID NO: 113414 - RNA, 20 nt, Artificial Sequence
  Synthetic
auugcgucaaagaucaagau

SEQ ID NO: 113415 - RNA, 22 nt, Artificial Sequence
  Synthetic
ugauugcgucaaagaucaagau

SEQ ID NO: 113416 - RNA, 23 nt, Artificial Sequence
  Synthetic
augauugcgucaaagaucaagau

SEQ ID NO: 113417 - RNA, 24 nt, Artificial Sequence
  Synthetic
uaugauugcgucaaagaucaagau

SEQ ID NO: 113418 - RNA, 18 nt, Artificial Sequence
  Synthetic
uggcuuagagaagaagau

SEQ ID NO: 113419 - RNA, 19 nt, Artificial Sequence
  Synthetic
cuggcuuagagaagaagau

SEQ ID NO: 113420 - RNA, 20 nt, Artificial Sequence
  Synthetic
ucuggcuuagagaagaagau

SEQ ID NO: 113421 - RNA, 21 nt, Artificial Sequence
  Synthetic
uucuggcuuagagaagaagau

SEQ ID NO: 113422 - RNA, 22 nt, Artificial Sequence
  Synthetic
uuucuggcuuagagaagaagau

SEQ ID NO: 113423 - RNA, 18 nt, Artificial Sequence
  Synthetic
auaaucaguugggaagau

SEQ ID NO: 113424 - RNA, 19 nt, Artificial Sequence
  Synthetic
cauaaucaguugggaagau

SEQ ID NO: 113425 - RNA, 20 nt, Artificial Sequence
  Synthetic
ucauaaucaguugggaagau

SEQ ID NO: 113426 - RNA, 21 nt, Artificial Sequence
  Synthetic
uucauaaucaguugggaagau

SEQ ID NO: 113427 - RNA, 22 nt, Artificial Sequence
  Synthetic
cuucauaaucaguugggaagau

SEQ ID NO: 113428 - RNA, 24 nt, Artificial Sequence
  Synthetic
ugcuucauaaucaguugggaagau

SEQ ID NO: 113429 - RNA, 18 nt, Artificial Sequence
  Synthetic
uugaaaaagauggaagau

SEQ ID NO: 113430 - RNA, 19 nt, Artificial Sequence
  Synthetic
uuugaaaaagauggaagau

SEQ ID NO: 113431 - RNA, 20 nt, Artificial Sequence
  Synthetic
auuugaaaaagauggaagau

SEQ ID NO: 113432 - RNA, 21 nt, Artificial Sequence
  Synthetic
cauuugaaaaagauggaagau

SEQ ID NO: 113433 - RNA, 22 nt, Artificial Sequence
  Synthetic
ccauuugaaaaagauggaagau

SEQ ID NO: 113434 - RNA, 23 nt, Artificial Sequence
  Synthetic
accauuugaaaaagauggaagau

SEQ ID NO: 113435 - RNA, 24 nt, Artificial Sequence
  Synthetic
caccauuugaaaaagauggaagau

SEQ ID NO: 113436 - RNA, 18 nt, Artificial Sequence
  Synthetic
aaaagcaaauuggaagau

SEQ ID NO: 113437 - RNA, 19 nt, Artificial Sequence
  Synthetic
caaaagcaaauuggaagau

SEQ ID NO: 113438 - RNA, 20 nt, Artificial Sequence
  Synthetic
ucaaaagcaaauuggaagau

SEQ ID NO: 113439 - RNA, 22 nt, Artificial Sequence
  Synthetic
agucaaaagcaaauuggaagau

SEQ ID NO: 113440 - RNA, 23 nt, Artificial Sequence
  Synthetic
uagucaaaagcaaauuggaagau

SEQ ID NO: 113441 - RNA, 24 nt, Artificial Sequence
  Synthetic
auagucaaaagcaaauuggaagau

SEQ ID NO: 113442 - RNA, 18 nt, Artificial Sequence
  Synthetic
aauugauuauaugaagau

SEQ ID NO: 113443 - RNA, 19 nt, Artificial Sequence
  Synthetic
uaauugauuauaugaagau

SEQ ID NO: 113444 - RNA, 21 nt, Artificial Sequence
  Synthetic
aguaauugauuauaugaagau

SEQ ID NO: 113445 - RNA, 22 nt, Artificial Sequence
  Synthetic
aaguaauugauuauaugaagau

SEQ ID NO: 113446 - RNA, 23 nt, Artificial Sequence
  Synthetic
aaaguaauugauuauaugaagau

SEQ ID NO: 113447 - RNA, 24 nt, Artificial Sequence
  Synthetic
aaaaguaauugauuauaugaagau

SEQ ID NO: 113448 - RNA, 18 nt, Artificial Sequence
  Synthetic
ugaugaguaugugaagau

SEQ ID NO: 113449 - RNA, 19 nt, Artificial Sequence
  Synthetic
augaugaguaugugaagau

SEQ ID NO: 113450 - RNA, 21 nt, Artificial Sequence
  Synthetic
agaugaugaguaugugaagau

SEQ ID NO: 113451 - RNA, 22 nt, Artificial Sequence
  Synthetic
uagaugaugaguaugugaagau

SEQ ID NO: 113452 - RNA, 23 nt, Artificial Sequence
  Synthetic
cuagaugaugaguaugugaagau

SEQ ID NO: 113453 - RNA, 24 nt, Artificial Sequence
  Synthetic
ucuagaugaugaguaugugaagau

SEQ ID NO: 113454 - RNA, 21 nt, Artificial Sequence
  Synthetic
uguuauauguaaaaauaagau

SEQ ID NO: 113455 - RNA, 22 nt, Artificial Sequence
  Synthetic
cuguuauauguaaaaauaagau

SEQ ID NO: 113456 - RNA, 23 nt, Artificial Sequence
  Synthetic
ccuguuauauguaaaaauaagau

SEQ ID NO: 113457 - RNA, 24 nt, Artificial Sequence
  Synthetic
accuguuauauguaaaaauaagau

SEQ ID NO: 113458 - RNA, 18 nt, Artificial Sequence
  Synthetic
aauaagucacaauaagau

SEQ ID NO: 113459 - RNA, 19 nt, Artificial Sequence
  Synthetic
caauaagucacaauaagau

SEQ ID NO: 113460 - RNA, 20 nt, Artificial Sequence
  Synthetic
ucaauaagucacaauaagau

SEQ ID NO: 113461 - RNA, 21 nt, Artificial Sequence
  Synthetic
uucaauaagucacaauaagau

SEQ ID NO: 113462 - RNA, 22 nt, Artificial Sequence
  Synthetic
uuucaauaagucacaauaagau

SEQ ID NO: 113463 - RNA, 24 nt, Artificial Sequence
  Synthetic
aguuucaauaagucacaauaagau

SEQ ID NO: 113464 - RNA, 18 nt, Artificial Sequence
  Synthetic
ugggcaacuuaauaagau

SEQ ID NO: 113465 - RNA, 19 nt, Artificial Sequence
  Synthetic
augggcaacuuaauaagau

SEQ ID NO: 113466 - RNA, 20 nt, Artificial Sequence
  Synthetic
aaugggcaacuuaauaagau

SEQ ID NO: 113467 - RNA, 21 nt, Artificial Sequence
  Synthetic
caaugggcaacuuaauaagau

SEQ ID NO: 113468 - RNA, 22 nt, Artificial Sequence
  Synthetic
ucaaugggcaacuuaauaagau

SEQ ID NO: 113469 - RNA, 23 nt, Artificial Sequence
  Synthetic
uucaaugggcaacuuaauaagau

SEQ ID NO: 113470 - RNA, 24 nt, Artificial Sequence
  Synthetic
auucaaugggcaacuuaauaagau

SEQ ID NO: 113471 - RNA, 18 nt, Artificial Sequence
  Synthetic
uuauuuaacacauaagau

SEQ ID NO: 113472 - RNA, 20 nt, Artificial Sequence
  Synthetic
aguuauuuaacacauaagau

SEQ ID NO: 113473 - RNA, 21 nt, Artificial Sequence
  Synthetic
aaguuauuuaacacauaagau

SEQ ID NO: 113474 - RNA, 22 nt, Artificial Sequence
  Synthetic
caaguuauuuaacacauaagau

SEQ ID NO: 113475 - RNA, 23 nt, Artificial Sequence
  Synthetic
acaaguuauuuaacacauaagau

SEQ ID NO: 113476 - RNA, 24 nt, Artificial Sequence
  Synthetic
aacaaguuauuuaacacauaagau

SEQ ID NO: 113477 - RNA, 18 nt, Artificial Sequence
  Synthetic
aagaauguucuauaagau

SEQ ID NO: 113478 - RNA, 20 nt, Artificial Sequence
  Synthetic
ugaagaauguucuauaagau

SEQ ID NO: 113479 - RNA, 21 nt, Artificial Sequence
  Synthetic
uugaagaauguucuauaagau

SEQ ID NO: 113480 - RNA, 22 nt, Artificial Sequence
  Synthetic
auugaagaauguucuauaagau

SEQ ID NO: 113481 - RNA, 23 nt, Artificial Sequence
  Synthetic
cauugaagaauguucuauaagau

SEQ ID NO: 113482 - RNA, 24 nt, Artificial Sequence
  Synthetic
acauugaagaauguucuauaagau

SEQ ID NO: 113483 - RNA, 18 nt, Artificial Sequence
  Synthetic
uugaagccuuaguaagau

SEQ ID NO: 113484 - RNA, 19 nt, Artificial Sequence
  Synthetic
uuugaagccuuaguaagau

SEQ ID NO: 113485 - RNA, 21 nt, Artificial Sequence
  Synthetic
uguuugaagccuuaguaagau

SEQ ID NO: 113486 - RNA, 22 nt, Artificial Sequence
  Synthetic
uuguuugaagccuuaguaagau

SEQ ID NO: 113487 - RNA, 23 nt, Artificial Sequence
  Synthetic
uuuguuugaagccuuaguaagau

SEQ ID NO: 113488 - RNA, 24 nt, Artificial Sequence
  Synthetic
uuuuguuugaagccuuaguaagau

SEQ ID NO: 113489 - RNA, 18 nt, Artificial Sequence
  Synthetic
cuagcacaaugaacagau

SEQ ID NO: 113490 - RNA, 19 nt, Artificial Sequence
  Synthetic
acuagcacaaugaacagau

SEQ ID NO: 113491 - RNA, 20 nt, Artificial Sequence
  Synthetic
aacuagcacaaugaacagau

SEQ ID NO: 113492 - RNA, 21 nt, Artificial Sequence
  Synthetic
uaacuagcacaaugaacagau

SEQ ID NO: 113493 - RNA, 22 nt, Artificial Sequence
  Synthetic
cuaacuagcacaaugaacagau

SEQ ID NO: 113494 - RNA, 23 nt, Artificial Sequence
  Synthetic
ucuaacuagcacaaugaacagau

SEQ ID NO: 113495 - RNA, 24 nt, Artificial Sequence
  Synthetic
uucuaacuagcacaaugaacagau

SEQ ID NO: 113496 - RNA, 20 nt, Artificial Sequence
  Synthetic
agguuccuccaguaacagau

SEQ ID NO: 113497 - RNA, 21 nt, Artificial Sequence
  Synthetic
aagguuccuccaguaacagau

SEQ ID NO: 113498 - RNA, 22 nt, Artificial Sequence
  Synthetic
aaagguuccuccaguaacagau

SEQ ID NO: 113499 - RNA, 23 nt, Artificial Sequence
  Synthetic
uaaagguuccuccaguaacagau

SEQ ID NO: 113500 - RNA, 24 nt, Artificial Sequence
  Synthetic
uuaaagguuccuccaguaacagau

SEQ ID NO: 113501 - RNA, 18 nt, Artificial Sequence
  Synthetic
aagggaaaaggcacagau

SEQ ID NO: 113502 - RNA, 19 nt, Artificial Sequence
  Synthetic
uaagggaaaaggcacagau

SEQ ID NO: 113503 - RNA, 20 nt, Artificial Sequence
  Synthetic
auaagggaaaaggcacagau

SEQ ID NO: 113504 - RNA, 21 nt, Artificial Sequence
  Synthetic
aauaagggaaaaggcacagau

SEQ ID NO: 113505 - RNA, 22 nt, Artificial Sequence
  Synthetic
caauaagggaaaaggcacagau

SEQ ID NO: 113506 - RNA, 23 nt, Artificial Sequence
  Synthetic
acaauaagggaaaaggcacagau

SEQ ID NO: 113507 - RNA, 24 nt, Artificial Sequence
  Synthetic
aacaauaagggaaaaggcacagau

SEQ ID NO: 113508 - RNA, 18 nt, Artificial Sequence
  Synthetic
uguauuuugggagcagau

SEQ ID NO: 113509 - RNA, 19 nt, Artificial Sequence
  Synthetic
cuguauuuugggagcagau

SEQ ID NO: 113510 - RNA, 21 nt, Artificial Sequence
  Synthetic
ugcuguauuuugggagcagau

SEQ ID NO: 113511 - RNA, 22 nt, Artificial Sequence
  Synthetic
uugcuguauuuugggagcagau

SEQ ID NO: 113512 - RNA, 23 nt, Artificial Sequence
  Synthetic
auugcuguauuuugggagcagau

SEQ ID NO: 113513 - RNA, 24 nt, Artificial Sequence
  Synthetic
cauugcuguauuuugggagcagau

SEQ ID NO: 113514 - RNA, 18 nt, Artificial Sequence
  Synthetic
ccugaggggaaggcagau

SEQ ID NO: 113515 - RNA, 19 nt, Artificial Sequence
  Synthetic
cccugaggggaaggcagau

SEQ ID NO: 113516 - RNA, 18 nt, Artificial Sequence
  Synthetic
uuuaaaaacuaggcagau

SEQ ID NO: 113517 - RNA, 19 nt, Artificial Sequence
  Synthetic
uuuuaaaaacuaggcagau

SEQ ID NO: 113518 - RNA, 21 nt, Artificial Sequence
  Synthetic
aguuuuaaaaacuaggcagau

SEQ ID NO: 113519 - RNA, 23 nt, Artificial Sequence
  Synthetic
agaguuuuaaaaacuaggcagau

SEQ ID NO: 113520 - RNA, 24 nt, Artificial Sequence
  Synthetic
uagaguuuuaaaaacuaggcagau

SEQ ID NO: 113521 - RNA, 18 nt, Artificial Sequence
  Synthetic
aaaaguaaguuugcagau

SEQ ID NO: 113522 - RNA, 19 nt, Artificial Sequence
  Synthetic
caaaaguaaguuugcagau

SEQ ID NO: 113523 - RNA, 20 nt, Artificial Sequence
  Synthetic
ucaaaaguaaguuugcagau

SEQ ID NO: 113524 - RNA, 21 nt, Artificial Sequence
  Synthetic
aucaaaaguaaguuugcagau

SEQ ID NO: 113525 - RNA, 22 nt, Artificial Sequence
  Synthetic
caucaaaaguaaguuugcagau

SEQ ID NO: 113526 - RNA, 23 nt, Artificial Sequence
  Synthetic
ucaucaaaaguaaguuugcagau

SEQ ID NO: 113527 - RNA, 24 nt, Artificial Sequence
  Synthetic
uucaucaaaaguaaguuugcagau

SEQ ID NO: 113528 - RNA, 18 nt, Artificial Sequence
  Synthetic
cauucccgggucucagau

SEQ ID NO: 113529 - RNA, 19 nt, Artificial Sequence
  Synthetic
ccauucccgggucucagau

SEQ ID NO: 113530 - RNA, 20 nt, Artificial Sequence
  Synthetic
uccauucccgggucucagau

SEQ ID NO: 113531 - RNA, 21 nt, Artificial Sequence
  Synthetic
cuccauucccgggucucagau

SEQ ID NO: 113532 - RNA, 22 nt, Artificial Sequence
  Synthetic
ccuccauucccgggucucagau

SEQ ID NO: 113533 - RNA, 18 nt, Artificial Sequence
  Synthetic
aauaaucuauguucagau

SEQ ID NO: 113534 - RNA, 19 nt, Artificial Sequence
  Synthetic
caauaaucuauguucagau

SEQ ID NO: 113535 - RNA, 20 nt, Artificial Sequence
  Synthetic
acaauaaucuauguucagau

SEQ ID NO: 113536 - RNA, 21 nt, Artificial Sequence
  Synthetic
aacaauaaucuauguucagau

SEQ ID NO: 113537 - RNA, 22 nt, Artificial Sequence
  Synthetic
caacaauaaucuauguucagau

SEQ ID NO: 113538 - RNA, 23 nt, Artificial Sequence
  Synthetic
acaacaauaaucuauguucagau

SEQ ID NO: 113539 - RNA, 24 nt, Artificial Sequence
  Synthetic
cacaacaauaaucuauguucagau

SEQ ID NO: 113540 - RNA, 18 nt, Artificial Sequence
  Synthetic
uauuuauaagcuagagau

SEQ ID NO: 113541 - RNA, 19 nt, Artificial Sequence
  Synthetic
auauuuauaagcuagagau

SEQ ID NO: 113542 - RNA, 20 nt, Artificial Sequence
  Synthetic
uauauuuauaagcuagagau

SEQ ID NO: 113543 - RNA, 21 nt, Artificial Sequence
  Synthetic
auauauuuauaagcuagagau

SEQ ID NO: 113544 - RNA, 22 nt, Artificial Sequence
  Synthetic
aauauauuuauaagcuagagau

SEQ ID NO: 113545 - RNA, 23 nt, Artificial Sequence
  Synthetic
caauauauuuauaagcuagagau

SEQ ID NO: 113546 - RNA, 24 nt, Artificial Sequence
  Synthetic
ucaauauauuuauaagcuagagau

SEQ ID NO: 113547 - RNA, 18 nt, Artificial Sequence
  Synthetic
caacuauaaauuagagau

SEQ ID NO: 113548 - RNA, 20 nt, Artificial Sequence
  Synthetic
agcaacuauaaauuagagau

SEQ ID NO: 113549 - RNA, 21 nt, Artificial Sequence
  Synthetic
uagcaacuauaaauuagagau

SEQ ID NO: 113550 - RNA, 22 nt, Artificial Sequence
  Synthetic
uuagcaacuauaaauuagagau

SEQ ID NO: 113551 - RNA, 23 nt, Artificial Sequence
  Synthetic
uuuagcaacuauaaauuagagau

SEQ ID NO: 113552 - RNA, 18 nt, Artificial Sequence
  Synthetic
uugaagauaagacgagau

SEQ ID NO: 113553 - RNA, 20 nt, Artificial Sequence
  Synthetic
aguugaagauaagacgagau

SEQ ID NO: 113554 - RNA, 21 nt, Artificial Sequence
  Synthetic
aaguugaagauaagacgagau

SEQ ID NO: 113555 - RNA, 23 nt, Artificial Sequence
  Synthetic
ugaaguugaagauaagacgagau

SEQ ID NO: 113556 - RNA, 24 nt, Artificial Sequence
  Synthetic
augaaguugaagauaagacgagau

SEQ ID NO: 113557 - RNA, 18 nt, Artificial Sequence
  Synthetic
augaggguuuaaggagau

SEQ ID NO: 113558 - RNA, 19 nt, Artificial Sequence
  Synthetic
aaugaggguuuaaggagau

SEQ ID NO: 113559 - RNA, 21 nt, Artificial Sequence
  Synthetic
agaaugaggguuuaaggagau

SEQ ID NO: 113560 - RNA, 22 nt, Artificial Sequence
  Synthetic
aagaaugaggguuuaaggagau

SEQ ID NO: 113561 - RNA, 23 nt, Artificial Sequence
  Synthetic
caagaaugaggguuuaaggagau

SEQ ID NO: 113562 - RNA, 24 nt, Artificial Sequence
  Synthetic
ucaagaaugaggguuuaaggagau

SEQ ID NO: 113563 - RNA, 19 nt, Artificial Sequence
  Synthetic
ugaaaucuaagcaggagau

SEQ ID NO: 113564 - RNA, 20 nt, Artificial Sequence
  Synthetic
uugaaaucuaagcaggagau

SEQ ID NO: 113565 - RNA, 21 nt, Artificial Sequence
  Synthetic
uuugaaaucuaagcaggagau

SEQ ID NO: 113566 - RNA, 22 nt, Artificial Sequence
  Synthetic
uuuugaaaucuaagcaggagau

SEQ ID NO: 113567 - RNA, 24 nt, Artificial Sequence
  Synthetic
uguuuugaaaucuaagcaggagau

SEQ ID NO: 113568 - RNA, 18 nt, Artificial Sequence
  Synthetic
uggcuagccacuggagau

SEQ ID NO: 113569 - RNA, 19 nt, Artificial Sequence
  Synthetic
uuggcuagccacuggagau

SEQ ID NO: 113570 - RNA, 20 nt, Artificial Sequence
  Synthetic
auuggcuagccacuggagau

SEQ ID NO: 113571 - RNA, 22 nt, Artificial Sequence
  Synthetic
ugauuggcuagccacuggagau

SEQ ID NO: 113572 - RNA, 23 nt, Artificial Sequence
  Synthetic
uugauuggcuagccacuggagau

SEQ ID NO: 113573 - RNA, 24 nt, Artificial Sequence
  Synthetic
cuugauuggcuagccacuggagau

SEQ ID NO: 113574 - RNA, 18 nt, Artificial Sequence
  Synthetic
ugcuuaccccuuggagau

SEQ ID NO: 113575 - RNA, 19 nt, Artificial Sequence
  Synthetic
cugcuuaccccuuggagau

SEQ ID NO: 113576 - RNA, 20 nt, Artificial Sequence
  Synthetic
acugcuuaccccuuggagau

SEQ ID NO: 113577 - RNA, 21 nt, Artificial Sequence
  Synthetic
aacugcuuaccccuuggagau

SEQ ID NO: 113578 - RNA, 22 nt, Artificial Sequence
  Synthetic
aaacugcuuaccccuuggagau

SEQ ID NO: 113579 - RNA, 23 nt, Artificial Sequence
  Synthetic
aaaacugcuuaccccuuggagau

SEQ ID NO: 113580 - RNA, 24 nt, Artificial Sequence
  Synthetic
aaaaacugcuuaccccuuggagau

SEQ ID NO: 113581 - RNA, 18 nt, Artificial Sequence
  Synthetic
cuauguaagaugugagau

SEQ ID NO: 113582 - RNA, 20 nt, Artificial Sequence
  Synthetic
agcuauguaagaugugagau

SEQ ID NO: 113583 - RNA, 21 nt, Artificial Sequence
  Synthetic
uagcuauguaagaugugagau

SEQ ID NO: 113584 - RNA, 22 nt, Artificial Sequence
  Synthetic
auagcuauguaagaugugagau

SEQ ID NO: 113585 - RNA, 23 nt, Artificial Sequence
  Synthetic
cauagcuauguaagaugugagau

SEQ ID NO: 113586 - RNA, 18 nt, Artificial Sequence
  Synthetic
uuauguacagugugagau

SEQ ID NO: 113587 - RNA, 19 nt, Artificial Sequence
  Synthetic
uuuauguacagugugagau

SEQ ID NO: 113588 - RNA, 18 nt, Artificial Sequence
  Synthetic
augcccucucauugagau

SEQ ID NO: 113589 - RNA, 19 nt, Artificial Sequence
  Synthetic
aaugcccucucauugagau

SEQ ID NO: 113590 - RNA, 20 nt, Artificial Sequence
  Synthetic
uaaugcccucucauugagau

SEQ ID NO: 113591 - RNA, 21 nt, Artificial Sequence
  Synthetic
uuaaugcccucucauugagau

SEQ ID NO: 113592 - RNA, 23 nt, Artificial Sequence
  Synthetic
aguuaaugcccucucauugagau

SEQ ID NO: 113593 - RNA, 24 nt, Artificial Sequence
  Synthetic
uaguuaaugcccucucauugagau

SEQ ID NO: 113594 - RNA, 18 nt, Artificial Sequence
  Synthetic
uuucacuuaaaaauagau

SEQ ID NO: 113595 - RNA, 19 nt, Artificial Sequence
  Synthetic
auuucacuuaaaaauagau

SEQ ID NO: 113596 - RNA, 22 nt, Artificial Sequence
  Synthetic
uggauuucacuuaaaaauagau

SEQ ID NO: 113597 - RNA, 23 nt, Artificial Sequence
  Synthetic
uuggauuucacuuaaaaauagau

SEQ ID NO: 113598 - RNA, 24 nt, Artificial Sequence
  Synthetic
uuuggauuucacuuaaaaauagau

SEQ ID NO: 113599 - RNA, 21 nt, Artificial Sequence
  Synthetic
cuauaauaauauuaaauagau

SEQ ID NO: 113600 - RNA, 23 nt, Artificial Sequence
  Synthetic
agcuauaauaauauuaaauagau

SEQ ID NO: 113601 - RNA, 24 nt, Artificial Sequence
  Synthetic
cagcuauaauaauauuaaauagau

SEQ ID NO: 113602 - RNA, 18 nt, Artificial Sequence
  Synthetic
caaucagucccuauagau

SEQ ID NO: 113603 - RNA, 19 nt, Artificial Sequence
  Synthetic
ucaaucagucccuauagau

SEQ ID NO: 113604 - RNA, 20 nt, Artificial Sequence
  Synthetic
cucaaucagucccuauagau

SEQ ID NO: 113605 - RNA, 21 nt, Artificial Sequence
  Synthetic
ucucaaucagucccuauagau

SEQ ID NO: 113606 - RNA, 22 nt, Artificial Sequence
  Synthetic
uucucaaucagucccuauagau

SEQ ID NO: 113607 - RNA, 23 nt, Artificial Sequence
  Synthetic
cuucucaaucagucccuauagau

SEQ ID NO: 113608 - RNA, 24 nt, Artificial Sequence
  Synthetic
acuucucaaucagucccuauagau

SEQ ID NO: 113609 - RNA, 18 nt, Artificial Sequence
  Synthetic
aagacuuucauucuagau

SEQ ID NO: 113610 - RNA, 19 nt, Artificial Sequence
  Synthetic
caagacuuucauucuagau

SEQ ID NO: 113611 - RNA, 20 nt, Artificial Sequence
  Synthetic
acaagacuuucauucuagau

SEQ ID NO: 113612 - RNA, 21 nt, Artificial Sequence
  Synthetic
aacaagacuuucauucuagau

SEQ ID NO: 113613 - RNA, 22 nt, Artificial Sequence
  Synthetic
aaacaagacuuucauucuagau

SEQ ID NO: 113614 - RNA, 23 nt, Artificial Sequence
  Synthetic
aaaacaagacuuucauucuagau

SEQ ID NO: 113615 - RNA, 24 nt, Artificial Sequence
  Synthetic
aaaaacaagacuuucauucuagau

SEQ ID NO: 113616 - RNA, 18 nt, Artificial Sequence
  Synthetic
cuuugaacuuaguuagau

SEQ ID NO: 113617 - RNA, 19 nt, Artificial Sequence
  Synthetic
ucuuugaacuuaguuagau

SEQ ID NO: 113618 - RNA, 21 nt, Artificial Sequence
  Synthetic
agucuuugaacuuaguuagau

SEQ ID NO: 113619 - RNA, 22 nt, Artificial Sequence
  Synthetic
cagucuuugaacuuaguuagau

SEQ ID NO: 113620 - RNA, 23 nt, Artificial Sequence
  Synthetic
acagucuuugaacuuaguuagau

SEQ ID NO: 113621 - RNA, 24 nt, Artificial Sequence
  Synthetic
uacagucuuugaacuuaguuagau

SEQ ID NO: 113622 - RNA, 20 nt, Artificial Sequence
  Synthetic
ugguuaaccauaauuuagau

SEQ ID NO: 113623 - RNA, 21 nt, Artificial Sequence
  Synthetic
augguuaaccauaauuuagau

SEQ ID NO: 113624 - RNA, 22 nt, Artificial Sequence
  Synthetic
aaugguuaaccauaauuuagau

SEQ ID NO: 113625 - RNA, 23 nt, Artificial Sequence
  Synthetic
caaugguuaaccauaauuuagau

SEQ ID NO: 113626 - RNA, 24 nt, Artificial Sequence
  Synthetic
acaaugguuaaccauaauuuagau

SEQ ID NO: 113627 - RNA, 18 nt, Artificial Sequence
  Synthetic
cuucuuaaaacuuuagau

SEQ ID NO: 113628 - RNA, 19 nt, Artificial Sequence
  Synthetic
ucuucuuaaaacuuuagau

SEQ ID NO: 113629 - RNA, 20 nt, Artificial Sequence
  Synthetic
uucuucuuaaaacuuuagau

SEQ ID NO: 113630 - RNA, 19 nt, Artificial Sequence
  Synthetic
agucacuaaaauuuuagau

SEQ ID NO: 113631 - RNA, 20 nt, Artificial Sequence
  Synthetic
uagucacuaaaauuuuagau

SEQ ID NO: 113632 - RNA, 22 nt, Artificial Sequence
  Synthetic
uguagucacuaaaauuuuagau

SEQ ID NO: 113633 - RNA, 23 nt, Artificial Sequence
  Synthetic
uuguagucacuaaaauuuuagau

SEQ ID NO: 113634 - RNA, 24 nt, Artificial Sequence
  Synthetic
auuguagucacuaaaauuuuagau

SEQ ID NO: 113635 - RNA, 18 nt, Artificial Sequence
  Synthetic
cuauuucauauuuuagau

SEQ ID NO: 113636 - RNA, 20 nt, Artificial Sequence
  Synthetic
agcuauuucauauuuuagau

SEQ ID NO: 113637 - RNA, 21 nt, Artificial Sequence
  Synthetic
uagcuauuucauauuuuagau

SEQ ID NO: 113638 - RNA, 22 nt, Artificial Sequence
  Synthetic
cuagcuauuucauauuuuagau

SEQ ID NO: 113639 - RNA, 23 nt, Artificial Sequence
  Synthetic
ucuagcuauuucauauuuuagau

SEQ ID NO: 113640 - RNA, 24 nt, Artificial Sequence
  Synthetic
aucuagcuauuucauauuuuagau

SEQ ID NO: 113641 - RNA, 18 nt, Artificial Sequence
  Synthetic
uucuacacuuuacacgau

SEQ ID NO: 113642 - RNA, 19 nt, Artificial Sequence
  Synthetic
uuucuacacuuuacacgau

SEQ ID NO: 113643 - RNA, 20 nt, Artificial Sequence
  Synthetic
cuuucuacacuuuacacgau

SEQ ID NO: 113644 - RNA, 22 nt, Artificial Sequence
  Synthetic
ugcuuucuacacuuuacacgau

SEQ ID NO: 113645 - RNA, 23 nt, Artificial Sequence
  Synthetic
cugcuuucuacacuuuacacgau

SEQ ID NO: 113646 - RNA, 24 nt, Artificial Sequence
  Synthetic
ucugcuuucuacacuuuacacgau

SEQ ID NO: 113647 - RNA, 18 nt, Artificial Sequence
  Synthetic
uacuuguuccaguccgau

SEQ ID NO: 113648 - RNA, 19 nt, Artificial Sequence
  Synthetic
uuacuuguuccaguccgau

SEQ ID NO: 113649 - RNA, 20 nt, Artificial Sequence
  Synthetic
uuuacuuguuccaguccgau

SEQ ID NO: 113650 - RNA, 21 nt, Artificial Sequence
  Synthetic
uuuuacuuguuccaguccgau

SEQ ID NO: 113651 - RNA, 22 nt, Artificial Sequence
  Synthetic
uuuuuacuuguuccaguccgau

SEQ ID NO: 113652 - RNA, 23 nt, Artificial Sequence
  Synthetic
uuuuuuacuuguuccaguccgau

SEQ ID NO: 113653 - RNA, 24 nt, Artificial Sequence
  Synthetic
auuuuuuacuuguuccaguccgau

SEQ ID NO: 113654 - RNA, 20 nt, Artificial Sequence
  Synthetic
cggaacaaaguaguuucgau

SEQ ID NO: 113655 - RNA, 21 nt, Artificial Sequence
  Synthetic
acggaacaaaguaguuucgau

SEQ ID NO: 113656 - RNA, 22 nt, Artificial Sequence
  Synthetic
aacggaacaaaguaguuucgau

SEQ ID NO: 113657 - RNA, 24 nt, Artificial Sequence
  Synthetic
agaacggaacaaaguaguuucgau

SEQ ID NO: 113658 - RNA, 18 nt, Artificial Sequence
  Synthetic
ccgugcugcccaaaggau

SEQ ID NO: 113659 - RNA, 19 nt, Artificial Sequence
  Synthetic
accgugcugcccaaaggau

SEQ ID NO: 113660 - RNA, 21 nt, Artificial Sequence
  Synthetic
agaccgugcugcccaaaggau

SEQ ID NO: 113661 - RNA, 22 nt, Artificial Sequence
  Synthetic
aagaccgugcugcccaaaggau

SEQ ID NO: 113662 - RNA, 24 nt, Artificial Sequence
  Synthetic
ugaagaccgugcugcccaaaggau

SEQ ID NO: 113663 - RNA, 18 nt, Artificial Sequence
  Synthetic
aaacggaugugaaaggau

SEQ ID NO: 113664 - RNA, 19 nt, Artificial Sequence
  Synthetic
uaaacggaugugaaaggau

SEQ ID NO: 113665 - RNA, 20 nt, Artificial Sequence
  Synthetic
uuaaacggaugugaaaggau

SEQ ID NO: 113666 - RNA, 22 nt, Artificial Sequence
  Synthetic
uguuaaacggaugugaaaggau

SEQ ID NO: 113667 - RNA, 23 nt, Artificial Sequence
  Synthetic
auguuaaacggaugugaaaggau

SEQ ID NO: 113668 - RNA, 24 nt, Artificial Sequence
  Synthetic
aauguuaaacggaugugaaaggau

SEQ ID NO: 113669 - RNA, 21 nt, Artificial Sequence
  Synthetic
cuuauucugugggucaaggau

SEQ ID NO: 113670 - RNA, 22 nt, Artificial Sequence
  Synthetic
ucuuauucugugggucaaggau

SEQ ID NO: 113671 - RNA, 23 nt, Artificial Sequence
  Synthetic
uucuuauucugugggucaaggau

SEQ ID NO: 113672 - RNA, 24 nt, Artificial Sequence
  Synthetic
cuucuuauucugugggucaaggau

SEQ ID NO: 113673 - RNA, 18 nt, Artificial Sequence
  Synthetic
uucccaucacagaaggau

SEQ ID NO: 113674 - RNA, 19 nt, Artificial Sequence
  Synthetic
uuucccaucacagaaggau

SEQ ID NO: 113675 - RNA, 20 nt, Artificial Sequence
  Synthetic
auuucccaucacagaaggau

SEQ ID NO: 113676 - RNA, 22 nt, Artificial Sequence
  Synthetic
agauuucccaucacagaaggau

SEQ ID NO: 113677 - RNA, 24 nt, Artificial Sequence
  Synthetic
agagauuucccaucacagaaggau

SEQ ID NO: 113678 - RNA, 21 nt, Artificial Sequence
  Synthetic
uggagaaaaagauagaaggau

SEQ ID NO: 113679 - RNA, 24 nt, Artificial Sequence
  Synthetic
ugguggagaaaaagauagaaggau

SEQ ID NO: 113680 - RNA, 18 nt, Artificial Sequence
  Synthetic
aguugacuuuagaaggau

SEQ ID NO: 113681 - RNA, 19 nt, Artificial Sequence
  Synthetic
aaguugacuuuagaaggau

SEQ ID NO: 113682 - RNA, 20 nt, Artificial Sequence
  Synthetic
aaaguugacuuuagaaggau

SEQ ID NO: 113683 - RNA, 21 nt, Artificial Sequence
  Synthetic
caaaguugacuuuagaaggau

SEQ ID NO: 113684 - RNA, 22 nt, Artificial Sequence
  Synthetic
acaaaguugacuuuagaaggau

SEQ ID NO: 113685 - RNA, 23 nt, Artificial Sequence
  Synthetic
uacaaaguugacuuuagaaggau

SEQ ID NO: 113686 - RNA, 24 nt, Artificial Sequence
  Synthetic
auacaaaguugacuuuagaaggau

SEQ ID NO: 113687 - RNA, 19 nt, Artificial Sequence
  Synthetic
agaguuuuugagacaggau

SEQ ID NO: 113688 - RNA, 20 nt, Artificial Sequence
  Synthetic
uagaguuuuugagacaggau

SEQ ID NO: 113689 - RNA, 22 nt, Artificial Sequence
  Synthetic
uguagaguuuuugagacaggau

SEQ ID NO: 113690 - RNA, 23 nt, Artificial Sequence
  Synthetic
cuguagaguuuuugagacaggau

SEQ ID NO: 113691 - RNA, 24 nt, Artificial Sequence
  Synthetic
ucuguagaguuuuugagacaggau

SEQ ID NO: 113692 - RNA, 18 nt, Artificial Sequence
  Synthetic
auauguaauaugcaggau

SEQ ID NO: 113693 - RNA, 19 nt, Artificial Sequence
  Synthetic
cauauguaauaugcaggau

SEQ ID NO: 113694 - RNA, 21 nt, Artificial Sequence
  Synthetic
agcauauguaauaugcaggau

SEQ ID NO: 113695 - RNA, 22 nt, Artificial Sequence
  Synthetic
uagcauauguaauaugcaggau

SEQ ID NO: 113696 - RNA, 23 nt, Artificial Sequence
  Synthetic
auagcauauguaauaugcaggau

SEQ ID NO: 113697 - RNA, 24 nt, Artificial Sequence
  Synthetic
cauagcauauguaauaugcaggau

SEQ ID NO: 113698 - RNA, 18 nt, Artificial Sequence
  Synthetic
cugucuggaauucaggau

SEQ ID NO: 113699 - RNA, 19 nt, Artificial Sequence
  Synthetic
acugucuggaauucaggau

SEQ ID NO: 113700 - RNA, 20 nt, Artificial Sequence
  Synthetic
uacugucuggaauucaggau

SEQ ID NO: 113701 - RNA, 21 nt, Artificial Sequence
  Synthetic
cuacugucuggaauucaggau

SEQ ID NO: 113702 - RNA, 22 nt, Artificial Sequence
  Synthetic
ccuacugucuggaauucaggau

SEQ ID NO: 113703 - RNA, 23 nt, Artificial Sequence
  Synthetic
accuacugucuggaauucaggau

SEQ ID NO: 113704 - RNA, 24 nt, Artificial Sequence
  Synthetic
caccuacugucuggaauucaggau

SEQ ID NO: 113705 - RNA, 19 nt, Artificial Sequence
  Synthetic
agucuucuguugggaggau

SEQ ID NO: 113706 - RNA, 20 nt, Artificial Sequence
  Synthetic
uagucuucuguugggaggau

SEQ ID NO: 113707 - RNA, 21 nt, Artificial Sequence
  Synthetic
cuagucuucuguugggaggau

SEQ ID NO: 113708 - RNA, 23 nt, Artificial Sequence
  Synthetic
ugcuagucuucuguugggaggau

SEQ ID NO: 113709 - RNA, 24 nt, Artificial Sequence
  Synthetic
cugcuagucuucuguugggaggau

SEQ ID NO: 113710 - RNA, 18 nt, Artificial Sequence
  Synthetic
accggaguuuucuaggau

SEQ ID NO: 113711 - RNA, 19 nt, Artificial Sequence
  Synthetic
uaccggaguuuucuaggau

SEQ ID NO: 113712 - RNA, 20 nt, Artificial Sequence
  Synthetic
uuaccggaguuuucuaggau

SEQ ID NO: 113713 - RNA, 22 nt, Artificial Sequence
  Synthetic
aguuaccggaguuuucuaggau

SEQ ID NO: 113714 - RNA, 23 nt, Artificial Sequence
  Synthetic
aaguuaccggaguuuucuaggau

SEQ ID NO: 113715 - RNA, 24 nt, Artificial Sequence
  Synthetic
caaguuaccggaguuuucuaggau

SEQ ID NO: 113716 - RNA, 18 nt, Artificial Sequence
  Synthetic
ugaugauacugguaggau

SEQ ID NO: 113717 - RNA, 20 nt, Artificial Sequence
  Synthetic
ugugaugauacugguaggau

SEQ ID NO: 113718 - RNA, 21 nt, Artificial Sequence
  Synthetic
cugugaugauacugguaggau

SEQ ID NO: 113719 - RNA, 22 nt, Artificial Sequence
  Synthetic
ucugugaugauacugguaggau

SEQ ID NO: 113720 - RNA, 23 nt, Artificial Sequence
  Synthetic
aucugugaugauacugguaggau

SEQ ID NO: 113721 - RNA, 24 nt, Artificial Sequence
  Synthetic
caucugugaugauacugguaggau

SEQ ID NO: 113722 - RNA, 18 nt, Artificial Sequence
  Synthetic
cagccagccaguuaggau

SEQ ID NO: 113723 - RNA, 19 nt, Artificial Sequence
  Synthetic
acagccagccaguuaggau

SEQ ID NO: 113724 - RNA, 21 nt, Artificial Sequence
  Synthetic
agacagccagccaguuaggau

SEQ ID NO: 113725 - RNA, 22 nt, Artificial Sequence
  Synthetic
aagacagccagccaguuaggau

SEQ ID NO: 113726 - RNA, 23 nt, Artificial Sequence
  Synthetic
aaagacagccagccaguuaggau

SEQ ID NO: 113727 - RNA, 24 nt, Artificial Sequence
  Synthetic
caaagacagccagccaguuaggau

SEQ ID NO: 113728 - RNA, 18 nt, Artificial Sequence
  Synthetic
auauacuaccucacggau

SEQ ID NO: 113729 - RNA, 20 nt, Artificial Sequence
  Synthetic
ugauauacuaccucacggau

SEQ ID NO: 113730 - RNA, 21 nt, Artificial Sequence
  Synthetic
augauauacuaccucacggau

SEQ ID NO: 113731 - RNA, 22 nt, Artificial Sequence
  Synthetic
aaugauauacuaccucacggau

SEQ ID NO: 113732 - RNA, 23 nt, Artificial Sequence
  Synthetic
caaugauauacuaccucacggau

SEQ ID NO: 113733 - RNA, 24 nt, Artificial Sequence
  Synthetic
acaaugauauacuaccucacggau

SEQ ID NO: 113734 - RNA, 18 nt, Artificial Sequence
  Synthetic
aauccuuuaacagcggau

SEQ ID NO: 113735 - RNA, 19 nt, Artificial Sequence
  Synthetic
caauccuuuaacagcggau

SEQ ID NO: 113736 - RNA, 22 nt, Artificial Sequence
  Synthetic
aggcaauccuuuaacagcggau

SEQ ID NO: 113737 - RNA, 18 nt, Artificial Sequence
  Synthetic
aaauuauagacaagggau

SEQ ID NO: 113738 - RNA, 19 nt, Artificial Sequence
  Synthetic
aaaauuauagacaagggau

SEQ ID NO: 113739 - RNA, 20 nt, Artificial Sequence
  Synthetic
uaaaauuauagacaagggau

SEQ ID NO: 113740 - RNA, 21 nt, Artificial Sequence
  Synthetic
auaaaauuauagacaagggau

SEQ ID NO: 113741 - RNA, 22 nt, Artificial Sequence
  Synthetic
uauaaaauuauagacaagggau

SEQ ID NO: 113742 - RNA, 23 nt, Artificial Sequence
  Synthetic
uuauaaaauuauagacaagggau

SEQ ID NO: 113743 - RNA, 24 nt, Artificial Sequence
  Synthetic
auuauaaaauuauagacaagggau

SEQ ID NO: 113744 - RNA, 18 nt, Artificial Sequence
  Synthetic
cugugagacagaagggau

SEQ ID NO: 113745 - RNA, 19 nt, Artificial Sequence
  Synthetic
ucugugagacagaagggau

SEQ ID NO: 113746 - RNA, 20 nt, Artificial Sequence
  Synthetic
aucugugagacagaagggau

SEQ ID NO: 113747 - RNA, 22 nt, Artificial Sequence
  Synthetic
agaucugugagacagaagggau

SEQ ID NO: 113748 - RNA, 23 nt, Artificial Sequence
  Synthetic
cagaucugugagacagaagggau

SEQ ID NO: 113749 - RNA, 18 nt, Artificial Sequence
  Synthetic
caaauucagcccagggau

SEQ ID NO: 113750 - RNA, 21 nt, Artificial Sequence
  Synthetic
uggcaaauucagcccagggau

SEQ ID NO: 113751 - RNA, 18 nt, Artificial Sequence
  Synthetic
agaggcccuugcagggau

SEQ ID NO: 113752 - RNA, 19 nt, Artificial Sequence
  Synthetic
aagaggcccuugcagggau

SEQ ID NO: 113753 - RNA, 20 nt, Artificial Sequence
  Synthetic
aaagaggcccuugcagggau

SEQ ID NO: 113754 - RNA, 21 nt, Artificial Sequence
  Synthetic
caaagaggcccuugcagggau

SEQ ID NO: 113755 - RNA, 22 nt, Artificial Sequence
  Synthetic
ccaaagaggcccuugcagggau

SEQ ID NO: 113756 - RNA, 23 nt, Artificial Sequence
  Synthetic
cccaaagaggcccuugcagggau

SEQ ID NO: 113757 - RNA, 18 nt, Artificial Sequence
  Synthetic
aaguuucaaaggcgggau

SEQ ID NO: 113758 - RNA, 20 nt, Artificial Sequence
  Synthetic
agaaguuucaaaggcgggau

SEQ ID NO: 113759 - RNA, 21 nt, Artificial Sequence
  Synthetic
cagaaguuucaaaggcgggau

SEQ ID NO: 113760 - RNA, 22 nt, Artificial Sequence
  Synthetic
ucagaaguuucaaaggcgggau

SEQ ID NO: 113761 - RNA, 23 nt, Artificial Sequence
  Synthetic
uucagaaguuucaaaggcgggau

SEQ ID NO: 113762 - RNA, 24 nt, Artificial Sequence
  Synthetic
uuucagaaguuucaaaggcgggau

SEQ ID NO: 113763 - RNA, 18 nt, Artificial Sequence
  Synthetic
uucaggcaaacaugggau

SEQ ID NO: 113764 - RNA, 19 nt, Artificial Sequence
  Synthetic
uuucaggcaaacaugggau

SEQ ID NO: 113765 - RNA, 20 nt, Artificial Sequence
  Synthetic
auuucaggcaaacaugggau

SEQ ID NO: 113766 - RNA, 21 nt, Artificial Sequence
  Synthetic
uauuucaggcaaacaugggau

SEQ ID NO: 113767 - RNA, 22 nt, Artificial Sequence
  Synthetic
uuauuucaggcaaacaugggau

SEQ ID NO: 113768 - RNA, 23 nt, Artificial Sequence
  Synthetic
auuauuucaggcaaacaugggau

SEQ ID NO: 113769 - RNA, 24 nt, Artificial Sequence
  Synthetic
cauuauuucaggcaaacaugggau

SEQ ID NO: 113770 - RNA, 19 nt, Artificial Sequence
  Synthetic
ugcagugucaagaugggau

SEQ ID NO: 113771 - RNA, 20 nt, Artificial Sequence
  Synthetic
augcagugucaagaugggau

SEQ ID NO: 113772 - RNA, 21 nt, Artificial Sequence
  Synthetic
uaugcagugucaagaugggau

SEQ ID NO: 113773 - RNA, 22 nt, Artificial Sequence
  Synthetic
cuaugcagugucaagaugggau

SEQ ID NO: 113774 - RNA, 24 nt, Artificial Sequence
  Synthetic
agcuaugcagugucaagaugggau

SEQ ID NO: 113775 - RNA, 18 nt, Artificial Sequence
  Synthetic
agcuaaaggaccugggau

SEQ ID NO: 113776 - RNA, 19 nt, Artificial Sequence
  Synthetic
aagcuaaaggaccugggau

SEQ ID NO: 113777 - RNA, 20 nt, Artificial Sequence
  Synthetic
uaagcuaaaggaccugggau

SEQ ID NO: 113778 - RNA, 21 nt, Artificial Sequence
  Synthetic
uuaagcuaaaggaccugggau

SEQ ID NO: 113779 - RNA, 22 nt, Artificial Sequence
  Synthetic
auuaagcuaaaggaccugggau

SEQ ID NO: 113780 - RNA, 23 nt, Artificial Sequence
  Synthetic
uauuaagcuaaaggaccugggau

SEQ ID NO: 113781 - RNA, 24 nt, Artificial Sequence
  Synthetic
cuauuaagcuaaaggaccugggau

SEQ ID NO: 113782 - RNA, 18 nt, Artificial Sequence
  Synthetic
uuuugcuaucauugggau

SEQ ID NO: 113783 - RNA, 20 nt, Artificial Sequence
  Synthetic
uguuuugcuaucauugggau

SEQ ID NO: 113784 - RNA, 21 nt, Artificial Sequence
  Synthetic
auguuuugcuaucauugggau

SEQ ID NO: 113785 - RNA, 22 nt, Artificial Sequence
  Synthetic
uauguuuugcuaucauugggau

SEQ ID NO: 113786 - RNA, 23 nt, Artificial Sequence
  Synthetic
auauguuuugcuaucauugggau

SEQ ID NO: 113787 - RNA, 24 nt, Artificial Sequence
  Synthetic
uauauguuuugcuaucauugggau

SEQ ID NO: 113788 - RNA, 18 nt, Artificial Sequence
  Synthetic
aaauccuucuguugggau

SEQ ID NO: 113789 - RNA, 19 nt, Artificial Sequence
  Synthetic
uaaauccuucuguugggau

SEQ ID NO: 113790 - RNA, 20 nt, Artificial Sequence
  Synthetic
auaaauccuucuguugggau

SEQ ID NO: 113791 - RNA, 21 nt, Artificial Sequence
  Synthetic
aauaaauccuucuguugggau

SEQ ID NO: 113792 - RNA, 22 nt, Artificial Sequence
  Synthetic
aaauaaauccuucuguugggau

SEQ ID NO: 113793 - RNA, 23 nt, Artificial Sequence
  Synthetic
uaaauaaauccuucuguugggau

SEQ ID NO: 113794 - RNA, 18 nt, Artificial Sequence
  Synthetic
uaugugaaagaaauggau

SEQ ID NO: 113795 - RNA, 20 nt, Artificial Sequence
  Synthetic
uguaugugaaagaaauggau

SEQ ID NO: 113796 - RNA, 21 nt, Artificial Sequence
  Synthetic
auguaugugaaagaaauggau

SEQ ID NO: 113797 - RNA, 22 nt, Artificial Sequence
  Synthetic
uauguaugugaaagaaauggau

SEQ ID NO: 113798 - RNA, 21 nt, Artificial Sequence
  Synthetic
aucacaguauuauaaauggau

SEQ ID NO: 113799 - RNA, 23 nt, Artificial Sequence
  Synthetic
ugaucacaguauuauaaauggau

SEQ ID NO: 113800 - RNA, 24 nt, Artificial Sequence
  Synthetic
cugaucacaguauuauaaauggau

SEQ ID NO: 113801 - RNA, 18 nt, Artificial Sequence
  Synthetic
ucuccccauuaaauggau

SEQ ID NO: 113802 - RNA, 19 nt, Artificial Sequence
  Synthetic
cucuccccauuaaauggau

SEQ ID NO: 113803 - RNA, 20 nt, Artificial Sequence
  Synthetic
acucuccccauuaaauggau

SEQ ID NO: 113804 - RNA, 21 nt, Artificial Sequence
  Synthetic
cacucuccccauuaaauggau

SEQ ID NO: 113805 - RNA, 22 nt, Artificial Sequence
  Synthetic
ucacucuccccauuaaauggau

SEQ ID NO: 113806 - RNA, 23 nt, Artificial Sequence
  Synthetic
aucacucuccccauuaaauggau

SEQ ID NO: 113807 - RNA, 24 nt, Artificial Sequence
  Synthetic
aaucacucuccccauuaaauggau

SEQ ID NO: 113808 - RNA, 18 nt, Artificial Sequence
  Synthetic
uaaagagccagaauggau

SEQ ID NO: 113809 - RNA, 19 nt, Artificial Sequence
  Synthetic
auaaagagccagaauggau

SEQ ID NO: 113810 - RNA, 20 nt, Artificial Sequence
  Synthetic
aauaaagagccagaauggau

SEQ ID NO: 113811 - RNA, 21 nt, Artificial Sequence
  Synthetic
caauaaagagccagaauggau

SEQ ID NO: 113812 - RNA, 18 nt, Artificial Sequence
  Synthetic
uggaaucacggaauggau

SEQ ID NO: 113813 - RNA, 19 nt, Artificial Sequence
  Synthetic
uuggaaucacggaauggau

SEQ ID NO: 113814 - RNA, 21 nt, Artificial Sequence
  Synthetic
aguuggaaucacggaauggau

SEQ ID NO: 113815 - RNA, 22 nt, Artificial Sequence
  Synthetic
uaguuggaaucacggaauggau

SEQ ID NO: 113816 - RNA, 24 nt, Artificial Sequence
  Synthetic
uguaguuggaaucacggaauggau

SEQ ID NO: 113817 - RNA, 18 nt, Artificial Sequence
  Synthetic
agucauagaugaauggau

SEQ ID NO: 113818 - RNA, 19 nt, Artificial Sequence
  Synthetic
cagucauagaugaauggau

SEQ ID NO: 113819 - RNA, 20 nt, Artificial Sequence
  Synthetic
ccagucauagaugaauggau

SEQ ID NO: 113820 - RNA, 21 nt, Artificial Sequence
  Synthetic
uccagucauagaugaauggau

SEQ ID NO: 113821 - RNA, 22 nt, Artificial Sequence
  Synthetic
cuccagucauagaugaauggau

SEQ ID NO: 113822 - RNA, 23 nt, Artificial Sequence
  Synthetic
acuccagucauagaugaauggau

SEQ ID NO: 113823 - RNA, 24 nt, Artificial Sequence
  Synthetic
uacuccagucauagaugaauggau

SEQ ID NO: 113824 - RNA, 18 nt, Artificial Sequence
  Synthetic
aauauauaacccauggau

SEQ ID NO: 113825 - RNA, 19 nt, Artificial Sequence
  Synthetic
caauauauaacccauggau

SEQ ID NO: 113826 - RNA, 20 nt, Artificial Sequence
  Synthetic
ucaauauauaacccauggau

SEQ ID NO: 113827 - RNA, 21 nt, Artificial Sequence
  Synthetic
uucaauauauaacccauggau

SEQ ID NO: 113828 - RNA, 22 nt, Artificial Sequence
  Synthetic
auucaauauauaacccauggau

SEQ ID NO: 113829 - RNA, 23 nt, Artificial Sequence
  Synthetic
aauucaauauauaacccauggau

SEQ ID NO: 113830 - RNA, 24 nt, Artificial Sequence
  Synthetic
caauucaauauauaacccauggau

SEQ ID NO: 113831 - RNA, 18 nt, Artificial Sequence
  Synthetic
auuuagccaaugauggau

SEQ ID NO: 113832 - RNA, 19 nt, Artificial Sequence
  Synthetic
cauuuagccaaugauggau

SEQ ID NO: 113833 - RNA, 21 nt, Artificial Sequence
  Synthetic
agcauuuagccaaugauggau

SEQ ID NO: 113834 - RNA, 22 nt, Artificial Sequence
  Synthetic
aagcauuuagccaaugauggau

SEQ ID NO: 113835 - RNA, 20 nt, Artificial Sequence
  Synthetic
aggaucauauuacuauggau

SEQ ID NO: 113836 - RNA, 21 nt, Artificial Sequence
  Synthetic
uaggaucauauuacuauggau

SEQ ID NO: 113837 - RNA, 22 nt, Artificial Sequence
  Synthetic
uuaggaucauauuacuauggau

SEQ ID NO: 113838 - RNA, 23 nt, Artificial Sequence
  Synthetic
uuuaggaucauauuacuauggau

SEQ ID NO: 113839 - RNA, 24 nt, Artificial Sequence
  Synthetic
auuuaggaucauauuacuauggau

SEQ ID NO: 113840 - RNA, 18 nt, Artificial Sequence
  Synthetic
aaauguaaagcacuggau

SEQ ID NO: 113841 - RNA, 19 nt, Artificial Sequence
  Synthetic
aaaauguaaagcacuggau

SEQ ID NO: 113842 - RNA, 20 nt, Artificial Sequence
  Synthetic
caaaauguaaagcacuggau

SEQ ID NO: 113843 - RNA, 21 nt, Artificial Sequence
  Synthetic
acaaaauguaaagcacuggau

SEQ ID NO: 113844 - RNA, 22 nt, Artificial Sequence
  Synthetic
aacaaaauguaaagcacuggau

SEQ ID NO: 113845 - RNA, 24 nt, Artificial Sequence
  Synthetic
agaacaaaauguaaagcacuggau

SEQ ID NO: 113846 - RNA, 18 nt, Artificial Sequence
  Synthetic
ucauuucuuuuccuggau

SEQ ID NO: 113847 - RNA, 19 nt, Artificial Sequence
  Synthetic
aucauuucuuuuccuggau

SEQ ID NO: 113848 - RNA, 20 nt, Artificial Sequence
  Synthetic
aaucauuucuuuuccuggau

SEQ ID NO: 113849 - RNA, 21 nt, Artificial Sequence
  Synthetic
caaucauuucuuuuccuggau

SEQ ID NO: 113850 - RNA, 22 nt, Artificial Sequence
  Synthetic
acaaucauuucuuuuccuggau

SEQ ID NO: 113851 - RNA, 23 nt, Artificial Sequence
  Synthetic
aacaaucauuucuuuuccuggau

SEQ ID NO: 113852 - RNA, 24 nt, Artificial Sequence
  Synthetic
caacaaucauuucuuuuccuggau

SEQ ID NO: 113853 - RNA, 18 nt, Artificial Sequence
  Synthetic
caggagagggaaguggau

SEQ ID NO: 113854 - RNA, 19 nt, Artificial Sequence
  Synthetic
ccaggagagggaaguggau

SEQ ID NO: 113855 - RNA, 20 nt, Artificial Sequence
  Synthetic
uccaggagagggaaguggau

SEQ ID NO: 113856 - RNA, 21 nt, Artificial Sequence
  Synthetic
cuccaggagagggaaguggau

SEQ ID NO: 113857 - RNA, 23 nt, Artificial Sequence
  Synthetic
ugcuccaggagagggaaguggau

SEQ ID NO: 113858 - RNA, 24 nt, Artificial Sequence
  Synthetic
augcuccaggagagggaaguggau

SEQ ID NO: 113859 - RNA, 18 nt, Artificial Sequence
  Synthetic
auauugaagccaguggau

SEQ ID NO: 113860 - RNA, 19 nt, Artificial Sequence
  Synthetic
uauauugaagccaguggau

SEQ ID NO: 113861 - RNA, 20 nt, Artificial Sequence
  Synthetic
auauauugaagccaguggau

SEQ ID NO: 113862 - RNA, 21 nt, Artificial Sequence
  Synthetic
uauauauugaagccaguggau

SEQ ID NO: 113863 - RNA, 22 nt, Artificial Sequence
  Synthetic
cuauauauugaagccaguggau

SEQ ID NO: 113864 - RNA, 23 nt, Artificial Sequence
  Synthetic
ucuauauauugaagccaguggau

SEQ ID NO: 113865 - RNA, 24 nt, Artificial Sequence
  Synthetic
cucuauauauugaagccaguggau

SEQ ID NO: 113866 - RNA, 18 nt, Artificial Sequence
  Synthetic
agcggcauccuaguggau

SEQ ID NO: 113867 - RNA, 19 nt, Artificial Sequence
  Synthetic
cagcggcauccuaguggau

SEQ ID NO: 113868 - RNA, 20 nt, Artificial Sequence
  Synthetic
ccagcggcauccuaguggau

SEQ ID NO: 113869 - RNA, 22 nt, Artificial Sequence
  Synthetic
ugccagcggcauccuaguggau

SEQ ID NO: 113870 - RNA, 23 nt, Artificial Sequence
  Synthetic
uugccagcggcauccuaguggau

SEQ ID NO: 113871 - RNA, 18 nt, Artificial Sequence
  Synthetic
uuucuuaaauauguggau

SEQ ID NO: 113872 - RNA, 19 nt, Artificial Sequence
  Synthetic
uuuucuuaaauauguggau

SEQ ID NO: 113873 - RNA, 20 nt, Artificial Sequence
  Synthetic
cuuuucuuaaauauguggau

SEQ ID NO: 113874 - RNA, 21 nt, Artificial Sequence
  Synthetic
ucuuuucuuaaauauguggau

SEQ ID NO: 113875 - RNA, 22 nt, Artificial Sequence
  Synthetic
cucuuuucuuaaauauguggau

SEQ ID NO: 113876 - RNA, 23 nt, Artificial Sequence
  Synthetic
ucucuuuucuuaaauauguggau

SEQ ID NO: 113877 - RNA, 24 nt, Artificial Sequence
  Synthetic
cucucuuuucuuaaauauguggau

SEQ ID NO: 113878 - RNA, 21 nt, Artificial Sequence
  Synthetic
aggaaucaaauggacuuggau

SEQ ID NO: 113879 - RNA, 22 nt, Artificial Sequence
  Synthetic
uaggaaucaaauggacuuggau

SEQ ID NO: 113880 - RNA, 23 nt, Artificial Sequence
  Synthetic
uuaggaaucaaauggacuuggau

SEQ ID NO: 113881 - RNA, 24 nt, Artificial Sequence
  Synthetic
cuuaggaaucaaauggacuuggau

SEQ ID NO: 113882 - RNA, 18 nt, Artificial Sequence
  Synthetic
uaaaaagaacauuuggau

SEQ ID NO: 113883 - RNA, 20 nt, Artificial Sequence
  Synthetic
aguaaaaagaacauuuggau

SEQ ID NO: 113884 - RNA, 21 nt, Artificial Sequence
  Synthetic
aaguaaaaagaacauuuggau

SEQ ID NO: 113885 - RNA, 23 nt, Artificial Sequence
  Synthetic
agaaguaaaaagaacauuuggau

SEQ ID NO: 113886 - RNA, 22 nt, Artificial Sequence
  Synthetic
uggagaugauggugcuuuggau

SEQ ID NO: 113887 - RNA, 23 nt, Artificial Sequence
  Synthetic
cuggagaugauggugcuuuggau

SEQ ID NO: 113888 - RNA, 18 nt, Artificial Sequence
  Synthetic
cccgcaaggaguuuggau

SEQ ID NO: 113889 - RNA, 19 nt, Artificial Sequence
  Synthetic
ucccgcaaggaguuuggau

SEQ ID NO: 113890 - RNA, 20 nt, Artificial Sequence
  Synthetic
cucccgcaaggaguuuggau

SEQ ID NO: 113891 - RNA, 21 nt, Artificial Sequence
  Synthetic
ucucccgcaaggaguuuggau

SEQ ID NO: 113892 - RNA, 22 nt, Artificial Sequence
  Synthetic
uucucccgcaaggaguuuggau

SEQ ID NO: 113893 - RNA, 23 nt, Artificial Sequence
  Synthetic
auucucccgcaaggaguuuggau

SEQ ID NO: 113894 - RNA, 24 nt, Artificial Sequence
  Synthetic
uauucucccgcaaggaguuuggau

SEQ ID NO: 113895 - RNA, 18 nt, Artificial Sequence
  Synthetic
uugggggaugguuuggau

SEQ ID NO: 113896 - RNA, 19 nt, Artificial Sequence
  Synthetic
uuugggggaugguuuggau

SEQ ID NO: 113897 - RNA, 21 nt, Artificial Sequence
  Synthetic
uguuugggggaugguuuggau

SEQ ID NO: 113898 - RNA, 22 nt, Artificial Sequence
  Synthetic
uuguuugggggaugguuuggau

SEQ ID NO: 113899 - RNA, 23 nt, Artificial Sequence
  Synthetic
uuuguuugggggaugguuuggau

SEQ ID NO: 113900 - RNA, 18 nt, Artificial Sequence
  Synthetic
aauaggggggaaaaugau

SEQ ID NO: 113901 - RNA, 20 nt, Artificial Sequence
  Synthetic
agaauaggggggaaaaugau

SEQ ID NO: 113902 - RNA, 21 nt, Artificial Sequence
  Synthetic
aagaauaggggggaaaaugau

SEQ ID NO: 113903 - RNA, 24 nt, Artificial Sequence
  Synthetic
aggaagaauaggggggaaaaugau

SEQ ID NO: 113904 - RNA, 18 nt, Artificial Sequence
  Synthetic
aaauauauuagaaaugau

SEQ ID NO: 113905 - RNA, 21 nt, Artificial Sequence
  Synthetic
aggaaauauauuagaaaugau

SEQ ID NO: 113906 - RNA, 22 nt, Artificial Sequence
  Synthetic
caggaaauauauuagaaaugau

SEQ ID NO: 113907 - RNA, 23 nt, Artificial Sequence
  Synthetic
acaggaaauauauuagaaaugau

SEQ ID NO: 113908 - RNA, 24 nt, Artificial Sequence
  Synthetic
aacaggaaauauauuagaaaugau

SEQ ID NO: 113909 - RNA, 19 nt, Artificial Sequence
  Synthetic
ugcugagucaggaaaugau

SEQ ID NO: 113910 - RNA, 20 nt, Artificial Sequence
  Synthetic
augcugagucaggaaaugau

SEQ ID NO: 113911 - RNA, 21 nt, Artificial Sequence
  Synthetic
caugcugagucaggaaaugau

SEQ ID NO: 113912 - RNA, 24 nt, Artificial Sequence
  Synthetic
aggcaugcugagucaggaaaugau

SEQ ID NO: 113913 - RNA, 19 nt, Artificial Sequence
  Synthetic
ugaggcacugaacaaugau

SEQ ID NO: 113914 - RNA, 21 nt, Artificial Sequence
  Synthetic
agugaggcacugaacaaugau

SEQ ID NO: 113915 - RNA, 22 nt, Artificial Sequence
  Synthetic
aagugaggcacugaacaaugau

SEQ ID NO: 113916 - RNA, 24 nt, Artificial Sequence
  Synthetic
agaagugaggcacugaacaaugau

SEQ ID NO: 113917 - RNA, 18 nt, Artificial Sequence
  Synthetic
aaugggcuucacaaugau

SEQ ID NO: 113918 - RNA, 20 nt, Artificial Sequence
  Synthetic
ugaaugggcuucacaaugau

SEQ ID NO: 113919 - RNA, 21 nt, Artificial Sequence
  Synthetic
cugaaugggcuucacaaugau

SEQ ID NO: 113920 - RNA, 23 nt, Artificial Sequence
  Synthetic
agcugaaugggcuucacaaugau

SEQ ID NO: 113921 - RNA, 24 nt, Artificial Sequence
  Synthetic
aagcugaaugggcuucacaaugau

SEQ ID NO: 113922 - RNA, 19 nt, Artificial Sequence
  Synthetic
ugacgguagugacaaugau

SEQ ID NO: 113923 - RNA, 21 nt, Artificial Sequence
  Synthetic
agugacgguagugacaaugau

SEQ ID NO: 113924 - RNA, 22 nt, Artificial Sequence
  Synthetic
uagugacgguagugacaaugau

SEQ ID NO: 113925 - RNA, 24 nt, Artificial Sequence
  Synthetic
aguagugacgguagugacaaugau

SEQ ID NO: 113926 - RNA, 18 nt, Artificial Sequence
  Synthetic
aauguuggcuccaaugau

SEQ ID NO: 113927 - RNA, 19 nt, Artificial Sequence
  Synthetic
uaauguuggcuccaaugau

SEQ ID NO: 113928 - RNA, 20 nt, Artificial Sequence
  Synthetic
cuaauguuggcuccaaugau

SEQ ID NO: 113929 - RNA, 21 nt, Artificial Sequence
  Synthetic
acuaauguuggcuccaaugau

SEQ ID NO: 113930 - RNA, 22 nt, Artificial Sequence
  Synthetic
aacuaauguuggcuccaaugau

SEQ ID NO: 113931 - RNA, 24 nt, Artificial Sequence
  Synthetic
agaacuaauguuggcuccaaugau

SEQ ID NO: 113932 - RNA, 18 nt, Artificial Sequence
  Synthetic
aagagccaacauaaugau

SEQ ID NO: 113933 - RNA, 19 nt, Artificial Sequence
  Synthetic
caagagccaacauaaugau

SEQ ID NO: 113934 - RNA, 20 nt, Artificial Sequence
  Synthetic
acaagagccaacauaaugau

SEQ ID NO: 113935 - RNA, 21 nt, Artificial Sequence
  Synthetic
aacaagagccaacauaaugau

SEQ ID NO: 113936 - RNA, 22 nt, Artificial Sequence
  Synthetic
aaacaagagccaacauaaugau

SEQ ID NO: 113937 - RNA, 23 nt, Artificial Sequence
  Synthetic
aaaacaagagccaacauaaugau

SEQ ID NO: 113938 - RNA, 18 nt, Artificial Sequence
  Synthetic
cccagagaagauaaugau

SEQ ID NO: 113939 - RNA, 19 nt, Artificial Sequence
  Synthetic
ucccagagaagauaaugau

SEQ ID NO: 113940 - RNA, 20 nt, Artificial Sequence
  Synthetic
aucccagagaagauaaugau

SEQ ID NO: 113941 - RNA, 21 nt, Artificial Sequence
  Synthetic
caucccagagaagauaaugau

SEQ ID NO: 113942 - RNA, 22 nt, Artificial Sequence
  Synthetic
acaucccagagaagauaaugau

SEQ ID NO: 113943 - RNA, 24 nt, Artificial Sequence
  Synthetic
agacaucccagagaagauaaugau

SEQ ID NO: 113944 - RNA, 21 nt, Artificial Sequence
  Synthetic
auuuuaaucauugcuaaugau

SEQ ID NO: 113945 - RNA, 22 nt, Artificial Sequence
  Synthetic
aauuuuaaucauugcuaaugau

SEQ ID NO: 113946 - RNA, 23 nt, Artificial Sequence
  Synthetic
uaauuuuaaucauugcuaaugau

SEQ ID NO: 113947 - RNA, 24 nt, Artificial Sequence
  Synthetic
uuaauuuuaaucauugcuaaugau

SEQ ID NO: 113948 - RNA, 18 nt, Artificial Sequence
  Synthetic
cuuuguuugauuaaugau

SEQ ID NO: 113949 - RNA, 19 nt, Artificial Sequence
  Synthetic
acuuuguuugauuaaugau

SEQ ID NO: 113950 - RNA, 20 nt, Artificial Sequence
  Synthetic
aacuuuguuugauuaaugau

SEQ ID NO: 113951 - RNA, 22 nt, Artificial Sequence
  Synthetic
agaacuuuguuugauuaaugau

SEQ ID NO: 113952 - RNA, 23 nt, Artificial Sequence
  Synthetic
uagaacuuuguuugauuaaugau

SEQ ID NO: 113953 - RNA, 24 nt, Artificial Sequence
  Synthetic
uuagaacuuuguuugauuaaugau

SEQ ID NO: 113954 - RNA, 18 nt, Artificial Sequence
  Synthetic
ccaagugcuagacaugau

SEQ ID NO: 113955 - RNA, 19 nt, Artificial Sequence
  Synthetic
uccaagugcuagacaugau

SEQ ID NO: 113956 - RNA, 20 nt, Artificial Sequence
  Synthetic
auccaagugcuagacaugau

SEQ ID NO: 113957 - RNA, 24 nt, Artificial Sequence
  Synthetic
ugggauccaagugcuagacaugau

SEQ ID NO: 113958 - RNA, 19 nt, Artificial Sequence
  Synthetic
ugaauuaauaugacaugau

SEQ ID NO: 113959 - RNA, 20 nt, Artificial Sequence
  Synthetic
augaauuaauaugacaugau

SEQ ID NO: 113960 - RNA, 21 nt, Artificial Sequence
  Synthetic
caugaauuaauaugacaugau

SEQ ID NO: 113961 - RNA, 22 nt, Artificial Sequence
  Synthetic
acaugaauuaauaugacaugau

SEQ ID NO: 113962 - RNA, 23 nt, Artificial Sequence
  Synthetic
uacaugaauuaauaugacaugau

SEQ ID NO: 113963 - RNA, 19 nt, Artificial Sequence
  Synthetic
aguguaccccaugcaugau

SEQ ID NO: 113964 - RNA, 20 nt, Artificial Sequence
  Synthetic
uaguguaccccaugcaugau

SEQ ID NO: 113965 - RNA, 21 nt, Artificial Sequence
  Synthetic
cuaguguaccccaugcaugau

SEQ ID NO: 113966 - RNA, 22 nt, Artificial Sequence
  Synthetic
acuaguguaccccaugcaugau

SEQ ID NO: 113967 - RNA, 24 nt, Artificial Sequence
  Synthetic
agacuaguguaccccaugcaugau

SEQ ID NO: 113968 - RNA, 18 nt, Artificial Sequence
  Synthetic
uguggauguguucaugau

SEQ ID NO: 113969 - RNA, 19 nt, Artificial Sequence
  Synthetic
cuguggauguguucaugau

SEQ ID NO: 113970 - RNA, 20 nt, Artificial Sequence
  Synthetic
acuguggauguguucaugau

SEQ ID NO: 113971 - RNA, 21 nt, Artificial Sequence
  Synthetic
cacuguggauguguucaugau

SEQ ID NO: 113972 - RNA, 22 nt, Artificial Sequence
  Synthetic
ucacuguggauguguucaugau

SEQ ID NO: 113973 - RNA, 23 nt, Artificial Sequence
  Synthetic
aucacuguggauguguucaugau

SEQ ID NO: 113974 - RNA, 24 nt, Artificial Sequence
  Synthetic
caucacuguggauguguucaugau

SEQ ID NO: 113975 - RNA, 19 nt, Artificial Sequence
  Synthetic
agccuuucuguuucaugau

SEQ ID NO: 113976 - RNA, 21 nt, Artificial Sequence
  Synthetic
ugagccuuucuguuucaugau

SEQ ID NO: 113977 - RNA, 22 nt, Artificial Sequence
  Synthetic
augagccuuucuguuucaugau

SEQ ID NO: 113978 - RNA, 23 nt, Artificial Sequence
  Synthetic
uaugagccuuucuguuucaugau

SEQ ID NO: 113979 - RNA, 24 nt, Artificial Sequence
  Synthetic
cuaugagccuuucuguuucaugau

SEQ ID NO: 113980 - RNA, 20 nt, Artificial Sequence
  Synthetic
ugguguaaauuaaagaugau

SEQ ID NO: 113981 - RNA, 21 nt, Artificial Sequence
  Synthetic
uugguguaaauuaaagaugau

SEQ ID NO: 113982 - RNA, 22 nt, Artificial Sequence
  Synthetic
uuugguguaaauuaaagaugau

SEQ ID NO: 113983 - RNA, 23 nt, Artificial Sequence
  Synthetic
uuuugguguaaauuaaagaugau

SEQ ID NO: 113984 - RNA, 24 nt, Artificial Sequence
  Synthetic
uuuuugguguaaauuaaagaugau

SEQ ID NO: 113985 - RNA, 19 nt, Artificial Sequence
  Synthetic
agacccaagauaagaugau

SEQ ID NO: 113986 - RNA, 21 nt, Artificial Sequence
  Synthetic
agagacccaagauaagaugau

SEQ ID NO: 113987 - RNA, 23 nt, Artificial Sequence
  Synthetic
agagagacccaagauaagaugau

SEQ ID NO: 113988 - RNA, 24 nt, Artificial Sequence
  Synthetic
cagagagacccaagauaagaugau

SEQ ID NO: 113989 - RNA, 18 nt, Artificial Sequence
  Synthetic
aagauuagaugagaugau

SEQ ID NO: 113990 - RNA, 19 nt, Artificial Sequence
  Synthetic
aaagauuagaugagaugau

SEQ ID NO: 113991 - RNA, 20 nt, Artificial Sequence
  Synthetic
caaagauuagaugagaugau

SEQ ID NO: 113992 - RNA, 23 nt, Artificial Sequence
  Synthetic
uggcaaagauuagaugagaugau

SEQ ID NO: 113993 - RNA, 24 nt, Artificial Sequence
  Synthetic
uuggcaaagauuagaugagaugau

SEQ ID NO: 113994 - RNA, 18 nt, Artificial Sequence
  Synthetic
cuuugccuaguagaugau

SEQ ID NO: 113995 - RNA, 19 nt, Artificial Sequence
  Synthetic
acuuugccuaguagaugau

SEQ ID NO: 113996 - RNA, 20 nt, Artificial Sequence
  Synthetic
aacuuugccuaguagaugau

SEQ ID NO: 113997 - RNA, 21 nt, Artificial Sequence
  Synthetic
uaacuuugccuaguagaugau

SEQ ID NO: 113998 - RNA, 22 nt, Artificial Sequence
  Synthetic
cuaacuuugccuaguagaugau

SEQ ID NO: 113999 - RNA, 24 nt, Artificial Sequence
  Synthetic
agcuaacuuugccuaguagaugau

SEQ ID NO: 114000 - RNA, 18 nt, Artificial Sequence
  Synthetic
cagauucaaugauaugau

SEQ ID NO: 114001 - RNA, 19 nt, Artificial Sequence
  Synthetic
acagauucaaugauaugau

SEQ ID NO: 114002 - RNA, 20 nt, Artificial Sequence
  Synthetic
aacagauucaaugauaugau

SEQ ID NO: 114003 - RNA, 21 nt, Artificial Sequence
  Synthetic
aaacagauucaaugauaugau

SEQ ID NO: 114004 - RNA, 22 nt, Artificial Sequence
  Synthetic
aaaacagauucaaugauaugau

SEQ ID NO: 114005 - RNA, 23 nt, Artificial Sequence
  Synthetic
uaaaacagauucaaugauaugau

SEQ ID NO: 114006 - RNA, 24 nt, Artificial Sequence
  Synthetic
uuaaaacagauucaaugauaugau

SEQ ID NO: 114007 - RNA, 19 nt, Artificial Sequence
  Synthetic
ugcaagucuuugauaugau

SEQ ID NO: 114008 - RNA, 20 nt, Artificial Sequence
  Synthetic
augcaagucuuugauaugau

SEQ ID NO: 114009 - RNA, 21 nt, Artificial Sequence
  Synthetic
caugcaagucuuugauaugau

SEQ ID NO: 114010 - RNA, 22 nt, Artificial Sequence
  Synthetic
ccaugcaagucuuugauaugau

SEQ ID NO: 114011 - RNA, 23 nt, Artificial Sequence
  Synthetic
cccaugcaagucuuugauaugau

SEQ ID NO: 114012 - RNA, 24 nt, Artificial Sequence
  Synthetic
ucccaugcaagucuuugauaugau

SEQ ID NO: 114013 - RNA, 18 nt, Artificial Sequence
  Synthetic
auuguagguuacuaugau

SEQ ID NO: 114014 - RNA, 19 nt, Artificial Sequence
  Synthetic
aauuguagguuacuaugau

SEQ ID NO: 114015 - RNA, 20 nt, Artificial Sequence
  Synthetic
uaauuguagguuacuaugau

SEQ ID NO: 114016 - RNA, 21 nt, Artificial Sequence
  Synthetic
uuaauuguagguuacuaugau

SEQ ID NO: 114017 - RNA, 22 nt, Artificial Sequence
  Synthetic
auuaauuguagguuacuaugau

SEQ ID NO: 114018 - RNA, 23 nt, Artificial Sequence
  Synthetic
cauuaauuguagguuacuaugau

SEQ ID NO: 114019 - RNA, 24 nt, Artificial Sequence
  Synthetic
ucauuaauuguagguuacuaugau

SEQ ID NO: 114020 - RNA, 21 nt, Artificial Sequence
  Synthetic
ccuaggcugaguguguaugau

SEQ ID NO: 114021 - RNA, 22 nt, Artificial Sequence
  Synthetic
uccuaggcugaguguguaugau

SEQ ID NO: 114022 - RNA, 23 nt, Artificial Sequence
  Synthetic
auccuaggcugaguguguaugau

SEQ ID NO: 114023 - RNA, 18 nt, Artificial Sequence
  Synthetic
augucuaaaauuuaugau

SEQ ID NO: 114024 - RNA, 19 nt, Artificial Sequence
  Synthetic
uaugucuaaaauuuaugau

SEQ ID NO: 114025 - RNA, 20 nt, Artificial Sequence
  Synthetic
cuaugucuaaaauuuaugau

SEQ ID NO: 114026 - RNA, 22 nt, Artificial Sequence
  Synthetic
agcuaugucuaaaauuuaugau

SEQ ID NO: 114027 - RNA, 24 nt, Artificial Sequence
  Synthetic
agagcuaugucuaaaauuuaugau

SEQ ID NO: 114028 - RNA, 21 nt, Artificial Sequence
  Synthetic
auuuauauuuuuauuuaugau

SEQ ID NO: 114029 - RNA, 22 nt, Artificial Sequence
  Synthetic
aauuuauauuuuuauuuaugau

SEQ ID NO: 114030 - RNA, 23 nt, Artificial Sequence
  Synthetic
uaauuuauauuuuuauuuaugau

SEQ ID NO: 114031 - RNA, 24 nt, Artificial Sequence
  Synthetic
auaauuuauauuuuuauuuaugau

SEQ ID NO: 114032 - RNA, 18 nt, Artificial Sequence
  Synthetic
uaaggaaaaugaacugau

SEQ ID NO: 114033 - RNA, 23 nt, Artificial Sequence
  Synthetic
agggguaaggaaaaugaacugau

SEQ ID NO: 114034 - RNA, 24 nt, Artificial Sequence
  Synthetic
uagggguaaggaaaaugaacugau

SEQ ID NO: 114035 - RNA, 18 nt, Artificial Sequence
  Synthetic
caaaaagaguacacugau

SEQ ID NO: 114036 - RNA, 19 nt, Artificial Sequence
  Synthetic
ccaaaaagaguacacugau

SEQ ID NO: 114037 - RNA, 20 nt, Artificial Sequence
  Synthetic
accaaaaagaguacacugau

SEQ ID NO: 114038 - RNA, 22 nt, Artificial Sequence
  Synthetic
agaccaaaaagaguacacugau

SEQ ID NO: 114039 - RNA, 23 nt, Artificial Sequence
  Synthetic
aagaccaaaaagaguacacugau

SEQ ID NO: 114040 - RNA, 18 nt, Artificial Sequence
  Synthetic
uaguuucagagcacugau

SEQ ID NO: 114041 - RNA, 19 nt, Artificial Sequence
  Synthetic
uuaguuucagagcacugau

SEQ ID NO: 114042 - RNA, 20 nt, Artificial Sequence
  Synthetic
uuuaguuucagagcacugau

SEQ ID NO: 114043 - RNA, 21 nt, Artificial Sequence
  Synthetic
auuuaguuucagagcacugau

SEQ ID NO: 114044 - RNA, 22 nt, Artificial Sequence
  Synthetic
uauuuaguuucagagcacugau

SEQ ID NO: 114045 - RNA, 23 nt, Artificial Sequence
  Synthetic
auauuuaguuucagagcacugau

SEQ ID NO: 114046 - RNA, 18 nt, Artificial Sequence
  Synthetic
ugaauugcacaaccugau

SEQ ID NO: 114047 - RNA, 19 nt, Artificial Sequence
  Synthetic
augaauugcacaaccugau

SEQ ID NO: 114048 - RNA, 20 nt, Artificial Sequence
  Synthetic
aaugaauugcacaaccugau

SEQ ID NO: 114049 - RNA, 21 nt, Artificial Sequence
  Synthetic
caaugaauugcacaaccugau

SEQ ID NO: 114050 - RNA, 22 nt, Artificial Sequence
  Synthetic
acaaugaauugcacaaccugau

SEQ ID NO: 114051 - RNA, 18 nt, Artificial Sequence
  Synthetic
cuucauguguauccugau

SEQ ID NO: 114052 - RNA, 19 nt, Artificial Sequence
  Synthetic
ccuucauguguauccugau

SEQ ID NO: 114053 - RNA, 20 nt, Artificial Sequence
  Synthetic
accuucauguguauccugau

SEQ ID NO: 114054 - RNA, 21 nt, Artificial Sequence
  Synthetic
uaccuucauguguauccugau

SEQ ID NO: 114055 - RNA, 22 nt, Artificial Sequence
  Synthetic
uuaccuucauguguauccugau

SEQ ID NO: 114056 - RNA, 23 nt, Artificial Sequence
  Synthetic
auuaccuucauguguauccugau

SEQ ID NO: 114057 - RNA, 24 nt, Artificial Sequence
  Synthetic
cauuaccuucauguguauccugau

SEQ ID NO: 114058 - RNA, 18 nt, Artificial Sequence
  Synthetic
cuaaucaaauaagcugau

SEQ ID NO: 114059 - RNA, 19 nt, Artificial Sequence
  Synthetic
ucuaaucaaauaagcugau

SEQ ID NO: 114060 - RNA, 20 nt, Artificial Sequence
  Synthetic
uucuaaucaaauaagcugau

SEQ ID NO: 114061 - RNA, 21 nt, Artificial Sequence
  Synthetic
uuucuaaucaaauaagcugau

SEQ ID NO: 114062 - RNA, 22 nt, Artificial Sequence
  Synthetic
uuuucuaaucaaauaagcugau

SEQ ID NO: 114063 - RNA, 21 nt, Artificial Sequence
  Synthetic
aauuaaauaauuuauucugau

SEQ ID NO: 114064 - RNA, 23 nt, Artificial Sequence
  Synthetic
ugaauuaaauaauuuauucugau

SEQ ID NO: 114065 - RNA, 24 nt, Artificial Sequence
  Synthetic
cugaauuaaauaauuuauucugau

SEQ ID NO: 114066 - RNA, 18 nt, Artificial Sequence
  Synthetic
caaaccguuuuuucugau

SEQ ID NO: 114067 - RNA, 19 nt, Artificial Sequence
  Synthetic
ucaaaccguuuuuucugau

SEQ ID NO: 114068 - RNA, 20 nt, Artificial Sequence
  Synthetic
uucaaaccguuuuuucugau

SEQ ID NO: 114069 - RNA, 21 nt, Artificial Sequence
  Synthetic
cuucaaaccguuuuuucugau

SEQ ID NO: 114070 - RNA, 22 nt, Artificial Sequence
  Synthetic
acuucaaaccguuuuuucugau

SEQ ID NO: 114071 - RNA, 24 nt, Artificial Sequence
  Synthetic
ugacuucaaaccguuuuuucugau

SEQ ID NO: 114072 - RNA, 18 nt, Artificial Sequence
  Synthetic
aauaccucaucaagugau

SEQ ID NO: 114073 - RNA, 19 nt, Artificial Sequence
  Synthetic
uaauaccucaucaagugau

SEQ ID NO: 114074 - RNA, 20 nt, Artificial Sequence
  Synthetic
auaauaccucaucaagugau

SEQ ID NO: 114075 - RNA, 21 nt, Artificial Sequence
  Synthetic
aauaauaccucaucaagugau

SEQ ID NO: 114076 - RNA, 22 nt, Artificial Sequence
  Synthetic
uaauaauaccucaucaagugau

SEQ ID NO: 114077 - RNA, 23 nt, Artificial Sequence
  Synthetic
uuaauaauaccucaucaagugau

SEQ ID NO: 114078 - RNA, 24 nt, Artificial Sequence
  Synthetic
auuaauaauaccucaucaagugau

SEQ ID NO: 114079 - RNA, 18 nt, Artificial Sequence
  Synthetic
uucaaaagaaacagugau

SEQ ID NO: 114080 - RNA, 19 nt, Artificial Sequence
  Synthetic
uuucaaaagaaacagugau

SEQ ID NO: 114081 - RNA, 20 nt, Artificial Sequence
  Synthetic
cuuucaaaagaaacagugau

SEQ ID NO: 114082 - RNA, 21 nt, Artificial Sequence
  Synthetic
ucuuucaaaagaaacagugau

SEQ ID NO: 114083 - RNA, 22 nt, Artificial Sequence
  Synthetic
cucuuucaaaagaaacagugau

SEQ ID NO: 114084 - RNA, 23 nt, Artificial Sequence
  Synthetic
acucuuucaaaagaaacagugau

SEQ ID NO: 114085 - RNA, 24 nt, Artificial Sequence
  Synthetic
aacucuuucaaaagaaacagugau

SEQ ID NO: 114086 - RNA, 18 nt, Artificial Sequence
  Synthetic
uguaaguaucucagugau

SEQ ID NO: 114087 - RNA, 21 nt, Artificial Sequence
  Synthetic
ugguguaaguaucucagugau

SEQ ID NO: 114088 - RNA, 22 nt, Artificial Sequence
  Synthetic
augguguaaguaucucagugau

SEQ ID NO: 114089 - RNA, 23 nt, Artificial Sequence
  Synthetic
caugguguaaguaucucagugau

SEQ ID NO: 114090 - RNA, 24 nt, Artificial Sequence
  Synthetic
ucaugguguaaguaucucagugau

SEQ ID NO: 114091 - RNA, 18 nt, Artificial Sequence
  Synthetic
ugauauaaagagggugau

SEQ ID NO: 114092 - RNA, 19 nt, Artificial Sequence
  Synthetic
augauauaaagagggugau

SEQ ID NO: 114093 - RNA, 20 nt, Artificial Sequence
  Synthetic
aaugauauaaagagggugau

SEQ ID NO: 114094 - RNA, 21 nt, Artificial Sequence
  Synthetic
aaaugauauaaagagggugau

SEQ ID NO: 114095 - RNA, 22 nt, Artificial Sequence
  Synthetic
caaaugauauaaagagggugau

SEQ ID NO: 114096 - RNA, 24 nt, Artificial Sequence
  Synthetic
ugcaaaugauauaaagagggugau

SEQ ID NO: 114097 - RNA, 18 nt, Artificial Sequence
  Synthetic
acaaugguuaugggugau

SEQ ID NO: 114098 - RNA, 19 nt, Artificial Sequence
  Synthetic
uacaaugguuaugggugau

SEQ ID NO: 114099 - RNA, 20 nt, Artificial Sequence
  Synthetic
auacaaugguuaugggugau

SEQ ID NO: 114100 - RNA, 22 nt, Artificial Sequence
  Synthetic
agauacaaugguuaugggugau

SEQ ID NO: 114101 - RNA, 23 nt, Artificial Sequence
  Synthetic
aagauacaaugguuaugggugau

SEQ ID NO: 114102 - RNA, 24 nt, Artificial Sequence
  Synthetic
uaagauacaaugguuaugggugau

SEQ ID NO: 114103 - RNA, 18 nt, Artificial Sequence
  Synthetic
aaauagcucuuuggugau

SEQ ID NO: 114104 - RNA, 19 nt, Artificial Sequence
  Synthetic
aaaauagcucuuuggugau

SEQ ID NO: 114105 - RNA, 20 nt, Artificial Sequence
  Synthetic
aaaaauagcucuuuggugau

SEQ ID NO: 114106 - RNA, 21 nt, Artificial Sequence
  Synthetic
uaaaaauagcucuuuggugau

SEQ ID NO: 114107 - RNA, 22 nt, Artificial Sequence
  Synthetic
cuaaaaauagcucuuuggugau

SEQ ID NO: 114108 - RNA, 23 nt, Artificial Sequence
  Synthetic
ucuaaaaauagcucuuuggugau

SEQ ID NO: 114109 - RNA, 24 nt, Artificial Sequence
  Synthetic
aucuaaaaauagcucuuuggugau

SEQ ID NO: 114110 - RNA, 18 nt, Artificial Sequence
  Synthetic
ugacaacaaaacugugau

SEQ ID NO: 114111 - RNA, 19 nt, Artificial Sequence
  Synthetic
uugacaacaaaacugugau

SEQ ID NO: 114112 - RNA, 20 nt, Artificial Sequence
  Synthetic
uuugacaacaaaacugugau

SEQ ID NO: 114113 - RNA, 21 nt, Artificial Sequence
  Synthetic
uuuugacaacaaaacugugau

SEQ ID NO: 114114 - RNA, 22 nt, Artificial Sequence
  Synthetic
auuuugacaacaaaacugugau

SEQ ID NO: 114115 - RNA, 23 nt, Artificial Sequence
  Synthetic
aauuuugacaacaaaacugugau

SEQ ID NO: 114116 - RNA, 24 nt, Artificial Sequence
  Synthetic
uaauuuugacaacaaaacugugau

SEQ ID NO: 114117 - RNA, 18 nt, Artificial Sequence
  Synthetic
cauuccuggggcugugau

SEQ ID NO: 114118 - RNA, 19 nt, Artificial Sequence
  Synthetic
acauuccuggggcugugau

SEQ ID NO: 114119 - RNA, 20 nt, Artificial Sequence
  Synthetic
aacauuccuggggcugugau

SEQ ID NO: 114120 - RNA, 21 nt, Artificial Sequence
  Synthetic
aaacauuccuggggcugugau

SEQ ID NO: 114121 - RNA, 23 nt, Artificial Sequence
  Synthetic
ugaaacauuccuggggcugugau

SEQ ID NO: 114122 - RNA, 24 nt, Artificial Sequence
  Synthetic
augaaacauuccuggggcugugau

SEQ ID NO: 114123 - RNA, 18 nt, Artificial Sequence
  Synthetic
aauaucuauugcugugau

SEQ ID NO: 114124 - RNA, 19 nt, Artificial Sequence
  Synthetic
caauaucuauugcugugau

SEQ ID NO: 114125 - RNA, 21 nt, Artificial Sequence
  Synthetic
ugcaauaucuauugcugugau

SEQ ID NO: 114126 - RNA, 22 nt, Artificial Sequence
  Synthetic
cugcaauaucuauugcugugau

SEQ ID NO: 114127 - RNA, 23 nt, Artificial Sequence
  Synthetic
ucugcaauaucuauugcugugau

SEQ ID NO: 114128 - RNA, 24 nt, Artificial Sequence
  Synthetic
aucugcaauaucuauugcugugau

SEQ ID NO: 114129 - RNA, 18 nt, Artificial Sequence
  Synthetic
uauuuaaauaauugugau

SEQ ID NO: 114130 - RNA, 19 nt, Artificial Sequence
  Synthetic
auauuuaaauaauugugau

SEQ ID NO: 114131 - RNA, 20 nt, Artificial Sequence
  Synthetic
cauauuuaaauaauugugau

SEQ ID NO: 114132 - RNA, 21 nt, Artificial Sequence
  Synthetic
acauauuuaaauaauugugau

SEQ ID NO: 114133 - RNA, 22 nt, Artificial Sequence
  Synthetic
uacauauuuaaauaauugugau

SEQ ID NO: 114134 - RNA, 23 nt, Artificial Sequence
  Synthetic
uuacauauuuaaauaauugugau

SEQ ID NO: 114135 - RNA, 24 nt, Artificial Sequence
  Synthetic
auuacauauuuaaauaauugugau

SEQ ID NO: 114136 - RNA, 18 nt, Artificial Sequence
  Synthetic
accuaccuguaaauugau

SEQ ID NO: 114137 - RNA, 19 nt, Artificial Sequence
  Synthetic
uaccuaccuguaaauugau

SEQ ID NO: 114138 - RNA, 20 nt, Artificial Sequence
  Synthetic
uuaccuaccuguaaauugau

SEQ ID NO: 114139 - RNA, 21 nt, Artificial Sequence
  Synthetic
uuuaccuaccuguaaauugau

SEQ ID NO: 114140 - RNA, 22 nt, Artificial Sequence
  Synthetic
uuuuaccuaccuguaaauugau

SEQ ID NO: 114141 - RNA, 23 nt, Artificial Sequence
  Synthetic
uuuuuaccuaccuguaaauugau

SEQ ID NO: 114142 - RNA, 24 nt, Artificial Sequence
  Synthetic
uuuuuuaccuaccuguaaauugau

SEQ ID NO: 114143 - RNA, 18 nt, Artificial Sequence
  Synthetic
aaagccaaaaccauugau

SEQ ID NO: 114144 - RNA, 19 nt, Artificial Sequence
  Synthetic
aaaagccaaaaccauugau

SEQ ID NO: 114145 - RNA, 20 nt, Artificial Sequence
  Synthetic
uaaaagccaaaaccauugau

SEQ ID NO: 114146 - RNA, 21 nt, Artificial Sequence
  Synthetic
auaaaagccaaaaccauugau

SEQ ID NO: 114147 - RNA, 22 nt, Artificial Sequence
  Synthetic
uauaaaagccaaaaccauugau

SEQ ID NO: 114148 - RNA, 23 nt, Artificial Sequence
  Synthetic
auauaaaagccaaaaccauugau

SEQ ID NO: 114149 - RNA, 24 nt, Artificial Sequence
  Synthetic
uauauaaaagccaaaaccauugau

SEQ ID NO: 114150 - RNA, 18 nt, Artificial Sequence
  Synthetic
ccccuuaucaaacuugau

SEQ ID NO: 114151 - RNA, 19 nt, Artificial Sequence
  Synthetic
uccccuuaucaaacuugau

SEQ ID NO: 114152 - RNA, 21 nt, Artificial Sequence
  Synthetic
aguccccuuaucaaacuugau

SEQ ID NO: 114153 - RNA, 22 nt, Artificial Sequence
  Synthetic
aaguccccuuaucaaacuugau

SEQ ID NO: 114154 - RNA, 18 nt, Artificial Sequence
  Synthetic
auuuaauguacacuugau

SEQ ID NO: 114155 - RNA, 19 nt, Artificial Sequence
  Synthetic
uauuuaauguacacuugau

SEQ ID NO: 114156 - RNA, 20 nt, Artificial Sequence
  Synthetic
uuauuuaauguacacuugau

SEQ ID NO: 114157 - RNA, 21 nt, Artificial Sequence
  Synthetic
auuauuuaauguacacuugau

SEQ ID NO: 114158 - RNA, 22 nt, Artificial Sequence
  Synthetic
aauuauuuaauguacacuugau

SEQ ID NO: 114159 - RNA, 23 nt, Artificial Sequence
  Synthetic
caauuauuuaauguacacuugau

SEQ ID NO: 114160 - RNA, 24 nt, Artificial Sequence
  Synthetic
ucaauuauuuaauguacacuugau

SEQ ID NO: 114161 - RNA, 19 nt, Artificial Sequence
  Synthetic
uguuucuugugcacuugau

SEQ ID NO: 114162 - RNA, 20 nt, Artificial Sequence
  Synthetic
uuguuucuugugcacuugau

SEQ ID NO: 114163 - RNA, 21 nt, Artificial Sequence
  Synthetic
auuguuucuugugcacuugau

SEQ ID NO: 114164 - RNA, 22 nt, Artificial Sequence
  Synthetic
aauuguuucuugugcacuugau

SEQ ID NO: 114165 - RNA, 24 nt, Artificial Sequence
  Synthetic
agaauuguuucuugugcacuugau

SEQ ID NO: 114166 - RNA, 18 nt, Artificial Sequence
  Synthetic
accaucaguguccuugau

SEQ ID NO: 114167 - RNA, 21 nt, Artificial Sequence
  Synthetic
aggaccaucaguguccuugau

SEQ ID NO: 114168 - RNA, 23 nt, Artificial Sequence
  Synthetic
ugaggaccaucaguguccuugau

SEQ ID NO: 114169 - RNA, 24 nt, Artificial Sequence
  Synthetic
augaggaccaucaguguccuugau

SEQ ID NO: 114170 - RNA, 18 nt, Artificial Sequence
  Synthetic
augaugcaguagcuugau

SEQ ID NO: 114171 - RNA, 19 nt, Artificial Sequence
  Synthetic
uaugaugcaguagcuugau

SEQ ID NO: 114172 - RNA, 20 nt, Artificial Sequence
  Synthetic
cuaugaugcaguagcuugau

SEQ ID NO: 114173 - RNA, 21 nt, Artificial Sequence
  Synthetic
acuaugaugcaguagcuugau

SEQ ID NO: 114174 - RNA, 22 nt, Artificial Sequence
  Synthetic
cacuaugaugcaguagcuugau

SEQ ID NO: 114175 - RNA, 23 nt, Artificial Sequence
  Synthetic
acacuaugaugcaguagcuugau

SEQ ID NO: 114176 - RNA, 18 nt, Artificial Sequence
  Synthetic
agucauucagaucuugau

SEQ ID NO: 114177 - RNA, 20 nt, Artificial Sequence
  Synthetic
agagucauucagaucuugau

SEQ ID NO: 114178 - RNA, 21 nt, Artificial Sequence
  Synthetic
uagagucauucagaucuugau

SEQ ID NO: 114179 - RNA, 22 nt, Artificial Sequence
  Synthetic
uuagagucauucagaucuugau

SEQ ID NO: 114180 - RNA, 23 nt, Artificial Sequence
  Synthetic
uuuagagucauucagaucuugau

SEQ ID NO: 114181 - RNA, 24 nt, Artificial Sequence
  Synthetic
auuuagagucauucagaucuugau

SEQ ID NO: 114182 - RNA, 18 nt, Artificial Sequence
  Synthetic
acagauaaaugucuugau

SEQ ID NO: 114183 - RNA, 19 nt, Artificial Sequence
  Synthetic
uacagauaaaugucuugau

SEQ ID NO: 114184 - RNA, 20 nt, Artificial Sequence
  Synthetic
auacagauaaaugucuugau

SEQ ID NO: 114185 - RNA, 21 nt, Artificial Sequence
  Synthetic
aauacagauaaaugucuugau

SEQ ID NO: 114186 - RNA, 23 nt, Artificial Sequence
  Synthetic
ugaauacagauaaaugucuugau

SEQ ID NO: 114187 - RNA, 24 nt, Artificial Sequence
  Synthetic
augaauacagauaaaugucuugau

SEQ ID NO: 114188 - RNA, 19 nt, Artificial Sequence
  Synthetic
ugaagccaacugucuugau

SEQ ID NO: 114189 - RNA, 20 nt, Artificial Sequence
  Synthetic
cugaagccaacugucuugau

SEQ ID NO: 114190 - RNA, 21 nt, Artificial Sequence
  Synthetic
acugaagccaacugucuugau

SEQ ID NO: 114191 - RNA, 22 nt, Artificial Sequence
  Synthetic
uacugaagccaacugucuugau

SEQ ID NO: 114192 - RNA, 24 nt, Artificial Sequence
  Synthetic
aguacugaagccaacugucuugau

SEQ ID NO: 114193 - RNA, 21 nt, Artificial Sequence
  Synthetic
uauuauauuauguuucuugau

SEQ ID NO: 114194 - RNA, 22 nt, Artificial Sequence
  Synthetic
auauuauauuauguuucuugau

SEQ ID NO: 114195 - RNA, 23 nt, Artificial Sequence
  Synthetic
uauauuauauuauguuucuugau

SEQ ID NO: 114196 - RNA, 24 nt, Artificial Sequence
  Synthetic
cuauauuauauuauguuucuugau

SEQ ID NO: 114197 - RNA, 18 nt, Artificial Sequence
  Synthetic
acuuaaaauuuucuugau

SEQ ID NO: 114198 - RNA, 19 nt, Artificial Sequence
  Synthetic
aacuuaaaauuuucuugau

SEQ ID NO: 114199 - RNA, 20 nt, Artificial Sequence
  Synthetic
aaacuuaaaauuuucuugau

SEQ ID NO: 114200 - RNA, 21 nt, Artificial Sequence
  Synthetic
aaaacuuaaaauuuucuugau

SEQ ID NO: 114201 - RNA, 22 nt, Artificial Sequence
  Synthetic
aaaaacuuaaaauuuucuugau

SEQ ID NO: 114202 - RNA, 23 nt, Artificial Sequence
  Synthetic
aaaaaacuuaaaauuuucuugau

SEQ ID NO: 114203 - RNA, 24 nt, Artificial Sequence
  Synthetic
uaaaaaacuuaaaauuuucuugau

SEQ ID NO: 114204 - RNA, 18 nt, Artificial Sequence
  Synthetic
ugacuuuucaaaguugau

SEQ ID NO: 114205 - RNA, 19 nt, Artificial Sequence
  Synthetic
augacuuuucaaaguugau

SEQ ID NO: 114206 - RNA, 20 nt, Artificial Sequence
  Synthetic
aaugacuuuucaaaguugau

SEQ ID NO: 114207 - RNA, 21 nt, Artificial Sequence
  Synthetic
caaugacuuuucaaaguugau

SEQ ID NO: 114208 - RNA, 23 nt, Artificial Sequence
  Synthetic
agcaaugacuuuucaaaguugau

SEQ ID NO: 114209 - RNA, 24 nt, Artificial Sequence
  Synthetic
aagcaaugacuuuucaaaguugau

SEQ ID NO: 114210 - RNA, 18 nt, Artificial Sequence
  Synthetic
uuguggcauugauuugau

SEQ ID NO: 114211 - RNA, 19 nt, Artificial Sequence
  Synthetic
uuuguggcauugauuugau

SEQ ID NO: 114212 - RNA, 20 nt, Artificial Sequence
  Synthetic
cuuuguggcauugauuugau

SEQ ID NO: 114213 - RNA, 22 nt, Artificial Sequence
  Synthetic
ugcuuuguggcauugauuugau

SEQ ID NO: 114214 - RNA, 23 nt, Artificial Sequence
  Synthetic
cugcuuuguggcauugauuugau

SEQ ID NO: 114215 - RNA, 24 nt, Artificial Sequence
  Synthetic
ccugcuuuguggcauugauuugau

SEQ ID NO: 114216 - RNA, 18 nt, Artificial Sequence
  Synthetic
caagugaugauauuugau

SEQ ID NO: 114217 - RNA, 19 nt, Artificial Sequence
  Synthetic
acaagugaugauauuugau

SEQ ID NO: 114218 - RNA, 20 nt, Artificial Sequence
  Synthetic
uacaagugaugauauuugau

SEQ ID NO: 114219 - RNA, 21 nt, Artificial Sequence
  Synthetic
auacaagugaugauauuugau

SEQ ID NO: 114220 - RNA, 22 nt, Artificial Sequence
  Synthetic
cauacaagugaugauauuugau

SEQ ID NO: 114221 - RNA, 23 nt, Artificial Sequence
  Synthetic
ucauacaagugaugauauuugau

SEQ ID NO: 114222 - RNA, 24 nt, Artificial Sequence
  Synthetic
aucauacaagugaugauauuugau

SEQ ID NO: 114223 - RNA, 18 nt, Artificial Sequence
  Synthetic
auuggcaaagauuuugau

SEQ ID NO: 114224 - RNA, 19 nt, Artificial Sequence
  Synthetic
uauuggcaaagauuuugau

SEQ ID NO: 114225 - RNA, 20 nt, Artificial Sequence
  Synthetic
cuauuggcaaagauuuugau

SEQ ID NO: 114226 - RNA, 21 nt, Artificial Sequence
  Synthetic
ccuauuggcaaagauuuugau

SEQ ID NO: 114227 - RNA, 23 nt, Artificial Sequence
  Synthetic
agccuauuggcaaagauuuugau

SEQ ID NO: 114228 - RNA, 24 nt, Artificial Sequence
  Synthetic
uagccuauuggcaaagauuuugau

SEQ ID NO: 114229 - RNA, 18 nt, Artificial Sequence
  Synthetic
uccuucuagguuuuugau

SEQ ID NO: 114230 - RNA, 19 nt, Artificial Sequence
  Synthetic
cuccuucuagguuuuugau

SEQ ID NO: 114231 - RNA, 20 nt, Artificial Sequence
  Synthetic
ccuccuucuagguuuuugau

SEQ ID NO: 114232 - RNA, 21 nt, Artificial Sequence
  Synthetic
accuccuucuagguuuuugau

SEQ ID NO: 114233 - RNA, 22 nt, Artificial Sequence
  Synthetic
uaccuccuucuagguuuuugau

SEQ ID NO: 114234 - RNA, 23 nt, Artificial Sequence
  Synthetic
uuaccuccuucuagguuuuugau

SEQ ID NO: 114235 - RNA, 24 nt, Artificial Sequence
  Synthetic
auuaccuccuucuagguuuuugau

SEQ ID NO: 114236 - RNA, 21 nt, Artificial Sequence
  Synthetic
uuagaaaaaaagucaaaauau

SEQ ID NO: 114237 - RNA, 22 nt, Artificial Sequence
  Synthetic
auuagaaaaaaagucaaaauau

SEQ ID NO: 114238 - RNA, 23 nt, Artificial Sequence
  Synthetic
aauuagaaaaaaagucaaaauau

SEQ ID NO: 114239 - RNA, 24 nt, Artificial Sequence
  Synthetic
aaauuagaaaaaaagucaaaauau

SEQ ID NO: 114240 - RNA, 18 nt, Artificial Sequence
  Synthetic
caccauauaugaaaauau

SEQ ID NO: 114241 - RNA, 19 nt, Artificial Sequence
  Synthetic
acaccauauaugaaaauau

SEQ ID NO: 114242 - RNA, 20 nt, Artificial Sequence
  Synthetic
aacaccauauaugaaaauau

SEQ ID NO: 114243 - RNA, 21 nt, Artificial Sequence
  Synthetic
aaacaccauauaugaaaauau

SEQ ID NO: 114244 - RNA, 22 nt, Artificial Sequence
  Synthetic
aaaacaccauauaugaaaauau

SEQ ID NO: 114245 - RNA, 23 nt, Artificial Sequence
  Synthetic
uaaaacaccauauaugaaaauau

SEQ ID NO: 114246 - RNA, 24 nt, Artificial Sequence
  Synthetic
auaaaacaccauauaugaaaauau

SEQ ID NO: 114247 - RNA, 18 nt, Artificial Sequence
  Synthetic
acaggaaacagcaaauau

SEQ ID NO: 114248 - RNA, 19 nt, Artificial Sequence
  Synthetic
uacaggaaacagcaaauau

SEQ ID NO: 114249 - RNA, 21 nt, Artificial Sequence
  Synthetic
uguacaggaaacagcaaauau

SEQ ID NO: 114250 - RNA, 22 nt, Artificial Sequence
  Synthetic
auguacaggaaacagcaaauau

SEQ ID NO: 114251 - RNA, 23 nt, Artificial Sequence
  Synthetic
cauguacaggaaacagcaaauau

SEQ ID NO: 114252 - RNA, 24 nt, Artificial Sequence
  Synthetic
acauguacaggaaacagcaaauau

SEQ ID NO: 114253 - RNA, 21 nt, Artificial Sequence
  Synthetic
aauaaaaaaaugggcaaauau

SEQ ID NO: 114254 - RNA, 22 nt, Artificial Sequence
  Synthetic
uaauaaaaaaaugggcaaauau

SEQ ID NO: 114255 - RNA, 23 nt, Artificial Sequence
  Synthetic
cuaauaaaaaaaugggcaaauau

SEQ ID NO: 114256 - RNA, 24 nt, Artificial Sequence
  Synthetic
ccuaauaaaaaaaugggcaaauau

SEQ ID NO: 114257 - RNA, 21 nt, Artificial Sequence
  Synthetic
ucuuuugcugauaauaaauau

SEQ ID NO: 114258 - RNA, 22 nt, Artificial Sequence
  Synthetic
uucuuuugcugauaauaaauau

SEQ ID NO: 114259 - RNA, 23 nt, Artificial Sequence
  Synthetic
uuucuuuugcugauaauaaauau

SEQ ID NO: 114260 - RNA, 24 nt, Artificial Sequence
  Synthetic
cuuucuuuugcugauaauaaauau

SEQ ID NO: 114261 - RNA, 21 nt, Artificial Sequence
  Synthetic
cuagcaauuuuaccuaaauau

SEQ ID NO: 114262 - RNA, 23 nt, Artificial Sequence
  Synthetic
ugcuagcaauuuuaccuaaauau

SEQ ID NO: 114263 - RNA, 24 nt, Artificial Sequence
  Synthetic
cugcuagcaauuuuaccuaaauau

SEQ ID NO: 114264 - RNA, 19 nt, Artificial Sequence
  Synthetic
cgaauggccauguaaauau

SEQ ID NO: 114265 - RNA, 20 nt, Artificial Sequence
  Synthetic
acgaauggccauguaaauau

SEQ ID NO: 114266 - RNA, 21 nt, Artificial Sequence
  Synthetic
uacgaauggccauguaaauau

SEQ ID NO: 114267 - RNA, 22 nt, Artificial Sequence
  Synthetic
cuacgaauggccauguaaauau

SEQ ID NO: 114268 - RNA, 23 nt, Artificial Sequence
  Synthetic
acuacgaauggccauguaaauau

SEQ ID NO: 114269 - RNA, 19 nt, Artificial Sequence
  Synthetic
agaugcaauuauuaaauau

SEQ ID NO: 114270 - RNA, 20 nt, Artificial Sequence
  Synthetic
cagaugcaauuauuaaauau

SEQ ID NO: 114271 - RNA, 21 nt, Artificial Sequence
  Synthetic
ucagaugcaauuauuaaauau

SEQ ID NO: 114272 - RNA, 22 nt, Artificial Sequence
  Synthetic
uucagaugcaauuauuaaauau

SEQ ID NO: 114273 - RNA, 24 nt, Artificial Sequence
  Synthetic
uguucagaugcaauuauuaaauau

SEQ ID NO: 114274 - RNA, 21 nt, Artificial Sequence
  Synthetic
ugucucucuuuucuuaaauau

SEQ ID NO: 114275 - RNA, 22 nt, Artificial Sequence
  Synthetic
augucucucuuuucuuaaauau

SEQ ID NO: 114276 - RNA, 23 nt, Artificial Sequence
  Synthetic
aaugucucucuuuucuuaaauau

SEQ ID NO: 114277 - RNA, 24 nt, Artificial Sequence
  Synthetic
aaaugucucucuuuucuuaaauau

SEQ ID NO: 114278 - RNA, 19 nt, Artificial Sequence
  Synthetic
ugagaccuaauuuaaauau

SEQ ID NO: 114279 - RNA, 20 nt, Artificial Sequence
  Synthetic
cugagaccuaauuuaaauau

SEQ ID NO: 114280 - RNA, 21 nt, Artificial Sequence
  Synthetic
acugagaccuaauuuaaauau

SEQ ID NO: 114281 - RNA, 22 nt, Artificial Sequence
  Synthetic
uacugagaccuaauuuaaauau

SEQ ID NO: 114282 - RNA, 23 nt, Artificial Sequence
  Synthetic
uuacugagaccuaauuuaaauau

SEQ ID NO: 114283 - RNA, 24 nt, Artificial Sequence
  Synthetic
uuuacugagaccuaauuuaaauau

SEQ ID NO: 114284 - RNA, 18 nt, Artificial Sequence
  Synthetic
ucuccaaaguuuaaauau

SEQ ID NO: 114285 - RNA, 19 nt, Artificial Sequence
  Synthetic
uucuccaaaguuuaaauau

SEQ ID NO: 114286 - RNA, 20 nt, Artificial Sequence
  Synthetic
cuucuccaaaguuuaaauau

SEQ ID NO: 114287 - RNA, 21 nt, Artificial Sequence
  Synthetic
ucuucuccaaaguuuaaauau

SEQ ID NO: 114288 - RNA, 22 nt, Artificial Sequence
  Synthetic
uucuucuccaaaguuuaaauau

SEQ ID NO: 114289 - RNA, 23 nt, Artificial Sequence
  Synthetic
uuucuucuccaaaguuuaaauau

SEQ ID NO: 114290 - RNA, 24 nt, Artificial Sequence
  Synthetic
uuuucuucuccaaaguuuaaauau

SEQ ID NO: 114291 - RNA, 18 nt, Artificial Sequence
  Synthetic
ucugaagagugccaauau

SEQ ID NO: 114292 - RNA, 19 nt, Artificial Sequence
  Synthetic
cucugaagagugccaauau

SEQ ID NO: 114293 - RNA, 21 nt, Artificial Sequence
  Synthetic
agcucugaagagugccaauau

SEQ ID NO: 114294 - RNA, 23 nt, Artificial Sequence
  Synthetic
agagcucugaagagugccaauau

SEQ ID NO: 114295 - RNA, 24 nt, Artificial Sequence
  Synthetic
aagagcucugaagagugccaauau

SEQ ID NO: 114296 - RNA, 18 nt, Artificial Sequence
  Synthetic
uuuuuauaguaucaauau

SEQ ID NO: 114297 - RNA, 23 nt, Artificial Sequence
  Synthetic
ugggguuuuuauaguaucaauau

SEQ ID NO: 114298 - RNA, 24 nt, Artificial Sequence
  Synthetic
augggguuuuuauaguaucaauau

SEQ ID NO: 114299 - RNA, 18 nt, Artificial Sequence
  Synthetic
acuaaagguugucaauau

SEQ ID NO: 114300 - RNA, 19 nt, Artificial Sequence
  Synthetic
aacuaaagguugucaauau

SEQ ID NO: 114301 - RNA, 20 nt, Artificial Sequence
  Synthetic
caacuaaagguugucaauau

SEQ ID NO: 114302 - RNA, 21 nt, Artificial Sequence
  Synthetic
ccaacuaaagguugucaauau

SEQ ID NO: 114303 - RNA, 22 nt, Artificial Sequence
  Synthetic
accaacuaaagguugucaauau

SEQ ID NO: 114304 - RNA, 23 nt, Artificial Sequence
  Synthetic
aaccaacuaaagguugucaauau

SEQ ID NO: 114305 - RNA, 21 nt, Artificial Sequence
  Synthetic
ugaauauuacauuuucaauau

SEQ ID NO: 114306 - RNA, 22 nt, Artificial Sequence
  Synthetic
cugaauauuacauuuucaauau

SEQ ID NO: 114307 - RNA, 23 nt, Artificial Sequence
  Synthetic
acugaauauuacauuuucaauau

SEQ ID NO: 114308 - RNA, 24 nt, Artificial Sequence
  Synthetic
uacugaauauuacauuuucaauau

SEQ ID NO: 114309 - RNA, 18 nt, Artificial Sequence
  Synthetic
uaggauuuccaagaauau

SEQ ID NO: 114310 - RNA, 19 nt, Artificial Sequence
  Synthetic
auaggauuuccaagaauau

SEQ ID NO: 114311 - RNA, 21 nt, Artificial Sequence
  Synthetic
ugauaggauuuccaagaauau

SEQ ID NO: 114312 - RNA, 22 nt, Artificial Sequence
  Synthetic
uugauaggauuuccaagaauau

SEQ ID NO: 114313 - RNA, 23 nt, Artificial Sequence
  Synthetic
auugauaggauuuccaagaauau

SEQ ID NO: 114314 - RNA, 19 nt, Artificial Sequence
  Synthetic
ugcgagaagaagagaauau

SEQ ID NO: 114315 - RNA, 20 nt, Artificial Sequence
  Synthetic
augcgagaagaagagaauau

SEQ ID NO: 114316 - RNA, 21 nt, Artificial Sequence
  Synthetic
uaugcgagaagaagagaauau

SEQ ID NO: 114317 - RNA, 22 nt, Artificial Sequence
  Synthetic
cuaugcgagaagaagagaauau

SEQ ID NO: 114318 - RNA, 23 nt, Artificial Sequence
  Synthetic
ucuaugcgagaagaagagaauau

SEQ ID NO: 114319 - RNA, 24 nt, Artificial Sequence
  Synthetic
aucuaugcgagaagaagagaauau

SEQ ID NO: 114320 - RNA, 22 nt, Artificial Sequence
  Synthetic
uggaguucuguaaguagaauau

SEQ ID NO: 114321 - RNA, 23 nt, Artificial Sequence
  Synthetic
cuggaguucuguaaguagaauau

SEQ ID NO: 114322 - RNA, 24 nt, Artificial Sequence
  Synthetic
acuggaguucuguaaguagaauau

SEQ ID NO: 114323 - RNA, 18 nt, Artificial Sequence
  Synthetic
aagcaucuuguggaauau

SEQ ID NO: 114324 - RNA, 19 nt, Artificial Sequence
  Synthetic
uaagcaucuuguggaauau

SEQ ID NO: 114325 - RNA, 20 nt, Artificial Sequence
  Synthetic
auaagcaucuuguggaauau

SEQ ID NO: 114326 - RNA, 22 nt, Artificial Sequence
  Synthetic
agauaagcaucuuguggaauau

SEQ ID NO: 114327 - RNA, 23 nt, Artificial Sequence
  Synthetic
cagauaagcaucuuguggaauau

SEQ ID NO: 114328 - RNA, 24 nt, Artificial Sequence
  Synthetic
ccagauaagcaucuuguggaauau

SEQ ID NO: 114329 - RNA, 21 nt, Artificial Sequence
  Synthetic
uaauaacuauuuuuggaauau

SEQ ID NO: 114330 - RNA, 22 nt, Artificial Sequence
  Synthetic
uuaauaacuauuuuuggaauau

SEQ ID NO: 114331 - RNA, 23 nt, Artificial Sequence
  Synthetic
cuuaauaacuauuuuuggaauau

SEQ ID NO: 114332 - RNA, 18 nt, Artificial Sequence
  Synthetic
cauacucuugaugaauau

SEQ ID NO: 114333 - RNA, 19 nt, Artificial Sequence
  Synthetic
acauacucuugaugaauau

SEQ ID NO: 114334 - RNA, 20 nt, Artificial Sequence
  Synthetic
uacauacucuugaugaauau

SEQ ID NO: 114335 - RNA, 21 nt, Artificial Sequence
  Synthetic
auacauacucuugaugaauau

SEQ ID NO: 114336 - RNA, 22 nt, Artificial Sequence
  Synthetic
aauacauacucuugaugaauau

SEQ ID NO: 114337 - RNA, 23 nt, Artificial Sequence
  Synthetic
aaauacauacucuugaugaauau

SEQ ID NO: 114338 - RNA, 24 nt, Artificial Sequence
  Synthetic
aaaauacauacucuugaugaauau

SEQ ID NO: 114339 - RNA, 21 nt, Artificial Sequence
  Synthetic
uaaaugaagguauaugaauau

SEQ ID NO: 114340 - RNA, 22 nt, Artificial Sequence
  Synthetic
auaaaugaagguauaugaauau

SEQ ID NO: 114341 - RNA, 23 nt, Artificial Sequence
  Synthetic
uauaaaugaagguauaugaauau

SEQ ID NO: 114342 - RNA, 24 nt, Artificial Sequence
  Synthetic
uuauaaaugaagguauaugaauau

SEQ ID NO: 114343 - RNA, 18 nt, Artificial Sequence
  Synthetic
aggcuuucugcugaauau

SEQ ID NO: 114344 - RNA, 19 nt, Artificial Sequence
  Synthetic
aaggcuuucugcugaauau

SEQ ID NO: 114345 - RNA, 20 nt, Artificial Sequence
  Synthetic
uaaggcuuucugcugaauau

SEQ ID NO: 114346 - RNA, 21 nt, Artificial Sequence
  Synthetic
auaaggcuuucugcugaauau

SEQ ID NO: 114347 - RNA, 23 nt, Artificial Sequence
  Synthetic
agauaaggcuuucugcugaauau

SEQ ID NO: 114348 - RNA, 20 nt, Artificial Sequence
  Synthetic
aggguaaucauagugaauau

SEQ ID NO: 114349 - RNA, 21 nt, Artificial Sequence
  Synthetic
caggguaaucauagugaauau

SEQ ID NO: 114350 - RNA, 22 nt, Artificial Sequence
  Synthetic
ucaggguaaucauagugaauau

SEQ ID NO: 114351 - RNA, 23 nt, Artificial Sequence
  Synthetic
cucaggguaaucauagugaauau

SEQ ID NO: 114352 - RNA, 24 nt, Artificial Sequence
  Synthetic
ucucaggguaaucauagugaauau

SEQ ID NO: 114353 - RNA, 18 nt, Artificial Sequence
  Synthetic
aaguaggccugugaauau

SEQ ID NO: 114354 - RNA, 19 nt, Artificial Sequence
  Synthetic
aaaguaggccugugaauau

SEQ ID NO: 114355 - RNA, 20 nt, Artificial Sequence
  Synthetic
caaaguaggccugugaauau

SEQ ID NO: 114356 - RNA, 21 nt, Artificial Sequence
  Synthetic
ucaaaguaggccugugaauau

SEQ ID NO: 114357 - RNA, 22 nt, Artificial Sequence
  Synthetic
cucaaaguaggccugugaauau

SEQ ID NO: 114358 - RNA, 23 nt, Artificial Sequence
  Synthetic
acucaaaguaggccugugaauau

SEQ ID NO: 114359 - RNA, 24 nt, Artificial Sequence
  Synthetic
uacucaaaguaggccugugaauau

SEQ ID NO: 114360 - RNA, 19 nt, Artificial Sequence
  Synthetic
ugauaguaugauauaauau

SEQ ID NO: 114361 - RNA, 20 nt, Artificial Sequence
  Synthetic
augauaguaugauauaauau

SEQ ID NO: 114362 - RNA, 21 nt, Artificial Sequence
  Synthetic
uaugauaguaugauauaauau

SEQ ID NO: 114363 - RNA, 22 nt, Artificial Sequence
  Synthetic
auaugauaguaugauauaauau

SEQ ID NO: 114364 - RNA, 23 nt, Artificial Sequence
  Synthetic
uauaugauaguaugauauaauau

SEQ ID NO: 114365 - RNA, 24 nt, Artificial Sequence
  Synthetic
cuauaugauaguaugauauaauau

SEQ ID NO: 114366 - RNA, 18 nt, Artificial Sequence
  Synthetic
cauugcuugaaguaauau

SEQ ID NO: 114367 - RNA, 19 nt, Artificial Sequence
  Synthetic
acauugcuugaaguaauau

SEQ ID NO: 114368 - RNA, 20 nt, Artificial Sequence
  Synthetic
aacauugcuugaaguaauau

SEQ ID NO: 114369 - RNA, 21 nt, Artificial Sequence
  Synthetic
caacauugcuugaaguaauau

SEQ ID NO: 114370 - RNA, 22 nt, Artificial Sequence
  Synthetic
ucaacauugcuugaaguaauau

SEQ ID NO: 114371 - RNA, 23 nt, Artificial Sequence
  Synthetic
uucaacauugcuugaaguaauau

SEQ ID NO: 114372 - RNA, 18 nt, Artificial Sequence
  Synthetic
ucauccugaucuuaauau

SEQ ID NO: 114373 - RNA, 19 nt, Artificial Sequence
  Synthetic
cucauccugaucuuaauau

SEQ ID NO: 114374 - RNA, 20 nt, Artificial Sequence
  Synthetic
ucucauccugaucuuaauau

SEQ ID NO: 114375 - RNA, 21 nt, Artificial Sequence
  Synthetic
uucucauccugaucuuaauau

SEQ ID NO: 114376 - RNA, 22 nt, Artificial Sequence
  Synthetic
cuucucauccugaucuuaauau

SEQ ID NO: 114377 - RNA, 23 nt, Artificial Sequence
  Synthetic
ccuucucauccugaucuuaauau

SEQ ID NO: 114378 - RNA, 24 nt, Artificial Sequence
  Synthetic
uccuucucauccugaucuuaauau

SEQ ID NO: 114379 - RNA, 18 nt, Artificial Sequence
  Synthetic
aaauccccauuuuaauau

SEQ ID NO: 114380 - RNA, 19 nt, Artificial Sequence
  Synthetic
uaaauccccauuuuaauau

SEQ ID NO: 114381 - RNA, 20 nt, Artificial Sequence
  Synthetic
auaaauccccauuuuaauau

SEQ ID NO: 114382 - RNA, 21 nt, Artificial Sequence
  Synthetic
aauaaauccccauuuuaauau

SEQ ID NO: 114383 - RNA, 22 nt, Artificial Sequence
  Synthetic
aaauaaauccccauuuuaauau

SEQ ID NO: 114384 - RNA, 23 nt, Artificial Sequence
  Synthetic
aaaauaaauccccauuuuaauau

SEQ ID NO: 114385 - RNA, 21 nt, Artificial Sequence
  Synthetic
uauuaacuuauacuaacauau

SEQ ID NO: 114386 - RNA, 22 nt, Artificial Sequence
  Synthetic
cuauuaacuuauacuaacauau

SEQ ID NO: 114387 - RNA, 23 nt, Artificial Sequence
  Synthetic
acuauuaacuuauacuaacauau

SEQ ID NO: 114388 - RNA, 24 nt, Artificial Sequence
  Synthetic
aacuauuaacuuauacuaacauau

SEQ ID NO: 114389 - RNA, 18 nt, Artificial Sequence
  Synthetic
agcauauguguaacauau

SEQ ID NO: 114390 - RNA, 19 nt, Artificial Sequence
  Synthetic
aagcauauguguaacauau

SEQ ID NO: 114391 - RNA, 20 nt, Artificial Sequence
  Synthetic
uaagcauauguguaacauau

SEQ ID NO: 114392 - RNA, 21 nt, Artificial Sequence
  Synthetic
auaagcauauguguaacauau

SEQ ID NO: 114393 - RNA, 22 nt, Artificial Sequence
  Synthetic
aauaagcauauguguaacauau

SEQ ID NO: 114394 - RNA, 23 nt, Artificial Sequence
  Synthetic
aaauaagcauauguguaacauau

SEQ ID NO: 114395 - RNA, 24 nt, Artificial Sequence
  Synthetic
uaaauaagcauauguguaacauau

SEQ ID NO: 114396 - RNA, 18 nt, Artificial Sequence
  Synthetic
aaauacauguacacauau

SEQ ID NO: 114397 - RNA, 19 nt, Artificial Sequence
  Synthetic
caaauacauguacacauau

SEQ ID NO: 114398 - RNA, 20 nt, Artificial Sequence
  Synthetic
ucaaauacauguacacauau

SEQ ID NO: 114399 - RNA, 21 nt, Artificial Sequence
  Synthetic
aucaaauacauguacacauau

SEQ ID NO: 114400 - RNA, 22 nt, Artificial Sequence
  Synthetic
uaucaaauacauguacacauau

SEQ ID NO: 114401 - RNA, 23 nt, Artificial Sequence
  Synthetic
uuaucaaauacauguacacauau

SEQ ID NO: 114402 - RNA, 18 nt, Artificial Sequence
  Synthetic
aaggaaaugaccacauau

SEQ ID NO: 114403 - RNA, 20 nt, Artificial Sequence
  Synthetic
ugaaggaaaugaccacauau

SEQ ID NO: 114404 - RNA, 22 nt, Artificial Sequence
  Synthetic
agugaaggaaaugaccacauau

SEQ ID NO: 114405 - RNA, 23 nt, Artificial Sequence
  Synthetic
cagugaaggaaaugaccacauau

SEQ ID NO: 114406 - RNA, 24 nt, Artificial Sequence
  Synthetic
ucagugaaggaaaugaccacauau

SEQ ID NO: 114407 - RNA, 18 nt, Artificial Sequence
  Synthetic
cgaaaagcucucacauau

SEQ ID NO: 114408 - RNA, 19 nt, Artificial Sequence
  Synthetic
acgaaaagcucucacauau

SEQ ID NO: 114409 - RNA, 21 nt, Artificial Sequence
  Synthetic
agacgaaaagcucucacauau

SEQ ID NO: 114410 - RNA, 22 nt, Artificial Sequence
  Synthetic
aagacgaaaagcucucacauau

SEQ ID NO: 114411 - RNA, 23 nt, Artificial Sequence
  Synthetic
aaagacgaaaagcucucacauau

SEQ ID NO: 114412 - RNA, 24 nt, Artificial Sequence
  Synthetic
aaaagacgaaaagcucucacauau

SEQ ID NO: 114413 - RNA, 18 nt, Artificial Sequence
  Synthetic
aaauugcaguagacauau

SEQ ID NO: 114414 - RNA, 19 nt, Artificial Sequence
  Synthetic
caaauugcaguagacauau

SEQ ID NO: 114415 - RNA, 21 nt, Artificial Sequence
  Synthetic
ugcaaauugcaguagacauau

SEQ ID NO: 114416 - RNA, 24 nt, Artificial Sequence
  Synthetic
aggugcaaauugcaguagacauau

SEQ ID NO: 114417 - RNA, 18 nt, Artificial Sequence
  Synthetic
cugagaggaaggacauau

SEQ ID NO: 114418 - RNA, 19 nt, Artificial Sequence
  Synthetic
ccugagaggaaggacauau

SEQ ID NO: 114419 - RNA, 20 nt, Artificial Sequence
  Synthetic
cccugagaggaaggacauau

SEQ ID NO: 114420 - RNA, 21 nt, Artificial Sequence
  Synthetic
ccccugagaggaaggacauau

SEQ ID NO: 114421 - RNA, 22 nt, Artificial Sequence
  Synthetic
uccccugagaggaaggacauau

SEQ ID NO: 114422 - RNA, 23 nt, Artificial Sequence
  Synthetic
auccccugagaggaaggacauau

SEQ ID NO: 114423 - RNA, 18 nt, Artificial Sequence
  Synthetic
acugucaaagggacauau

SEQ ID NO: 114424 - RNA, 19 nt, Artificial Sequence
  Synthetic
aacugucaaagggacauau

SEQ ID NO: 114425 - RNA, 20 nt, Artificial Sequence
  Synthetic
caacugucaaagggacauau

SEQ ID NO: 114426 - RNA, 21 nt, Artificial Sequence
  Synthetic
ucaacugucaaagggacauau

SEQ ID NO: 114427 - RNA, 22 nt, Artificial Sequence
  Synthetic
cucaacugucaaagggacauau

SEQ ID NO: 114428 - RNA, 24 nt, Artificial Sequence
  Synthetic
agcucaacugucaaagggacauau

SEQ ID NO: 114429 - RNA, 18 nt, Artificial Sequence
  Synthetic
auuuuccuuaucccauau

SEQ ID NO: 114430 - RNA, 19 nt, Artificial Sequence
  Synthetic
cauuuuccuuaucccauau

SEQ ID NO: 114431 - RNA, 20 nt, Artificial Sequence
  Synthetic
ccauuuuccuuaucccauau

SEQ ID NO: 114432 - RNA, 21 nt, Artificial Sequence
  Synthetic
cccauuuuccuuaucccauau

SEQ ID NO: 114433 - RNA, 22 nt, Artificial Sequence
  Synthetic
acccauuuuccuuaucccauau

SEQ ID NO: 114434 - RNA, 23 nt, Artificial Sequence
  Synthetic
uacccauuuuccuuaucccauau

SEQ ID NO: 114435 - RNA, 24 nt, Artificial Sequence
  Synthetic
cuacccauuuuccuuaucccauau

SEQ ID NO: 114436 - RNA, 18 nt, Artificial Sequence
  Synthetic
aauucauguuucccauau

SEQ ID NO: 114437 - RNA, 19 nt, Artificial Sequence
  Synthetic
caauucauguuucccauau

SEQ ID NO: 114438 - RNA, 20 nt, Artificial Sequence
  Synthetic
ucaauucauguuucccauau

SEQ ID NO: 114439 - RNA, 21 nt, Artificial Sequence
  Synthetic
uucaauucauguuucccauau

SEQ ID NO: 114440 - RNA, 23 nt, Artificial Sequence
  Synthetic
uguucaauucauguuucccauau

SEQ ID NO: 114441 - RNA, 24 nt, Artificial Sequence
  Synthetic
cuguucaauucauguuucccauau

SEQ ID NO: 114442 - RNA, 18 nt, Artificial Sequence
  Synthetic
ccagcacuauauccauau

SEQ ID NO: 114443 - RNA, 19 nt, Artificial Sequence
  Synthetic
uccagcacuauauccauau

SEQ ID NO: 114444 - RNA, 20 nt, Artificial Sequence
  Synthetic
auccagcacuauauccauau

SEQ ID NO: 114445 - RNA, 21 nt, Artificial Sequence
  Synthetic
aauccagcacuauauccauau

SEQ ID NO: 114446 - RNA, 22 nt, Artificial Sequence
  Synthetic
aaauccagcacuauauccauau

SEQ ID NO: 114447 - RNA, 23 nt, Artificial Sequence
  Synthetic
aaaauccagcacuauauccauau

SEQ ID NO: 114448 - RNA, 24 nt, Artificial Sequence
  Synthetic
uaaaauccagcacuauauccauau

SEQ ID NO: 114449 - RNA, 18 nt, Artificial Sequence
  Synthetic
acgcagaaugcagcauau

SEQ ID NO: 114450 - RNA, 19 nt, Artificial Sequence
  Synthetic
uacgcagaaugcagcauau

SEQ ID NO: 114451 - RNA, 20 nt, Artificial Sequence
  Synthetic
auacgcagaaugcagcauau

SEQ ID NO: 114452 - RNA, 21 nt, Artificial Sequence
  Synthetic
aauacgcagaaugcagcauau

SEQ ID NO: 114453 - RNA, 22 nt, Artificial Sequence
  Synthetic
caauacgcagaaugcagcauau

SEQ ID NO: 114454 - RNA, 23 nt, Artificial Sequence
  Synthetic
ucaauacgcagaaugcagcauau

SEQ ID NO: 114455 - RNA, 24 nt, Artificial Sequence
  Synthetic
cucaauacgcagaaugcagcauau

SEQ ID NO: 114456 - RNA, 22 nt, Artificial Sequence
  Synthetic
agcacagacaacaguggcauau

SEQ ID NO: 114457 - RNA, 24 nt, Artificial Sequence
  Synthetic
agagcacagacaacaguggcauau

SEQ ID NO: 114458 - RNA, 18 nt, Artificial Sequence
  Synthetic
ugaugacagauaagauau

SEQ ID NO: 114459 - RNA, 19 nt, Artificial Sequence
  Synthetic
uugaugacagauaagauau

SEQ ID NO: 114460 - RNA, 20 nt, Artificial Sequence
  Synthetic
cuugaugacagauaagauau

SEQ ID NO: 114461 - RNA, 21 nt, Artificial Sequence
  Synthetic
acuugaugacagauaagauau

SEQ ID NO: 114462 - RNA, 23 nt, Artificial Sequence
  Synthetic
agacuugaugacagauaagauau

SEQ ID NO: 114463 - RNA, 24 nt, Artificial Sequence
  Synthetic
aagacuugaugacagauaagauau

SEQ ID NO: 114464 - RNA, 18 nt, Artificial Sequence
  Synthetic
aacucugaagacagauau

SEQ ID NO: 114465 - RNA, 19 nt, Artificial Sequence
  Synthetic
uaacucugaagacagauau

SEQ ID NO: 114466 - RNA, 21 nt, Artificial Sequence
  Synthetic
uguaacucugaagacagauau

SEQ ID NO: 114467 - RNA, 22 nt, Artificial Sequence
  Synthetic
uuguaacucugaagacagauau

SEQ ID NO: 114468 - RNA, 23 nt, Artificial Sequence
  Synthetic
uuuguaacucugaagacagauau

SEQ ID NO: 114469 - RNA, 24 nt, Artificial Sequence
  Synthetic
uuuuguaacucugaagacagauau

SEQ ID NO: 114470 - RNA, 18 nt, Artificial Sequence
  Synthetic
ucuugaagaaccagauau

SEQ ID NO: 114471 - RNA, 19 nt, Artificial Sequence
  Synthetic
aucuugaagaaccagauau

SEQ ID NO: 114472 - RNA, 20 nt, Artificial Sequence
  Synthetic
aaucuugaagaaccagauau

SEQ ID NO: 114473 - RNA, 21 nt, Artificial Sequence
  Synthetic
uaaucuugaagaaccagauau

SEQ ID NO: 114474 - RNA, 22 nt, Artificial Sequence
  Synthetic
uuaaucuugaagaaccagauau

SEQ ID NO: 114475 - RNA, 24 nt, Artificial Sequence
  Synthetic
aguuaaucuugaagaaccagauau

SEQ ID NO: 114476 - RNA, 20 nt, Artificial Sequence
  Synthetic
ugguagcacaacugagauau

SEQ ID NO: 114477 - RNA, 21 nt, Artificial Sequence
  Synthetic
uugguagcacaacugagauau

SEQ ID NO: 114478 - RNA, 23 nt, Artificial Sequence
  Synthetic
aguugguagcacaacugagauau

SEQ ID NO: 114479 - RNA, 24 nt, Artificial Sequence
  Synthetic
uaguugguagcacaacugagauau

SEQ ID NO: 114480 - RNA, 18 nt, Artificial Sequence
  Synthetic
cauucuacuauuagauau

SEQ ID NO: 114481 - RNA, 19 nt, Artificial Sequence
  Synthetic
ccauucuacuauuagauau

SEQ ID NO: 114482 - RNA, 20 nt, Artificial Sequence
  Synthetic
accauucuacuauuagauau

SEQ ID NO: 114483 - RNA, 21 nt, Artificial Sequence
  Synthetic
caccauucuacuauuagauau

SEQ ID NO: 114484 - RNA, 22 nt, Artificial Sequence
  Synthetic
acaccauucuacuauuagauau

SEQ ID NO: 114485 - RNA, 23 nt, Artificial Sequence
  Synthetic
cacaccauucuacuauuagauau

SEQ ID NO: 114486 - RNA, 24 nt, Artificial Sequence
  Synthetic
acacaccauucuacuauuagauau

SEQ ID NO: 114487 - RNA, 18 nt, Artificial Sequence
  Synthetic
uaugugcucaaaugauau

SEQ ID NO: 114488 - RNA, 19 nt, Artificial Sequence
  Synthetic
auaugugcucaaaugauau

SEQ ID NO: 114489 - RNA, 20 nt, Artificial Sequence
  Synthetic
aauaugugcucaaaugauau

SEQ ID NO: 114490 - RNA, 21 nt, Artificial Sequence
  Synthetic
aaauaugugcucaaaugauau

SEQ ID NO: 114491 - RNA, 23 nt, Artificial Sequence
  Synthetic
ugaaauaugugcucaaaugauau

SEQ ID NO: 114492 - RNA, 21 nt, Artificial Sequence
  Synthetic
aaagauuaaaaacaaugauau

SEQ ID NO: 114493 - RNA, 22 nt, Artificial Sequence
  Synthetic
uaaagauuaaaaacaaugauau

SEQ ID NO: 114494 - RNA, 23 nt, Artificial Sequence
  Synthetic
uuaaagauuaaaaacaaugauau

SEQ ID NO: 114495 - RNA, 24 nt, Artificial Sequence
  Synthetic
auuaaagauuaaaaacaaugauau

SEQ ID NO: 114496 - RNA, 19 nt, Artificial Sequence
  Synthetic
uguuauaaaagaaugauau

SEQ ID NO: 114497 - RNA, 20 nt, Artificial Sequence
  Synthetic
cuguuauaaaagaaugauau

SEQ ID NO: 114498 - RNA, 21 nt, Artificial Sequence
  Synthetic
ucuguuauaaaagaaugauau

SEQ ID NO: 114499 - RNA, 22 nt, Artificial Sequence
  Synthetic
uucuguuauaaaagaaugauau

SEQ ID NO: 114500 - RNA, 23 nt, Artificial Sequence
  Synthetic
uuucuguuauaaaagaaugauau

SEQ ID NO: 114501 - RNA, 24 nt, Artificial Sequence
  Synthetic
uuuucuguuauaaaagaaugauau

SEQ ID NO: 114502 - RNA, 19 nt, Artificial Sequence
  Synthetic
ugccaacugauuaugauau

SEQ ID NO: 114503 - RNA, 20 nt, Artificial Sequence
  Synthetic
cugccaacugauuaugauau

SEQ ID NO: 114504 - RNA, 21 nt, Artificial Sequence
  Synthetic
ccugccaacugauuaugauau

SEQ ID NO: 114505 - RNA, 22 nt, Artificial Sequence
  Synthetic
accugccaacugauuaugauau

SEQ ID NO: 114506 - RNA, 23 nt, Artificial Sequence
  Synthetic
caccugccaacugauuaugauau

SEQ ID NO: 114507 - RNA, 24 nt, Artificial Sequence
  Synthetic
ucaccugccaacugauuaugauau

SEQ ID NO: 114508 - RNA, 18 nt, Artificial Sequence
  Synthetic
caauugcaaaacugauau

SEQ ID NO: 114509 - RNA, 19 nt, Artificial Sequence
  Synthetic
ucaauugcaaaacugauau

SEQ ID NO: 114510 - RNA, 20 nt, Artificial Sequence
  Synthetic
aucaauugcaaaacugauau

SEQ ID NO: 114511 - RNA, 21 nt, Artificial Sequence
  Synthetic
caucaauugcaaaacugauau

SEQ ID NO: 114512 - RNA, 22 nt, Artificial Sequence
  Synthetic
ucaucaauugcaaaacugauau

SEQ ID NO: 114513 - RNA, 20 nt, Artificial Sequence
  Synthetic
aggugcuauuuaagugauau

SEQ ID NO: 114514 - RNA, 22 nt, Artificial Sequence
  Synthetic
cgaggugcuauuuaagugauau

SEQ ID NO: 114515 - RNA, 23 nt, Artificial Sequence
  Synthetic
acgaggugcuauuuaagugauau

SEQ ID NO: 114516 - RNA, 24 nt, Artificial Sequence
  Synthetic
uacgaggugcuauuuaagugauau

SEQ ID NO: 114517 - RNA, 19 nt, Artificial Sequence
  Synthetic
cgaagggagauaaauauau

SEQ ID NO: 114518 - RNA, 20 nt, Artificial Sequence
  Synthetic
ccgaagggagauaaauauau

SEQ ID NO: 114519 - RNA, 21 nt, Artificial Sequence
  Synthetic
accgaagggagauaaauauau

SEQ ID NO: 114520 - RNA, 22 nt, Artificial Sequence
  Synthetic
uaccgaagggagauaaauauau

SEQ ID NO: 114521 - RNA, 23 nt, Artificial Sequence
  Synthetic
cuaccgaagggagauaaauauau

SEQ ID NO: 114522 - RNA, 18 nt, Artificial Sequence
  Synthetic
uugaucuucuaaauauau

SEQ ID NO: 114523 - RNA, 19 nt, Artificial Sequence
  Synthetic
auugaucuucuaaauauau

SEQ ID NO: 114524 - RNA, 20 nt, Artificial Sequence
  Synthetic
aauugaucuucuaaauauau

SEQ ID NO: 114525 - RNA, 21 nt, Artificial Sequence
  Synthetic
caauugaucuucuaaauauau

SEQ ID NO: 114526 - RNA, 22 nt, Artificial Sequence
  Synthetic
ccaauugaucuucuaaauauau

SEQ ID NO: 114527 - RNA, 23 nt, Artificial Sequence
  Synthetic
uccaauugaucuucuaaauauau

SEQ ID NO: 114528 - RNA, 24 nt, Artificial Sequence
  Synthetic
uuccaauugaucuucuaaauauau

SEQ ID NO: 114529 - RNA, 18 nt, Artificial Sequence
  Synthetic
aaucaauuuuaaauauau

SEQ ID NO: 114530 - RNA, 20 nt, Artificial Sequence
  Synthetic
ugaaucaauuuuaaauauau

SEQ ID NO: 114531 - RNA, 19 nt, Artificial Sequence
  Synthetic
ugaaaguaaaucaauauau

SEQ ID NO: 114532 - RNA, 20 nt, Artificial Sequence
  Synthetic
cugaaaguaaaucaauauau

SEQ ID NO: 114533 - RNA, 21 nt, Artificial Sequence
  Synthetic
acugaaaguaaaucaauauau

SEQ ID NO: 114534 - RNA, 22 nt, Artificial Sequence
  Synthetic
uacugaaaguaaaucaauauau

SEQ ID NO: 114535 - RNA, 23 nt, Artificial Sequence
  Synthetic
cuacugaaaguaaaucaauauau

SEQ ID NO: 114536 - RNA, 21 nt, Artificial Sequence
  Synthetic
agaauauuuauuucaauauau

SEQ ID NO: 114537 - RNA, 23 nt, Artificial Sequence
  Synthetic
ugagaauauuuauuucaauauau

SEQ ID NO: 114538 - RNA, 24 nt, Artificial Sequence
  Synthetic
uugagaauauuuauuucaauauau

SEQ ID NO: 114539 - RNA, 19 nt, Artificial Sequence
  Synthetic
aguuaagauaaacauauau

SEQ ID NO: 114540 - RNA, 20 nt, Artificial Sequence
  Synthetic
caguuaagauaaacauauau

SEQ ID NO: 114541 - RNA, 21 nt, Artificial Sequence
  Synthetic
acaguuaagauaaacauauau

SEQ ID NO: 114542 - RNA, 22 nt, Artificial Sequence
  Synthetic
aacaguuaagauaaacauauau

SEQ ID NO: 114543 - RNA, 23 nt, Artificial Sequence
  Synthetic
uaacaguuaagauaaacauauau

SEQ ID NO: 114544 - RNA, 24 nt, Artificial Sequence
  Synthetic
uuaacaguuaagauaaacauauau

SEQ ID NO: 114545 - RNA, 18 nt, Artificial Sequence
  Synthetic
ugguuuaaauccauauau

SEQ ID NO: 114546 - RNA, 21 nt, Artificial Sequence
  Synthetic
aggugguuuaaauccauauau

SEQ ID NO: 114547 - RNA, 22 nt, Artificial Sequence
  Synthetic
aaggugguuuaaauccauauau

SEQ ID NO: 114548 - RNA, 23 nt, Artificial Sequence
  Synthetic
aaaggugguuuaaauccauauau

SEQ ID NO: 114549 - RNA, 18 nt, Artificial Sequence
  Synthetic
ccuaguaauaagauauau

SEQ ID NO: 114550 - RNA, 19 nt, Artificial Sequence
  Synthetic
uccuaguaauaagauauau

SEQ ID NO: 114551 - RNA, 20 nt, Artificial Sequence
  Synthetic
auccuaguaauaagauauau

SEQ ID NO: 114552 - RNA, 22 nt, Artificial Sequence
  Synthetic
agauccuaguaauaagauauau

SEQ ID NO: 114553 - RNA, 23 nt, Artificial Sequence
  Synthetic
aagauccuaguaauaagauauau

SEQ ID NO: 114554 - RNA, 24 nt, Artificial Sequence
  Synthetic
uaagauccuaguaauaagauauau

SEQ ID NO: 114555 - RNA, 21 nt, Artificial Sequence
  Synthetic
uuaguacaauaguagauauau

SEQ ID NO: 114556 - RNA, 22 nt, Artificial Sequence
  Synthetic
uuuaguacaauaguagauauau

SEQ ID NO: 114557 - RNA, 23 nt, Artificial Sequence
  Synthetic
cuuuaguacaauaguagauauau

SEQ ID NO: 114558 - RNA, 24 nt, Artificial Sequence
  Synthetic
ucuuuaguacaauaguagauauau

SEQ ID NO: 114559 - RNA, 21 nt, Artificial Sequence
  Synthetic
auaauaauauguuggauauau

SEQ ID NO: 114560 - RNA, 22 nt, Artificial Sequence
  Synthetic
aauaauaauauguuggauauau

SEQ ID NO: 114561 - RNA, 23 nt, Artificial Sequence
  Synthetic
aaauaauaauauguuggauauau

SEQ ID NO: 114562 - RNA, 18 nt, Artificial Sequence
  Synthetic
auuaaguccccuauauau

SEQ ID NO: 114563 - RNA, 19 nt, Artificial Sequence
  Synthetic
cauuaaguccccuauauau

SEQ ID NO: 114564 - RNA, 20 nt, Artificial Sequence
  Synthetic
ucauuaaguccccuauauau

SEQ ID NO: 114565 - RNA, 21 nt, Artificial Sequence
  Synthetic
aucauuaaguccccuauauau

SEQ ID NO: 114566 - RNA, 22 nt, Artificial Sequence
  Synthetic
uaucauuaaguccccuauauau

SEQ ID NO: 114567 - RNA, 19 nt, Artificial Sequence
  Synthetic
ugcugacuuuucuauauau

SEQ ID NO: 114568 - RNA, 20 nt, Artificial Sequence
  Synthetic
augcugacuuuucuauauau

SEQ ID NO: 114569 - RNA, 21 nt, Artificial Sequence
  Synthetic
aaugcugacuuuucuauauau

SEQ ID NO: 114570 - RNA, 22 nt, Artificial Sequence
  Synthetic
aaaugcugacuuuucuauauau

SEQ ID NO: 114571 - RNA, 23 nt, Artificial Sequence
  Synthetic
caaaugcugacuuuucuauauau

SEQ ID NO: 114572 - RNA, 24 nt, Artificial Sequence
  Synthetic
ucaaaugcugacuuuucuauauau

SEQ ID NO: 114573 - RNA, 21 nt, Artificial Sequence
  Synthetic
auuauuccacaauguauauau

SEQ ID NO: 114574 - RNA, 23 nt, Artificial Sequence
  Synthetic
ugauuauuccacaauguauauau

SEQ ID NO: 114575 - RNA, 24 nt, Artificial Sequence
  Synthetic
uugauuauuccacaauguauauau

SEQ ID NO: 114576 - RNA, 19 nt, Artificial Sequence
  Synthetic
ugaagagcauauacuauau

SEQ ID NO: 114577 - RNA, 20 nt, Artificial Sequence
  Synthetic
uugaagagcauauacuauau

SEQ ID NO: 114578 - RNA, 21 nt, Artificial Sequence
  Synthetic
cuugaagagcauauacuauau

SEQ ID NO: 114579 - RNA, 22 nt, Artificial Sequence
  Synthetic
acuugaagagcauauacuauau

SEQ ID NO: 114580 - RNA, 23 nt, Artificial Sequence
  Synthetic
uacuugaagagcauauacuauau

SEQ ID NO: 114581 - RNA, 24 nt, Artificial Sequence
  Synthetic
uuacuugaagagcauauacuauau

SEQ ID NO: 114582 - RNA, 21 nt, Artificial Sequence
  Synthetic
uaauauuauauuuuacuauau

SEQ ID NO: 114583 - RNA, 23 nt, Artificial Sequence
  Synthetic
uguaauauuauauuuuacuauau

SEQ ID NO: 114584 - RNA, 24 nt, Artificial Sequence
  Synthetic
uuguaauauuauauuuuacuauau

SEQ ID NO: 114585 - RNA, 18 nt, Artificial Sequence
  Synthetic
uggugcuagguccuauau

SEQ ID NO: 114586 - RNA, 19 nt, Artificial Sequence
  Synthetic
auggugcuagguccuauau

SEQ ID NO: 114587 - RNA, 20 nt, Artificial Sequence
  Synthetic
uauggugcuagguccuauau

SEQ ID NO: 114588 - RNA, 21 nt, Artificial Sequence
  Synthetic
auauggugcuagguccuauau

SEQ ID NO: 114589 - RNA, 23 nt, Artificial Sequence
  Synthetic
agauauggugcuagguccuauau

SEQ ID NO: 114590 - RNA, 24 nt, Artificial Sequence
  Synthetic
uagauauggugcuagguccuauau

SEQ ID NO: 114591 - RNA, 18 nt, Artificial Sequence
  Synthetic
uuuguaaagcugcuauau

SEQ ID NO: 114592 - RNA, 19 nt, Artificial Sequence
  Synthetic
uuuuguaaagcugcuauau

SEQ ID NO: 114593 - RNA, 20 nt, Artificial Sequence
  Synthetic
uuuuuguaaagcugcuauau

SEQ ID NO: 114594 - RNA, 22 nt, Artificial Sequence
  Synthetic
uguuuuuguaaagcugcuauau

SEQ ID NO: 114595 - RNA, 23 nt, Artificial Sequence
  Synthetic
auguuuuuguaaagcugcuauau

SEQ ID NO: 114596 - RNA, 24 nt, Artificial Sequence
  Synthetic
cauguuuuuguaaagcugcuauau

SEQ ID NO: 114597 - RNA, 18 nt, Artificial Sequence
  Synthetic
uacauuucuucaguauau

SEQ ID NO: 114598 - RNA, 19 nt, Artificial Sequence
  Synthetic
auacauuucuucaguauau

SEQ ID NO: 114599 - RNA, 20 nt, Artificial Sequence
  Synthetic
aauacauuucuucaguauau

SEQ ID NO: 114600 - RNA, 21 nt, Artificial Sequence
  Synthetic
aaauacauuucuucaguauau

SEQ ID NO: 114601 - RNA, 22 nt, Artificial Sequence
  Synthetic
uaaauacauuucuucaguauau

SEQ ID NO: 114602 - RNA, 23 nt, Artificial Sequence
  Synthetic
uuaaauacauuucuucaguauau

SEQ ID NO: 114603 - RNA, 24 nt, Artificial Sequence
  Synthetic
cuuaaauacauuucuucaguauau

SEQ ID NO: 114604 - RNA, 19 nt, Artificial Sequence
  Synthetic
agaguaauaaggaguauau

SEQ ID NO: 114605 - RNA, 20 nt, Artificial Sequence
  Synthetic
aagaguaauaaggaguauau

SEQ ID NO: 114606 - RNA, 21 nt, Artificial Sequence
  Synthetic
aaagaguaauaaggaguauau

SEQ ID NO: 114607 - RNA, 23 nt, Artificial Sequence
  Synthetic
agaaagaguaauaaggaguauau

SEQ ID NO: 114608 - RNA, 24 nt, Artificial Sequence
  Synthetic
uagaaagaguaauaaggaguauau

SEQ ID NO: 114609 - RNA, 18 nt, Artificial Sequence
  Synthetic
cuacaugcaugaguauau

SEQ ID NO: 114610 - RNA, 19 nt, Artificial Sequence
  Synthetic
ucuacaugcaugaguauau

SEQ ID NO: 114611 - RNA, 20 nt, Artificial Sequence
  Synthetic
aucuacaugcaugaguauau

SEQ ID NO: 114612 - RNA, 21 nt, Artificial Sequence
  Synthetic
uaucuacaugcaugaguauau

SEQ ID NO: 114613 - RNA, 22 nt, Artificial Sequence
  Synthetic
cuaucuacaugcaugaguauau

SEQ ID NO: 114614 - RNA, 23 nt, Artificial Sequence
  Synthetic
acuaucuacaugcaugaguauau

SEQ ID NO: 114615 - RNA, 24 nt, Artificial Sequence
  Synthetic
aacuaucuacaugcaugaguauau

SEQ ID NO: 114616 - RNA, 18 nt, Artificial Sequence
  Synthetic
uagcuuacauuaguauau

SEQ ID NO: 114617 - RNA, 19 nt, Artificial Sequence
  Synthetic
auagcuuacauuaguauau

SEQ ID NO: 114618 - RNA, 20 nt, Artificial Sequence
  Synthetic
aauagcuuacauuaguauau

SEQ ID NO: 114619 - RNA, 21 nt, Artificial Sequence
  Synthetic
uaauagcuuacauuaguauau

SEQ ID NO: 114620 - RNA, 22 nt, Artificial Sequence
  Synthetic
auaauagcuuacauuaguauau

SEQ ID NO: 114621 - RNA, 23 nt, Artificial Sequence
  Synthetic
uauaauagcuuacauuaguauau

SEQ ID NO: 114622 - RNA, 24 nt, Artificial Sequence
  Synthetic
uuauaauagcuuacauuaguauau

SEQ ID NO: 114623 - RNA, 18 nt, Artificial Sequence
  Synthetic
acagccagauggguauau

SEQ ID NO: 114624 - RNA, 20 nt, Artificial Sequence
  Synthetic
agacagccagauggguauau

SEQ ID NO: 114625 - RNA, 21 nt, Artificial Sequence
  Synthetic
uagacagccagauggguauau

SEQ ID NO: 114626 - RNA, 24 nt, Artificial Sequence
  Synthetic
agguagacagccagauggguauau

SEQ ID NO: 114627 - RNA, 18 nt, Artificial Sequence
  Synthetic
uacacuccuuggguauau

SEQ ID NO: 114628 - RNA, 19 nt, Artificial Sequence
  Synthetic
uuacacuccuuggguauau

SEQ ID NO: 114629 - RNA, 20 nt, Artificial Sequence
  Synthetic
uuuacacuccuuggguauau

SEQ ID NO: 114630 - RNA, 21 nt, Artificial Sequence
  Synthetic
uuuuacacuccuuggguauau

SEQ ID NO: 114631 - RNA, 23 nt, Artificial Sequence
  Synthetic
aguuuuacacuccuuggguauau

SEQ ID NO: 114632 - RNA, 24 nt, Artificial Sequence
  Synthetic
uaguuuuacacuccuuggguauau

SEQ ID NO: 114633 - RNA, 18 nt, Artificial Sequence
  Synthetic
acccccagucaauuauau

SEQ ID NO: 114634 - RNA, 19 nt, Artificial Sequence
  Synthetic
cacccccagucaauuauau

SEQ ID NO: 114635 - RNA, 20 nt, Artificial Sequence
  Synthetic
ucacccccagucaauuauau

SEQ ID NO: 114636 - RNA, 21 nt, Artificial Sequence
  Synthetic
cucacccccagucaauuauau

SEQ ID NO: 114637 - RNA, 24 nt, Artificial Sequence
  Synthetic
uggcucacccccagucaauuauau

SEQ ID NO: 114638 - RNA, 19 nt, Artificial Sequence
  Synthetic
aguaauguuuuaauuauau

SEQ ID NO: 114639 - RNA, 20 nt, Artificial Sequence
  Synthetic
uaguaauguuuuaauuauau

SEQ ID NO: 114640 - RNA, 19 nt, Artificial Sequence
  Synthetic
agcaaaccuuggauuauau

SEQ ID NO: 114641 - RNA, 20 nt, Artificial Sequence
  Synthetic
cagcaaaccuuggauuauau

SEQ ID NO: 114642 - RNA, 21 nt, Artificial Sequence
  Synthetic
ucagcaaaccuuggauuauau

SEQ ID NO: 114643 - RNA, 22 nt, Artificial Sequence
  Synthetic
uucagcaaaccuuggauuauau

SEQ ID NO: 114644 - RNA, 23 nt, Artificial Sequence
  Synthetic
uuucagcaaaccuuggauuauau

SEQ ID NO: 114645 - RNA, 24 nt, Artificial Sequence
  Synthetic
auuucagcaaaccuuggauuauau

SEQ ID NO: 114646 - RNA, 21 nt, Artificial Sequence
  Synthetic
uggauauuuuaucuauuauau

SEQ ID NO: 114647 - RNA, 22 nt, Artificial Sequence
  Synthetic
cuggauauuuuaucuauuauau

SEQ ID NO: 114648 - RNA, 23 nt, Artificial Sequence
  Synthetic
ucuggauauuuuaucuauuauau

SEQ ID NO: 114649 - RNA, 24 nt, Artificial Sequence
  Synthetic
aucuggauauuuuaucuauuauau

SEQ ID NO: 114650 - RNA, 18 nt, Artificial Sequence
  Synthetic
uuuacuccucuauuauau

SEQ ID NO: 114651 - RNA, 20 nt, Artificial Sequence
  Synthetic
uguuuacuccucuauuauau

SEQ ID NO: 114652 - RNA, 21 nt, Artificial Sequence
  Synthetic
cuguuuacuccucuauuauau

SEQ ID NO: 114653 - RNA, 22 nt, Artificial Sequence
  Synthetic
acuguuuacuccucuauuauau

SEQ ID NO: 114654 - RNA, 23 nt, Artificial Sequence
  Synthetic
cacuguuuacuccucuauuauau

SEQ ID NO: 114655 - RNA, 24 nt, Artificial Sequence
  Synthetic
acacuguuuacuccucuauuauau

SEQ ID NO: 114656 - RNA, 21 nt, Artificial Sequence
  Synthetic
uuuuuuaaaacauuauuauau

SEQ ID NO: 114657 - RNA, 22 nt, Artificial Sequence
  Synthetic
auuuuuuaaaacauuauuauau

SEQ ID NO: 114658 - RNA, 23 nt, Artificial Sequence
  Synthetic
uauuuuuuaaaacauuauuauau

SEQ ID NO: 114659 - RNA, 24 nt, Artificial Sequence
  Synthetic
auauuuuuuaaaacauuauuauau

SEQ ID NO: 114660 - RNA, 18 nt, Artificial Sequence
  Synthetic
uacagccaauacuuauau

SEQ ID NO: 114661 - RNA, 21 nt, Artificial Sequence
  Synthetic
agguacagccaauacuuauau

SEQ ID NO: 114662 - RNA, 22 nt, Artificial Sequence
  Synthetic
cagguacagccaauacuuauau

SEQ ID NO: 114663 - RNA, 23 nt, Artificial Sequence
  Synthetic
ucagguacagccaauacuuauau

SEQ ID NO: 114664 - RNA, 24 nt, Artificial Sequence
  Synthetic
cucagguacagccaauacuuauau

SEQ ID NO: 114665 - RNA, 18 nt, Artificial Sequence
  Synthetic
cugaggaugggguuauau

SEQ ID NO: 114666 - RNA, 19 nt, Artificial Sequence
  Synthetic
acugaggaugggguuauau

SEQ ID NO: 114667 - RNA, 22 nt, Artificial Sequence
  Synthetic
uggacugaggaugggguuauau

SEQ ID NO: 114668 - RNA, 23 nt, Artificial Sequence
  Synthetic
cuggacugaggaugggguuauau

SEQ ID NO: 114669 - RNA, 24 nt, Artificial Sequence
  Synthetic
ccuggacugaggaugggguuauau

SEQ ID NO: 114670 - RNA, 18 nt, Artificial Sequence
  Synthetic
uguauauauauguuauau

SEQ ID NO: 114671 - RNA, 19 nt, Artificial Sequence
  Synthetic
uuguauauauauguuauau

SEQ ID NO: 114672 - RNA, 20 nt, Artificial Sequence
  Synthetic
cuuguauauauauguuauau

SEQ ID NO: 114673 - RNA, 21 nt, Artificial Sequence
  Synthetic
acuuguauauauauguuauau

SEQ ID NO: 114674 - RNA, 22 nt, Artificial Sequence
  Synthetic
aacuuguauauauauguuauau

SEQ ID NO: 114675 - RNA, 23 nt, Artificial Sequence
  Synthetic
uaacuuguauauauauguuauau

SEQ ID NO: 114676 - RNA, 24 nt, Artificial Sequence
  Synthetic
auaacuuguauauauauguuauau

SEQ ID NO: 114677 - RNA, 21 nt, Artificial Sequence
  Synthetic
agaaauuaaugaaauuuauau

SEQ ID NO: 114678 - RNA, 22 nt, Artificial Sequence
  Synthetic
uagaaauuaaugaaauuuauau

SEQ ID NO: 114679 - RNA, 23 nt, Artificial Sequence
  Synthetic
uuagaaauuaaugaaauuuauau

SEQ ID NO: 114680 - RNA, 24 nt, Artificial Sequence
  Synthetic
uuuagaaauuaaugaaauuuauau

SEQ ID NO: 114681 - RNA, 21 nt, Artificial Sequence
  Synthetic
ucuaugagaaaaagaaacuau

SEQ ID NO: 114682 - RNA, 22 nt, Artificial Sequence
  Synthetic
cucuaugagaaaaagaaacuau

SEQ ID NO: 114683 - RNA, 24 nt, Artificial Sequence
  Synthetic
ugcucuaugagaaaaagaaacuau

SEQ ID NO: 114684 - RNA, 18 nt, Artificial Sequence
  Synthetic
caagcauuccuaaacuau

SEQ ID NO: 114685 - RNA, 19 nt, Artificial Sequence
  Synthetic
ucaagcauuccuaaacuau

SEQ ID NO: 114686 - RNA, 20 nt, Artificial Sequence
  Synthetic
aucaagcauuccuaaacuau

SEQ ID NO: 114687 - RNA, 21 nt, Artificial Sequence
  Synthetic
uaucaagcauuccuaaacuau

SEQ ID NO: 114688 - RNA, 22 nt, Artificial Sequence
  Synthetic
cuaucaagcauuccuaaacuau

SEQ ID NO: 114689 - RNA, 23 nt, Artificial Sequence
  Synthetic
ccuaucaagcauuccuaaacuau

SEQ ID NO: 114690 - RNA, 24 nt, Artificial Sequence
  Synthetic
cccuaucaagcauuccuaaacuau

SEQ ID NO: 114691 - RNA, 19 nt, Artificial Sequence
  Synthetic
uggccuggcuuucaacuau

SEQ ID NO: 114692 - RNA, 20 nt, Artificial Sequence
  Synthetic
cuggccuggcuuucaacuau

SEQ ID NO: 114693 - RNA, 21 nt, Artificial Sequence
  Synthetic
acuggccuggcuuucaacuau

SEQ ID NO: 114694 - RNA, 23 nt, Artificial Sequence
  Synthetic
agacuggccuggcuuucaacuau

SEQ ID NO: 114695 - RNA, 24 nt, Artificial Sequence
  Synthetic
cagacuggccuggcuuucaacuau

SEQ ID NO: 114696 - RNA, 18 nt, Artificial Sequence
  Synthetic
aaguauuuaccuaacuau

SEQ ID NO: 114697 - RNA, 19 nt, Artificial Sequence
  Synthetic
aaaguauuuaccuaacuau

SEQ ID NO: 114698 - RNA, 20 nt, Artificial Sequence
  Synthetic
aaaaguauuuaccuaacuau

SEQ ID NO: 114699 - RNA, 21 nt, Artificial Sequence
  Synthetic
aaaaaguauuuaccuaacuau

SEQ ID NO: 114700 - RNA, 22 nt, Artificial Sequence
  Synthetic
aaaaaaguauuuaccuaacuau

SEQ ID NO: 114701 - RNA, 23 nt, Artificial Sequence
  Synthetic
aaaaaaaguauuuaccuaacuau

SEQ ID NO: 114702 - RNA, 24 nt, Artificial Sequence
  Synthetic
aaaaaaaaguauuuaccuaacuau

SEQ ID NO: 114703 - RNA, 18 nt, Artificial Sequence
  Synthetic
ugacuguaaguacacuau

SEQ ID NO: 114704 - RNA, 19 nt, Artificial Sequence
  Synthetic
cugacuguaaguacacuau

SEQ ID NO: 114705 - RNA, 20 nt, Artificial Sequence
  Synthetic
ucugacuguaaguacacuau

SEQ ID NO: 114706 - RNA, 21 nt, Artificial Sequence
  Synthetic
uucugacuguaaguacacuau

SEQ ID NO: 114707 - RNA, 23 nt, Artificial Sequence
  Synthetic
uguucugacuguaaguacacuau

SEQ ID NO: 114708 - RNA, 24 nt, Artificial Sequence
  Synthetic
uuguucugacuguaaguacacuau

SEQ ID NO: 114709 - RNA, 18 nt, Artificial Sequence
  Synthetic
uugucaaauuuacacuau

SEQ ID NO: 114710 - RNA, 20 nt, Artificial Sequence
  Synthetic
aguugucaaauuuacacuau

SEQ ID NO: 114711 - RNA, 21 nt, Artificial Sequence
  Synthetic
aaguugucaaauuuacacuau

SEQ ID NO: 114712 - RNA, 22 nt, Artificial Sequence
  Synthetic
aaaguugucaaauuuacacuau

SEQ ID NO: 114713 - RNA, 23 nt, Artificial Sequence
  Synthetic
uaaaguugucaaauuuacacuau

SEQ ID NO: 114714 - RNA, 24 nt, Artificial Sequence
  Synthetic
cuaaaguugucaaauuuacacuau

SEQ ID NO: 114715 - RNA, 18 nt, Artificial Sequence
  Synthetic
uugcaaauuuuacacuau

SEQ ID NO: 114716 - RNA, 19 nt, Artificial Sequence
  Synthetic
auugcaaauuuuacacuau

SEQ ID NO: 114717 - RNA, 20 nt, Artificial Sequence
  Synthetic
uauugcaaauuuuacacuau

SEQ ID NO: 114718 - RNA, 21 nt, Artificial Sequence
  Synthetic
cuauugcaaauuuuacacuau

SEQ ID NO: 114719 - RNA, 22 nt, Artificial Sequence
  Synthetic
acuauugcaaauuuuacacuau

SEQ ID NO: 114720 - RNA, 23 nt, Artificial Sequence
  Synthetic
cacuauugcaaauuuuacacuau

SEQ ID NO: 114721 - RNA, 24 nt, Artificial Sequence
  Synthetic
acacuauugcaaauuuuacacuau

SEQ ID NO: 114722 - RNA, 21 nt, Artificial Sequence
  Synthetic
uaacaaaaacuaucagacuau

SEQ ID NO: 114723 - RNA, 22 nt, Artificial Sequence
  Synthetic
auaacaaaaacuaucagacuau

SEQ ID NO: 114724 - RNA, 23 nt, Artificial Sequence
  Synthetic
aauaacaaaaacuaucagacuau

SEQ ID NO: 114725 - RNA, 24 nt, Artificial Sequence
  Synthetic
aaauaacaaaaacuaucagacuau

SEQ ID NO: 114726 - RNA, 18 nt, Artificial Sequence
  Synthetic
auguaggccaaugacuau

SEQ ID NO: 114727 - RNA, 19 nt, Artificial Sequence
  Synthetic
aauguaggccaaugacuau

SEQ ID NO: 114728 - RNA, 20 nt, Artificial Sequence
  Synthetic
uaauguaggccaaugacuau

SEQ ID NO: 114729 - RNA, 21 nt, Artificial Sequence
  Synthetic
auaauguaggccaaugacuau

SEQ ID NO: 114730 - RNA, 22 nt, Artificial Sequence
  Synthetic
aauaauguaggccaaugacuau

SEQ ID NO: 114731 - RNA, 24 nt, Artificial Sequence
  Synthetic
ugaauaauguaggccaaugacuau

SEQ ID NO: 114732 - RNA, 18 nt, Artificial Sequence
  Synthetic
acucuauucaaauacuau

SEQ ID NO: 114733 - RNA, 19 nt, Artificial Sequence
  Synthetic
cacucuauucaaauacuau

SEQ ID NO: 114734 - RNA, 20 nt, Artificial Sequence
  Synthetic
acacucuauucaaauacuau

SEQ ID NO: 114735 - RNA, 21 nt, Artificial Sequence
  Synthetic
uacacucuauucaaauacuau

SEQ ID NO: 114736 - RNA, 22 nt, Artificial Sequence
  Synthetic
auacacucuauucaaauacuau

SEQ ID NO: 114737 - RNA, 23 nt, Artificial Sequence
  Synthetic
aauacacucuauucaaauacuau

SEQ ID NO: 114738 - RNA, 24 nt, Artificial Sequence
  Synthetic
uaauacacucuauucaaauacuau

SEQ ID NO: 114739 - RNA, 18 nt, Artificial Sequence
  Synthetic
augauuauugaauacuau

SEQ ID NO: 114740 - RNA, 19 nt, Artificial Sequence
  Synthetic
uaugauuauugaauacuau

SEQ ID NO: 114741 - RNA, 20 nt, Artificial Sequence
  Synthetic
uuaugauuauugaauacuau

SEQ ID NO: 114742 - RNA, 21 nt, Artificial Sequence
  Synthetic
uuuaugauuauugaauacuau

SEQ ID NO: 114743 - RNA, 22 nt, Artificial Sequence
  Synthetic
cuuuaugauuauugaauacuau

SEQ ID NO: 114744 - RNA, 23 nt, Artificial Sequence
  Synthetic
ucuuuaugauuauugaauacuau

SEQ ID NO: 114745 - RNA, 24 nt, Artificial Sequence
  Synthetic
aucuuuaugauuauugaauacuau

SEQ ID NO: 114746 - RNA, 18 nt, Artificial Sequence
  Synthetic
uuugagaaaauauacuau

SEQ ID NO: 114747 - RNA, 19 nt, Artificial Sequence
  Synthetic
cuuugagaaaauauacuau

SEQ ID NO: 114748 - RNA, 20 nt, Artificial Sequence
  Synthetic
acuuugagaaaauauacuau

SEQ ID NO: 114749 - RNA, 22 nt, Artificial Sequence
  Synthetic
ugacuuugagaaaauauacuau

SEQ ID NO: 114750 - RNA, 23 nt, Artificial Sequence
  Synthetic
augacuuugagaaaauauacuau

SEQ ID NO: 114751 - RNA, 24 nt, Artificial Sequence
  Synthetic
uaugacuuugagaaaauauacuau

SEQ ID NO: 114752 - RNA, 19 nt, Artificial Sequence
  Synthetic
ugugcuaauacuauacuau

SEQ ID NO: 114753 - RNA, 20 nt, Artificial Sequence
  Synthetic
uugugcuaauacuauacuau

SEQ ID NO: 114754 - RNA, 21 nt, Artificial Sequence
  Synthetic
uuugugcuaauacuauacuau

SEQ ID NO: 114755 - RNA, 22 nt, Artificial Sequence
  Synthetic
uuuugugcuaauacuauacuau

SEQ ID NO: 114756 - RNA, 24 nt, Artificial Sequence
  Synthetic
uguuuugugcuaauacuauacuau

SEQ ID NO: 114757 - RNA, 18 nt, Artificial Sequence
  Synthetic
caauaauuucauuacuau

SEQ ID NO: 114758 - RNA, 19 nt, Artificial Sequence
  Synthetic
ccaauaauuucauuacuau

SEQ ID NO: 114759 - RNA, 21 nt, Artificial Sequence
  Synthetic
ugccaauaauuucauuacuau

SEQ ID NO: 114760 - RNA, 23 nt, Artificial Sequence
  Synthetic
agugccaauaauuucauuacuau

SEQ ID NO: 114761 - RNA, 24 nt, Artificial Sequence
  Synthetic
cagugccaauaauuucauuacuau

SEQ ID NO: 114762 - RNA, 18 nt, Artificial Sequence
  Synthetic
aucuaagggaguuacuau

SEQ ID NO: 114763 - RNA, 19 nt, Artificial Sequence
  Synthetic
uaucuaagggaguuacuau

SEQ ID NO: 114764 - RNA, 20 nt, Artificial Sequence
  Synthetic
cuaucuaagggaguuacuau

SEQ ID NO: 114765 - RNA, 21 nt, Artificial Sequence
  Synthetic
ucuaucuaagggaguuacuau

SEQ ID NO: 114766 - RNA, 22 nt, Artificial Sequence
  Synthetic
aucuaucuaagggaguuacuau

SEQ ID NO: 114767 - RNA, 23 nt, Artificial Sequence
  Synthetic
caucuaucuaagggaguuacuau

SEQ ID NO: 114768 - RNA, 24 nt, Artificial Sequence
  Synthetic
acaucuaucuaagggaguuacuau

SEQ ID NO: 114769 - RNA, 18 nt, Artificial Sequence
  Synthetic
agaaaaaguaguuacuau

SEQ ID NO: 114770 - RNA, 20 nt, Artificial Sequence
  Synthetic
ugagaaaaaguaguuacuau

SEQ ID NO: 114771 - RNA, 21 nt, Artificial Sequence
  Synthetic
uugagaaaaaguaguuacuau

SEQ ID NO: 114772 - RNA, 22 nt, Artificial Sequence
  Synthetic
auugagaaaaaguaguuacuau

SEQ ID NO: 114773 - RNA, 23 nt, Artificial Sequence
  Synthetic
cauugagaaaaaguaguuacuau

SEQ ID NO: 114774 - RNA, 24 nt, Artificial Sequence
  Synthetic
ccauugagaaaaaguaguuacuau

SEQ ID NO: 114775 - RNA, 18 nt, Artificial Sequence
  Synthetic
uugcaacuuugagccuau

SEQ ID NO: 114776 - RNA, 20 nt, Artificial Sequence
  Synthetic
uguugcaacuuugagccuau

SEQ ID NO: 114777 - RNA, 21 nt, Artificial Sequence
  Synthetic
cuguugcaacuuugagccuau

SEQ ID NO: 114778 - RNA, 22 nt, Artificial Sequence
  Synthetic
acuguugcaacuuugagccuau

SEQ ID NO: 114779 - RNA, 23 nt, Artificial Sequence
  Synthetic
uacuguugcaacuuugagccuau

SEQ ID NO: 114780 - RNA, 24 nt, Artificial Sequence
  Synthetic
auacuguugcaacuuugagccuau

SEQ ID NO: 114781 - RNA, 20 nt, Artificial Sequence
  Synthetic
ugguauaaaaaauggccuau

SEQ ID NO: 114782 - RNA, 21 nt, Artificial Sequence
  Synthetic
uugguauaaaaaauggccuau

SEQ ID NO: 114783 - RNA, 22 nt, Artificial Sequence
  Synthetic
cuugguauaaaaaauggccuau

SEQ ID NO: 114784 - RNA, 23 nt, Artificial Sequence
  Synthetic
acuugguauaaaaaauggccuau

SEQ ID NO: 114785 - RNA, 19 nt, Artificial Sequence
  Synthetic
agugcagagaaaugccuau

SEQ ID NO: 114786 - RNA, 20 nt, Artificial Sequence
  Synthetic
aagugcagagaaaugccuau

SEQ ID NO: 114787 - RNA, 21 nt, Artificial Sequence
  Synthetic
aaagugcagagaaaugccuau

SEQ ID NO: 114788 - RNA, 22 nt, Artificial Sequence
  Synthetic
uaaagugcagagaaaugccuau

SEQ ID NO: 114789 - RNA, 23 nt, Artificial Sequence
  Synthetic
uuaaagugcagagaaaugccuau

SEQ ID NO: 114790 - RNA, 24 nt, Artificial Sequence
  Synthetic
uuuaaagugcagagaaaugccuau

SEQ ID NO: 114791 - RNA, 21 nt, Artificial Sequence
  Synthetic
cucuucaggaaugaauccuau

SEQ ID NO: 114792 - RNA, 23 nt, Artificial Sequence
  Synthetic
ugcucuucaggaaugaauccuau

SEQ ID NO: 114793 - RNA, 24 nt, Artificial Sequence
  Synthetic
cugcucuucaggaaugaauccuau

SEQ ID NO: 114794 - RNA, 18 nt, Artificial Sequence
  Synthetic
auacuacccuaauccuau

SEQ ID NO: 114795 - RNA, 19 nt, Artificial Sequence
  Synthetic
cauacuacccuaauccuau

SEQ ID NO: 114796 - RNA, 20 nt, Artificial Sequence
  Synthetic
acauacuacccuaauccuau

SEQ ID NO: 114797 - RNA, 21 nt, Artificial Sequence
  Synthetic
uacauacuacccuaauccuau

SEQ ID NO: 114798 - RNA, 22 nt, Artificial Sequence
  Synthetic
uuacauacuacccuaauccuau

SEQ ID NO: 114799 - RNA, 24 nt, Artificial Sequence
  Synthetic
uguuacauacuacccuaauccuau

SEQ ID NO: 114800 - RNA, 18 nt, Artificial Sequence
  Synthetic
cuaauaugauuauccuau

SEQ ID NO: 114801 - RNA, 19 nt, Artificial Sequence
  Synthetic
acuaauaugauuauccuau

SEQ ID NO: 114802 - RNA, 20 nt, Artificial Sequence
  Synthetic
cacuaauaugauuauccuau

SEQ ID NO: 114803 - RNA, 22 nt, Artificial Sequence
  Synthetic
agcacuaauaugauuauccuau

SEQ ID NO: 114804 - RNA, 23 nt, Artificial Sequence
  Synthetic
aagcacuaauaugauuauccuau

SEQ ID NO: 114805 - RNA, 18 nt, Artificial Sequence
  Synthetic
acaaauuguuaguccuau

SEQ ID NO: 114806 - RNA, 19 nt, Artificial Sequence
  Synthetic
aacaaauuguuaguccuau

SEQ ID NO: 114807 - RNA, 20 nt, Artificial Sequence
  Synthetic
caacaaauuguuaguccuau

SEQ ID NO: 114808 - RNA, 21 nt, Artificial Sequence
  Synthetic
ccaacaaauuguuaguccuau

SEQ ID NO: 114809 - RNA, 22 nt, Artificial Sequence
  Synthetic
uccaacaaauuguuaguccuau

SEQ ID NO: 114810 - RNA, 24 nt, Artificial Sequence
  Synthetic
uguccaacaaauuguuaguccuau

SEQ ID NO: 114811 - RNA, 18 nt, Artificial Sequence
  Synthetic
uaaauguauuuuuccuau

SEQ ID NO: 114812 - RNA, 19 nt, Artificial Sequence
  Synthetic
auaaauguauuuuuccuau

SEQ ID NO: 114813 - RNA, 20 nt, Artificial Sequence
  Synthetic
cauaaauguauuuuuccuau

SEQ ID NO: 114814 - RNA, 22 nt, Artificial Sequence
  Synthetic
agcauaaauguauuuuuccuau

SEQ ID NO: 114815 - RNA, 23 nt, Artificial Sequence
  Synthetic
aagcauaaauguauuuuuccuau

SEQ ID NO: 114816 - RNA, 24 nt, Artificial Sequence
  Synthetic
uaagcauaaauguauuuuuccuau

SEQ ID NO: 114817 - RNA, 18 nt, Artificial Sequence
  Synthetic
cccucacauaacagcuau

SEQ ID NO: 114818 - RNA, 19 nt, Artificial Sequence
  Synthetic
acccucacauaacagcuau

SEQ ID NO: 114819 - RNA, 20 nt, Artificial Sequence
  Synthetic
cacccucacauaacagcuau

SEQ ID NO: 114820 - RNA, 21 nt, Artificial Sequence
  Synthetic
ccacccucacauaacagcuau

SEQ ID NO: 114821 - RNA, 22 nt, Artificial Sequence
  Synthetic
uccacccucacauaacagcuau

SEQ ID NO: 114822 - RNA, 23 nt, Artificial Sequence
  Synthetic
uuccacccucacauaacagcuau

SEQ ID NO: 114823 - RNA, 24 nt, Artificial Sequence
  Synthetic
auuccacccucacauaacagcuau

SEQ ID NO: 114824 - RNA, 18 nt, Artificial Sequence
  Synthetic
uuuuauuuuuccagcuau

SEQ ID NO: 114825 - RNA, 20 nt, Artificial Sequence
  Synthetic
aguuuuauuuuuccagcuau

SEQ ID NO: 114826 - RNA, 21 nt, Artificial Sequence
  Synthetic
uaguuuuauuuuuccagcuau

SEQ ID NO: 114827 - RNA, 22 nt, Artificial Sequence
  Synthetic
auaguuuuauuuuuccagcuau

SEQ ID NO: 114828 - RNA, 23 nt, Artificial Sequence
  Synthetic
cauaguuuuauuuuuccagcuau

SEQ ID NO: 114829 - RNA, 24 nt, Artificial Sequence
  Synthetic
ucauaguuuuauuuuuccagcuau

SEQ ID NO: 114830 - RNA, 18 nt, Artificial Sequence
  Synthetic
cucuugaggaguagcuau

SEQ ID NO: 114831 - RNA, 20 nt, Artificial Sequence
  Synthetic
ugcucuugaggaguagcuau

SEQ ID NO: 114832 - RNA, 21 nt, Artificial Sequence
  Synthetic
cugcucuugaggaguagcuau

SEQ ID NO: 114833 - RNA, 22 nt, Artificial Sequence
  Synthetic
ucugcucuugaggaguagcuau

SEQ ID NO: 114834 - RNA, 23 nt, Artificial Sequence
  Synthetic
aucugcucuugaggaguagcuau

SEQ ID NO: 114835 - RNA, 24 nt, Artificial Sequence
  Synthetic
caucugcucuugaggaguagcuau

SEQ ID NO: 114836 - RNA, 21 nt, Artificial Sequence
  Synthetic
augauuuuuuuuaaaggcuau

SEQ ID NO: 114837 - RNA, 22 nt, Artificial Sequence
  Synthetic
aaugauuuuuuuuaaaggcuau

SEQ ID NO: 114838 - RNA, 23 nt, Artificial Sequence
  Synthetic
aaaugauuuuuuuuaaaggcuau

SEQ ID NO: 114839 - RNA, 24 nt, Artificial Sequence
  Synthetic
aaaaugauuuuuuuuaaaggcuau

SEQ ID NO: 114840 - RNA, 18 nt, Artificial Sequence
  Synthetic
uuauaacaucaaggcuau

SEQ ID NO: 114841 - RNA, 20 nt, Artificial Sequence
  Synthetic
uguuauaacaucaaggcuau

SEQ ID NO: 114842 - RNA, 21 nt, Artificial Sequence
  Synthetic
auguuauaacaucaaggcuau

SEQ ID NO: 114843 - RNA, 22 nt, Artificial Sequence
  Synthetic
uauguuauaacaucaaggcuau

SEQ ID NO: 114844 - RNA, 23 nt, Artificial Sequence
  Synthetic
uuauguuauaacaucaaggcuau

SEQ ID NO: 114845 - RNA, 24 nt, Artificial Sequence
  Synthetic
auuauguuauaacaucaaggcuau

SEQ ID NO: 114846 - RNA, 18 nt, Artificial Sequence
  Synthetic
aauaacucagcaggcuau

SEQ ID NO: 114847 - RNA, 19 nt, Artificial Sequence
  Synthetic
aaauaacucagcaggcuau

SEQ ID NO: 114848 - RNA, 20 nt, Artificial Sequence
  Synthetic
aaaauaacucagcaggcuau

SEQ ID NO: 114849 - RNA, 21 nt, Artificial Sequence
  Synthetic
aaaaauaacucagcaggcuau

SEQ ID NO: 114850 - RNA, 23 nt, Artificial Sequence
  Synthetic
agaaaaauaacucagcaggcuau

SEQ ID NO: 114851 - RNA, 24 nt, Artificial Sequence
  Synthetic
aagaaaaauaacucagcaggcuau

SEQ ID NO: 114852 - RNA, 21 nt, Artificial Sequence
  Synthetic
uccaaaugucucuaaugcuau

SEQ ID NO: 114853 - RNA, 22 nt, Artificial Sequence
  Synthetic
uuccaaaugucucuaaugcuau

SEQ ID NO: 114854 - RNA, 23 nt, Artificial Sequence
  Synthetic
uuuccaaaugucucuaaugcuau

SEQ ID NO: 114855 - RNA, 24 nt, Artificial Sequence
  Synthetic
uuuuccaaaugucucuaaugcuau

SEQ ID NO: 114856 - RNA, 18 nt, Artificial Sequence
  Synthetic
uuuuguagaagaugcuau

SEQ ID NO: 114857 - RNA, 21 nt, Artificial Sequence
  Synthetic
agguuuuguagaagaugcuau

SEQ ID NO: 114858 - RNA, 23 nt, Artificial Sequence
  Synthetic
agagguuuuguagaagaugcuau

SEQ ID NO: 114859 - RNA, 24 nt, Artificial Sequence
  Synthetic
aagagguuuuguagaagaugcuau

SEQ ID NO: 114860 - RNA, 18 nt, Artificial Sequence
  Synthetic
auguggauuaacugcuau

SEQ ID NO: 114861 - RNA, 19 nt, Artificial Sequence
  Synthetic
uauguggauuaacugcuau

SEQ ID NO: 114862 - RNA, 22 nt, Artificial Sequence
  Synthetic
ugguauguggauuaacugcuau

SEQ ID NO: 114863 - RNA, 23 nt, Artificial Sequence
  Synthetic
cugguauguggauuaacugcuau

SEQ ID NO: 114864 - RNA, 24 nt, Artificial Sequence
  Synthetic
ccugguauguggauuaacugcuau

SEQ ID NO: 114865 - RNA, 18 nt, Artificial Sequence
  Synthetic
accccuuaccacugcuau

SEQ ID NO: 114866 - RNA, 19 nt, Artificial Sequence
  Synthetic
uaccccuuaccacugcuau

SEQ ID NO: 114867 - RNA, 20 nt, Artificial Sequence
  Synthetic
uuaccccuuaccacugcuau

SEQ ID NO: 114868 - RNA, 21 nt, Artificial Sequence
  Synthetic
uuuaccccuuaccacugcuau

SEQ ID NO: 114869 - RNA, 22 nt, Artificial Sequence
  Synthetic
cuuuaccccuuaccacugcuau

SEQ ID NO: 114870 - RNA, 23 nt, Artificial Sequence
  Synthetic
ucuuuaccccuuaccacugcuau

SEQ ID NO: 114871 - RNA, 24 nt, Artificial Sequence
  Synthetic
aucuuuaccccuuaccacugcuau

SEQ ID NO: 114872 - RNA, 19 nt, Artificial Sequence
  Synthetic
aggacaacagaccugcuau

SEQ ID NO: 114873 - RNA, 21 nt, Artificial Sequence
  Synthetic
ugaggacaacagaccugcuau

SEQ ID NO: 114874 - RNA, 22 nt, Artificial Sequence
  Synthetic
augaggacaacagaccugcuau

SEQ ID NO: 114875 - RNA, 23 nt, Artificial Sequence
  Synthetic
aaugaggacaacagaccugcuau

SEQ ID NO: 114876 - RNA, 24 nt, Artificial Sequence
  Synthetic
uaaugaggacaacagaccugcuau

SEQ ID NO: 114877 - RNA, 18 nt, Artificial Sequence
  Synthetic
uaucaagugguuugcuau

SEQ ID NO: 114878 - RNA, 20 nt, Artificial Sequence
  Synthetic
uguaucaagugguuugcuau

SEQ ID NO: 114879 - RNA, 21 nt, Artificial Sequence
  Synthetic
uuguaucaagugguuugcuau

SEQ ID NO: 114880 - RNA, 22 nt, Artificial Sequence
  Synthetic
auuguaucaagugguuugcuau

SEQ ID NO: 114881 - RNA, 23 nt, Artificial Sequence
  Synthetic
uauuguaucaagugguuugcuau

SEQ ID NO: 114882 - RNA, 24 nt, Artificial Sequence
  Synthetic
uuauuguaucaagugguuugcuau

SEQ ID NO: 114883 - RNA, 18 nt, Artificial Sequence
  Synthetic
ucaacacacauaaucuau

SEQ ID NO: 114884 - RNA, 19 nt, Artificial Sequence
  Synthetic
uucaacacacauaaucuau

SEQ ID NO: 114885 - RNA, 20 nt, Artificial Sequence
  Synthetic
cuucaacacacauaaucuau

SEQ ID NO: 114886 - RNA, 21 nt, Artificial Sequence
  Synthetic
ucuucaacacacauaaucuau

SEQ ID NO: 114887 - RNA, 22 nt, Artificial Sequence
  Synthetic
aucuucaacacacauaaucuau

SEQ ID NO: 114888 - RNA, 23 nt, Artificial Sequence
  Synthetic
aaucuucaacacacauaaucuau

SEQ ID NO: 114889 - RNA, 24 nt, Artificial Sequence
  Synthetic
uaaucuucaacacacauaaucuau

SEQ ID NO: 114890 - RNA, 19 nt, Artificial Sequence
  Synthetic
agcaugcuuggugaucuau

SEQ ID NO: 114891 - RNA, 20 nt, Artificial Sequence
  Synthetic
uagcaugcuuggugaucuau

SEQ ID NO: 114892 - RNA, 21 nt, Artificial Sequence
  Synthetic
uuagcaugcuuggugaucuau

SEQ ID NO: 114893 - RNA, 22 nt, Artificial Sequence
  Synthetic
uuuagcaugcuuggugaucuau

SEQ ID NO: 114894 - RNA, 23 nt, Artificial Sequence
  Synthetic
auuuagcaugcuuggugaucuau

SEQ ID NO: 114895 - RNA, 24 nt, Artificial Sequence
  Synthetic
aauuuagcaugcuuggugaucuau

SEQ ID NO: 114896 - RNA, 18 nt, Artificial Sequence
  Synthetic
uauaguuuuaaacucuau

SEQ ID NO: 114897 - RNA, 19 nt, Artificial Sequence
  Synthetic
auauaguuuuaaacucuau

SEQ ID NO: 114898 - RNA, 20 nt, Artificial Sequence
  Synthetic
aauauaguuuuaaacucuau

SEQ ID NO: 114899 - RNA, 22 nt, Artificial Sequence
  Synthetic
agaauauaguuuuaaacucuau

SEQ ID NO: 114900 - RNA, 23 nt, Artificial Sequence
  Synthetic
uagaauauaguuuuaaacucuau

SEQ ID NO: 114901 - RNA, 24 nt, Artificial Sequence
  Synthetic
cuagaauauaguuuuaaacucuau

SEQ ID NO: 114902 - RNA, 18 nt, Artificial Sequence
  Synthetic
uaaagaauuauccucuau

SEQ ID NO: 114903 - RNA, 19 nt, Artificial Sequence
  Synthetic
cuaaagaauuauccucuau

SEQ ID NO: 114904 - RNA, 20 nt, Artificial Sequence
  Synthetic
ccuaaagaauuauccucuau

SEQ ID NO: 114905 - RNA, 21 nt, Artificial Sequence
  Synthetic
uccuaaagaauuauccucuau

SEQ ID NO: 114906 - RNA, 22 nt, Artificial Sequence
  Synthetic
uuccuaaagaauuauccucuau

SEQ ID NO: 114907 - RNA, 23 nt, Artificial Sequence
  Synthetic
auuccuaaagaauuauccucuau

SEQ ID NO: 114908 - RNA, 24 nt, Artificial Sequence
  Synthetic
cauuccuaaagaauuauccucuau

SEQ ID NO: 114909 - RNA, 18 nt, Artificial Sequence
  Synthetic
ucuuuacuccuccucuau

SEQ ID NO: 114910 - RNA, 19 nt, Artificial Sequence
  Synthetic
cucuuuacuccuccucuau

SEQ ID NO: 114911 - RNA, 20 nt, Artificial Sequence
  Synthetic
acucuuuacuccuccucuau

SEQ ID NO: 114912 - RNA, 21 nt, Artificial Sequence
  Synthetic
cacucuuuacuccuccucuau

SEQ ID NO: 114913 - RNA, 22 nt, Artificial Sequence
  Synthetic
ccacucuuuacuccuccucuau

SEQ ID NO: 114914 - RNA, 23 nt, Artificial Sequence
  Synthetic
cccacucuuuacuccuccucuau

SEQ ID NO: 114915 - RNA, 24 nt, Artificial Sequence
  Synthetic
ucccacucuuuacuccuccucuau

SEQ ID NO: 114916 - RNA, 18 nt, Artificial Sequence
  Synthetic
aacaagguuuuccucuau

SEQ ID NO: 114917 - RNA, 19 nt, Artificial Sequence
  Synthetic
aaacaagguuuuccucuau

SEQ ID NO: 114918 - RNA, 20 nt, Artificial Sequence
  Synthetic
uaaacaagguuuuccucuau

SEQ ID NO: 114919 - RNA, 21 nt, Artificial Sequence
  Synthetic
auaaacaagguuuuccucuau

SEQ ID NO: 114920 - RNA, 22 nt, Artificial Sequence
  Synthetic
uauaaacaagguuuuccucuau

SEQ ID NO: 114921 - RNA, 23 nt, Artificial Sequence
  Synthetic
cuauaaacaagguuuuccucuau

SEQ ID NO: 114922 - RNA, 24 nt, Artificial Sequence
  Synthetic
acuauaaacaagguuuuccucuau

SEQ ID NO: 114923 - RNA, 19 nt, Artificial Sequence
  Synthetic
agguuuucagaggcucuau

SEQ ID NO: 114924 - RNA, 21 nt, Artificial Sequence
  Synthetic
ugagguuuucagaggcucuau

SEQ ID NO: 114925 - RNA, 22 nt, Artificial Sequence
  Synthetic
uugagguuuucagaggcucuau

SEQ ID NO: 114926 - RNA, 24 nt, Artificial Sequence
  Synthetic
uguugagguuuucagaggcucuau

SEQ ID NO: 114927 - RNA, 18 nt, Artificial Sequence
  Synthetic
ucuuguuuccuucucuau

SEQ ID NO: 114928 - RNA, 20 nt, Artificial Sequence
  Synthetic
agucuuguuuccuucucuau

SEQ ID NO: 114929 - RNA, 21 nt, Artificial Sequence
  Synthetic
aagucuuguuuccuucucuau

SEQ ID NO: 114930 - RNA, 23 nt, Artificial Sequence
  Synthetic
agaagucuuguuuccuucucuau

SEQ ID NO: 114931 - RNA, 24 nt, Artificial Sequence
  Synthetic
aagaagucuuguuuccuucucuau

SEQ ID NO: 114932 - RNA, 18 nt, Artificial Sequence
  Synthetic
aggaaaauguuagucuau

SEQ ID NO: 114933 - RNA, 20 nt, Artificial Sequence
  Synthetic
ugaggaaaauguuagucuau

SEQ ID NO: 114934 - RNA, 21 nt, Artificial Sequence
  Synthetic
augaggaaaauguuagucuau

SEQ ID NO: 114935 - RNA, 22 nt, Artificial Sequence
  Synthetic
caugaggaaaauguuagucuau

SEQ ID NO: 114936 - RNA, 23 nt, Artificial Sequence
  Synthetic
ucaugaggaaaauguuagucuau

SEQ ID NO: 114937 - RNA, 19 nt, Artificial Sequence
  Synthetic
ugaguuacuuccauucuau

SEQ ID NO: 114938 - RNA, 20 nt, Artificial Sequence
  Synthetic
augaguuacuuccauucuau

SEQ ID NO: 114939 - RNA, 21 nt, Artificial Sequence
  Synthetic
uaugaguuacuuccauucuau

SEQ ID NO: 114940 - RNA, 22 nt, Artificial Sequence
  Synthetic
uuaugaguuacuuccauucuau

SEQ ID NO: 114941 - RNA, 23 nt, Artificial Sequence
  Synthetic
auuaugaguuacuuccauucuau

SEQ ID NO: 114942 - RNA, 24 nt, Artificial Sequence
  Synthetic
aauuaugaguuacuuccauucuau

SEQ ID NO: 114943 - RNA, 18 nt, Artificial Sequence
  Synthetic
uuagcugcaaauuucuau

SEQ ID NO: 114944 - RNA, 20 nt, Artificial Sequence
  Synthetic
cguuagcugcaaauuucuau

SEQ ID NO: 114945 - RNA, 21 nt, Artificial Sequence
  Synthetic
acguuagcugcaaauuucuau

SEQ ID NO: 114946 - RNA, 22 nt, Artificial Sequence
  Synthetic
uacguuagcugcaaauuucuau

SEQ ID NO: 114947 - RNA, 23 nt, Artificial Sequence
  Synthetic
auacguuagcugcaaauuucuau

SEQ ID NO: 114948 - RNA, 24 nt, Artificial Sequence
  Synthetic
aauacguuagcugcaaauuucuau

SEQ ID NO: 114949 - RNA, 18 nt, Artificial Sequence
  Synthetic
uuuauauucuguuucuau

SEQ ID NO: 114950 - RNA, 19 nt, Artificial Sequence
  Synthetic
cuuuauauucuguuucuau

SEQ ID NO: 114951 - RNA, 20 nt, Artificial Sequence
  Synthetic
acuuuauauucuguuucuau

SEQ ID NO: 114952 - RNA, 21 nt, Artificial Sequence
  Synthetic
cacuuuauauucuguuucuau

SEQ ID NO: 114953 - RNA, 22 nt, Artificial Sequence
  Synthetic
ccacuuuauauucuguuucuau

SEQ ID NO: 114954 - RNA, 23 nt, Artificial Sequence
  Synthetic
cccacuuuauauucuguuucuau

SEQ ID NO: 114955 - RNA, 24 nt, Artificial Sequence
  Synthetic
acccacuuuauauucuguuucuau

SEQ ID NO: 114956 - RNA, 18 nt, Artificial Sequence
  Synthetic
uaaaccucaguuuucuau

SEQ ID NO: 114957 - RNA, 19 nt, Artificial Sequence
  Synthetic
uuaaaccucaguuuucuau

SEQ ID NO: 114958 - RNA, 20 nt, Artificial Sequence
  Synthetic
cuuaaaccucaguuuucuau

SEQ ID NO: 114959 - RNA, 21 nt, Artificial Sequence
  Synthetic
ucuuaaaccucaguuuucuau

SEQ ID NO: 114960 - RNA, 22 nt, Artificial Sequence
  Synthetic
uucuuaaaccucaguuuucuau

SEQ ID NO: 114961 - RNA, 24 nt, Artificial Sequence
  Synthetic
uguucuuaaaccucaguuuucuau

SEQ ID NO: 114962 - RNA, 18 nt, Artificial Sequence
  Synthetic
uacauggauuaaaaguau

SEQ ID NO: 114963 - RNA, 19 nt, Artificial Sequence
  Synthetic
auacauggauuaaaaguau

SEQ ID NO: 114964 - RNA, 20 nt, Artificial Sequence
  Synthetic
aauacauggauuaaaaguau

SEQ ID NO: 114965 - RNA, 21 nt, Artificial Sequence
  Synthetic
agggggcaaaauauaaaguau

SEQ ID NO: 114966 - RNA, 22 nt, Artificial Sequence
  Synthetic
aagggggcaaaauauaaaguau

SEQ ID NO: 114967 - RNA, 24 nt, Artificial Sequence
  Synthetic
agaagggggcaaaauauaaaguau

SEQ ID NO: 114968 - RNA, 18 nt, Artificial Sequence
  Synthetic
aagggauuuuacaaguau

SEQ ID NO: 114969 - RNA, 20 nt, Artificial Sequence
  Synthetic
agaagggauuuuacaaguau

SEQ ID NO: 114970 - RNA, 21 nt, Artificial Sequence
  Synthetic
uagaagggauuuuacaaguau

SEQ ID NO: 114971 - RNA, 18 nt, Artificial Sequence
  Synthetic
uucccccucaagaaguau

SEQ ID NO: 114972 - RNA, 19 nt, Artificial Sequence
  Synthetic
uuucccccucaagaaguau

SEQ ID NO: 114973 - RNA, 20 nt, Artificial Sequence
  Synthetic
auuucccccucaagaaguau

SEQ ID NO: 114974 - RNA, 21 nt, Artificial Sequence
  Synthetic
aauuucccccucaagaaguau

SEQ ID NO: 114975 - RNA, 23 nt, Artificial Sequence
  Synthetic
ugaauuucccccucaagaaguau

SEQ ID NO: 114976 - RNA, 24 nt, Artificial Sequence
  Synthetic
augaauuucccccucaagaaguau

SEQ ID NO: 114977 - RNA, 19 nt, Artificial Sequence
  Synthetic
agcuauuugagauaaguau

SEQ ID NO: 114978 - RNA, 20 nt, Artificial Sequence
  Synthetic
aagcuauuugagauaaguau

SEQ ID NO: 114979 - RNA, 21 nt, Artificial Sequence
  Synthetic
uaagcuauuugagauaaguau

SEQ ID NO: 114980 - RNA, 22 nt, Artificial Sequence
  Synthetic
auaagcuauuugagauaaguau

SEQ ID NO: 114981 - RNA, 24 nt, Artificial Sequence
  Synthetic
ugauaagcuauuugagauaaguau

SEQ ID NO: 114982 - RNA, 19 nt, Artificial Sequence
  Synthetic
ugauucauucauucaguau

SEQ ID NO: 114983 - RNA, 20 nt, Artificial Sequence
  Synthetic
cugauucauucauucaguau

SEQ ID NO: 114984 - RNA, 21 nt, Artificial Sequence
  Synthetic
acugauucauucauucaguau

SEQ ID NO: 114985 - RNA, 22 nt, Artificial Sequence
  Synthetic
uacugauucauucauucaguau

SEQ ID NO: 114986 - RNA, 23 nt, Artificial Sequence
  Synthetic
auacugauucauucauucaguau

SEQ ID NO: 114987 - RNA, 24 nt, Artificial Sequence
  Synthetic
cauacugauucauucauucaguau

SEQ ID NO: 114988 - RNA, 18 nt, Artificial Sequence
  Synthetic
uuguaggguuuucaguau

SEQ ID NO: 114989 - RNA, 20 nt, Artificial Sequence
  Synthetic
aguuguaggguuuucaguau

SEQ ID NO: 114990 - RNA, 21 nt, Artificial Sequence
  Synthetic
aaguuguaggguuuucaguau

SEQ ID NO: 114991 - RNA, 23 nt, Artificial Sequence
  Synthetic
ugaaguuguaggguuuucaguau

SEQ ID NO: 114992 - RNA, 18 nt, Artificial Sequence
  Synthetic
auuuaaggguaagaguau

SEQ ID NO: 114993 - RNA, 19 nt, Artificial Sequence
  Synthetic
uauuuaaggguaagaguau

SEQ ID NO: 114994 - RNA, 20 nt, Artificial Sequence
  Synthetic
uuauuuaaggguaagaguau

SEQ ID NO: 114995 - RNA, 21 nt, Artificial Sequence
  Synthetic
auuauuuaaggguaagaguau

SEQ ID NO: 114996 - RNA, 22 nt, Artificial Sequence
  Synthetic
uauuauuuaaggguaagaguau

SEQ ID NO: 114997 - RNA, 23 nt, Artificial Sequence
  Synthetic
uuauuauuuaaggguaagaguau

SEQ ID NO: 114998 - RNA, 24 nt, Artificial Sequence
  Synthetic
cuuauuauuuaaggguaagaguau

SEQ ID NO: 114999 - RNA, 18 nt, Artificial Sequence
  Synthetic
uaaugauacagagaguau

SEQ ID NO: 115000 - RNA, 19 nt, Artificial Sequence
  Synthetic
uuaaugauacagagaguau

SEQ ID NO: 115001 - RNA, 22 nt, Artificial Sequence
  Synthetic
ugguuaaugauacagagaguau

SEQ ID NO: 115002 - RNA, 23 nt, Artificial Sequence
  Synthetic
uugguuaaugauacagagaguau

SEQ ID NO: 115003 - RNA, 19 nt, Artificial Sequence
  Synthetic
aguuucccaaucggaguau

SEQ ID NO: 115004 - RNA, 20 nt, Artificial Sequence
  Synthetic
caguuucccaaucggaguau

SEQ ID NO: 115005 - RNA, 21 nt, Artificial Sequence
  Synthetic
ucaguuucccaaucggaguau

SEQ ID NO: 115006 - RNA, 22 nt, Artificial Sequence
  Synthetic
cucaguuucccaaucggaguau

SEQ ID NO: 115007 - RNA, 24 nt, Artificial Sequence
  Synthetic
ugcucaguuucccaaucggaguau

SEQ ID NO: 115008 - RNA, 18 nt, Artificial Sequence
  Synthetic
aauuucaaacaugaguau

SEQ ID NO: 115009 - RNA, 20 nt, Artificial Sequence
  Synthetic
agaauuucaaacaugaguau

SEQ ID NO: 115010 - RNA, 21 nt, Artificial Sequence
  Synthetic
aagaauuucaaacaugaguau

SEQ ID NO: 115011 - RNA, 23 nt, Artificial Sequence
  Synthetic
ugaagaauuucaaacaugaguau

SEQ ID NO: 115012 - RNA, 24 nt, Artificial Sequence
  Synthetic
uugaagaauuucaaacaugaguau

SEQ ID NO: 115013 - RNA, 18 nt, Artificial Sequence
  Synthetic
ccaucacaauaugaguau

SEQ ID NO: 115014 - RNA, 19 nt, Artificial Sequence
  Synthetic
accaucacaauaugaguau

SEQ ID NO: 115015 - RNA, 20 nt, Artificial Sequence
  Synthetic
caccaucacaauaugaguau

SEQ ID NO: 115016 - RNA, 21 nt, Artificial Sequence
  Synthetic
ucaccaucacaauaugaguau

SEQ ID NO: 115017 - RNA, 22 nt, Artificial Sequence
  Synthetic
cucaccaucacaauaugaguau

SEQ ID NO: 115018 - RNA, 19 nt, Artificial Sequence
  Synthetic
ugccuauaucaaauaguau

SEQ ID NO: 115019 - RNA, 20 nt, Artificial Sequence
  Synthetic
cugccuauaucaaauaguau

SEQ ID NO: 115020 - RNA, 21 nt, Artificial Sequence
  Synthetic
ucugccuauaucaaauaguau

SEQ ID NO: 115021 - RNA, 22 nt, Artificial Sequence
  Synthetic
uucugccuauaucaaauaguau

SEQ ID NO: 115022 - RNA, 23 nt, Artificial Sequence
  Synthetic
uuucugccuauaucaaauaguau

SEQ ID NO: 115023 - RNA, 24 nt, Artificial Sequence
  Synthetic
uuuucugccuauaucaaauaguau

SEQ ID NO: 115024 - RNA, 19 nt, Artificial Sequence
  Synthetic
agaagauuguaaauaguau

SEQ ID NO: 115025 - RNA, 20 nt, Artificial Sequence
  Synthetic
uagaagauuguaaauaguau

SEQ ID NO: 115026 - RNA, 21 nt, Artificial Sequence
  Synthetic
cuagaagauuguaaauaguau

SEQ ID NO: 115027 - RNA, 22 nt, Artificial Sequence
  Synthetic
ccuagaagauuguaaauaguau

SEQ ID NO: 115028 - RNA, 23 nt, Artificial Sequence
  Synthetic
uccuagaagauuguaaauaguau

SEQ ID NO: 115029 - RNA, 24 nt, Artificial Sequence
  Synthetic
uuccuagaagauuguaaauaguau

SEQ ID NO: 115030 - RNA, 18 nt, Artificial Sequence
  Synthetic
agacccauaaacuaguau

SEQ ID NO: 115031 - RNA, 19 nt, Artificial Sequence
  Synthetic
uagacccauaaacuaguau

SEQ ID NO: 115032 - RNA, 21 nt, Artificial Sequence
  Synthetic
uguagacccauaaacuaguau

SEQ ID NO: 115033 - RNA, 22 nt, Artificial Sequence
  Synthetic
auguagacccauaaacuaguau

SEQ ID NO: 115034 - RNA, 23 nt, Artificial Sequence
  Synthetic
aauguagacccauaaacuaguau

SEQ ID NO: 115035 - RNA, 24 nt, Artificial Sequence
  Synthetic
uaauguagacccauaaacuaguau

SEQ ID NO: 115036 - RNA, 22 nt, Artificial Sequence
  Synthetic
agugaucucugucuccuaguau

SEQ ID NO: 115037 - RNA, 23 nt, Artificial Sequence
  Synthetic
cagugaucucugucuccuaguau

SEQ ID NO: 115038 - RNA, 24 nt, Artificial Sequence
  Synthetic
ucagugaucucugucuccuaguau

SEQ ID NO: 115039 - RNA, 18 nt, Artificial Sequence
  Synthetic
uugaggcauuauuaguau

SEQ ID NO: 115040 - RNA, 19 nt, Artificial Sequence
  Synthetic
auugaggcauuauuaguau

SEQ ID NO: 115041 - RNA, 21 nt, Artificial Sequence
  Synthetic
ugauugaggcauuauuaguau

SEQ ID NO: 115042 - RNA, 22 nt, Artificial Sequence
  Synthetic
cugauugaggcauuauuaguau

SEQ ID NO: 115043 - RNA, 23 nt, Artificial Sequence
  Synthetic
ccugauugaggcauuauuaguau

SEQ ID NO: 115044 - RNA, 24 nt, Artificial Sequence
  Synthetic
accugauugaggcauuauuaguau

SEQ ID NO: 115045 - RNA, 18 nt, Artificial Sequence
  Synthetic
acaaauaucccuuaguau

SEQ ID NO: 115046 - RNA, 19 nt, Artificial Sequence
  Synthetic
aacaaauaucccuuaguau

SEQ ID NO: 115047 - RNA, 21 nt, Artificial Sequence
  Synthetic
agaacaaauaucccuuaguau

SEQ ID NO: 115048 - RNA, 22 nt, Artificial Sequence
  Synthetic
aagaacaaauaucccuuaguau

SEQ ID NO: 115049 - RNA, 23 nt, Artificial Sequence
  Synthetic
uaagaacaaauaucccuuaguau

SEQ ID NO: 115050 - RNA, 18 nt, Artificial Sequence
  Synthetic
ucugaaagcaguuaguau

SEQ ID NO: 115051 - RNA, 19 nt, Artificial Sequence
  Synthetic
uucugaaagcaguuaguau

SEQ ID NO: 115052 - RNA, 20 nt, Artificial Sequence
  Synthetic
uuucugaaagcaguuaguau

SEQ ID NO: 115053 - RNA, 21 nt, Artificial Sequence
  Synthetic
uuuucugaaagcaguuaguau

SEQ ID NO: 115054 - RNA, 22 nt, Artificial Sequence
  Synthetic
cuuuucugaaagcaguuaguau

SEQ ID NO: 115055 - RNA, 24 nt, Artificial Sequence
  Synthetic
agcuuuucugaaagcaguuaguau

SEQ ID NO: 115056 - RNA, 18 nt, Artificial Sequence
  Synthetic
augguagaagguuaguau

SEQ ID NO: 115057 - RNA, 19 nt, Artificial Sequence
  Synthetic
uaugguagaagguuaguau

SEQ ID NO: 115058 - RNA, 20 nt, Artificial Sequence
  Synthetic
auaugguagaagguuaguau

SEQ ID NO: 115059 - RNA, 21 nt, Artificial Sequence
  Synthetic
uauaugguagaagguuaguau

SEQ ID NO: 115060 - RNA, 22 nt, Artificial Sequence
  Synthetic
uuauaugguagaagguuaguau

SEQ ID NO: 115061 - RNA, 23 nt, Artificial Sequence
  Synthetic
uuuauaugguagaagguuaguau

SEQ ID NO: 115062 - RNA, 18 nt, Artificial Sequence
  Synthetic
agugucuucuuuuaguau

SEQ ID NO: 115063 - RNA, 19 nt, Artificial Sequence
  Synthetic
aagugucuucuuuuaguau

SEQ ID NO: 115064 - RNA, 24 nt, Artificial Sequence
  Synthetic
uggggaagugucuucuuuuaguau

SEQ ID NO: 115065 - RNA, 18 nt, Artificial Sequence
  Synthetic
uauaucauaagagcguau

SEQ ID NO: 115066 - RNA, 19 nt, Artificial Sequence
  Synthetic
uuauaucauaagagcguau

SEQ ID NO: 115067 - RNA, 20 nt, Artificial Sequence
  Synthetic
uuuauaucauaagagcguau

SEQ ID NO: 115068 - RNA, 23 nt, Artificial Sequence
  Synthetic
ugguuuauaucauaagagcguau

SEQ ID NO: 115069 - RNA, 24 nt, Artificial Sequence
  Synthetic
augguuuauaucauaagagcguau

SEQ ID NO: 115070 - RNA, 18 nt, Artificial Sequence
  Synthetic
uauguaaaauguucguau

SEQ ID NO: 115071 - RNA, 19 nt, Artificial Sequence
  Synthetic
uuauguaaaauguucguau

SEQ ID NO: 115072 - RNA, 20 nt, Artificial Sequence
  Synthetic
auuauguaaaauguucguau

SEQ ID NO: 115073 - RNA, 21 nt, Artificial Sequence
  Synthetic
aauuauguaaaauguucguau

SEQ ID NO: 115074 - RNA, 23 nt, Artificial Sequence
  Synthetic
ugaauuauguaaaauguucguau

SEQ ID NO: 115075 - RNA, 24 nt, Artificial Sequence
  Synthetic
augaauuauguaaaauguucguau

SEQ ID NO: 115076 - RNA, 21 nt, Artificial Sequence
  Synthetic
uauauuuauaaaugaagguau

SEQ ID NO: 115077 - RNA, 22 nt, Artificial Sequence
  Synthetic
auauauuuauaaaugaagguau

SEQ ID NO: 115078 - RNA, 23 nt, Artificial Sequence
  Synthetic
uauauauuuauaaaugaagguau

SEQ ID NO: 115079 - RNA, 24 nt, Artificial Sequence
  Synthetic
auauauauuuauaaaugaagguau

SEQ ID NO: 115080 - RNA, 18 nt, Artificial Sequence
  Synthetic
uaaguaccaaacagguau

SEQ ID NO: 115081 - RNA, 19 nt, Artificial Sequence
  Synthetic
uuaaguaccaaacagguau

SEQ ID NO: 115082 - RNA, 20 nt, Artificial Sequence
  Synthetic
uuuaaguaccaaacagguau

SEQ ID NO: 115083 - RNA, 21 nt, Artificial Sequence
  Synthetic
cuuuaaguaccaaacagguau

SEQ ID NO: 115084 - RNA, 22 nt, Artificial Sequence
  Synthetic
ccuuuaaguaccaaacagguau

SEQ ID NO: 115085 - RNA, 23 nt, Artificial Sequence
  Synthetic
uccuuuaaguaccaaacagguau

SEQ ID NO: 115086 - RNA, 24 nt, Artificial Sequence
  Synthetic
uuccuuuaaguaccaaacagguau

SEQ ID NO: 115087 - RNA, 21 nt, Artificial Sequence
  Synthetic
aaaaaaaaauccuucagguau

SEQ ID NO: 115088 - RNA, 22 nt, Artificial Sequence
  Synthetic
caaaaaaaaauccuucagguau

SEQ ID NO: 115089 - RNA, 23 nt, Artificial Sequence
  Synthetic
acaaaaaaaaauccuucagguau

SEQ ID NO: 115090 - RNA, 18 nt, Artificial Sequence
  Synthetic
accacaguuuggagguau

SEQ ID NO: 115091 - RNA, 19 nt, Artificial Sequence
  Synthetic
caccacaguuuggagguau

SEQ ID NO: 115092 - RNA, 20 nt, Artificial Sequence
  Synthetic
acaccacaguuuggagguau

SEQ ID NO: 115093 - RNA, 21 nt, Artificial Sequence
  Synthetic
uacaccacaguuuggagguau

SEQ ID NO: 115094 - RNA, 22 nt, Artificial Sequence
  Synthetic
auacaccacaguuuggagguau

SEQ ID NO: 115095 - RNA, 23 nt, Artificial Sequence
  Synthetic
aauacaccacaguuuggagguau

SEQ ID NO: 115096 - RNA, 18 nt, Artificial Sequence
  Synthetic
aauggucuuccuagguau

SEQ ID NO: 115097 - RNA, 19 nt, Artificial Sequence
  Synthetic
uaauggucuuccuagguau

SEQ ID NO: 115098 - RNA, 20 nt, Artificial Sequence
  Synthetic
auaauggucuuccuagguau

SEQ ID NO: 115099 - RNA, 21 nt, Artificial Sequence
  Synthetic
uauaauggucuuccuagguau

SEQ ID NO: 115100 - RNA, 24 nt, Artificial Sequence
  Synthetic
agguauaauggucuuccuagguau

SEQ ID NO: 115101 - RNA, 18 nt, Artificial Sequence
  Synthetic
accugagagugaggguau

SEQ ID NO: 115102 - RNA, 19 nt, Artificial Sequence
  Synthetic
caccugagagugaggguau

SEQ ID NO: 115103 - RNA, 20 nt, Artificial Sequence
  Synthetic
acaccugagagugaggguau

SEQ ID NO: 115104 - RNA, 21 nt, Artificial Sequence
  Synthetic
aacaccugagagugaggguau

SEQ ID NO: 115105 - RNA, 22 nt, Artificial Sequence
  Synthetic
caacaccugagagugaggguau

SEQ ID NO: 115106 - RNA, 23 nt, Artificial Sequence
  Synthetic
acaacaccugagagugaggguau

SEQ ID NO: 115107 - RNA, 21 nt, Artificial Sequence
  Synthetic
ucagaauggagugguggguau

SEQ ID NO: 115108 - RNA, 22 nt, Artificial Sequence
  Synthetic
cucagaauggagugguggguau

SEQ ID NO: 115109 - RNA, 23 nt, Artificial Sequence
  Synthetic
acucagaauggagugguggguau

SEQ ID NO: 115110 - RNA, 24 nt, Artificial Sequence
  Synthetic
aacucagaauggagugguggguau

SEQ ID NO: 115111 - RNA, 18 nt, Artificial Sequence
  Synthetic
auuauauugcaaugguau

SEQ ID NO: 115112 - RNA, 19 nt, Artificial Sequence
  Synthetic
cauuauauugcaaugguau

SEQ ID NO: 115113 - RNA, 20 nt, Artificial Sequence
  Synthetic
acauuauauugcaaugguau

SEQ ID NO: 115114 - RNA, 22 nt, Artificial Sequence
  Synthetic
agacauuauauugcaaugguau

SEQ ID NO: 115115 - RNA, 23 nt, Artificial Sequence
  Synthetic
uagacauuauauugcaaugguau

SEQ ID NO: 115116 - RNA, 18 nt, Artificial Sequence
  Synthetic
aaaugaguuuaaugguau

SEQ ID NO: 115117 - RNA, 19 nt, Artificial Sequence
  Synthetic
uaaaugaguuuaaugguau

SEQ ID NO: 115118 - RNA, 20 nt, Artificial Sequence
  Synthetic
uuaaaugaguuuaaugguau

SEQ ID NO: 115119 - RNA, 22 nt, Artificial Sequence
  Synthetic
ugaccaaugccccucaugguau

SEQ ID NO: 115120 - RNA, 23 nt, Artificial Sequence
  Synthetic
augaccaaugccccucaugguau

SEQ ID NO: 115121 - RNA, 18 nt, Artificial Sequence
  Synthetic
aagcuaagugccugguau

SEQ ID NO: 115122 - RNA, 19 nt, Artificial Sequence
  Synthetic
uaagcuaagugccugguau

SEQ ID NO: 115123 - RNA, 20 nt, Artificial Sequence
  Synthetic
cuaagcuaagugccugguau

SEQ ID NO: 115124 - RNA, 21 nt, Artificial Sequence
  Synthetic
ccuaagcuaagugccugguau

SEQ ID NO: 115125 - RNA, 23 nt, Artificial Sequence
  Synthetic
ugccuaagcuaagugccugguau

SEQ ID NO: 115126 - RNA, 19 nt, Artificial Sequence
  Synthetic
aguucacaguaucugguau

SEQ ID NO: 115127 - RNA, 20 nt, Artificial Sequence
  Synthetic
uaguucacaguaucugguau

SEQ ID NO: 115128 - RNA, 22 nt, Artificial Sequence
  Synthetic
aguaguucacaguaucugguau

SEQ ID NO: 115129 - RNA, 23 nt, Artificial Sequence
  Synthetic
aaguaguucacaguaucugguau

SEQ ID NO: 115130 - RNA, 24 nt, Artificial Sequence
  Synthetic
uaaguaguucacaguaucugguau

SEQ ID NO: 115131 - RNA, 18 nt, Artificial Sequence
  Synthetic
uauuucagguauugguau

SEQ ID NO: 115132 - RNA, 19 nt, Artificial Sequence
  Synthetic
auauuucagguauugguau

SEQ ID NO: 115133 - RNA, 20 nt, Artificial Sequence
  Synthetic
uauauuucagguauugguau

SEQ ID NO: 115134 - RNA, 21 nt, Artificial Sequence
  Synthetic
uuauauuucagguauugguau

SEQ ID NO: 115135 - RNA, 22 nt, Artificial Sequence
  Synthetic
uuuauauuucagguauugguau

SEQ ID NO: 115136 - RNA, 23 nt, Artificial Sequence
  Synthetic
auuuauauuucagguauugguau

SEQ ID NO: 115137 - RNA, 24 nt, Artificial Sequence
  Synthetic
aauuuauauuucagguauugguau

SEQ ID NO: 115138 - RNA, 20 nt, Artificial Sequence
  Synthetic
aggcaacaaagaacauguau

SEQ ID NO: 115139 - RNA, 21 nt, Artificial Sequence
  Synthetic
aaggcaacaaagaacauguau

SEQ ID NO: 115140 - RNA, 22 nt, Artificial Sequence
  Synthetic
uaaggcaacaaagaacauguau

SEQ ID NO: 115141 - RNA, 23 nt, Artificial Sequence
  Synthetic
auaaggcaacaaagaacauguau

SEQ ID NO: 115142 - RNA, 24 nt, Artificial Sequence
  Synthetic
aauaaggcaacaaagaacauguau

SEQ ID NO: 115143 - RNA, 18 nt, Artificial Sequence
  Synthetic
auccacuuauauauguau

SEQ ID NO: 115144 - RNA, 19 nt, Artificial Sequence
  Synthetic
aauccacuuauauauguau

SEQ ID NO: 115145 - RNA, 20 nt, Artificial Sequence
  Synthetic
aaauccacuuauauauguau

SEQ ID NO: 115146 - RNA, 21 nt, Artificial Sequence
  Synthetic
aaaauccacuuauauauguau

SEQ ID NO: 115147 - RNA, 22 nt, Artificial Sequence
  Synthetic
uaaaauccacuuauauauguau

SEQ ID NO: 115148 - RNA, 23 nt, Artificial Sequence
  Synthetic
auaaaauccacuuauauauguau

SEQ ID NO: 115149 - RNA, 24 nt, Artificial Sequence
  Synthetic
aauaaaauccacuuauauauguau

SEQ ID NO: 115150 - RNA, 19 nt, Artificial Sequence
  Synthetic
agugcaguaugguauguau

SEQ ID NO: 115151 - RNA, 20 nt, Artificial Sequence
  Synthetic
uagugcaguaugguauguau

SEQ ID NO: 115152 - RNA, 21 nt, Artificial Sequence
  Synthetic
auagugcaguaugguauguau

SEQ ID NO: 115153 - RNA, 22 nt, Artificial Sequence
  Synthetic
cauagugcaguaugguauguau

SEQ ID NO: 115154 - RNA, 23 nt, Artificial Sequence
  Synthetic
acauagugcaguaugguauguau

SEQ ID NO: 115155 - RNA, 21 nt, Artificial Sequence
  Synthetic
auaaaaaagauguuacuguau

SEQ ID NO: 115156 - RNA, 22 nt, Artificial Sequence
  Synthetic
aauaaaaaagauguuacuguau

SEQ ID NO: 115157 - RNA, 23 nt, Artificial Sequence
  Synthetic
aaauaaaaaagauguuacuguau

SEQ ID NO: 115158 - RNA, 18 nt, Artificial Sequence
  Synthetic
caaugguauuugcuguau

SEQ ID NO: 115159 - RNA, 20 nt, Artificial Sequence
  Synthetic
ugcaaugguauuugcuguau

SEQ ID NO: 115160 - RNA, 21 nt, Artificial Sequence
  Synthetic
uugcaaugguauuugcuguau

SEQ ID NO: 115161 - RNA, 22 nt, Artificial Sequence
  Synthetic
auugcaaugguauuugcuguau

SEQ ID NO: 115162 - RNA, 23 nt, Artificial Sequence
  Synthetic
uauugcaaugguauuugcuguau

SEQ ID NO: 115163 - RNA, 24 nt, Artificial Sequence
  Synthetic
uuauugcaaugguauuugcuguau

SEQ ID NO: 115164 - RNA, 18 nt, Artificial Sequence
  Synthetic
cccuuuguccaucuguau

SEQ ID NO: 115165 - RNA, 19 nt, Artificial Sequence
  Synthetic
acccuuuguccaucuguau

SEQ ID NO: 115166 - RNA, 20 nt, Artificial Sequence
  Synthetic
cacccuuuguccaucuguau

SEQ ID NO: 115167 - RNA, 21 nt, Artificial Sequence
  Synthetic
acacccuuuguccaucuguau

SEQ ID NO: 115168 - RNA, 22 nt, Artificial Sequence
  Synthetic
aacacccuuuguccaucuguau

SEQ ID NO: 115169 - RNA, 23 nt, Artificial Sequence
  Synthetic
aaacacccuuuguccaucuguau

SEQ ID NO: 115170 - RNA, 24 nt, Artificial Sequence
  Synthetic
aaaacacccuuuguccaucuguau

SEQ ID NO: 115171 - RNA, 18 nt, Artificial Sequence
  Synthetic
caaaauuucuuucuguau

SEQ ID NO: 115172 - RNA, 19 nt, Artificial Sequence
  Synthetic
acaaaauuucuuucuguau

SEQ ID NO: 115173 - RNA, 20 nt, Artificial Sequence
  Synthetic
cacaaaauuucuuucuguau

SEQ ID NO: 115174 - RNA, 21 nt, Artificial Sequence
  Synthetic
acacaaaauuucuuucuguau

SEQ ID NO: 115175 - RNA, 24 nt, Artificial Sequence
  Synthetic
uggacacaaaauuucuuucuguau

SEQ ID NO: 115176 - RNA, 18 nt, Artificial Sequence
  Synthetic
ucuacaugagaaguguau

SEQ ID NO: 115177 - RNA, 19 nt, Artificial Sequence
  Synthetic
cucuacaugagaaguguau

SEQ ID NO: 115178 - RNA, 20 nt, Artificial Sequence
  Synthetic
acucuacaugagaaguguau

SEQ ID NO: 115179 - RNA, 21 nt, Artificial Sequence
  Synthetic
uacucuacaugagaaguguau

SEQ ID NO: 115180 - RNA, 22 nt, Artificial Sequence
  Synthetic
uuacucuacaugagaaguguau

SEQ ID NO: 115181 - RNA, 19 nt, Artificial Sequence
  Synthetic
ugaggaguuuugcuuguau

SEQ ID NO: 115182 - RNA, 22 nt, Artificial Sequence
  Synthetic
cggugaggaguuuugcuuguau

SEQ ID NO: 115183 - RNA, 18 nt, Artificial Sequence
  Synthetic
aggaccagauuguuguau

SEQ ID NO: 115184 - RNA, 19 nt, Artificial Sequence
  Synthetic
uaggaccagauuguuguau

SEQ ID NO: 115185 - RNA, 20 nt, Artificial Sequence
  Synthetic
cuaggaccagauuguuguau

SEQ ID NO: 115186 - RNA, 21 nt, Artificial Sequence
  Synthetic
ucuaggaccagauuguuguau

SEQ ID NO: 115187 - RNA, 22 nt, Artificial Sequence
  Synthetic
uucuaggaccagauuguuguau

SEQ ID NO: 115188 - RNA, 23 nt, Artificial Sequence
  Synthetic
uuucuaggaccagauuguuguau

SEQ ID NO: 115189 - RNA, 24 nt, Artificial Sequence
  Synthetic
cuuucuaggaccagauuguuguau

SEQ ID NO: 115190 - RNA, 22 nt, Artificial Sequence
  Synthetic
agccaggaaguacaauuuguau

SEQ ID NO: 115191 - RNA, 24 nt, Artificial Sequence
  Synthetic
ugagccaggaaguacaauuuguau

SEQ ID NO: 115192 - RNA, 21 nt, Artificial Sequence
  Synthetic
uugcuguuuuacuuuuuguau

SEQ ID NO: 115193 - RNA, 22 nt, Artificial Sequence
  Synthetic
uuugcuguuuuacuuuuuguau

SEQ ID NO: 115194 - RNA, 23 nt, Artificial Sequence
  Synthetic
auuugcuguuuuacuuuuuguau

SEQ ID NO: 115195 - RNA, 24 nt, Artificial Sequence
  Synthetic
uauuugcuguuuuacuuuuuguau

SEQ ID NO: 115196 - RNA, 18 nt, Artificial Sequence
  Synthetic
cauacuuaauaaaauuau

SEQ ID NO: 115197 - RNA, 19 nt, Artificial Sequence
  Synthetic
ccauacuuaauaaaauuau

SEQ ID NO: 115198 - RNA, 20 nt, Artificial Sequence
  Synthetic
accauacuuaauaaaauuau

SEQ ID NO: 115199 - RNA, 21 nt, Artificial Sequence
  Synthetic
caccauacuuaauaaaauuau

SEQ ID NO: 115200 - RNA, 22 nt, Artificial Sequence
  Synthetic
ucaccauacuuaauaaaauuau

SEQ ID NO: 115201 - RNA, 23 nt, Artificial Sequence
  Synthetic
uucaccauacuuaauaaaauuau

SEQ ID NO: 115202 - RNA, 24 nt, Artificial Sequence
  Synthetic
uuucaccauacuuaauaaaauuau

SEQ ID NO: 115203 - RNA, 21 nt, Artificial Sequence
  Synthetic
aagaaacaaaccuaaaauuau

SEQ ID NO: 115204 - RNA, 24 nt, Artificial Sequence
  Synthetic
uggaagaaacaaaccuaaaauuau

SEQ ID NO: 115205 - RNA, 18 nt, Artificial Sequence
  Synthetic
aauugguaguaaaauuau

SEQ ID NO: 115206 - RNA, 21 nt, Artificial Sequence
  Synthetic
uggaauugguaguaaaauuau

SEQ ID NO: 115207 - RNA, 22 nt, Artificial Sequence
  Synthetic
auggaauugguaguaaaauuau

SEQ ID NO: 115208 - RNA, 23 nt, Artificial Sequence
  Synthetic
aauggaauugguaguaaaauuau

SEQ ID NO: 115209 - RNA, 24 nt, Artificial Sequence
  Synthetic
aaauggaauugguaguaaaauuau

SEQ ID NO: 115210 - RNA, 18 nt, Artificial Sequence
  Synthetic
ucaguguaguaaaauuau

SEQ ID NO: 115211 - RNA, 19 nt, Artificial Sequence
  Synthetic
uucaguguaguaaaauuau

SEQ ID NO: 115212 - RNA, 21 nt, Artificial Sequence
  Synthetic
uguucaguguaguaaaauuau

SEQ ID NO: 115213 - RNA, 22 nt, Artificial Sequence
  Synthetic
auguucaguguaguaaaauuau

SEQ ID NO: 115214 - RNA, 23 nt, Artificial Sequence
  Synthetic
aauguucaguguaguaaaauuau

SEQ ID NO: 115215 - RNA, 24 nt, Artificial Sequence
  Synthetic
uaauguucaguguaguaaaauuau

SEQ ID NO: 115216 - RNA, 18 nt, Artificial Sequence
  Synthetic
cauuagaucucaaauuau

SEQ ID NO: 115217 - RNA, 19 nt, Artificial Sequence
  Synthetic
acauuagaucucaaauuau

SEQ ID NO: 115218 - RNA, 20 nt, Artificial Sequence
  Synthetic
aacauuagaucucaaauuau

SEQ ID NO: 115219 - RNA, 18 nt, Artificial Sequence
  Synthetic
aagaaguucugaaauuau

SEQ ID NO: 115220 - RNA, 20 nt, Artificial Sequence
  Synthetic
agaagaaguucugaaauuau

SEQ ID NO: 115221 - RNA, 23 nt, Artificial Sequence
  Synthetic
uggagaagaaguucugaaauuau

SEQ ID NO: 115222 - RNA, 24 nt, Artificial Sequence
  Synthetic
uuggagaagaaguucugaaauuau

SEQ ID NO: 115223 - RNA, 18 nt, Artificial Sequence
  Synthetic
uuguuuuucuagaauuau

SEQ ID NO: 115224 - RNA, 19 nt, Artificial Sequence
  Synthetic
cuuguuuuucuagaauuau

SEQ ID NO: 115225 - RNA, 20 nt, Artificial Sequence
  Synthetic
ccuuguuuuucuagaauuau

SEQ ID NO: 115226 - RNA, 21 nt, Artificial Sequence
  Synthetic
accuuguuuuucuagaauuau

SEQ ID NO: 115227 - RNA, 22 nt, Artificial Sequence
  Synthetic
aaccuuguuuuucuagaauuau

SEQ ID NO: 115228 - RNA, 23 nt, Artificial Sequence
  Synthetic
caaccuuguuuuucuagaauuau

SEQ ID NO: 115229 - RNA, 24 nt, Artificial Sequence
  Synthetic
acaaccuuguuuuucuagaauuau

SEQ ID NO: 115230 - RNA, 19 nt, Artificial Sequence
  Synthetic
uguauucuugaauaauuau

SEQ ID NO: 115231 - RNA, 20 nt, Artificial Sequence
  Synthetic
cuguauucuugaauaauuau

SEQ ID NO: 115232 - RNA, 21 nt, Artificial Sequence
  Synthetic
ccuguauucuugaauaauuau

SEQ ID NO: 115233 - RNA, 24 nt, Artificial Sequence
  Synthetic
uggccuguauucuugaauaauuau

SEQ ID NO: 115234 - RNA, 18 nt, Artificial Sequence
  Synthetic
cuggcuuguuuuaauuau

SEQ ID NO: 115235 - RNA, 19 nt, Artificial Sequence
  Synthetic
ucuggcuuguuuuaauuau

SEQ ID NO: 115236 - RNA, 20 nt, Artificial Sequence
  Synthetic
cucuggcuuguuuuaauuau

SEQ ID NO: 115237 - RNA, 21 nt, Artificial Sequence
  Synthetic
ccucuggcuuguuuuaauuau

SEQ ID NO: 115238 - RNA, 22 nt, Artificial Sequence
  Synthetic
cccucuggcuuguuuuaauuau

SEQ ID NO: 115239 - RNA, 23 nt, Artificial Sequence
  Synthetic
ucccucuggcuuguuuuaauuau

SEQ ID NO: 115240 - RNA, 24 nt, Artificial Sequence
  Synthetic
uucccucuggcuuguuuuaauuau

SEQ ID NO: 115241 - RNA, 18 nt, Artificial Sequence
  Synthetic
uucuauaacuaacauuau

SEQ ID NO: 115242 - RNA, 19 nt, Artificial Sequence
  Synthetic
cuucuauaacuaacauuau

SEQ ID NO: 115243 - RNA, 20 nt, Artificial Sequence
  Synthetic
ccuucuauaacuaacauuau

SEQ ID NO: 115244 - RNA, 21 nt, Artificial Sequence
  Synthetic
cccuucuauaacuaacauuau

SEQ ID NO: 115245 - RNA, 23 nt, Artificial Sequence
  Synthetic
ugcccuucuauaacuaacauuau

SEQ ID NO: 115246 - RNA, 18 nt, Artificial Sequence
  Synthetic
uccuaaacuuuccauuau

SEQ ID NO: 115247 - RNA, 19 nt, Artificial Sequence
  Synthetic
cuccuaaacuuuccauuau

SEQ ID NO: 115248 - RNA, 20 nt, Artificial Sequence
  Synthetic
ucuccuaaacuuuccauuau

SEQ ID NO: 115249 - RNA, 21 nt, Artificial Sequence
  Synthetic
uucuccuaaacuuuccauuau

SEQ ID NO: 115250 - RNA, 22 nt, Artificial Sequence
  Synthetic
uuucuccuaaacuuuccauuau

SEQ ID NO: 115251 - RNA, 23 nt, Artificial Sequence
  Synthetic
auuucuccuaaacuuuccauuau

SEQ ID NO: 115252 - RNA, 24 nt, Artificial Sequence
  Synthetic
aauuucuccuaaacuuuccauuau

SEQ ID NO: 115253 - RNA, 19 nt, Artificial Sequence
  Synthetic
aguuaaauauaaucauuau

SEQ ID NO: 115254 - RNA, 20 nt, Artificial Sequence
  Synthetic
caguuaaauauaaucauuau

SEQ ID NO: 115255 - RNA, 21 nt, Artificial Sequence
  Synthetic
ucaguuaaauauaaucauuau

SEQ ID NO: 115256 - RNA, 22 nt, Artificial Sequence
  Synthetic
uucaguuaaauauaaucauuau

SEQ ID NO: 115257 - RNA, 23 nt, Artificial Sequence
  Synthetic
cuucaguuaaauauaaucauuau

SEQ ID NO: 115258 - RNA, 24 nt, Artificial Sequence
  Synthetic
ucuucaguuaaauauaaucauuau

SEQ ID NO: 115259 - RNA, 18 nt, Artificial Sequence
  Synthetic
cccuccguaggucauuau

SEQ ID NO: 115260 - RNA, 19 nt, Artificial Sequence
  Synthetic
acccuccguaggucauuau

SEQ ID NO: 115261 - RNA, 20 nt, Artificial Sequence
  Synthetic
uacccuccguaggucauuau

SEQ ID NO: 115262 - RNA, 21 nt, Artificial Sequence
  Synthetic
auacccuccguaggucauuau

SEQ ID NO: 115263 - RNA, 22 nt, Artificial Sequence
  Synthetic
cauacccuccguaggucauuau

SEQ ID NO: 115264 - RNA, 23 nt, Artificial Sequence
  Synthetic
ccauacccuccguaggucauuau

SEQ ID NO: 115265 - RNA, 18 nt, Artificial Sequence
  Synthetic
accucucagauucauuau

SEQ ID NO: 115266 - RNA, 19 nt, Artificial Sequence
  Synthetic
uaccucucagauucauuau

SEQ ID NO: 115267 - RNA, 20 nt, Artificial Sequence
  Synthetic
cuaccucucagauucauuau

SEQ ID NO: 115268 - RNA, 21 nt, Artificial Sequence
  Synthetic
ucuaccucucagauucauuau

SEQ ID NO: 115269 - RNA, 22 nt, Artificial Sequence
  Synthetic
cucuaccucucagauucauuau

SEQ ID NO: 115270 - RNA, 23 nt, Artificial Sequence
  Synthetic
ucucuaccucucagauucauuau

SEQ ID NO: 115271 - RNA, 18 nt, Artificial Sequence
  Synthetic
aauucagugcaagauuau

SEQ ID NO: 115272 - RNA, 20 nt, Artificial Sequence
  Synthetic
agaauucagugcaagauuau

SEQ ID NO: 115273 - RNA, 21 nt, Artificial Sequence
  Synthetic
aagaauucagugcaagauuau

SEQ ID NO: 115274 - RNA, 22 nt, Artificial Sequence
  Synthetic
uaagaauucagugcaagauuau

SEQ ID NO: 115275 - RNA, 24 nt, Artificial Sequence
  Synthetic
uguaagaauucagugcaagauuau

SEQ ID NO: 115276 - RNA, 18 nt, Artificial Sequence
  Synthetic
ugugaaaacuaagauuau

SEQ ID NO: 115277 - RNA, 19 nt, Artificial Sequence
  Synthetic
augugaaaacuaagauuau

SEQ ID NO: 115278 - RNA, 20 nt, Artificial Sequence
  Synthetic
aaugugaaaacuaagauuau

SEQ ID NO: 115279 - RNA, 18 nt, Artificial Sequence
  Synthetic
aucuuucugacagauuau

SEQ ID NO: 115280 - RNA, 19 nt, Artificial Sequence
  Synthetic
uaucuuucugacagauuau

SEQ ID NO: 115281 - RNA, 20 nt, Artificial Sequence
  Synthetic
uuaucuuucugacagauuau

SEQ ID NO: 115282 - RNA, 21 nt, Artificial Sequence
  Synthetic
uuuaucuuucugacagauuau

SEQ ID NO: 115283 - RNA, 22 nt, Artificial Sequence
  Synthetic
uuuuaucuuucugacagauuau

SEQ ID NO: 115284 - RNA, 23 nt, Artificial Sequence
  Synthetic
uuuuuaucuuucugacagauuau

SEQ ID NO: 115285 - RNA, 19 nt, Artificial Sequence
  Synthetic
uggcuaacucugagauuau

SEQ ID NO: 115286 - RNA, 20 nt, Artificial Sequence
  Synthetic
auggcuaacucugagauuau

SEQ ID NO: 115287 - RNA, 21 nt, Artificial Sequence
  Synthetic
uauggcuaacucugagauuau

SEQ ID NO: 115288 - RNA, 22 nt, Artificial Sequence
  Synthetic
cuauggcuaacucugagauuau

SEQ ID NO: 115289 - RNA, 23 nt, Artificial Sequence
  Synthetic
ucuauggcuaacucugagauuau

SEQ ID NO: 115290 - RNA, 24 nt, Artificial Sequence
  Synthetic
aucuauggcuaacucugagauuau

SEQ ID NO: 115291 - RNA, 22 nt, Artificial Sequence
  Synthetic
agagaaggaaauagaauauuau

SEQ ID NO: 115292 - RNA, 23 nt, Artificial Sequence
  Synthetic
cagagaaggaaauagaauauuau

SEQ ID NO: 115293 - RNA, 24 nt, Artificial Sequence
  Synthetic
ccagagaaggaaauagaauauuau

SEQ ID NO: 115294 - RNA, 21 nt, Artificial Sequence
  Synthetic
aauuuuuaaaaugaauauuau

SEQ ID NO: 115295 - RNA, 22 nt, Artificial Sequence
  Synthetic
aaauuuuuaaaaugaauauuau

SEQ ID NO: 115296 - RNA, 23 nt, Artificial Sequence
  Synthetic
aaaauuuuuaaaaugaauauuau

SEQ ID NO: 115297 - RNA, 24 nt, Artificial Sequence
  Synthetic
uaaaauuuuuaaaaugaauauuau

SEQ ID NO: 115298 - RNA, 18 nt, Artificial Sequence
  Synthetic
ugauuucacuaauauuau

SEQ ID NO: 115299 - RNA, 19 nt, Artificial Sequence
  Synthetic
augauuucacuaauauuau

SEQ ID NO: 115300 - RNA, 20 nt, Artificial Sequence
  Synthetic
caugauuucacuaauauuau

SEQ ID NO: 115301 - RNA, 21 nt, Artificial Sequence
  Synthetic
acaugauuucacuaauauuau

SEQ ID NO: 115302 - RNA, 23 nt, Artificial Sequence
  Synthetic
ugacaugauuucacuaauauuau

SEQ ID NO: 115303 - RNA, 24 nt, Artificial Sequence
  Synthetic
cugacaugauuucacuaauauuau

SEQ ID NO: 115304 - RNA, 18 nt, Artificial Sequence
  Synthetic
uuaaaauccaccuauuau

SEQ ID NO: 115305 - RNA, 19 nt, Artificial Sequence
  Synthetic
auuaaaauccaccuauuau

SEQ ID NO: 115306 - RNA, 20 nt, Artificial Sequence
  Synthetic
uauuaaaauccaccuauuau

SEQ ID NO: 115307 - RNA, 21 nt, Artificial Sequence
  Synthetic
auauuaaaauccaccuauuau

SEQ ID NO: 115308 - RNA, 22 nt, Artificial Sequence
  Synthetic
aauauuaaaauccaccuauuau

SEQ ID NO: 115309 - RNA, 24 nt, Artificial Sequence
  Synthetic
ugaauauuaaaauccaccuauuau

SEQ ID NO: 115310 - RNA, 21 nt, Artificial Sequence
  Synthetic
uuuauuuuuaacaucuauuau

SEQ ID NO: 115311 - RNA, 22 nt, Artificial Sequence
  Synthetic
uuuuauuuuuaacaucuauuau

SEQ ID NO: 115312 - RNA, 24 nt, Artificial Sequence
  Synthetic
uguuuuauuuuuaacaucuauuau

SEQ ID NO: 115313 - RNA, 18 nt, Artificial Sequence
  Synthetic
cuguaagagaucuauuau

SEQ ID NO: 115314 - RNA, 19 nt, Artificial Sequence
  Synthetic
ucuguaagagaucuauuau

SEQ ID NO: 115315 - RNA, 20 nt, Artificial Sequence
  Synthetic
aucuguaagagaucuauuau

SEQ ID NO: 115316 - RNA, 21 nt, Artificial Sequence
  Synthetic
caucuguaagagaucuauuau

SEQ ID NO: 115317 - RNA, 22 nt, Artificial Sequence
  Synthetic
ucaucuguaagagaucuauuau

SEQ ID NO: 115318 - RNA, 23 nt, Artificial Sequence
  Synthetic
cucaucuguaagagaucuauuau

SEQ ID NO: 115319 - RNA, 24 nt, Artificial Sequence
  Synthetic
ccucaucuguaagagaucuauuau

SEQ ID NO: 115320 - RNA, 18 nt, Artificial Sequence
  Synthetic
ugcagaugguaguauuau

SEQ ID NO: 115321 - RNA, 19 nt, Artificial Sequence
  Synthetic
uugcagaugguaguauuau

SEQ ID NO: 115322 - RNA, 20 nt, Artificial Sequence
  Synthetic
auugcagaugguaguauuau

SEQ ID NO: 115323 - RNA, 21 nt, Artificial Sequence
  Synthetic
cauugcagaugguaguauuau

SEQ ID NO: 115324 - RNA, 22 nt, Artificial Sequence
  Synthetic
acauugcagaugguaguauuau

SEQ ID NO: 115325 - RNA, 23 nt, Artificial Sequence
  Synthetic
cacauugcagaugguaguauuau

SEQ ID NO: 115326 - RNA, 24 nt, Artificial Sequence
  Synthetic
ccacauugcagaugguaguauuau

SEQ ID NO: 115327 - RNA, 18 nt, Artificial Sequence
  Synthetic
acauaagaaugguauuau

SEQ ID NO: 115328 - RNA, 19 nt, Artificial Sequence
  Synthetic
aacauaagaaugguauuau

SEQ ID NO: 115329 - RNA, 20 nt, Artificial Sequence
  Synthetic
aaacauaagaaugguauuau

SEQ ID NO: 115330 - RNA, 21 nt, Artificial Sequence
  Synthetic
aaaacauaagaaugguauuau

SEQ ID NO: 115331 - RNA, 19 nt, Artificial Sequence
  Synthetic
agauauuaucauguauuau

SEQ ID NO: 115332 - RNA, 20 nt, Artificial Sequence
  Synthetic
cagauauuaucauguauuau

SEQ ID NO: 115333 - RNA, 22 nt, Artificial Sequence
  Synthetic
cgcagauauuaucauguauuau

SEQ ID NO: 115334 - RNA, 23 nt, Artificial Sequence
  Synthetic
acgcagauauuaucauguauuau

SEQ ID NO: 115335 - RNA, 24 nt, Artificial Sequence
  Synthetic
aacgcagauauuaucauguauuau

SEQ ID NO: 115336 - RNA, 18 nt, Artificial Sequence
  Synthetic
uggcaaaguuuguauuau

SEQ ID NO: 115337 - RNA, 19 nt, Artificial Sequence
  Synthetic
cuggcaaaguuuguauuau

SEQ ID NO: 115338 - RNA, 21 nt, Artificial Sequence
  Synthetic
agcuggcaaaguuuguauuau

SEQ ID NO: 115339 - RNA, 22 nt, Artificial Sequence
  Synthetic
aagcuggcaaaguuuguauuau

SEQ ID NO: 115340 - RNA, 23 nt, Artificial Sequence
  Synthetic
uaagcuggcaaaguuuguauuau

SEQ ID NO: 115341 - RNA, 24 nt, Artificial Sequence
  Synthetic
uuaagcuggcaaaguuuguauuau

SEQ ID NO: 115342 - RNA, 21 nt, Artificial Sequence
  Synthetic
acagagaaaacacauuauuau

SEQ ID NO: 115343 - RNA, 22 nt, Artificial Sequence
  Synthetic
aacagagaaaacacauuauuau

SEQ ID NO: 115344 - RNA, 23 nt, Artificial Sequence
  Synthetic
aaacagagaaaacacauuauuau

SEQ ID NO: 115345 - RNA, 24 nt, Artificial Sequence
  Synthetic
uaaacagagaaaacacauuauuau

SEQ ID NO: 115346 - RNA, 19 nt, Artificial Sequence
  Synthetic
uguuuucuguuauuauuau

SEQ ID NO: 115347 - RNA, 20 nt, Artificial Sequence
  Synthetic
uuguuuucuguuauuauuau

SEQ ID NO: 115348 - RNA, 21 nt, Artificial Sequence
  Synthetic
uuuguuuucuguuauuauuau

SEQ ID NO: 115349 - RNA, 22 nt, Artificial Sequence
  Synthetic
cuuuguuuucuguuauuauuau

SEQ ID NO: 115350 - RNA, 23 nt, Artificial Sequence
  Synthetic
ccuuuguuuucuguuauuauuau

SEQ ID NO: 115351 - RNA, 24 nt, Artificial Sequence
  Synthetic
cccuuuguuuucuguuauuauuau

SEQ ID NO: 115352 - RNA, 18 nt, Artificial Sequence
  Synthetic
ccuggaauguuuuauuau

SEQ ID NO: 115353 - RNA, 19 nt, Artificial Sequence
  Synthetic
accuggaauguuuuauuau

SEQ ID NO: 115354 - RNA, 20 nt, Artificial Sequence
  Synthetic
uaccuggaauguuuuauuau

SEQ ID NO: 115355 - RNA, 21 nt, Artificial Sequence
  Synthetic
auaccuggaauguuuuauuau

SEQ ID NO: 115356 - RNA, 22 nt, Artificial Sequence
  Synthetic
aauaccuggaauguuuuauuau

SEQ ID NO: 115357 - RNA, 23 nt, Artificial Sequence
  Synthetic
uaauaccuggaauguuuuauuau

SEQ ID NO: 115358 - RNA, 24 nt, Artificial Sequence
  Synthetic
cuaauaccuggaauguuuuauuau

SEQ ID NO: 115359 - RNA, 18 nt, Artificial Sequence
  Synthetic
auacuaaacagaacuuau

SEQ ID NO: 115360 - RNA, 20 nt, Artificial Sequence
  Synthetic
agauacuaaacagaacuuau

SEQ ID NO: 115361 - RNA, 21 nt, Artificial Sequence
  Synthetic
aagauacuaaacagaacuuau

SEQ ID NO: 115362 - RNA, 22 nt, Artificial Sequence
  Synthetic
aaagauacuaaacagaacuuau

SEQ ID NO: 115363 - RNA, 23 nt, Artificial Sequence
  Synthetic
uaaagauacuaaacagaacuuau

SEQ ID NO: 115364 - RNA, 24 nt, Artificial Sequence
  Synthetic
uuaaagauacuaaacagaacuuau

SEQ ID NO: 115365 - RNA, 18 nt, Artificial Sequence
  Synthetic
uugaauuuaacuacuuau

SEQ ID NO: 115366 - RNA, 19 nt, Artificial Sequence
  Synthetic
cuugaauuuaacuacuuau

SEQ ID NO: 115367 - RNA, 20 nt, Artificial Sequence
  Synthetic
ucuugaauuuaacuacuuau

SEQ ID NO: 115368 - RNA, 21 nt, Artificial Sequence
  Synthetic
aucuugaauuuaacuacuuau

SEQ ID NO: 115369 - RNA, 22 nt, Artificial Sequence
  Synthetic
caucuugaauuuaacuacuuau

SEQ ID NO: 115370 - RNA, 23 nt, Artificial Sequence
  Synthetic
ccaucuugaauuuaacuacuuau

SEQ ID NO: 115371 - RNA, 24 nt, Artificial Sequence
  Synthetic
accaucuugaauuuaacuacuuau

SEQ ID NO: 115372 - RNA, 21 nt, Artificial Sequence
  Synthetic
uuuacauuuauuuuuacuuau

SEQ ID NO: 115373 - RNA, 22 nt, Artificial Sequence
  Synthetic
auuuacauuuauuuuuacuuau

SEQ ID NO: 115374 - RNA, 23 nt, Artificial Sequence
  Synthetic
aauuuacauuuauuuuuacuuau

SEQ ID NO: 115375 - RNA, 24 nt, Artificial Sequence
  Synthetic
uaauuuacauuuauuuuuacuuau

SEQ ID NO: 115376 - RNA, 18 nt, Artificial Sequence
  Synthetic
ccacagucuuggccuuau

SEQ ID NO: 115377 - RNA, 19 nt, Artificial Sequence
  Synthetic
cccacagucuuggccuuau

SEQ ID NO: 115378 - RNA, 20 nt, Artificial Sequence
  Synthetic
acccacagucuuggccuuau

SEQ ID NO: 115379 - RNA, 23 nt, Artificial Sequence
  Synthetic
uggacccacagucuuggccuuau

SEQ ID NO: 115380 - RNA, 24 nt, Artificial Sequence
  Synthetic
uuggacccacagucuuggccuuau

SEQ ID NO: 115381 - RNA, 18 nt, Artificial Sequence
  Synthetic
uagcaucuacguccuuau

SEQ ID NO: 115382 - RNA, 19 nt, Artificial Sequence
  Synthetic
uuagcaucuacguccuuau

SEQ ID NO: 115383 - RNA, 21 nt, Artificial Sequence
  Synthetic
aguuagcaucuacguccuuau

SEQ ID NO: 115384 - RNA, 22 nt, Artificial Sequence
  Synthetic
aaguuagcaucuacguccuuau

SEQ ID NO: 115385 - RNA, 23 nt, Artificial Sequence
  Synthetic
aaaguuagcaucuacguccuuau

SEQ ID NO: 115386 - RNA, 24 nt, Artificial Sequence
  Synthetic
aaaaguuagcaucuacguccuuau

SEQ ID NO: 115387 - RNA, 18 nt, Artificial Sequence
  Synthetic
aaacauaaacuuccuuau

SEQ ID NO: 115388 - RNA, 19 nt, Artificial Sequence
  Synthetic
caaacauaaacuuccuuau

SEQ ID NO: 115389 - RNA, 22 nt, Artificial Sequence
  Synthetic
uggcaaacauaaacuuccuuau

SEQ ID NO: 115390 - RNA, 23 nt, Artificial Sequence
  Synthetic
auggcaaacauaaacuuccuuau

SEQ ID NO: 115391 - RNA, 24 nt, Artificial Sequence
  Synthetic
aauggcaaacauaaacuuccuuau

SEQ ID NO: 115392 - RNA, 18 nt, Artificial Sequence
  Synthetic
auacuauucuuuccuuau

SEQ ID NO: 115393 - RNA, 19 nt, Artificial Sequence
  Synthetic
uauacuauucuuuccuuau

SEQ ID NO: 115394 - RNA, 21 nt, Artificial Sequence
  Synthetic
aguauacuauucuuuccuuau

SEQ ID NO: 115395 - RNA, 22 nt, Artificial Sequence
  Synthetic
uaguauacuauucuuuccuuau

SEQ ID NO: 115396 - RNA, 23 nt, Artificial Sequence
  Synthetic
uuaguauacuauucuuuccuuau

SEQ ID NO: 115397 - RNA, 24 nt, Artificial Sequence
  Synthetic
auuaguauacuauucuuuccuuau

SEQ ID NO: 115398 - RNA, 18 nt, Artificial Sequence
  Synthetic
agguaugucucugcuuau

SEQ ID NO: 115399 - RNA, 19 nt, Artificial Sequence
  Synthetic
aagguaugucucugcuuau

SEQ ID NO: 115400 - RNA, 20 nt, Artificial Sequence
  Synthetic
aaagguaugucucugcuuau

SEQ ID NO: 115401 - RNA, 21 nt, Artificial Sequence
  Synthetic
uaaagguaugucucugcuuau

SEQ ID NO: 115402 - RNA, 22 nt, Artificial Sequence
  Synthetic
cuaaagguaugucucugcuuau

SEQ ID NO: 115403 - RNA, 23 nt, Artificial Sequence
  Synthetic
acuaaagguaugucucugcuuau

SEQ ID NO: 115404 - RNA, 24 nt, Artificial Sequence
  Synthetic
cacuaaagguaugucucugcuuau

SEQ ID NO: 115405 - RNA, 18 nt, Artificial Sequence
  Synthetic
uaaaauauccaaucuuau

SEQ ID NO: 115406 - RNA, 19 nt, Artificial Sequence
  Synthetic
cuaaaauauccaaucuuau

SEQ ID NO: 115407 - RNA, 20 nt, Artificial Sequence
  Synthetic
acuaaaauauccaaucuuau

SEQ ID NO: 115408 - RNA, 21 nt, Artificial Sequence
  Synthetic
aacuaaaauauccaaucuuau

SEQ ID NO: 115409 - RNA, 23 nt, Artificial Sequence
  Synthetic
agaacuaaaauauccaaucuuau

SEQ ID NO: 115410 - RNA, 24 nt, Artificial Sequence
  Synthetic
cagaacuaaaauauccaaucuuau

SEQ ID NO: 115411 - RNA, 18 nt, Artificial Sequence
  Synthetic
cuguauacugcaucuuau

SEQ ID NO: 115412 - RNA, 19 nt, Artificial Sequence
  Synthetic
ucuguauacugcaucuuau

SEQ ID NO: 115413 - RNA, 20 nt, Artificial Sequence
  Synthetic
cucuguauacugcaucuuau

SEQ ID NO: 115414 - RNA, 21 nt, Artificial Sequence
  Synthetic
acucuguauacugcaucuuau

SEQ ID NO: 115415 - RNA, 22 nt, Artificial Sequence
  Synthetic
cacucuguauacugcaucuuau

SEQ ID NO: 115416 - RNA, 23 nt, Artificial Sequence
  Synthetic
ccacucuguauacugcaucuuau

SEQ ID NO: 115417 - RNA, 18 nt, Artificial Sequence
  Synthetic
cccacaacuguaucuuau

SEQ ID NO: 115418 - RNA, 20 nt, Artificial Sequence
  Synthetic
ugcccacaacuguaucuuau

SEQ ID NO: 115419 - RNA, 21 nt, Artificial Sequence
  Synthetic
augcccacaacuguaucuuau

SEQ ID NO: 115420 - RNA, 22 nt, Artificial Sequence
  Synthetic
caugcccacaacuguaucuuau

SEQ ID NO: 115421 - RNA, 23 nt, Artificial Sequence
  Synthetic
ucaugcccacaacuguaucuuau

SEQ ID NO: 115422 - RNA, 24 nt, Artificial Sequence
  Synthetic
aucaugcccacaacuguaucuuau

SEQ ID NO: 115423 - RNA, 18 nt, Artificial Sequence
  Synthetic
ccuguuuccugcucuuau

SEQ ID NO: 115424 - RNA, 19 nt, Artificial Sequence
  Synthetic
uccuguuuccugcucuuau

SEQ ID NO: 115425 - RNA, 20 nt, Artificial Sequence
  Synthetic
uuccuguuuccugcucuuau

SEQ ID NO: 115426 - RNA, 21 nt, Artificial Sequence
  Synthetic
cuuccuguuuccugcucuuau

SEQ ID NO: 115427 - RNA, 22 nt, Artificial Sequence
  Synthetic
ucuuccuguuuccugcucuuau

SEQ ID NO: 115428 - RNA, 23 nt, Artificial Sequence
  Synthetic
cucuuccuguuuccugcucuuau

SEQ ID NO: 115429 - RNA, 24 nt, Artificial Sequence
  Synthetic
ucucuuccuguuuccugcucuuau

SEQ ID NO: 115430 - RNA, 18 nt, Artificial Sequence
  Synthetic
uuuucaaaugucucuuau

SEQ ID NO: 115431 - RNA, 19 nt, Artificial Sequence
  Synthetic
auuuucaaaugucucuuau

SEQ ID NO: 115432 - RNA, 20 nt, Artificial Sequence
  Synthetic
cauuuucaaaugucucuuau

SEQ ID NO: 115433 - RNA, 21 nt, Artificial Sequence
  Synthetic
acauuuucaaaugucucuuau

SEQ ID NO: 115434 - RNA, 22 nt, Artificial Sequence
  Synthetic
uacauuuucaaaugucucuuau

SEQ ID NO: 115435 - RNA, 24 nt, Artificial Sequence
  Synthetic
uguacauuuucaaaugucucuuau

SEQ ID NO: 115436 - RNA, 18 nt, Artificial Sequence
  Synthetic
uccacacuuccuucuuau

SEQ ID NO: 115437 - RNA, 19 nt, Artificial Sequence
  Synthetic
uuccacacuuccuucuuau

SEQ ID NO: 115438 - RNA, 20 nt, Artificial Sequence
  Synthetic
auuccacacuuccuucuuau

SEQ ID NO: 115439 - RNA, 21 nt, Artificial Sequence
  Synthetic
aauuccacacuuccuucuuau

SEQ ID NO: 115440 - RNA, 22 nt, Artificial Sequence
  Synthetic
aaauuccacacuuccuucuuau

SEQ ID NO: 115441 - RNA, 23 nt, Artificial Sequence
  Synthetic
caaauuccacacuuccuucuuau

SEQ ID NO: 115442 - RNA, 24 nt, Artificial Sequence
  Synthetic
ucaaauuccacacuuccuucuuau

SEQ ID NO: 115443 - RNA, 18 nt, Artificial Sequence
  Synthetic
acaaauauuguuucuuau

SEQ ID NO: 115444 - RNA, 19 nt, Artificial Sequence
  Synthetic
aacaaauauuguuucuuau

SEQ ID NO: 115445 - RNA, 20 nt, Artificial Sequence
  Synthetic
aaacaaauauuguuucuuau

SEQ ID NO: 115446 - RNA, 23 nt, Artificial Sequence
  Synthetic
aggaaacaaauauuguuucuuau

SEQ ID NO: 115447 - RNA, 24 nt, Artificial Sequence
  Synthetic
uaggaaacaaauauuguuucuuau

SEQ ID NO: 115448 - RNA, 18 nt, Artificial Sequence
  Synthetic
aauaacguggaaaguuau

SEQ ID NO: 115449 - RNA, 19 nt, Artificial Sequence
  Synthetic
aaauaacguggaaaguuau

SEQ ID NO: 115450 - RNA, 20 nt, Artificial Sequence
  Synthetic
aaaauaacguggaaaguuau

SEQ ID NO: 115451 - RNA, 21 nt, Artificial Sequence
  Synthetic
aaaaauaacguggaaaguuau

SEQ ID NO: 115452 - RNA, 22 nt, Artificial Sequence
  Synthetic
uaaaaauaacguggaaaguuau

SEQ ID NO: 115453 - RNA, 23 nt, Artificial Sequence
  Synthetic
auaaaaauaacguggaaaguuau

SEQ ID NO: 115454 - RNA, 24 nt, Artificial Sequence
  Synthetic
aauaaaaauaacguggaaaguuau

SEQ ID NO: 115455 - RNA, 18 nt, Artificial Sequence
  Synthetic
ucccagucuucaaguuau

SEQ ID NO: 115456 - RNA, 19 nt, Artificial Sequence
  Synthetic
uucccagucuucaaguuau

SEQ ID NO: 115457 - RNA, 20 nt, Artificial Sequence
  Synthetic
auucccagucuucaaguuau

SEQ ID NO: 115458 - RNA, 21 nt, Artificial Sequence
  Synthetic
cauucccagucuucaaguuau

SEQ ID NO: 115459 - RNA, 22 nt, Artificial Sequence
  Synthetic
ucauucccagucuucaaguuau

SEQ ID NO: 115460 - RNA, 24 nt, Artificial Sequence
  Synthetic
ugucauucccagucuucaaguuau

SEQ ID NO: 115461 - RNA, 18 nt, Artificial Sequence
  Synthetic
aacuaguauggaaguuau

SEQ ID NO: 115462 - RNA, 19 nt, Artificial Sequence
  Synthetic
aaacuaguauggaaguuau

SEQ ID NO: 115463 - RNA, 20 nt, Artificial Sequence
  Synthetic
caaacuaguauggaaguuau

SEQ ID NO: 115464 - RNA, 21 nt, Artificial Sequence
  Synthetic
ccaaacuaguauggaaguuau

SEQ ID NO: 115465 - RNA, 22 nt, Artificial Sequence
  Synthetic
accaaacuaguauggaaguuau

SEQ ID NO: 115466 - RNA, 23 nt, Artificial Sequence
  Synthetic
caccaaacuaguauggaaguuau

SEQ ID NO: 115467 - RNA, 24 nt, Artificial Sequence
  Synthetic
acaccaaacuaguauggaaguuau

SEQ ID NO: 115468 - RNA, 21 nt, Artificial Sequence
  Synthetic
aauuaaaacagacacaguuau

SEQ ID NO: 115469 - RNA, 24 nt, Artificial Sequence
  Synthetic
aggaauuaaaacagacacaguuau

SEQ ID NO: 115470 - RNA, 21 nt, Artificial Sequence
  Synthetic
aaccucugaacuuccaguuau

SEQ ID NO: 115471 - RNA, 22 nt, Artificial Sequence
  Synthetic
uaaccucugaacuuccaguuau

SEQ ID NO: 115472 - RNA, 23 nt, Artificial Sequence
  Synthetic
uuaaccucugaacuuccaguuau

SEQ ID NO: 115473 - RNA, 24 nt, Artificial Sequence
  Synthetic
uuuaaccucugaacuuccaguuau

SEQ ID NO: 115474 - RNA, 18 nt, Artificial Sequence
  Synthetic
uuuuugucuaagaguuau

SEQ ID NO: 115475 - RNA, 19 nt, Artificial Sequence
  Synthetic
auuuuugucuaagaguuau

SEQ ID NO: 115476 - RNA, 20 nt, Artificial Sequence
  Synthetic
aauuuuugucuaagaguuau

SEQ ID NO: 115477 - RNA, 21 nt, Artificial Sequence
  Synthetic
aaauuuuugucuaagaguuau

SEQ ID NO: 115478 - RNA, 23 nt, Artificial Sequence
  Synthetic
cgaaauuuuugucuaagaguuau

SEQ ID NO: 115479 - RNA, 24 nt, Artificial Sequence
  Synthetic
ccgaaauuuuugucuaagaguuau

SEQ ID NO: 115480 - RNA, 18 nt, Artificial Sequence
  Synthetic
ucagucuaauagaguuau

SEQ ID NO: 115481 - RNA, 19 nt, Artificial Sequence
  Synthetic
uucagucuaauagaguuau

SEQ ID NO: 115482 - RNA, 20 nt, Artificial Sequence
  Synthetic
uuucagucuaauagaguuau

SEQ ID NO: 115483 - RNA, 21 nt, Artificial Sequence
  Synthetic
auuucagucuaauagaguuau

SEQ ID NO: 115484 - RNA, 22 nt, Artificial Sequence
  Synthetic
aauuucagucuaauagaguuau

SEQ ID NO: 115485 - RNA, 23 nt, Artificial Sequence
  Synthetic
aaauuucagucuaauagaguuau

SEQ ID NO: 115486 - RNA, 24 nt, Artificial Sequence
  Synthetic
uaaauuucagucuaauagaguuau

SEQ ID NO: 115487 - RNA, 18 nt, Artificial Sequence
  Synthetic
aacuaagucacagguuau

SEQ ID NO: 115488 - RNA, 19 nt, Artificial Sequence
  Synthetic
uaacuaagucacagguuau

SEQ ID NO: 115489 - RNA, 20 nt, Artificial Sequence
  Synthetic
cuaacuaagucacagguuau

SEQ ID NO: 115490 - RNA, 21 nt, Artificial Sequence
  Synthetic
ccuaacuaagucacagguuau

SEQ ID NO: 115491 - RNA, 23 nt, Artificial Sequence
  Synthetic
agccuaacuaagucacagguuau

SEQ ID NO: 115492 - RNA, 24 nt, Artificial Sequence
  Synthetic
aagccuaacuaagucacagguuau

SEQ ID NO: 115493 - RNA, 18 nt, Artificial Sequence
  Synthetic
aaggaaaguucauguuau

SEQ ID NO: 115494 - RNA, 19 nt, Artificial Sequence
  Synthetic
uaaggaaaguucauguuau

SEQ ID NO: 115495 - RNA, 20 nt, Artificial Sequence
  Synthetic
auaaggaaaguucauguuau

SEQ ID NO: 115496 - RNA, 21 nt, Artificial Sequence
  Synthetic
cauaaggaaaguucauguuau

SEQ ID NO: 115497 - RNA, 23 nt, Artificial Sequence
  Synthetic
agcauaaggaaaguucauguuau

SEQ ID NO: 115498 - RNA, 24 nt, Artificial Sequence
  Synthetic
aagcauaaggaaaguucauguuau

SEQ ID NO: 115499 - RNA, 19 nt, Artificial Sequence
  Synthetic
cguguaaaugaucuguuau

SEQ ID NO: 115500 - RNA, 20 nt, Artificial Sequence
  Synthetic
ucguguaaaugaucuguuau

SEQ ID NO: 115501 - RNA, 22 nt, Artificial Sequence
  Synthetic
agucguguaaaugaucuguuau

SEQ ID NO: 115502 - RNA, 23 nt, Artificial Sequence
  Synthetic
cagucguguaaaugaucuguuau

SEQ ID NO: 115503 - RNA, 24 nt, Artificial Sequence
  Synthetic
ucagucguguaaaugaucuguuau

SEQ ID NO: 115504 - RNA, 19 nt, Artificial Sequence
  Synthetic
ugauucuguaagguguuau

SEQ ID NO: 115505 - RNA, 20 nt, Artificial Sequence
  Synthetic
augauucuguaagguguuau

SEQ ID NO: 115506 - RNA, 22 nt, Artificial Sequence
  Synthetic
agaugauucuguaagguguuau

SEQ ID NO: 115507 - RNA, 23 nt, Artificial Sequence
  Synthetic
cagaugauucuguaagguguuau

SEQ ID NO: 115508 - RNA, 24 nt, Artificial Sequence
  Synthetic
ccagaugauucuguaagguguuau

SEQ ID NO: 115509 - RNA, 18 nt, Artificial Sequence
  Synthetic
uugggauggauguguuau

SEQ ID NO: 115510 - RNA, 19 nt, Artificial Sequence
  Synthetic
cuugggauggauguguuau

SEQ ID NO: 115511 - RNA, 20 nt, Artificial Sequence
  Synthetic
ucuugggauggauguguuau

SEQ ID NO: 115512 - RNA, 21 nt, Artificial Sequence
  Synthetic
uucuugggauggauguguuau

SEQ ID NO: 115513 - RNA, 22 nt, Artificial Sequence
  Synthetic
uuucuugggauggauguguuau

SEQ ID NO: 115514 - RNA, 23 nt, Artificial Sequence
  Synthetic
cuuucuugggauggauguguuau

SEQ ID NO: 115515 - RNA, 24 nt, Artificial Sequence
  Synthetic
ucuuucuugggauggauguguuau

SEQ ID NO: 115516 - RNA, 18 nt, Artificial Sequence
  Synthetic
agacaaaguauuuguuau

SEQ ID NO: 115517 - RNA, 19 nt, Artificial Sequence
  Synthetic
aagacaaaguauuuguuau

SEQ ID NO: 115518 - RNA, 20 nt, Artificial Sequence
  Synthetic
aaagacaaaguauuuguuau

SEQ ID NO: 115519 - RNA, 21 nt, Artificial Sequence
  Synthetic
uaaagacaaaguauuuguuau

SEQ ID NO: 115520 - RNA, 22 nt, Artificial Sequence
  Synthetic
uuaaagacaaaguauuuguuau

SEQ ID NO: 115521 - RNA, 23 nt, Artificial Sequence
  Synthetic
cuuaaagacaaaguauuuguuau

SEQ ID NO: 115522 - RNA, 21 nt, Artificial Sequence
  Synthetic
caauuuauuaacauaauuuau

SEQ ID NO: 115523 - RNA, 22 nt, Artificial Sequence
  Synthetic
acaauuuauuaacauaauuuau

SEQ ID NO: 115524 - RNA, 23 nt, Artificial Sequence
  Synthetic
uacaauuuauuaacauaauuuau

SEQ ID NO: 115525 - RNA, 24 nt, Artificial Sequence
  Synthetic
auacaauuuauuaacauaauuuau

SEQ ID NO: 115526 - RNA, 18 nt, Artificial Sequence
  Synthetic
uaucacugagacauuuau

SEQ ID NO: 115527 - RNA, 19 nt, Artificial Sequence
  Synthetic
uuaucacugagacauuuau

SEQ ID NO: 115528 - RNA, 20 nt, Artificial Sequence
  Synthetic
cuuaucacugagacauuuau

SEQ ID NO: 115529 - RNA, 21 nt, Artificial Sequence
  Synthetic
ucuuaucacugagacauuuau

SEQ ID NO: 115530 - RNA, 22 nt, Artificial Sequence
  Synthetic
cucuuaucacugagacauuuau

SEQ ID NO: 115531 - RNA, 24 nt, Artificial Sequence
  Synthetic
ugcucuuaucacugagacauuuau

SEQ ID NO: 115532 - RNA, 18 nt, Artificial Sequence
  Synthetic
uauucuguuggcauuuau

SEQ ID NO: 115533 - RNA, 19 nt, Artificial Sequence
  Synthetic
cuauucuguuggcauuuau

SEQ ID NO: 115534 - RNA, 20 nt, Artificial Sequence
  Synthetic
ucuauucuguuggcauuuau

SEQ ID NO: 115535 - RNA, 21 nt, Artificial Sequence
  Synthetic
cucuauucuguuggcauuuau

SEQ ID NO: 115536 - RNA, 22 nt, Artificial Sequence
  Synthetic
ucucuauucuguuggcauuuau

SEQ ID NO: 115537 - RNA, 23 nt, Artificial Sequence
  Synthetic
uucucuauucuguuggcauuuau

SEQ ID NO: 115538 - RNA, 24 nt, Artificial Sequence
  Synthetic
uuucucuauucuguuggcauuuau

SEQ ID NO: 115539 - RNA, 18 nt, Artificial Sequence
  Synthetic
ugaacugugaagauuuau

SEQ ID NO: 115540 - RNA, 20 nt, Artificial Sequence
  Synthetic
agugaacugugaagauuuau

SEQ ID NO: 115541 - RNA, 21 nt, Artificial Sequence
  Synthetic
aagugaacugugaagauuuau

SEQ ID NO: 115542 - RNA, 22 nt, Artificial Sequence
  Synthetic
uaagugaacugugaagauuuau

SEQ ID NO: 115543 - RNA, 23 nt, Artificial Sequence
  Synthetic
cuaagugaacugugaagauuuau

SEQ ID NO: 115544 - RNA, 24 nt, Artificial Sequence
  Synthetic
ucuaagugaacugugaagauuuau

SEQ ID NO: 115545 - RNA, 18 nt, Artificial Sequence
  Synthetic
accucuuacuauauuuau

SEQ ID NO: 115546 - RNA, 20 nt, Artificial Sequence
  Synthetic
agaccucuuacuauauuuau

SEQ ID NO: 115547 - RNA, 21 nt, Artificial Sequence
  Synthetic
uagaccucuuacuauauuuau

SEQ ID NO: 115548 - RNA, 22 nt, Artificial Sequence
  Synthetic
auagaccucuuacuauauuuau

SEQ ID NO: 115549 - RNA, 23 nt, Artificial Sequence
  Synthetic
aauagaccucuuacuauauuuau

SEQ ID NO: 115550 - RNA, 24 nt, Artificial Sequence
  Synthetic
aaauagaccucuuacuauauuuau

SEQ ID NO: 115551 - RNA, 18 nt, Artificial Sequence
  Synthetic
agcaaugaaucuauuuau

SEQ ID NO: 115552 - RNA, 19 nt, Artificial Sequence
  Synthetic
aagcaaugaaucuauuuau

SEQ ID NO: 115553 - RNA, 20 nt, Artificial Sequence
  Synthetic
aaagcaaugaaucuauuuau

SEQ ID NO: 115554 - RNA, 21 nt, Artificial Sequence
  Synthetic
uaaagcaaugaaucuauuuau

SEQ ID NO: 115555 - RNA, 22 nt, Artificial Sequence
  Synthetic
uuaaagcaaugaaucuauuuau

SEQ ID NO: 115556 - RNA, 23 nt, Artificial Sequence
  Synthetic
auuaaagcaaugaaucuauuuau

SEQ ID NO: 115557 - RNA, 18 nt, Artificial Sequence
  Synthetic
auucauuacauuauuuau

SEQ ID NO: 115558 - RNA, 19 nt, Artificial Sequence
  Synthetic
uauucauuacauuauuuau

SEQ ID NO: 115559 - RNA, 20 nt, Artificial Sequence
  Synthetic
auauucauuacauuauuuau

SEQ ID NO: 115560 - RNA, 21 nt, Artificial Sequence
  Synthetic
uauauucauuacauuauuuau

SEQ ID NO: 115561 - RNA, 22 nt, Artificial Sequence
  Synthetic
uuauauucauuacauuauuuau

SEQ ID NO: 115562 - RNA, 23 nt, Artificial Sequence
  Synthetic
cuuauauucauuacauuauuuau

SEQ ID NO: 115563 - RNA, 24 nt, Artificial Sequence
  Synthetic
ucuuauauucauuacauuauuuau

SEQ ID NO: 115564 - RNA, 19 nt, Artificial Sequence
  Synthetic
aggucaugaaugccuuuau

SEQ ID NO: 115565 - RNA, 22 nt, Artificial Sequence
  Synthetic
uggaggucaugaaugccuuuau

SEQ ID NO: 115566 - RNA, 23 nt, Artificial Sequence
  Synthetic
cuggaggucaugaaugccuuuau

SEQ ID NO: 115567 - RNA, 24 nt, Artificial Sequence
  Synthetic
ucuggaggucaugaaugccuuuau

SEQ ID NO: 115568 - RNA, 18 nt, Artificial Sequence
  Synthetic
caagaauauaagcuuuau

SEQ ID NO: 115569 - RNA, 19 nt, Artificial Sequence
  Synthetic
ccaagaauauaagcuuuau

SEQ ID NO: 115570 - RNA, 20 nt, Artificial Sequence
  Synthetic
uccaagaauauaagcuuuau

SEQ ID NO: 115571 - RNA, 21 nt, Artificial Sequence
  Synthetic
uuccaagaauauaagcuuuau

SEQ ID NO: 115572 - RNA, 22 nt, Artificial Sequence
  Synthetic
cuuccaagaauauaagcuuuau

SEQ ID NO: 115573 - RNA, 24 nt, Artificial Sequence
  Synthetic
ugcuuccaagaauauaagcuuuau

SEQ ID NO: 115574 - RNA, 18 nt, Artificial Sequence
  Synthetic
acacauuuugagcuuuau

SEQ ID NO: 115575 - RNA, 19 nt, Artificial Sequence
  Synthetic
aacacauuuugagcuuuau

SEQ ID NO: 115576 - RNA, 20 nt, Artificial Sequence
  Synthetic
uaacacauuuugagcuuuau

SEQ ID NO: 115577 - RNA, 21 nt, Artificial Sequence
  Synthetic
uuaacacauuuugagcuuuau

SEQ ID NO: 115578 - RNA, 23 nt, Artificial Sequence
  Synthetic
aguuaacacauuuugagcuuuau

SEQ ID NO: 115579 - RNA, 24 nt, Artificial Sequence
  Synthetic
caguuaacacauuuugagcuuuau

SEQ ID NO: 115580 - RNA, 18 nt, Artificial Sequence
  Synthetic
ucucuggcacaucuuuau

SEQ ID NO: 115581 - RNA, 19 nt, Artificial Sequence
  Synthetic
uucucuggcacaucuuuau

SEQ ID NO: 115582 - RNA, 20 nt, Artificial Sequence
  Synthetic
cuucucuggcacaucuuuau

SEQ ID NO: 115583 - RNA, 21 nt, Artificial Sequence
  Synthetic
ucuucucuggcacaucuuuau

SEQ ID NO: 115584 - RNA, 23 nt, Artificial Sequence
  Synthetic
agucuucucuggcacaucuuuau

SEQ ID NO: 115585 - RNA, 24 nt, Artificial Sequence
  Synthetic
uagucuucucuggcacaucuuuau

SEQ ID NO: 115586 - RNA, 21 nt, Artificial Sequence
  Synthetic
acaacaaauuuucuucuuuau

SEQ ID NO: 115587 - RNA, 22 nt, Artificial Sequence
  Synthetic
aacaacaaauuuucuucuuuau

SEQ ID NO: 115588 - RNA, 23 nt, Artificial Sequence
  Synthetic
uaacaacaaauuuucuucuuuau

SEQ ID NO: 115589 - RNA, 24 nt, Artificial Sequence
  Synthetic
cuaacaacaaauuuucuucuuuau

SEQ ID NO: 115590 - RNA, 21 nt, Artificial Sequence
  Synthetic
aaauaaaaauuuuuucuuuau

SEQ ID NO: 115591 - RNA, 22 nt, Artificial Sequence
  Synthetic
uaaauaaaaauuuuuucuuuau

SEQ ID NO: 115592 - RNA, 23 nt, Artificial Sequence
  Synthetic
auaaauaaaaauuuuuucuuuau

SEQ ID NO: 115593 - RNA, 21 nt, Artificial Sequence
  Synthetic
aaaagagauaauuaaguuuau

SEQ ID NO: 115594 - RNA, 22 nt, Artificial Sequence
  Synthetic
aaaaagagauaauuaaguuuau

SEQ ID NO: 115595 - RNA, 23 nt, Artificial Sequence
  Synthetic
aaaaaagagauaauuaaguuuau

SEQ ID NO: 115596 - RNA, 24 nt, Artificial Sequence
  Synthetic
aaaaaaagagauaauuaaguuuau

SEQ ID NO: 115597 - RNA, 19 nt, Artificial Sequence
  Synthetic
cgcacaauuuauaguuuau

SEQ ID NO: 115598 - RNA, 20 nt, Artificial Sequence
  Synthetic
ccgcacaauuuauaguuuau

SEQ ID NO: 115599 - RNA, 21 nt, Artificial Sequence
  Synthetic
uccgcacaauuuauaguuuau

SEQ ID NO: 115600 - RNA, 22 nt, Artificial Sequence
  Synthetic
cuccgcacaauuuauaguuuau

SEQ ID NO: 115601 - RNA, 23 nt, Artificial Sequence
  Synthetic
ucuccgcacaauuuauaguuuau

SEQ ID NO: 115602 - RNA, 24 nt, Artificial Sequence
  Synthetic
uucuccgcacaauuuauaguuuau

SEQ ID NO: 115603 - RNA, 18 nt, Artificial Sequence
  Synthetic
aggguagaauagguuuau

SEQ ID NO: 115604 - RNA, 21 nt, Artificial Sequence
  Synthetic
uggaggguagaauagguuuau

SEQ ID NO: 115605 - RNA, 24 nt, Artificial Sequence
  Synthetic
ugguggaggguagaauagguuuau

SEQ ID NO: 115606 - RNA, 18 nt, Artificial Sequence
  Synthetic
ugaacucaguggguuuau

SEQ ID NO: 115607 - RNA, 19 nt, Artificial Sequence
  Synthetic
uugaacucaguggguuuau

SEQ ID NO: 115608 - RNA, 20 nt, Artificial Sequence
  Synthetic
cuugaacucaguggguuuau

SEQ ID NO: 115609 - RNA, 21 nt, Artificial Sequence
  Synthetic
ucuugaacucaguggguuuau

SEQ ID NO: 115610 - RNA, 22 nt, Artificial Sequence
  Synthetic
cucuugaacucaguggguuuau

SEQ ID NO: 115611 - RNA, 23 nt, Artificial Sequence
  Synthetic
ucucuugaacucaguggguuuau

SEQ ID NO: 115612 - RNA, 24 nt, Artificial Sequence
  Synthetic
uucucuugaacucaguggguuuau

SEQ ID NO: 115613 - RNA, 21 nt, Artificial Sequence
  Synthetic
acacuuuccuuuauuguuuau

SEQ ID NO: 115614 - RNA, 22 nt, Artificial Sequence
  Synthetic
uacacuuuccuuuauuguuuau

SEQ ID NO: 115615 - RNA, 23 nt, Artificial Sequence
  Synthetic
cuacacuuuccuuuauuguuuau

SEQ ID NO: 115616 - RNA, 24 nt, Artificial Sequence
  Synthetic
ccuacacuuuccuuuauuguuuau

SEQ ID NO: 115617 - RNA, 19 nt, Artificial Sequence
  Synthetic
ugcgugaagccuuguuuau

SEQ ID NO: 115618 - RNA, 20 nt, Artificial Sequence
  Synthetic
cugcgugaagccuuguuuau

SEQ ID NO: 115619 - RNA, 18 nt, Artificial Sequence
  Synthetic
acauaauuagaauuuuau

SEQ ID NO: 115620 - RNA, 19 nt, Artificial Sequence
  Synthetic
cacauaauuagaauuuuau

SEQ ID NO: 115621 - RNA, 20 nt, Artificial Sequence
  Synthetic
ucacauaauuagaauuuuau

SEQ ID NO: 115622 - RNA, 21 nt, Artificial Sequence
  Synthetic
uucacauaauuagaauuuuau

SEQ ID NO: 115623 - RNA, 22 nt, Artificial Sequence
  Synthetic
auucacauaauuagaauuuuau

SEQ ID NO: 115624 - RNA, 23 nt, Artificial Sequence
  Synthetic
aauucacauaauuagaauuuuau

SEQ ID NO: 115625 - RNA, 24 nt, Artificial Sequence
  Synthetic
aaauucacauaauuagaauuuuau

SEQ ID NO: 115626 - RNA, 18 nt, Artificial Sequence
  Synthetic
uucuaaaauggauuuuau

SEQ ID NO: 115627 - RNA, 20 nt, Artificial Sequence
  Synthetic
aguucuaaaauggauuuuau

SEQ ID NO: 115628 - RNA, 21 nt, Artificial Sequence
  Synthetic
uaguucuaaaauggauuuuau

SEQ ID NO: 115629 - RNA, 22 nt, Artificial Sequence
  Synthetic
auaguucuaaaauggauuuuau

SEQ ID NO: 115630 - RNA, 23 nt, Artificial Sequence
  Synthetic
aauaguucuaaaauggauuuuau

SEQ ID NO: 115631 - RNA, 24 nt, Artificial Sequence
  Synthetic
caauaguucuaaaauggauuuuau

SEQ ID NO: 115632 - RNA, 18 nt, Artificial Sequence
  Synthetic
ucaagacugauauuuuau

SEQ ID NO: 115633 - RNA, 19 nt, Artificial Sequence
  Synthetic
uucaagacugauauuuuau

SEQ ID NO: 115634 - RNA, 20 nt, Artificial Sequence
  Synthetic
auucaagacugauauuuuau

SEQ ID NO: 115635 - RNA, 21 nt, Artificial Sequence
  Synthetic
cauucaagacugauauuuuau

SEQ ID NO: 115636 - RNA, 23 nt, Artificial Sequence
  Synthetic
agcauucaagacugauauuuuau

SEQ ID NO: 115637 - RNA, 24 nt, Artificial Sequence
  Synthetic
cagcauucaagacugauauuuuau

SEQ ID NO: 115638 - RNA, 19 nt, Artificial Sequence
  Synthetic
ugaggugaaacuauuuuau

SEQ ID NO: 115639 - RNA, 20 nt, Artificial Sequence
  Synthetic
uugaggugaaacuauuuuau

SEQ ID NO: 115640 - RNA, 21 nt, Artificial Sequence
  Synthetic
auugaggugaaacuauuuuau

SEQ ID NO: 115641 - RNA, 22 nt, Artificial Sequence
  Synthetic
aauugaggugaaacuauuuuau

SEQ ID NO: 115642 - RNA, 23 nt, Artificial Sequence
  Synthetic
aaauugaggugaaacuauuuuau

SEQ ID NO: 115643 - RNA, 24 nt, Artificial Sequence
  Synthetic
uaaauugaggugaaacuauuuuau

SEQ ID NO: 115644 - RNA, 21 nt, Artificial Sequence
  Synthetic
acuuauccucaucuauuuuau

SEQ ID NO: 115645 - RNA, 22 nt, Artificial Sequence
  Synthetic
uacuuauccucaucuauuuuau

SEQ ID NO: 115646 - RNA, 23 nt, Artificial Sequence
  Synthetic
uuacuuauccucaucuauuuuau

SEQ ID NO: 115647 - RNA, 24 nt, Artificial Sequence
  Synthetic
uuuacuuauccucaucuauuuuau

SEQ ID NO: 115648 - RNA, 18 nt, Artificial Sequence
  Synthetic
aaauucagaaaguuuuau

SEQ ID NO: 115649 - RNA, 20 nt, Artificial Sequence
  Synthetic
ugaaauucagaaaguuuuau

SEQ ID NO: 115650 - RNA, 22 nt, Artificial Sequence
  Synthetic
ugugaaauucagaaaguuuuau

SEQ ID NO: 115651 - RNA, 24 nt, Artificial Sequence
  Synthetic
agugugaaauucagaaaguuuuau

SEQ ID NO: 115652 - RNA, 20 nt, Artificial Sequence
  Synthetic
aggcucuaugggaguuuuau

SEQ ID NO: 115653 - RNA, 22 nt, Artificial Sequence
  Synthetic
agaggcucuaugggaguuuuau

SEQ ID NO: 115654 - RNA, 23 nt, Artificial Sequence
  Synthetic
cagaggcucuaugggaguuuuau

SEQ ID NO: 115655 - RNA, 24 nt, Artificial Sequence
  Synthetic
ucagaggcucuaugggaguuuuau

SEQ ID NO: 115656 - RNA, 18 nt, Artificial Sequence
  Synthetic
cuuuacuggauguuuuau

SEQ ID NO: 115657 - RNA, 19 nt, Artificial Sequence
  Synthetic
ucuuuacuggauguuuuau

SEQ ID NO: 115658 - RNA, 21 nt, Artificial Sequence
  Synthetic
agucuuuacuggauguuuuau

SEQ ID NO: 115659 - RNA, 22 nt, Artificial Sequence
  Synthetic
cagucuuuacuggauguuuuau

SEQ ID NO: 115660 - RNA, 23 nt, Artificial Sequence
  Synthetic
ucagucuuuacuggauguuuuau

SEQ ID NO: 115661 - RNA, 24 nt, Artificial Sequence
  Synthetic
uucagucuuuacuggauguuuuau

SEQ ID NO: 115662 - RNA, 18 nt, Artificial Sequence
  Synthetic
uaaacaauucauuuuuau

SEQ ID NO: 115663 - RNA, 19 nt, Artificial Sequence
  Synthetic
cuaaacaauucauuuuuau

SEQ ID NO: 115664 - RNA, 20 nt, Artificial Sequence
  Synthetic
acuaaacaauucauuuuuau

SEQ ID NO: 115665 - RNA, 21 nt, Artificial Sequence
  Synthetic
cacuaaacaauucauuuuuau

SEQ ID NO: 115666 - RNA, 22 nt, Artificial Sequence
  Synthetic
acacuaaacaauucauuuuuau

SEQ ID NO: 115667 - RNA, 23 nt, Artificial Sequence
  Synthetic
aacacuaaacaauucauuuuuau

SEQ ID NO: 115668 - RNA, 24 nt, Artificial Sequence
  Synthetic
uaacacuaaacaauucauuuuuau

SEQ ID NO: 115669 - RNA, 18 nt, Artificial Sequence
  Synthetic
uaauaacacucuuuuuau

SEQ ID NO: 115670 - RNA, 19 nt, Artificial Sequence
  Synthetic
uuaauaacacucuuuuuau

SEQ ID NO: 115671 - RNA, 20 nt, Artificial Sequence
  Synthetic
uuuaauaacacucuuuuuau

SEQ ID NO: 115672 - RNA, 21 nt, Artificial Sequence
  Synthetic
cuuuaauaacacucuuuuuau

SEQ ID NO: 115673 - RNA, 22 nt, Artificial Sequence
  Synthetic
ucuuuaauaacacucuuuuuau

SEQ ID NO: 115674 - RNA, 23 nt, Artificial Sequence
  Synthetic
cucuuuaauaacacucuuuuuau

SEQ ID NO: 115675 - RNA, 24 nt, Artificial Sequence
  Synthetic
ccucuuuaauaacacucuuuuuau

SEQ ID NO: 115676 - RNA, 18 nt, Artificial Sequence
  Synthetic
cuuaaagcuuuuuuuuau

SEQ ID NO: 115677 - RNA, 19 nt, Artificial Sequence
  Synthetic
ccuuaaagcuuuuuuuuau

SEQ ID NO: 115678 - RNA, 20 nt, Artificial Sequence
  Synthetic
cccuuaaagcuuuuuuuuau

SEQ ID NO: 115679 - RNA, 22 nt, Artificial Sequence
  Synthetic
agcccuuaaagcuuuuuuuuau

SEQ ID NO: 115680 - RNA, 23 nt, Artificial Sequence
  Synthetic
cagcccuuaaagcuuuuuuuuau

SEQ ID NO: 115681 - RNA, 24 nt, Artificial Sequence
  Synthetic
acagcccuuaaagcuuuuuuuuau

SEQ ID NO: 115682 - RNA, 18 nt, Artificial Sequence
  Synthetic
uagaagccacaaaaaacu

SEQ ID NO: 115683 - RNA, 19 nt, Artificial Sequence
  Synthetic
uuagaagccacaaaaaacu

SEQ ID NO: 115684 - RNA, 20 nt, Artificial Sequence
  Synthetic
auuagaagccacaaaaaacu

SEQ ID NO: 115685 - RNA, 21 nt, Artificial Sequence
  Synthetic
cauuagaagccacaaaaaacu

SEQ ID NO: 115686 - RNA, 23 nt, Artificial Sequence
  Synthetic
ugcauuagaagccacaaaaaacu

SEQ ID NO: 115687 - RNA, 24 nt, Artificial Sequence
  Synthetic
uugcauuagaagccacaaaaaacu

SEQ ID NO: 115688 - RNA, 18 nt, Artificial Sequence
  Synthetic
ugagaggaauaaaaaacu

SEQ ID NO: 115689 - RNA, 19 nt, Artificial Sequence
  Synthetic
augagaggaauaaaaaacu

SEQ ID NO: 115690 - RNA, 20 nt, Artificial Sequence
  Synthetic
caugagaggaauaaaaaacu

SEQ ID NO: 115691 - RNA, 21 nt, Artificial Sequence
  Synthetic
acaugagaggaauaaaaaacu

SEQ ID NO: 115692 - RNA, 22 nt, Artificial Sequence
  Synthetic
cacaugagaggaauaaaaaacu

SEQ ID NO: 115693 - RNA, 23 nt, Artificial Sequence
  Synthetic
acacaugagaggaauaaaaaacu

SEQ ID NO: 115694 - RNA, 21 nt, Artificial Sequence
  Synthetic
uucaaaucaaagauaaaaacu

SEQ ID NO: 115695 - RNA, 22 nt, Artificial Sequence
  Synthetic
uuucaaaucaaagauaaaaacu

SEQ ID NO: 115696 - RNA, 23 nt, Artificial Sequence
  Synthetic
auuucaaaucaaagauaaaaacu

SEQ ID NO: 115697 - RNA, 24 nt, Artificial Sequence
  Synthetic
aauuucaaaucaaagauaaaaacu

SEQ ID NO: 115698 - RNA, 18 nt, Artificial Sequence
  Synthetic
agggcugcuuuaaaaacu

SEQ ID NO: 115699 - RNA, 20 nt, Artificial Sequence
  Synthetic
agagggcugcuuuaaaaacu

SEQ ID NO: 115700 - RNA, 21 nt, Artificial Sequence
  Synthetic
aagagggcugcuuuaaaaacu

SEQ ID NO: 115701 - RNA, 22 nt, Artificial Sequence
  Synthetic
caagagggcugcuuuaaaaacu

SEQ ID NO: 115702 - RNA, 23 nt, Artificial Sequence
  Synthetic
ucaagagggcugcuuuaaaaacu

SEQ ID NO: 115703 - RNA, 24 nt, Artificial Sequence
  Synthetic
aucaagagggcugcuuuaaaaacu

SEQ ID NO: 115704 - RNA, 18 nt, Artificial Sequence
  Synthetic
cauacaugugacaaaacu

SEQ ID NO: 115705 - RNA, 19 nt, Artificial Sequence
  Synthetic
acauacaugugacaaaacu

SEQ ID NO: 115706 - RNA, 20 nt, Artificial Sequence
  Synthetic
cacauacaugugacaaaacu

SEQ ID NO: 115707 - RNA, 21 nt, Artificial Sequence
  Synthetic
ccacauacaugugacaaaacu

SEQ ID NO: 115708 - RNA, 22 nt, Artificial Sequence
  Synthetic
accacauacaugugacaaaacu

SEQ ID NO: 115709 - RNA, 23 nt, Artificial Sequence
  Synthetic
uaccacauacaugugacaaaacu

SEQ ID NO: 115710 - RNA, 24 nt, Artificial Sequence
  Synthetic
cuaccacauacaugugacaaaacu

SEQ ID NO: 115711 - RNA, 18 nt, Artificial Sequence
  Synthetic
cuuugaaauaccaaaacu

SEQ ID NO: 115712 - RNA, 19 nt, Artificial Sequence
  Synthetic
ucuuugaaauaccaaaacu

SEQ ID NO: 115713 - RNA, 20 nt, Artificial Sequence
  Synthetic
aucuuugaaauaccaaaacu

SEQ ID NO: 115714 - RNA, 21 nt, Artificial Sequence
  Synthetic
aaucuuugaaauaccaaaacu

SEQ ID NO: 115715 - RNA, 23 nt, Artificial Sequence
  Synthetic
ugaaucuuugaaauaccaaaacu

SEQ ID NO: 115716 - RNA, 24 nt, Artificial Sequence
  Synthetic
augaaucuuugaaauaccaaaacu

SEQ ID NO: 115717 - RNA, 18 nt, Artificial Sequence
  Synthetic
uguuggcuaugcaaaacu

SEQ ID NO: 115718 - RNA, 19 nt, Artificial Sequence
  Synthetic
uuguuggcuaugcaaaacu

SEQ ID NO: 115719 - RNA, 21 nt, Artificial Sequence
  Synthetic
aguuguuggcuaugcaaaacu

SEQ ID NO: 115720 - RNA, 22 nt, Artificial Sequence
  Synthetic
uaguuguuggcuaugcaaaacu

SEQ ID NO: 115721 - RNA, 23 nt, Artificial Sequence
  Synthetic
uuaguuguuggcuaugcaaaacu

SEQ ID NO: 115722 - RNA, 24 nt, Artificial Sequence
  Synthetic
uuuaguuguuggcuaugcaaaacu

SEQ ID NO: 115723 - RNA, 19 nt, Artificial Sequence
  Synthetic
ugggacacaaaagaaaacu

SEQ ID NO: 115724 - RNA, 20 nt, Artificial Sequence
  Synthetic
cugggacacaaaagaaaacu

SEQ ID NO: 115725 - RNA, 21 nt, Artificial Sequence
  Synthetic
acugggacacaaaagaaaacu

SEQ ID NO: 115726 - RNA, 22 nt, Artificial Sequence
  Synthetic
cacugggacacaaaagaaaacu

SEQ ID NO: 115727 - RNA, 23 nt, Artificial Sequence
  Synthetic
ucacugggacacaaaagaaaacu

SEQ ID NO: 115728 - RNA, 24 nt, Artificial Sequence
  Synthetic
cucacugggacacaaaagaaaacu

SEQ ID NO: 115729 - RNA, 18 nt, Artificial Sequence
  Synthetic
agcugacuagagaaaacu

SEQ ID NO: 115730 - RNA, 19 nt, Artificial Sequence
  Synthetic
cagcugacuagagaaaacu

SEQ ID NO: 115731 - RNA, 20 nt, Artificial Sequence
  Synthetic
ucagcugacuagagaaaacu

SEQ ID NO: 115732 - RNA, 21 nt, Artificial Sequence
  Synthetic
aucagcugacuagagaaaacu

SEQ ID NO: 115733 - RNA, 23 nt, Artificial Sequence
  Synthetic
agaucagcugacuagagaaaacu

SEQ ID NO: 115734 - RNA, 24 nt, Artificial Sequence
  Synthetic
cagaucagcugacuagagaaaacu

SEQ ID NO: 115735 - RNA, 18 nt, Artificial Sequence
  Synthetic
agcuuacauuugaaaacu

SEQ ID NO: 115736 - RNA, 19 nt, Artificial Sequence
  Synthetic
uagcuuacauuugaaaacu

SEQ ID NO: 115737 - RNA, 20 nt, Artificial Sequence
  Synthetic
uuagcuuacauuugaaaacu

SEQ ID NO: 115738 - RNA, 21 nt, Artificial Sequence
  Synthetic
cuuagcuuacauuugaaaacu

SEQ ID NO: 115739 - RNA, 23 nt, Artificial Sequence
  Synthetic
agcuuagcuuacauuugaaaacu

SEQ ID NO: 115740 - RNA, 24 nt, Artificial Sequence
  Synthetic
uagcuuagcuuacauuugaaaacu

SEQ ID NO: 115741 - RNA, 18 nt, Artificial Sequence
  Synthetic
ucacugugcauuaaaacu

SEQ ID NO: 115742 - RNA, 20 nt, Artificial Sequence
  Synthetic
cgucacugugcauuaaaacu

SEQ ID NO: 115743 - RNA, 21 nt, Artificial Sequence
  Synthetic
ucgucacugugcauuaaaacu

SEQ ID NO: 115744 - RNA, 22 nt, Artificial Sequence
  Synthetic
cucgucacugugcauuaaaacu

SEQ ID NO: 115745 - RNA, 23 nt, Artificial Sequence
  Synthetic
acucgucacugugcauuaaaacu

SEQ ID NO: 115746 - RNA, 18 nt, Artificial Sequence
  Synthetic
cgacucccucuuaaaacu

SEQ ID NO: 115747 - RNA, 19 nt, Artificial Sequence
  Synthetic
acgacucccucuuaaaacu

SEQ ID NO: 115748 - RNA, 20 nt, Artificial Sequence
  Synthetic
aacgacucccucuuaaaacu

SEQ ID NO: 115749 - RNA, 21 nt, Artificial Sequence
  Synthetic
aaacgacucccucuuaaaacu

SEQ ID NO: 115750 - RNA, 22 nt, Artificial Sequence
  Synthetic
uaaacgacucccucuuaaaacu

SEQ ID NO: 115751 - RNA, 23 nt, Artificial Sequence
  Synthetic
auaaacgacucccucuuaaaacu

SEQ ID NO: 115752 - RNA, 24 nt, Artificial Sequence
  Synthetic
aauaaacgacucccucuuaaaacu

SEQ ID NO: 115753 - RNA, 18 nt, Artificial Sequence
  Synthetic
cuccauaauuuuaaaacu

SEQ ID NO: 115754 - RNA, 19 nt, Artificial Sequence
  Synthetic
ucuccauaauuuuaaaacu

SEQ ID NO: 115755 - RNA, 20 nt, Artificial Sequence
  Synthetic
aucuccauaauuuuaaaacu

SEQ ID NO: 115756 - RNA, 21 nt, Artificial Sequence
  Synthetic
caucuccauaauuuuaaaacu

SEQ ID NO: 115757 - RNA, 22 nt, Artificial Sequence
  Synthetic
acaucuccauaauuuuaaaacu

SEQ ID NO: 115758 - RNA, 23 nt, Artificial Sequence
  Synthetic
uacaucuccauaauuuuaaaacu

SEQ ID NO: 115759 - RNA, 24 nt, Artificial Sequence
  Synthetic
cuacaucuccauaauuuuaaaacu

SEQ ID NO: 115760 - RNA, 18 nt, Artificial Sequence
  Synthetic
uuuuacacagcacaaacu

SEQ ID NO: 115761 - RNA, 19 nt, Artificial Sequence
  Synthetic
uuuuuacacagcacaaacu

SEQ ID NO: 115762 - RNA, 20 nt, Artificial Sequence
  Synthetic
cuuuuuacacagcacaaacu

SEQ ID NO: 115763 - RNA, 22 nt, Artificial Sequence
  Synthetic
agcuuuuuacacagcacaaacu

SEQ ID NO: 115764 - RNA, 23 nt, Artificial Sequence
  Synthetic
aagcuuuuuacacagcacaaacu

SEQ ID NO: 115765 - RNA, 24 nt, Artificial Sequence
  Synthetic
uaagcuuuuuacacagcacaaacu

SEQ ID NO: 115766 - RNA, 18 nt, Artificial Sequence
  Synthetic
aaauuauuuccccaaacu

SEQ ID NO: 115767 - RNA, 19 nt, Artificial Sequence
  Synthetic
uaaauuauuuccccaaacu

SEQ ID NO: 115768 - RNA, 20 nt, Artificial Sequence
  Synthetic
cuaaauuauuuccccaaacu

SEQ ID NO: 115769 - RNA, 22 nt, Artificial Sequence
  Synthetic
ugcuaaauuauuuccccaaacu

SEQ ID NO: 115770 - RNA, 24 nt, Artificial Sequence
  Synthetic
ugugcuaaauuauuuccccaaacu

SEQ ID NO: 115771 - RNA, 18 nt, Artificial Sequence
  Synthetic
ccaauagauuuccaaacu

SEQ ID NO: 115772 - RNA, 19 nt, Artificial Sequence
  Synthetic
uccaauagauuuccaaacu

SEQ ID NO: 115773 - RNA, 20 nt, Artificial Sequence
  Synthetic
uuccaauagauuuccaaacu

SEQ ID NO: 115774 - RNA, 21 nt, Artificial Sequence
  Synthetic
cuuccaauagauuuccaaacu

SEQ ID NO: 115775 - RNA, 22 nt, Artificial Sequence
  Synthetic
ucuuccaauagauuuccaaacu

SEQ ID NO: 115776 - RNA, 23 nt, Artificial Sequence
  Synthetic
aucuuccaauagauuuccaaacu

SEQ ID NO: 115777 - RNA, 24 nt, Artificial Sequence
  Synthetic
aaucuuccaauagauuuccaaacu

SEQ ID NO: 115778 - RNA, 18 nt, Artificial Sequence
  Synthetic
uucucaugcucucaaacu

SEQ ID NO: 115779 - RNA, 19 nt, Artificial Sequence
  Synthetic
cuucucaugcucucaaacu

SEQ ID NO: 115780 - RNA, 20 nt, Artificial Sequence
  Synthetic
ccuucucaugcucucaaacu

SEQ ID NO: 115781 - RNA, 18 nt, Artificial Sequence
  Synthetic
cuccagagauaagaaacu

SEQ ID NO: 115782 - RNA, 19 nt, Artificial Sequence
  Synthetic
acuccagagauaagaaacu

SEQ ID NO: 115783 - RNA, 20 nt, Artificial Sequence
  Synthetic
cacuccagagauaagaaacu

SEQ ID NO: 115784 - RNA, 22 nt, Artificial Sequence
  Synthetic
ugcacuccagagauaagaaacu

SEQ ID NO: 115785 - RNA, 23 nt, Artificial Sequence
  Synthetic
cugcacuccagagauaagaaacu

SEQ ID NO: 115786 - RNA, 24 nt, Artificial Sequence
  Synthetic
ucugcacuccagagauaagaaacu

SEQ ID NO: 115787 - RNA, 18 nt, Artificial Sequence
  Synthetic
uguaugacaucagaaacu

SEQ ID NO: 115788 - RNA, 21 nt, Artificial Sequence
  Synthetic
agguguaugacaucagaaacu

SEQ ID NO: 115789 - RNA, 23 nt, Artificial Sequence
  Synthetic
agagguguaugacaucagaaacu

SEQ ID NO: 115790 - RNA, 24 nt, Artificial Sequence
  Synthetic
cagagguguaugacaucagaaacu

SEQ ID NO: 115791 - RNA, 18 nt, Artificial Sequence
  Synthetic
auucuaaagucagaaacu

SEQ ID NO: 115792 - RNA, 21 nt, Artificial Sequence
  Synthetic
uggauucuaaagucagaaacu

SEQ ID NO: 115793 - RNA, 22 nt, Artificial Sequence
  Synthetic
uuggauucuaaagucagaaacu

SEQ ID NO: 115794 - RNA, 24 nt, Artificial Sequence
  Synthetic
aguuggauucuaaagucagaaacu

SEQ ID NO: 115795 - RNA, 24 nt, Artificial Sequence
  Synthetic
uggggaaagagcgagagagaaacu

SEQ ID NO: 115796 - RNA, 19 nt, Artificial Sequence
  Synthetic
uguuugaaacauggaaacu

SEQ ID NO: 115797 - RNA, 20 nt, Artificial Sequence
  Synthetic
uuguuugaaacauggaaacu

SEQ ID NO: 115798 - RNA, 21 nt, Artificial Sequence
  Synthetic
auuguuugaaacauggaaacu

SEQ ID NO: 115799 - RNA, 22 nt, Artificial Sequence
  Synthetic
uauuguuugaaacauggaaacu

SEQ ID NO: 115800 - RNA, 23 nt, Artificial Sequence
  Synthetic
auauuguuugaaacauggaaacu

SEQ ID NO: 115801 - RNA, 24 nt, Artificial Sequence
  Synthetic
uauauuguuugaaacauggaaacu

SEQ ID NO: 115802 - RNA, 19 nt, Artificial Sequence
  Synthetic
agucagaggaauugaaacu

SEQ ID NO: 115803 - RNA, 21 nt, Artificial Sequence
  Synthetic
cgagucagaggaauugaaacu

SEQ ID NO: 115804 - RNA, 23 nt, Artificial Sequence
  Synthetic
agcgagucagaggaauugaaacu

SEQ ID NO: 115805 - RNA, 24 nt, Artificial Sequence
  Synthetic
uagcgagucagaggaauugaaacu

SEQ ID NO: 115806 - RNA, 18 nt, Artificial Sequence
  Synthetic
uucuucuuauuugaaacu

SEQ ID NO: 115807 - RNA, 20 nt, Artificial Sequence
  Synthetic
uguucuucuuauuugaaacu

SEQ ID NO: 115808 - RNA, 23 nt, Artificial Sequence
  Synthetic
ugguguucuucuuauuugaaacu

SEQ ID NO: 115809 - RNA, 24 nt, Artificial Sequence
  Synthetic
augguguucuucuuauuugaaacu

SEQ ID NO: 115810 - RNA, 18 nt, Artificial Sequence
  Synthetic
cagaauuucacauaaacu

SEQ ID NO: 115811 - RNA, 19 nt, Artificial Sequence
  Synthetic
ccagaauuucacauaaacu

SEQ ID NO: 115812 - RNA, 20 nt, Artificial Sequence
  Synthetic
cccagaauuucacauaaacu

SEQ ID NO: 115813 - RNA, 21 nt, Artificial Sequence
  Synthetic
ucccagaauuucacauaaacu

SEQ ID NO: 115814 - RNA, 22 nt, Artificial Sequence
  Synthetic
uucccagaauuucacauaaacu

SEQ ID NO: 115815 - RNA, 18 nt, Artificial Sequence
  Synthetic
caaauaauauuauaaacu

SEQ ID NO: 115816 - RNA, 19 nt, Artificial Sequence
  Synthetic
acaaauaauauuauaaacu

SEQ ID NO: 115817 - RNA, 20 nt, Artificial Sequence
  Synthetic
cacaaauaauauuauaaacu

SEQ ID NO: 115818 - RNA, 21 nt, Artificial Sequence
  Synthetic
acacaaauaauauuauaaacu

SEQ ID NO: 115819 - RNA, 22 nt, Artificial Sequence
  Synthetic
uacacaaauaauauuauaaacu

SEQ ID NO: 115820 - RNA, 23 nt, Artificial Sequence
  Synthetic
uuacacaaauaauauuauaaacu

SEQ ID NO: 115821 - RNA, 24 nt, Artificial Sequence
  Synthetic
cuuacacaaauaauauuauaaacu

SEQ ID NO: 115822 - RNA, 18 nt, Artificial Sequence
  Synthetic
uccugaaguugcuaaacu

SEQ ID NO: 115823 - RNA, 19 nt, Artificial Sequence
  Synthetic
uuccugaaguugcuaaacu

SEQ ID NO: 115824 - RNA, 20 nt, Artificial Sequence
  Synthetic
uuuccugaaguugcuaaacu

SEQ ID NO: 115825 - RNA, 22 nt, Artificial Sequence
  Synthetic
aguuuccugaaguugcuaaacu

SEQ ID NO: 115826 - RNA, 23 nt, Artificial Sequence
  Synthetic
uaguuuccugaaguugcuaaacu

SEQ ID NO: 115827 - RNA, 24 nt, Artificial Sequence
  Synthetic
auaguuuccugaaguugcuaaacu

SEQ ID NO: 115828 - RNA, 18 nt, Artificial Sequence
  Synthetic
aacgagcagucuuaaacu

SEQ ID NO: 115829 - RNA, 20 nt, Artificial Sequence
  Synthetic
ugaacgagcagucuuaaacu

SEQ ID NO: 115830 - RNA, 21 nt, Artificial Sequence
  Synthetic
cugaacgagcagucuuaaacu

SEQ ID NO: 115831 - RNA, 22 nt, Artificial Sequence
  Synthetic
ucugaacgagcagucuuaaacu

SEQ ID NO: 115832 - RNA, 23 nt, Artificial Sequence
  Synthetic
uucugaacgagcagucuuaaacu

SEQ ID NO: 115833 - RNA, 18 nt, Artificial Sequence
  Synthetic
caccuuguucuuuaaacu

SEQ ID NO: 115834 - RNA, 19 nt, Artificial Sequence
  Synthetic
acaccuuguucuuuaaacu

SEQ ID NO: 115835 - RNA, 20 nt, Artificial Sequence
  Synthetic
uacaccuuguucuuuaaacu

SEQ ID NO: 115836 - RNA, 22 nt, Artificial Sequence
  Synthetic
aguacaccuuguucuuuaaacu

SEQ ID NO: 115837 - RNA, 23 nt, Artificial Sequence
  Synthetic
aaguacaccuuguucuuuaaacu

SEQ ID NO: 115838 - RNA, 24 nt, Artificial Sequence
  Synthetic
caaguacaccuuguucuuuaaacu

SEQ ID NO: 115839 - RNA, 18 nt, Artificial Sequence
  Synthetic
caccugcucuuaacaacu

SEQ ID NO: 115840 - RNA, 19 nt, Artificial Sequence
  Synthetic
ccaccugcucuuaacaacu

SEQ ID NO: 115841 - RNA, 20 nt, Artificial Sequence
  Synthetic
accaccugcucuuaacaacu

SEQ ID NO: 115842 - RNA, 21 nt, Artificial Sequence
  Synthetic
caccaccugcucuuaacaacu

SEQ ID NO: 115843 - RNA, 22 nt, Artificial Sequence
  Synthetic
ucaccaccugcucuuaacaacu

SEQ ID NO: 115844 - RNA, 23 nt, Artificial Sequence
  Synthetic
uucaccaccugcucuuaacaacu

SEQ ID NO: 115845 - RNA, 24 nt, Artificial Sequence
  Synthetic
uuucaccaccugcucuuaacaacu

SEQ ID NO: 115846 - RNA, 21 nt, Artificial Sequence
  Synthetic
aaauuaaaacaaaugacaacu

SEQ ID NO: 115847 - RNA, 22 nt, Artificial Sequence
  Synthetic
aaaauuaaaacaaaugacaacu

SEQ ID NO: 115848 - RNA, 23 nt, Artificial Sequence
  Synthetic
caaaauuaaaacaaaugacaacu

SEQ ID NO: 115849 - RNA, 24 nt, Artificial Sequence
  Synthetic
ucaaaauuaaaacaaaugacaacu

SEQ ID NO: 115850 - RNA, 19 nt, Artificial Sequence
  Synthetic
ugcugauauuuuuacaacu

SEQ ID NO: 115851 - RNA, 20 nt, Artificial Sequence
  Synthetic
augcugauauuuuuacaacu

SEQ ID NO: 115852 - RNA, 21 nt, Artificial Sequence
  Synthetic
aaugcugauauuuuuacaacu

SEQ ID NO: 115853 - RNA, 22 nt, Artificial Sequence
  Synthetic
caaugcugauauuuuuacaacu

SEQ ID NO: 115854 - RNA, 23 nt, Artificial Sequence
  Synthetic
ucaaugcugauauuuuuacaacu

SEQ ID NO: 115855 - RNA, 24 nt, Artificial Sequence
  Synthetic
uucaaugcugauauuuuuacaacu

SEQ ID NO: 115856 - RNA, 18 nt, Artificial Sequence
  Synthetic
auaaugaucuauccaacu

SEQ ID NO: 115857 - RNA, 19 nt, Artificial Sequence
  Synthetic
aauaaugaucuauccaacu

SEQ ID NO: 115858 - RNA, 20 nt, Artificial Sequence
  Synthetic
aaauaaugaucuauccaacu

SEQ ID NO: 115859 - RNA, 21 nt, Artificial Sequence
  Synthetic
aaaauaaugaucuauccaacu

SEQ ID NO: 115860 - RNA, 23 nt, Artificial Sequence
  Synthetic
ugaaaauaaugaucuauccaacu

SEQ ID NO: 115861 - RNA, 18 nt, Artificial Sequence
  Synthetic
caaguacuugauucaacu

SEQ ID NO: 115862 - RNA, 19 nt, Artificial Sequence
  Synthetic
acaaguacuugauucaacu

SEQ ID NO: 115863 - RNA, 20 nt, Artificial Sequence
  Synthetic
cacaaguacuugauucaacu

SEQ ID NO: 115864 - RNA, 21 nt, Artificial Sequence
  Synthetic
ucacaaguacuugauucaacu

SEQ ID NO: 115865 - RNA, 22 nt, Artificial Sequence
  Synthetic
uucacaaguacuugauucaacu

SEQ ID NO: 115866 - RNA, 23 nt, Artificial Sequence
  Synthetic
uuucacaaguacuugauucaacu

SEQ ID NO: 115867 - RNA, 24 nt, Artificial Sequence
  Synthetic
auuucacaaguacuugauucaacu

SEQ ID NO: 115868 - RNA, 21 nt, Artificial Sequence
  Synthetic
cuagaccagugauuuucaacu

SEQ ID NO: 115869 - RNA, 22 nt, Artificial Sequence
  Synthetic
ccuagaccagugauuuucaacu

SEQ ID NO: 115870 - RNA, 23 nt, Artificial Sequence
  Synthetic
cccuagaccagugauuuucaacu

SEQ ID NO: 115871 - RNA, 24 nt, Artificial Sequence
  Synthetic
ccccuagaccagugauuuucaacu

SEQ ID NO: 115872 - RNA, 18 nt, Artificial Sequence
  Synthetic
accacaugauaaagaacu

SEQ ID NO: 115873 - RNA, 19 nt, Artificial Sequence
  Synthetic
aaccacaugauaaagaacu

SEQ ID NO: 115874 - RNA, 20 nt, Artificial Sequence
  Synthetic
uaaccacaugauaaagaacu

SEQ ID NO: 115875 - RNA, 22 nt, Artificial Sequence
  Synthetic
aguaaccacaugauaaagaacu

SEQ ID NO: 115876 - RNA, 23 nt, Artificial Sequence
  Synthetic
caguaaccacaugauaaagaacu

SEQ ID NO: 115877 - RNA, 24 nt, Artificial Sequence
  Synthetic
acaguaaccacaugauaaagaacu

SEQ ID NO: 115878 - RNA, 18 nt, Artificial Sequence
  Synthetic
uuguguucucugagaacu

SEQ ID NO: 115879 - RNA, 19 nt, Artificial Sequence
  Synthetic
uuuguguucucugagaacu

SEQ ID NO: 115880 - RNA, 20 nt, Artificial Sequence
  Synthetic
uuuuguguucucugagaacu

SEQ ID NO: 115881 - RNA, 21 nt, Artificial Sequence
  Synthetic
auuuuguguucucugagaacu

SEQ ID NO: 115882 - RNA, 22 nt, Artificial Sequence
  Synthetic
aauuuuguguucucugagaacu

SEQ ID NO: 115883 - RNA, 23 nt, Artificial Sequence
  Synthetic
caauuuuguguucucugagaacu

SEQ ID NO: 115884 - RNA, 18 nt, Artificial Sequence
  Synthetic
acucuucccuugagaacu

SEQ ID NO: 115885 - RNA, 19 nt, Artificial Sequence
  Synthetic
uacucuucccuugagaacu

SEQ ID NO: 115886 - RNA, 21 nt, Artificial Sequence
  Synthetic
uguacucuucccuugagaacu

SEQ ID NO: 115887 - RNA, 22 nt, Artificial Sequence
  Synthetic
auguacucuucccuugagaacu

SEQ ID NO: 115888 - RNA, 23 nt, Artificial Sequence
  Synthetic
uauguacucuucccuugagaacu

SEQ ID NO: 115889 - RNA, 18 nt, Artificial Sequence
  Synthetic
acacuuuagcaaggaacu

SEQ ID NO: 115890 - RNA, 19 nt, Artificial Sequence
  Synthetic
aacacuuuagcaaggaacu

SEQ ID NO: 115891 - RNA, 20 nt, Artificial Sequence
  Synthetic
aaacacuuuagcaaggaacu

SEQ ID NO: 115892 - RNA, 21 nt, Artificial Sequence
  Synthetic
aaaacacuuuagcaaggaacu

SEQ ID NO: 115893 - RNA, 22 nt, Artificial Sequence
  Synthetic
aaaaacacuuuagcaaggaacu

SEQ ID NO: 115894 - RNA, 24 nt, Artificial Sequence
  Synthetic
agaaaaacacuuuagcaaggaacu

SEQ ID NO: 115895 - RNA, 18 nt, Artificial Sequence
  Synthetic
uuaggggaagaaggaacu

SEQ ID NO: 115896 - RNA, 23 nt, Artificial Sequence
  Synthetic
agggguuaggggaagaaggaacu

SEQ ID NO: 115897 - RNA, 24 nt, Artificial Sequence
  Synthetic
uagggguuaggggaagaaggaacu

SEQ ID NO: 115898 - RNA, 18 nt, Artificial Sequence
  Synthetic
aauagccacaauggaacu

SEQ ID NO: 115899 - RNA, 19 nt, Artificial Sequence
  Synthetic
uaauagccacaauggaacu

SEQ ID NO: 115900 - RNA, 20 nt, Artificial Sequence
  Synthetic
uuaauagccacaauggaacu

SEQ ID NO: 115901 - RNA, 21 nt, Artificial Sequence
  Synthetic
uuuaauagccacaauggaacu

SEQ ID NO: 115902 - RNA, 22 nt, Artificial Sequence
  Synthetic
uuuuaauagccacaauggaacu

SEQ ID NO: 115903 - RNA, 23 nt, Artificial Sequence
  Synthetic
cuuuuaauagccacaauggaacu

SEQ ID NO: 115904 - RNA, 24 nt, Artificial Sequence
  Synthetic
ccuuuuaauagccacaauggaacu

SEQ ID NO: 115905 - RNA, 19 nt, Artificial Sequence
  Synthetic
agcugcuagucauggaacu

SEQ ID NO: 115906 - RNA, 21 nt, Artificial Sequence
  Synthetic
agagcugcuagucauggaacu

SEQ ID NO: 115907 - RNA, 22 nt, Artificial Sequence
  Synthetic
aagagcugcuagucauggaacu

SEQ ID NO: 115908 - RNA, 23 nt, Artificial Sequence
  Synthetic
uaagagcugcuagucauggaacu

SEQ ID NO: 115909 - RNA, 24 nt, Artificial Sequence
  Synthetic
uuaagagcugcuagucauggaacu

SEQ ID NO: 115910 - RNA, 21 nt, Artificial Sequence
  Synthetic
uauguuggauaguggugaacu

SEQ ID NO: 115911 - RNA, 23 nt, Artificial Sequence
  Synthetic
aguauguuggauaguggugaacu

SEQ ID NO: 115912 - RNA, 18 nt, Artificial Sequence
  Synthetic
uagguaacuuauauaacu

SEQ ID NO: 115913 - RNA, 19 nt, Artificial Sequence
  Synthetic
uuagguaacuuauauaacu

SEQ ID NO: 115914 - RNA, 20 nt, Artificial Sequence
  Synthetic
uuuagguaacuuauauaacu

SEQ ID NO: 115915 - RNA, 21 nt, Artificial Sequence
  Synthetic
auuuagguaacuuauauaacu

SEQ ID NO: 115916 - RNA, 22 nt, Artificial Sequence
  Synthetic
aauuuagguaacuuauauaacu

SEQ ID NO: 115917 - RNA, 23 nt, Artificial Sequence
  Synthetic
aaauuuagguaacuuauauaacu

SEQ ID NO: 115918 - RNA, 24 nt, Artificial Sequence
  Synthetic
uaaauuuagguaacuuauauaacu

SEQ ID NO: 115919 - RNA, 19 nt, Artificial Sequence
  Synthetic
ugaccccaaaagccuaacu

SEQ ID NO: 115920 - RNA, 20 nt, Artificial Sequence
  Synthetic
uugaccccaaaagccuaacu

SEQ ID NO: 115921 - RNA, 21 nt, Artificial Sequence
  Synthetic
uuugaccccaaaagccuaacu

SEQ ID NO: 115922 - RNA, 22 nt, Artificial Sequence
  Synthetic
uuuugaccccaaaagccuaacu

SEQ ID NO: 115923 - RNA, 23 nt, Artificial Sequence
  Synthetic
auuuugaccccaaaagccuaacu

SEQ ID NO: 115924 - RNA, 24 nt, Artificial Sequence
  Synthetic
aauuuugaccccaaaagccuaacu

SEQ ID NO: 115925 - RNA, 18 nt, Artificial Sequence
  Synthetic
auaauugcccuccuaacu

SEQ ID NO: 115926 - RNA, 19 nt, Artificial Sequence
  Synthetic
uauaauugcccuccuaacu

SEQ ID NO: 115927 - RNA, 20 nt, Artificial Sequence
  Synthetic
auauaauugcccuccuaacu

SEQ ID NO: 115928 - RNA, 21 nt, Artificial Sequence
  Synthetic
uauauaauugcccuccuaacu

SEQ ID NO: 115929 - RNA, 22 nt, Artificial Sequence
  Synthetic
uuauauaauugcccuccuaacu

SEQ ID NO: 115930 - RNA, 23 nt, Artificial Sequence
  Synthetic
uuuauauaauugcccuccuaacu

SEQ ID NO: 115931 - RNA, 19 nt, Artificial Sequence
  Synthetic
agagguuuggcuuguaacu

SEQ ID NO: 115932 - RNA, 20 nt, Artificial Sequence
  Synthetic
aagagguuuggcuuguaacu

SEQ ID NO: 115933 - RNA, 22 nt, Artificial Sequence
  Synthetic
ugaagagguuuggcuuguaacu

SEQ ID NO: 115934 - RNA, 23 nt, Artificial Sequence
  Synthetic
uugaagagguuuggcuuguaacu

SEQ ID NO: 115935 - RNA, 24 nt, Artificial Sequence
  Synthetic
auugaagagguuuggcuuguaacu

SEQ ID NO: 115936 - RNA, 18 nt, Artificial Sequence
  Synthetic
uaguuaucuguuguaacu

SEQ ID NO: 115937 - RNA, 19 nt, Artificial Sequence
  Synthetic
cuaguuaucuguuguaacu

SEQ ID NO: 115938 - RNA, 20 nt, Artificial Sequence
  Synthetic
ccuaguuaucuguuguaacu

SEQ ID NO: 115939 - RNA, 21 nt, Artificial Sequence
  Synthetic
uccuaguuaucuguuguaacu

SEQ ID NO: 115940 - RNA, 22 nt, Artificial Sequence
  Synthetic
auccuaguuaucuguuguaacu

SEQ ID NO: 115941 - RNA, 23 nt, Artificial Sequence
  Synthetic
aauccuaguuaucuguuguaacu

SEQ ID NO: 115942 - RNA, 24 nt, Artificial Sequence
  Synthetic
aaauccuaguuaucuguuguaacu

SEQ ID NO: 115943 - RNA, 18 nt, Artificial Sequence
  Synthetic
agaagucauccauuaacu

SEQ ID NO: 115944 - RNA, 19 nt, Artificial Sequence
  Synthetic
cagaagucauccauuaacu

SEQ ID NO: 115945 - RNA, 20 nt, Artificial Sequence
  Synthetic
acagaagucauccauuaacu

SEQ ID NO: 115946 - RNA, 21 nt, Artificial Sequence
  Synthetic
aacagaagucauccauuaacu

SEQ ID NO: 115947 - RNA, 22 nt, Artificial Sequence
  Synthetic
aaacagaagucauccauuaacu

SEQ ID NO: 115948 - RNA, 24 nt, Artificial Sequence
  Synthetic
ugaaacagaagucauccauuaacu

SEQ ID NO: 115949 - RNA, 18 nt, Artificial Sequence
  Synthetic
aaacuuugaggguuaacu

SEQ ID NO: 115950 - RNA, 20 nt, Artificial Sequence
  Synthetic
agaaacuuugaggguuaacu

SEQ ID NO: 115951 - RNA, 22 nt, Artificial Sequence
  Synthetic
ugagaaacuuugaggguuaacu

SEQ ID NO: 115952 - RNA, 23 nt, Artificial Sequence
  Synthetic
cugagaaacuuugaggguuaacu

SEQ ID NO: 115953 - RNA, 24 nt, Artificial Sequence
  Synthetic
ucugagaaacuuugaggguuaacu

SEQ ID NO: 115954 - RNA, 18 nt, Artificial Sequence
  Synthetic
caacuuuaagaaaacacu

SEQ ID NO: 115955 - RNA, 20 nt, Artificial Sequence
  Synthetic
agcaacuuuaagaaaacacu

SEQ ID NO: 115956 - RNA, 24 nt, Artificial Sequence
  Synthetic
ugggagcaacuuuaagaaaacacu

SEQ ID NO: 115957 - RNA, 18 nt, Artificial Sequence
  Synthetic
uaaugacccaacaacacu

SEQ ID NO: 115958 - RNA, 19 nt, Artificial Sequence
  Synthetic
auaaugacccaacaacacu

SEQ ID NO: 115959 - RNA, 20 nt, Artificial Sequence
  Synthetic
uauaaugacccaacaacacu

SEQ ID NO: 115960 - RNA, 21 nt, Artificial Sequence
  Synthetic
auauaaugacccaacaacacu

SEQ ID NO: 115961 - RNA, 22 nt, Artificial Sequence
  Synthetic
cauauaaugacccaacaacacu

SEQ ID NO: 115962 - RNA, 23 nt, Artificial Sequence
  Synthetic
ucauauaaugacccaacaacacu

SEQ ID NO: 115963 - RNA, 24 nt, Artificial Sequence
  Synthetic
cucauauaaugacccaacaacacu

SEQ ID NO: 115964 - RNA, 18 nt, Artificial Sequence
  Synthetic
uuuaaaaauagcaacacu

SEQ ID NO: 115965 - RNA, 19 nt, Artificial Sequence
  Synthetic
auuuaaaaauagcaacacu

SEQ ID NO: 115966 - RNA, 20 nt, Artificial Sequence
  Synthetic
uauuuaaaaauagcaacacu

SEQ ID NO: 115967 - RNA, 21 nt, Artificial Sequence
  Synthetic
cuauuuaaaaauagcaacacu

SEQ ID NO: 115968 - RNA, 23 nt, Artificial Sequence
  Synthetic
ugcuauuuaaaaauagcaacacu

SEQ ID NO: 115969 - RNA, 18 nt, Artificial Sequence
  Synthetic
ccguugucaugcaacacu

SEQ ID NO: 115970 - RNA, 19 nt, Artificial Sequence
  Synthetic
cccguugucaugcaacacu

SEQ ID NO: 115971 - RNA, 20 nt, Artificial Sequence
  Synthetic
ucccguugucaugcaacacu

SEQ ID NO: 115972 - RNA, 21 nt, Artificial Sequence
  Synthetic
aucccguugucaugcaacacu

SEQ ID NO: 115973 - RNA, 22 nt, Artificial Sequence
  Synthetic
uaucccguugucaugcaacacu

SEQ ID NO: 115974 - RNA, 23 nt, Artificial Sequence
  Synthetic
auaucccguugucaugcaacacu

SEQ ID NO: 115975 - RNA, 24 nt, Artificial Sequence
  Synthetic
cauaucccguugucaugcaacacu

SEQ ID NO: 115976 - RNA, 18 nt, Artificial Sequence
  Synthetic
aucaguuaauuacacacu

SEQ ID NO: 115977 - RNA, 19 nt, Artificial Sequence
  Synthetic
caucaguuaauuacacacu

SEQ ID NO: 115978 - RNA, 20 nt, Artificial Sequence
  Synthetic
ccaucaguuaauuacacacu

SEQ ID NO: 115979 - RNA, 23 nt, Artificial Sequence
  Synthetic
aggccaucaguuaauuacacacu

SEQ ID NO: 115980 - RNA, 24 nt, Artificial Sequence
  Synthetic
aaggccaucaguuaauuacacacu

SEQ ID NO: 115981 - RNA, 21 nt, Artificial Sequence
  Synthetic
cucuggaccagagaccacacu

SEQ ID NO: 115982 - RNA, 23 nt, Artificial Sequence
  Synthetic
ugcucuggaccagagaccacacu

SEQ ID NO: 115983 - RNA, 18 nt, Artificial Sequence
  Synthetic
ugcuagggagugcacacu

SEQ ID NO: 115984 - RNA, 19 nt, Artificial Sequence
  Synthetic
cugcuagggagugcacacu

SEQ ID NO: 115985 - RNA, 20 nt, Artificial Sequence
  Synthetic
ucugcuagggagugcacacu

SEQ ID NO: 115986 - RNA, 21 nt, Artificial Sequence
  Synthetic
aucugcuagggagugcacacu

SEQ ID NO: 115987 - RNA, 23 nt, Artificial Sequence
  Synthetic
cgaucugcuagggagugcacacu

SEQ ID NO: 115988 - RNA, 24 nt, Artificial Sequence
  Synthetic
acgaucugcuagggagugcacacu

SEQ ID NO: 115989 - RNA, 18 nt, Artificial Sequence
  Synthetic
uuucaaugaaaucacacu

SEQ ID NO: 115990 - RNA, 20 nt, Artificial Sequence
  Synthetic
aguuucaaugaaaucacacu

SEQ ID NO: 115991 - RNA, 22 nt, Artificial Sequence
  Synthetic
ugaguuucaaugaaaucacacu

SEQ ID NO: 115992 - RNA, 24 nt, Artificial Sequence
  Synthetic
agugaguuucaaugaaaucacacu

SEQ ID NO: 115993 - RNA, 18 nt, Artificial Sequence
  Synthetic
ccucagugucaggacacu

SEQ ID NO: 115994 - RNA, 19 nt, Artificial Sequence
  Synthetic
uccucagugucaggacacu

SEQ ID NO: 115995 - RNA, 20 nt, Artificial Sequence
  Synthetic
cuccucagugucaggacacu

SEQ ID NO: 115996 - RNA, 21 nt, Artificial Sequence
  Synthetic
acuccucagugucaggacacu

SEQ ID NO: 115997 - RNA, 22 nt, Artificial Sequence
  Synthetic
aacuccucagugucaggacacu

SEQ ID NO: 115998 - RNA, 18 nt, Artificial Sequence
  Synthetic
auccagaagaaugacacu

SEQ ID NO: 115999 - RNA, 19 nt, Artificial Sequence
  Synthetic
cauccagaagaaugacacu

SEQ ID NO: 116000 - RNA, 21 nt, Artificial Sequence
  Synthetic
ugcauccagaagaaugacacu

SEQ ID NO: 116001 - RNA, 22 nt, Artificial Sequence
  Synthetic
uugcauccagaagaaugacacu

SEQ ID NO: 116002 - RNA, 23 nt, Artificial Sequence
  Synthetic
auugcauccagaagaaugacacu

SEQ ID NO: 116003 - RNA, 24 nt, Artificial Sequence
  Synthetic
uauugcauccagaagaaugacacu

SEQ ID NO: 116004 - RNA, 18 nt, Artificial Sequence
  Synthetic
uccuucuuuuaauacacu

SEQ ID NO: 116005 - RNA, 19 nt, Artificial Sequence
  Synthetic
auccuucuuuuaauacacu

SEQ ID NO: 116006 - RNA, 20 nt, Artificial Sequence
  Synthetic
cauccuucuuuuaauacacu

SEQ ID NO: 116007 - RNA, 21 nt, Artificial Sequence
  Synthetic
acauccuucuuuuaauacacu

SEQ ID NO: 116008 - RNA, 22 nt, Artificial Sequence
  Synthetic
aacauccuucuuuuaauacacu

SEQ ID NO: 116009 - RNA, 23 nt, Artificial Sequence
  Synthetic
uaacauccuucuuuuaauacacu

SEQ ID NO: 116010 - RNA, 24 nt, Artificial Sequence
  Synthetic
uuaacauccuucuuuuaauacacu

SEQ ID NO: 116011 - RNA, 18 nt, Artificial Sequence
  Synthetic
agauguucccuaaccacu

SEQ ID NO: 116012 - RNA, 20 nt, Artificial Sequence
  Synthetic
ugagauguucccuaaccacu

SEQ ID NO: 116013 - RNA, 21 nt, Artificial Sequence
  Synthetic
augagauguucccuaaccacu

SEQ ID NO: 116014 - RNA, 22 nt, Artificial Sequence
  Synthetic
aaugagauguucccuaaccacu

SEQ ID NO: 116015 - RNA, 23 nt, Artificial Sequence
  Synthetic
caaugagauguucccuaaccacu

SEQ ID NO: 116016 - RNA, 24 nt, Artificial Sequence
  Synthetic
ucaaugagauguucccuaaccacu

SEQ ID NO: 116017 - RNA, 21 nt, Artificial Sequence
  Synthetic
aggggaaauggguagcccacu

SEQ ID NO: 116018 - RNA, 22 nt, Artificial Sequence
  Synthetic
aaggggaaauggguagcccacu

SEQ ID NO: 116019 - RNA, 23 nt, Artificial Sequence
  Synthetic
uaaggggaaauggguagcccacu

SEQ ID NO: 116020 - RNA, 24 nt, Artificial Sequence
  Synthetic
cuaaggggaaauggguagcccacu

SEQ ID NO: 116021 - RNA, 18 nt, Artificial Sequence
  Synthetic
uggggugugcaucccacu

SEQ ID NO: 116022 - RNA, 19 nt, Artificial Sequence
  Synthetic
uuggggugugcaucccacu

SEQ ID NO: 116023 - RNA, 20 nt, Artificial Sequence
  Synthetic
cuuggggugugcaucccacu

SEQ ID NO: 116024 - RNA, 21 nt, Artificial Sequence
  Synthetic
ccuuggggugugcaucccacu

SEQ ID NO: 116025 - RNA, 22 nt, Artificial Sequence
  Synthetic
uccuuggggugugcaucccacu

SEQ ID NO: 116026 - RNA, 23 nt, Artificial Sequence
  Synthetic
cuccuuggggugugcaucccacu

SEQ ID NO: 116027 - RNA, 20 nt, Artificial Sequence
  Synthetic
uggugauguuuagagccacu

SEQ ID NO: 116028 - RNA, 19 nt, Artificial Sequence
  Synthetic
aggugguuaaugagccacu

SEQ ID NO: 116029 - RNA, 20 nt, Artificial Sequence
  Synthetic
aaggugguuaaugagccacu

SEQ ID NO: 116030 - RNA, 21 nt, Artificial Sequence
  Synthetic
caaggugguuaaugagccacu

SEQ ID NO: 116031 - RNA, 22 nt, Artificial Sequence
  Synthetic
ccaaggugguuaaugagccacu

SEQ ID NO: 116032 - RNA, 23 nt, Artificial Sequence
  Synthetic
uccaaggugguuaaugagccacu

SEQ ID NO: 116033 - RNA, 24 nt, Artificial Sequence
  Synthetic
cuccaaggugguuaaugagccacu

SEQ ID NO: 116034 - RNA, 18 nt, Artificial Sequence
  Synthetic
cagugcugcggggccacu

SEQ ID NO: 116035 - RNA, 20 nt, Artificial Sequence
  Synthetic
agcagugcugcggggccacu

SEQ ID NO: 116036 - RNA, 22 nt, Artificial Sequence
  Synthetic
ugagcagugcugcggggccacu

SEQ ID NO: 116037 - RNA, 23 nt, Artificial Sequence
  Synthetic
uugagcagugcugcggggccacu

SEQ ID NO: 116038 - RNA, 18 nt, Artificial Sequence
  Synthetic
caacagcaugcauccacu

SEQ ID NO: 116039 - RNA, 19 nt, Artificial Sequence
  Synthetic
acaacagcaugcauccacu

SEQ ID NO: 116040 - RNA, 21 nt, Artificial Sequence
  Synthetic
agacaacagcaugcauccacu

SEQ ID NO: 116041 - RNA, 23 nt, Artificial Sequence
  Synthetic
ugagacaacagcaugcauccacu

SEQ ID NO: 116042 - RNA, 24 nt, Artificial Sequence
  Synthetic
uugagacaacagcaugcauccacu

SEQ ID NO: 116043 - RNA, 19 nt, Artificial Sequence
  Synthetic
agguucccugaauuccacu

SEQ ID NO: 116044 - RNA, 20 nt, Artificial Sequence
  Synthetic
uagguucccugaauuccacu

SEQ ID NO: 116045 - RNA, 21 nt, Artificial Sequence
  Synthetic
uuagguucccugaauuccacu

SEQ ID NO: 116046 - RNA, 22 nt, Artificial Sequence
  Synthetic
uuuagguucccugaauuccacu

SEQ ID NO: 116047 - RNA, 23 nt, Artificial Sequence
  Synthetic
auuuagguucccugaauuccacu

SEQ ID NO: 116048 - RNA, 24 nt, Artificial Sequence
  Synthetic
aauuuagguucccugaauuccacu

SEQ ID NO: 116049 - RNA, 21 nt, Artificial Sequence
  Synthetic
acuccuguuucaucuuccacu

SEQ ID NO: 116050 - RNA, 22 nt, Artificial Sequence
  Synthetic
uacuccuguuucaucuuccacu

SEQ ID NO: 116051 - RNA, 23 nt, Artificial Sequence
  Synthetic
uuacuccuguuucaucuuccacu

SEQ ID NO: 116052 - RNA, 24 nt, Artificial Sequence
  Synthetic
cuuacuccuguuucaucuuccacu

SEQ ID NO: 116053 - RNA, 18 nt, Artificial Sequence
  Synthetic
aaaccuagucuuuccacu

SEQ ID NO: 116054 - RNA, 19 nt, Artificial Sequence
  Synthetic
aaaaccuagucuuuccacu

SEQ ID NO: 116055 - RNA, 20 nt, Artificial Sequence
  Synthetic
uaaaaccuagucuuuccacu

SEQ ID NO: 116056 - RNA, 21 nt, Artificial Sequence
  Synthetic
cuaaaaccuagucuuuccacu

SEQ ID NO: 116057 - RNA, 22 nt, Artificial Sequence
  Synthetic
acuaaaaccuagucuuuccacu

SEQ ID NO: 116058 - RNA, 24 nt, Artificial Sequence
  Synthetic
ugacuaaaaccuagucuuuccacu

SEQ ID NO: 116059 - RNA, 18 nt, Artificial Sequence
  Synthetic
aaaaguacauuuuccacu

SEQ ID NO: 116060 - RNA, 19 nt, Artificial Sequence
  Synthetic
aaaaaguacauuuuccacu

SEQ ID NO: 116061 - RNA, 20 nt, Artificial Sequence
  Synthetic
caaaaaguacauuuuccacu

SEQ ID NO: 116062 - RNA, 21 nt, Artificial Sequence
  Synthetic
ucaaaaaguacauuuuccacu

SEQ ID NO: 116063 - RNA, 22 nt, Artificial Sequence
  Synthetic
uucaaaaaguacauuuuccacu

SEQ ID NO: 116064 - RNA, 23 nt, Artificial Sequence
  Synthetic
auucaaaaaguacauuuuccacu

SEQ ID NO: 116065 - RNA, 24 nt, Artificial Sequence
  Synthetic
cauucaaaaaguacauuuuccacu

SEQ ID NO: 116066 - RNA, 18 nt, Artificial Sequence
  Synthetic
cuaacagugcaaagcacu

SEQ ID NO: 116067 - RNA, 19 nt, Artificial Sequence
  Synthetic
ucuaacagugcaaagcacu

SEQ ID NO: 116068 - RNA, 20 nt, Artificial Sequence
  Synthetic
uucuaacagugcaaagcacu

SEQ ID NO: 116069 - RNA, 21 nt, Artificial Sequence
  Synthetic
cuucuaacagugcaaagcacu

SEQ ID NO: 116070 - RNA, 22 nt, Artificial Sequence
  Synthetic
ccuucuaacagugcaaagcacu

SEQ ID NO: 116071 - RNA, 23 nt, Artificial Sequence
  Synthetic
uccuucuaacagugcaaagcacu

SEQ ID NO: 116072 - RNA, 24 nt, Artificial Sequence
  Synthetic
cuccuucuaacagugcaaagcacu

SEQ ID NO: 116073 - RNA, 18 nt, Artificial Sequence
  Synthetic
ucuaugguuugaagcacu

SEQ ID NO: 116074 - RNA, 19 nt, Artificial Sequence
  Synthetic
uucuaugguuugaagcacu

SEQ ID NO: 116075 - RNA, 20 nt, Artificial Sequence
  Synthetic
uuucuaugguuugaagcacu

SEQ ID NO: 116076 - RNA, 21 nt, Artificial Sequence
  Synthetic
uuuucuaugguuugaagcacu

SEQ ID NO: 116077 - RNA, 22 nt, Artificial Sequence
  Synthetic
cuuuucuaugguuugaagcacu

SEQ ID NO: 116078 - RNA, 23 nt, Artificial Sequence
  Synthetic
ccuuuucuaugguuugaagcacu

SEQ ID NO: 116079 - RNA, 24 nt, Artificial Sequence
  Synthetic
cccuuuucuaugguuugaagcacu

SEQ ID NO: 116080 - RNA, 18 nt, Artificial Sequence
  Synthetic
cacuguuuuauaagcacu

SEQ ID NO: 116081 - RNA, 19 nt, Artificial Sequence
  Synthetic
ucacuguuuuauaagcacu

SEQ ID NO: 116082 - RNA, 20 nt, Artificial Sequence
  Synthetic
uucacuguuuuauaagcacu

SEQ ID NO: 116083 - RNA, 21 nt, Artificial Sequence
  Synthetic
uuucacuguuuuauaagcacu

SEQ ID NO: 116084 - RNA, 22 nt, Artificial Sequence
  Synthetic
uuuucacuguuuuauaagcacu

SEQ ID NO: 116085 - RNA, 23 nt, Artificial Sequence
  Synthetic
uuuuucacuguuuuauaagcacu

SEQ ID NO: 116086 - RNA, 24 nt, Artificial Sequence
  Synthetic
cuuuuucacuguuuuauaagcacu

SEQ ID NO: 116087 - RNA, 18 nt, Artificial Sequence
  Synthetic
auaucugcccuuagcacu

SEQ ID NO: 116088 - RNA, 19 nt, Artificial Sequence
  Synthetic
uauaucugcccuuagcacu

SEQ ID NO: 116089 - RNA, 20 nt, Artificial Sequence
  Synthetic
uuauaucugcccuuagcacu

SEQ ID NO: 116090 - RNA, 21 nt, Artificial Sequence
  Synthetic
uuuauaucugcccuuagcacu

SEQ ID NO: 116091 - RNA, 22 nt, Artificial Sequence
  Synthetic
cuuuauaucugcccuuagcacu

SEQ ID NO: 116092 - RNA, 24 nt, Artificial Sequence
  Synthetic
ugcuuuauaucugcccuuagcacu

SEQ ID NO: 116093 - RNA, 19 nt, Artificial Sequence
  Synthetic
agcuaaauaacagcgcacu

SEQ ID NO: 116094 - RNA, 20 nt, Artificial Sequence
  Synthetic
uagcuaaauaacagcgcacu

SEQ ID NO: 116095 - RNA, 21 nt, Artificial Sequence
  Synthetic
auagcuaaauaacagcgcacu

SEQ ID NO: 116096 - RNA, 22 nt, Artificial Sequence
  Synthetic
aauagcuaaauaacagcgcacu

SEQ ID NO: 116097 - RNA, 23 nt, Artificial Sequence
  Synthetic
aaauagcuaaauaacagcgcacu

SEQ ID NO: 116098 - RNA, 24 nt, Artificial Sequence
  Synthetic
aaaauagcuaaauaacagcgcacu

SEQ ID NO: 116099 - RNA, 18 nt, Artificial Sequence
  Synthetic
agacuauuuaaaggcacu

SEQ ID NO: 116100 - RNA, 19 nt, Artificial Sequence
  Synthetic
aagacuauuuaaaggcacu

SEQ ID NO: 116101 - RNA, 20 nt, Artificial Sequence
  Synthetic
uaagacuauuuaaaggcacu

SEQ ID NO: 116102 - RNA, 24 nt, Artificial Sequence
  Synthetic
uggguaagacuauuuaaaggcacu

SEQ ID NO: 116103 - RNA, 21 nt, Artificial Sequence
  Synthetic
cugggcaccauucuaggcacu

SEQ ID NO: 116104 - RNA, 22 nt, Artificial Sequence
  Synthetic
ucugggcaccauucuaggcacu

SEQ ID NO: 116105 - RNA, 23 nt, Artificial Sequence
  Synthetic
aucugggcaccauucuaggcacu

SEQ ID NO: 116106 - RNA, 19 nt, Artificial Sequence
  Synthetic
agccugccuacagggcacu

SEQ ID NO: 116107 - RNA, 20 nt, Artificial Sequence
  Synthetic
aagccugccuacagggcacu

SEQ ID NO: 116108 - RNA, 23 nt, Artificial Sequence
  Synthetic
aggaagccugccuacagggcacu

SEQ ID NO: 116109 - RNA, 18 nt, Artificial Sequence
  Synthetic
cauuggucggcuggcacu

SEQ ID NO: 116110 - RNA, 19 nt, Artificial Sequence
  Synthetic
ucauuggucggcuggcacu

SEQ ID NO: 116111 - RNA, 20 nt, Artificial Sequence
  Synthetic
cucauuggucggcuggcacu

SEQ ID NO: 116112 - RNA, 21 nt, Artificial Sequence
  Synthetic
acucauuggucggcuggcacu

SEQ ID NO: 116113 - RNA, 22 nt, Artificial Sequence
  Synthetic
cacucauuggucggcuggcacu

SEQ ID NO: 116114 - RNA, 23 nt, Artificial Sequence
  Synthetic
ccacucauuggucggcuggcacu

SEQ ID NO: 116115 - RNA, 24 nt, Artificial Sequence
  Synthetic
uccacucauuggucggcuggcacu

SEQ ID NO: 116116 - RNA, 19 nt, Artificial Sequence
  Synthetic
agucaauuguucuggcacu

SEQ ID NO: 116117 - RNA, 20 nt, Artificial Sequence
  Synthetic
aagucaauuguucuggcacu

SEQ ID NO: 116118 - RNA, 21 nt, Artificial Sequence
  Synthetic
uaagucaauuguucuggcacu

SEQ ID NO: 116119 - RNA, 22 nt, Artificial Sequence
  Synthetic
uuaagucaauuguucuggcacu

SEQ ID NO: 116120 - RNA, 23 nt, Artificial Sequence
  Synthetic
uuuaagucaauuguucuggcacu

SEQ ID NO: 116121 - RNA, 24 nt, Artificial Sequence
  Synthetic
auuuaagucaauuguucuggcacu

SEQ ID NO: 116122 - RNA, 18 nt, Artificial Sequence
  Synthetic
agacccugauuaugcacu

SEQ ID NO: 116123 - RNA, 19 nt, Artificial Sequence
  Synthetic
aagacccugauuaugcacu

SEQ ID NO: 116124 - RNA, 21 nt, Artificial Sequence
  Synthetic
agaagacccugauuaugcacu

SEQ ID NO: 116125 - RNA, 22 nt, Artificial Sequence
  Synthetic
aagaagacccugauuaugcacu

SEQ ID NO: 116126 - RNA, 23 nt, Artificial Sequence
  Synthetic
aaagaagacccugauuaugcacu

SEQ ID NO: 116127 - RNA, 24 nt, Artificial Sequence
  Synthetic
uaaagaagacccugauuaugcacu

SEQ ID NO: 116128 - RNA, 18 nt, Artificial Sequence
  Synthetic
aguaucugaaugugcacu

SEQ ID NO: 116129 - RNA, 19 nt, Artificial Sequence
  Synthetic
uaguaucugaaugugcacu

SEQ ID NO: 116130 - RNA, 20 nt, Artificial Sequence
  Synthetic
auaguaucugaaugugcacu

SEQ ID NO: 116131 - RNA, 21 nt, Artificial Sequence
  Synthetic
aauaguaucugaaugugcacu

SEQ ID NO: 116132 - RNA, 22 nt, Artificial Sequence
  Synthetic
aaauaguaucugaaugugcacu

SEQ ID NO: 116133 - RNA, 23 nt, Artificial Sequence
  Synthetic
uaaauaguaucugaaugugcacu

SEQ ID NO: 116134 - RNA, 18 nt, Artificial Sequence
  Synthetic
aucugcuugcguugcacu

SEQ ID NO: 116135 - RNA, 19 nt, Artificial Sequence
  Synthetic
caucugcuugcguugcacu

SEQ ID NO: 116136 - RNA, 20 nt, Artificial Sequence
  Synthetic
acaucugcuugcguugcacu

SEQ ID NO: 116137 - RNA, 21 nt, Artificial Sequence
  Synthetic
aacaucugcuugcguugcacu

SEQ ID NO: 116138 - RNA, 22 nt, Artificial Sequence
  Synthetic
uaacaucugcuugcguugcacu

SEQ ID NO: 116139 - RNA, 23 nt, Artificial Sequence
  Synthetic
cuaacaucugcuugcguugcacu

SEQ ID NO: 116140 - RNA, 24 nt, Artificial Sequence
  Synthetic
ucuaacaucugcuugcguugcacu

SEQ ID NO: 116141 - RNA, 18 nt, Artificial Sequence
  Synthetic
acacaacacacaaucacu

SEQ ID NO: 116142 - RNA, 20 nt, Artificial Sequence
  Synthetic
ugacacaacacacaaucacu

SEQ ID NO: 116143 - RNA, 21 nt, Artificial Sequence
  Synthetic
cugacacaacacacaaucacu

SEQ ID NO: 116144 - RNA, 22 nt, Artificial Sequence
  Synthetic
acugacacaacacacaaucacu

SEQ ID NO: 116145 - RNA, 23 nt, Artificial Sequence
  Synthetic
cacugacacaacacacaaucacu

SEQ ID NO: 116146 - RNA, 24 nt, Artificial Sequence
  Synthetic
ucacugacacaacacacaaucacu

SEQ ID NO: 116147 - RNA, 18 nt, Artificial Sequence
  Synthetic
ugauaauagagaaucacu

SEQ ID NO: 116148 - RNA, 19 nt, Artificial Sequence
  Synthetic
cugauaauagagaaucacu

SEQ ID NO: 116149 - RNA, 20 nt, Artificial Sequence
  Synthetic
ucugauaauagagaaucacu

SEQ ID NO: 116150 - RNA, 21 nt, Artificial Sequence
  Synthetic
cucugauaauagagaaucacu

SEQ ID NO: 116151 - RNA, 22 nt, Artificial Sequence
  Synthetic
ucucugauaauagagaaucacu

SEQ ID NO: 116152 - RNA, 23 nt, Artificial Sequence
  Synthetic
cucucugauaauagagaaucacu

SEQ ID NO: 116153 - RNA, 24 nt, Artificial Sequence
  Synthetic
ccucucugauaauagagaaucacu

SEQ ID NO: 116154 - RNA, 18 nt, Artificial Sequence
  Synthetic
agcacaaucaucaucacu

SEQ ID NO: 116155 - RNA, 19 nt, Artificial Sequence
  Synthetic
aagcacaaucaucaucacu

SEQ ID NO: 116156 - RNA, 21 nt, Artificial Sequence
  Synthetic
agaagcacaaucaucaucacu

SEQ ID NO: 116157 - RNA, 22 nt, Artificial Sequence
  Synthetic
aagaagcacaaucaucaucacu

SEQ ID NO: 116158 - RNA, 18 nt, Artificial Sequence
  Synthetic
aucacaugacuuaucacu

SEQ ID NO: 116159 - RNA, 19 nt, Artificial Sequence
  Synthetic
aaucacaugacuuaucacu

SEQ ID NO: 116160 - RNA, 20 nt, Artificial Sequence
  Synthetic
uaaucacaugacuuaucacu

SEQ ID NO: 116161 - RNA, 21 nt, Artificial Sequence
  Synthetic
uuaaucacaugacuuaucacu

SEQ ID NO: 116162 - RNA, 22 nt, Artificial Sequence
  Synthetic
cuuaaucacaugacuuaucacu

SEQ ID NO: 116163 - RNA, 23 nt, Artificial Sequence
  Synthetic
ucuuaaucacaugacuuaucacu

SEQ ID NO: 116164 - RNA, 24 nt, Artificial Sequence
  Synthetic
uucuuaaucacaugacuuaucacu

SEQ ID NO: 116165 - RNA, 19 nt, Artificial Sequence
  Synthetic
ugacaguauaugugucacu

SEQ ID NO: 116166 - RNA, 20 nt, Artificial Sequence
  Synthetic
cugacaguauaugugucacu

SEQ ID NO: 116167 - RNA, 22 nt, Artificial Sequence
  Synthetic
agcugacaguauaugugucacu

SEQ ID NO: 116168 - RNA, 24 nt, Artificial Sequence
  Synthetic
ugagcugacaguauaugugucacu

SEQ ID NO: 116169 - RNA, 18 nt, Artificial Sequence
  Synthetic
acuguguaauaauucacu

SEQ ID NO: 116170 - RNA, 19 nt, Artificial Sequence
  Synthetic
aacuguguaauaauucacu

SEQ ID NO: 116171 - RNA, 20 nt, Artificial Sequence
  Synthetic
uaacuguguaauaauucacu

SEQ ID NO: 116172 - RNA, 21 nt, Artificial Sequence
  Synthetic
uuaacuguguaauaauucacu

SEQ ID NO: 116173 - RNA, 23 nt, Artificial Sequence
  Synthetic
aguuaacuguguaauaauucacu

SEQ ID NO: 116174 - RNA, 18 nt, Artificial Sequence
  Synthetic
augaacaaaugauucacu

SEQ ID NO: 116175 - RNA, 21 nt, Artificial Sequence
  Synthetic
aggaugaacaaaugauucacu

SEQ ID NO: 116176 - RNA, 22 nt, Artificial Sequence
  Synthetic
caggaugaacaaaugauucacu

SEQ ID NO: 116177 - RNA, 23 nt, Artificial Sequence
  Synthetic
ucaggaugaacaaaugauucacu

SEQ ID NO: 116178 - RNA, 24 nt, Artificial Sequence
  Synthetic
aucaggaugaacaaaugauucacu

SEQ ID NO: 116179 - RNA, 18 nt, Artificial Sequence
  Synthetic
aggucauuaaucuucacu

SEQ ID NO: 116180 - RNA, 20 nt, Artificial Sequence
  Synthetic
ugaggucauuaaucuucacu

SEQ ID NO: 116181 - RNA, 21 nt, Artificial Sequence
  Synthetic
augaggucauuaaucuucacu

SEQ ID NO: 116182 - RNA, 22 nt, Artificial Sequence
  Synthetic
uaugaggucauuaaucuucacu

SEQ ID NO: 116183 - RNA, 23 nt, Artificial Sequence
  Synthetic
cuaugaggucauuaaucuucacu

SEQ ID NO: 116184 - RNA, 24 nt, Artificial Sequence
  Synthetic
ccuaugaggucauuaaucuucacu

SEQ ID NO: 116185 - RNA, 19 nt, Artificial Sequence
  Synthetic
agaagagaguaguuucacu

SEQ ID NO: 116186 - RNA, 20 nt, Artificial Sequence
  Synthetic
aagaagagaguaguuucacu

SEQ ID NO: 116187 - RNA, 21 nt, Artificial Sequence
  Synthetic
caagaagagaguaguuucacu

SEQ ID NO: 116188 - RNA, 22 nt, Artificial Sequence
  Synthetic
ucaagaagagaguaguuucacu

SEQ ID NO: 116189 - RNA, 23 nt, Artificial Sequence
  Synthetic
cucaagaagagaguaguuucacu

SEQ ID NO: 116190 - RNA, 24 nt, Artificial Sequence
  Synthetic
ccucaagaagagaguaguuucacu

SEQ ID NO: 116191 - RNA, 18 nt, Artificial Sequence
  Synthetic
uagagguaauguuucacu

SEQ ID NO: 116192 - RNA, 19 nt, Artificial Sequence
  Synthetic
cuagagguaauguuucacu

SEQ ID NO: 116193 - RNA, 20 nt, Artificial Sequence
  Synthetic
ucuagagguaauguuucacu

SEQ ID NO: 116194 - RNA, 21 nt, Artificial Sequence
  Synthetic
aucuagagguaauguuucacu

SEQ ID NO: 116195 - RNA, 22 nt, Artificial Sequence
  Synthetic
aaucuagagguaauguuucacu

SEQ ID NO: 116196 - RNA, 24 nt, Artificial Sequence
  Synthetic
ugaaucuagagguaauguuucacu

SEQ ID NO: 116197 - RNA, 18 nt, Artificial Sequence
  Synthetic
acaucacagguuuucacu

SEQ ID NO: 116198 - RNA, 19 nt, Artificial Sequence
  Synthetic
aacaucacagguuuucacu

SEQ ID NO: 116199 - RNA, 20 nt, Artificial Sequence
  Synthetic
caacaucacagguuuucacu

SEQ ID NO: 116200 - RNA, 21 nt, Artificial Sequence
  Synthetic
ccaacaucacagguuuucacu

SEQ ID NO: 116201 - RNA, 22 nt, Artificial Sequence
  Synthetic
accaacaucacagguuuucacu

SEQ ID NO: 116202 - RNA, 23 nt, Artificial Sequence
  Synthetic
uaccaacaucacagguuuucacu

SEQ ID NO: 116203 - RNA, 18 nt, Artificial Sequence
  Synthetic
uacuuugagaaaaagacu

SEQ ID NO: 116204 - RNA, 19 nt, Artificial Sequence
  Synthetic
uuacuuugagaaaaagacu

SEQ ID NO: 116205 - RNA, 20 nt, Artificial Sequence
  Synthetic
auuacuuugagaaaaagacu

SEQ ID NO: 116206 - RNA, 21 nt, Artificial Sequence
  Synthetic
aauuacuuugagaaaaagacu

SEQ ID NO: 116207 - RNA, 22 nt, Artificial Sequence
  Synthetic
caauuacuuugagaaaaagacu

SEQ ID NO: 116208 - RNA, 23 nt, Artificial Sequence
  Synthetic
ucaauuacuuugagaaaaagacu

SEQ ID NO: 116209 - RNA, 24 nt, Artificial Sequence
  Synthetic
uucaauuacuuugagaaaaagacu

SEQ ID NO: 116210 - RNA, 18 nt, Artificial Sequence
  Synthetic
cuaauacauacaaagacu

SEQ ID NO: 116211 - RNA, 19 nt, Artificial Sequence
  Synthetic
ucuaauacauacaaagacu

SEQ ID NO: 116212 - RNA, 20 nt, Artificial Sequence
  Synthetic
uucuaauacauacaaagacu

SEQ ID NO: 116213 - RNA, 21 nt, Artificial Sequence
  Synthetic
uuucuaauacauacaaagacu

SEQ ID NO: 116214 - RNA, 22 nt, Artificial Sequence
  Synthetic
cuuucuaauacauacaaagacu

SEQ ID NO: 116215 - RNA, 23 nt, Artificial Sequence
  Synthetic
ucuuucuaauacauacaaagacu

SEQ ID NO: 116216 - RNA, 24 nt, Artificial Sequence
  Synthetic
aucuuucuaauacauacaaagacu

SEQ ID NO: 116217 - RNA, 18 nt, Artificial Sequence
  Synthetic
acggcauuccucaagacu

SEQ ID NO: 116218 - RNA, 19 nt, Artificial Sequence
  Synthetic
cacggcauuccucaagacu

SEQ ID NO: 116219 - RNA, 20 nt, Artificial Sequence
  Synthetic
acacggcauuccucaagacu

SEQ ID NO: 116220 - RNA, 21 nt, Artificial Sequence
  Synthetic
uacacggcauuccucaagacu

SEQ ID NO: 116221 - RNA, 22 nt, Artificial Sequence
  Synthetic
auacacggcauuccucaagacu

SEQ ID NO: 116222 - RNA, 23 nt, Artificial Sequence
  Synthetic
uauacacggcauuccucaagacu

SEQ ID NO: 116223 - RNA, 24 nt, Artificial Sequence
  Synthetic
auauacacggcauuccucaagacu

SEQ ID NO: 116224 - RNA, 18 nt, Artificial Sequence
  Synthetic
uuguugggaaauaagacu

SEQ ID NO: 116225 - RNA, 19 nt, Artificial Sequence
  Synthetic
cuuguugggaaauaagacu

SEQ ID NO: 116226 - RNA, 20 nt, Artificial Sequence
  Synthetic
ucuuguugggaaauaagacu

SEQ ID NO: 116227 - RNA, 21 nt, Artificial Sequence
  Synthetic
cucuuguugggaaauaagacu

SEQ ID NO: 116228 - RNA, 22 nt, Artificial Sequence
  Synthetic
ucucuuguugggaaauaagacu

SEQ ID NO: 116229 - RNA, 23 nt, Artificial Sequence
  Synthetic
cucucuuguugggaaauaagacu

SEQ ID NO: 116230 - RNA, 24 nt, Artificial Sequence
  Synthetic
ccucucuuguugggaaauaagacu

SEQ ID NO: 116231 - RNA, 21 nt, Artificial Sequence
  Synthetic
ugugugauguugaauaagacu

SEQ ID NO: 116232 - RNA, 23 nt, Artificial Sequence
  Synthetic
ugugugugauguugaauaagacu

SEQ ID NO: 116233 - RNA, 24 nt, Artificial Sequence
  Synthetic
augugugugauguugaauaagacu

SEQ ID NO: 116234 - RNA, 18 nt, Artificial Sequence
  Synthetic
uggccaaccccuaagacu

SEQ ID NO: 116235 - RNA, 19 nt, Artificial Sequence
  Synthetic
auggccaaccccuaagacu

SEQ ID NO: 116236 - RNA, 20 nt, Artificial Sequence
  Synthetic
cauggccaaccccuaagacu

SEQ ID NO: 116237 - RNA, 21 nt, Artificial Sequence
  Synthetic
acauggccaaccccuaagacu

SEQ ID NO: 116238 - RNA, 22 nt, Artificial Sequence
  Synthetic
cacauggccaaccccuaagacu

SEQ ID NO: 116239 - RNA, 23 nt, Artificial Sequence
  Synthetic
ucacauggccaaccccuaagacu

SEQ ID NO: 116240 - RNA, 24 nt, Artificial Sequence
  Synthetic
aucacauggccaaccccuaagacu

SEQ ID NO: 116241 - RNA, 18 nt, Artificial Sequence
  Synthetic
auaaccaaugcuaagacu

SEQ ID NO: 116242 - RNA, 19 nt, Artificial Sequence
  Synthetic
aauaaccaaugcuaagacu

SEQ ID NO: 116243 - RNA, 20 nt, Artificial Sequence
  Synthetic
aaauaaccaaugcuaagacu

SEQ ID NO: 116244 - RNA, 21 nt, Artificial Sequence
  Synthetic
uaaauaaccaaugcuaagacu

SEQ ID NO: 116245 - RNA, 22 nt, Artificial Sequence
  Synthetic
auaaauaaccaaugcuaagacu

SEQ ID NO: 116246 - RNA, 23 nt, Artificial Sequence
  Synthetic
aauaaauaaccaaugcuaagacu

SEQ ID NO: 116247 - RNA, 24 nt, Artificial Sequence
  Synthetic
aaauaaauaaccaaugcuaagacu

SEQ ID NO: 116248 - RNA, 21 nt, Artificial Sequence
  Synthetic
aggguuuauaagugccagacu

SEQ ID NO: 116249 - RNA, 22 nt, Artificial Sequence
  Synthetic
uaggguuuauaagugccagacu

SEQ ID NO: 116250 - RNA, 23 nt, Artificial Sequence
  Synthetic
uuaggguuuauaagugccagacu

SEQ ID NO: 116251 - RNA, 18 nt, Artificial Sequence
  Synthetic
cauagagcaaugcagacu

SEQ ID NO: 116252 - RNA, 19 nt, Artificial Sequence
  Synthetic
ccauagagcaaugcagacu

SEQ ID NO: 116253 - RNA, 22 nt, Artificial Sequence
  Synthetic
uggccauagagcaaugcagacu

SEQ ID NO: 116254 - RNA, 23 nt, Artificial Sequence
  Synthetic
cuggccauagagcaaugcagacu

SEQ ID NO: 116255 - RNA, 18 nt, Artificial Sequence
  Synthetic
augagucauuuucagacu

SEQ ID NO: 116256 - RNA, 19 nt, Artificial Sequence
  Synthetic
aaugagucauuuucagacu

SEQ ID NO: 116257 - RNA, 20 nt, Artificial Sequence
  Synthetic
aaaugagucauuuucagacu

SEQ ID NO: 116258 - RNA, 21 nt, Artificial Sequence
  Synthetic
uaaaugagucauuuucagacu

SEQ ID NO: 116259 - RNA, 22 nt, Artificial Sequence
  Synthetic
auaaaugagucauuuucagacu

SEQ ID NO: 116260 - RNA, 23 nt, Artificial Sequence
  Synthetic
aauaaaugagucauuuucagacu

SEQ ID NO: 116261 - RNA, 24 nt, Artificial Sequence
  Synthetic
aaauaaaugagucauuuucagacu

SEQ ID NO: 116262 - RNA, 18 nt, Artificial Sequence
  Synthetic
cuaaccaccucagagacu

SEQ ID NO: 116263 - RNA, 19 nt, Artificial Sequence
  Synthetic
ucuaaccaccucagagacu

SEQ ID NO: 116264 - RNA, 20 nt, Artificial Sequence
  Synthetic
cucuaaccaccucagagacu

SEQ ID NO: 116265 - RNA, 21 nt, Artificial Sequence
  Synthetic
ucucuaaccaccucagagacu

SEQ ID NO: 116266 - RNA, 22 nt, Artificial Sequence
  Synthetic
cucucuaaccaccucagagacu

SEQ ID NO: 116267 - RNA, 23 nt, Artificial Sequence
  Synthetic
ccucucuaaccaccucagagacu

SEQ ID NO: 116268 - RNA, 18 nt, Artificial Sequence
  Synthetic
ugcugcuaugaauagacu

SEQ ID NO: 116269 - RNA, 21 nt, Artificial Sequence
  Synthetic
uggugcugcuaugaauagacu

SEQ ID NO: 116270 - RNA, 18 nt, Artificial Sequence
  Synthetic
ugcucucuauucuagacu

SEQ ID NO: 116271 - RNA, 20 nt, Artificial Sequence
  Synthetic
ugugcucucuauucuagacu

SEQ ID NO: 116272 - RNA, 21 nt, Artificial Sequence
  Synthetic
uugugcucucuauucuagacu

SEQ ID NO: 116273 - RNA, 22 nt, Artificial Sequence
  Synthetic
auugugcucucuauucuagacu

SEQ ID NO: 116274 - RNA, 24 nt, Artificial Sequence
  Synthetic
ugauugugcucucuauucuagacu

SEQ ID NO: 116275 - RNA, 18 nt, Artificial Sequence
  Synthetic
cccaguggccuuuagacu

SEQ ID NO: 116276 - RNA, 20 nt, Artificial Sequence
  Synthetic
cgcccaguggccuuuagacu

SEQ ID NO: 116277 - RNA, 21 nt, Artificial Sequence
  Synthetic
ucgcccaguggccuuuagacu

SEQ ID NO: 116278 - RNA, 23 nt, Artificial Sequence
  Synthetic
ugucgcccaguggccuuuagacu

SEQ ID NO: 116279 - RNA, 24 nt, Artificial Sequence
  Synthetic
uugucgcccaguggccuuuagacu

SEQ ID NO: 116280 - RNA, 21 nt, Artificial Sequence
  Synthetic
acacauuuuucucuuaggacu

SEQ ID NO: 116281 - RNA, 22 nt, Artificial Sequence
  Synthetic
aacacauuuuucucuuaggacu

SEQ ID NO: 116282 - RNA, 23 nt, Artificial Sequence
  Synthetic
caacacauuuuucucuuaggacu

SEQ ID NO: 116283 - RNA, 24 nt, Artificial Sequence
  Synthetic
ucaacacauuuuucucuuaggacu

SEQ ID NO: 116284 - RNA, 21 nt, Artificial Sequence
  Synthetic
aaacccaaagccacagggacu

SEQ ID NO: 116285 - RNA, 22 nt, Artificial Sequence
  Synthetic
aaaacccaaagccacagggacu

SEQ ID NO: 116286 - RNA, 23 nt, Artificial Sequence
  Synthetic
aaaaacccaaagccacagggacu

SEQ ID NO: 116287 - RNA, 24 nt, Artificial Sequence
  Synthetic
aaaaaacccaaagccacagggacu

SEQ ID NO: 116288 - RNA, 18 nt, Artificial Sequence
  Synthetic
cccaguaauucagggacu

SEQ ID NO: 116289 - RNA, 19 nt, Artificial Sequence
  Synthetic
acccaguaauucagggacu

SEQ ID NO: 116290 - RNA, 20 nt, Artificial Sequence
  Synthetic
uacccaguaauucagggacu

SEQ ID NO: 116291 - RNA, 21 nt, Artificial Sequence
  Synthetic
cuacccaguaauucagggacu

SEQ ID NO: 116292 - RNA, 22 nt, Artificial Sequence
  Synthetic
ucuacccaguaauucagggacu

SEQ ID NO: 116293 - RNA, 23 nt, Artificial Sequence
  Synthetic
cucuacccaguaauucagggacu

SEQ ID NO: 116294 - RNA, 24 nt, Artificial Sequence
  Synthetic
ucucuacccaguaauucagggacu

SEQ ID NO: 116295 - RNA, 21 nt, Artificial Sequence
  Synthetic
uaguuagaagaaaaauggacu

SEQ ID NO: 116296 - RNA, 23 nt, Artificial Sequence
  Synthetic
uguaguuagaagaaaaauggacu

SEQ ID NO: 116297 - RNA, 24 nt, Artificial Sequence
  Synthetic
cuguaguuagaagaaaaauggacu

SEQ ID NO: 116298 - RNA, 18 nt, Artificial Sequence
  Synthetic
ugcaaacaucacuggacu

SEQ ID NO: 116299 - RNA, 20 nt, Artificial Sequence
  Synthetic
agugcaaacaucacuggacu

SEQ ID NO: 116300 - RNA, 21 nt, Artificial Sequence
  Synthetic
uagugcaaacaucacuggacu

SEQ ID NO: 116301 - RNA, 23 nt, Artificial Sequence
  Synthetic
uguagugcaaacaucacuggacu

SEQ ID NO: 116302 - RNA, 24 nt, Artificial Sequence
  Synthetic
auguagugcaaacaucacuggacu

SEQ ID NO: 116303 - RNA, 18 nt, Artificial Sequence
  Synthetic
uuaguauaauccuggacu

SEQ ID NO: 116304 - RNA, 19 nt, Artificial Sequence
  Synthetic
uuuaguauaauccuggacu

SEQ ID NO: 116305 - RNA, 20 nt, Artificial Sequence
  Synthetic
auuuaguauaauccuggacu

SEQ ID NO: 116306 - RNA, 21 nt, Artificial Sequence
  Synthetic
cauuuaguauaauccuggacu

SEQ ID NO: 116307 - RNA, 22 nt, Artificial Sequence
  Synthetic
acauuuaguauaauccuggacu

SEQ ID NO: 116308 - RNA, 23 nt, Artificial Sequence
  Synthetic
cacauuuaguauaauccuggacu

SEQ ID NO: 116309 - RNA, 24 nt, Artificial Sequence
  Synthetic
acacauuuaguauaauccuggacu

SEQ ID NO: 116310 - RNA, 18 nt, Artificial Sequence
  Synthetic
cagcagcuugucuggacu

SEQ ID NO: 116311 - RNA, 19 nt, Artificial Sequence
  Synthetic
acagcagcuugucuggacu

SEQ ID NO: 116312 - RNA, 20 nt, Artificial Sequence
  Synthetic
cacagcagcuugucuggacu

SEQ ID NO: 116313 - RNA, 21 nt, Artificial Sequence
  Synthetic
ccacagcagcuugucuggacu

SEQ ID NO: 116314 - RNA, 22 nt, Artificial Sequence
  Synthetic
accacagcagcuugucuggacu

SEQ ID NO: 116315 - RNA, 23 nt, Artificial Sequence
  Synthetic
aaccacagcagcuugucuggacu

SEQ ID NO: 116316 - RNA, 18 nt, Artificial Sequence
  Synthetic
caggugaaauauuggacu

SEQ ID NO: 116317 - RNA, 19 nt, Artificial Sequence
  Synthetic
acaggugaaauauuggacu

SEQ ID NO: 116318 - RNA, 20 nt, Artificial Sequence
  Synthetic
uacaggugaaauauuggacu

SEQ ID NO: 116319 - RNA, 21 nt, Artificial Sequence
  Synthetic
auacaggugaaauauuggacu

SEQ ID NO: 116320 - RNA, 22 nt, Artificial Sequence
  Synthetic
aauacaggugaaauauuggacu

SEQ ID NO: 116321 - RNA, 23 nt, Artificial Sequence
  Synthetic
uaauacaggugaaauauuggacu

SEQ ID NO: 116322 - RNA, 24 nt, Artificial Sequence
  Synthetic
auaauacaggugaaauauuggacu

SEQ ID NO: 116323 - RNA, 18 nt, Artificial Sequence
  Synthetic
acacaaaguacaaugacu

SEQ ID NO: 116324 - RNA, 19 nt, Artificial Sequence
  Synthetic
aacacaaaguacaaugacu

SEQ ID NO: 116325 - RNA, 20 nt, Artificial Sequence
  Synthetic
aaacacaaaguacaaugacu

SEQ ID NO: 116326 - RNA, 21 nt, Artificial Sequence
  Synthetic
aaaacacaaaguacaaugacu

SEQ ID NO: 116327 - RNA, 22 nt, Artificial Sequence
  Synthetic
caaaacacaaaguacaaugacu

SEQ ID NO: 116328 - RNA, 23 nt, Artificial Sequence
  Synthetic
acaaaacacaaaguacaaugacu

SEQ ID NO: 116329 - RNA, 18 nt, Artificial Sequence
  Synthetic
uuggaagacgcaaugacu

SEQ ID NO: 116330 - RNA, 19 nt, Artificial Sequence
  Synthetic
cuuggaagacgcaaugacu

SEQ ID NO: 116331 - RNA, 20 nt, Artificial Sequence
  Synthetic
acuuggaagacgcaaugacu

SEQ ID NO: 116332 - RNA, 21 nt, Artificial Sequence
  Synthetic
aacuuggaagacgcaaugacu

SEQ ID NO: 116333 - RNA, 22 nt, Artificial Sequence
  Synthetic
aaacuuggaagacgcaaugacu

SEQ ID NO: 116334 - RNA, 23 nt, Artificial Sequence
  Synthetic
aaaacuuggaagacgcaaugacu

SEQ ID NO: 116335 - RNA, 18 nt, Artificial Sequence
  Synthetic
ugugguaugcuaaugacu

SEQ ID NO: 116336 - RNA, 19 nt, Artificial Sequence
  Synthetic
cugugguaugcuaaugacu

SEQ ID NO: 116337 - RNA, 21 nt, Artificial Sequence
  Synthetic
ugcugugguaugcuaaugacu

SEQ ID NO: 116338 - RNA, 22 nt, Artificial Sequence
  Synthetic
cugcugugguaugcuaaugacu

SEQ ID NO: 116339 - RNA, 23 nt, Artificial Sequence
  Synthetic
ucugcugugguaugcuaaugacu

SEQ ID NO: 116340 - RNA, 18 nt, Artificial Sequence
  Synthetic
cauuuugauagcaugacu

SEQ ID NO: 116341 - RNA, 19 nt, Artificial Sequence
  Synthetic
ucauuuugauagcaugacu

SEQ ID NO: 116342 - RNA, 20 nt, Artificial Sequence
  Synthetic
aucauuuugauagcaugacu

SEQ ID NO: 116343 - RNA, 21 nt, Artificial Sequence
  Synthetic
uaucauuuugauagcaugacu

SEQ ID NO: 116344 - RNA, 22 nt, Artificial Sequence
  Synthetic
auaucauuuugauagcaugacu

SEQ ID NO: 116345 - RNA, 23 nt, Artificial Sequence
  Synthetic
uauaucauuuugauagcaugacu

SEQ ID NO: 116346 - RNA, 24 nt, Artificial Sequence
  Synthetic
uuauaucauuuugauagcaugacu

SEQ ID NO: 116347 - RNA, 18 nt, Artificial Sequence
  Synthetic
cauaaaaucucccugacu

SEQ ID NO: 116348 - RNA, 19 nt, Artificial Sequence
  Synthetic
acauaaaaucucccugacu

SEQ ID NO: 116349 - RNA, 20 nt, Artificial Sequence
  Synthetic
aacauaaaaucucccugacu

SEQ ID NO: 116350 - RNA, 21 nt, Artificial Sequence
  Synthetic
aaacauaaaaucucccugacu

SEQ ID NO: 116351 - RNA, 22 nt, Artificial Sequence
  Synthetic
aaaacauaaaaucucccugacu

SEQ ID NO: 116352 - RNA, 23 nt, Artificial Sequence
  Synthetic
caaaacauaaaaucucccugacu

SEQ ID NO: 116353 - RNA, 24 nt, Artificial Sequence
  Synthetic
acaaaacauaaaaucucccugacu

SEQ ID NO: 116354 - RNA, 18 nt, Artificial Sequence
  Synthetic
aaaacaagacaggugacu

SEQ ID NO: 116355 - RNA, 19 nt, Artificial Sequence
  Synthetic
aaaaacaagacaggugacu

SEQ ID NO: 116356 - RNA, 20 nt, Artificial Sequence
  Synthetic
aaaaaacaagacaggugacu

SEQ ID NO: 116357 - RNA, 22 nt, Artificial Sequence
  Synthetic
agaaaaaacaagacaggugacu

SEQ ID NO: 116358 - RNA, 23 nt, Artificial Sequence
  Synthetic
aagaaaaaacaagacaggugacu

SEQ ID NO: 116359 - RNA, 24 nt, Artificial Sequence
  Synthetic
aaagaaaaaacaagacaggugacu

SEQ ID NO: 116360 - RNA, 18 nt, Artificial Sequence
  Synthetic
uugcuuugacaauugacu

SEQ ID NO: 116361 - RNA, 19 nt, Artificial Sequence
  Synthetic
cuugcuuugacaauugacu

SEQ ID NO: 116362 - RNA, 20 nt, Artificial Sequence
  Synthetic
acuugcuuugacaauugacu

SEQ ID NO: 116363 - RNA, 22 nt, Artificial Sequence
  Synthetic
ugacuugcuuugacaauugacu

SEQ ID NO: 116364 - RNA, 24 nt, Artificial Sequence
  Synthetic
cgugacuugcuuugacaauugacu

SEQ ID NO: 116365 - RNA, 19 nt, Artificial Sequence
  Synthetic
uggcuuuucuagcuugacu

SEQ ID NO: 116366 - RNA, 20 nt, Artificial Sequence
  Synthetic
uuggcuuuucuagcuugacu

SEQ ID NO: 116367 - RNA, 21 nt, Artificial Sequence
  Synthetic
cuuggcuuuucuagcuugacu

SEQ ID NO: 116368 - RNA, 23 nt, Artificial Sequence
  Synthetic
ugcuuggcuuuucuagcuugacu

SEQ ID NO: 116369 - RNA, 24 nt, Artificial Sequence
  Synthetic
uugcuuggcuuuucuagcuugacu

SEQ ID NO: 116370 - RNA, 18 nt, Artificial Sequence
  Synthetic
accaaccuauauuugacu

SEQ ID NO: 116371 - RNA, 19 nt, Artificial Sequence
  Synthetic
caccaaccuauauuugacu

SEQ ID NO: 116372 - RNA, 20 nt, Artificial Sequence
  Synthetic
acaccaaccuauauuugacu

SEQ ID NO: 116373 - RNA, 21 nt, Artificial Sequence
  Synthetic
uacaccaaccuauauuugacu

SEQ ID NO: 116374 - RNA, 22 nt, Artificial Sequence
  Synthetic
auacaccaaccuauauuugacu

SEQ ID NO: 116375 - RNA, 23 nt, Artificial Sequence
  Synthetic
cauacaccaaccuauauuugacu

SEQ ID NO: 116376 - RNA, 24 nt, Artificial Sequence
  Synthetic
ucauacaccaaccuauauuugacu

SEQ ID NO: 116377 - RNA, 19 nt, Artificial Sequence
  Synthetic
aguaaucacauaaaauacu

SEQ ID NO: 116378 - RNA, 21 nt, Artificial Sequence
  Synthetic
agaguaaucacauaaaauacu

SEQ ID NO: 116379 - RNA, 22 nt, Artificial Sequence
  Synthetic
uagaguaaucacauaaaauacu

SEQ ID NO: 116380 - RNA, 23 nt, Artificial Sequence
  Synthetic
auagaguaaucacauaaaauacu

SEQ ID NO: 116381 - RNA, 24 nt, Artificial Sequence
  Synthetic
uauagaguaaucacauaaaauacu

SEQ ID NO: 116382 - RNA, 20 nt, Artificial Sequence
  Synthetic
uggaauuuuuguaaaauacu

SEQ ID NO: 116383 - RNA, 21 nt, Artificial Sequence
  Synthetic
auggaauuuuuguaaaauacu

SEQ ID NO: 116384 - RNA, 22 nt, Artificial Sequence
  Synthetic
cauggaauuuuuguaaaauacu

SEQ ID NO: 116385 - RNA, 23 nt, Artificial Sequence
  Synthetic
acauggaauuuuuguaaaauacu

SEQ ID NO: 116386 - RNA, 24 nt, Artificial Sequence
  Synthetic
uacauggaauuuuuguaaaauacu

SEQ ID NO: 116387 - RNA, 18 nt, Artificial Sequence
  Synthetic
cuuuguacaccuaauacu

SEQ ID NO: 116388 - RNA, 19 nt, Artificial Sequence
  Synthetic
ucuuuguacaccuaauacu

SEQ ID NO: 116389 - RNA, 22 nt, Artificial Sequence
  Synthetic
aggucuuuguacaccuaauacu

SEQ ID NO: 116390 - RNA, 23 nt, Artificial Sequence
  Synthetic
aaggucuuuguacaccuaauacu

SEQ ID NO: 116391 - RNA, 24 nt, Artificial Sequence
  Synthetic
aaaggucuuuguacaccuaauacu

SEQ ID NO: 116392 - RNA, 20 nt, Artificial Sequence
  Synthetic
aggcuuuagcagcuaauacu

SEQ ID NO: 116393 - RNA, 22 nt, Artificial Sequence
  Synthetic
ugaggcuuuagcagcuaauacu

SEQ ID NO: 116394 - RNA, 23 nt, Artificial Sequence
  Synthetic
augaggcuuuagcagcuaauacu

SEQ ID NO: 116395 - RNA, 24 nt, Artificial Sequence
  Synthetic
caugaggcuuuagcagcuaauacu

SEQ ID NO: 116396 - RNA, 18 nt, Artificial Sequence
  Synthetic
uguauauccucuaauacu

SEQ ID NO: 116397 - RNA, 19 nt, Artificial Sequence
  Synthetic
uuguauauccucuaauacu

SEQ ID NO: 116398 - RNA, 20 nt, Artificial Sequence
  Synthetic
uuuguauauccucuaauacu

SEQ ID NO: 116399 - RNA, 21 nt, Artificial Sequence
  Synthetic
auuuguauauccucuaauacu

SEQ ID NO: 116400 - RNA, 22 nt, Artificial Sequence
  Synthetic
cauuuguauauccucuaauacu

SEQ ID NO: 116401 - RNA, 24 nt, Artificial Sequence
  Synthetic
ugcauuuguauauccucuaauacu

SEQ ID NO: 116402 - RNA, 18 nt, Artificial Sequence
  Synthetic
cagucagaggaccauacu

SEQ ID NO: 116403 - RNA, 19 nt, Artificial Sequence
  Synthetic
ccagucagaggaccauacu

SEQ ID NO: 116404 - RNA, 20 nt, Artificial Sequence
  Synthetic
uggucauggugcuagauacu

SEQ ID NO: 116405 - RNA, 21 nt, Artificial Sequence
  Synthetic
uuggucauggugcuagauacu

SEQ ID NO: 116406 - RNA, 22 nt, Artificial Sequence
  Synthetic
auuggucauggugcuagauacu

SEQ ID NO: 116407 - RNA, 23 nt, Artificial Sequence
  Synthetic
cauuggucauggugcuagauacu

SEQ ID NO: 116408 - RNA, 24 nt, Artificial Sequence
  Synthetic
acauuggucauggugcuagauacu

SEQ ID NO: 116409 - RNA, 18 nt, Artificial Sequence
  Synthetic
cauuucuucuucuauacu

SEQ ID NO: 116410 - RNA, 19 nt, Artificial Sequence
  Synthetic
ucauuucuucuucuauacu

SEQ ID NO: 116411 - RNA, 20 nt, Artificial Sequence
  Synthetic
uucauuucuucuucuauacu

SEQ ID NO: 116412 - RNA, 18 nt, Artificial Sequence
  Synthetic
uacuuuuaaauaccuacu

SEQ ID NO: 116413 - RNA, 20 nt, Artificial Sequence
  Synthetic
uguacuuuuaaauaccuacu

SEQ ID NO: 116414 - RNA, 21 nt, Artificial Sequence
  Synthetic
cuguacuuuuaaauaccuacu

SEQ ID NO: 116415 - RNA, 22 nt, Artificial Sequence
  Synthetic
ucuguacuuuuaaauaccuacu

SEQ ID NO: 116416 - RNA, 23 nt, Artificial Sequence
  Synthetic
uucuguacuuuuaaauaccuacu

SEQ ID NO: 116417 - RNA, 24 nt, Artificial Sequence
  Synthetic
uuucuguacuuuuaaauaccuacu

SEQ ID NO: 116418 - RNA, 21 nt, Artificial Sequence
  Synthetic
uguauugauaucuuggcuacu

SEQ ID NO: 116419 - RNA, 22 nt, Artificial Sequence
  Synthetic
cuguauugauaucuuggcuacu

SEQ ID NO: 116420 - RNA, 24 nt, Artificial Sequence
  Synthetic
ugcuguauugauaucuuggcuacu

SEQ ID NO: 116421 - RNA, 21 nt, Artificial Sequence
  Synthetic
cucauuuuugaaagaucuacu

SEQ ID NO: 116422 - RNA, 22 nt, Artificial Sequence
  Synthetic
ccucauuuuugaaagaucuacu

SEQ ID NO: 116423 - RNA, 23 nt, Artificial Sequence
  Synthetic
accucauuuuugaaagaucuacu

SEQ ID NO: 116424 - RNA, 18 nt, Artificial Sequence
  Synthetic
agggauucuaacucuacu

SEQ ID NO: 116425 - RNA, 19 nt, Artificial Sequence
  Synthetic
cagggauucuaacucuacu

SEQ ID NO: 116426 - RNA, 20 nt, Artificial Sequence
  Synthetic
acagggauucuaacucuacu

SEQ ID NO: 116427 - RNA, 21 nt, Artificial Sequence
  Synthetic
aacagggauucuaacucuacu

SEQ ID NO: 116428 - RNA, 22 nt, Artificial Sequence
  Synthetic
uaacagggauucuaacucuacu

SEQ ID NO: 116429 - RNA, 23 nt, Artificial Sequence
  Synthetic
cuaacagggauucuaacucuacu

SEQ ID NO: 116430 - RNA, 24 nt, Artificial Sequence
  Synthetic
ccuaacagggauucuaacucuacu

SEQ ID NO: 116431 - RNA, 18 nt, Artificial Sequence
  Synthetic
ucccaaguucuaaguacu

SEQ ID NO: 116432 - RNA, 19 nt, Artificial Sequence
  Synthetic
uucccaaguucuaaguacu

SEQ ID NO: 116433 - RNA, 20 nt, Artificial Sequence
  Synthetic
cuucccaaguucuaaguacu

SEQ ID NO: 116434 - RNA, 21 nt, Artificial Sequence
  Synthetic
acuucccaaguucuaaguacu

SEQ ID NO: 116435 - RNA, 24 nt, Artificial Sequence
  Synthetic
aggacuucccaaguucuaaguacu

SEQ ID NO: 116436 - RNA, 19 nt, Artificial Sequence
  Synthetic
aggcuuucugguaaguacu

SEQ ID NO: 116437 - RNA, 20 nt, Artificial Sequence
  Synthetic
caggcuuucugguaaguacu

SEQ ID NO: 116438 - RNA, 21 nt, Artificial Sequence
  Synthetic
ucaggcuuucugguaaguacu

SEQ ID NO: 116439 - RNA, 22 nt, Artificial Sequence
  Synthetic
aucaggcuuucugguaaguacu

SEQ ID NO: 116440 - RNA, 23 nt, Artificial Sequence
  Synthetic
uaucaggcuuucugguaaguacu

SEQ ID NO: 116441 - RNA, 24 nt, Artificial Sequence
  Synthetic
auaucaggcuuucugguaaguacu

SEQ ID NO: 116442 - RNA, 21 nt, Artificial Sequence
  Synthetic
aacaucuggcuacugaguacu

SEQ ID NO: 116443 - RNA, 22 nt, Artificial Sequence
  Synthetic
caacaucuggcuacugaguacu

SEQ ID NO: 116444 - RNA, 18 nt, Artificial Sequence
  Synthetic
cuuguuuaacuuaguacu

SEQ ID NO: 116445 - RNA, 19 nt, Artificial Sequence
  Synthetic
ccuuguuuaacuuaguacu

SEQ ID NO: 116446 - RNA, 20 nt, Artificial Sequence
  Synthetic
cccuuguuuaacuuaguacu

SEQ ID NO: 116447 - RNA, 21 nt, Artificial Sequence
  Synthetic
acccuuguuuaacuuaguacu

SEQ ID NO: 116448 - RNA, 22 nt, Artificial Sequence
  Synthetic
cacccuuguuuaacuuaguacu

SEQ ID NO: 116449 - RNA, 23 nt, Artificial Sequence
  Synthetic
ccacccuuguuuaacuuaguacu

SEQ ID NO: 116450 - RNA, 24 nt, Artificial Sequence
  Synthetic
cccacccuuguuuaacuuaguacu

SEQ ID NO: 116451 - RNA, 19 nt, Artificial Sequence
  Synthetic
aggguuuagauuagguacu

SEQ ID NO: 116452 - RNA, 20 nt, Artificial Sequence
  Synthetic
caggguuuagauuagguacu

SEQ ID NO: 116453 - RNA, 21 nt, Artificial Sequence
  Synthetic
ucaggguuuagauuagguacu

SEQ ID NO: 116454 - RNA, 22 nt, Artificial Sequence
  Synthetic
aucaggguuuagauuagguacu

SEQ ID NO: 116455 - RNA, 23 nt, Artificial Sequence
  Synthetic
uaucaggguuuagauuagguacu

SEQ ID NO: 116456 - RNA, 24 nt, Artificial Sequence
  Synthetic
auaucaggguuuagauuagguacu

SEQ ID NO: 116457 - RNA, 18 nt, Artificial Sequence
  Synthetic
uuucaagugcuauguacu

SEQ ID NO: 116458 - RNA, 20 nt, Artificial Sequence
  Synthetic
uguuucaagugcuauguacu

SEQ ID NO: 116459 - RNA, 21 nt, Artificial Sequence
  Synthetic
cuguuucaagugcuauguacu

SEQ ID NO: 116460 - RNA, 22 nt, Artificial Sequence
  Synthetic
ccuguuucaagugcuauguacu

SEQ ID NO: 116461 - RNA, 23 nt, Artificial Sequence
  Synthetic
accuguuucaagugcuauguacu

SEQ ID NO: 116462 - RNA, 24 nt, Artificial Sequence
  Synthetic
uaccuguuucaagugcuauguacu

SEQ ID NO: 116463 - RNA, 18 nt, Artificial Sequence
  Synthetic
acaauacaagccuguacu

SEQ ID NO: 116464 - RNA, 19 nt, Artificial Sequence
  Synthetic
uacaauacaagccuguacu

SEQ ID NO: 116465 - RNA, 20 nt, Artificial Sequence
  Synthetic
uuacaauacaagccuguacu

SEQ ID NO: 116466 - RNA, 21 nt, Artificial Sequence
  Synthetic
uuuacaauacaagccuguacu

SEQ ID NO: 116467 - RNA, 22 nt, Artificial Sequence
  Synthetic
auuuacaauacaagccuguacu

SEQ ID NO: 116468 - RNA, 18 nt, Artificial Sequence
  Synthetic
cucuguaugcucuguacu

SEQ ID NO: 116469 - RNA, 19 nt, Artificial Sequence
  Synthetic
acucuguaugcucuguacu

SEQ ID NO: 116470 - RNA, 20 nt, Artificial Sequence
  Synthetic
uacucuguaugcucuguacu

SEQ ID NO: 116471 - RNA, 22 nt, Artificial Sequence
  Synthetic
uguacucuguaugcucuguacu

SEQ ID NO: 116472 - RNA, 24 nt, Artificial Sequence
  Synthetic
uguguacucuguaugcucuguacu

SEQ ID NO: 116473 - RNA, 18 nt, Artificial Sequence
  Synthetic
ccucuucacagguguacu

SEQ ID NO: 116474 - RNA, 19 nt, Artificial Sequence
  Synthetic
cccucuucacagguguacu

SEQ ID NO: 116475 - RNA, 20 nt, Artificial Sequence
  Synthetic
ucccucuucacagguguacu

SEQ ID NO: 116476 - RNA, 22 nt, Artificial Sequence
  Synthetic
ugucccucuucacagguguacu

SEQ ID NO: 116477 - RNA, 23 nt, Artificial Sequence
  Synthetic
augucccucuucacagguguacu

SEQ ID NO: 116478 - RNA, 24 nt, Artificial Sequence
  Synthetic
caugucccucuucacagguguacu

SEQ ID NO: 116479 - RNA, 18 nt, Artificial Sequence
  Synthetic
acuuuuauauaaauuacu

SEQ ID NO: 116480 - RNA, 19 nt, Artificial Sequence
  Synthetic
cacuuuuauauaaauuacu

SEQ ID NO: 116481 - RNA, 20 nt, Artificial Sequence
  Synthetic
ucacuuuuauauaaauuacu

SEQ ID NO: 116482 - RNA, 21 nt, Artificial Sequence
  Synthetic
aucacuuuuauauaaauuacu

SEQ ID NO: 116483 - RNA, 22 nt, Artificial Sequence
  Synthetic
caucacuuuuauauaaauuacu

SEQ ID NO: 116484 - RNA, 23 nt, Artificial Sequence
  Synthetic
ucaucacuuuuauauaaauuacu

SEQ ID NO: 116485 - RNA, 24 nt, Artificial Sequence
  Synthetic
uucaucacuuuuauauaaauuacu

SEQ ID NO: 116486 - RNA, 18 nt, Artificial Sequence
  Synthetic
cauuuuacgauaauuacu

SEQ ID NO: 116487 - RNA, 19 nt, Artificial Sequence
  Synthetic
ccauuuuacgauaauuacu

SEQ ID NO: 116488 - RNA, 20 nt, Artificial Sequence
  Synthetic
cccauuuuacgauaauuacu

SEQ ID NO: 116489 - RNA, 21 nt, Artificial Sequence
  Synthetic
acccauuuuacgauaauuacu

SEQ ID NO: 116490 - RNA, 22 nt, Artificial Sequence
  Synthetic
uacccauuuuacgauaauuacu

SEQ ID NO: 116491 - RNA, 23 nt, Artificial Sequence
  Synthetic
uuacccauuuuacgauaauuacu

SEQ ID NO: 116492 - RNA, 24 nt, Artificial Sequence
  Synthetic
uuuacccauuuuacgauaauuacu

SEQ ID NO: 116493 - RNA, 18 nt, Artificial Sequence
  Synthetic
auuuaggaucauauuacu

SEQ ID NO: 116494 - RNA, 21 nt, Artificial Sequence
  Synthetic
uggauuuaggaucauauuacu

SEQ ID NO: 116495 - RNA, 23 nt, Artificial Sequence
  Synthetic
aguggauuuaggaucauauuacu

SEQ ID NO: 116496 - RNA, 24 nt, Artificial Sequence
  Synthetic
caguggauuuaggaucauauuacu

SEQ ID NO: 116497 - RNA, 18 nt, Artificial Sequence
  Synthetic
aaacuaacagauauuacu

SEQ ID NO: 116498 - RNA, 20 nt, Artificial Sequence
  Synthetic
ugaaacuaacagauauuacu

SEQ ID NO: 116499 - RNA, 21 nt, Artificial Sequence
  Synthetic
augaaacuaacagauauuacu

SEQ ID NO: 116500 - RNA, 22 nt, Artificial Sequence
  Synthetic
aaugaaacuaacagauauuacu

SEQ ID NO: 116501 - RNA, 23 nt, Artificial Sequence
  Synthetic
aaaugaaacuaacagauauuacu

SEQ ID NO: 116502 - RNA, 24 nt, Artificial Sequence
  Synthetic
uaaaugaaacuaacagauauuacu

SEQ ID NO: 116503 - RNA, 18 nt, Artificial Sequence
  Synthetic
agugugcaggauauuacu

SEQ ID NO: 116504 - RNA, 19 nt, Artificial Sequence
  Synthetic
uagugugcaggauauuacu

SEQ ID NO: 116505 - RNA, 21 nt, Artificial Sequence
  Synthetic
cguagugugcaggauauuacu

SEQ ID NO: 116506 - RNA, 22 nt, Artificial Sequence
  Synthetic
acguagugugcaggauauuacu

SEQ ID NO: 116507 - RNA, 23 nt, Artificial Sequence
  Synthetic
uacguagugugcaggauauuacu

SEQ ID NO: 116508 - RNA, 18 nt, Artificial Sequence
  Synthetic
uaaugauuuccuauuacu

SEQ ID NO: 116509 - RNA, 20 nt, Artificial Sequence
  Synthetic
aguaaugauuuccuauuacu

SEQ ID NO: 116510 - RNA, 21 nt, Artificial Sequence
  Synthetic
aaguaaugauuuccuauuacu

SEQ ID NO: 116511 - RNA, 22 nt, Artificial Sequence
  Synthetic
aaaguaaugauuuccuauuacu

SEQ ID NO: 116512 - RNA, 23 nt, Artificial Sequence
  Synthetic
uaaaguaaugauuuccuauuacu

SEQ ID NO: 116513 - RNA, 24 nt, Artificial Sequence
  Synthetic
cuaaaguaaugauuuccuauuacu

SEQ ID NO: 116514 - RNA, 18 nt, Artificial Sequence
  Synthetic
ucauaauaauuuauuacu

SEQ ID NO: 116515 - RNA, 19 nt, Artificial Sequence
  Synthetic
uucauaauaauuuauuacu

SEQ ID NO: 116516 - RNA, 20 nt, Artificial Sequence
  Synthetic
cuucauaauaauuuauuacu

SEQ ID NO: 116517 - RNA, 21 nt, Artificial Sequence
  Synthetic
acuucauaauaauuuauuacu

SEQ ID NO: 116518 - RNA, 22 nt, Artificial Sequence
  Synthetic
aacuucauaauaauuuauuacu

SEQ ID NO: 116519 - RNA, 23 nt, Artificial Sequence
  Synthetic
caacuucauaauaauuuauuacu

SEQ ID NO: 116520 - RNA, 24 nt, Artificial Sequence
  Synthetic
acaacuucauaauaauuuauuacu

SEQ ID NO: 116521 - RNA, 18 nt, Artificial Sequence
  Synthetic
cuauuuuagaaacuuacu

SEQ ID NO: 116522 - RNA, 19 nt, Artificial Sequence
  Synthetic
ucuauuuuagaaacuuacu

SEQ ID NO: 116523 - RNA, 20 nt, Artificial Sequence
  Synthetic
uucuauuuuagaaacuuacu

SEQ ID NO: 116524 - RNA, 21 nt, Artificial Sequence
  Synthetic
auucuauuuuagaaacuuacu

SEQ ID NO: 116525 - RNA, 22 nt, Artificial Sequence
  Synthetic
uauucuauuuuagaaacuuacu

SEQ ID NO: 116526 - RNA, 23 nt, Artificial Sequence
  Synthetic
cuauucuauuuuagaaacuuacu

SEQ ID NO: 116527 - RNA, 24 nt, Artificial Sequence
  Synthetic
acuauucuauuuuagaaacuuacu

SEQ ID NO: 116528 - RNA, 18 nt, Artificial Sequence
  Synthetic
cguccuaucucacuuacu

SEQ ID NO: 116529 - RNA, 19 nt, Artificial Sequence
  Synthetic
acguccuaucucacuuacu

SEQ ID NO: 116530 - RNA, 21 nt, Artificial Sequence
  Synthetic
agacguccuaucucacuuacu

SEQ ID NO: 116531 - RNA, 22 nt, Artificial Sequence
  Synthetic
uagacguccuaucucacuuacu

SEQ ID NO: 116532 - RNA, 23 nt, Artificial Sequence
  Synthetic
auagacguccuaucucacuuacu

SEQ ID NO: 116533 - RNA, 24 nt, Artificial Sequence
  Synthetic
cauagacguccuaucucacuuacu

SEQ ID NO: 116534 - RNA, 18 nt, Artificial Sequence
  Synthetic
cuuguucugcuacuuacu

SEQ ID NO: 116535 - RNA, 19 nt, Artificial Sequence
  Synthetic
ccuuguucugcuacuuacu

SEQ ID NO: 116536 - RNA, 20 nt, Artificial Sequence
  Synthetic
uccuuguucugcuacuuacu

SEQ ID NO: 116537 - RNA, 21 nt, Artificial Sequence
  Synthetic
auccuuguucugcuacuuacu

SEQ ID NO: 116538 - RNA, 22 nt, Artificial Sequence
  Synthetic
aauccuuguucugcuacuuacu

SEQ ID NO: 116539 - RNA, 24 nt, Artificial Sequence
  Synthetic
ugaauccuuguucugcuacuuacu

SEQ ID NO: 116540 - RNA, 18 nt, Artificial Sequence
  Synthetic
uuaaugguguuccuuacu

SEQ ID NO: 116541 - RNA, 20 nt, Artificial Sequence
  Synthetic
uguuaaugguguuccuuacu

SEQ ID NO: 116542 - RNA, 21 nt, Artificial Sequence
  Synthetic
uuguuaaugguguuccuuacu

SEQ ID NO: 116543 - RNA, 24 nt, Artificial Sequence
  Synthetic
ugguuguuaaugguguuccuuacu

SEQ ID NO: 116544 - RNA, 18 nt, Artificial Sequence
  Synthetic
uugcacugcaauguuacu

SEQ ID NO: 116545 - RNA, 19 nt, Artificial Sequence
  Synthetic
cuugcacugcaauguuacu

SEQ ID NO: 116546 - RNA, 20 nt, Artificial Sequence
  Synthetic
ucuugcacugcaauguuacu

SEQ ID NO: 116547 - RNA, 21 nt, Artificial Sequence
  Synthetic
uucuugcacugcaauguuacu

SEQ ID NO: 116548 - RNA, 23 nt, Artificial Sequence
  Synthetic
aguucuugcacugcaauguuacu

SEQ ID NO: 116549 - RNA, 24 nt, Artificial Sequence
  Synthetic
aaguucuugcacugcaauguuacu

SEQ ID NO: 116550 - RNA, 19 nt, Artificial Sequence
  Synthetic
ugugauuuccuguguuacu

SEQ ID NO: 116551 - RNA, 22 nt, Artificial Sequence
  Synthetic
uggugugauuuccuguguuacu

SEQ ID NO: 116552 - RNA, 23 nt, Artificial Sequence
  Synthetic
uuggugugauuuccuguguuacu

SEQ ID NO: 116553 - RNA, 24 nt, Artificial Sequence
  Synthetic
auuggugugauuuccuguguuacu

SEQ ID NO: 116554 - RNA, 19 nt, Artificial Sequence
  Synthetic
uggaaguguuuuuguuacu

SEQ ID NO: 116555 - RNA, 20 nt, Artificial Sequence
  Synthetic
cuggaaguguuuuuguuacu

SEQ ID NO: 116556 - RNA, 22 nt, Artificial Sequence
  Synthetic
ugcuggaaguguuuuuguuacu

SEQ ID NO: 116557 - RNA, 23 nt, Artificial Sequence
  Synthetic
uugcuggaaguguuuuuguuacu

SEQ ID NO: 116558 - RNA, 24 nt, Artificial Sequence
  Synthetic
uuugcuggaaguguuuuuguuacu

SEQ ID NO: 116559 - RNA, 21 nt, Artificial Sequence
  Synthetic
ugaacugccuaaauauuuacu

SEQ ID NO: 116560 - RNA, 22 nt, Artificial Sequence
  Synthetic
augaacugccuaaauauuuacu

SEQ ID NO: 116561 - RNA, 23 nt, Artificial Sequence
  Synthetic
aaugaacugccuaaauauuuacu

SEQ ID NO: 116562 - RNA, 24 nt, Artificial Sequence
  Synthetic
uaaugaacugccuaaauauuuacu

SEQ ID NO: 116563 - RNA, 19 nt, Artificial Sequence
  Synthetic
uguauuuuauaccuuuacu

SEQ ID NO: 116564 - RNA, 20 nt, Artificial Sequence
  Synthetic
auguauuuuauaccuuuacu

SEQ ID NO: 116565 - RNA, 22 nt, Artificial Sequence
  Synthetic
agauguauuuuauaccuuuacu

SEQ ID NO: 116566 - RNA, 23 nt, Artificial Sequence
  Synthetic
aagauguauuuuauaccuuuacu

SEQ ID NO: 116567 - RNA, 24 nt, Artificial Sequence
  Synthetic
uaagauguauuuuauaccuuuacu

SEQ ID NO: 116568 - RNA, 18 nt, Artificial Sequence
  Synthetic
uucccuucucuguuuacu

SEQ ID NO: 116569 - RNA, 19 nt, Artificial Sequence
  Synthetic
uuucccuucucuguuuacu

SEQ ID NO: 116570 - RNA, 20 nt, Artificial Sequence
  Synthetic
cuuucccuucucuguuuacu

SEQ ID NO: 116571 - RNA, 21 nt, Artificial Sequence
  Synthetic
ucuuucccuucucuguuuacu

SEQ ID NO: 116572 - RNA, 22 nt, Artificial Sequence
  Synthetic
cucuuucccuucucuguuuacu

SEQ ID NO: 116573 - RNA, 23 nt, Artificial Sequence
  Synthetic
ucucuuucccuucucuguuuacu

SEQ ID NO: 116574 - RNA, 18 nt, Artificial Sequence
  Synthetic
cagagaaauauuuuuacu

SEQ ID NO: 116575 - RNA, 19 nt, Artificial Sequence
  Synthetic
acagagaaauauuuuuacu

SEQ ID NO: 116576 - RNA, 20 nt, Artificial Sequence
  Synthetic
aacagagaaauauuuuuacu

SEQ ID NO: 116577 - RNA, 18 nt, Artificial Sequence
  Synthetic
ugaacaguauagaaaccu

SEQ ID NO: 116578 - RNA, 19 nt, Artificial Sequence
  Synthetic
uugaacaguauagaaaccu

SEQ ID NO: 116579 - RNA, 20 nt, Artificial Sequence
  Synthetic
uuugaacaguauagaaaccu

SEQ ID NO: 116580 - RNA, 21 nt, Artificial Sequence
  Synthetic
auuugaacaguauagaaaccu

SEQ ID NO: 116581 - RNA, 22 nt, Artificial Sequence
  Synthetic
cauuugaacaguauagaaaccu

SEQ ID NO: 116582 - RNA, 23 nt, Artificial Sequence
  Synthetic
ccauuugaacaguauagaaaccu

SEQ ID NO: 116583 - RNA, 24 nt, Artificial Sequence
  Synthetic
cccauuugaacaguauagaaaccu

SEQ ID NO: 116584 - RNA, 20 nt, Artificial Sequence
  Synthetic
uggaaguacaauuucaaccu

SEQ ID NO: 116585 - RNA, 21 nt, Artificial Sequence
  Synthetic
auggaaguacaauuucaaccu

SEQ ID NO: 116586 - RNA, 22 nt, Artificial Sequence
  Synthetic
aauggaaguacaauuucaaccu

SEQ ID NO: 116587 - RNA, 23 nt, Artificial Sequence
  Synthetic
caauggaaguacaauuucaaccu

SEQ ID NO: 116588 - RNA, 24 nt, Artificial Sequence
  Synthetic
ucaauggaaguacaauuucaaccu

SEQ ID NO: 116589 - RNA, 19 nt, Artificial Sequence
  Synthetic
ugguauuagguaagaaccu

SEQ ID NO: 116590 - RNA, 20 nt, Artificial Sequence
  Synthetic
augguauuagguaagaaccu

SEQ ID NO: 116591 - RNA, 21 nt, Artificial Sequence
  Synthetic
caugguauuagguaagaaccu

SEQ ID NO: 116592 - RNA, 22 nt, Artificial Sequence
  Synthetic
ccaugguauuagguaagaaccu

SEQ ID NO: 116593 - RNA, 23 nt, Artificial Sequence
  Synthetic
accaugguauuagguaagaaccu

SEQ ID NO: 116594 - RNA, 24 nt, Artificial Sequence
  Synthetic
uaccaugguauuagguaagaaccu

SEQ ID NO: 116595 - RNA, 22 nt, Artificial Sequence
  Synthetic
ugaauccugaccuacagaaccu

SEQ ID NO: 116596 - RNA, 23 nt, Artificial Sequence
  Synthetic
augaauccugaccuacagaaccu

SEQ ID NO: 116597 - RNA, 24 nt, Artificial Sequence
  Synthetic
caugaauccugaccuacagaaccu

SEQ ID NO: 116598 - RNA, 18 nt, Artificial Sequence
  Synthetic
uauaagccagaggaaccu

SEQ ID NO: 116599 - RNA, 19 nt, Artificial Sequence
  Synthetic
auauaagccagaggaaccu

SEQ ID NO: 116600 - RNA, 20 nt, Artificial Sequence
  Synthetic
uauauaagccagaggaaccu

SEQ ID NO: 116601 - RNA, 21 nt, Artificial Sequence
  Synthetic
auauauaagccagaggaaccu

SEQ ID NO: 116602 - RNA, 22 nt, Artificial Sequence
  Synthetic
aauauauaagccagaggaaccu

SEQ ID NO: 116603 - RNA, 23 nt, Artificial Sequence
  Synthetic
caauauauaagccagaggaaccu

SEQ ID NO: 116604 - RNA, 24 nt, Artificial Sequence
  Synthetic
acaauauauaagccagaggaaccu

SEQ ID NO: 116605 - RNA, 18 nt, Artificial Sequence
  Synthetic
augagcaugauggaaccu

SEQ ID NO: 116606 - RNA, 19 nt, Artificial Sequence
  Synthetic
caugagcaugauggaaccu

SEQ ID NO: 116607 - RNA, 20 nt, Artificial Sequence
  Synthetic
acaugagcaugauggaaccu

SEQ ID NO: 116608 - RNA, 21 nt, Artificial Sequence
  Synthetic
aacaugagcaugauggaaccu

SEQ ID NO: 116609 - RNA, 22 nt, Artificial Sequence
  Synthetic
aaacaugagcaugauggaaccu

SEQ ID NO: 116610 - RNA, 24 nt, Artificial Sequence
  Synthetic
ugaaacaugagcaugauggaaccu

SEQ ID NO: 116611 - RNA, 18 nt, Artificial Sequence
  Synthetic
uuuaccuacuaauaaccu

SEQ ID NO: 116612 - RNA, 19 nt, Artificial Sequence
  Synthetic
uuuuaccuacuaauaaccu

SEQ ID NO: 116613 - RNA, 20 nt, Artificial Sequence
  Synthetic
auuuuaccuacuaauaaccu

SEQ ID NO: 116614 - RNA, 21 nt, Artificial Sequence
  Synthetic
cauuuuaccuacuaauaaccu

SEQ ID NO: 116615 - RNA, 22 nt, Artificial Sequence
  Synthetic
ucauuuuaccuacuaauaaccu

SEQ ID NO: 116616 - RNA, 23 nt, Artificial Sequence
  Synthetic
uucauuuuaccuacuaauaaccu

SEQ ID NO: 116617 - RNA, 24 nt, Artificial Sequence
  Synthetic
uuucauuuuaccuacuaauaaccu

SEQ ID NO: 116618 - RNA, 18 nt, Artificial Sequence
  Synthetic
caccacugcuuauaaccu

SEQ ID NO: 116619 - RNA, 19 nt, Artificial Sequence
  Synthetic
acaccacugcuuauaaccu

SEQ ID NO: 116620 - RNA, 20 nt, Artificial Sequence
  Synthetic
cacaccacugcuuauaaccu

SEQ ID NO: 116621 - RNA, 21 nt, Artificial Sequence
  Synthetic
ccacaccacugcuuauaaccu

SEQ ID NO: 116622 - RNA, 22 nt, Artificial Sequence
  Synthetic
uccacaccacugcuuauaaccu

SEQ ID NO: 116623 - RNA, 24 nt, Artificial Sequence
  Synthetic
uguccacaccacugcuuauaaccu

SEQ ID NO: 116624 - RNA, 18 nt, Artificial Sequence
  Synthetic
uaucacccacucuaaccu

SEQ ID NO: 116625 - RNA, 19 nt, Artificial Sequence
  Synthetic
auaucacccacucuaaccu

SEQ ID NO: 116626 - RNA, 20 nt, Artificial Sequence
  Synthetic
uauaucacccacucuaaccu

SEQ ID NO: 116627 - RNA, 21 nt, Artificial Sequence
  Synthetic
uuauaucacccacucuaaccu

SEQ ID NO: 116628 - RNA, 22 nt, Artificial Sequence
  Synthetic
auuauaucacccacucuaaccu

SEQ ID NO: 116629 - RNA, 23 nt, Artificial Sequence
  Synthetic
aauuauaucacccacucuaaccu

SEQ ID NO: 116630 - RNA, 24 nt, Artificial Sequence
  Synthetic
caauuauaucacccacucuaaccu

SEQ ID NO: 116631 - RNA, 18 nt, Artificial Sequence
  Synthetic
cagcaucagugguaaccu

SEQ ID NO: 116632 - RNA, 19 nt, Artificial Sequence
  Synthetic
ucagcaucagugguaaccu

SEQ ID NO: 116633 - RNA, 21 nt, Artificial Sequence
  Synthetic
agucagcaucagugguaaccu

SEQ ID NO: 116634 - RNA, 22 nt, Artificial Sequence
  Synthetic
cagucagcaucagugguaaccu

SEQ ID NO: 116635 - RNA, 23 nt, Artificial Sequence
  Synthetic
ccagucagcaucagugguaaccu

SEQ ID NO: 116636 - RNA, 18 nt, Artificial Sequence
  Synthetic
caagggggaaaaacaccu

SEQ ID NO: 116637 - RNA, 19 nt, Artificial Sequence
  Synthetic
ucaagggggaaaaacaccu

SEQ ID NO: 116638 - RNA, 20 nt, Artificial Sequence
  Synthetic
uucaagggggaaaaacaccu

SEQ ID NO: 116639 - RNA, 21 nt, Artificial Sequence
  Synthetic
uuucaagggggaaaaacaccu

SEQ ID NO: 116640 - RNA, 22 nt, Artificial Sequence
  Synthetic
uuuucaagggggaaaaacaccu

SEQ ID NO: 116641 - RNA, 23 nt, Artificial Sequence
  Synthetic
uuuuucaagggggaaaaacaccu

SEQ ID NO: 116642 - RNA, 24 nt, Artificial Sequence
  Synthetic
auuuuucaagggggaaaaacaccu

SEQ ID NO: 116643 - RNA, 19 nt, Artificial Sequence
  Synthetic
aggagcuagucaaacaccu

SEQ ID NO: 116644 - RNA, 20 nt, Artificial Sequence
  Synthetic
uaggagcuagucaaacaccu

SEQ ID NO: 116645 - RNA, 21 nt, Artificial Sequence
  Synthetic
auaggagcuagucaaacaccu

SEQ ID NO: 116646 - RNA, 22 nt, Artificial Sequence
  Synthetic
aauaggagcuagucaaacaccu

SEQ ID NO: 116647 - RNA, 24 nt, Artificial Sequence
  Synthetic
ugaauaggagcuagucaaacaccu

SEQ ID NO: 116648 - RNA, 18 nt, Artificial Sequence
  Synthetic
cggaguaugacaacaccu

SEQ ID NO: 116649 - RNA, 19 nt, Artificial Sequence
  Synthetic
acggaguaugacaacaccu

SEQ ID NO: 116650 - RNA, 20 nt, Artificial Sequence
  Synthetic
uacggaguaugacaacaccu

SEQ ID NO: 116651 - RNA, 21 nt, Artificial Sequence
  Synthetic
auacggaguaugacaacaccu

SEQ ID NO: 116652 - RNA, 22 nt, Artificial Sequence
  Synthetic
uauacggaguaugacaacaccu

SEQ ID NO: 116653 - RNA, 23 nt, Artificial Sequence
  Synthetic
uuauacggaguaugacaacaccu

SEQ ID NO: 116654 - RNA, 24 nt, Artificial Sequence
  Synthetic
uuuauacggaguaugacaacaccu

SEQ ID NO: 116655 - RNA, 19 nt, Artificial Sequence
  Synthetic
ugggaaauaaggaacaccu

SEQ ID NO: 116656 - RNA, 20 nt, Artificial Sequence
  Synthetic
uugggaaauaaggaacaccu

SEQ ID NO: 116657 - RNA, 21 nt, Artificial Sequence
  Synthetic
auugggaaauaaggaacaccu

SEQ ID NO: 116658 - RNA, 22 nt, Artificial Sequence
  Synthetic
aauugggaaauaaggaacaccu

SEQ ID NO: 116659 - RNA, 23 nt, Artificial Sequence
  Synthetic
aaauugggaaauaaggaacaccu

SEQ ID NO: 116660 - RNA, 24 nt, Artificial Sequence
  Synthetic
uaaauugggaaauaaggaacaccu

SEQ ID NO: 116661 - RNA, 19 nt, Artificial Sequence
  Synthetic
cgcggcuaaaaagacaccu

SEQ ID NO: 116662 - RNA, 20 nt, Artificial Sequence
  Synthetic
acgcggcuaaaaagacaccu

SEQ ID NO: 116663 - RNA, 21 nt, Artificial Sequence
  Synthetic
aacgcggcuaaaaagacaccu

SEQ ID NO: 116664 - RNA, 22 nt, Artificial Sequence
  Synthetic
caacgcggcuaaaaagacaccu

SEQ ID NO: 116665 - RNA, 23 nt, Artificial Sequence
  Synthetic
ccaacgcggcuaaaaagacaccu

SEQ ID NO: 116666 - RNA, 24 nt, Artificial Sequence
  Synthetic
uccaacgcggcuaaaaagacaccu

SEQ ID NO: 116667 - RNA, 19 nt, Artificial Sequence
  Synthetic
agcuuuuccauugacaccu

SEQ ID NO: 116668 - RNA, 20 nt, Artificial Sequence
  Synthetic
cagcuuuuccauugacaccu

SEQ ID NO: 116669 - RNA, 21 nt, Artificial Sequence
  Synthetic
ccagcuuuuccauugacaccu

SEQ ID NO: 116670 - RNA, 22 nt, Artificial Sequence
  Synthetic
accagcuuuuccauugacaccu

SEQ ID NO: 116671 - RNA, 24 nt, Artificial Sequence
  Synthetic
agaccagcuuuuccauugacaccu

SEQ ID NO: 116672 - RNA, 18 nt, Artificial Sequence
  Synthetic
ucuguucagcauacaccu

SEQ ID NO: 116673 - RNA, 19 nt, Artificial Sequence
  Synthetic
uucuguucagcauacaccu

SEQ ID NO: 116674 - RNA, 20 nt, Artificial Sequence
  Synthetic
uuucuguucagcauacaccu

SEQ ID NO: 116675 - RNA, 21 nt, Artificial Sequence
  Synthetic
auuucuguucagcauacaccu

SEQ ID NO: 116676 - RNA, 22 nt, Artificial Sequence
  Synthetic
uauuucuguucagcauacaccu

SEQ ID NO: 116677 - RNA, 23 nt, Artificial Sequence
  Synthetic
uuauuucuguucagcauacaccu

SEQ ID NO: 116678 - RNA, 24 nt, Artificial Sequence
  Synthetic
uuuauuucuguucagcauacaccu

SEQ ID NO: 116679 - RNA, 18 nt, Artificial Sequence
  Synthetic
ucaauucccaccccaccu

SEQ ID NO: 116680 - RNA, 19 nt, Artificial Sequence
  Synthetic
uucaauucccaccccaccu

SEQ ID NO: 116681 - RNA, 21 nt, Artificial Sequence
  Synthetic
uguucaauucccaccccaccu

SEQ ID NO: 116682 - RNA, 22 nt, Artificial Sequence
  Synthetic
uuguucaauucccaccccaccu

SEQ ID NO: 116683 - RNA, 23 nt, Artificial Sequence
  Synthetic
auuguucaauucccaccccaccu

SEQ ID NO: 116684 - RNA, 24 nt, Artificial Sequence
  Synthetic
cauuguucaauucccaccccaccu

SEQ ID NO: 116685 - RNA, 18 nt, Artificial Sequence
  Synthetic
ugcauuuuuaguccaccu

SEQ ID NO: 116686 - RNA, 19 nt, Artificial Sequence
  Synthetic
cugcauuuuuaguccaccu

SEQ ID NO: 116687 - RNA, 20 nt, Artificial Sequence
  Synthetic
ucugcauuuuuaguccaccu

SEQ ID NO: 116688 - RNA, 21 nt, Artificial Sequence
  Synthetic
uucugcauuuuuaguccaccu

SEQ ID NO: 116689 - RNA, 22 nt, Artificial Sequence
  Synthetic
auucugcauuuuuaguccaccu

SEQ ID NO: 116690 - RNA, 24 nt, Artificial Sequence
  Synthetic
ugauucugcauuuuuaguccaccu

SEQ ID NO: 116691 - RNA, 18 nt, Artificial Sequence
  Synthetic
auauacuccacagcaccu

SEQ ID NO: 116692 - RNA, 19 nt, Artificial Sequence
  Synthetic
aauauacuccacagcaccu

SEQ ID NO: 116693 - RNA, 20 nt, Artificial Sequence
  Synthetic
aaauauacuccacagcaccu

SEQ ID NO: 116694 - RNA, 21 nt, Artificial Sequence
  Synthetic
uaaauauacuccacagcaccu

SEQ ID NO: 116695 - RNA, 22 nt, Artificial Sequence
  Synthetic
uuaaauauacuccacagcaccu

SEQ ID NO: 116696 - RNA, 23 nt, Artificial Sequence
  Synthetic
auuaaauauacuccacagcaccu

SEQ ID NO: 116697 - RNA, 18 nt, Artificial Sequence
  Synthetic
aaccuugugggagcaccu

SEQ ID NO: 116698 - RNA, 19 nt, Artificial Sequence
  Synthetic
uaaccuugugggagcaccu

SEQ ID NO: 116699 - RNA, 20 nt, Artificial Sequence
  Synthetic
auaaccuugugggagcaccu

SEQ ID NO: 116700 - RNA, 22 nt, Artificial Sequence
  Synthetic
ugauaaccuugugggagcaccu

SEQ ID NO: 116701 - RNA, 23 nt, Artificial Sequence
  Synthetic
cugauaaccuugugggagcaccu

SEQ ID NO: 116702 - RNA, 24 nt, Artificial Sequence
  Synthetic
ucugauaaccuugugggagcaccu

SEQ ID NO: 116703 - RNA, 21 nt, Artificial Sequence
  Synthetic
aggaagauguuuuaugcaccu

SEQ ID NO: 116704 - RNA, 22 nt, Artificial Sequence
  Synthetic
aaggaagauguuuuaugcaccu

SEQ ID NO: 116705 - RNA, 23 nt, Artificial Sequence
  Synthetic
uaaggaagauguuuuaugcaccu

SEQ ID NO: 116706 - RNA, 24 nt, Artificial Sequence
  Synthetic
auaaggaagauguuuuaugcaccu

SEQ ID NO: 116707 - RNA, 18 nt, Artificial Sequence
  Synthetic
aagguaggacacucaccu

SEQ ID NO: 116708 - RNA, 19 nt, Artificial Sequence
  Synthetic
aaagguaggacacucaccu

SEQ ID NO: 116709 - RNA, 20 nt, Artificial Sequence
  Synthetic
caaagguaggacacucaccu

SEQ ID NO: 116710 - RNA, 21 nt, Artificial Sequence
  Synthetic
acaaagguaggacacucaccu

SEQ ID NO: 116711 - RNA, 22 nt, Artificial Sequence
  Synthetic
aacaaagguaggacacucaccu

SEQ ID NO: 116712 - RNA, 23 nt, Artificial Sequence
  Synthetic
aaacaaagguaggacacucaccu

SEQ ID NO: 116713 - RNA, 24 nt, Artificial Sequence
  Synthetic
uaaacaaagguaggacacucaccu

SEQ ID NO: 116714 - RNA, 18 nt, Artificial Sequence
  Synthetic
cuguugaugaggucaccu

SEQ ID NO: 116715 - RNA, 19 nt, Artificial Sequence
  Synthetic
ccuguugaugaggucaccu

SEQ ID NO: 116716 - RNA, 21 nt, Artificial Sequence
  Synthetic
ugccuguugaugaggucaccu

SEQ ID NO: 116717 - RNA, 22 nt, Artificial Sequence
  Synthetic
cugccuguugaugaggucaccu

SEQ ID NO: 116718 - RNA, 23 nt, Artificial Sequence
  Synthetic
ccugccuguugaugaggucaccu

SEQ ID NO: 116719 - RNA, 24 nt, Artificial Sequence
  Synthetic
accugccuguugaugaggucaccu

SEQ ID NO: 116720 - RNA, 19 nt, Artificial Sequence
  Synthetic
agcuagaauuuugucaccu

SEQ ID NO: 116721 - RNA, 20 nt, Artificial Sequence
  Synthetic
aagcuagaauuuugucaccu

SEQ ID NO: 116722 - RNA, 21 nt, Artificial Sequence
  Synthetic
cagugugcacaggauucaccu

SEQ ID NO: 116723 - RNA, 22 nt, Artificial Sequence
  Synthetic
ucagugugcacaggauucaccu

SEQ ID NO: 116724 - RNA, 24 nt, Artificial Sequence
  Synthetic
ugucagugugcacaggauucaccu

SEQ ID NO: 116725 - RNA, 18 nt, Artificial Sequence
  Synthetic
ccacaaaccuuuucaccu

SEQ ID NO: 116726 - RNA, 19 nt, Artificial Sequence
  Synthetic
uccacaaaccuuuucaccu

SEQ ID NO: 116727 - RNA, 20 nt, Artificial Sequence
  Synthetic
auccacaaaccuuuucaccu

SEQ ID NO: 116728 - RNA, 21 nt, Artificial Sequence
  Synthetic
aauccacaaaccuuuucaccu

SEQ ID NO: 116729 - RNA, 22 nt, Artificial Sequence
  Synthetic
caauccacaaaccuuuucaccu

SEQ ID NO: 116730 - RNA, 23 nt, Artificial Sequence
  Synthetic
acaauccacaaaccuuuucaccu

SEQ ID NO: 116731 - RNA, 24 nt, Artificial Sequence
  Synthetic
aacaauccacaaaccuuuucaccu

SEQ ID NO: 116732 - RNA, 21 nt, Artificial Sequence
  Synthetic
aaugaagaugagaaaggaccu

SEQ ID NO: 116733 - RNA, 22 nt, Artificial Sequence
  Synthetic
caaugaagaugagaaaggaccu

SEQ ID NO: 116734 - RNA, 24 nt, Artificial Sequence
  Synthetic
ugcaaugaagaugagaaaggaccu

SEQ ID NO: 116735 - RNA, 18 nt, Artificial Sequence
  Synthetic
ucacgugguucaggaccu

SEQ ID NO: 116736 - RNA, 19 nt, Artificial Sequence
  Synthetic
aucacgugguucaggaccu

SEQ ID NO: 116737 - RNA, 20 nt, Artificial Sequence
  Synthetic
uaucacgugguucaggaccu

SEQ ID NO: 116738 - RNA, 21 nt, Artificial Sequence
  Synthetic
auaucacgugguucaggaccu

SEQ ID NO: 116739 - RNA, 22 nt, Artificial Sequence
  Synthetic
uauaucacgugguucaggaccu

SEQ ID NO: 116740 - RNA, 23 nt, Artificial Sequence
  Synthetic
uuauaucacgugguucaggaccu

SEQ ID NO: 116741 - RNA, 24 nt, Artificial Sequence
  Synthetic
auuauaucacgugguucaggaccu

SEQ ID NO: 116742 - RNA, 18 nt, Artificial Sequence
  Synthetic
acacacaauaaaugaccu

SEQ ID NO: 116743 - RNA, 19 nt, Artificial Sequence
  Synthetic
aacacacaauaaaugaccu

SEQ ID NO: 116744 - RNA, 20 nt, Artificial Sequence
  Synthetic
uaacacacaauaaaugaccu

SEQ ID NO: 116745 - RNA, 21 nt, Artificial Sequence
  Synthetic
auaacacacaauaaaugaccu

SEQ ID NO: 116746 - RNA, 22 nt, Artificial Sequence
  Synthetic
uauaacacacaauaaaugaccu

SEQ ID NO: 116747 - RNA, 23 nt, Artificial Sequence
  Synthetic
auauaacacacaauaaaugaccu

SEQ ID NO: 116748 - RNA, 24 nt, Artificial Sequence
  Synthetic
uauauaacacacaauaaaugaccu

SEQ ID NO: 116749 - RNA, 18 nt, Artificial Sequence
  Synthetic
uuuaaauagcccugaccu

SEQ ID NO: 116750 - RNA, 20 nt, Artificial Sequence
  Synthetic
uguuuaaauagcccugaccu

SEQ ID NO: 116751 - RNA, 21 nt, Artificial Sequence
  Synthetic
cuguuuaaauagcccugaccu

SEQ ID NO: 116752 - RNA, 23 nt, Artificial Sequence
  Synthetic
agcuguuuaaauagcccugaccu

SEQ ID NO: 116753 - RNA, 24 nt, Artificial Sequence
  Synthetic
uagcuguuuaaauagcccugaccu

SEQ ID NO: 116754 - RNA, 18 nt, Artificial Sequence
  Synthetic
augauauccaucugaccu

SEQ ID NO: 116755 - RNA, 19 nt, Artificial Sequence
  Synthetic
aaugauauccaucugaccu

SEQ ID NO: 116756 - RNA, 20 nt, Artificial Sequence
  Synthetic
aaaugauauccaucugaccu

SEQ ID NO: 116757 - RNA, 21 nt, Artificial Sequence
  Synthetic
aaaaugauauccaucugaccu

SEQ ID NO: 116758 - RNA, 22 nt, Artificial Sequence
  Synthetic
uaaaaugauauccaucugaccu

SEQ ID NO: 116759 - RNA, 23 nt, Artificial Sequence
  Synthetic
uuaaaaugauauccaucugaccu

SEQ ID NO: 116760 - RNA, 24 nt, Artificial Sequence
  Synthetic
auuaaaaugauauccaucugaccu

SEQ ID NO: 116761 - RNA, 18 nt, Artificial Sequence
  Synthetic
ccccucagauucugaccu

SEQ ID NO: 116762 - RNA, 19 nt, Artificial Sequence
  Synthetic
uccccucagauucugaccu

SEQ ID NO: 116763 - RNA, 20 nt, Artificial Sequence
  Synthetic
uuccccucagauucugaccu

SEQ ID NO: 116764 - RNA, 21 nt, Artificial Sequence
  Synthetic
uuuccccucagauucugaccu

SEQ ID NO: 116765 - RNA, 22 nt, Artificial Sequence
  Synthetic
auuuccccucagauucugaccu

SEQ ID NO: 116766 - RNA, 23 nt, Artificial Sequence
  Synthetic
cauuuccccucagauucugaccu

SEQ ID NO: 116767 - RNA, 24 nt, Artificial Sequence
  Synthetic
ccauuuccccucagauucugaccu

SEQ ID NO: 116768 - RNA, 18 nt, Artificial Sequence
  Synthetic
uguucaagccauugaccu

SEQ ID NO: 116769 - RNA, 19 nt, Artificial Sequence
  Synthetic
uuguucaagccauugaccu

SEQ ID NO: 116770 - RNA, 20 nt, Artificial Sequence
  Synthetic
uuuguucaagccauugaccu

SEQ ID NO: 116771 - RNA, 21 nt, Artificial Sequence
  Synthetic
auuuguucaagccauugaccu

SEQ ID NO: 116772 - RNA, 22 nt, Artificial Sequence
  Synthetic
uauuuguucaagccauugaccu

SEQ ID NO: 116773 - RNA, 23 nt, Artificial Sequence
  Synthetic
uuauuuguucaagccauugaccu

SEQ ID NO: 116774 - RNA, 24 nt, Artificial Sequence
  Synthetic
uuuauuuguucaagccauugaccu

SEQ ID NO: 116775 - RNA, 21 nt, Artificial Sequence
  Synthetic
caacuucuuuuaacaauaccu

SEQ ID NO: 116776 - RNA, 22 nt, Artificial Sequence
  Synthetic
ccaacuucuuuuaacaauaccu

SEQ ID NO: 116777 - RNA, 18 nt, Artificial Sequence
  Synthetic
aguuagugaaugcuaccu

SEQ ID NO: 116778 - RNA, 21 nt, Artificial Sequence
  Synthetic
aggaguuagugaaugcuaccu

SEQ ID NO: 116779 - RNA, 23 nt, Artificial Sequence
  Synthetic
ugaggaguuagugaaugcuaccu

SEQ ID NO: 116780 - RNA, 24 nt, Artificial Sequence
  Synthetic
augaggaguuagugaaugcuaccu

SEQ ID NO: 116781 - RNA, 18 nt, Artificial Sequence
  Synthetic
uacaaauaucaucuaccu

SEQ ID NO: 116782 - RNA, 19 nt, Artificial Sequence
  Synthetic
uuacaaauaucaucuaccu

SEQ ID NO: 116783 - RNA, 20 nt, Artificial Sequence
  Synthetic
auuacaaauaucaucuaccu

SEQ ID NO: 116784 - RNA, 22 nt, Artificial Sequence
  Synthetic
cgauuacaaauaucaucuaccu

SEQ ID NO: 116785 - RNA, 23 nt, Artificial Sequence
  Synthetic
acgauuacaaauaucaucuaccu

SEQ ID NO: 116786 - RNA, 24 nt, Artificial Sequence
  Synthetic
uacgauuacaaauaucaucuaccu

SEQ ID NO: 116787 - RNA, 18 nt, Artificial Sequence
  Synthetic
ugaauggcaagcguaccu

SEQ ID NO: 116788 - RNA, 19 nt, Artificial Sequence
  Synthetic
cugaauggcaagcguaccu

SEQ ID NO: 116789 - RNA, 20 nt, Artificial Sequence
  Synthetic
acugaauggcaagcguaccu

SEQ ID NO: 116790 - RNA, 22 nt, Artificial Sequence
  Synthetic
ugacugaauggcaagcguaccu

SEQ ID NO: 116791 - RNA, 19 nt, Artificial Sequence
  Synthetic
ugaaaccuagcugguaccu

SEQ ID NO: 116792 - RNA, 20 nt, Artificial Sequence
  Synthetic
cugaaaccuagcugguaccu

SEQ ID NO: 116793 - RNA, 21 nt, Artificial Sequence
  Synthetic
acugaaaccuagcugguaccu

SEQ ID NO: 116794 - RNA, 22 nt, Artificial Sequence
  Synthetic
aacugaaaccuagcugguaccu

SEQ ID NO: 116795 - RNA, 21 nt, Artificial Sequence
  Synthetic
ugggaucuagauuuuguaccu

SEQ ID NO: 116796 - RNA, 22 nt, Artificial Sequence
  Synthetic
cugggaucuagauuuuguaccu

SEQ ID NO: 116797 - RNA, 23 nt, Artificial Sequence
  Synthetic
acugggaucuagauuuuguaccu

SEQ ID NO: 116798 - RNA, 24 nt, Artificial Sequence
  Synthetic
cacugggaucuagauuuuguaccu

SEQ ID NO: 116799 - RNA, 18 nt, Artificial Sequence
  Synthetic
aacuauaucuacuuaccu

SEQ ID NO: 116800 - RNA, 19 nt, Artificial Sequence
  Synthetic
aaacuauaucuacuuaccu

SEQ ID NO: 116801 - RNA, 21 nt, Artificial Sequence
  Synthetic
agaaacuauaucuacuuaccu

SEQ ID NO: 116802 - RNA, 23 nt, Artificial Sequence
  Synthetic
ugagaaacuauaucuacuuaccu

SEQ ID NO: 116803 - RNA, 24 nt, Artificial Sequence
  Synthetic
augagaaacuauaucuacuuaccu

SEQ ID NO: 116804 - RNA, 19 nt, Artificial Sequence
  Synthetic
uggauacacuauuuuaccu

SEQ ID NO: 116805 - RNA, 20 nt, Artificial Sequence
  Synthetic
uuggauacacuauuuuaccu

SEQ ID NO: 116806 - RNA, 21 nt, Artificial Sequence
  Synthetic
cuuggauacacuauuuuaccu

SEQ ID NO: 116807 - RNA, 23 nt, Artificial Sequence
  Synthetic
ugcuuggauacacuauuuuaccu

SEQ ID NO: 116808 - RNA, 24 nt, Artificial Sequence
  Synthetic
augcuuggauacacuauuuuaccu

SEQ ID NO: 116809 - RNA, 18 nt, Artificial Sequence
  Synthetic
uagaguuucaguaacccu

SEQ ID NO: 116810 - RNA, 19 nt, Artificial Sequence
  Synthetic
auagaguuucaguaacccu

SEQ ID NO: 116811 - RNA, 21 nt, Artificial Sequence
  Synthetic
agauagaguuucaguaacccu

SEQ ID NO: 116812 - RNA, 23 nt, Artificial Sequence
  Synthetic
agagauagaguuucaguaacccu

SEQ ID NO: 116813 - RNA, 24 nt, Artificial Sequence
  Synthetic
uagagauagaguuucaguaacccu

SEQ ID NO: 116814 - RNA, 18 nt, Artificial Sequence
  Synthetic
agugaaugaauuaacccu

SEQ ID NO: 116815 - RNA, 19 nt, Artificial Sequence
  Synthetic
cagugaaugaauuaacccu

SEQ ID NO: 116816 - RNA, 20 nt, Artificial Sequence
  Synthetic
ucagugaaugaauuaacccu

SEQ ID NO: 116817 - RNA, 21 nt, Artificial Sequence
  Synthetic
cucagugaaugaauuaacccu

SEQ ID NO: 116818 - RNA, 22 nt, Artificial Sequence
  Synthetic
ucucagugaaugaauuaacccu

SEQ ID NO: 116819 - RNA, 18 nt, Artificial Sequence
  Synthetic
agauucauugaauacccu

SEQ ID NO: 116820 - RNA, 19 nt, Artificial Sequence
  Synthetic
cagauucauugaauacccu

SEQ ID NO: 116821 - RNA, 20 nt, Artificial Sequence
  Synthetic
ucagauucauugaauacccu

SEQ ID NO: 116822 - RNA, 21 nt, Artificial Sequence
  Synthetic
uucagauucauugaauacccu

SEQ ID NO: 116823 - RNA, 22 nt, Artificial Sequence
  Synthetic
auucagauucauugaauacccu

SEQ ID NO: 116824 - RNA, 23 nt, Artificial Sequence
  Synthetic
uauucagauucauugaauacccu

SEQ ID NO: 116825 - RNA, 24 nt, Artificial Sequence
  Synthetic
uuauucagauucauugaauacccu

SEQ ID NO: 116826 - RNA, 19 nt, Artificial Sequence
  Synthetic
aggguaacucuacuacccu

SEQ ID NO: 116827 - RNA, 20 nt, Artificial Sequence
  Synthetic
aaggguaacucuacuacccu

SEQ ID NO: 116828 - RNA, 21 nt, Artificial Sequence
  Synthetic
uaaggguaacucuacuacccu

SEQ ID NO: 116829 - RNA, 22 nt, Artificial Sequence
  Synthetic
cuaaggguaacucuacuacccu

SEQ ID NO: 116830 - RNA, 23 nt, Artificial Sequence
  Synthetic
ccuaaggguaacucuacuacccu

SEQ ID NO: 116831 - RNA, 24 nt, Artificial Sequence
  Synthetic
uccuaaggguaacucuacuacccu

SEQ ID NO: 116832 - RNA, 18 nt, Artificial Sequence
  Synthetic
aucuagaaccucuacccu

SEQ ID NO: 116833 - RNA, 19 nt, Artificial Sequence
  Synthetic
aaucuagaaccucuacccu

SEQ ID NO: 116834 - RNA, 21 nt, Artificial Sequence
  Synthetic
agaaucuagaaccucuacccu

SEQ ID NO: 116835 - RNA, 22 nt, Artificial Sequence
  Synthetic
aagaaucuagaaccucuacccu

SEQ ID NO: 116836 - RNA, 23 nt, Artificial Sequence
  Synthetic
uaagaaucuagaaccucuacccu

SEQ ID NO: 116837 - RNA, 24 nt, Artificial Sequence
  Synthetic
uuaagaaucuagaaccucuacccu

SEQ ID NO: 116838 - RNA, 19 nt, Artificial Sequence
  Synthetic
agcauuuugacuuuacccu

SEQ ID NO: 116839 - RNA, 21 nt, Artificial Sequence
  Synthetic
agagcauuuugacuuuacccu

SEQ ID NO: 116840 - RNA, 22 nt, Artificial Sequence
  Synthetic
aagagcauuuugacuuuacccu

SEQ ID NO: 116841 - RNA, 23 nt, Artificial Sequence
  Synthetic
aaagagcauuuugacuuuacccu

SEQ ID NO: 116842 - RNA, 24 nt, Artificial Sequence
  Synthetic
aaaagagcauuuugacuuuacccu

SEQ ID NO: 116843 - RNA, 19 nt, Artificial Sequence
  Synthetic
agcugaguuucuuuacccu

SEQ ID NO: 116844 - RNA, 20 nt, Artificial Sequence
  Synthetic
cagcugaguuucuuuacccu

SEQ ID NO: 116845 - RNA, 21 nt, Artificial Sequence
  Synthetic
ucagcugaguuucuuuacccu

SEQ ID NO: 116846 - RNA, 22 nt, Artificial Sequence
  Synthetic
aucagcugaguuucuuuacccu

SEQ ID NO: 116847 - RNA, 23 nt, Artificial Sequence
  Synthetic
aaucagcugaguuucuuuacccu

SEQ ID NO: 116848 - RNA, 24 nt, Artificial Sequence
  Synthetic
aaaucagcugaguuucuuuacccu

SEQ ID NO: 116849 - RNA, 18 nt, Artificial Sequence
  Synthetic
ccacggcagcaaaccccu

SEQ ID NO: 116850 - RNA, 21 nt, Artificial Sequence
  Synthetic
cggccacggcagcaaaccccu

SEQ ID NO: 116851 - RNA, 22 nt, Artificial Sequence
  Synthetic
ccggccacggcagcaaaccccu

SEQ ID NO: 116852 - RNA, 23 nt, Artificial Sequence
  Synthetic
accggccacggcagcaaaccccu

SEQ ID NO: 116853 - RNA, 24 nt, Artificial Sequence
  Synthetic
aaccggccacggcagcaaaccccu

SEQ ID NO: 116854 - RNA, 18 nt, Artificial Sequence
  Synthetic
aacauucuaaccaccccu

SEQ ID NO: 116855 - RNA, 19 nt, Artificial Sequence
  Synthetic
caacauucuaaccaccccu

SEQ ID NO: 116856 - RNA, 20 nt, Artificial Sequence
  Synthetic
ccaacauucuaaccaccccu

SEQ ID NO: 116857 - RNA, 21 nt, Artificial Sequence
  Synthetic
cccaacauucuaaccaccccu

SEQ ID NO: 116858 - RNA, 22 nt, Artificial Sequence
  Synthetic
acccaacauucuaaccaccccu

SEQ ID NO: 116859 - RNA, 23 nt, Artificial Sequence
  Synthetic
aacccaacauucuaaccaccccu

SEQ ID NO: 116860 - RNA, 24 nt, Artificial Sequence
  Synthetic
aaacccaacauucuaaccaccccu

SEQ ID NO: 116861 - RNA, 18 nt, Artificial Sequence
  Synthetic
uaauuuugacaugccccu

SEQ ID NO: 116862 - RNA, 19 nt, Artificial Sequence
  Synthetic
uuaauuuugacaugccccu

SEQ ID NO: 116863 - RNA, 20 nt, Artificial Sequence
  Synthetic
cuuaauuuugacaugccccu

SEQ ID NO: 116864 - RNA, 21 nt, Artificial Sequence
  Synthetic
ucuuaauuuugacaugccccu

SEQ ID NO: 116865 - RNA, 22 nt, Artificial Sequence
  Synthetic
uucuuaauuuugacaugccccu

SEQ ID NO: 116866 - RNA, 23 nt, Artificial Sequence
  Synthetic
cuucuuaauuuugacaugccccu

SEQ ID NO: 116867 - RNA, 24 nt, Artificial Sequence
  Synthetic
ccuucuuaauuuugacaugccccu

SEQ ID NO: 116868 - RNA, 18 nt, Artificial Sequence
  Synthetic
aguaagcauauugccccu

SEQ ID NO: 116869 - RNA, 19 nt, Artificial Sequence
  Synthetic
caguaagcauauugccccu

SEQ ID NO: 116870 - RNA, 20 nt, Artificial Sequence
  Synthetic
ucaguaagcauauugccccu

SEQ ID NO: 116871 - RNA, 21 nt, Artificial Sequence
  Synthetic
cucaguaagcauauugccccu

SEQ ID NO: 116872 - RNA, 22 nt, Artificial Sequence
  Synthetic
acucaguaagcauauugccccu

SEQ ID NO: 116873 - RNA, 23 nt, Artificial Sequence
  Synthetic
cacucaguaagcauauugccccu

SEQ ID NO: 116874 - RNA, 24 nt, Artificial Sequence
  Synthetic
ccacucaguaagcauauugccccu

SEQ ID NO: 116875 - RNA, 19 nt, Artificial Sequence
  Synthetic
agcaacaauaguauccccu

SEQ ID NO: 116876 - RNA, 20 nt, Artificial Sequence
  Synthetic
cagcaacaauaguauccccu

SEQ ID NO: 116877 - RNA, 21 nt, Artificial Sequence
  Synthetic
ucagcaacaauaguauccccu

SEQ ID NO: 116878 - RNA, 22 nt, Artificial Sequence
  Synthetic
aucagcaacaauaguauccccu

SEQ ID NO: 116879 - RNA, 23 nt, Artificial Sequence
  Synthetic
aaucagcaacaauaguauccccu

SEQ ID NO: 116880 - RNA, 24 nt, Artificial Sequence
  Synthetic
caaucagcaacaauaguauccccu

SEQ ID NO: 116881 - RNA, 18 nt, Artificial Sequence
  Synthetic
aaaaugagucccuccccu

SEQ ID NO: 116882 - RNA, 19 nt, Artificial Sequence
  Synthetic
aaaaaugagucccuccccu

SEQ ID NO: 116883 - RNA, 20 nt, Artificial Sequence
  Synthetic
uaaaaaugagucccuccccu

SEQ ID NO: 116884 - RNA, 21 nt, Artificial Sequence
  Synthetic
uuaaaaaugagucccuccccu

SEQ ID NO: 116885 - RNA, 22 nt, Artificial Sequence
  Synthetic
cuuaaaaaugagucccuccccu

SEQ ID NO: 116886 - RNA, 23 nt, Artificial Sequence
  Synthetic
ucuuaaaaaugagucccuccccu

SEQ ID NO: 116887 - RNA, 24 nt, Artificial Sequence
  Synthetic
uucuuaaaaaugagucccuccccu

SEQ ID NO: 116888 - RNA, 18 nt, Artificial Sequence
  Synthetic
uauaauccccuguccccu

SEQ ID NO: 116889 - RNA, 19 nt, Artificial Sequence
  Synthetic
uuauaauccccuguccccu

SEQ ID NO: 116890 - RNA, 20 nt, Artificial Sequence
  Synthetic
auuauaauccccuguccccu

SEQ ID NO: 116891 - RNA, 22 nt, Artificial Sequence
  Synthetic
ugauuauaauccccuguccccu

SEQ ID NO: 116892 - RNA, 24 nt, Artificial Sequence
  Synthetic
agugauuauaauccccuguccccu

SEQ ID NO: 116893 - RNA, 22 nt, Artificial Sequence
  Synthetic
aguuuucuggccucuuuccccu

SEQ ID NO: 116894 - RNA, 23 nt, Artificial Sequence
  Synthetic
aaguuuucuggccucuuuccccu

SEQ ID NO: 116895 - RNA, 18 nt, Artificial Sequence
  Synthetic
uuacacuuacugagcccu

SEQ ID NO: 116896 - RNA, 19 nt, Artificial Sequence
  Synthetic
cuuacacuuacugagcccu

SEQ ID NO: 116897 - RNA, 21 nt, Artificial Sequence
  Synthetic
agcuuacacuuacugagcccu

SEQ ID NO: 116898 - RNA, 22 nt, Artificial Sequence
  Synthetic
cagcuuacacuuacugagcccu

SEQ ID NO: 116899 - RNA, 23 nt, Artificial Sequence
  Synthetic
ccagcuuacacuuacugagcccu

SEQ ID NO: 116900 - RNA, 18 nt, Artificial Sequence
  Synthetic
uuuuauauuucuagcccu

SEQ ID NO: 116901 - RNA, 20 nt, Artificial Sequence
  Synthetic
aguuuuauauuucuagcccu

SEQ ID NO: 116902 - RNA, 21 nt, Artificial Sequence
  Synthetic
caguuuuauauuucuagcccu

SEQ ID NO: 116903 - RNA, 22 nt, Artificial Sequence
  Synthetic
ucaguuuuauauuucuagcccu

SEQ ID NO: 116904 - RNA, 23 nt, Artificial Sequence
  Synthetic
uucaguuuuauauuucuagcccu

SEQ ID NO: 116905 - RNA, 24 nt, Artificial Sequence
  Synthetic
auucaguuuuauauuucuagcccu

SEQ ID NO: 116906 - RNA, 18 nt, Artificial Sequence
  Synthetic
cucuuggaaaacugcccu

SEQ ID NO: 116907 - RNA, 19 nt, Artificial Sequence
  Synthetic
ucucuuggaaaacugcccu

SEQ ID NO: 116908 - RNA, 20 nt, Artificial Sequence
  Synthetic
cucucuuggaaaacugcccu

SEQ ID NO: 116909 - RNA, 21 nt, Artificial Sequence
  Synthetic
ccucucuuggaaaacugcccu

SEQ ID NO: 116910 - RNA, 22 nt, Artificial Sequence
  Synthetic
cccucucuuggaaaacugcccu

SEQ ID NO: 116911 - RNA, 24 nt, Artificial Sequence
  Synthetic
cgcccucucuuggaaaacugcccu

SEQ ID NO: 116912 - RNA, 18 nt, Artificial Sequence
  Synthetic
cguucaucauguugcccu

SEQ ID NO: 116913 - RNA, 20 nt, Artificial Sequence
  Synthetic
agcguucaucauguugcccu

SEQ ID NO: 116914 - RNA, 21 nt, Artificial Sequence
  Synthetic
cagcguucaucauguugcccu

SEQ ID NO: 116915 - RNA, 22 nt, Artificial Sequence
  Synthetic
ucagcguucaucauguugcccu

SEQ ID NO: 116916 - RNA, 23 nt, Artificial Sequence
  Synthetic
aucagcguucaucauguugcccu

SEQ ID NO: 116917 - RNA, 24 nt, Artificial Sequence
  Synthetic
caucagcguucaucauguugcccu

SEQ ID NO: 116918 - RNA, 18 nt, Artificial Sequence
  Synthetic
uguaugauuuuaaucccu

SEQ ID NO: 116919 - RNA, 19 nt, Artificial Sequence
  Synthetic
uuguaugauuuuaaucccu

SEQ ID NO: 116920 - RNA, 20 nt, Artificial Sequence
  Synthetic
auuguaugauuuuaaucccu

SEQ ID NO: 116921 - RNA, 21 nt, Artificial Sequence
  Synthetic
cauuguaugauuuuaaucccu

SEQ ID NO: 116922 - RNA, 23 nt, Artificial Sequence
  Synthetic
ugcauuguaugauuuuaaucccu

SEQ ID NO: 116923 - RNA, 24 nt, Artificial Sequence
  Synthetic
cugcauuguaugauuuuaaucccu

SEQ ID NO: 116924 - RNA, 18 nt, Artificial Sequence
  Synthetic
ccacacuaaaugcucccu

SEQ ID NO: 116925 - RNA, 19 nt, Artificial Sequence
  Synthetic
accacacuaaaugcucccu

SEQ ID NO: 116926 - RNA, 20 nt, Artificial Sequence
  Synthetic
aaccacacuaaaugcucccu

SEQ ID NO: 116927 - RNA, 21 nt, Artificial Sequence
  Synthetic
aaaccacacuaaaugcucccu

SEQ ID NO: 116928 - RNA, 22 nt, Artificial Sequence
  Synthetic
uaaaccacacuaaaugcucccu

SEQ ID NO: 116929 - RNA, 23 nt, Artificial Sequence
  Synthetic
cuaaaccacacuaaaugcucccu

SEQ ID NO: 116930 - RNA, 24 nt, Artificial Sequence
  Synthetic
ucuaaaccacacuaaaugcucccu

SEQ ID NO: 116931 - RNA, 18 nt, Artificial Sequence
  Synthetic
cauaaggcuucucucccu

SEQ ID NO: 116932 - RNA, 19 nt, Artificial Sequence
  Synthetic
ccauaaggcuucucucccu

SEQ ID NO: 116933 - RNA, 20 nt, Artificial Sequence
  Synthetic
uccauaaggcuucucucccu

SEQ ID NO: 116934 - RNA, 21 nt, Artificial Sequence
  Synthetic
uuccauaaggcuucucucccu

SEQ ID NO: 116935 - RNA, 22 nt, Artificial Sequence
  Synthetic
auuccauaaggcuucucucccu

SEQ ID NO: 116936 - RNA, 23 nt, Artificial Sequence
  Synthetic
uauuccauaaggcuucucucccu

SEQ ID NO: 116937 - RNA, 24 nt, Artificial Sequence
  Synthetic
cuauuccauaaggcuucucucccu

SEQ ID NO: 116938 - RNA, 18 nt, Artificial Sequence
  Synthetic
uuguaacagugagucccu

SEQ ID NO: 116939 - RNA, 21 nt, Artificial Sequence
  Synthetic
ugguuguaacagugagucccu

SEQ ID NO: 116940 - RNA, 24 nt, Artificial Sequence
  Synthetic
uggugguuguaacagugagucccu

SEQ ID NO: 116941 - RNA, 18 nt, Artificial Sequence
  Synthetic
cuuuaauuucuugucccu

SEQ ID NO: 116942 - RNA, 20 nt, Artificial Sequence
  Synthetic
agcuuuaauuucuugucccu

SEQ ID NO: 116943 - RNA, 21 nt, Artificial Sequence
  Synthetic
cagcuuuaauuucuugucccu

SEQ ID NO: 116944 - RNA, 23 nt, Artificial Sequence
  Synthetic
ugcagcuuuaauuucuugucccu

SEQ ID NO: 116945 - RNA, 24 nt, Artificial Sequence
  Synthetic
uugcagcuuuaauuucuugucccu

SEQ ID NO: 116946 - RNA, 20 nt, Artificial Sequence
  Synthetic
aggugcucaauugauucccu

SEQ ID NO: 116947 - RNA, 23 nt, Artificial Sequence
  Synthetic
aggaggugcucaauugauucccu

SEQ ID NO: 116948 - RNA, 24 nt, Artificial Sequence
  Synthetic
uaggaggugcucaauugauucccu

SEQ ID NO: 116949 - RNA, 18 nt, Artificial Sequence
  Synthetic
uaaauguugcuauucccu

SEQ ID NO: 116950 - RNA, 19 nt, Artificial Sequence
  Synthetic
uuaaauguugcuauucccu

SEQ ID NO: 116951 - RNA, 20 nt, Artificial Sequence
  Synthetic
cuuaaauguugcuauucccu

SEQ ID NO: 116952 - RNA, 21 nt, Artificial Sequence
  Synthetic
ccuuaaauguugcuauucccu

SEQ ID NO: 116953 - RNA, 22 nt, Artificial Sequence
  Synthetic
uccuuaaauguugcuauucccu

SEQ ID NO: 116954 - RNA, 23 nt, Artificial Sequence
  Synthetic
uuccuuaaauguugcuauucccu

SEQ ID NO: 116955 - RNA, 24 nt, Artificial Sequence
  Synthetic
auuccuuaaauguugcuauucccu

SEQ ID NO: 116956 - RNA, 18 nt, Artificial Sequence
  Synthetic
auuuaggcuuuaaagccu

SEQ ID NO: 116957 - RNA, 19 nt, Artificial Sequence
  Synthetic
cauuuaggcuuuaaagccu

SEQ ID NO: 116958 - RNA, 20 nt, Artificial Sequence
  Synthetic
acauuuaggcuuuaaagccu

SEQ ID NO: 116959 - RNA, 21 nt, Artificial Sequence
  Synthetic
aacauuuaggcuuuaaagccu

SEQ ID NO: 116960 - RNA, 22 nt, Artificial Sequence
  Synthetic
caacauuuaggcuuuaaagccu

SEQ ID NO: 116961 - RNA, 23 nt, Artificial Sequence
  Synthetic
ucaacauuuaggcuuuaaagccu

SEQ ID NO: 116962 - RNA, 24 nt, Artificial Sequence
  Synthetic
uucaacauuuaggcuuuaaagccu

SEQ ID NO: 116963 - RNA, 18 nt, Artificial Sequence
  Synthetic
acacagccacacaagccu

SEQ ID NO: 116964 - RNA, 20 nt, Artificial Sequence
  Synthetic
agacacagccacacaagccu

SEQ ID NO: 116965 - RNA, 21 nt, Artificial Sequence
  Synthetic
aagacacagccacacaagccu

SEQ ID NO: 116966 - RNA, 22 nt, Artificial Sequence
  Synthetic
aaagacacagccacacaagccu

SEQ ID NO: 116967 - RNA, 24 nt, Artificial Sequence
  Synthetic
agaaagacacagccacacaagccu

SEQ ID NO: 116968 - RNA, 18 nt, Artificial Sequence
  Synthetic
accacacugacuaagccu

SEQ ID NO: 116969 - RNA, 19 nt, Artificial Sequence
  Synthetic
uaccacacugacuaagccu

SEQ ID NO: 116970 - RNA, 20 nt, Artificial Sequence
  Synthetic
cuaccacacugacuaagccu

SEQ ID NO: 116971 - RNA, 21 nt, Artificial Sequence
  Synthetic
acuaccacacugacuaagccu

SEQ ID NO: 116972 - RNA, 22 nt, Artificial Sequence
  Synthetic
cacuaccacacugacuaagccu

SEQ ID NO: 116973 - RNA, 23 nt, Artificial Sequence
  Synthetic
acacuaccacacugacuaagccu

SEQ ID NO: 116974 - RNA, 24 nt, Artificial Sequence
  Synthetic
cacacuaccacacugacuaagccu

SEQ ID NO: 116975 - RNA, 19 nt, Artificial Sequence
  Synthetic
ugcauucaggauucagccu

SEQ ID NO: 116976 - RNA, 20 nt, Artificial Sequence
  Synthetic
augcauucaggauucagccu

SEQ ID NO: 116977 - RNA, 21 nt, Artificial Sequence
  Synthetic
caugcauucaggauucagccu

SEQ ID NO: 116978 - RNA, 23 nt, Artificial Sequence
  Synthetic
ugcaugcauucaggauucagccu

SEQ ID NO: 116979 - RNA, 24 nt, Artificial Sequence
  Synthetic
cugcaugcauucaggauucagccu

SEQ ID NO: 116980 - RNA, 18 nt, Artificial Sequence
  Synthetic
aaauggcagccagagccu

SEQ ID NO: 116981 - RNA, 19 nt, Artificial Sequence
  Synthetic
caaauggcagccagagccu

SEQ ID NO: 116982 - RNA, 20 nt, Artificial Sequence
  Synthetic
acaaauggcagccagagccu

SEQ ID NO: 116983 - RNA, 21 nt, Artificial Sequence
  Synthetic
cacaaauggcagccagagccu

SEQ ID NO: 116984 - RNA, 23 nt, Artificial Sequence
  Synthetic
agcacaaauggcagccagagccu

SEQ ID NO: 116985 - RNA, 24 nt, Artificial Sequence
  Synthetic
uagcacaaauggcagccagagccu

SEQ ID NO: 116986 - RNA, 19 nt, Artificial Sequence
  Synthetic
cgcuucuacauaauagccu

SEQ ID NO: 116987 - RNA, 20 nt, Artificial Sequence
  Synthetic
ucgcuucuacauaauagccu

SEQ ID NO: 116988 - RNA, 22 nt, Artificial Sequence
  Synthetic
ugucgcuucuacauaauagccu

SEQ ID NO: 116989 - RNA, 23 nt, Artificial Sequence
  Synthetic
augucgcuucuacauaauagccu

SEQ ID NO: 116990 - RNA, 24 nt, Artificial Sequence
  Synthetic
uaugucgcuucuacauaauagccu

SEQ ID NO: 116991 - RNA, 18 nt, Artificial Sequence
  Synthetic
cuccuuauguaauagccu

SEQ ID NO: 116992 - RNA, 19 nt, Artificial Sequence
  Synthetic
ccuccuuauguaauagccu

SEQ ID NO: 116993 - RNA, 20 nt, Artificial Sequence
  Synthetic
cccuccuuauguaauagccu

SEQ ID NO: 116994 - RNA, 21 nt, Artificial Sequence
  Synthetic
ucccuccuuauguaauagccu

SEQ ID NO: 116995 - RNA, 22 nt, Artificial Sequence
  Synthetic
cucccuccuuauguaauagccu

SEQ ID NO: 116996 - RNA, 23 nt, Artificial Sequence
  Synthetic
ucucccuccuuauguaauagccu

SEQ ID NO: 116997 - RNA, 24 nt, Artificial Sequence
  Synthetic
aucucccuccuuauguaauagccu

SEQ ID NO: 116998 - RNA, 18 nt, Artificial Sequence
  Synthetic
ucuagggaaaauacgccu

SEQ ID NO: 116999 - RNA, 19 nt, Artificial Sequence
  Synthetic
aucuagggaaaauacgccu

SEQ ID NO: 117000 - RNA, 20 nt, Artificial Sequence
  Synthetic
aaucuagggaaaauacgccu

SEQ ID NO: 117001 - RNA, 21 nt, Artificial Sequence
  Synthetic
uaaucuagggaaaauacgccu

SEQ ID NO: 117002 - RNA, 22 nt, Artificial Sequence
  Synthetic
auaaucuagggaaaauacgccu

SEQ ID NO: 117003 - RNA, 23 nt, Artificial Sequence
  Synthetic
aauaaucuagggaaaauacgccu

SEQ ID NO: 117004 - RNA, 24 nt, Artificial Sequence
  Synthetic
uaauaaucuagggaaaauacgccu

SEQ ID NO: 117005 - RNA, 18 nt, Artificial Sequence
  Synthetic
cuaaauuucuugaggccu

SEQ ID NO: 117006 - RNA, 19 nt, Artificial Sequence
  Synthetic
acuaaauuucuugaggccu

SEQ ID NO: 117007 - RNA, 20 nt, Artificial Sequence
  Synthetic
cacuaaauuucuugaggccu

SEQ ID NO: 117008 - RNA, 21 nt, Artificial Sequence
  Synthetic
ucacuaaauuucuugaggccu

SEQ ID NO: 117009 - RNA, 22 nt, Artificial Sequence
  Synthetic
uucacuaaauuucuugaggccu

SEQ ID NO: 117010 - RNA, 23 nt, Artificial Sequence
  Synthetic
auucacuaaauuucuugaggccu

SEQ ID NO: 117011 - RNA, 18 nt, Artificial Sequence
  Synthetic
ugaagggagcauaggccu

SEQ ID NO: 117012 - RNA, 20 nt, Artificial Sequence
  Synthetic
agugaagggagcauaggccu

SEQ ID NO: 117013 - RNA, 21 nt, Artificial Sequence
  Synthetic
cagugaagggagcauaggccu

SEQ ID NO: 117014 - RNA, 23 nt, Artificial Sequence
  Synthetic
agcagugaagggagcauaggccu

SEQ ID NO: 117015 - RNA, 24 nt, Artificial Sequence
  Synthetic
cagcagugaagggagcauaggccu

SEQ ID NO: 117016 - RNA, 18 nt, Artificial Sequence
  Synthetic
aauaacuugccuaggccu

SEQ ID NO: 117017 - RNA, 19 nt, Artificial Sequence
  Synthetic
aaauaacuugccuaggccu

SEQ ID NO: 117018 - RNA, 21 nt, Artificial Sequence
  Synthetic
ugaaauaacuugccuaggccu

SEQ ID NO: 117019 - RNA, 24 nt, Artificial Sequence
  Synthetic
cggugaaauaacuugccuaggccu

SEQ ID NO: 117020 - RNA, 20 nt, Artificial Sequence
  Synthetic
agggccugagcucuaggccu

SEQ ID NO: 117021 - RNA, 22 nt, Artificial Sequence
  Synthetic
ugagggccugagcucuaggccu

SEQ ID NO: 117022 - RNA, 23 nt, Artificial Sequence
  Synthetic
augagggccugagcucuaggccu

SEQ ID NO: 117023 - RNA, 18 nt, Artificial Sequence
  Synthetic
auuacucaaaguaggccu

SEQ ID NO: 117024 - RNA, 20 nt, Artificial Sequence
  Synthetic
agauuacucaaaguaggccu

SEQ ID NO: 117025 - RNA, 22 nt, Artificial Sequence
  Synthetic
agagauuacucaaaguaggccu

SEQ ID NO: 117026 - RNA, 23 nt, Artificial Sequence
  Synthetic
cagagauuacucaaaguaggccu

SEQ ID NO: 117027 - RNA, 24 nt, Artificial Sequence
  Synthetic
ucagagauuacucaaaguaggccu

SEQ ID NO: 117028 - RNA, 22 nt, Artificial Sequence
  Synthetic
cggggaauuaauaacagggccu

SEQ ID NO: 117029 - RNA, 18 nt, Artificial Sequence
  Synthetic
aaaccaugggaggggccu

SEQ ID NO: 117030 - RNA, 19 nt, Artificial Sequence
  Synthetic
uaaaccaugggaggggccu

SEQ ID NO: 117031 - RNA, 20 nt, Artificial Sequence
  Synthetic
auaaaccaugggaggggccu

SEQ ID NO: 117032 - RNA, 21 nt, Artificial Sequence
  Synthetic
cauaaaccaugggaggggccu

SEQ ID NO: 117033 - RNA, 22 nt, Artificial Sequence
  Synthetic
ucauaaaccaugggaggggccu

SEQ ID NO: 117034 - RNA, 23 nt, Artificial Sequence
  Synthetic
uucauaaaccaugggaggggccu

SEQ ID NO: 117035 - RNA, 24 nt, Artificial Sequence
  Synthetic
auucauaaaccaugggaggggccu

SEQ ID NO: 117036 - RNA, 18 nt, Artificial Sequence
  Synthetic
uggguguaaggugggccu

SEQ ID NO: 117037 - RNA, 20 nt, Artificial Sequence
  Synthetic
aguggguguaaggugggccu

SEQ ID NO: 117038 - RNA, 21 nt, Artificial Sequence
  Synthetic
caguggguguaaggugggccu

SEQ ID NO: 117039 - RNA, 22 nt, Artificial Sequence
  Synthetic
ucaguggguguaaggugggccu

SEQ ID NO: 117040 - RNA, 23 nt, Artificial Sequence
  Synthetic
uucaguggguguaaggugggccu

SEQ ID NO: 117041 - RNA, 24 nt, Artificial Sequence
  Synthetic
auucaguggguguaaggugggccu

SEQ ID NO: 117042 - RNA, 19 nt, Artificial Sequence
  Synthetic
aguuaauggcacauggccu

SEQ ID NO: 117043 - RNA, 20 nt, Artificial Sequence
  Synthetic
caguuaauggcacauggccu

SEQ ID NO: 117044 - RNA, 21 nt, Artificial Sequence
  Synthetic
ucaguuaauggcacauggccu

SEQ ID NO: 117045 - RNA, 22 nt, Artificial Sequence
  Synthetic
uucaguuaauggcacauggccu

SEQ ID NO: 117046 - RNA, 24 nt, Artificial Sequence
  Synthetic
uguucaguuaauggcacauggccu

SEQ ID NO: 117047 - RNA, 18 nt, Artificial Sequence
  Synthetic
ugccgagcaugauggccu

SEQ ID NO: 117048 - RNA, 19 nt, Artificial Sequence
  Synthetic
augccgagcaugauggccu

SEQ ID NO: 117049 - RNA, 21 nt, Artificial Sequence
  Synthetic
ugaugccgagcaugauggccu

SEQ ID NO: 117050 - RNA, 24 nt, Artificial Sequence
  Synthetic
aggugaugccgagcaugauggccu

SEQ ID NO: 117051 - RNA, 18 nt, Artificial Sequence
  Synthetic
aaucacuucuuuuggccu

SEQ ID NO: 117052 - RNA, 20 nt, Artificial Sequence
  Synthetic
agaaucacuucuuuuggccu

SEQ ID NO: 117053 - RNA, 21 nt, Artificial Sequence
  Synthetic
uagaaucacuucuuuuggccu

SEQ ID NO: 117054 - RNA, 22 nt, Artificial Sequence
  Synthetic
uuagaaucacuucuuuuggccu

SEQ ID NO: 117055 - RNA, 23 nt, Artificial Sequence
  Synthetic
auuagaaucacuucuuuuggccu

SEQ ID NO: 117056 - RNA, 24 nt, Artificial Sequence
  Synthetic
aauuagaaucacuucuuuuggccu

SEQ ID NO: 117057 - RNA, 21 nt, Artificial Sequence
  Synthetic
ccucaagagaauaaaaugccu

SEQ ID NO: 117058 - RNA, 23 nt, Artificial Sequence
  Synthetic
ugccucaagagaauaaaaugccu

SEQ ID NO: 117059 - RNA, 24 nt, Artificial Sequence
  Synthetic
augccucaagagaauaaaaugccu

SEQ ID NO: 117060 - RNA, 18 nt, Artificial Sequence
  Synthetic
uguuacagaucuaugccu

SEQ ID NO: 117061 - RNA, 20 nt, Artificial Sequence
  Synthetic
aguguuacagaucuaugccu

SEQ ID NO: 117062 - RNA, 21 nt, Artificial Sequence
  Synthetic
uaguguuacagaucuaugccu

SEQ ID NO: 117063 - RNA, 22 nt, Artificial Sequence
  Synthetic
uuaguguuacagaucuaugccu

SEQ ID NO: 117064 - RNA, 23 nt, Artificial Sequence
  Synthetic
uuuaguguuacagaucuaugccu

SEQ ID NO: 117065 - RNA, 24 nt, Artificial Sequence
  Synthetic
auuuaguguuacagaucuaugccu

SEQ ID NO: 117066 - RNA, 18 nt, Artificial Sequence
  Synthetic
uucucaagagguaugccu

SEQ ID NO: 117067 - RNA, 19 nt, Artificial Sequence
  Synthetic
auucucaagagguaugccu

SEQ ID NO: 117068 - RNA, 20 nt, Artificial Sequence
  Synthetic
uauucucaagagguaugccu

SEQ ID NO: 117069 - RNA, 21 nt, Artificial Sequence
  Synthetic
auauucucaagagguaugccu

SEQ ID NO: 117070 - RNA, 22 nt, Artificial Sequence
  Synthetic
aauauucucaagagguaugccu

SEQ ID NO: 117071 - RNA, 23 nt, Artificial Sequence
  Synthetic
uaauauucucaagagguaugccu

SEQ ID NO: 117072 - RNA, 24 nt, Artificial Sequence
  Synthetic
uuaauauucucaagagguaugccu

SEQ ID NO: 117073 - RNA, 18 nt, Artificial Sequence
  Synthetic
acuugagugucacugccu

SEQ ID NO: 117074 - RNA, 19 nt, Artificial Sequence
  Synthetic
uacuugagugucacugccu

SEQ ID NO: 117075 - RNA, 20 nt, Artificial Sequence
  Synthetic
cuacuugagugucacugccu

SEQ ID NO: 117076 - RNA, 21 nt, Artificial Sequence
  Synthetic
acuacuugagugucacugccu

SEQ ID NO: 117077 - RNA, 22 nt, Artificial Sequence
  Synthetic
aacuacuugagugucacugccu

SEQ ID NO: 117078 - RNA, 23 nt, Artificial Sequence
  Synthetic
aaacuacuugagugucacugccu

SEQ ID NO: 117079 - RNA, 24 nt, Artificial Sequence
  Synthetic
uaaacuacuugagugucacugccu

SEQ ID NO: 117080 - RNA, 18 nt, Artificial Sequence
  Synthetic
caauauauaggacugccu

SEQ ID NO: 117081 - RNA, 19 nt, Artificial Sequence
  Synthetic
acaauauauaggacugccu

SEQ ID NO: 117082 - RNA, 20 nt, Artificial Sequence
  Synthetic
aacaauauauaggacugccu

SEQ ID NO: 117083 - RNA, 21 nt, Artificial Sequence
  Synthetic
aaacaauauauaggacugccu

SEQ ID NO: 117084 - RNA, 23 nt, Artificial Sequence
  Synthetic
ugaaacaauauauaggacugccu

SEQ ID NO: 117085 - RNA, 24 nt, Artificial Sequence
  Synthetic
augaaacaauauauaggacugccu

SEQ ID NO: 117086 - RNA, 18 nt, Artificial Sequence
  Synthetic
ccggcuauggugcugccu

SEQ ID NO: 117087 - RNA, 19 nt, Artificial Sequence
  Synthetic
accggcuauggugcugccu

SEQ ID NO: 117088 - RNA, 20 nt, Artificial Sequence
  Synthetic
uaccggcuauggugcugccu

SEQ ID NO: 117089 - RNA, 21 nt, Artificial Sequence
  Synthetic
uuaccggcuauggugcugccu

SEQ ID NO: 117090 - RNA, 22 nt, Artificial Sequence
  Synthetic
auuaccggcuauggugcugccu

SEQ ID NO: 117091 - RNA, 24 nt, Artificial Sequence
  Synthetic
agauuaccggcuauggugcugccu

SEQ ID NO: 117092 - RNA, 18 nt, Artificial Sequence
  Synthetic
accguaagucuucugccu

SEQ ID NO: 117093 - RNA, 19 nt, Artificial Sequence
  Synthetic
caccguaagucuucugccu

SEQ ID NO: 117094 - RNA, 21 nt, Artificial Sequence
  Synthetic
agcaccguaagucuucugccu

SEQ ID NO: 117095 - RNA, 22 nt, Artificial Sequence
  Synthetic
cagcaccguaagucuucugccu

SEQ ID NO: 117096 - RNA, 23 nt, Artificial Sequence
  Synthetic
ccagcaccguaagucuucugccu

SEQ ID NO: 117097 - RNA, 24 nt, Artificial Sequence
  Synthetic
uccagcaccguaagucuucugccu

SEQ ID NO: 117098 - RNA, 19 nt, Artificial Sequence
  Synthetic
uggaccugcgguggugccu

SEQ ID NO: 117099 - RNA, 20 nt, Artificial Sequence
  Synthetic
uuggaccugcgguggugccu

SEQ ID NO: 117100 - RNA, 21 nt, Artificial Sequence
  Synthetic
auuggaccugcgguggugccu

SEQ ID NO: 117101 - RNA, 22 nt, Artificial Sequence
  Synthetic
cauuggaccugcgguggugccu

SEQ ID NO: 117102 - RNA, 23 nt, Artificial Sequence
  Synthetic
ucauuggaccugcgguggugccu

SEQ ID NO: 117103 - RNA, 24 nt, Artificial Sequence
  Synthetic
uucauuggaccugcgguggugccu

SEQ ID NO: 117104 - RNA, 21 nt, Artificial Sequence
  Synthetic
ugcauuaugacuuaugugccu

SEQ ID NO: 117105 - RNA, 23 nt, Artificial Sequence
  Synthetic
ugugcauuaugacuuaugugccu

SEQ ID NO: 117106 - RNA, 18 nt, Artificial Sequence
  Synthetic
ccacggauugcugugccu

SEQ ID NO: 117107 - RNA, 19 nt, Artificial Sequence
  Synthetic
uccacggauugcugugccu

SEQ ID NO: 117108 - RNA, 20 nt, Artificial Sequence
  Synthetic
uuccacggauugcugugccu

SEQ ID NO: 117109 - RNA, 21 nt, Artificial Sequence
  Synthetic
cuuccacggauugcugugccu

SEQ ID NO: 117110 - RNA, 23 nt, Artificial Sequence
  Synthetic
agcuuccacggauugcugugccu

SEQ ID NO: 117111 - RNA, 24 nt, Artificial Sequence
  Synthetic
cagcuuccacggauugcugugccu

SEQ ID NO: 117112 - RNA, 18 nt, Artificial Sequence
  Synthetic
uggagugaucaauugccu

SEQ ID NO: 117113 - RNA, 19 nt, Artificial Sequence
  Synthetic
uuggagugaucaauugccu

SEQ ID NO: 117114 - RNA, 20 nt, Artificial Sequence
  Synthetic
uuuggagugaucaauugccu

SEQ ID NO: 117115 - RNA, 21 nt, Artificial Sequence
  Synthetic
cuuuggagugaucaauugccu

SEQ ID NO: 117116 - RNA, 22 nt, Artificial Sequence
  Synthetic
ccuuuggagugaucaauugccu

SEQ ID NO: 117117 - RNA, 23 nt, Artificial Sequence
  Synthetic
uccuuuggagugaucaauugccu

SEQ ID NO: 117118 - RNA, 24 nt, Artificial Sequence
  Synthetic
auccuuuggagugaucaauugccu

SEQ ID NO: 117119 - RNA, 18 nt, Artificial Sequence
  Synthetic
aguuaucaauaauugccu

SEQ ID NO: 117120 - RNA, 20 nt, Artificial Sequence
  Synthetic
ugaguuaucaauaauugccu

SEQ ID NO: 117121 - RNA, 21 nt, Artificial Sequence
  Synthetic
augaguuaucaauaauugccu

SEQ ID NO: 117122 - RNA, 22 nt, Artificial Sequence
  Synthetic
aaugaguuaucaauaauugccu

SEQ ID NO: 117123 - RNA, 24 nt, Artificial Sequence
  Synthetic
agaaugaguuaucaauaauugccu

SEQ ID NO: 117124 - RNA, 18 nt, Artificial Sequence
  Synthetic
augacaauaauauugccu

SEQ ID NO: 117125 - RNA, 19 nt, Artificial Sequence
  Synthetic
aaugacaauaauauugccu

SEQ ID NO: 117126 - RNA, 20 nt, Artificial Sequence
  Synthetic
uaaugacaauaauauugccu

SEQ ID NO: 117127 - RNA, 21 nt, Artificial Sequence
  Synthetic
auaaugacaauaauauugccu

SEQ ID NO: 117128 - RNA, 22 nt, Artificial Sequence
  Synthetic
uauaaugacaauaauauugccu

SEQ ID NO: 117129 - RNA, 23 nt, Artificial Sequence
  Synthetic
auauaaugacaauaauauugccu

SEQ ID NO: 117130 - RNA, 24 nt, Artificial Sequence
  Synthetic
aauauaaugacaauaauauugccu

SEQ ID NO: 117131 - RNA, 18 nt, Artificial Sequence
  Synthetic
uucuaaaaagacuugccu

SEQ ID NO: 117132 - RNA, 19 nt, Artificial Sequence
  Synthetic
uuucuaaaaagacuugccu

SEQ ID NO: 117133 - RNA, 20 nt, Artificial Sequence
  Synthetic
uuuucuaaaaagacuugccu

SEQ ID NO: 117134 - RNA, 22 nt, Artificial Sequence
  Synthetic
uguuuucuaaaaagacuugccu

SEQ ID NO: 117135 - RNA, 23 nt, Artificial Sequence
  Synthetic
auguuuucuaaaaagacuugccu

SEQ ID NO: 117136 - RNA, 24 nt, Artificial Sequence
  Synthetic
uauguuuucuaaaaagacuugccu

SEQ ID NO: 117137 - RNA, 18 nt, Artificial Sequence
  Synthetic
agaugguggcauuugccu

SEQ ID NO: 117138 - RNA, 19 nt, Artificial Sequence
  Synthetic
cagaugguggcauuugccu

SEQ ID NO: 117139 - RNA, 20 nt, Artificial Sequence
  Synthetic
acagaugguggcauuugccu

SEQ ID NO: 117140 - RNA, 21 nt, Artificial Sequence
  Synthetic
cacagaugguggcauuugccu

SEQ ID NO: 117141 - RNA, 22 nt, Artificial Sequence
  Synthetic
acacagaugguggcauuugccu

SEQ ID NO: 117142 - RNA, 23 nt, Artificial Sequence
  Synthetic
cacacagaugguggcauuugccu

SEQ ID NO: 117143 - RNA, 24 nt, Artificial Sequence
  Synthetic
ucacacagaugguggcauuugccu

SEQ ID NO: 117144 - RNA, 18 nt, Artificial Sequence
  Synthetic
caaauguucauuuugccu

SEQ ID NO: 117145 - RNA, 20 nt, Artificial Sequence
  Synthetic
ugcaaauguucauuuugccu

SEQ ID NO: 117146 - RNA, 21 nt, Artificial Sequence
  Synthetic
uugcaaauguucauuuugccu

SEQ ID NO: 117147 - RNA, 22 nt, Artificial Sequence
  Synthetic
uuugcaaauguucauuuugccu

SEQ ID NO: 117148 - RNA, 23 nt, Artificial Sequence
  Synthetic
uuuugcaaauguucauuuugccu

SEQ ID NO: 117149 - RNA, 24 nt, Artificial Sequence
  Synthetic
uuuuugcaaauguucauuuugccu

SEQ ID NO: 117150 - RNA, 18 nt, Artificial Sequence
  Synthetic
aacugaaauagaaauccu

SEQ ID NO: 117151 - RNA, 19 nt, Artificial Sequence
  Synthetic
aaacugaaauagaaauccu

SEQ ID NO: 117152 - RNA, 22 nt, Artificial Sequence
  Synthetic
aggaaacugaaauagaaauccu

SEQ ID NO: 117153 - RNA, 23 nt, Artificial Sequence
  Synthetic
aaggaaacugaaauagaaauccu

SEQ ID NO: 117154 - RNA, 24 nt, Artificial Sequence
  Synthetic
uaaggaaacugaaauagaaauccu

SEQ ID NO: 117155 - RNA, 18 nt, Artificial Sequence
  Synthetic
uuguaaaggcagaauccu

SEQ ID NO: 117156 - RNA, 19 nt, Artificial Sequence
  Synthetic
auuguaaaggcagaauccu

SEQ ID NO: 117157 - RNA, 20 nt, Artificial Sequence
  Synthetic
cauuguaaaggcagaauccu

SEQ ID NO: 117158 - RNA, 21 nt, Artificial Sequence
  Synthetic
acauuguaaaggcagaauccu

SEQ ID NO: 117159 - RNA, 22 nt, Artificial Sequence
  Synthetic
uacauuguaaaggcagaauccu

SEQ ID NO: 117160 - RNA, 23 nt, Artificial Sequence
  Synthetic
auacauuguaaaggcagaauccu

SEQ ID NO: 117161 - RNA, 19 nt, Artificial Sequence
  Synthetic
aguuaacaaugggaauccu

SEQ ID NO: 117162 - RNA, 20 nt, Artificial Sequence
  Synthetic
aaguuaacaaugggaauccu

SEQ ID NO: 117163 - RNA, 21 nt, Artificial Sequence
  Synthetic
aaaguuaacaaugggaauccu

SEQ ID NO: 117164 - RNA, 22 nt, Artificial Sequence
  Synthetic
aaaaguuaacaaugggaauccu

SEQ ID NO: 117165 - RNA, 24 nt, Artificial Sequence
  Synthetic
ugaaaaguuaacaaugggaauccu

SEQ ID NO: 117166 - RNA, 18 nt, Artificial Sequence
  Synthetic
cuucuacuacuuaauccu

SEQ ID NO: 117167 - RNA, 19 nt, Artificial Sequence
  Synthetic
ccuucuacuacuuaauccu

SEQ ID NO: 117168 - RNA, 20 nt, Artificial Sequence
  Synthetic
cccuucuacuacuuaauccu

SEQ ID NO: 117169 - RNA, 21 nt, Artificial Sequence
  Synthetic
acccuucuacuacuuaauccu

SEQ ID NO: 117170 - RNA, 22 nt, Artificial Sequence
  Synthetic
uacccuucuacuacuuaauccu

SEQ ID NO: 117171 - RNA, 23 nt, Artificial Sequence
  Synthetic
uuacccuucuacuacuuaauccu

SEQ ID NO: 117172 - RNA, 24 nt, Artificial Sequence
  Synthetic
auuacccuucuacuacuuaauccu

SEQ ID NO: 117173 - RNA, 18 nt, Artificial Sequence
  Synthetic
ucuaagcuauaacauccu

SEQ ID NO: 117174 - RNA, 19 nt, Artificial Sequence
  Synthetic
uucuaagcuauaacauccu

SEQ ID NO: 117175 - RNA, 20 nt, Artificial Sequence
  Synthetic
cuucuaagcuauaacauccu

SEQ ID NO: 117176 - RNA, 21 nt, Artificial Sequence
  Synthetic
acuucuaagcuauaacauccu

SEQ ID NO: 117177 - RNA, 22 nt, Artificial Sequence
  Synthetic
aacuucuaagcuauaacauccu

SEQ ID NO: 117178 - RNA, 24 nt, Artificial Sequence
  Synthetic
ugaacuucuaagcuauaacauccu

SEQ ID NO: 117179 - RNA, 18 nt, Artificial Sequence
  Synthetic
uaauauuccauacauccu

SEQ ID NO: 117180 - RNA, 19 nt, Artificial Sequence
  Synthetic
uuaauauuccauacauccu

SEQ ID NO: 117181 - RNA, 20 nt, Artificial Sequence
  Synthetic
uuuaauauuccauacauccu

SEQ ID NO: 117182 - RNA, 21 nt, Artificial Sequence
  Synthetic
uuuuaauauuccauacauccu

SEQ ID NO: 117183 - RNA, 22 nt, Artificial Sequence
  Synthetic
cuuuuaauauuccauacauccu

SEQ ID NO: 117184 - RNA, 23 nt, Artificial Sequence
  Synthetic
ucuuuuaauauuccauacauccu

SEQ ID NO: 117185 - RNA, 24 nt, Artificial Sequence
  Synthetic
aucuuuuaauauuccauacauccu

SEQ ID NO: 117186 - RNA, 21 nt, Artificial Sequence
  Synthetic
aaauggugguuauuagauccu

SEQ ID NO: 117187 - RNA, 22 nt, Artificial Sequence
  Synthetic
aaaauggugguuauuagauccu

SEQ ID NO: 117188 - RNA, 23 nt, Artificial Sequence
  Synthetic
aaaaauggugguuauuagauccu

SEQ ID NO: 117189 - RNA, 18 nt, Artificial Sequence
  Synthetic
ucaagagcucaauauccu

SEQ ID NO: 117190 - RNA, 19 nt, Artificial Sequence
  Synthetic
aucaagagcucaauauccu

SEQ ID NO: 117191 - RNA, 20 nt, Artificial Sequence
  Synthetic
uaucaagagcucaauauccu

SEQ ID NO: 117192 - RNA, 21 nt, Artificial Sequence
  Synthetic
auaucaagagcucaauauccu

SEQ ID NO: 117193 - RNA, 22 nt, Artificial Sequence
  Synthetic
uauaucaagagcucaauauccu

SEQ ID NO: 117194 - RNA, 23 nt, Artificial Sequence
  Synthetic
cuauaucaagagcucaauauccu

SEQ ID NO: 117195 - RNA, 24 nt, Artificial Sequence
  Synthetic
acuauaucaagagcucaauauccu

SEQ ID NO: 117196 - RNA, 18 nt, Artificial Sequence
  Synthetic
agguagaaaaccuauccu

SEQ ID NO: 117197 - RNA, 19 nt, Artificial Sequence
  Synthetic
cagguagaaaaccuauccu

SEQ ID NO: 117198 - RNA, 20 nt, Artificial Sequence
  Synthetic
ucagguagaaaaccuauccu

SEQ ID NO: 117199 - RNA, 21 nt, Artificial Sequence
  Synthetic
aucagguagaaaaccuauccu

SEQ ID NO: 117200 - RNA, 23 nt, Artificial Sequence
  Synthetic
ugaucagguagaaaaccuauccu

SEQ ID NO: 117201 - RNA, 24 nt, Artificial Sequence
  Synthetic
uugaucagguagaaaaccuauccu

SEQ ID NO: 117202 - RNA, 18 nt, Artificial Sequence
  Synthetic
uauuauuucaguuauccu

SEQ ID NO: 117203 - RNA, 19 nt, Artificial Sequence
  Synthetic
auauuauuucaguuauccu

SEQ ID NO: 117204 - RNA, 20 nt, Artificial Sequence
  Synthetic
aauauuauuucaguuauccu

SEQ ID NO: 117205 - RNA, 21 nt, Artificial Sequence
  Synthetic
aaauauuauuucaguuauccu

SEQ ID NO: 117206 - RNA, 22 nt, Artificial Sequence
  Synthetic
caaauauuauuucaguuauccu

SEQ ID NO: 117207 - RNA, 23 nt, Artificial Sequence
  Synthetic
ccaaauauuauuucaguuauccu

SEQ ID NO: 117208 - RNA, 24 nt, Artificial Sequence
  Synthetic
cccaaauauuauuucaguuauccu

SEQ ID NO: 117209 - RNA, 18 nt, Artificial Sequence
  Synthetic
uaccuuaucagaacuccu

SEQ ID NO: 117210 - RNA, 19 nt, Artificial Sequence
  Synthetic
cuaccuuaucagaacuccu

SEQ ID NO: 117211 - RNA, 21 nt, Artificial Sequence
  Synthetic
agcuaccuuaucagaacuccu

SEQ ID NO: 117212 - RNA, 22 nt, Artificial Sequence
  Synthetic
cagcuaccuuaucagaacuccu

SEQ ID NO: 117213 - RNA, 23 nt, Artificial Sequence
  Synthetic
acagcuaccuuaucagaacuccu

SEQ ID NO: 117214 - RNA, 24 nt, Artificial Sequence
  Synthetic
cacagcuaccuuaucagaacuccu

SEQ ID NO: 117215 - RNA, 18 nt, Artificial Sequence
  Synthetic
cuaucugugccuacuccu

SEQ ID NO: 117216 - RNA, 19 nt, Artificial Sequence
  Synthetic
acuaucugugccuacuccu

SEQ ID NO: 117217 - RNA, 20 nt, Artificial Sequence
  Synthetic
aacuaucugugccuacuccu

SEQ ID NO: 117218 - RNA, 21 nt, Artificial Sequence
  Synthetic
aaacuaucugugccuacuccu

SEQ ID NO: 117219 - RNA, 22 nt, Artificial Sequence
  Synthetic
aaaacuaucugugccuacuccu

SEQ ID NO: 117220 - RNA, 23 nt, Artificial Sequence
  Synthetic
uaaaacuaucugugccuacuccu

SEQ ID NO: 117221 - RNA, 24 nt, Artificial Sequence
  Synthetic
uuaaaacuaucugugccuacuccu

SEQ ID NO: 117222 - RNA, 18 nt, Artificial Sequence
  Synthetic
uauagaauugcuacuccu

SEQ ID NO: 117223 - RNA, 19 nt, Artificial Sequence
  Synthetic
auauagaauugcuacuccu

SEQ ID NO: 117224 - RNA, 20 nt, Artificial Sequence
  Synthetic
cauauagaauugcuacuccu

SEQ ID NO: 117225 - RNA, 21 nt, Artificial Sequence
  Synthetic
ucauauagaauugcuacuccu

SEQ ID NO: 117226 - RNA, 22 nt, Artificial Sequence
  Synthetic
aucauauagaauugcuacuccu

SEQ ID NO: 117227 - RNA, 23 nt, Artificial Sequence
  Synthetic
uaucauauagaauugcuacuccu

SEQ ID NO: 117228 - RNA, 24 nt, Artificial Sequence
  Synthetic
auaucauauagaauugcuacuccu

SEQ ID NO: 117229 - RNA, 19 nt, Artificial Sequence
  Synthetic
ugcuaguuuuuaaccuccu

SEQ ID NO: 117230 - RNA, 20 nt, Artificial Sequence
  Synthetic
augcuaguuuuuaaccuccu

SEQ ID NO: 117231 - RNA, 21 nt, Artificial Sequence
  Synthetic
aaugcuaguuuuuaaccuccu

SEQ ID NO: 117232 - RNA, 22 nt, Artificial Sequence
  Synthetic
aaaugcuaguuuuuaaccuccu

SEQ ID NO: 117233 - RNA, 23 nt, Artificial Sequence
  Synthetic
uaaaugcuaguuuuuaaccuccu

SEQ ID NO: 117234 - RNA, 24 nt, Artificial Sequence
  Synthetic
uuaaaugcuaguuuuuaaccuccu

SEQ ID NO: 117235 - RNA, 18 nt, Artificial Sequence
  Synthetic
aucuacagguucccuccu

SEQ ID NO: 117236 - RNA, 19 nt, Artificial Sequence
  Synthetic
uaucuacagguucccuccu

SEQ ID NO: 117237 - RNA, 20 nt, Artificial Sequence
  Synthetic
auaucuacagguucccuccu

SEQ ID NO: 117238 - RNA, 21 nt, Artificial Sequence
  Synthetic
cauaucuacagguucccuccu

SEQ ID NO: 117239 - RNA, 22 nt, Artificial Sequence
  Synthetic
ucauaucuacagguucccuccu

SEQ ID NO: 117240 - RNA, 24 nt, Artificial Sequence
  Synthetic
agucauaucuacagguucccuccu

SEQ ID NO: 117241 - RNA, 18 nt, Artificial Sequence
  Synthetic
acuuucugaauuccuccu

SEQ ID NO: 117242 - RNA, 19 nt, Artificial Sequence
  Synthetic
uacuuucugaauuccuccu

SEQ ID NO: 117243 - RNA, 20 nt, Artificial Sequence
  Synthetic
cuacuuucugaauuccuccu

SEQ ID NO: 117244 - RNA, 21 nt, Artificial Sequence
  Synthetic
ucuacuuucugaauuccuccu

SEQ ID NO: 117245 - RNA, 22 nt, Artificial Sequence
  Synthetic
uucuacuuucugaauuccuccu

SEQ ID NO: 117246 - RNA, 23 nt, Artificial Sequence
  Synthetic
cuucuacuuucugaauuccuccu

SEQ ID NO: 117247 - RNA, 18 nt, Artificial Sequence
  Synthetic
uguugggggacagcuccu

SEQ ID NO: 117248 - RNA, 19 nt, Artificial Sequence
  Synthetic
auguugggggacagcuccu

SEQ ID NO: 117249 - RNA, 20 nt, Artificial Sequence
  Synthetic
cauguugggggacagcuccu

SEQ ID NO: 117250 - RNA, 21 nt, Artificial Sequence
  Synthetic
ccauguugggggacagcuccu

SEQ ID NO: 117251 - RNA, 22 nt, Artificial Sequence
  Synthetic
accauguugggggacagcuccu

SEQ ID NO: 117252 - RNA, 24 nt, Artificial Sequence
  Synthetic
ugaccauguugggggacagcuccu

SEQ ID NO: 117253 - RNA, 18 nt, Artificial Sequence
  Synthetic
auacauuuagaggcuccu

SEQ ID NO: 117254 - RNA, 20 nt, Artificial Sequence
  Synthetic
ugauacauuuagaggcuccu

SEQ ID NO: 117255 - RNA, 21 nt, Artificial Sequence
  Synthetic
uugauacauuuagaggcuccu

SEQ ID NO: 117256 - RNA, 22 nt, Artificial Sequence
  Synthetic
uuugauacauuuagaggcuccu

SEQ ID NO: 117257 - RNA, 24 nt, Artificial Sequence
  Synthetic
aguuugauacauuuagaggcuccu

SEQ ID NO: 117258 - RNA, 18 nt, Artificial Sequence
  Synthetic
caaguuaaaauggcuccu

SEQ ID NO: 117259 - RNA, 20 nt, Artificial Sequence
  Synthetic
agcaaguuaaaauggcuccu

SEQ ID NO: 117260 - RNA, 21 nt, Artificial Sequence
  Synthetic
uagcaaguuaaaauggcuccu

SEQ ID NO: 117261 - RNA, 23 nt, Artificial Sequence
  Synthetic
uguagcaaguuaaaauggcuccu

SEQ ID NO: 117262 - RNA, 24 nt, Artificial Sequence
  Synthetic
auguagcaaguuaaaauggcuccu

SEQ ID NO: 117263 - RNA, 18 nt, Artificial Sequence
  Synthetic
uguaaacaaaggucuccu

SEQ ID NO: 117264 - RNA, 19 nt, Artificial Sequence
  Synthetic
auguaaacaaaggucuccu

SEQ ID NO: 117265 - RNA, 21 nt, Artificial Sequence
  Synthetic
ugauguaaacaaaggucuccu

SEQ ID NO: 117266 - RNA, 22 nt, Artificial Sequence
  Synthetic
uugauguaaacaaaggucuccu

SEQ ID NO: 117267 - RNA, 23 nt, Artificial Sequence
  Synthetic
uuugauguaaacaaaggucuccu

SEQ ID NO: 117268 - RNA, 24 nt, Artificial Sequence
  Synthetic
uuuugauguaaacaaaggucuccu

SEQ ID NO: 117269 - RNA, 18 nt, Artificial Sequence
  Synthetic
aaguugcuuuugucuccu

SEQ ID NO: 117270 - RNA, 20 nt, Artificial Sequence
  Synthetic
agaaguugcuuuugucuccu

SEQ ID NO: 117271 - RNA, 21 nt, Artificial Sequence
  Synthetic
cagaaguugcuuuugucuccu

SEQ ID NO: 117272 - RNA, 22 nt, Artificial Sequence
  Synthetic
acagaaguugcuuuugucuccu

SEQ ID NO: 117273 - RNA, 23 nt, Artificial Sequence
  Synthetic
cacagaaguugcuuuugucuccu

SEQ ID NO: 117274 - RNA, 24 nt, Artificial Sequence
  Synthetic
ucacagaaguugcuuuugucuccu

SEQ ID NO: 117275 - RNA, 18 nt, Artificial Sequence
  Synthetic
cuguaucuauauucuccu

SEQ ID NO: 117276 - RNA, 19 nt, Artificial Sequence
  Synthetic
ucuguaucuauauucuccu

SEQ ID NO: 117277 - RNA, 20 nt, Artificial Sequence
  Synthetic
aucuguaucuauauucuccu

SEQ ID NO: 117278 - RNA, 21 nt, Artificial Sequence
  Synthetic
uaucuguaucuauauucuccu

SEQ ID NO: 117279 - RNA, 22 nt, Artificial Sequence
  Synthetic
uuaucuguaucuauauucuccu

SEQ ID NO: 117280 - RNA, 24 nt, Artificial Sequence
  Synthetic
aguuaucuguaucuauauucuccu

SEQ ID NO: 117281 - RNA, 18 nt, Artificial Sequence
  Synthetic
cuaaagguuucuucuccu

SEQ ID NO: 117282 - RNA, 19 nt, Artificial Sequence
  Synthetic
acuaaagguuucuucuccu

SEQ ID NO: 117283 - RNA, 20 nt, Artificial Sequence
  Synthetic
cacuaaagguuucuucuccu

SEQ ID NO: 117284 - RNA, 21 nt, Artificial Sequence
  Synthetic
acacuaaagguuucuucuccu

SEQ ID NO: 117285 - RNA, 22 nt, Artificial Sequence
  Synthetic
uacacuaaagguuucuucuccu

SEQ ID NO: 117286 - RNA, 23 nt, Artificial Sequence
  Synthetic
auacacuaaagguuucuucuccu

SEQ ID NO: 117287 - RNA, 24 nt, Artificial Sequence
  Synthetic
aauacacuaaagguuucuucuccu

SEQ ID NO: 117288 - RNA, 19 nt, Artificial Sequence
  Synthetic
ugaauugucuaguucuccu

SEQ ID NO: 117289 - RNA, 20 nt, Artificial Sequence
  Synthetic
uugaauugucuaguucuccu

SEQ ID NO: 117290 - RNA, 21 nt, Artificial Sequence
  Synthetic
ugucaaaaccagaaaaguccu

SEQ ID NO: 117291 - RNA, 22 nt, Artificial Sequence
  Synthetic
uugucaaaaccagaaaaguccu

SEQ ID NO: 117292 - RNA, 23 nt, Artificial Sequence
  Synthetic
uuugucaaaaccagaaaaguccu

SEQ ID NO: 117293 - RNA, 24 nt, Artificial Sequence
  Synthetic
cuuugucaaaaccagaaaaguccu

SEQ ID NO: 117294 - RNA, 18 nt, Artificial Sequence
  Synthetic
uugguaaauaaaaguccu

SEQ ID NO: 117295 - RNA, 19 nt, Artificial Sequence
  Synthetic
uuugguaaauaaaaguccu

SEQ ID NO: 117296 - RNA, 20 nt, Artificial Sequence
  Synthetic
cuuugguaaauaaaaguccu

SEQ ID NO: 117297 - RNA, 21 nt, Artificial Sequence
  Synthetic
ccuuugguaaauaaaaguccu

SEQ ID NO: 117298 - RNA, 22 nt, Artificial Sequence
  Synthetic
uccuuugguaaauaaaaguccu

SEQ ID NO: 117299 - RNA, 23 nt, Artificial Sequence
  Synthetic
uuccuuugguaaauaaaaguccu

SEQ ID NO: 117300 - RNA, 24 nt, Artificial Sequence
  Synthetic
uuuccuuugguaaauaaaaguccu

SEQ ID NO: 117301 - RNA, 18 nt, Artificial Sequence
  Synthetic
uucagaauuaaaaguccu

SEQ ID NO: 117302 - RNA, 20 nt, Artificial Sequence
  Synthetic
uguucagaauuaaaaguccu

SEQ ID NO: 117303 - RNA, 21 nt, Artificial Sequence
  Synthetic
auguucagaauuaaaaguccu

SEQ ID NO: 117304 - RNA, 23 nt, Artificial Sequence
  Synthetic
cgauguucagaauuaaaaguccu

SEQ ID NO: 117305 - RNA, 24 nt, Artificial Sequence
  Synthetic
acgauguucagaauuaaaaguccu

SEQ ID NO: 117306 - RNA, 20 nt, Artificial Sequence
  Synthetic
aggguauuuugucaaguccu

SEQ ID NO: 117307 - RNA, 21 nt, Artificial Sequence
  Synthetic
uaggguauuuugucaaguccu

SEQ ID NO: 117308 - RNA, 23 nt, Artificial Sequence
  Synthetic
aguaggguauuuugucaaguccu

SEQ ID NO: 117309 - RNA, 19 nt, Artificial Sequence
  Synthetic
ugaagagaacugaaguccu

SEQ ID NO: 117310 - RNA, 20 nt, Artificial Sequence
  Synthetic
augaagagaacugaaguccu

SEQ ID NO: 117311 - RNA, 22 nt, Artificial Sequence
  Synthetic
agaugaagagaacugaaguccu

SEQ ID NO: 117312 - RNA, 23 nt, Artificial Sequence
  Synthetic
uagaugaagagaacugaaguccu

SEQ ID NO: 117313 - RNA, 18 nt, Artificial Sequence
  Synthetic
uauguaagccauaguccu

SEQ ID NO: 117314 - RNA, 19 nt, Artificial Sequence
  Synthetic
uuauguaagccauaguccu

SEQ ID NO: 117315 - RNA, 20 nt, Artificial Sequence
  Synthetic
uuuauguaagccauaguccu

SEQ ID NO: 117316 - RNA, 21 nt, Artificial Sequence
  Synthetic
uuuuauguaagccauaguccu

SEQ ID NO: 117317 - RNA, 23 nt, Artificial Sequence
  Synthetic
uguuuuauguaagccauaguccu

SEQ ID NO: 117318 - RNA, 24 nt, Artificial Sequence
  Synthetic
cuguuuuauguaagccauaguccu

SEQ ID NO: 117319 - RNA, 18 nt, Artificial Sequence
  Synthetic
caggcgaacaaauguccu

SEQ ID NO: 117320 - RNA, 19 nt, Artificial Sequence
  Synthetic
ccaggcgaacaaauguccu

SEQ ID NO: 117321 - RNA, 20 nt, Artificial Sequence
  Synthetic
uccaggcgaacaaauguccu

SEQ ID NO: 117322 - RNA, 21 nt, Artificial Sequence
  Synthetic
uuccaggcgaacaaauguccu

SEQ ID NO: 117323 - RNA, 22 nt, Artificial Sequence
  Synthetic
auuccaggcgaacaaauguccu

SEQ ID NO: 117324 - RNA, 23 nt, Artificial Sequence
  Synthetic
uauuccaggcgaacaaauguccu

SEQ ID NO: 117325 - RNA, 24 nt, Artificial Sequence
  Synthetic
cuauuccaggcgaacaaauguccu

SEQ ID NO: 117326 - RNA, 18 nt, Artificial Sequence
  Synthetic
augguuaaacgaauuccu

SEQ ID NO: 117327 - RNA, 19 nt, Artificial Sequence
  Synthetic
aaugguuaaacgaauuccu

SEQ ID NO: 117328 - RNA, 20 nt, Artificial Sequence
  Synthetic
uaaugguuaaacgaauuccu

SEQ ID NO: 117329 - RNA, 22 nt, Artificial Sequence
  Synthetic
uguaaugguuaaacgaauuccu

SEQ ID NO: 117330 - RNA, 24 nt, Artificial Sequence
  Synthetic
uguguaaugguuaaacgaauuccu

SEQ ID NO: 117331 - RNA, 19 nt, Artificial Sequence
  Synthetic
ugccucuugcuuaauuccu

SEQ ID NO: 117332 - RNA, 20 nt, Artificial Sequence
  Synthetic
augccucuugcuuaauuccu

SEQ ID NO: 117333 - RNA, 21 nt, Artificial Sequence
  Synthetic
aaugccucuugcuuaauuccu

SEQ ID NO: 117334 - RNA, 22 nt, Artificial Sequence
  Synthetic
aaaugccucuugcuuaauuccu

SEQ ID NO: 117335 - RNA, 23 nt, Artificial Sequence
  Synthetic
caaaugccucuugcuuaauuccu

SEQ ID NO: 117336 - RNA, 24 nt, Artificial Sequence
  Synthetic
ucaaaugccucuugcuuaauuccu

SEQ ID NO: 117337 - RNA, 18 nt, Artificial Sequence
  Synthetic
cagcaccagcacauuccu

SEQ ID NO: 117338 - RNA, 19 nt, Artificial Sequence
  Synthetic
acagcaccagcacauuccu

SEQ ID NO: 117339 - RNA, 20 nt, Artificial Sequence
  Synthetic
cacagcaccagcacauuccu

SEQ ID NO: 117340 - RNA, 21 nt, Artificial Sequence
  Synthetic
ccacagcaccagcacauuccu

SEQ ID NO: 117341 - RNA, 22 nt, Artificial Sequence
  Synthetic
cccacagcaccagcacauuccu

SEQ ID NO: 117342 - RNA, 18 nt, Artificial Sequence
  Synthetic
uugaagccugacauuccu

SEQ ID NO: 117343 - RNA, 20 nt, Artificial Sequence
  Synthetic
uguugaagccugacauuccu

SEQ ID NO: 117344 - RNA, 21 nt, Artificial Sequence
  Synthetic
cuguugaagccugacauuccu

SEQ ID NO: 117345 - RNA, 22 nt, Artificial Sequence
  Synthetic
ucuguugaagccugacauuccu

SEQ ID NO: 117346 - RNA, 23 nt, Artificial Sequence
  Synthetic
aucuguugaagccugacauuccu

SEQ ID NO: 117347 - RNA, 24 nt, Artificial Sequence
  Synthetic
aaucuguugaagccugacauuccu

SEQ ID NO: 117348 - RNA, 18 nt, Artificial Sequence
  Synthetic
agauagaaagauauuccu

SEQ ID NO: 117349 - RNA, 20 nt, Artificial Sequence
  Synthetic
ugagauagaaagauauuccu

SEQ ID NO: 117350 - RNA, 21 nt, Artificial Sequence
  Synthetic
augagauagaaagauauuccu

SEQ ID NO: 117351 - RNA, 23 nt, Artificial Sequence
  Synthetic
ugaugagauagaaagauauuccu

SEQ ID NO: 117352 - RNA, 24 nt, Artificial Sequence
  Synthetic
augaugagauagaaagauauuccu

SEQ ID NO: 117353 - RNA, 18 nt, Artificial Sequence
  Synthetic
augaccacgugacuuccu

SEQ ID NO: 117354 - RNA, 19 nt, Artificial Sequence
  Synthetic
caugaccacgugacuuccu

SEQ ID NO: 117355 - RNA, 18 nt, Artificial Sequence
  Synthetic
acuuacaucaugcuuccu

SEQ ID NO: 117356 - RNA, 19 nt, Artificial Sequence
  Synthetic
cacuuacaucaugcuuccu

SEQ ID NO: 117357 - RNA, 20 nt, Artificial Sequence
  Synthetic
ucacuuacaucaugcuuccu

SEQ ID NO: 117358 - RNA, 22 nt, Artificial Sequence
  Synthetic
ugucacuuacaucaugcuuccu

SEQ ID NO: 117359 - RNA, 23 nt, Artificial Sequence
  Synthetic
cugucacuuacaucaugcuuccu

SEQ ID NO: 117360 - RNA, 24 nt, Artificial Sequence
  Synthetic
ucugucacuuacaucaugcuuccu

SEQ ID NO: 117361 - RNA, 18 nt, Artificial Sequence
  Synthetic
uguggcacagaaguuccu

SEQ ID NO: 117362 - RNA, 19 nt, Artificial Sequence
  Synthetic
cuguggcacagaaguuccu

SEQ ID NO: 117363 - RNA, 21 nt, Artificial Sequence
  Synthetic
agcuguggcacagaaguuccu

SEQ ID NO: 117364 - RNA, 22 nt, Artificial Sequence
  Synthetic
aagcuguggcacagaaguuccu

SEQ ID NO: 117365 - RNA, 23 nt, Artificial Sequence
  Synthetic
aaagcuguggcacagaaguuccu

SEQ ID NO: 117366 - RNA, 18 nt, Artificial Sequence
  Synthetic
uccuacuaaaauguuccu

SEQ ID NO: 117367 - RNA, 19 nt, Artificial Sequence
  Synthetic
auccuacuaaaauguuccu

SEQ ID NO: 117368 - RNA, 20 nt, Artificial Sequence
  Synthetic
uauccuacuaaaauguuccu

SEQ ID NO: 117369 - RNA, 21 nt, Artificial Sequence
  Synthetic
auauccuacuaaaauguuccu

SEQ ID NO: 117370 - RNA, 22 nt, Artificial Sequence
  Synthetic
aauauccuacuaaaauguuccu

SEQ ID NO: 117371 - RNA, 23 nt, Artificial Sequence
  Synthetic
aaauauccuacuaaaauguuccu

SEQ ID NO: 117372 - RNA, 24 nt, Artificial Sequence
  Synthetic
caaauauccuacuaaaauguuccu

SEQ ID NO: 117373 - RNA, 18 nt, Artificial Sequence
  Synthetic
augcauucaaauguuccu

SEQ ID NO: 117374 - RNA, 19 nt, Artificial Sequence
  Synthetic
caugcauucaaauguuccu

SEQ ID NO: 117375 - RNA, 20 nt, Artificial Sequence
  Synthetic
ccaugcauucaaauguuccu

SEQ ID NO: 117376 - RNA, 21 nt, Artificial Sequence
  Synthetic
uccaugcauucaaauguuccu

SEQ ID NO: 117377 - RNA, 22 nt, Artificial Sequence
  Synthetic
auccaugcauucaaauguuccu

SEQ ID NO: 117378 - RNA, 23 nt, Artificial Sequence
  Synthetic
aauccaugcauucaaauguuccu

SEQ ID NO: 117379 - RNA, 24 nt, Artificial Sequence
  Synthetic
aaauccaugcauucaaauguuccu

SEQ ID NO: 117380 - RNA, 19 nt, Artificial Sequence
  Synthetic
agaacuuuuguauguuccu

SEQ ID NO: 117381 - RNA, 20 nt, Artificial Sequence
  Synthetic
cagaacuuuuguauguuccu

SEQ ID NO: 117382 - RNA, 21 nt, Artificial Sequence
  Synthetic
acagaacuuuuguauguuccu

SEQ ID NO: 117383 - RNA, 23 nt, Artificial Sequence
  Synthetic
ugacagaacuuuuguauguuccu

SEQ ID NO: 117384 - RNA, 24 nt, Artificial Sequence
  Synthetic
uugacagaacuuuuguauguuccu

SEQ ID NO: 117385 - RNA, 18 nt, Artificial Sequence
  Synthetic
ugugauuuacaguuuccu

SEQ ID NO: 117386 - RNA, 19 nt, Artificial Sequence
  Synthetic
cugugauuuacaguuuccu

SEQ ID NO: 117387 - RNA, 20 nt, Artificial Sequence
  Synthetic
acugugauuuacaguuuccu

SEQ ID NO: 117388 - RNA, 21 nt, Artificial Sequence
  Synthetic
aacugugauuuacaguuuccu

SEQ ID NO: 117389 - RNA, 22 nt, Artificial Sequence
  Synthetic
uaacugugauuuacaguuuccu

SEQ ID NO: 117390 - RNA, 24 nt, Artificial Sequence
  Synthetic
uguaacugugauuuacaguuuccu

SEQ ID NO: 117391 - RNA, 19 nt, Artificial Sequence
  Synthetic
uguguuaguucuguuuccu

SEQ ID NO: 117392 - RNA, 20 nt, Artificial Sequence
  Synthetic
uuguguuaguucuguuuccu

SEQ ID NO: 117393 - RNA, 21 nt, Artificial Sequence
  Synthetic
cuuguguuaguucuguuuccu

SEQ ID NO: 117394 - RNA, 22 nt, Artificial Sequence
  Synthetic
ucuuguguuaguucuguuuccu

SEQ ID NO: 117395 - RNA, 23 nt, Artificial Sequence
  Synthetic
uucuuguguuaguucuguuuccu

SEQ ID NO: 117396 - RNA, 24 nt, Artificial Sequence
  Synthetic
uuucuuguguuaguucuguuuccu

SEQ ID NO: 117397 - RNA, 21 nt, Artificial Sequence
  Synthetic
cuaacuucuguuccuuuuccu

SEQ ID NO: 117398 - RNA, 23 nt, Artificial Sequence
  Synthetic
agcuaacuucuguuccuuuuccu

SEQ ID NO: 117399 - RNA, 18 nt, Artificial Sequence
  Synthetic
caugauaacugaaaagcu

SEQ ID NO: 117400 - RNA, 20 nt, Artificial Sequence
  Synthetic
ugcaugauaacugaaaagcu

SEQ ID NO: 117401 - RNA, 21 nt, Artificial Sequence
  Synthetic
uugcaugauaacugaaaagcu

SEQ ID NO: 117402 - RNA, 22 nt, Artificial Sequence
  Synthetic
uuugcaugauaacugaaaagcu

SEQ ID NO: 117403 - RNA, 23 nt, Artificial Sequence
  Synthetic
auuugcaugauaacugaaaagcu

SEQ ID NO: 117404 - RNA, 24 nt, Artificial Sequence
  Synthetic
uauuugcaugauaacugaaaagcu

SEQ ID NO: 117405 - RNA, 19 nt, Artificial Sequence
  Synthetic
uggagagaaagacaaagcu

SEQ ID NO: 117406 - RNA, 20 nt, Artificial Sequence
  Synthetic
cuggagagaaagacaaagcu

SEQ ID NO: 117407 - RNA, 18 nt, Artificial Sequence
  Synthetic
acaguuuuaaucaaagcu

SEQ ID NO: 117408 - RNA, 20 nt, Artificial Sequence
  Synthetic
agacaguuuuaaucaaagcu

SEQ ID NO: 117409 - RNA, 21 nt, Artificial Sequence
  Synthetic
uagacaguuuuaaucaaagcu

SEQ ID NO: 117410 - RNA, 22 nt, Artificial Sequence
  Synthetic
auagacaguuuuaaucaaagcu

SEQ ID NO: 117411 - RNA, 24 nt, Artificial Sequence
  Synthetic
ugauagacaguuuuaaucaaagcu

SEQ ID NO: 117412 - RNA, 18 nt, Artificial Sequence
  Synthetic
acugaaaucaggaaagcu

SEQ ID NO: 117413 - RNA, 19 nt, Artificial Sequence
  Synthetic
uacugaaaucaggaaagcu

SEQ ID NO: 117414 - RNA, 20 nt, Artificial Sequence
  Synthetic
cuacugaaaucaggaaagcu

SEQ ID NO: 117415 - RNA, 21 nt, Artificial Sequence
  Synthetic
acuacugaaaucaggaaagcu

SEQ ID NO: 117416 - RNA, 22 nt, Artificial Sequence
  Synthetic
uacuacugaaaucaggaaagcu

SEQ ID NO: 117417 - RNA, 23 nt, Artificial Sequence
  Synthetic
uuacuacugaaaucaggaaagcu

SEQ ID NO: 117418 - RNA, 24 nt, Artificial Sequence
  Synthetic
auuacuacugaaaucaggaaagcu

SEQ ID NO: 117419 - RNA, 18 nt, Artificial Sequence
  Synthetic
uguauucaaccuaaagcu

SEQ ID NO: 117420 - RNA, 19 nt, Artificial Sequence
  Synthetic
auguauucaaccuaaagcu

SEQ ID NO: 117421 - RNA, 20 nt, Artificial Sequence
  Synthetic
aauguauucaaccuaaagcu

SEQ ID NO: 117422 - RNA, 21 nt, Artificial Sequence
  Synthetic
aaauguauucaaccuaaagcu

SEQ ID NO: 117423 - RNA, 22 nt, Artificial Sequence
  Synthetic
caaauguauucaaccuaaagcu

SEQ ID NO: 117424 - RNA, 23 nt, Artificial Sequence
  Synthetic
acaaauguauucaaccuaaagcu

SEQ ID NO: 117425 - RNA, 24 nt, Artificial Sequence
  Synthetic
uacaaauguauucaaccuaaagcu

SEQ ID NO: 117426 - RNA, 19 nt, Artificial Sequence
  Synthetic
ugcguauggcacacaagcu

SEQ ID NO: 117427 - RNA, 21 nt, Artificial Sequence
  Synthetic
ugugcguauggcacacaagcu

SEQ ID NO: 117428 - RNA, 23 nt, Artificial Sequence
  Synthetic
ugugugcguauggcacacaagcu

SEQ ID NO: 117429 - RNA, 24 nt, Artificial Sequence
  Synthetic
cugugugcguauggcacacaagcu

SEQ ID NO: 117430 - RNA, 18 nt, Artificial Sequence
  Synthetic
auuaugcuugaccaagcu

SEQ ID NO: 117431 - RNA, 19 nt, Artificial Sequence
  Synthetic
uauuaugcuugaccaagcu

SEQ ID NO: 117432 - RNA, 20 nt, Artificial Sequence
  Synthetic
cuauuaugcuugaccaagcu

SEQ ID NO: 117433 - RNA, 21 nt, Artificial Sequence
  Synthetic
acuauuaugcuugaccaagcu

SEQ ID NO: 117434 - RNA, 22 nt, Artificial Sequence
  Synthetic
aacuauuaugcuugaccaagcu

SEQ ID NO: 117435 - RNA, 24 nt, Artificial Sequence
  Synthetic
agaacuauuaugcuugaccaagcu

SEQ ID NO: 117436 - RNA, 18 nt, Artificial Sequence
  Synthetic
auuugaaaauaccaagcu

SEQ ID NO: 117437 - RNA, 19 nt, Artificial Sequence
  Synthetic
cauuugaaaauaccaagcu

SEQ ID NO: 117438 - RNA, 21 nt, Artificial Sequence
  Synthetic
ugcauuugaaaauaccaagcu

SEQ ID NO: 117439 - RNA, 22 nt, Artificial Sequence
  Synthetic
uugcauuugaaaauaccaagcu

SEQ ID NO: 117440 - RNA, 23 nt, Artificial Sequence
  Synthetic
uuugcauuugaaaauaccaagcu

SEQ ID NO: 117441 - RNA, 20 nt, Artificial Sequence
  Synthetic
aggggcuuguguaucaagcu

SEQ ID NO: 117442 - RNA, 21 nt, Artificial Sequence
  Synthetic
aaggggcuuguguaucaagcu

SEQ ID NO: 117443 - RNA, 23 nt, Artificial Sequence
  Synthetic
ugaaggggcuuguguaucaagcu

SEQ ID NO: 117444 - RNA, 18 nt, Artificial Sequence
  Synthetic
auauucacaccucaagcu

SEQ ID NO: 117445 - RNA, 19 nt, Artificial Sequence
  Synthetic
uauauucacaccucaagcu

SEQ ID NO: 117446 - RNA, 20 nt, Artificial Sequence
  Synthetic
uuauauucacaccucaagcu

SEQ ID NO: 117447 - RNA, 22 nt, Artificial Sequence
  Synthetic
aguuauauucacaccucaagcu

SEQ ID NO: 117448 - RNA, 23 nt, Artificial Sequence
  Synthetic
caguuauauucacaccucaagcu

SEQ ID NO: 117449 - RNA, 24 nt, Artificial Sequence
  Synthetic
ccaguuauauucacaccucaagcu

SEQ ID NO: 117450 - RNA, 18 nt, Artificial Sequence
  Synthetic
uuguuaaaagaugaagcu

SEQ ID NO: 117451 - RNA, 19 nt, Artificial Sequence
  Synthetic
uuuguuaaaagaugaagcu

SEQ ID NO: 117452 - RNA, 20 nt, Artificial Sequence
  Synthetic
uuuuguuaaaagaugaagcu

SEQ ID NO: 117453 - RNA, 21 nt, Artificial Sequence
  Synthetic
cuuuuguuaaaagaugaagcu

SEQ ID NO: 117454 - RNA, 24 nt, Artificial Sequence
  Synthetic
aggcuuuuguuaaaagaugaagcu

SEQ ID NO: 117455 - RNA, 18 nt, Artificial Sequence
  Synthetic
auuuccuaauuauaagcu

SEQ ID NO: 117456 - RNA, 19 nt, Artificial Sequence
  Synthetic
cauuuccuaauuauaagcu

SEQ ID NO: 117457 - RNA, 20 nt, Artificial Sequence
  Synthetic
ccauuuccuaauuauaagcu

SEQ ID NO: 117458 - RNA, 21 nt, Artificial Sequence
  Synthetic
accauuuccuaauuauaagcu

SEQ ID NO: 117459 - RNA, 22 nt, Artificial Sequence
  Synthetic
caccauuuccuaauuauaagcu

SEQ ID NO: 117460 - RNA, 23 nt, Artificial Sequence
  Synthetic
ucaccauuuccuaauuauaagcu

SEQ ID NO: 117461 - RNA, 18 nt, Artificial Sequence
  Synthetic
augaaauauaaguaagcu

SEQ ID NO: 117462 - RNA, 19 nt, Artificial Sequence
  Synthetic
aaugaaauauaaguaagcu

SEQ ID NO: 117463 - RNA, 20 nt, Artificial Sequence
  Synthetic
uaaugaaauauaaguaagcu

SEQ ID NO: 117464 - RNA, 21 nt, Artificial Sequence
  Synthetic
auaaugaaauauaaguaagcu

SEQ ID NO: 117465 - RNA, 22 nt, Artificial Sequence
  Synthetic
cauaaugaaauauaaguaagcu

SEQ ID NO: 117466 - RNA, 23 nt, Artificial Sequence
  Synthetic
ucauaaugaaauauaaguaagcu

SEQ ID NO: 117467 - RNA, 24 nt, Artificial Sequence
  Synthetic
uucauaaugaaauauaaguaagcu

SEQ ID NO: 117468 - RNA, 19 nt, Artificial Sequence
  Synthetic
agauguagggaauuaagcu

SEQ ID NO: 117469 - RNA, 20 nt, Artificial Sequence
  Synthetic
aagauguagggaauuaagcu

SEQ ID NO: 117470 - RNA, 21 nt, Artificial Sequence
  Synthetic
aaagauguagggaauuaagcu

SEQ ID NO: 117471 - RNA, 23 nt, Artificial Sequence
  Synthetic
ugaaagauguagggaauuaagcu

SEQ ID NO: 117472 - RNA, 24 nt, Artificial Sequence
  Synthetic
augaaagauguagggaauuaagcu

SEQ ID NO: 117473 - RNA, 18 nt, Artificial Sequence
  Synthetic
aaaucuguguuuuaagcu

SEQ ID NO: 117474 - RNA, 19 nt, Artificial Sequence
  Synthetic
aaaaucuguguuuuaagcu

SEQ ID NO: 117475 - RNA, 20 nt, Artificial Sequence
  Synthetic
uaaaaucuguguuuuaagcu

SEQ ID NO: 117476 - RNA, 22 nt, Artificial Sequence
  Synthetic
aguaaaaucuguguuuuaagcu

SEQ ID NO: 117477 - RNA, 24 nt, Artificial Sequence
  Synthetic
agaguaaaaucuguguuuuaagcu

SEQ ID NO: 117478 - RNA, 18 nt, Artificial Sequence
  Synthetic
agauagaauugaacagcu

SEQ ID NO: 117479 - RNA, 20 nt, Artificial Sequence
  Synthetic
agagauagaauugaacagcu

SEQ ID NO: 117480 - RNA, 21 nt, Artificial Sequence
  Synthetic
aagagauagaauugaacagcu

SEQ ID NO: 117481 - RNA, 22 nt, Artificial Sequence
  Synthetic
uaagagauagaauugaacagcu

SEQ ID NO: 117482 - RNA, 23 nt, Artificial Sequence
  Synthetic
auaagagauagaauugaacagcu

SEQ ID NO: 117483 - RNA, 24 nt, Artificial Sequence
  Synthetic
aauaagagauagaauugaacagcu

SEQ ID NO: 117484 - RNA, 18 nt, Artificial Sequence
  Synthetic
aggccuaauugaacagcu

SEQ ID NO: 117485 - RNA, 19 nt, Artificial Sequence
  Synthetic
aaggccuaauugaacagcu

SEQ ID NO: 117486 - RNA, 20 nt, Artificial Sequence
  Synthetic
caaggccuaauugaacagcu

SEQ ID NO: 117487 - RNA, 21 nt, Artificial Sequence
  Synthetic
ccaaggccuaauugaacagcu

SEQ ID NO: 117488 - RNA, 22 nt, Artificial Sequence
  Synthetic
accaaggccuaauugaacagcu

SEQ ID NO: 117489 - RNA, 23 nt, Artificial Sequence
  Synthetic
uaccaaggccuaauugaacagcu

SEQ ID NO: 117490 - RNA, 24 nt, Artificial Sequence
  Synthetic
auaccaaggccuaauugaacagcu

SEQ ID NO: 117491 - RNA, 19 nt, Artificial Sequence
  Synthetic
aggagggagcgcuacagcu

SEQ ID NO: 117492 - RNA, 20 nt, Artificial Sequence
  Synthetic
aaggagggagcgcuacagcu

SEQ ID NO: 117493 - RNA, 24 nt, Artificial Sequence
  Synthetic
agggaaggagggagcgcuacagcu

SEQ ID NO: 117494 - RNA, 21 nt, Artificial Sequence
  Synthetic
cuuauuuuaauaaaagcagcu

SEQ ID NO: 117495 - RNA, 22 nt, Artificial Sequence
  Synthetic
ucuuauuuuaauaaaagcagcu

SEQ ID NO: 117496 - RNA, 23 nt, Artificial Sequence
  Synthetic
aucuuauuuuaauaaaagcagcu

SEQ ID NO: 117497 - RNA, 24 nt, Artificial Sequence
  Synthetic
aaucuuauuuuaauaaaagcagcu

SEQ ID NO: 117498 - RNA, 18 nt, Artificial Sequence
  Synthetic
caucuuaaacgagcagcu

SEQ ID NO: 117499 - RNA, 20 nt, Artificial Sequence
  Synthetic
ugcaucuuaaacgagcagcu

SEQ ID NO: 117500 - RNA, 21 nt, Artificial Sequence
  Synthetic
uugcaucuuaaacgagcagcu

SEQ ID NO: 117501 - RNA, 23 nt, Artificial Sequence
  Synthetic
cguugcaucuuaaacgagcagcu

SEQ ID NO: 117502 - RNA, 18 nt, Artificial Sequence
  Synthetic
ugggaugguuaggcagcu

SEQ ID NO: 117503 - RNA, 19 nt, Artificial Sequence
  Synthetic
cugggaugguuaggcagcu

SEQ ID NO: 117504 - RNA, 20 nt, Artificial Sequence
  Synthetic
ccugggaugguuaggcagcu

SEQ ID NO: 117505 - RNA, 21 nt, Artificial Sequence
  Synthetic
cccugggaugguuaggcagcu

SEQ ID NO: 117506 - RNA, 23 nt, Artificial Sequence
  Synthetic
agcccugggaugguuaggcagcu

SEQ ID NO: 117507 - RNA, 24 nt, Artificial Sequence
  Synthetic
cagcccugggaugguuaggcagcu

SEQ ID NO: 117508 - RNA, 18 nt, Artificial Sequence
  Synthetic
augcuauuuacuucagcu

SEQ ID NO: 117509 - RNA, 19 nt, Artificial Sequence
  Synthetic
aaugcuauuuacuucagcu

SEQ ID NO: 117510 - RNA, 21 nt, Artificial Sequence
  Synthetic
ugaaugcuauuuacuucagcu

SEQ ID NO: 117511 - RNA, 22 nt, Artificial Sequence
  Synthetic
augaaugcuauuuacuucagcu

SEQ ID NO: 117512 - RNA, 24 nt, Artificial Sequence
  Synthetic
agaugaaugcuauuuacuucagcu

SEQ ID NO: 117513 - RNA, 18 nt, Artificial Sequence
  Synthetic
auaauuaguaguucagcu

SEQ ID NO: 117514 - RNA, 19 nt, Artificial Sequence
  Synthetic
aauaauuaguaguucagcu

SEQ ID NO: 117515 - RNA, 20 nt, Artificial Sequence
  Synthetic
uaauaauuaguaguucagcu

SEQ ID NO: 117516 - RNA, 21 nt, Artificial Sequence
  Synthetic
uuaauaauuaguaguucagcu

SEQ ID NO: 117517 - RNA, 22 nt, Artificial Sequence
  Synthetic
auuaauaauuaguaguucagcu

SEQ ID NO: 117518 - RNA, 23 nt, Artificial Sequence
  Synthetic
uauuaauaauuaguaguucagcu

SEQ ID NO: 117519 - RNA, 24 nt, Artificial Sequence
  Synthetic
auauuaauaauuaguaguucagcu

SEQ ID NO: 117520 - RNA, 18 nt, Artificial Sequence
  Synthetic
auagagcaaauuucagcu

SEQ ID NO: 117521 - RNA, 19 nt, Artificial Sequence
  Synthetic
uauagagcaaauuucagcu

SEQ ID NO: 117522 - RNA, 20 nt, Artificial Sequence
  Synthetic
uuauagagcaaauuucagcu

SEQ ID NO: 117523 - RNA, 21 nt, Artificial Sequence
  Synthetic
auuauagagcaaauuucagcu

SEQ ID NO: 117524 - RNA, 22 nt, Artificial Sequence
  Synthetic
aauuauagagcaaauuucagcu

SEQ ID NO: 117525 - RNA, 23 nt, Artificial Sequence
  Synthetic
caauuauagagcaaauuucagcu

SEQ ID NO: 117526 - RNA, 24 nt, Artificial Sequence
  Synthetic
acaauuauagagcaaauuucagcu

SEQ ID NO: 117527 - RNA, 21 nt, Artificial Sequence
  Synthetic
uacaaguuaaguggcagagcu

SEQ ID NO: 117528 - RNA, 22 nt, Artificial Sequence
  Synthetic
auacaaguuaaguggcagagcu

SEQ ID NO: 117529 - RNA, 23 nt, Artificial Sequence
  Synthetic
uauacaaguuaaguggcagagcu

SEQ ID NO: 117530 - RNA, 18 nt, Artificial Sequence
  Synthetic
ucugauuuugagagagcu

SEQ ID NO: 117531 - RNA, 19 nt, Artificial Sequence
  Synthetic
aucugauuuugagagagcu

SEQ ID NO: 117532 - RNA, 20 nt, Artificial Sequence
  Synthetic
uaucugauuuugagagagcu

SEQ ID NO: 117533 - RNA, 21 nt, Artificial Sequence
  Synthetic
auaucugauuuugagagagcu

SEQ ID NO: 117534 - RNA, 22 nt, Artificial Sequence
  Synthetic
aauaucugauuuugagagagcu

SEQ ID NO: 117535 - RNA, 23 nt, Artificial Sequence
  Synthetic
uaauaucugauuuugagagagcu

SEQ ID NO: 117536 - RNA, 24 nt, Artificial Sequence
  Synthetic
uuaauaucugauuuugagagagcu

SEQ ID NO: 117537 - RNA, 18 nt, Artificial Sequence
  Synthetic
ucaaggucaaggagagcu

SEQ ID NO: 117538 - RNA, 19 nt, Artificial Sequence
  Synthetic
aucaaggucaaggagagcu

SEQ ID NO: 117539 - RNA, 20 nt, Artificial Sequence
  Synthetic
aaucaaggucaaggagagcu

SEQ ID NO: 117540 - RNA, 22 nt, Artificial Sequence
  Synthetic
agaaucaaggucaaggagagcu

SEQ ID NO: 117541 - RNA, 23 nt, Artificial Sequence
  Synthetic
aagaaucaaggucaaggagagcu

SEQ ID NO: 117542 - RNA, 24 nt, Artificial Sequence
  Synthetic
uaagaaucaaggucaaggagagcu

SEQ ID NO: 117543 - RNA, 19 nt, Artificial Sequence
  Synthetic
aguguagccaaugagagcu

SEQ ID NO: 117544 - RNA, 20 nt, Artificial Sequence
  Synthetic
caguguagccaaugagagcu

SEQ ID NO: 117545 - RNA, 21 nt, Artificial Sequence
  Synthetic
acaguguagccaaugagagcu

SEQ ID NO: 117546 - RNA, 22 nt, Artificial Sequence
  Synthetic
uacaguguagccaaugagagcu

SEQ ID NO: 117547 - RNA, 18 nt, Artificial Sequence
  Synthetic
cuuccugaagaaggagcu

SEQ ID NO: 117548 - RNA, 19 nt, Artificial Sequence
  Synthetic
ccuuccugaagaaggagcu

SEQ ID NO: 117549 - RNA, 20 nt, Artificial Sequence
  Synthetic
accuuccugaagaaggagcu

SEQ ID NO: 117550 - RNA, 24 nt, Artificial Sequence
  Synthetic
ugggaccuuccugaagaaggagcu

SEQ ID NO: 117551 - RNA, 18 nt, Artificial Sequence
  Synthetic
auguuaaguuugggagcu

SEQ ID NO: 117552 - RNA, 19 nt, Artificial Sequence
  Synthetic
aauguuaaguuugggagcu

SEQ ID NO: 117553 - RNA, 20 nt, Artificial Sequence
  Synthetic
aaauguuaaguuugggagcu

SEQ ID NO: 117554 - RNA, 21 nt, Artificial Sequence
  Synthetic
aaaauguuaaguuugggagcu

SEQ ID NO: 117555 - RNA, 22 nt, Artificial Sequence
  Synthetic
aaaaauguuaaguuugggagcu

SEQ ID NO: 117556 - RNA, 23 nt, Artificial Sequence
  Synthetic
aaaaaauguuaaguuugggagcu

SEQ ID NO: 117557 - RNA, 24 nt, Artificial Sequence
  Synthetic
aaaaaaauguuaaguuugggagcu

SEQ ID NO: 117558 - RNA, 18 nt, Artificial Sequence
  Synthetic
acacauugugauggagcu

SEQ ID NO: 117559 - RNA, 21 nt, Artificial Sequence
  Synthetic
uggacacauugugauggagcu

SEQ ID NO: 117560 - RNA, 22 nt, Artificial Sequence
  Synthetic
uuggacacauugugauggagcu

SEQ ID NO: 117561 - RNA, 23 nt, Artificial Sequence
  Synthetic
uuuggacacauugugauggagcu

SEQ ID NO: 117562 - RNA, 24 nt, Artificial Sequence
  Synthetic
auuuggacacauugugauggagcu

SEQ ID NO: 117563 - RNA, 19 nt, Artificial Sequence
  Synthetic
agugaggaaaagcugagcu

SEQ ID NO: 117564 - RNA, 20 nt, Artificial Sequence
  Synthetic
cagugaggaaaagcugagcu

SEQ ID NO: 117565 - RNA, 21 nt, Artificial Sequence
  Synthetic
acagugaggaaaagcugagcu

SEQ ID NO: 117566 - RNA, 22 nt, Artificial Sequence
  Synthetic
aacagugaggaaaagcugagcu

SEQ ID NO: 117567 - RNA, 23 nt, Artificial Sequence
  Synthetic
aaacagugaggaaaagcugagcu

SEQ ID NO: 117568 - RNA, 24 nt, Artificial Sequence
  Synthetic
uaaacagugaggaaaagcugagcu

SEQ ID NO: 117569 - RNA, 18 nt, Artificial Sequence
  Synthetic
auuacaguauucugagcu

SEQ ID NO: 117570 - RNA, 19 nt, Artificial Sequence
  Synthetic
cauuacaguauucugagcu

SEQ ID NO: 117571 - RNA, 20 nt, Artificial Sequence
  Synthetic
acauuacaguauucugagcu

SEQ ID NO: 117572 - RNA, 21 nt, Artificial Sequence
  Synthetic
aacauuacaguauucugagcu

SEQ ID NO: 117573 - RNA, 22 nt, Artificial Sequence
  Synthetic
aaacauuacaguauucugagcu

SEQ ID NO: 117574 - RNA, 23 nt, Artificial Sequence
  Synthetic
uaaacauuacaguauucugagcu

SEQ ID NO: 117575 - RNA, 24 nt, Artificial Sequence
  Synthetic
uuaaacauuacaguauucugagcu

SEQ ID NO: 117576 - RNA, 18 nt, Artificial Sequence
  Synthetic
uggacugaaaagugagcu

SEQ ID NO: 117577 - RNA, 19 nt, Artificial Sequence
  Synthetic
auggacugaaaagugagcu

SEQ ID NO: 117578 - RNA, 20 nt, Artificial Sequence
  Synthetic
aauggacugaaaagugagcu

SEQ ID NO: 117579 - RNA, 21 nt, Artificial Sequence
  Synthetic
aaauggacugaaaagugagcu

SEQ ID NO: 117580 - RNA, 22 nt, Artificial Sequence
  Synthetic
uaaauggacugaaaagugagcu

SEQ ID NO: 117581 - RNA, 23 nt, Artificial Sequence
  Synthetic
auaaauggacugaaaagugagcu

SEQ ID NO: 117582 - RNA, 18 nt, Artificial Sequence
  Synthetic
uggugcacaaaaauagcu

SEQ ID NO: 117583 - RNA, 19 nt, Artificial Sequence
  Synthetic
auggugcacaaaaauagcu

SEQ ID NO: 117584 - RNA, 20 nt, Artificial Sequence
  Synthetic
uauggugcacaaaaauagcu

SEQ ID NO: 117585 - RNA, 21 nt, Artificial Sequence
  Synthetic
uuauggugcacaaaaauagcu

SEQ ID NO: 117586 - RNA, 22 nt, Artificial Sequence
  Synthetic
uuuauggugcacaaaaauagcu

SEQ ID NO: 117587 - RNA, 23 nt, Artificial Sequence
  Synthetic
cuuuauggugcacaaaaauagcu

SEQ ID NO: 117588 - RNA, 19 nt, Artificial Sequence
  Synthetic
uggaugcuuagaaauagcu

SEQ ID NO: 117589 - RNA, 20 nt, Artificial Sequence
  Synthetic
cuggaugcuuagaaauagcu

SEQ ID NO: 117590 - RNA, 21 nt, Artificial Sequence
  Synthetic
acuggaugcuuagaaauagcu

SEQ ID NO: 117591 - RNA, 22 nt, Artificial Sequence
  Synthetic
uacuggaugcuuagaaauagcu

SEQ ID NO: 117592 - RNA, 23 nt, Artificial Sequence
  Synthetic
cuacuggaugcuuagaaauagcu

SEQ ID NO: 117593 - RNA, 19 nt, Artificial Sequence
  Synthetic
agaaaagcaggaaauagcu

SEQ ID NO: 117594 - RNA, 23 nt, Artificial Sequence
  Synthetic
agggagaaaagcaggaaauagcu

SEQ ID NO: 117595 - RNA, 24 nt, Artificial Sequence
  Synthetic
aagggagaaaagcaggaaauagcu

SEQ ID NO: 117596 - RNA, 18 nt, Artificial Sequence
  Synthetic
ucaugaggggaaauagcu

SEQ ID NO: 117597 - RNA, 19 nt, Artificial Sequence
  Synthetic
aucaugaggggaaauagcu

SEQ ID NO: 117598 - RNA, 20 nt, Artificial Sequence
  Synthetic
caucaugaggggaaauagcu

SEQ ID NO: 117599 - RNA, 21 nt, Artificial Sequence
  Synthetic
acaucaugaggggaaauagcu

SEQ ID NO: 117600 - RNA, 22 nt, Artificial Sequence
  Synthetic
cacaucaugaggggaaauagcu

SEQ ID NO: 117601 - RNA, 23 nt, Artificial Sequence
  Synthetic
acacaucaugaggggaaauagcu

SEQ ID NO: 117602 - RNA, 24 nt, Artificial Sequence
  Synthetic
aacacaucaugaggggaaauagcu

SEQ ID NO: 117603 - RNA, 18 nt, Artificial Sequence
  Synthetic
augauauuuacaauagcu

SEQ ID NO: 117604 - RNA, 19 nt, Artificial Sequence
  Synthetic
aaugauauuuacaauagcu

SEQ ID NO: 117605 - RNA, 21 nt, Artificial Sequence
  Synthetic
ugaaugauauuuacaauagcu

SEQ ID NO: 117606 - RNA, 23 nt, Artificial Sequence
  Synthetic
agugaaugauauuuacaauagcu

SEQ ID NO: 117607 - RNA, 24 nt, Artificial Sequence
  Synthetic
cagugaaugauauuuacaauagcu

SEQ ID NO: 117608 - RNA, 20 nt, Artificial Sequence
  Synthetic
agggucaaacgguuauagcu

SEQ ID NO: 117609 - RNA, 22 nt, Artificial Sequence
  Synthetic
agagggucaaacgguuauagcu

SEQ ID NO: 117610 - RNA, 23 nt, Artificial Sequence
  Synthetic
aagagggucaaacgguuauagcu

SEQ ID NO: 117611 - RNA, 24 nt, Artificial Sequence
  Synthetic
caagagggucaaacgguuauagcu

SEQ ID NO: 117612 - RNA, 18 nt, Artificial Sequence
  Synthetic
auacacugacaaguagcu

SEQ ID NO: 117613 - RNA, 21 nt, Artificial Sequence
  Synthetic
aggauacacugacaaguagcu

SEQ ID NO: 117614 - RNA, 22 nt, Artificial Sequence
  Synthetic
caggauacacugacaaguagcu

SEQ ID NO: 117615 - RNA, 23 nt, Artificial Sequence
  Synthetic
ccaggauacacugacaaguagcu

SEQ ID NO: 117616 - RNA, 24 nt, Artificial Sequence
  Synthetic
accaggauacacugacaaguagcu

SEQ ID NO: 117617 - RNA, 19 nt, Artificial Sequence
  Synthetic
ugcuuaucuuuauguagcu

SEQ ID NO: 117618 - RNA, 20 nt, Artificial Sequence
  Synthetic
uugcuuaucuuuauguagcu

SEQ ID NO: 117619 - RNA, 21 nt, Artificial Sequence
  Synthetic
uuugcuuaucuuuauguagcu

SEQ ID NO: 117620 - RNA, 22 nt, Artificial Sequence
  Synthetic
cuuugcuuaucuuuauguagcu

SEQ ID NO: 117621 - RNA, 23 nt, Artificial Sequence
  Synthetic
ucuuugcuuaucuuuauguagcu

SEQ ID NO: 117622 - RNA, 24 nt, Artificial Sequence
  Synthetic
aucuuugcuuaucuuuauguagcu

SEQ ID NO: 117623 - RNA, 19 nt, Artificial Sequence
  Synthetic
ugcaauagacaaauuagcu

SEQ ID NO: 117624 - RNA, 20 nt, Artificial Sequence
  Synthetic
uugcaauagacaaauuagcu

SEQ ID NO: 117625 - RNA, 21 nt, Artificial Sequence
  Synthetic
auugcaauagacaaauuagcu

SEQ ID NO: 117626 - RNA, 22 nt, Artificial Sequence
  Synthetic
cauugcaauagacaaauuagcu

SEQ ID NO: 117627 - RNA, 23 nt, Artificial Sequence
  Synthetic
ccauugcaauagacaaauuagcu

SEQ ID NO: 117628 - RNA, 24 nt, Artificial Sequence
  Synthetic
accauugcaauagacaaauuagcu

SEQ ID NO: 117629 - RNA, 18 nt, Artificial Sequence
  Synthetic
uuaagaaacaauuuagcu

SEQ ID NO: 117630 - RNA, 19 nt, Artificial Sequence
  Synthetic
uuuaagaaacaauuuagcu

SEQ ID NO: 117631 - RNA, 20 nt, Artificial Sequence
  Synthetic
auuuaagaaacaauuuagcu

SEQ ID NO: 117632 - RNA, 21 nt, Artificial Sequence
  Synthetic
cauuuaagaaacaauuuagcu

SEQ ID NO: 117633 - RNA, 22 nt, Artificial Sequence
  Synthetic
ucauuuaagaaacaauuuagcu

SEQ ID NO: 117634 - RNA, 23 nt, Artificial Sequence
  Synthetic
uucauuuaagaaacaauuuagcu

SEQ ID NO: 117635 - RNA, 24 nt, Artificial Sequence
  Synthetic
uuucauuuaagaaacaauuuagcu

SEQ ID NO: 117636 - RNA, 18 nt, Artificial Sequence
  Synthetic
caaaguaaacauuuagcu

SEQ ID NO: 117637 - RNA, 19 nt, Artificial Sequence
  Synthetic
ccaaaguaaacauuuagcu

SEQ ID NO: 117638 - RNA, 21 nt, Artificial Sequence
  Synthetic
agccaaaguaaacauuuagcu

SEQ ID NO: 117639 - RNA, 22 nt, Artificial Sequence
  Synthetic
aagccaaaguaaacauuuagcu

SEQ ID NO: 117640 - RNA, 23 nt, Artificial Sequence
  Synthetic
caagccaaaguaaacauuuagcu

SEQ ID NO: 117641 - RNA, 24 nt, Artificial Sequence
  Synthetic
ccaagccaaaguaaacauuuagcu

SEQ ID NO: 117642 - RNA, 18 nt, Artificial Sequence
  Synthetic
auuuuggaaaauuacgcu

SEQ ID NO: 117643 - RNA, 19 nt, Artificial Sequence
  Synthetic
cauuuuggaaaauuacgcu

SEQ ID NO: 117644 - RNA, 21 nt, Artificial Sequence
  Synthetic
agcauuuuggaaaauuacgcu

SEQ ID NO: 117645 - RNA, 22 nt, Artificial Sequence
  Synthetic
cagcauuuuggaaaauuacgcu

SEQ ID NO: 117646 - RNA, 23 nt, Artificial Sequence
  Synthetic
ucagcauuuuggaaaauuacgcu

SEQ ID NO: 117647 - RNA, 24 nt, Artificial Sequence
  Synthetic
uucagcauuuuggaaaauuacgcu

SEQ ID NO: 117648 - RNA, 20 nt, Artificial Sequence
  Synthetic
uggcucccagugucagcgcu

SEQ ID NO: 117649 - RNA, 21 nt, Artificial Sequence
  Synthetic
auggcucccagugucagcgcu

SEQ ID NO: 117650 - RNA, 22 nt, Artificial Sequence
  Synthetic
cauggcucccagugucagcgcu

SEQ ID NO: 117651 - RNA, 23 nt, Artificial Sequence
  Synthetic
acauggcucccagugucagcgcu

SEQ ID NO: 117652 - RNA, 24 nt, Artificial Sequence
  Synthetic
aacauggcucccagugucagcgcu

SEQ ID NO: 117653 - RNA, 18 nt, Artificial Sequence
  Synthetic
ccugaguucaggggcgcu

SEQ ID NO: 117654 - RNA, 20 nt, Artificial Sequence
  Synthetic
ugccugaguucaggggcgcu

SEQ ID NO: 117655 - RNA, 21 nt, Artificial Sequence
  Synthetic
uugccugaguucaggggcgcu

SEQ ID NO: 117656 - RNA, 22 nt, Artificial Sequence
  Synthetic
uuugccugaguucaggggcgcu

SEQ ID NO: 117657 - RNA, 23 nt, Artificial Sequence
  Synthetic
uuuugccugaguucaggggcgcu

SEQ ID NO: 117658 - RNA, 24 nt, Artificial Sequence
  Synthetic
auuuugccugaguucaggggcgcu

SEQ ID NO: 117659 - RNA, 18 nt, Artificial Sequence
  Synthetic
auaaauuacucaaaggcu

SEQ ID NO: 117660 - RNA, 19 nt, Artificial Sequence
  Synthetic
uauaaauuacucaaaggcu

SEQ ID NO: 117661 - RNA, 20 nt, Artificial Sequence
  Synthetic
auauaaauuacucaaaggcu

SEQ ID NO: 117662 - RNA, 21 nt, Artificial Sequence
  Synthetic
cauauaaauuacucaaaggcu

SEQ ID NO: 117663 - RNA, 22 nt, Artificial Sequence
  Synthetic
acauauaaauuacucaaaggcu

SEQ ID NO: 117664 - RNA, 23 nt, Artificial Sequence
  Synthetic
aacauauaaauuacucaaaggcu

SEQ ID NO: 117665 - RNA, 24 nt, Artificial Sequence
  Synthetic
aaacauauaaauuacucaaaggcu

SEQ ID NO: 117666 - RNA, 18 nt, Artificial Sequence
  Synthetic
aaauaaaaucccaaggcu

SEQ ID NO: 117667 - RNA, 19 nt, Artificial Sequence
  Synthetic
aaaauaaaaucccaaggcu

SEQ ID NO: 117668 - RNA, 20 nt, Artificial Sequence
  Synthetic
caaaauaaaaucccaaggcu

SEQ ID NO: 117669 - RNA, 21 nt, Artificial Sequence
  Synthetic
ccaaaauaaaaucccaaggcu

SEQ ID NO: 117670 - RNA, 23 nt, Artificial Sequence
  Synthetic
agccaaaauaaaaucccaaggcu

SEQ ID NO: 117671 - RNA, 24 nt, Artificial Sequence
  Synthetic
aagccaaaauaaaaucccaaggcu

SEQ ID NO: 117672 - RNA, 18 nt, Artificial Sequence
  Synthetic
cagauuagggguaaggcu

SEQ ID NO: 117673 - RNA, 20 nt, Artificial Sequence
  Synthetic
ugcagauuagggguaaggcu

SEQ ID NO: 117674 - RNA, 22 nt, Artificial Sequence
  Synthetic
ugugcagauuagggguaaggcu

SEQ ID NO: 117675 - RNA, 24 nt, Artificial Sequence
  Synthetic
agugugcagauuagggguaaggcu

SEQ ID NO: 117676 - RNA, 18 nt, Artificial Sequence
  Synthetic
uauccuaaauaacaggcu

SEQ ID NO: 117677 - RNA, 20 nt, Artificial Sequence
  Synthetic
uguauccuaaauaacaggcu

SEQ ID NO: 117678 - RNA, 21 nt, Artificial Sequence
  Synthetic
auguauccuaaauaacaggcu

SEQ ID NO: 117679 - RNA, 22 nt, Artificial Sequence
  Synthetic
aauguauccuaaauaacaggcu

SEQ ID NO: 117680 - RNA, 23 nt, Artificial Sequence
  Synthetic
caauguauccuaaauaacaggcu

SEQ ID NO: 117681 - RNA, 24 nt, Artificial Sequence
  Synthetic
ccaauguauccuaaauaacaggcu

SEQ ID NO: 117682 - RNA, 18 nt, Artificial Sequence
  Synthetic
cuuauuauggaagaggcu

SEQ ID NO: 117683 - RNA, 19 nt, Artificial Sequence
  Synthetic
acuuauuauggaagaggcu

SEQ ID NO: 117684 - RNA, 20 nt, Artificial Sequence
  Synthetic
uacuuauuauggaagaggcu

SEQ ID NO: 117685 - RNA, 21 nt, Artificial Sequence
  Synthetic
auacuuauuauggaagaggcu

SEQ ID NO: 117686 - RNA, 22 nt, Artificial Sequence
  Synthetic
cauacuuauuauggaagaggcu

SEQ ID NO: 117687 - RNA, 23 nt, Artificial Sequence
  Synthetic
ccauacuuauuauggaagaggcu

SEQ ID NO: 117688 - RNA, 20 nt, Artificial Sequence
  Synthetic
uggggcaugaaacagaggcu

SEQ ID NO: 117689 - RNA, 21 nt, Artificial Sequence
  Synthetic
auggggcaugaaacagaggcu

SEQ ID NO: 117690 - RNA, 23 nt, Artificial Sequence
  Synthetic
agauggggcaugaaacagaggcu

SEQ ID NO: 117691 - RNA, 24 nt, Artificial Sequence
  Synthetic
aagauggggcaugaaacagaggcu

SEQ ID NO: 117692 - RNA, 18 nt, Artificial Sequence
  Synthetic
ucaauggucagcgaggcu

SEQ ID NO: 117693 - RNA, 19 nt, Artificial Sequence
  Synthetic
cucaauggucagcgaggcu

SEQ ID NO: 117694 - RNA, 20 nt, Artificial Sequence
  Synthetic
ucucaauggucagcgaggcu

SEQ ID NO: 117695 - RNA, 21 nt, Artificial Sequence
  Synthetic
uucucaauggucagcgaggcu

SEQ ID NO: 117696 - RNA, 22 nt, Artificial Sequence
  Synthetic
auucucaauggucagcgaggcu

SEQ ID NO: 117697 - RNA, 23 nt, Artificial Sequence
  Synthetic
cauucucaauggucagcgaggcu

SEQ ID NO: 117698 - RNA, 24 nt, Artificial Sequence
  Synthetic
ccauucucaauggucagcgaggcu

SEQ ID NO: 117699 - RNA, 18 nt, Artificial Sequence
  Synthetic
uuuucuaccuucuaggcu

SEQ ID NO: 117700 - RNA, 19 nt, Artificial Sequence
  Synthetic
cuuuucuaccuucuaggcu

SEQ ID NO: 117701 - RNA, 20 nt, Artificial Sequence
  Synthetic
ucuuuucuaccuucuaggcu

SEQ ID NO: 117702 - RNA, 21 nt, Artificial Sequence
  Synthetic
cucuuuucuaccuucuaggcu

SEQ ID NO: 117703 - RNA, 22 nt, Artificial Sequence
  Synthetic
ccucuuuucuaccuucuaggcu

SEQ ID NO: 117704 - RNA, 23 nt, Artificial Sequence
  Synthetic
cccucuuuucuaccuucuaggcu

SEQ ID NO: 117705 - RNA, 24 nt, Artificial Sequence
  Synthetic
ucccucuuuucuaccuucuaggcu

SEQ ID NO: 117706 - RNA, 18 nt, Artificial Sequence
  Synthetic
acucugauuuaguaggcu

SEQ ID NO: 117707 - RNA, 19 nt, Artificial Sequence
  Synthetic
aacucugauuuaguaggcu

SEQ ID NO: 117708 - RNA, 20 nt, Artificial Sequence
  Synthetic
aaacucugauuuaguaggcu

SEQ ID NO: 117709 - RNA, 21 nt, Artificial Sequence
  Synthetic
aaaacucugauuuaguaggcu

SEQ ID NO: 117710 - RNA, 22 nt, Artificial Sequence
  Synthetic
aaaaacucugauuuaguaggcu

SEQ ID NO: 117711 - RNA, 23 nt, Artificial Sequence
  Synthetic
caaaaacucugauuuaguaggcu

SEQ ID NO: 117712 - RNA, 24 nt, Artificial Sequence
  Synthetic
ccaaaaacucugauuuaguaggcu

SEQ ID NO: 117713 - RNA, 18 nt, Artificial Sequence
  Synthetic
cgcagccauucgacggcu

SEQ ID NO: 117714 - RNA, 19 nt, Artificial Sequence
  Synthetic
acgcagccauucgacggcu

SEQ ID NO: 117715 - RNA, 21 nt, Artificial Sequence
  Synthetic
ugacgcagccauucgacggcu

SEQ ID NO: 117716 - RNA, 22 nt, Artificial Sequence
  Synthetic
uugacgcagccauucgacggcu

SEQ ID NO: 117717 - RNA, 23 nt, Artificial Sequence
  Synthetic
uuugacgcagccauucgacggcu

SEQ ID NO: 117718 - RNA, 18 nt, Artificial Sequence
  Synthetic
auguaagugcaaagggcu

SEQ ID NO: 117719 - RNA, 19 nt, Artificial Sequence
  Synthetic
uauguaagugcaaagggcu

SEQ ID NO: 117720 - RNA, 20 nt, Artificial Sequence
  Synthetic
auauguaagugcaaagggcu

SEQ ID NO: 117721 - RNA, 18 nt, Artificial Sequence
  Synthetic
ugagcccaacaccgggcu

SEQ ID NO: 117722 - RNA, 19 nt, Artificial Sequence
  Synthetic
cugagcccaacaccgggcu

SEQ ID NO: 117723 - RNA, 20 nt, Artificial Sequence
  Synthetic
acugagcccaacaccgggcu

SEQ ID NO: 117724 - RNA, 22 nt, Artificial Sequence
  Synthetic
agacugagcccaacaccgggcu

SEQ ID NO: 117725 - RNA, 23 nt, Artificial Sequence
  Synthetic
uagacugagcccaacaccgggcu

SEQ ID NO: 117726 - RNA, 24 nt, Artificial Sequence
  Synthetic
auagacugagcccaacaccgggcu

SEQ ID NO: 117727 - RNA, 18 nt, Artificial Sequence
  Synthetic
uugacaggagcuggggcu

SEQ ID NO: 117728 - RNA, 19 nt, Artificial Sequence
  Synthetic
cuugacaggagcuggggcu

SEQ ID NO: 117729 - RNA, 20 nt, Artificial Sequence
  Synthetic
ucuugacaggagcuggggcu

SEQ ID NO: 117730 - RNA, 21 nt, Artificial Sequence
  Synthetic
cucuugacaggagcuggggcu

SEQ ID NO: 117731 - RNA, 22 nt, Artificial Sequence
  Synthetic
ccucuugacaggagcuggggcu

SEQ ID NO: 117732 - RNA, 23 nt, Artificial Sequence
  Synthetic
accucuugacaggagcuggggcu

SEQ ID NO: 117733 - RNA, 18 nt, Artificial Sequence
  Synthetic
uaggugccuauuggggcu

SEQ ID NO: 117734 - RNA, 19 nt, Artificial Sequence
  Synthetic
auaggugccuauuggggcu

SEQ ID NO: 117735 - RNA, 20 nt, Artificial Sequence
  Synthetic
aauaggugccuauuggggcu

SEQ ID NO: 117736 - RNA, 22 nt, Artificial Sequence
  Synthetic
agaauaggugccuauuggggcu

SEQ ID NO: 117737 - RNA, 23 nt, Artificial Sequence
  Synthetic
aagaauaggugccuauuggggcu

SEQ ID NO: 117738 - RNA, 18 nt, Artificial Sequence
  Synthetic
auaagggcuuucugggcu

SEQ ID NO: 117739 - RNA, 20 nt, Artificial Sequence
  Synthetic
agauaagggcuuucugggcu

SEQ ID NO: 117740 - RNA, 21 nt, Artificial Sequence
  Synthetic
uagauaagggcuuucugggcu

SEQ ID NO: 117741 - RNA, 22 nt, Artificial Sequence
  Synthetic
uuagauaagggcuuucugggcu

SEQ ID NO: 117742 - RNA, 24 nt, Artificial Sequence
  Synthetic
uguuagauaagggcuuucugggcu

SEQ ID NO: 117743 - RNA, 19 nt, Artificial Sequence
  Synthetic
ugaaauacugcugugggcu

SEQ ID NO: 117744 - RNA, 21 nt, Artificial Sequence
  Synthetic
agugaaauacugcugugggcu

SEQ ID NO: 117745 - RNA, 22 nt, Artificial Sequence
  Synthetic
aagugaaauacugcugugggcu

SEQ ID NO: 117746 - RNA, 23 nt, Artificial Sequence
  Synthetic
uaagugaaauacugcugugggcu

SEQ ID NO: 117747 - RNA, 18 nt, Artificial Sequence
  Synthetic
aaaggauuuguuugggcu

SEQ ID NO: 117748 - RNA, 19 nt, Artificial Sequence
  Synthetic
aaaaggauuuguuugggcu

SEQ ID NO: 117749 - RNA, 20 nt, Artificial Sequence
  Synthetic
aaaaaggauuuguuugggcu

SEQ ID NO: 117750 - RNA, 21 nt, Artificial Sequence
  Synthetic
aaaaaaggauuuguuugggcu

SEQ ID NO: 117751 - RNA, 22 nt, Artificial Sequence
  Synthetic
caaaaaaggauuuguuugggcu

SEQ ID NO: 117752 - RNA, 24 nt, Artificial Sequence
  Synthetic
ugcaaaaaaggauuuguuugggcu

SEQ ID NO: 117753 - RNA, 18 nt, Artificial Sequence
  Synthetic
uaguugagcuaaauggcu

SEQ ID NO: 117754 - RNA, 19 nt, Artificial Sequence
  Synthetic
uuaguugagcuaaauggcu

SEQ ID NO: 117755 - RNA, 20 nt, Artificial Sequence
  Synthetic
uuuaguugagcuaaauggcu

SEQ ID NO: 117756 - RNA, 21 nt, Artificial Sequence
  Synthetic
uuuuaguugagcuaaauggcu

SEQ ID NO: 117757 - RNA, 22 nt, Artificial Sequence
  Synthetic
uuuuuaguugagcuaaauggcu

SEQ ID NO: 117758 - RNA, 23 nt, Artificial Sequence
  Synthetic
auuuuuaguugagcuaaauggcu

SEQ ID NO: 117759 - RNA, 24 nt, Artificial Sequence
  Synthetic
uauuuuuaguugagcuaaauggcu

SEQ ID NO: 117760 - RNA, 18 nt, Artificial Sequence
  Synthetic
acuguugauagcauggcu

SEQ ID NO: 117761 - RNA, 20 nt, Artificial Sequence
  Synthetic
agacuguugauagcauggcu

SEQ ID NO: 117762 - RNA, 21 nt, Artificial Sequence
  Synthetic
uagacuguugauagcauggcu

SEQ ID NO: 117763 - RNA, 22 nt, Artificial Sequence
  Synthetic
cuagacuguugauagcauggcu

SEQ ID NO: 117764 - RNA, 23 nt, Artificial Sequence
  Synthetic
acuagacuguugauagcauggcu

SEQ ID NO: 117765 - RNA, 24 nt, Artificial Sequence
  Synthetic
uacuagacuguugauagcauggcu

SEQ ID NO: 117766 - RNA, 18 nt, Artificial Sequence
  Synthetic
ccuuuaucaagccuggcu

SEQ ID NO: 117767 - RNA, 20 nt, Artificial Sequence
  Synthetic
ugccuuuaucaagccuggcu

SEQ ID NO: 117768 - RNA, 21 nt, Artificial Sequence
  Synthetic
uugccuuuaucaagccuggcu

SEQ ID NO: 117769 - RNA, 22 nt, Artificial Sequence
  Synthetic
uuugccuuuaucaagccuggcu

SEQ ID NO: 117770 - RNA, 23 nt, Artificial Sequence
  Synthetic
cuuugccuuuaucaagccuggcu

SEQ ID NO: 117771 - RNA, 24 nt, Artificial Sequence
  Synthetic
ucuuugccuuuaucaagccuggcu

SEQ ID NO: 117772 - RNA, 18 nt, Artificial Sequence
  Synthetic
agucugauaucauuggcu

SEQ ID NO: 117773 - RNA, 19 nt, Artificial Sequence
  Synthetic
aagucugauaucauuggcu

SEQ ID NO: 117774 - RNA, 20 nt, Artificial Sequence
  Synthetic
aaagucugauaucauuggcu

SEQ ID NO: 117775 - RNA, 21 nt, Artificial Sequence
  Synthetic
aaaagucugauaucauuggcu

SEQ ID NO: 117776 - RNA, 22 nt, Artificial Sequence
  Synthetic
caaaagucugauaucauuggcu

SEQ ID NO: 117777 - RNA, 23 nt, Artificial Sequence
  Synthetic
acaaaagucugauaucauuggcu

SEQ ID NO: 117778 - RNA, 24 nt, Artificial Sequence
  Synthetic
cacaaaagucugauaucauuggcu

SEQ ID NO: 117779 - RNA, 18 nt, Artificial Sequence
  Synthetic
uuucauuauauuuuggcu

SEQ ID NO: 117780 - RNA, 20 nt, Artificial Sequence
  Synthetic
aguuucauuauauuuuggcu

SEQ ID NO: 117781 - RNA, 21 nt, Artificial Sequence
  Synthetic
uaguuucauuauauuuuggcu

SEQ ID NO: 117782 - RNA, 22 nt, Artificial Sequence
  Synthetic
auaguuucauuauauuuuggcu

SEQ ID NO: 117783 - RNA, 23 nt, Artificial Sequence
  Synthetic
aauaguuucauuauauuuuggcu

SEQ ID NO: 117784 - RNA, 24 nt, Artificial Sequence
  Synthetic
aaauaguuucauuauauuuuggcu

SEQ ID NO: 117785 - RNA, 19 nt, Artificial Sequence
  Synthetic
aguuacaaguacaaaugcu

SEQ ID NO: 117786 - RNA, 20 nt, Artificial Sequence
  Synthetic
caguuacaaguacaaaugcu

SEQ ID NO: 117787 - RNA, 21 nt, Artificial Sequence
  Synthetic
ucaguuacaaguacaaaugcu

SEQ ID NO: 117788 - RNA, 23 nt, Artificial Sequence
  Synthetic
ugucaguuacaaguacaaaugcu

SEQ ID NO: 117789 - RNA, 24 nt, Artificial Sequence
  Synthetic
uugucaguuacaaguacaaaugcu

SEQ ID NO: 117790 - RNA, 19 nt, Artificial Sequence
  Synthetic
uguaaguaauucaaaugcu

SEQ ID NO: 117791 - RNA, 20 nt, Artificial Sequence
  Synthetic
uuguaaguaauucaaaugcu

SEQ ID NO: 117792 - RNA, 22 nt, Artificial Sequence
  Synthetic
cguuguaaguaauucaaaugcu

SEQ ID NO: 117793 - RNA, 23 nt, Artificial Sequence
  Synthetic
acguuguaaguaauucaaaugcu

SEQ ID NO: 117794 - RNA, 24 nt, Artificial Sequence
  Synthetic
cacguuguaaguaauucaaaugcu

SEQ ID NO: 117795 - RNA, 18 nt, Artificial Sequence
  Synthetic
uuagcgguuucaaaugcu

SEQ ID NO: 117796 - RNA, 19 nt, Artificial Sequence
  Synthetic
cuuagcgguuucaaaugcu

SEQ ID NO: 117797 - RNA, 20 nt, Artificial Sequence
  Synthetic
ccuuagcgguuucaaaugcu

SEQ ID NO: 117798 - RNA, 21 nt, Artificial Sequence
  Synthetic
cccuuagcgguuucaaaugcu

SEQ ID NO: 117799 - RNA, 22 nt, Artificial Sequence
  Synthetic
ccccuuagcgguuucaaaugcu

SEQ ID NO: 117800 - RNA, 23 nt, Artificial Sequence
  Synthetic
accccuuagcgguuucaaaugcu

SEQ ID NO: 117801 - RNA, 24 nt, Artificial Sequence
  Synthetic
aaccccuuagcgguuucaaaugcu

SEQ ID NO: 117802 - RNA, 18 nt, Artificial Sequence
  Synthetic
uuggcucacugaaaugcu

SEQ ID NO: 117803 - RNA, 19 nt, Artificial Sequence
  Synthetic
auuggcucacugaaaugcu

SEQ ID NO: 117804 - RNA, 20 nt, Artificial Sequence
  Synthetic
aauuggcucacugaaaugcu

SEQ ID NO: 117805 - RNA, 21 nt, Artificial Sequence
  Synthetic
uaauuggcucacugaaaugcu

SEQ ID NO: 117806 - RNA, 23 nt, Artificial Sequence
  Synthetic
aguaauuggcucacugaaaugcu

SEQ ID NO: 117807 - RNA, 24 nt, Artificial Sequence
  Synthetic
caguaauuggcucacugaaaugcu

SEQ ID NO: 117808 - RNA, 18 nt, Artificial Sequence
  Synthetic
uugaaggucuacaaugcu

SEQ ID NO: 117809 - RNA, 19 nt, Artificial Sequence
  Synthetic
auugaaggucuacaaugcu

SEQ ID NO: 117810 - RNA, 20 nt, Artificial Sequence
  Synthetic
uauugaaggucuacaaugcu

SEQ ID NO: 117811 - RNA, 22 nt, Artificial Sequence
  Synthetic
uguauugaaggucuacaaugcu

SEQ ID NO: 117812 - RNA, 23 nt, Artificial Sequence
  Synthetic
auguauugaaggucuacaaugcu

SEQ ID NO: 117813 - RNA, 24 nt, Artificial Sequence
  Synthetic
uauguauugaaggucuacaaugcu

SEQ ID NO: 117814 - RNA, 19 nt, Artificial Sequence
  Synthetic
agcuuuagaaaccaaugcu

SEQ ID NO: 117815 - RNA, 20 nt, Artificial Sequence
  Synthetic
aagcuuuagaaaccaaugcu

SEQ ID NO: 117816 - RNA, 23 nt, Artificial Sequence
  Synthetic
uggaagcuuuagaaaccaaugcu

SEQ ID NO: 117817 - RNA, 24 nt, Artificial Sequence
  Synthetic
auggaagcuuuagaaaccaaugcu

SEQ ID NO: 117818 - RNA, 18 nt, Artificial Sequence
  Synthetic
cacacagagacgaaugcu

SEQ ID NO: 117819 - RNA, 19 nt, Artificial Sequence
  Synthetic
ucacacagagacgaaugcu

SEQ ID NO: 117820 - RNA, 20 nt, Artificial Sequence
  Synthetic
uucacacagagacgaaugcu

SEQ ID NO: 117821 - RNA, 21 nt, Artificial Sequence
  Synthetic
uuucacacagagacgaaugcu

SEQ ID NO: 117822 - RNA, 22 nt, Artificial Sequence
  Synthetic
auuucacacagagacgaaugcu

SEQ ID NO: 117823 - RNA, 23 nt, Artificial Sequence
  Synthetic
aauuucacacagagacgaaugcu

SEQ ID NO: 117824 - RNA, 24 nt, Artificial Sequence
  Synthetic
caauuucacacagagacgaaugcu

SEQ ID NO: 117825 - RNA, 18 nt, Artificial Sequence
  Synthetic
agcaaaauaguuaaugcu

SEQ ID NO: 117826 - RNA, 19 nt, Artificial Sequence
  Synthetic
aagcaaaauaguuaaugcu

SEQ ID NO: 117827 - RNA, 21 nt, Artificial Sequence
  Synthetic
cgaagcaaaauaguuaaugcu

SEQ ID NO: 117828 - RNA, 23 nt, Artificial Sequence
  Synthetic
agcgaagcaaaauaguuaaugcu

SEQ ID NO: 117829 - RNA, 24 nt, Artificial Sequence
  Synthetic
uagcgaagcaaaauaguuaaugcu

SEQ ID NO: 117830 - RNA, 19 nt, Artificial Sequence
  Synthetic
ugggguugcaacacaugcu

SEQ ID NO: 117831 - RNA, 20 nt, Artificial Sequence
  Synthetic
uugggguugcaacacaugcu

SEQ ID NO: 117832 - RNA, 22 nt, Artificial Sequence
  Synthetic
uguugggguugcaacacaugcu

SEQ ID NO: 117833 - RNA, 23 nt, Artificial Sequence
  Synthetic
cuguugggguugcaacacaugcu

SEQ ID NO: 117834 - RNA, 24 nt, Artificial Sequence
  Synthetic
ccuguugggguugcaacacaugcu

SEQ ID NO: 117835 - RNA, 18 nt, Artificial Sequence
  Synthetic
aucuaaguaaaagaugcu

SEQ ID NO: 117836 - RNA, 19 nt, Artificial Sequence
  Synthetic
caucuaaguaaaagaugcu

SEQ ID NO: 117837 - RNA, 20 nt, Artificial Sequence
  Synthetic
ucaucuaaguaaaagaugcu

SEQ ID NO: 117838 - RNA, 21 nt, Artificial Sequence
  Synthetic
aucaucuaaguaaaagaugcu

SEQ ID NO: 117839 - RNA, 22 nt, Artificial Sequence
  Synthetic
uaucaucuaaguaaaagaugcu

SEQ ID NO: 117840 - RNA, 23 nt, Artificial Sequence
  Synthetic
uuaucaucuaaguaaaagaugcu

SEQ ID NO: 117841 - RNA, 20 nt, Artificial Sequence
  Synthetic
cgggaaaaucugaggaugcu

SEQ ID NO: 117842 - RNA, 21 nt, Artificial Sequence
  Synthetic
ucgggaaaaucugaggaugcu

SEQ ID NO: 117843 - RNA, 22 nt, Artificial Sequence
  Synthetic
uucgggaaaaucugaggaugcu

SEQ ID NO: 117844 - RNA, 23 nt, Artificial Sequence
  Synthetic
cuucgggaaaaucugaggaugcu

SEQ ID NO: 117845 - RNA, 18 nt, Artificial Sequence
  Synthetic
cacacaucccuggaugcu

SEQ ID NO: 117846 - RNA, 20 nt, Artificial Sequence
  Synthetic
ugcacacaucccuggaugcu

SEQ ID NO: 117847 - RNA, 21 nt, Artificial Sequence
  Synthetic
augcacacaucccuggaugcu

SEQ ID NO: 117848 - RNA, 22 nt, Artificial Sequence
  Synthetic
aaugcacacaucccuggaugcu

SEQ ID NO: 117849 - RNA, 23 nt, Artificial Sequence
  Synthetic
caaugcacacaucccuggaugcu

SEQ ID NO: 117850 - RNA, 24 nt, Artificial Sequence
  Synthetic
acaaugcacacaucccuggaugcu

SEQ ID NO: 117851 - RNA, 18 nt, Artificial Sequence
  Synthetic
uuuuugauuacugaugcu

SEQ ID NO: 117852 - RNA, 19 nt, Artificial Sequence
  Synthetic
cuuuuugauuacugaugcu

SEQ ID NO: 117853 - RNA, 20 nt, Artificial Sequence
  Synthetic
ccuuuuugauuacugaugcu

SEQ ID NO: 117854 - RNA, 21 nt, Artificial Sequence
  Synthetic
accuuuuugauuacugaugcu

SEQ ID NO: 117855 - RNA, 22 nt, Artificial Sequence
  Synthetic
uaccuuuuugauuacugaugcu

SEQ ID NO: 117856 - RNA, 23 nt, Artificial Sequence
  Synthetic
auaccuuuuugauuacugaugcu

SEQ ID NO: 117857 - RNA, 20 nt, Artificial Sequence
  Synthetic
aggcuuugugauaauaugcu

SEQ ID NO: 117858 - RNA, 21 nt, Artificial Sequence
  Synthetic
uaggcuuugugauaauaugcu

SEQ ID NO: 117859 - RNA, 23 nt, Artificial Sequence
  Synthetic
aguaggcuuugugauaauaugcu

SEQ ID NO: 117860 - RNA, 24 nt, Artificial Sequence
  Synthetic
caguaggcuuugugauaauaugcu

SEQ ID NO: 117861 - RNA, 21 nt, Artificial Sequence
  Synthetic
uauuugggacauaguuaugcu

SEQ ID NO: 117862 - RNA, 23 nt, Artificial Sequence
  Synthetic
aguauuugggacauaguuaugcu

SEQ ID NO: 117863 - RNA, 24 nt, Artificial Sequence
  Synthetic
uaguauuugggacauaguuaugcu

SEQ ID NO: 117864 - RNA, 18 nt, Artificial Sequence
  Synthetic
cugacaugggaaacugcu

SEQ ID NO: 117865 - RNA, 20 nt, Artificial Sequence
  Synthetic
agcugacaugggaaacugcu

SEQ ID NO: 117866 - RNA, 21 nt, Artificial Sequence
  Synthetic
uagcugacaugggaaacugcu

SEQ ID NO: 117867 - RNA, 24 nt, Artificial Sequence
  Synthetic
cgguagcugacaugggaaacugcu

SEQ ID NO: 117868 - RNA, 18 nt, Artificial Sequence
  Synthetic
auugauuuaaauacugcu

SEQ ID NO: 117869 - RNA, 22 nt, Artificial Sequence
  Synthetic
agggauugauuuaaauacugcu

SEQ ID NO: 117870 - RNA, 23 nt, Artificial Sequence
  Synthetic
uagggauugauuuaaauacugcu

SEQ ID NO: 117871 - RNA, 24 nt, Artificial Sequence
  Synthetic
uuagggauugauuuaaauacugcu

SEQ ID NO: 117872 - RNA, 18 nt, Artificial Sequence
  Synthetic
aaacacacaacuacugcu

SEQ ID NO: 117873 - RNA, 20 nt, Artificial Sequence
  Synthetic
ugaaacacacaacuacugcu

SEQ ID NO: 117874 - RNA, 21 nt, Artificial Sequence
  Synthetic
uugaaacacacaacuacugcu

SEQ ID NO: 117875 - RNA, 22 nt, Artificial Sequence
  Synthetic
uuugaaacacacaacuacugcu

SEQ ID NO: 117876 - RNA, 23 nt, Artificial Sequence
  Synthetic
auuugaaacacacaacuacugcu

SEQ ID NO: 117877 - RNA, 24 nt, Artificial Sequence
  Synthetic
uauuugaaacacacaacuacugcu

SEQ ID NO: 117878 - RNA, 18 nt, Artificial Sequence
  Synthetic
agaaagcccccagcugcu

SEQ ID NO: 117879 - RNA, 19 nt, Artificial Sequence
  Synthetic
uagaaagcccccagcugcu

SEQ ID NO: 117880 - RNA, 20 nt, Artificial Sequence
  Synthetic
uuagaaagcccccagcugcu

SEQ ID NO: 117881 - RNA, 21 nt, Artificial Sequence
  Synthetic
auuagaaagcccccagcugcu

SEQ ID NO: 117882 - RNA, 23 nt, Artificial Sequence
  Synthetic
agauuagaaagcccccagcugcu

SEQ ID NO: 117883 - RNA, 18 nt, Artificial Sequence
  Synthetic
accucucaaauagcugcu

SEQ ID NO: 117884 - RNA, 19 nt, Artificial Sequence
  Synthetic
caccucucaaauagcugcu

SEQ ID NO: 117885 - RNA, 20 nt, Artificial Sequence
  Synthetic
ccaccucucaaauagcugcu

SEQ ID NO: 117886 - RNA, 21 nt, Artificial Sequence
  Synthetic
cccaccucucaaauagcugcu

SEQ ID NO: 117887 - RNA, 22 nt, Artificial Sequence
  Synthetic
acccaccucucaaauagcugcu

SEQ ID NO: 117888 - RNA, 23 nt, Artificial Sequence
  Synthetic
cacccaccucucaaauagcugcu

SEQ ID NO: 117889 - RNA, 24 nt, Artificial Sequence
  Synthetic
ccacccaccucucaaauagcugcu

SEQ ID NO: 117890 - RNA, 18 nt, Artificial Sequence
  Synthetic
ugugucauuuuggcugcu

SEQ ID NO: 117891 - RNA, 19 nt, Artificial Sequence
  Synthetic
augugucauuuuggcugcu

SEQ ID NO: 117892 - RNA, 20 nt, Artificial Sequence
  Synthetic
uaugugucauuuuggcugcu

SEQ ID NO: 117893 - RNA, 21 nt, Artificial Sequence
  Synthetic
auaugugucauuuuggcugcu

SEQ ID NO: 117894 - RNA, 22 nt, Artificial Sequence
  Synthetic
aauaugugucauuuuggcugcu

SEQ ID NO: 117895 - RNA, 23 nt, Artificial Sequence
  Synthetic
aaauaugugucauuuuggcugcu

SEQ ID NO: 117896 - RNA, 18 nt, Artificial Sequence
  Synthetic
ccaugggguggugcugcu

SEQ ID NO: 117897 - RNA, 22 nt, Artificial Sequence
  Synthetic
ugggccaugggguggugcugcu

SEQ ID NO: 117898 - RNA, 23 nt, Artificial Sequence
  Synthetic
uugggccaugggguggugcugcu

SEQ ID NO: 117899 - RNA, 24 nt, Artificial Sequence
  Synthetic
uuugggccaugggguggugcugcu

SEQ ID NO: 117900 - RNA, 19 nt, Artificial Sequence
  Synthetic
ugauccuucuuuugcugcu

SEQ ID NO: 117901 - RNA, 21 nt, Artificial Sequence
  Synthetic
agugauccuucuuuugcugcu

SEQ ID NO: 117902 - RNA, 22 nt, Artificial Sequence
  Synthetic
aagugauccuucuuuugcugcu

SEQ ID NO: 117903 - RNA, 23 nt, Artificial Sequence
  Synthetic
uaagugauccuucuuuugcugcu

SEQ ID NO: 117904 - RNA, 24 nt, Artificial Sequence
  Synthetic
cuaagugauccuucuuuugcugcu

SEQ ID NO: 117905 - RNA, 18 nt, Artificial Sequence
  Synthetic
uacacuguucccucugcu

SEQ ID NO: 117906 - RNA, 19 nt, Artificial Sequence
  Synthetic
auacacuguucccucugcu

SEQ ID NO: 117907 - RNA, 21 nt, Artificial Sequence
  Synthetic
agauacacuguucccucugcu

SEQ ID NO: 117908 - RNA, 22 nt, Artificial Sequence
  Synthetic
cagauacacuguucccucugcu

SEQ ID NO: 117909 - RNA, 23 nt, Artificial Sequence
  Synthetic
ucagauacacuguucccucugcu

SEQ ID NO: 117910 - RNA, 24 nt, Artificial Sequence
  Synthetic
uucagauacacuguucccucugcu

SEQ ID NO: 117911 - RNA, 18 nt, Artificial Sequence
  Synthetic
auaauauaacagucugcu

SEQ ID NO: 117912 - RNA, 19 nt, Artificial Sequence
  Synthetic
aauaauauaacagucugcu

SEQ ID NO: 117913 - RNA, 20 nt, Artificial Sequence
  Synthetic
aaauaauauaacagucugcu

SEQ ID NO: 117914 - RNA, 21 nt, Artificial Sequence
  Synthetic
aaaauaauauaacagucugcu

SEQ ID NO: 117915 - RNA, 22 nt, Artificial Sequence
  Synthetic
uaaaauaauauaacagucugcu

SEQ ID NO: 117916 - RNA, 23 nt, Artificial Sequence
  Synthetic
auaaaauaauauaacagucugcu

SEQ ID NO: 117917 - RNA, 24 nt, Artificial Sequence
  Synthetic
uauaaaauaauauaacagucugcu

SEQ ID NO: 117918 - RNA, 19 nt, Artificial Sequence
  Synthetic
uggaaagugaagaagugcu

SEQ ID NO: 117919 - RNA, 20 nt, Artificial Sequence
  Synthetic
auggaaagugaagaagugcu

SEQ ID NO: 117920 - RNA, 21 nt, Artificial Sequence
  Synthetic
cauggaaagugaagaagugcu

SEQ ID NO: 117921 - RNA, 24 nt, Artificial Sequence
  Synthetic
uggcauggaaagugaagaagugcu

SEQ ID NO: 117922 - RNA, 18 nt, Artificial Sequence
  Synthetic
caggaagagcccagugcu

SEQ ID NO: 117923 - RNA, 19 nt, Artificial Sequence
  Synthetic
acaggaagagcccagugcu

SEQ ID NO: 117924 - RNA, 20 nt, Artificial Sequence
  Synthetic
aacaggaagagcccagugcu

SEQ ID NO: 117925 - RNA, 21 nt, Artificial Sequence
  Synthetic
aaacaggaagagcccagugcu

SEQ ID NO: 117926 - RNA, 22 nt, Artificial Sequence
  Synthetic
aaaacaggaagagcccagugcu

SEQ ID NO: 117927 - RNA, 23 nt, Artificial Sequence
  Synthetic
uaaaacaggaagagcccagugcu

SEQ ID NO: 117928 - RNA, 24 nt, Artificial Sequence
  Synthetic
auaaaacaggaagagcccagugcu

SEQ ID NO: 117929 - RNA, 18 nt, Artificial Sequence
  Synthetic
aacugaagaaagggugcu

SEQ ID NO: 117930 - RNA, 19 nt, Artificial Sequence
  Synthetic
caacugaagaaagggugcu

SEQ ID NO: 117931 - RNA, 20 nt, Artificial Sequence
  Synthetic
ucaacugaagaaagggugcu

SEQ ID NO: 117932 - RNA, 21 nt, Artificial Sequence
  Synthetic
cucaacugaagaaagggugcu

SEQ ID NO: 117933 - RNA, 22 nt, Artificial Sequence
  Synthetic
ucucaacugaagaaagggugcu

SEQ ID NO: 117934 - RNA, 19 nt, Artificial Sequence
  Synthetic
ugcuggagaugauggugcu

SEQ ID NO: 117935 - RNA, 20 nt, Artificial Sequence
  Synthetic
augcuggagaugauggugcu

SEQ ID NO: 117936 - RNA, 21 nt, Artificial Sequence
  Synthetic
caugcuggagaugauggugcu

SEQ ID NO: 117937 - RNA, 22 nt, Artificial Sequence
  Synthetic
ccaugcuggagaugauggugcu

SEQ ID NO: 117938 - RNA, 23 nt, Artificial Sequence
  Synthetic
uccaugcuggagaugauggugcu

SEQ ID NO: 117939 - RNA, 24 nt, Artificial Sequence
  Synthetic
auccaugcuggagaugauggugcu

SEQ ID NO: 117940 - RNA, 20 nt, Artificial Sequence
  Synthetic
aggauguucaauaaugugcu

SEQ ID NO: 117941 - RNA, 22 nt, Artificial Sequence
  Synthetic
ugaggauguucaauaaugugcu

SEQ ID NO: 117942 - RNA, 23 nt, Artificial Sequence
  Synthetic
cugaggauguucaauaaugugcu

SEQ ID NO: 117943 - RNA, 21 nt, Artificial Sequence
  Synthetic
cagaguuuuaaaagaugugcu

SEQ ID NO: 117944 - RNA, 22 nt, Artificial Sequence
  Synthetic
ucagaguuuuaaaagaugugcu

SEQ ID NO: 117945 - RNA, 23 nt, Artificial Sequence
  Synthetic
cucagaguuuuaaaagaugugcu

SEQ ID NO: 117946 - RNA, 24 nt, Artificial Sequence
  Synthetic
ccucagaguuuuaaaagaugugcu

SEQ ID NO: 117947 - RNA, 19 nt, Artificial Sequence
  Synthetic
aggaugcaucaagugugcu

SEQ ID NO: 117948 - RNA, 20 nt, Artificial Sequence
  Synthetic
uaggaugcaucaagugugcu

SEQ ID NO: 117949 - RNA, 22 nt, Artificial Sequence
  Synthetic
uguaggaugcaucaagugugcu

SEQ ID NO: 117950 - RNA, 23 nt, Artificial Sequence
  Synthetic
auguaggaugcaucaagugugcu

SEQ ID NO: 117951 - RNA, 24 nt, Artificial Sequence
  Synthetic
aauguaggaugcaucaagugugcu

SEQ ID NO: 117952 - RNA, 18 nt, Artificial Sequence
  Synthetic
uuuucuaacaggugugcu

SEQ ID NO: 117953 - RNA, 19 nt, Artificial Sequence
  Synthetic
uuuuucuaacaggugugcu

SEQ ID NO: 117954 - RNA, 20 nt, Artificial Sequence
  Synthetic
auuuuucuaacaggugugcu

SEQ ID NO: 117955 - RNA, 21 nt, Artificial Sequence
  Synthetic
uauuuuucuaacaggugugcu

SEQ ID NO: 117956 - RNA, 22 nt, Artificial Sequence
  Synthetic
auauuuuucuaacaggugugcu

SEQ ID NO: 117957 - RNA, 23 nt, Artificial Sequence
  Synthetic
cauauuuuucuaacaggugugcu

SEQ ID NO: 117958 - RNA, 24 nt, Artificial Sequence
  Synthetic
acauauuuuucuaacaggugugcu

SEQ ID NO: 117959 - RNA, 21 nt, Artificial Sequence
  Synthetic
uuguggaagauaguuugugcu

SEQ ID NO: 117960 - RNA, 22 nt, Artificial Sequence
  Synthetic
auuguggaagauaguuugugcu

SEQ ID NO: 117961 - RNA, 23 nt, Artificial Sequence
  Synthetic
uauuguggaagauaguuugugcu

SEQ ID NO: 117962 - RNA, 24 nt, Artificial Sequence
  Synthetic
auauuguggaagauaguuugugcu

SEQ ID NO: 117963 - RNA, 18 nt, Artificial Sequence
  Synthetic
aggagauuggaaauugcu

SEQ ID NO: 117964 - RNA, 20 nt, Artificial Sequence
  Synthetic
agaggagauuggaaauugcu

SEQ ID NO: 117965 - RNA, 21 nt, Artificial Sequence
  Synthetic
cagaggagauuggaaauugcu

SEQ ID NO: 117966 - RNA, 22 nt, Artificial Sequence
  Synthetic
acagaggagauuggaaauugcu

SEQ ID NO: 117967 - RNA, 23 nt, Artificial Sequence
  Synthetic
uacagaggagauuggaaauugcu

SEQ ID NO: 117968 - RNA, 18 nt, Artificial Sequence
  Synthetic
cguauucuuccaauugcu

SEQ ID NO: 117969 - RNA, 19 nt, Artificial Sequence
  Synthetic
ucguauucuuccaauugcu

SEQ ID NO: 117970 - RNA, 20 nt, Artificial Sequence
  Synthetic
cucguauucuuccaauugcu

SEQ ID NO: 117971 - RNA, 21 nt, Artificial Sequence
  Synthetic
ucucguauucuuccaauugcu

SEQ ID NO: 117972 - RNA, 22 nt, Artificial Sequence
  Synthetic
uucucguauucuuccaauugcu

SEQ ID NO: 117973 - RNA, 23 nt, Artificial Sequence
  Synthetic
uuucucguauucuuccaauugcu

SEQ ID NO: 117974 - RNA, 24 nt, Artificial Sequence
  Synthetic
auuucucguauucuuccaauugcu

SEQ ID NO: 117975 - RNA, 18 nt, Artificial Sequence
  Synthetic
augauagaaggaauugcu

SEQ ID NO: 117976 - RNA, 19 nt, Artificial Sequence
  Synthetic
uaugauagaaggaauugcu

SEQ ID NO: 117977 - RNA, 20 nt, Artificial Sequence
  Synthetic
auaugauagaaggaauugcu

SEQ ID NO: 117978 - RNA, 21 nt, Artificial Sequence
  Synthetic
aauaugauagaaggaauugcu

SEQ ID NO: 117979 - RNA, 22 nt, Artificial Sequence
  Synthetic
aaauaugauagaaggaauugcu

SEQ ID NO: 117980 - RNA, 23 nt, Artificial Sequence
  Synthetic
aaaauaugauagaaggaauugcu

SEQ ID NO: 117981 - RNA, 24 nt, Artificial Sequence
  Synthetic
aaaaauaugauagaaggaauugcu

SEQ ID NO: 117982 - RNA, 18 nt, Artificial Sequence
  Synthetic
cggggaggagagauugcu

SEQ ID NO: 117983 - RNA, 19 nt, Artificial Sequence
  Synthetic
acggggaggagagauugcu

SEQ ID NO: 117984 - RNA, 20 nt, Artificial Sequence
  Synthetic
aacggggaggagagauugcu

SEQ ID NO: 117985 - RNA, 22 nt, Artificial Sequence
  Synthetic
ugaacggggaggagagauugcu

SEQ ID NO: 117986 - RNA, 23 nt, Artificial Sequence
  Synthetic
augaacggggaggagagauugcu

SEQ ID NO: 117987 - RNA, 24 nt, Artificial Sequence
  Synthetic
caugaacggggaggagagauugcu

SEQ ID NO: 117988 - RNA, 19 nt, Artificial Sequence
  Synthetic
cgucuuuuguaugauugcu

SEQ ID NO: 117989 - RNA, 20 nt, Artificial Sequence
  Synthetic
acgucuuuuguaugauugcu

SEQ ID NO: 117990 - RNA, 21 nt, Artificial Sequence
  Synthetic
cacgucuuuuguaugauugcu

SEQ ID NO: 117991 - RNA, 22 nt, Artificial Sequence
  Synthetic
ucacgucuuuuguaugauugcu

SEQ ID NO: 117992 - RNA, 23 nt, Artificial Sequence
  Synthetic
aucacgucuuuuguaugauugcu

SEQ ID NO: 117993 - RNA, 24 nt, Artificial Sequence
  Synthetic
uaucacgucuuuuguaugauugcu

SEQ ID NO: 117994 - RNA, 18 nt, Artificial Sequence
  Synthetic
cuuuuagcugcuauugcu

SEQ ID NO: 117995 - RNA, 19 nt, Artificial Sequence
  Synthetic
ucuuuuagcugcuauugcu

SEQ ID NO: 117996 - RNA, 20 nt, Artificial Sequence
  Synthetic
aucuuuuagcugcuauugcu

SEQ ID NO: 117997 - RNA, 21 nt, Artificial Sequence
  Synthetic
aaucuuuuagcugcuauugcu

SEQ ID NO: 117998 - RNA, 22 nt, Artificial Sequence
  Synthetic
caaucuuuuagcugcuauugcu

SEQ ID NO: 117999 - RNA, 23 nt, Artificial Sequence
  Synthetic
ucaaucuuuuagcugcuauugcu

SEQ ID NO: 118000 - RNA, 18 nt, Artificial Sequence
  Synthetic
aucuuaauuauuauugcu

SEQ ID NO: 118001 - RNA, 19 nt, Artificial Sequence
  Synthetic
aaucuuaauuauuauugcu

SEQ ID NO: 118002 - RNA, 20 nt, Artificial Sequence
  Synthetic
aaaucuuaauuauuauugcu

SEQ ID NO: 118003 - RNA, 22 nt, Artificial Sequence
  Synthetic
ugaaaucuuaauuauuauugcu

SEQ ID NO: 118004 - RNA, 23 nt, Artificial Sequence
  Synthetic
uugaaaucuuaauuauuauugcu

SEQ ID NO: 118005 - RNA, 24 nt, Artificial Sequence
  Synthetic
uuugaaaucuuaauuauuauugcu

SEQ ID NO: 118006 - RNA, 18 nt, Artificial Sequence
  Synthetic
uauguuucucagcuugcu

SEQ ID NO: 118007 - RNA, 19 nt, Artificial Sequence
  Synthetic
uuauguuucucagcuugcu

SEQ ID NO: 118008 - RNA, 20 nt, Artificial Sequence
  Synthetic
auuauguuucucagcuugcu

SEQ ID NO: 118009 - RNA, 22 nt, Artificial Sequence
  Synthetic
ugauuauguuucucagcuugcu

SEQ ID NO: 118010 - RNA, 23 nt, Artificial Sequence
  Synthetic
uugauuauguuucucagcuugcu

SEQ ID NO: 118011 - RNA, 24 nt, Artificial Sequence
  Synthetic
auugauuauguuucucagcuugcu

SEQ ID NO: 118012 - RNA, 18 nt, Artificial Sequence
  Synthetic
uuuucuaccuaucuugcu

SEQ ID NO: 118013 - RNA, 19 nt, Artificial Sequence
  Synthetic
cuuuucuaccuaucuugcu

SEQ ID NO: 118014 - RNA, 20 nt, Artificial Sequence
  Synthetic
ccuuuucuaccuaucuugcu

SEQ ID NO: 118015 - RNA, 21 nt, Artificial Sequence
  Synthetic
accuuuucuaccuaucuugcu

SEQ ID NO: 118016 - RNA, 22 nt, Artificial Sequence
  Synthetic
uaccuuuucuaccuaucuugcu

SEQ ID NO: 118017 - RNA, 23 nt, Artificial Sequence
  Synthetic
auaccuuuucuaccuaucuugcu

SEQ ID NO: 118018 - RNA, 24 nt, Artificial Sequence
  Synthetic
aauaccuuuucuaccuaucuugcu

SEQ ID NO: 118019 - RNA, 18 nt, Artificial Sequence
  Synthetic
aaauuugcugaaguugcu

SEQ ID NO: 118020 - RNA, 19 nt, Artificial Sequence
  Synthetic
uaaauuugcugaaguugcu

SEQ ID NO: 118021 - RNA, 20 nt, Artificial Sequence
  Synthetic
cuaaauuugcugaaguugcu

SEQ ID NO: 118022 - RNA, 21 nt, Artificial Sequence
  Synthetic
ucuaaauuugcugaaguugcu

SEQ ID NO: 118023 - RNA, 22 nt, Artificial Sequence
  Synthetic
cucuaaauuugcugaaguugcu

SEQ ID NO: 118024 - RNA, 23 nt, Artificial Sequence
  Synthetic
ucucuaaauuugcugaaguugcu

SEQ ID NO: 118025 - RNA, 24 nt, Artificial Sequence
  Synthetic
uucucuaaauuugcugaaguugcu

SEQ ID NO: 118026 - RNA, 18 nt, Artificial Sequence
  Synthetic
ccaccaggaauaguugcu

SEQ ID NO: 118027 - RNA, 19 nt, Artificial Sequence
  Synthetic
uccaccaggaauaguugcu

SEQ ID NO: 118028 - RNA, 21 nt, Artificial Sequence
  Synthetic
cguccaccaggaauaguugcu

SEQ ID NO: 118029 - RNA, 22 nt, Artificial Sequence
  Synthetic
ccguccaccaggaauaguugcu

SEQ ID NO: 118030 - RNA, 23 nt, Artificial Sequence
  Synthetic
uccguccaccaggaauaguugcu

SEQ ID NO: 118031 - RNA, 18 nt, Artificial Sequence
  Synthetic
uugcagugaaguguugcu

SEQ ID NO: 118032 - RNA, 19 nt, Artificial Sequence
  Synthetic
cuugcagugaaguguugcu

SEQ ID NO: 118033 - RNA, 20 nt, Artificial Sequence
  Synthetic
acuugcagugaaguguugcu

SEQ ID NO: 118034 - RNA, 21 nt, Artificial Sequence
  Synthetic
uacuugcagugaaguguugcu

SEQ ID NO: 118035 - RNA, 22 nt, Artificial Sequence
  Synthetic
auacuugcagugaaguguugcu

SEQ ID NO: 118036 - RNA, 23 nt, Artificial Sequence
  Synthetic
uauacuugcagugaaguguugcu

SEQ ID NO: 118037 - RNA, 24 nt, Artificial Sequence
  Synthetic
auauacuugcagugaaguguugcu

SEQ ID NO: 118038 - RNA, 18 nt, Artificial Sequence
  Synthetic
aaagcuacauuuguugcu

SEQ ID NO: 118039 - RNA, 20 nt, Artificial Sequence
  Synthetic
ugaaagcuacauuuguugcu

SEQ ID NO: 118040 - RNA, 22 nt, Artificial Sequence
  Synthetic
agugaaagcuacauuuguugcu

SEQ ID NO: 118041 - RNA, 23 nt, Artificial Sequence
  Synthetic
cagugaaagcuacauuuguugcu

SEQ ID NO: 118042 - RNA, 24 nt, Artificial Sequence
  Synthetic
acagugaaagcuacauuuguugcu

SEQ ID NO: 118043 - RNA, 18 nt, Artificial Sequence
  Synthetic
aaaagaauaucauuugcu

SEQ ID NO: 118044 - RNA, 19 nt, Artificial Sequence
  Synthetic
aaaaagaauaucauuugcu

SEQ ID NO: 118045 - RNA, 20 nt, Artificial Sequence
  Synthetic
aaaaaagaauaucauuugcu

SEQ ID NO: 118046 - RNA, 21 nt, Artificial Sequence
  Synthetic
uaaaaaagaauaucauuugcu

SEQ ID NO: 118047 - RNA, 22 nt, Artificial Sequence
  Synthetic
auaaaaaagaauaucauuugcu

SEQ ID NO: 118048 - RNA, 23 nt, Artificial Sequence
  Synthetic
aauaaaaaagaauaucauuugcu

SEQ ID NO: 118049 - RNA, 24 nt, Artificial Sequence
  Synthetic
aaauaaaaaagaauaucauuugcu

SEQ ID NO: 118050 - RNA, 19 nt, Artificial Sequence
  Synthetic
ugcaaaccacagcuuugcu

SEQ ID NO: 118051 - RNA, 20 nt, Artificial Sequence
  Synthetic
uugcaaaccacagcuuugcu

SEQ ID NO: 118052 - RNA, 21 nt, Artificial Sequence
  Synthetic
auugcaaaccacagcuuugcu

SEQ ID NO: 118053 - RNA, 22 nt, Artificial Sequence
  Synthetic
uauugcaaaccacagcuuugcu

SEQ ID NO: 118054 - RNA, 23 nt, Artificial Sequence
  Synthetic
cuauugcaaaccacagcuuugcu

SEQ ID NO: 118055 - RNA, 24 nt, Artificial Sequence
  Synthetic
acuauugcaaaccacagcuuugcu

SEQ ID NO: 118056 - RNA, 21 nt, Artificial Sequence
  Synthetic
cugauuaaaucauucuuugcu

SEQ ID NO: 118057 - RNA, 22 nt, Artificial Sequence
  Synthetic
acugauuaaaucauucuuugcu

SEQ ID NO: 118058 - RNA, 23 nt, Artificial Sequence
  Synthetic
uacugauuaaaucauucuuugcu

SEQ ID NO: 118059 - RNA, 24 nt, Artificial Sequence
  Synthetic
cuacugauuaaaucauucuuugcu

SEQ ID NO: 118060 - RNA, 18 nt, Artificial Sequence
  Synthetic
acgguuaaguucuuugcu

SEQ ID NO: 118061 - RNA, 19 nt, Artificial Sequence
  Synthetic
aacgguuaaguucuuugcu

SEQ ID NO: 118062 - RNA, 20 nt, Artificial Sequence
  Synthetic
uaacgguuaaguucuuugcu

SEQ ID NO: 118063 - RNA, 21 nt, Artificial Sequence
  Synthetic
cuaacgguuaaguucuuugcu

SEQ ID NO: 118064 - RNA, 22 nt, Artificial Sequence
  Synthetic
acuaacgguuaaguucuuugcu

SEQ ID NO: 118065 - RNA, 23 nt, Artificial Sequence
  Synthetic
aacuaacgguuaaguucuuugcu

SEQ ID NO: 118066 - RNA, 24 nt, Artificial Sequence
  Synthetic
aaacuaacgguuaaguucuuugcu

SEQ ID NO: 118067 - RNA, 21 nt, Artificial Sequence
  Synthetic
uacucauugcaauaguuugcu

SEQ ID NO: 118068 - RNA, 22 nt, Artificial Sequence
  Synthetic
uuacucauugcaauaguuugcu

SEQ ID NO: 118069 - RNA, 23 nt, Artificial Sequence
  Synthetic
cuuacucauugcaauaguuugcu

SEQ ID NO: 118070 - RNA, 24 nt, Artificial Sequence
  Synthetic
acuuacucauugcaauaguuugcu

SEQ ID NO: 118071 - RNA, 18 nt, Artificial Sequence
  Synthetic
agucugggucuguuugcu

SEQ ID NO: 118072 - RNA, 19 nt, Artificial Sequence
  Synthetic
aagucugggucuguuugcu

SEQ ID NO: 118073 - RNA, 20 nt, Artificial Sequence
  Synthetic
aaagucugggucuguuugcu

SEQ ID NO: 118074 - RNA, 21 nt, Artificial Sequence
  Synthetic
caaagucugggucuguuugcu

SEQ ID NO: 118075 - RNA, 23 nt, Artificial Sequence
  Synthetic
ugcaaagucugggucuguuugcu

SEQ ID NO: 118076 - RNA, 24 nt, Artificial Sequence
  Synthetic
uugcaaagucugggucuguuugcu

SEQ ID NO: 118077 - RNA, 18 nt, Artificial Sequence
  Synthetic
aagaggauuuguuuugcu

SEQ ID NO: 118078 - RNA, 19 nt, Artificial Sequence
  Synthetic
aaagaggauuuguuuugcu

SEQ ID NO: 118079 - RNA, 21 nt, Artificial Sequence
  Synthetic
ugaaagaggauuuguuuugcu

SEQ ID NO: 118080 - RNA, 22 nt, Artificial Sequence
  Synthetic
cugaaagaggauuuguuuugcu

SEQ ID NO: 118081 - RNA, 23 nt, Artificial Sequence
  Synthetic
acugaaagaggauuuguuuugcu

SEQ ID NO: 118082 - RNA, 18 nt, Artificial Sequence
  Synthetic
ugcaaaguuauuuuugcu

SEQ ID NO: 118083 - RNA, 19 nt, Artificial Sequence
  Synthetic
augcaaaguuauuuuugcu

SEQ ID NO: 118084 - RNA, 20 nt, Artificial Sequence
  Synthetic
uaugcaaaguuauuuuugcu

SEQ ID NO: 118085 - RNA, 21 nt, Artificial Sequence
  Synthetic
cuaugcaaaguuauuuuugcu

SEQ ID NO: 118086 - RNA, 22 nt, Artificial Sequence
  Synthetic
ucuaugcaaaguuauuuuugcu

SEQ ID NO: 118087 - RNA, 18 nt, Artificial Sequence
  Synthetic
caggcuucgggaaaaucu

SEQ ID NO: 118088 - RNA, 19 nt, Artificial Sequence
  Synthetic
acaggcuucgggaaaaucu

SEQ ID NO: 118089 - RNA, 20 nt, Artificial Sequence
  Synthetic
aacaggcuucgggaaaaucu

SEQ ID NO: 118090 - RNA, 21 nt, Artificial Sequence
  Synthetic
aaacaggcuucgggaaaaucu

SEQ ID NO: 118091 - RNA, 23 nt, Artificial Sequence
  Synthetic
ugaaacaggcuucgggaaaaucu

SEQ ID NO: 118092 - RNA, 24 nt, Artificial Sequence
  Synthetic
cugaaacaggcuucgggaaaaucu

SEQ ID NO: 118093 - RNA, 18 nt, Artificial Sequence
  Synthetic
uaucugagggugaaaucu

SEQ ID NO: 118094 - RNA, 19 nt, Artificial Sequence
  Synthetic
uuaucugagggugaaaucu

SEQ ID NO: 118095 - RNA, 20 nt, Artificial Sequence
  Synthetic
cuuaucugagggugaaaucu

SEQ ID NO: 118096 - RNA, 21 nt, Artificial Sequence
  Synthetic
ucuuaucugagggugaaaucu

SEQ ID NO: 118097 - RNA, 22 nt, Artificial Sequence
  Synthetic
uucuuaucugagggugaaaucu

SEQ ID NO: 118098 - RNA, 24 nt, Artificial Sequence
  Synthetic
uguucuuaucugagggugaaaucu

SEQ ID NO: 118099 - RNA, 18 nt, Artificial Sequence
  Synthetic
uacauaugugcuaaaucu

SEQ ID NO: 118100 - RNA, 19 nt, Artificial Sequence
  Synthetic
cuacauaugugcuaaaucu

SEQ ID NO: 118101 - RNA, 21 nt, Artificial Sequence
  Synthetic
agcuacauaugugcuaaaucu

SEQ ID NO: 118102 - RNA, 22 nt, Artificial Sequence
  Synthetic
aagcuacauaugugcuaaaucu

SEQ ID NO: 118103 - RNA, 23 nt, Artificial Sequence
  Synthetic
aaagcuacauaugugcuaaaucu

SEQ ID NO: 118104 - RNA, 24 nt, Artificial Sequence
  Synthetic
aaaagcuacauaugugcuaaaucu

SEQ ID NO: 118105 - RNA, 18 nt, Artificial Sequence
  Synthetic
uuuuaguuuguuaaaucu

SEQ ID NO: 118106 - RNA, 19 nt, Artificial Sequence
  Synthetic
auuuuaguuuguuaaaucu

SEQ ID NO: 118107 - RNA, 20 nt, Artificial Sequence
  Synthetic
uauuuuaguuuguuaaaucu

SEQ ID NO: 118108 - RNA, 21 nt, Artificial Sequence
  Synthetic
uuauuuuaguuuguuaaaucu

SEQ ID NO: 118109 - RNA, 22 nt, Artificial Sequence
  Synthetic
cuuauuuuaguuuguuaaaucu

SEQ ID NO: 118110 - RNA, 23 nt, Artificial Sequence
  Synthetic
acuuauuuuaguuuguuaaaucu

SEQ ID NO: 118111 - RNA, 24 nt, Artificial Sequence
  Synthetic
aacuuauuuuaguuuguuaaaucu

SEQ ID NO: 118112 - RNA, 18 nt, Artificial Sequence
  Synthetic
ccaacacagaaacaaucu

SEQ ID NO: 118113 - RNA, 20 nt, Artificial Sequence
  Synthetic
agccaacacagaaacaaucu

SEQ ID NO: 118114 - RNA, 21 nt, Artificial Sequence
  Synthetic
aagccaacacagaaacaaucu

SEQ ID NO: 118115 - RNA, 22 nt, Artificial Sequence
  Synthetic
caagccaacacagaaacaaucu

SEQ ID NO: 118116 - RNA, 23 nt, Artificial Sequence
  Synthetic
acaagccaacacagaaacaaucu

SEQ ID NO: 118117 - RNA, 24 nt, Artificial Sequence
  Synthetic
aacaagccaacacagaaacaaucu

SEQ ID NO: 118118 - RNA, 19 nt, Artificial Sequence
  Synthetic
ugcaugcucaccucaaucu

SEQ ID NO: 118119 - RNA, 20 nt, Artificial Sequence
  Synthetic
cugcaugcucaccucaaucu

SEQ ID NO: 118120 - RNA, 21 nt, Artificial Sequence
  Synthetic
acugcaugcucaccucaaucu

SEQ ID NO: 118121 - RNA, 22 nt, Artificial Sequence
  Synthetic
uacugcaugcucaccucaaucu

SEQ ID NO: 118122 - RNA, 23 nt, Artificial Sequence
  Synthetic
auacugcaugcucaccucaaucu

SEQ ID NO: 118123 - RNA, 24 nt, Artificial Sequence
  Synthetic
cauacugcaugcucaccucaaucu

SEQ ID NO: 118124 - RNA, 19 nt, Artificial Sequence
  Synthetic
agagaauuaaugucaaucu

SEQ ID NO: 118125 - RNA, 20 nt, Artificial Sequence
  Synthetic
uagagaauuaaugucaaucu

SEQ ID NO: 118126 - RNA, 21 nt, Artificial Sequence
  Synthetic
auagagaauuaaugucaaucu

SEQ ID NO: 118127 - RNA, 22 nt, Artificial Sequence
  Synthetic
aauagagaauuaaugucaaucu

SEQ ID NO: 118128 - RNA, 23 nt, Artificial Sequence
  Synthetic
caauagagaauuaaugucaaucu

SEQ ID NO: 118129 - RNA, 24 nt, Artificial Sequence
  Synthetic
acaauagagaauuaaugucaaucu

SEQ ID NO: 118130 - RNA, 18 nt, Artificial Sequence
  Synthetic
uccuuauucuuucaaucu

SEQ ID NO: 118131 - RNA, 19 nt, Artificial Sequence
  Synthetic
uuccuuauucuuucaaucu

SEQ ID NO: 118132 - RNA, 20 nt, Artificial Sequence
  Synthetic
uuuccuuauucuuucaaucu

SEQ ID NO: 118133 - RNA, 21 nt, Artificial Sequence
  Synthetic
cuuuccuuauucuuucaaucu

SEQ ID NO: 118134 - RNA, 22 nt, Artificial Sequence
  Synthetic
acuuuccuuauucuuucaaucu

SEQ ID NO: 118135 - RNA, 23 nt, Artificial Sequence
  Synthetic
uacuuuccuuauucuuucaaucu

SEQ ID NO: 118136 - RNA, 24 nt, Artificial Sequence
  Synthetic
uuacuuuccuuauucuuucaaucu

SEQ ID NO: 118137 - RNA, 18 nt, Artificial Sequence
  Synthetic
cccuucuaaaaagaaucu

SEQ ID NO: 118138 - RNA, 20 nt, Artificial Sequence
  Synthetic
agcccuucuaaaaagaaucu

SEQ ID NO: 118139 - RNA, 21 nt, Artificial Sequence
  Synthetic
uagcccuucuaaaaagaaucu

SEQ ID NO: 118140 - RNA, 23 nt, Artificial Sequence
  Synthetic
uguagcccuucuaaaaagaaucu

SEQ ID NO: 118141 - RNA, 18 nt, Artificial Sequence
  Synthetic
uguauguuuaaagaaucu

SEQ ID NO: 118142 - RNA, 19 nt, Artificial Sequence
  Synthetic
auguauguuuaaagaaucu

SEQ ID NO: 118143 - RNA, 20 nt, Artificial Sequence
  Synthetic
cauguauguuuaaagaaucu

SEQ ID NO: 118144 - RNA, 18 nt, Artificial Sequence
  Synthetic
uuaugguacacagaaucu

SEQ ID NO: 118145 - RNA, 20 nt, Artificial Sequence
  Synthetic
aguuaugguacacagaaucu

SEQ ID NO: 118146 - RNA, 21 nt, Artificial Sequence
  Synthetic
aaguuaugguacacagaaucu

SEQ ID NO: 118147 - RNA, 22 nt, Artificial Sequence
  Synthetic
aaaguuaugguacacagaaucu

SEQ ID NO: 118148 - RNA, 23 nt, Artificial Sequence
  Synthetic
aaaaguuaugguacacagaaucu

SEQ ID NO: 118149 - RNA, 24 nt, Artificial Sequence
  Synthetic
uaaaaguuaugguacacagaaucu

SEQ ID NO: 118150 - RNA, 18 nt, Artificial Sequence
  Synthetic
auuuuggauaaggaaucu

SEQ ID NO: 118151 - RNA, 19 nt, Artificial Sequence
  Synthetic
aauuuuggauaaggaaucu

SEQ ID NO: 118152 - RNA, 20 nt, Artificial Sequence
  Synthetic
caauuuuggauaaggaaucu

SEQ ID NO: 118153 - RNA, 21 nt, Artificial Sequence
  Synthetic
ucaauuuuggauaaggaaucu

SEQ ID NO: 118154 - RNA, 22 nt, Artificial Sequence
  Synthetic
uucaauuuuggauaaggaaucu

SEQ ID NO: 118155 - RNA, 23 nt, Artificial Sequence
  Synthetic
cuucaauuuuggauaaggaaucu

SEQ ID NO: 118156 - RNA, 24 nt, Artificial Sequence
  Synthetic
acuucaauuuuggauaaggaaucu

SEQ ID NO: 118157 - RNA, 18 nt, Artificial Sequence
  Synthetic
caugaaaggaaugaaucu

SEQ ID NO: 118158 - RNA, 19 nt, Artificial Sequence
  Synthetic
acaugaaaggaaugaaucu

SEQ ID NO: 118159 - RNA, 20 nt, Artificial Sequence
  Synthetic
aacaugaaaggaaugaaucu

SEQ ID NO: 118160 - RNA, 21 nt, Artificial Sequence
  Synthetic
caacaugaaaggaaugaaucu

SEQ ID NO: 118161 - RNA, 22 nt, Artificial Sequence
  Synthetic
acaacaugaaaggaaugaaucu

SEQ ID NO: 118162 - RNA, 23 nt, Artificial Sequence
  Synthetic
uacaacaugaaaggaaugaaucu

SEQ ID NO: 118163 - RNA, 18 nt, Artificial Sequence
  Synthetic
ccuauguaccaugaaucu

SEQ ID NO: 118164 - RNA, 19 nt, Artificial Sequence
  Synthetic
uccuauguaccaugaaucu

SEQ ID NO: 118165 - RNA, 20 nt, Artificial Sequence
  Synthetic
uuccuauguaccaugaaucu

SEQ ID NO: 118166 - RNA, 22 nt, Artificial Sequence
  Synthetic
aguuccuauguaccaugaaucu

SEQ ID NO: 118167 - RNA, 23 nt, Artificial Sequence
  Synthetic
caguuccuauguaccaugaaucu

SEQ ID NO: 118168 - RNA, 24 nt, Artificial Sequence
  Synthetic
acaguuccuauguaccaugaaucu

SEQ ID NO: 118169 - RNA, 19 nt, Artificial Sequence
  Synthetic
ugcuauacagcaugaaucu

SEQ ID NO: 118170 - RNA, 20 nt, Artificial Sequence
  Synthetic
uugcuauacagcaugaaucu

SEQ ID NO: 118171 - RNA, 21 nt, Artificial Sequence
  Synthetic
auugcuauacagcaugaaucu

SEQ ID NO: 118172 - RNA, 23 nt, Artificial Sequence
  Synthetic
ugauugcuauacagcaugaaucu

SEQ ID NO: 118173 - RNA, 24 nt, Artificial Sequence
  Synthetic
augauugcuauacagcaugaaucu

SEQ ID NO: 118174 - RNA, 19 nt, Artificial Sequence
  Synthetic
ugagugaacgcaugaaucu

SEQ ID NO: 118175 - RNA, 20 nt, Artificial Sequence
  Synthetic
cugagugaacgcaugaaucu

SEQ ID NO: 118176 - RNA, 22 nt, Artificial Sequence
  Synthetic
ugcugagugaacgcaugaaucu

SEQ ID NO: 118177 - RNA, 23 nt, Artificial Sequence
  Synthetic
uugcugagugaacgcaugaaucu

SEQ ID NO: 118178 - RNA, 24 nt, Artificial Sequence
  Synthetic
uuugcugagugaacgcaugaaucu

SEQ ID NO: 118179 - RNA, 18 nt, Artificial Sequence
  Synthetic
aguaacccagaugaaucu

SEQ ID NO: 118180 - RNA, 19 nt, Artificial Sequence
  Synthetic
aaguaacccagaugaaucu

SEQ ID NO: 118181 - RNA, 21 nt, Artificial Sequence
  Synthetic
ugaaguaacccagaugaaucu

SEQ ID NO: 118182 - RNA, 22 nt, Artificial Sequence
  Synthetic
augaaguaacccagaugaaucu

SEQ ID NO: 118183 - RNA, 18 nt, Artificial Sequence
  Synthetic
uccucucuuucauaaucu

SEQ ID NO: 118184 - RNA, 19 nt, Artificial Sequence
  Synthetic
cuccucucuuucauaaucu

SEQ ID NO: 118185 - RNA, 20 nt, Artificial Sequence
  Synthetic
ucuccucucuuucauaaucu

SEQ ID NO: 118186 - RNA, 21 nt, Artificial Sequence
  Synthetic
cucuccucucuuucauaaucu

SEQ ID NO: 118187 - RNA, 22 nt, Artificial Sequence
  Synthetic
ccucuccucucuuucauaaucu

SEQ ID NO: 118188 - RNA, 23 nt, Artificial Sequence
  Synthetic
uccucuccucucuuucauaaucu

SEQ ID NO: 118189 - RNA, 24 nt, Artificial Sequence
  Synthetic
cuccucuccucucuuucauaaucu

SEQ ID NO: 118190 - RNA, 19 nt, Artificial Sequence
  Synthetic
ugaauuuacaagauaaucu

SEQ ID NO: 118191 - RNA, 20 nt, Artificial Sequence
  Synthetic
cugaauuuacaagauaaucu

SEQ ID NO: 118192 - RNA, 21 nt, Artificial Sequence
  Synthetic
acugaauuuacaagauaaucu

SEQ ID NO: 118193 - RNA, 22 nt, Artificial Sequence
  Synthetic
aacugaauuuacaagauaaucu

SEQ ID NO: 118194 - RNA, 24 nt, Artificial Sequence
  Synthetic
cgaacugaauuuacaagauaaucu

SEQ ID NO: 118195 - RNA, 19 nt, Artificial Sequence
  Synthetic
ugaacuacagguaacaucu

SEQ ID NO: 118196 - RNA, 20 nt, Artificial Sequence
  Synthetic
cugaacuacagguaacaucu

SEQ ID NO: 118197 - RNA, 21 nt, Artificial Sequence
  Synthetic
ucugaacuacagguaacaucu

SEQ ID NO: 118198 - RNA, 22 nt, Artificial Sequence
  Synthetic
uucugaacuacagguaacaucu

SEQ ID NO: 118199 - RNA, 23 nt, Artificial Sequence
  Synthetic
uuucugaacuacagguaacaucu

SEQ ID NO: 118200 - RNA, 24 nt, Artificial Sequence
  Synthetic
uuuucugaacuacagguaacaucu

SEQ ID NO: 118201 - RNA, 21 nt, Artificial Sequence
  Synthetic
uaauuauuuacaaucacaucu

SEQ ID NO: 118202 - RNA, 22 nt, Artificial Sequence
  Synthetic
uuaauuauuuacaaucacaucu

SEQ ID NO: 118203 - RNA, 23 nt, Artificial Sequence
  Synthetic
auuaauuauuuacaaucacaucu

SEQ ID NO: 118204 - RNA, 24 nt, Artificial Sequence
  Synthetic
aauuaauuauuuacaaucacaucu

SEQ ID NO: 118205 - RNA, 18 nt, Artificial Sequence
  Synthetic
cguuuuaccaugacaucu

SEQ ID NO: 118206 - RNA, 19 nt, Artificial Sequence
  Synthetic
ccguuuuaccaugacaucu

SEQ ID NO: 118207 - RNA, 20 nt, Artificial Sequence
  Synthetic
accguuuuaccaugacaucu

SEQ ID NO: 118208 - RNA, 21 nt, Artificial Sequence
  Synthetic
caccguuuuaccaugacaucu

SEQ ID NO: 118209 - RNA, 22 nt, Artificial Sequence
  Synthetic
ucaccguuuuaccaugacaucu

SEQ ID NO: 118210 - RNA, 23 nt, Artificial Sequence
  Synthetic
uucaccguuuuaccaugacaucu

SEQ ID NO: 118211 - RNA, 18 nt, Artificial Sequence
  Synthetic
aaauccuccagaccaucu

SEQ ID NO: 118212 - RNA, 19 nt, Artificial Sequence
  Synthetic
caaauccuccagaccaucu

SEQ ID NO: 118213 - RNA, 20 nt, Artificial Sequence
  Synthetic
ucaaauccuccagaccaucu

SEQ ID NO: 118214 - RNA, 21 nt, Artificial Sequence
  Synthetic
uucaaauccuccagaccaucu

SEQ ID NO: 118215 - RNA, 22 nt, Artificial Sequence
  Synthetic
cuucaaauccuccagaccaucu

SEQ ID NO: 118216 - RNA, 18 nt, Artificial Sequence
  Synthetic
auccucacucuaccaucu

SEQ ID NO: 118217 - RNA, 19 nt, Artificial Sequence
  Synthetic
cauccucacucuaccaucu

SEQ ID NO: 118218 - RNA, 20 nt, Artificial Sequence
  Synthetic
ccauccucacucuaccaucu

SEQ ID NO: 118219 - RNA, 18 nt, Artificial Sequence
  Synthetic
aaaagggccuguccaucu

SEQ ID NO: 118220 - RNA, 19 nt, Artificial Sequence
  Synthetic
aaaaagggccuguccaucu

SEQ ID NO: 118221 - RNA, 20 nt, Artificial Sequence
  Synthetic
aaaaaagggccuguccaucu

SEQ ID NO: 118222 - RNA, 21 nt, Artificial Sequence
  Synthetic
aaaaaaagggccuguccaucu

SEQ ID NO: 118223 - RNA, 22 nt, Artificial Sequence
  Synthetic
caaaaaaagggccuguccaucu

SEQ ID NO: 118224 - RNA, 23 nt, Artificial Sequence
  Synthetic
ccaaaaaaagggccuguccaucu

SEQ ID NO: 118225 - RNA, 24 nt, Artificial Sequence
  Synthetic
accaaaaaaagggccuguccaucu

SEQ ID NO: 118226 - RNA, 21 nt, Artificial Sequence
  Synthetic
acuggcccucagacagcaucu

SEQ ID NO: 118227 - RNA, 23 nt, Artificial Sequence
  Synthetic
ugacuggcccucagacagcaucu

SEQ ID NO: 118228 - RNA, 24 nt, Artificial Sequence
  Synthetic
augacuggcccucagacagcaucu

SEQ ID NO: 118229 - RNA, 22 nt, Artificial Sequence
  Synthetic
uggggucuuuaaccuggcaucu

SEQ ID NO: 118230 - RNA, 23 nt, Artificial Sequence
  Synthetic
auggggucuuuaaccuggcaucu

SEQ ID NO: 118231 - RNA, 19 nt, Artificial Sequence
  Synthetic
agccuauaauucaagaucu

SEQ ID NO: 118232 - RNA, 20 nt, Artificial Sequence
  Synthetic
uagccuauaauucaagaucu

SEQ ID NO: 118233 - RNA, 21 nt, Artificial Sequence
  Synthetic
uuagccuauaauucaagaucu

SEQ ID NO: 118234 - RNA, 22 nt, Artificial Sequence
  Synthetic
auuagccuauaauucaagaucu

SEQ ID NO: 118235 - RNA, 23 nt, Artificial Sequence
  Synthetic
uauuagccuauaauucaagaucu

SEQ ID NO: 118236 - RNA, 24 nt, Artificial Sequence
  Synthetic
uuauuagccuauaauucaagaucu

SEQ ID NO: 118237 - RNA, 18 nt, Artificial Sequence
  Synthetic
aacuuuaccauaagaucu

SEQ ID NO: 118238 - RNA, 19 nt, Artificial Sequence
  Synthetic
aaacuuuaccauaagaucu

SEQ ID NO: 118239 - RNA, 20 nt, Artificial Sequence
  Synthetic
uaaacuuuaccauaagaucu

SEQ ID NO: 118240 - RNA, 21 nt, Artificial Sequence
  Synthetic
uuaaacuuuaccauaagaucu

SEQ ID NO: 118241 - RNA, 22 nt, Artificial Sequence
  Synthetic
uuuaaacuuuaccauaagaucu

SEQ ID NO: 118242 - RNA, 23 nt, Artificial Sequence
  Synthetic
cuuuaaacuuuaccauaagaucu

SEQ ID NO: 118243 - RNA, 24 nt, Artificial Sequence
  Synthetic
ucuuuaaacuuuaccauaagaucu

SEQ ID NO: 118244 - RNA, 18 nt, Artificial Sequence
  Synthetic
uauagguuaugcagaucu

SEQ ID NO: 118245 - RNA, 19 nt, Artificial Sequence
  Synthetic
cuauagguuaugcagaucu

SEQ ID NO: 118246 - RNA, 23 nt, Artificial Sequence
  Synthetic
ugggcuauagguuaugcagaucu

SEQ ID NO: 118247 - RNA, 19 nt, Artificial Sequence
  Synthetic
agaacaaucccaaggaucu

SEQ ID NO: 118248 - RNA, 22 nt, Artificial Sequence
  Synthetic
uggagaacaaucccaaggaucu

SEQ ID NO: 118249 - RNA, 23 nt, Artificial Sequence
  Synthetic
auggagaacaaucccaaggaucu

SEQ ID NO: 118250 - RNA, 24 nt, Artificial Sequence
  Synthetic
aauggagaacaaucccaaggaucu

SEQ ID NO: 118251 - RNA, 18 nt, Artificial Sequence
  Synthetic
ucacgcauucauggaucu

SEQ ID NO: 118252 - RNA, 21 nt, Artificial Sequence
  Synthetic
aggucacgcauucauggaucu

SEQ ID NO: 118253 - RNA, 22 nt, Artificial Sequence
  Synthetic
uaggucacgcauucauggaucu

SEQ ID NO: 118254 - RNA, 23 nt, Artificial Sequence
  Synthetic
uuaggucacgcauucauggaucu

SEQ ID NO: 118255 - RNA, 18 nt, Artificial Sequence
  Synthetic
auuucuaguuaaugaucu

SEQ ID NO: 118256 - RNA, 19 nt, Artificial Sequence
  Synthetic
aauuucuaguuaaugaucu

SEQ ID NO: 118257 - RNA, 20 nt, Artificial Sequence
  Synthetic
aaauuucuaguuaaugaucu

SEQ ID NO: 118258 - RNA, 21 nt, Artificial Sequence
  Synthetic
aaaauuucuaguuaaugaucu

SEQ ID NO: 118259 - RNA, 22 nt, Artificial Sequence
  Synthetic
aaaaauuucuaguuaaugaucu

SEQ ID NO: 118260 - RNA, 23 nt, Artificial Sequence
  Synthetic
caaaaauuucuaguuaaugaucu

SEQ ID NO: 118261 - RNA, 24 nt, Artificial Sequence
  Synthetic
acaaaaauuucuaguuaaugaucu

SEQ ID NO: 118262 - RNA, 18 nt, Artificial Sequence
  Synthetic
cucaccaggcccugaucu

SEQ ID NO: 118263 - RNA, 19 nt, Artificial Sequence
  Synthetic
ccucaccaggcccugaucu

SEQ ID NO: 118264 - RNA, 20 nt, Artificial Sequence
  Synthetic
cccucaccaggcccugaucu

SEQ ID NO: 118265 - RNA, 22 nt, Artificial Sequence
  Synthetic
uguauuucucuaucccugaucu

SEQ ID NO: 118266 - RNA, 24 nt, Artificial Sequence
  Synthetic
aguguauuucucuaucccugaucu

SEQ ID NO: 118267 - RNA, 18 nt, Artificial Sequence
  Synthetic
caacuggaucucugaucu

SEQ ID NO: 118268 - RNA, 19 nt, Artificial Sequence
  Synthetic
ucaacuggaucucugaucu

SEQ ID NO: 118269 - RNA, 20 nt, Artificial Sequence
  Synthetic
aucaacuggaucucugaucu

SEQ ID NO: 118270 - RNA, 21 nt, Artificial Sequence
  Synthetic
uaucaacuggaucucugaucu

SEQ ID NO: 118271 - RNA, 22 nt, Artificial Sequence
  Synthetic
auaucaacuggaucucugaucu

SEQ ID NO: 118272 - RNA, 23 nt, Artificial Sequence
  Synthetic
uauaucaacuggaucucugaucu

SEQ ID NO: 118273 - RNA, 19 nt, Artificial Sequence
  Synthetic
cguuucaucugcaauaucu

SEQ ID NO: 118274 - RNA, 21 nt, Artificial Sequence
  Synthetic
ugcguuucaucugcaauaucu

SEQ ID NO: 118275 - RNA, 22 nt, Artificial Sequence
  Synthetic
uugcguuucaucugcaauaucu

SEQ ID NO: 118276 - RNA, 23 nt, Artificial Sequence
  Synthetic
uuugcguuucaucugcaauaucu

SEQ ID NO: 118277 - RNA, 24 nt, Artificial Sequence
  Synthetic
auuugcguuucaucugcaauaucu

SEQ ID NO: 118278 - RNA, 21 nt, Artificial Sequence
  Synthetic
auaugaauauuuucaauaucu

SEQ ID NO: 118279 - RNA, 22 nt, Artificial Sequence
  Synthetic
uauaugaauauuuucaauaucu

SEQ ID NO: 118280 - RNA, 23 nt, Artificial Sequence
  Synthetic
auauaugaauauuuucaauaucu

SEQ ID NO: 118281 - RNA, 24 nt, Artificial Sequence
  Synthetic
cauauaugaauauuuucaauaucu

SEQ ID NO: 118282 - RNA, 19 nt, Artificial Sequence
  Synthetic
ugaauggguccuaauaucu

SEQ ID NO: 118283 - RNA, 20 nt, Artificial Sequence
  Synthetic
cugaauggguccuaauaucu

SEQ ID NO: 118284 - RNA, 23 nt, Artificial Sequence
  Synthetic
uggcugaauggguccuaauaucu

SEQ ID NO: 118285 - RNA, 24 nt, Artificial Sequence
  Synthetic
cuggcugaauggguccuaauaucu

SEQ ID NO: 118286 - RNA, 18 nt, Artificial Sequence
  Synthetic
cuaaacauucacauaucu

SEQ ID NO: 118287 - RNA, 19 nt, Artificial Sequence
  Synthetic
ucuaaacauucacauaucu

SEQ ID NO: 118288 - RNA, 20 nt, Artificial Sequence
  Synthetic
uucuaaacauucacauaucu

SEQ ID NO: 118289 - RNA, 21 nt, Artificial Sequence
  Synthetic
uuucuaaacauucacauaucu

SEQ ID NO: 118290 - RNA, 22 nt, Artificial Sequence
  Synthetic
uuuucuaaacauucacauaucu

SEQ ID NO: 118291 - RNA, 23 nt, Artificial Sequence
  Synthetic
uuuuucuaaacauucacauaucu

SEQ ID NO: 118292 - RNA, 24 nt, Artificial Sequence
  Synthetic
cuuuuucuaaacauucacauaucu

SEQ ID NO: 118293 - RNA, 19 nt, Artificial Sequence
  Synthetic
aguuacaaaaggcauaucu

SEQ ID NO: 118294 - RNA, 18 nt, Artificial Sequence
  Synthetic
auuuuacuguaccuaucu

SEQ ID NO: 118295 - RNA, 20 nt, Artificial Sequence
  Synthetic
agauuuuacuguaccuaucu

SEQ ID NO: 118296 - RNA, 21 nt, Artificial Sequence
  Synthetic
cagauuuuacuguaccuaucu

SEQ ID NO: 118297 - RNA, 22 nt, Artificial Sequence
  Synthetic
acagauuuuacuguaccuaucu

SEQ ID NO: 118298 - RNA, 23 nt, Artificial Sequence
  Synthetic
cacagauuuuacuguaccuaucu

SEQ ID NO: 118299 - RNA, 24 nt, Artificial Sequence
  Synthetic
ucacagauuuuacuguaccuaucu

SEQ ID NO: 118300 - RNA, 18 nt, Artificial Sequence
  Synthetic
agccccuccauccuaucu

SEQ ID NO: 118301 - RNA, 20 nt, Artificial Sequence
  Synthetic
agagccccuccauccuaucu

SEQ ID NO: 118302 - RNA, 21 nt, Artificial Sequence
  Synthetic
uagagccccuccauccuaucu

SEQ ID NO: 118303 - RNA, 24 nt, Artificial Sequence
  Synthetic
agguagagccccuccauccuaucu

SEQ ID NO: 118304 - RNA, 18 nt, Artificial Sequence
  Synthetic
uaagaucucugucuaucu

SEQ ID NO: 118305 - RNA, 19 nt, Artificial Sequence
  Synthetic
uuaagaucucugucuaucu

SEQ ID NO: 118306 - RNA, 20 nt, Artificial Sequence
  Synthetic
auuaagaucucugucuaucu

SEQ ID NO: 118307 - RNA, 22 nt, Artificial Sequence
  Synthetic
agauuaagaucucugucuaucu

SEQ ID NO: 118308 - RNA, 23 nt, Artificial Sequence
  Synthetic
aagauuaagaucucugucuaucu

SEQ ID NO: 118309 - RNA, 24 nt, Artificial Sequence
  Synthetic
aaagauuaagaucucugucuaucu

SEQ ID NO: 118310 - RNA, 18 nt, Artificial Sequence
  Synthetic
cccugucuucuucuaucu

SEQ ID NO: 118311 - RNA, 20 nt, Artificial Sequence
  Synthetic
ugcccugucuucuucuaucu

SEQ ID NO: 118312 - RNA, 21 nt, Artificial Sequence
  Synthetic
cugcccugucuucuucuaucu

SEQ ID NO: 118313 - RNA, 22 nt, Artificial Sequence
  Synthetic
acugcccugucuucuucuaucu

SEQ ID NO: 118314 - RNA, 23 nt, Artificial Sequence
  Synthetic
cacugcccugucuucuucuaucu

SEQ ID NO: 118315 - RNA, 24 nt, Artificial Sequence
  Synthetic
acacugcccugucuucuucuaucu

SEQ ID NO: 118316 - RNA, 18 nt, Artificial Sequence
  Synthetic
caaggccuugcaguaucu

SEQ ID NO: 118317 - RNA, 19 nt, Artificial Sequence
  Synthetic
ccaaggccuugcaguaucu

SEQ ID NO: 118318 - RNA, 20 nt, Artificial Sequence
  Synthetic
uccaaggccuugcaguaucu

SEQ ID NO: 118319 - RNA, 21 nt, Artificial Sequence
  Synthetic
cuccaaggccuugcaguaucu

SEQ ID NO: 118320 - RNA, 23 nt, Artificial Sequence
  Synthetic
ugcuccaaggccuugcaguaucu

SEQ ID NO: 118321 - RNA, 24 nt, Artificial Sequence
  Synthetic
cugcuccaaggccuugcaguaucu

SEQ ID NO: 118322 - RNA, 18 nt, Artificial Sequence
  Synthetic
uaugucuguggaguaucu

SEQ ID NO: 118323 - RNA, 19 nt, Artificial Sequence
  Synthetic
auaugucuguggaguaucu

SEQ ID NO: 118324 - RNA, 20 nt, Artificial Sequence
  Synthetic
aauaugucuguggaguaucu

SEQ ID NO: 118325 - RNA, 21 nt, Artificial Sequence
  Synthetic
aaauaugucuguggaguaucu

SEQ ID NO: 118326 - RNA, 22 nt, Artificial Sequence
  Synthetic
caaauaugucuguggaguaucu

SEQ ID NO: 118327 - RNA, 23 nt, Artificial Sequence
  Synthetic
ccaaauaugucuguggaguaucu

SEQ ID NO: 118328 - RNA, 24 nt, Artificial Sequence
  Synthetic
cccaaauaugucuguggaguaucu

SEQ ID NO: 118329 - RNA, 18 nt, Artificial Sequence
  Synthetic
uauuucugaguaguaucu

SEQ ID NO: 118330 - RNA, 20 nt, Artificial Sequence
  Synthetic
aguauuucugaguaguaucu

SEQ ID NO: 118331 - RNA, 21 nt, Artificial Sequence
  Synthetic
aaguauuucugaguaguaucu

SEQ ID NO: 118332 - RNA, 22 nt, Artificial Sequence
  Synthetic
aaaguauuucugaguaguaucu

SEQ ID NO: 118333 - RNA, 24 nt, Artificial Sequence
  Synthetic
ugaaaguauuucugaguaguaucu

SEQ ID NO: 118334 - RNA, 18 nt, Artificial Sequence
  Synthetic
aagaucauagagguaucu

SEQ ID NO: 118335 - RNA, 19 nt, Artificial Sequence
  Synthetic
aaagaucauagagguaucu

SEQ ID NO: 118336 - RNA, 20 nt, Artificial Sequence
  Synthetic
caaagaucauagagguaucu

SEQ ID NO: 118337 - RNA, 21 nt, Artificial Sequence
  Synthetic
ucaaagaucauagagguaucu

SEQ ID NO: 118338 - RNA, 22 nt, Artificial Sequence
  Synthetic
aucaaagaucauagagguaucu

SEQ ID NO: 118339 - RNA, 23 nt, Artificial Sequence
  Synthetic
aaucaaagaucauagagguaucu

SEQ ID NO: 118340 - RNA, 24 nt, Artificial Sequence
  Synthetic
aaaucaaagaucauagagguaucu

SEQ ID NO: 118341 - RNA, 19 nt, Artificial Sequence
  Synthetic
aggaguuaucugauuaucu

SEQ ID NO: 118342 - RNA, 20 nt, Artificial Sequence
  Synthetic
uaggaguuaucugauuaucu

SEQ ID NO: 118343 - RNA, 21 nt, Artificial Sequence
  Synthetic
uuaggaguuaucugauuaucu

SEQ ID NO: 118344 - RNA, 22 nt, Artificial Sequence
  Synthetic
cuuaggaguuaucugauuaucu

SEQ ID NO: 118345 - RNA, 23 nt, Artificial Sequence
  Synthetic
ccuuaggaguuaucugauuaucu

SEQ ID NO: 118346 - RNA, 24 nt, Artificial Sequence
  Synthetic
accuuaggaguuaucugauuaucu

SEQ ID NO: 118347 - RNA, 18 nt, Artificial Sequence
  Synthetic
uuaaauauuagcuuaucu

SEQ ID NO: 118348 - RNA, 19 nt, Artificial Sequence
  Synthetic
cuuaaauauuagcuuaucu

SEQ ID NO: 118349 - RNA, 21 nt, Artificial Sequence
  Synthetic
agcuuaaauauuagcuuaucu

SEQ ID NO: 118350 - RNA, 23 nt, Artificial Sequence
  Synthetic
ugagcuuaaauauuagcuuaucu

SEQ ID NO: 118351 - RNA, 24 nt, Artificial Sequence
  Synthetic
augagcuuaaauauuagcuuaucu

SEQ ID NO: 118352 - RNA, 21 nt, Artificial Sequence
  Synthetic
aaauuuugauuguucuuaucu

SEQ ID NO: 118353 - RNA, 22 nt, Artificial Sequence
  Synthetic
aaaauuuugauuguucuuaucu

SEQ ID NO: 118354 - RNA, 23 nt, Artificial Sequence
  Synthetic
uaaaauuuugauuguucuuaucu

SEQ ID NO: 118355 - RNA, 24 nt, Artificial Sequence
  Synthetic
uuaaaauuuugauuguucuuaucu

SEQ ID NO: 118356 - RNA, 18 nt, Artificial Sequence
  Synthetic
aaaacagacaauuuaucu

SEQ ID NO: 118357 - RNA, 19 nt, Artificial Sequence
  Synthetic
uaaaacagacaauuuaucu

SEQ ID NO: 118358 - RNA, 20 nt, Artificial Sequence
  Synthetic
uuaaaacagacaauuuaucu

SEQ ID NO: 118359 - RNA, 21 nt, Artificial Sequence
  Synthetic
uuuaaaacagacaauuuaucu

SEQ ID NO: 118360 - RNA, 22 nt, Artificial Sequence
  Synthetic
auuuaaaacagacaauuuaucu

SEQ ID NO: 118361 - RNA, 23 nt, Artificial Sequence
  Synthetic
cauuuaaaacagacaauuuaucu

SEQ ID NO: 118362 - RNA, 18 nt, Artificial Sequence
  Synthetic
ucugauugauguuuaucu

SEQ ID NO: 118363 - RNA, 19 nt, Artificial Sequence
  Synthetic
aucugauugauguuuaucu

SEQ ID NO: 118364 - RNA, 20 nt, Artificial Sequence
  Synthetic
caucugauugauguuuaucu

SEQ ID NO: 118365 - RNA, 21 nt, Artificial Sequence
  Synthetic
acaucugauugauguuuaucu

SEQ ID NO: 118366 - RNA, 22 nt, Artificial Sequence
  Synthetic
cacaucugauugauguuuaucu

SEQ ID NO: 118367 - RNA, 23 nt, Artificial Sequence
  Synthetic
ccacaucugauugauguuuaucu

SEQ ID NO: 118368 - RNA, 24 nt, Artificial Sequence
  Synthetic
accacaucugauugauguuuaucu

SEQ ID NO: 118369 - RNA, 18 nt, Artificial Sequence
  Synthetic
aauaucauagucaacucu

SEQ ID NO: 118370 - RNA, 20 nt, Artificial Sequence
  Synthetic
ugaauaucauagucaacucu

SEQ ID NO: 118371 - RNA, 21 nt, Artificial Sequence
  Synthetic
augaauaucauagucaacucu

SEQ ID NO: 118372 - RNA, 23 nt, Artificial Sequence
  Synthetic
agaugaauaucauagucaacucu

SEQ ID NO: 118373 - RNA, 24 nt, Artificial Sequence
  Synthetic
cagaugaauaucauagucaacucu

SEQ ID NO: 118374 - RNA, 18 nt, Artificial Sequence
  Synthetic
aguagacauaagaacucu

SEQ ID NO: 118375 - RNA, 19 nt, Artificial Sequence
  Synthetic
caguagacauaagaacucu

SEQ ID NO: 118376 - RNA, 20 nt, Artificial Sequence
  Synthetic
acaguagacauaagaacucu

SEQ ID NO: 118377 - RNA, 21 nt, Artificial Sequence
  Synthetic
uacaguagacauaagaacucu

SEQ ID NO: 118378 - RNA, 23 nt, Artificial Sequence
  Synthetic
aguacaguagacauaagaacucu

SEQ ID NO: 118379 - RNA, 24 nt, Artificial Sequence
  Synthetic
uaguacaguagacauaagaacucu

SEQ ID NO: 118380 - RNA, 18 nt, Artificial Sequence
  Synthetic
aaaacucuuaagaacucu

SEQ ID NO: 118381 - RNA, 20 nt, Artificial Sequence
  Synthetic
agaaaacucuuaagaacucu

SEQ ID NO: 118382 - RNA, 21 nt, Artificial Sequence
  Synthetic
uagaaaacucuuaagaacucu

SEQ ID NO: 118383 - RNA, 22 nt, Artificial Sequence
  Synthetic
uuagaaaacucuuaagaacucu

SEQ ID NO: 118384 - RNA, 23 nt, Artificial Sequence
  Synthetic
uuuagaaaacucuuaagaacucu

SEQ ID NO: 118385 - RNA, 24 nt, Artificial Sequence
  Synthetic
auuuagaaaacucuuaagaacucu

SEQ ID NO: 118386 - RNA, 18 nt, Artificial Sequence
  Synthetic
uuugacaacagacacucu

SEQ ID NO: 118387 - RNA, 19 nt, Artificial Sequence
  Synthetic
auuugacaacagacacucu

SEQ ID NO: 118388 - RNA, 20 nt, Artificial Sequence
  Synthetic
cauuugacaacagacacucu

SEQ ID NO: 118389 - RNA, 21 nt, Artificial Sequence
  Synthetic
ucauuugacaacagacacucu

SEQ ID NO: 118390 - RNA, 22 nt, Artificial Sequence
  Synthetic
aucauuugacaacagacacucu

SEQ ID NO: 118391 - RNA, 23 nt, Artificial Sequence
  Synthetic
aaucauuugacaacagacacucu

SEQ ID NO: 118392 - RNA, 22 nt, Artificial Sequence
  Synthetic
aguucuuuuuuuuucccacucu

SEQ ID NO: 118393 - RNA, 23 nt, Artificial Sequence
  Synthetic
aaguucuuuuuuuuucccacucu

SEQ ID NO: 118394 - RNA, 18 nt, Artificial Sequence
  Synthetic
uaaauuguuccagacucu

SEQ ID NO: 118395 - RNA, 19 nt, Artificial Sequence
  Synthetic
uuaaauuguuccagacucu

SEQ ID NO: 118396 - RNA, 20 nt, Artificial Sequence
  Synthetic
auuaaauuguuccagacucu

SEQ ID NO: 118397 - RNA, 21 nt, Artificial Sequence
  Synthetic
aauuaaauuguuccagacucu

SEQ ID NO: 118398 - RNA, 22 nt, Artificial Sequence
  Synthetic
aaauuaaauuguuccagacucu

SEQ ID NO: 118399 - RNA, 23 nt, Artificial Sequence
  Synthetic
uaaauuaaauuguuccagacucu

SEQ ID NO: 118400 - RNA, 24 nt, Artificial Sequence
  Synthetic
auaaauuaaauuguuccagacucu

SEQ ID NO: 118401 - RNA, 22 nt, Artificial Sequence
  Synthetic
uguacacauacauauauacucu

SEQ ID NO: 118402 - RNA, 23 nt, Artificial Sequence
  Synthetic
cuguacacauacauauauacucu

SEQ ID NO: 118403 - RNA, 21 nt, Artificial Sequence
  Synthetic
ccaaauaauuuauccuacucu

SEQ ID NO: 118404 - RNA, 22 nt, Artificial Sequence
  Synthetic
uccaaauaauuuauccuacucu

SEQ ID NO: 118405 - RNA, 23 nt, Artificial Sequence
  Synthetic
uuccaaauaauuuauccuacucu

SEQ ID NO: 118406 - RNA, 24 nt, Artificial Sequence
  Synthetic
auuccaaauaauuuauccuacucu

SEQ ID NO: 118407 - RNA, 19 nt, Artificial Sequence
  Synthetic
ugaagaaaauuaguacucu

SEQ ID NO: 118408 - RNA, 22 nt, Artificial Sequence
  Synthetic
uggugaagaaaauuaguacucu

SEQ ID NO: 118409 - RNA, 24 nt, Artificial Sequence
  Synthetic
uguggugaagaaaauuaguacucu

SEQ ID NO: 118410 - RNA, 18 nt, Artificial Sequence
  Synthetic
augguuaauguguacucu

SEQ ID NO: 118411 - RNA, 19 nt, Artificial Sequence
  Synthetic
aaugguuaauguguacucu

SEQ ID NO: 118412 - RNA, 20 nt, Artificial Sequence
  Synthetic
uaaugguuaauguguacucu

SEQ ID NO: 118413 - RNA, 21 nt, Artificial Sequence
  Synthetic
uuaaugguuaauguguacucu

SEQ ID NO: 118414 - RNA, 22 nt, Artificial Sequence
  Synthetic
cuuaaugguuaauguguacucu

SEQ ID NO: 118415 - RNA, 24 nt, Artificial Sequence
  Synthetic
ugcuuaaugguuaauguguacucu

SEQ ID NO: 118416 - RNA, 18 nt, Artificial Sequence
  Synthetic
cuucuggcuaguuacucu

SEQ ID NO: 118417 - RNA, 19 nt, Artificial Sequence
  Synthetic
ucuucuggcuaguuacucu

SEQ ID NO: 118418 - RNA, 20 nt, Artificial Sequence
  Synthetic
uucuucuggcuaguuacucu

SEQ ID NO: 118419 - RNA, 21 nt, Artificial Sequence
  Synthetic
auucuucuggcuaguuacucu

SEQ ID NO: 118420 - RNA, 22 nt, Artificial Sequence
  Synthetic
aauucuucuggcuaguuacucu

SEQ ID NO: 118421 - RNA, 23 nt, Artificial Sequence
  Synthetic
caauucuucuggcuaguuacucu

SEQ ID NO: 118422 - RNA, 24 nt, Artificial Sequence
  Synthetic
ccaauucuucuggcuaguuacucu

SEQ ID NO: 118423 - RNA, 18 nt, Artificial Sequence
  Synthetic
agucguacucuuuacucu

SEQ ID NO: 118424 - RNA, 19 nt, Artificial Sequence
  Synthetic
aagucguacucuuuacucu

SEQ ID NO: 118425 - RNA, 20 nt, Artificial Sequence
  Synthetic
aaagucguacucuuuacucu

SEQ ID NO: 118426 - RNA, 21 nt, Artificial Sequence
  Synthetic
aaaagucguacucuuuacucu

SEQ ID NO: 118427 - RNA, 22 nt, Artificial Sequence
  Synthetic
uaaaagucguacucuuuacucu

SEQ ID NO: 118428 - RNA, 23 nt, Artificial Sequence
  Synthetic
uuaaaagucguacucuuuacucu

SEQ ID NO: 118429 - RNA, 24 nt, Artificial Sequence
  Synthetic
uuuaaaagucguacucuuuacucu

SEQ ID NO: 118430 - RNA, 18 nt, Artificial Sequence
  Synthetic
cuagaugugguuuacucu

SEQ ID NO: 118431 - RNA, 19 nt, Artificial Sequence
  Synthetic
ccuagaugugguuuacucu

SEQ ID NO: 118432 - RNA, 20 nt, Artificial Sequence
  Synthetic
accuagaugugguuuacucu

SEQ ID NO: 118433 - RNA, 21 nt, Artificial Sequence
  Synthetic
aaccuagaugugguuuacucu

SEQ ID NO: 118434 - RNA, 22 nt, Artificial Sequence
  Synthetic
aaaccuagaugugguuuacucu

SEQ ID NO: 118435 - RNA, 21 nt, Artificial Sequence
  Synthetic
uagucagaugacuuaaccucu

SEQ ID NO: 118436 - RNA, 22 nt, Artificial Sequence
  Synthetic
auagucagaugacuuaaccucu

SEQ ID NO: 118437 - RNA, 23 nt, Artificial Sequence
  Synthetic
uauagucagaugacuuaaccucu

SEQ ID NO: 118438 - RNA, 24 nt, Artificial Sequence
  Synthetic
cuauagucagaugacuuaaccucu

SEQ ID NO: 118439 - RNA, 18 nt, Artificial Sequence
  Synthetic
uaagauuauuccaccucu

SEQ ID NO: 118440 - RNA, 19 nt, Artificial Sequence
  Synthetic
uuaagauuauuccaccucu

SEQ ID NO: 118441 - RNA, 21 nt, Artificial Sequence
  Synthetic
aguuaagauuauuccaccucu

SEQ ID NO: 118442 - RNA, 22 nt, Artificial Sequence
  Synthetic
aaguuaagauuauuccaccucu

SEQ ID NO: 118443 - RNA, 23 nt, Artificial Sequence
  Synthetic
aaaguuaagauuauuccaccucu

SEQ ID NO: 118444 - RNA, 18 nt, Artificial Sequence
  Synthetic
ugguccaggaauaccucu

SEQ ID NO: 118445 - RNA, 19 nt, Artificial Sequence
  Synthetic
cugguccaggaauaccucu

SEQ ID NO: 118446 - RNA, 21 nt, Artificial Sequence
  Synthetic
ugcugguccaggaauaccucu

SEQ ID NO: 118447 - RNA, 22 nt, Artificial Sequence
  Synthetic
cugcugguccaggaauaccucu

SEQ ID NO: 118448 - RNA, 23 nt, Artificial Sequence
  Synthetic
acugcugguccaggaauaccucu

SEQ ID NO: 118449 - RNA, 24 nt, Artificial Sequence
  Synthetic
uacugcugguccaggaauaccucu

SEQ ID NO: 118450 - RNA, 21 nt, Artificial Sequence
  Synthetic
ucaauaauaaaaucuaccucu

SEQ ID NO: 118451 - RNA, 22 nt, Artificial Sequence
  Synthetic
uucaauaauaaaaucuaccucu

SEQ ID NO: 118452 - RNA, 23 nt, Artificial Sequence
  Synthetic
auucaauaauaaaaucuaccucu

SEQ ID NO: 118453 - RNA, 24 nt, Artificial Sequence
  Synthetic
aauucaauaauaaaaucuaccucu

SEQ ID NO: 118454 - RNA, 18 nt, Artificial Sequence
  Synthetic
aguacacuauguaccucu

SEQ ID NO: 118455 - RNA, 19 nt, Artificial Sequence
  Synthetic
caguacacuauguaccucu

SEQ ID NO: 118456 - RNA, 20 nt, Artificial Sequence
  Synthetic
ccaguacacuauguaccucu

SEQ ID NO: 118457 - RNA, 21 nt, Artificial Sequence
  Synthetic
uccaguacacuauguaccucu

SEQ ID NO: 118458 - RNA, 22 nt, Artificial Sequence
  Synthetic
uuccaguacacuauguaccucu

SEQ ID NO: 118459 - RNA, 24 nt, Artificial Sequence
  Synthetic
uguuccaguacacuauguaccucu

SEQ ID NO: 118460 - RNA, 19 nt, Artificial Sequence
  Synthetic
cgagagacuguguaccucu

SEQ ID NO: 118461 - RNA, 20 nt, Artificial Sequence
  Synthetic
ucgagagacuguguaccucu

SEQ ID NO: 118462 - RNA, 21 nt, Artificial Sequence
  Synthetic
aucgagagacuguguaccucu

SEQ ID NO: 118463 - RNA, 22 nt, Artificial Sequence
  Synthetic
uaucgagagacuguguaccucu

SEQ ID NO: 118464 - RNA, 23 nt, Artificial Sequence
  Synthetic
cuaucgagagacuguguaccucu

SEQ ID NO: 118465 - RNA, 24 nt, Artificial Sequence
  Synthetic
ucuaucgagagacuguguaccucu

SEQ ID NO: 118466 - RNA, 18 nt, Artificial Sequence
  Synthetic
aggauugaaagccccucu

SEQ ID NO: 118467 - RNA, 19 nt, Artificial Sequence
  Synthetic
aaggauugaaagccccucu

SEQ ID NO: 118468 - RNA, 20 nt, Artificial Sequence
  Synthetic
caaggauugaaagccccucu

SEQ ID NO: 118469 - RNA, 24 nt, Artificial Sequence
  Synthetic
ugggcaaggauugaaagccccucu

SEQ ID NO: 118470 - RNA, 18 nt, Artificial Sequence
  Synthetic
uuauauuuaauuuccucu

SEQ ID NO: 118471 - RNA, 19 nt, Artificial Sequence
  Synthetic
auuauauuuaauuuccucu

SEQ ID NO: 118472 - RNA, 20 nt, Artificial Sequence
  Synthetic
cauuauauuuaauuuccucu

SEQ ID NO: 118473 - RNA, 21 nt, Artificial Sequence
  Synthetic
ucauuauauuuaauuuccucu

SEQ ID NO: 118474 - RNA, 22 nt, Artificial Sequence
  Synthetic
cucauuauauuuaauuuccucu

SEQ ID NO: 118475 - RNA, 23 nt, Artificial Sequence
  Synthetic
ucucauuauauuuaauuuccucu

SEQ ID NO: 118476 - RNA, 24 nt, Artificial Sequence
  Synthetic
cucucauuauauuuaauuuccucu

SEQ ID NO: 118477 - RNA, 18 nt, Artificial Sequence
  Synthetic
aaugauuugauuuccucu

SEQ ID NO: 118478 - RNA, 20 nt, Artificial Sequence
  Synthetic
cgaaugauuugauuuccucu

SEQ ID NO: 118479 - RNA, 21 nt, Artificial Sequence
  Synthetic
acgaaugauuugauuuccucu

SEQ ID NO: 118480 - RNA, 23 nt, Artificial Sequence
  Synthetic
agacgaaugauuugauuuccucu

SEQ ID NO: 118481 - RNA, 24 nt, Artificial Sequence
  Synthetic
uagacgaaugauuugauuuccucu

SEQ ID NO: 118482 - RNA, 18 nt, Artificial Sequence
  Synthetic
uagccuuguaauagcucu

SEQ ID NO: 118483 - RNA, 19 nt, Artificial Sequence
  Synthetic
auagccuuguaauagcucu

SEQ ID NO: 118484 - RNA, 20 nt, Artificial Sequence
  Synthetic
cauagccuuguaauagcucu

SEQ ID NO: 118485 - RNA, 21 nt, Artificial Sequence
  Synthetic
acauagccuuguaauagcucu

SEQ ID NO: 118486 - RNA, 22 nt, Artificial Sequence
  Synthetic
uacauagccuuguaauagcucu

SEQ ID NO: 118487 - RNA, 23 nt, Artificial Sequence
  Synthetic
uuacauagccuuguaauagcucu

SEQ ID NO: 118488 - RNA, 24 nt, Artificial Sequence
  Synthetic
uuuacauagccuuguaauagcucu

SEQ ID NO: 118489 - RNA, 21 nt, Artificial Sequence
  Synthetic
agcccccaguggcauagcucu

SEQ ID NO: 118490 - RNA, 22 nt, Artificial Sequence
  Synthetic
cagcccccaguggcauagcucu

SEQ ID NO: 118491 - RNA, 23 nt, Artificial Sequence
  Synthetic
ucagcccccaguggcauagcucu

SEQ ID NO: 118492 - RNA, 24 nt, Artificial Sequence
  Synthetic
uucagcccccaguggcauagcucu

SEQ ID NO: 118493 - RNA, 18 nt, Artificial Sequence
  Synthetic
acaaguuacguuagcucu

SEQ ID NO: 118494 - RNA, 20 nt, Artificial Sequence
  Synthetic
agacaaguuacguuagcucu

SEQ ID NO: 118495 - RNA, 21 nt, Artificial Sequence
  Synthetic
uagacaaguuacguuagcucu

SEQ ID NO: 118496 - RNA, 22 nt, Artificial Sequence
  Synthetic
cuagacaaguuacguuagcucu

SEQ ID NO: 118497 - RNA, 23 nt, Artificial Sequence
  Synthetic
ccuagacaaguuacguuagcucu

SEQ ID NO: 118498 - RNA, 24 nt, Artificial Sequence
  Synthetic
cccuagacaaguuacguuagcucu

SEQ ID NO: 118499 - RNA, 18 nt, Artificial Sequence
  Synthetic
uugauaauuucaugcucu

SEQ ID NO: 118500 - RNA, 19 nt, Artificial Sequence
  Synthetic
cuugauaauuucaugcucu

SEQ ID NO: 118501 - RNA, 20 nt, Artificial Sequence
  Synthetic
ucuugauaauuucaugcucu

SEQ ID NO: 118502 - RNA, 21 nt, Artificial Sequence
  Synthetic
cucuugauaauuucaugcucu

SEQ ID NO: 118503 - RNA, 22 nt, Artificial Sequence
  Synthetic
ucucuugauaauuucaugcucu

SEQ ID NO: 118504 - RNA, 23 nt, Artificial Sequence
  Synthetic
cucucuugauaauuucaugcucu

SEQ ID NO: 118505 - RNA, 24 nt, Artificial Sequence
  Synthetic
acucucuugauaauuucaugcucu

SEQ ID NO: 118506 - RNA, 18 nt, Artificial Sequence
  Synthetic
ugcuguuggggaugcucu

SEQ ID NO: 118507 - RNA, 19 nt, Artificial Sequence
  Synthetic
augcuguuggggaugcucu

SEQ ID NO: 118508 - RNA, 20 nt, Artificial Sequence
  Synthetic
aaugcuguuggggaugcucu

SEQ ID NO: 118509 - RNA, 21 nt, Artificial Sequence
  Synthetic
caaugcuguuggggaugcucu

SEQ ID NO: 118510 - RNA, 22 nt, Artificial Sequence
  Synthetic
ucaaugcuguuggggaugcucu

SEQ ID NO: 118511 - RNA, 23 nt, Artificial Sequence
  Synthetic
cucaaugcuguuggggaugcucu

SEQ ID NO: 118512 - RNA, 18 nt, Artificial Sequence
  Synthetic
ccaacuccauugugcucu

SEQ ID NO: 118513 - RNA, 19 nt, Artificial Sequence
  Synthetic
uccaacuccauugugcucu

SEQ ID NO: 118514 - RNA, 20 nt, Artificial Sequence
  Synthetic
cuccaacuccauugugcucu

SEQ ID NO: 118515 - RNA, 21 nt, Artificial Sequence
  Synthetic
acuccaacuccauugugcucu

SEQ ID NO: 118516 - RNA, 22 nt, Artificial Sequence
  Synthetic
cacuccaacuccauugugcucu

SEQ ID NO: 118517 - RNA, 23 nt, Artificial Sequence
  Synthetic
ucacuccaacuccauugugcucu

SEQ ID NO: 118518 - RNA, 18 nt, Artificial Sequence
  Synthetic
uuagaugaaaauugcucu

SEQ ID NO: 118519 - RNA, 19 nt, Artificial Sequence
  Synthetic
uuuagaugaaaauugcucu

SEQ ID NO: 118520 - RNA, 20 nt, Artificial Sequence
  Synthetic
uuuuagaugaaaauugcucu

SEQ ID NO: 118521 - RNA, 21 nt, Artificial Sequence
  Synthetic
cuuuuagaugaaaauugcucu

SEQ ID NO: 118522 - RNA, 22 nt, Artificial Sequence
  Synthetic
acuuuuagaugaaaauugcucu

SEQ ID NO: 118523 - RNA, 23 nt, Artificial Sequence
  Synthetic
cacuuuuagaugaaaauugcucu

SEQ ID NO: 118524 - RNA, 18 nt, Artificial Sequence
  Synthetic
uagaccucucuuugcucu

SEQ ID NO: 118525 - RNA, 19 nt, Artificial Sequence
  Synthetic
auagaccucucuuugcucu

SEQ ID NO: 118526 - RNA, 20 nt, Artificial Sequence
  Synthetic
aauagaccucucuuugcucu

SEQ ID NO: 118527 - RNA, 21 nt, Artificial Sequence
  Synthetic
caauagaccucucuuugcucu

SEQ ID NO: 118528 - RNA, 22 nt, Artificial Sequence
  Synthetic
acaauagaccucucuuugcucu

SEQ ID NO: 118529 - RNA, 23 nt, Artificial Sequence
  Synthetic
cacaauagaccucucuuugcucu

SEQ ID NO: 118530 - RNA, 24 nt, Artificial Sequence
  Synthetic
ccacaauagaccucucuuugcucu

SEQ ID NO: 118531 - RNA, 18 nt, Artificial Sequence
  Synthetic
aguaagugcaacaucucu

SEQ ID NO: 118532 - RNA, 20 nt, Artificial Sequence
  Synthetic
ugaguaagugcaacaucucu

SEQ ID NO: 118533 - RNA, 22 nt, Artificial Sequence
  Synthetic
agugaguaagugcaacaucucu

SEQ ID NO: 118534 - RNA, 23 nt, Artificial Sequence
  Synthetic
aagugaguaagugcaacaucucu

SEQ ID NO: 118535 - RNA, 24 nt, Artificial Sequence
  Synthetic
aaagugaguaagugcaacaucucu

SEQ ID NO: 118536 - RNA, 18 nt, Artificial Sequence
  Synthetic
auucuacucuacaucucu

SEQ ID NO: 118537 - RNA, 20 nt, Artificial Sequence
  Synthetic
ugauucuacucuacaucucu

SEQ ID NO: 118538 - RNA, 21 nt, Artificial Sequence
  Synthetic
caaauaaaaugaaauaucucu

SEQ ID NO: 118539 - RNA, 23 nt, Artificial Sequence
  Synthetic
agcaaauaaaaugaaauaucucu

SEQ ID NO: 118540 - RNA, 24 nt, Artificial Sequence
  Synthetic
aagcaaauaaaaugaaauaucucu

SEQ ID NO: 118541 - RNA, 18 nt, Artificial Sequence
  Synthetic
uacacuguguuuaucucu

SEQ ID NO: 118542 - RNA, 19 nt, Artificial Sequence
  Synthetic
cuacacuguguuuaucucu

SEQ ID NO: 118543 - RNA, 20 nt, Artificial Sequence
  Synthetic
acuacacuguguuuaucucu

SEQ ID NO: 118544 - RNA, 21 nt, Artificial Sequence
  Synthetic
aacuacacuguguuuaucucu

SEQ ID NO: 118545 - RNA, 22 nt, Artificial Sequence
  Synthetic
uaacuacacuguguuuaucucu

SEQ ID NO: 118546 - RNA, 23 nt, Artificial Sequence
  Synthetic
uuaacuacacuguguuuaucucu

SEQ ID NO: 118547 - RNA, 24 nt, Artificial Sequence
  Synthetic
uuuaacuacacuguguuuaucucu

SEQ ID NO: 118548 - RNA, 18 nt, Artificial Sequence
  Synthetic
uaaacugacauacucucu

SEQ ID NO: 118549 - RNA, 19 nt, Artificial Sequence
  Synthetic
uuaaacugacauacucucu

SEQ ID NO: 118550 - RNA, 20 nt, Artificial Sequence
  Synthetic
uuuaaacugacauacucucu

SEQ ID NO: 118551 - RNA, 22 nt, Artificial Sequence
  Synthetic
aguuuaaacugacauacucucu

SEQ ID NO: 118552 - RNA, 23 nt, Artificial Sequence
  Synthetic
aaguuuaaacugacauacucucu

SEQ ID NO: 118553 - RNA, 24 nt, Artificial Sequence
  Synthetic
uaaguuuaaacugacauacucucu

SEQ ID NO: 118554 - RNA, 18 nt, Artificial Sequence
  Synthetic
uguguauguauacucucu

SEQ ID NO: 118555 - RNA, 20 nt, Artificial Sequence
  Synthetic
uguguguauguauacucucu

SEQ ID NO: 118556 - RNA, 22 nt, Artificial Sequence
  Synthetic
uguguguguauguauacucucu

SEQ ID NO: 118557 - RNA, 23 nt, Artificial Sequence
  Synthetic
auguguguguauguauacucucu

SEQ ID NO: 118558 - RNA, 24 nt, Artificial Sequence
  Synthetic
uauguguguguauguauacucucu

SEQ ID NO: 118559 - RNA, 18 nt, Artificial Sequence
  Synthetic
aaguccuaaccucucucu

SEQ ID NO: 118560 - RNA, 19 nt, Artificial Sequence
  Synthetic
aaaguccuaaccucucucu

SEQ ID NO: 118561 - RNA, 20 nt, Artificial Sequence
  Synthetic
caaaguccuaaccucucucu

SEQ ID NO: 118562 - RNA, 21 nt, Artificial Sequence
  Synthetic
acaaaguccuaaccucucucu

SEQ ID NO: 118563 - RNA, 23 nt, Artificial Sequence
  Synthetic
agacaaaguccuaaccucucucu

SEQ ID NO: 118564 - RNA, 24 nt, Artificial Sequence
  Synthetic
aagacaaaguccuaaccucucucu

SEQ ID NO: 118565 - RNA, 22 nt, Artificial Sequence
  Synthetic
ugcucgagggcuugcucucucu

SEQ ID NO: 118566 - RNA, 23 nt, Artificial Sequence
  Synthetic
cugcucgagggcuugcucucucu

SEQ ID NO: 118567 - RNA, 24 nt, Artificial Sequence
  Synthetic
ucugcucgagggcuugcucucucu

SEQ ID NO: 118568 - RNA, 22 nt, Artificial Sequence
  Synthetic
aguagucuuuucauaugucucu

SEQ ID NO: 118569 - RNA, 23 nt, Artificial Sequence
  Synthetic
caguagucuuuucauaugucucu

SEQ ID NO: 118570 - RNA, 24 nt, Artificial Sequence
  Synthetic
acaguagucuuuucauaugucucu

SEQ ID NO: 118571 - RNA, 18 nt, Artificial Sequence
  Synthetic
ucuggauuuguugucucu

SEQ ID NO: 118572 - RNA, 19 nt, Artificial Sequence
  Synthetic
aucuggauuuguugucucu

SEQ ID NO: 118573 - RNA, 20 nt, Artificial Sequence
  Synthetic
aaucuggauuuguugucucu

SEQ ID NO: 118574 - RNA, 21 nt, Artificial Sequence
  Synthetic
aaaucuggauuuguugucucu

SEQ ID NO: 118575 - RNA, 22 nt, Artificial Sequence
  Synthetic
caaaucuggauuuguugucucu

SEQ ID NO: 118576 - RNA, 23 nt, Artificial Sequence
  Synthetic
ucaaaucuggauuuguugucucu

SEQ ID NO: 118577 - RNA, 24 nt, Artificial Sequence
  Synthetic
uucaaaucuggauuuguugucucu

SEQ ID NO: 118578 - RNA, 19 nt, Artificial Sequence
  Synthetic
uguagaagucccauucucu

SEQ ID NO: 118579 - RNA, 20 nt, Artificial Sequence
  Synthetic
uuguagaagucccauucucu

SEQ ID NO: 118580 - RNA, 21 nt, Artificial Sequence
  Synthetic
uuuguagaagucccauucucu

SEQ ID NO: 118581 - RNA, 22 nt, Artificial Sequence
  Synthetic
uuuuguagaagucccauucucu

SEQ ID NO: 118582 - RNA, 23 nt, Artificial Sequence
  Synthetic
uuuuuguagaagucccauucucu

SEQ ID NO: 118583 - RNA, 18 nt, Artificial Sequence
  Synthetic
aggggaaaugacuucucu

SEQ ID NO: 118584 - RNA, 19 nt, Artificial Sequence
  Synthetic
aaggggaaaugacuucucu

SEQ ID NO: 118585 - RNA, 20 nt, Artificial Sequence
  Synthetic
caaggggaaaugacuucucu

SEQ ID NO: 118586 - RNA, 21 nt, Artificial Sequence
  Synthetic
ccaaggggaaaugacuucucu

SEQ ID NO: 118587 - RNA, 22 nt, Artificial Sequence
  Synthetic
accaaggggaaaugacuucucu

SEQ ID NO: 118588 - RNA, 23 nt, Artificial Sequence
  Synthetic
aaccaaggggaaaugacuucucu

SEQ ID NO: 118589 - RNA, 24 nt, Artificial Sequence
  Synthetic
aaaccaaggggaaaugacuucucu

SEQ ID NO: 118590 - RNA, 18 nt, Artificial Sequence
  Synthetic
augcacugcaucuucucu

SEQ ID NO: 118591 - RNA, 19 nt, Artificial Sequence
  Synthetic
aaugcacugcaucuucucu

SEQ ID NO: 118592 - RNA, 21 nt, Artificial Sequence
  Synthetic
agaaugcacugcaucuucucu

SEQ ID NO: 118593 - RNA, 22 nt, Artificial Sequence
  Synthetic
uagaaugcacugcaucuucucu

SEQ ID NO: 118594 - RNA, 23 nt, Artificial Sequence
  Synthetic
uuagaaugcacugcaucuucucu

SEQ ID NO: 118595 - RNA, 24 nt, Artificial Sequence
  Synthetic
uuuagaaugcacugcaucuucucu

SEQ ID NO: 118596 - RNA, 18 nt, Artificial Sequence
  Synthetic
acacaaaagaucuucucu

SEQ ID NO: 118597 - RNA, 19 nt, Artificial Sequence
  Synthetic
aacacaaaagaucuucucu

SEQ ID NO: 118598 - RNA, 21 nt, Artificial Sequence
  Synthetic
ugaacacaaaagaucuucucu

SEQ ID NO: 118599 - RNA, 23 nt, Artificial Sequence
  Synthetic
ugugaacacaaaagaucuucucu

SEQ ID NO: 118600 - RNA, 24 nt, Artificial Sequence
  Synthetic
cugugaacacaaaagaucuucucu

SEQ ID NO: 118601 - RNA, 18 nt, Artificial Sequence
  Synthetic
acuuaucaggucuucucu

SEQ ID NO: 118602 - RNA, 19 nt, Artificial Sequence
  Synthetic
aacuuaucaggucuucucu

SEQ ID NO: 118603 - RNA, 20 nt, Artificial Sequence
  Synthetic
caacuuaucaggucuucucu

SEQ ID NO: 118604 - RNA, 21 nt, Artificial Sequence
  Synthetic
acaacuuaucaggucuucucu

SEQ ID NO: 118605 - RNA, 23 nt, Artificial Sequence
  Synthetic
ugacaacuuaucaggucuucucu

SEQ ID NO: 118606 - RNA, 24 nt, Artificial Sequence
  Synthetic
cugacaacuuaucaggucuucucu

SEQ ID NO: 118607 - RNA, 18 nt, Artificial Sequence
  Synthetic
auacuaaaaaaguucucu

SEQ ID NO: 118608 - RNA, 19 nt, Artificial Sequence
  Synthetic
uauacuaaaaaaguucucu

SEQ ID NO: 118609 - RNA, 20 nt, Artificial Sequence
  Synthetic
auauacuaaaaaaguucucu

SEQ ID NO: 118610 - RNA, 22 nt, Artificial Sequence
  Synthetic
ugauauacuaaaaaaguucucu

SEQ ID NO: 118611 - RNA, 23 nt, Artificial Sequence
  Synthetic
augauauacuaaaaaaguucucu

SEQ ID NO: 118612 - RNA, 24 nt, Artificial Sequence
  Synthetic
aaugauauacuaaaaaaguucucu

SEQ ID NO: 118613 - RNA, 21 nt, Artificial Sequence
  Synthetic
agauacugucaaauguucucu

SEQ ID NO: 118614 - RNA, 23 nt, Artificial Sequence
  Synthetic
ugagauacugucaaauguucucu

SEQ ID NO: 118615 - RNA, 24 nt, Artificial Sequence
  Synthetic
uugagauacugucaaauguucucu

SEQ ID NO: 118616 - RNA, 18 nt, Artificial Sequence
  Synthetic
cuaucacuaaauuucucu

SEQ ID NO: 118617 - RNA, 20 nt, Artificial Sequence
  Synthetic
agcuaucacuaaauuucucu

SEQ ID NO: 118618 - RNA, 21 nt, Artificial Sequence
  Synthetic
aagcuaucacuaaauuucucu

SEQ ID NO: 118619 - RNA, 22 nt, Artificial Sequence
  Synthetic
uaagcuaucacuaaauuucucu

SEQ ID NO: 118620 - RNA, 23 nt, Artificial Sequence
  Synthetic
auaagcuaucacuaaauuucucu

SEQ ID NO: 118621 - RNA, 24 nt, Artificial Sequence
  Synthetic
uauaagcuaucacuaaauuucucu

SEQ ID NO: 118622 - RNA, 18 nt, Artificial Sequence
  Synthetic
cggcuucaacauuucucu

SEQ ID NO: 118623 - RNA, 19 nt, Artificial Sequence
  Synthetic
acggcuucaacauuucucu

SEQ ID NO: 118624 - RNA, 20 nt, Artificial Sequence
  Synthetic
uacggcuucaacauuucucu

SEQ ID NO: 118625 - RNA, 21 nt, Artificial Sequence
  Synthetic
uuacggcuucaacauuucucu

SEQ ID NO: 118626 - RNA, 22 nt, Artificial Sequence
  Synthetic
uuuacggcuucaacauuucucu

SEQ ID NO: 118627 - RNA, 23 nt, Artificial Sequence
  Synthetic
uuuuacggcuucaacauuucucu

SEQ ID NO: 118628 - RNA, 19 nt, Artificial Sequence
  Synthetic
aggaaaauagcauuucucu

SEQ ID NO: 118629 - RNA, 21 nt, Artificial Sequence
  Synthetic
agaggaaaauagcauuucucu

SEQ ID NO: 118630 - RNA, 22 nt, Artificial Sequence
  Synthetic
aagaggaaaauagcauuucucu

SEQ ID NO: 118631 - RNA, 23 nt, Artificial Sequence
  Synthetic
caagaggaaaauagcauuucucu

SEQ ID NO: 118632 - RNA, 24 nt, Artificial Sequence
  Synthetic
ucaagaggaaaauagcauuucucu

SEQ ID NO: 118633 - RNA, 18 nt, Artificial Sequence
  Synthetic
cgauuagggacuuucucu

SEQ ID NO: 118634 - RNA, 19 nt, Artificial Sequence
  Synthetic
acgauuagggacuuucucu

SEQ ID NO: 118635 - RNA, 21 nt, Artificial Sequence
  Synthetic
agacgauuagggacuuucucu

SEQ ID NO: 118636 - RNA, 23 nt, Artificial Sequence
  Synthetic
agagacgauuagggacuuucucu

SEQ ID NO: 118637 - RNA, 24 nt, Artificial Sequence
  Synthetic
cagagacgauuagggacuuucucu

SEQ ID NO: 118638 - RNA, 18 nt, Artificial Sequence
  Synthetic
uuuauucuugcuuucucu

SEQ ID NO: 118639 - RNA, 19 nt, Artificial Sequence
  Synthetic
auuuauucuugcuuucucu

SEQ ID NO: 118640 - RNA, 20 nt, Artificial Sequence
  Synthetic
aauuuauucuugcuuucucu

SEQ ID NO: 118641 - RNA, 21 nt, Artificial Sequence
  Synthetic
uaauuuauucuugcuuucucu

SEQ ID NO: 118642 - RNA, 22 nt, Artificial Sequence
  Synthetic
cuaauuuauucuugcuuucucu

SEQ ID NO: 118643 - RNA, 23 nt, Artificial Sequence
  Synthetic
acuaauuuauucuugcuuucucu

SEQ ID NO: 118644 - RNA, 24 nt, Artificial Sequence
  Synthetic
aacuaauuuauucuugcuuucucu

SEQ ID NO: 118645 - RNA, 18 nt, Artificial Sequence
  Synthetic
aaaaucagaauaaagucu

SEQ ID NO: 118646 - RNA, 19 nt, Artificial Sequence
  Synthetic
aaaaaucagaauaaagucu

SEQ ID NO: 118647 - RNA, 20 nt, Artificial Sequence
  Synthetic
uaaaaaucagaauaaagucu

SEQ ID NO: 118648 - RNA, 21 nt, Artificial Sequence
  Synthetic
uuaaaaaucagaauaaagucu

SEQ ID NO: 118649 - RNA, 22 nt, Artificial Sequence
  Synthetic
uuuaaaaaucagaauaaagucu

SEQ ID NO: 118650 - RNA, 23 nt, Artificial Sequence
  Synthetic
uuuuaaaaaucagaauaaagucu

SEQ ID NO: 118651 - RNA, 24 nt, Artificial Sequence
  Synthetic
auuuuaaaaaucagaauaaagucu

SEQ ID NO: 118652 - RNA, 18 nt, Artificial Sequence
  Synthetic
cuucagcgaaagaagucu

SEQ ID NO: 118653 - RNA, 19 nt, Artificial Sequence
  Synthetic
acuucagcgaaagaagucu

SEQ ID NO: 118654 - RNA, 20 nt, Artificial Sequence
  Synthetic
cacuucagcgaaagaagucu

SEQ ID NO: 118655 - RNA, 21 nt, Artificial Sequence
  Synthetic
acacuucagcgaaagaagucu

SEQ ID NO: 118656 - RNA, 22 nt, Artificial Sequence
  Synthetic
cacacuucagcgaaagaagucu

SEQ ID NO: 118657 - RNA, 23 nt, Artificial Sequence
  Synthetic
ccacacuucagcgaaagaagucu

SEQ ID NO: 118658 - RNA, 24 nt, Artificial Sequence
  Synthetic
uccacacuucagcgaaagaagucu

SEQ ID NO: 118659 - RNA, 18 nt, Artificial Sequence
  Synthetic
aauuucaaagcacagucu

SEQ ID NO: 118660 - RNA, 19 nt, Artificial Sequence
  Synthetic
aaauuucaaagcacagucu

SEQ ID NO: 118661 - RNA, 20 nt, Artificial Sequence
  Synthetic
uaaauuucaaagcacagucu

SEQ ID NO: 118662 - RNA, 21 nt, Artificial Sequence
  Synthetic
uuaaauuucaaagcacagucu

SEQ ID NO: 118663 - RNA, 22 nt, Artificial Sequence
  Synthetic
uuuaaauuucaaagcacagucu

SEQ ID NO: 118664 - RNA, 23 nt, Artificial Sequence
  Synthetic
auuuaaauuucaaagcacagucu

SEQ ID NO: 118665 - RNA, 24 nt, Artificial Sequence
  Synthetic
uauuuaaauuucaaagcacagucu

SEQ ID NO: 118666 - RNA, 18 nt, Artificial Sequence
  Synthetic
aauauuuaguuagagucu

SEQ ID NO: 118667 - RNA, 19 nt, Artificial Sequence
  Synthetic
aaauauuuaguuagagucu

SEQ ID NO: 118668 - RNA, 20 nt, Artificial Sequence
  Synthetic
aaaauauuuaguuagagucu

SEQ ID NO: 118669 - RNA, 22 nt, Artificial Sequence
  Synthetic
agaaaauauuuaguuagagucu

SEQ ID NO: 118670 - RNA, 24 nt, Artificial Sequence
  Synthetic
ugagaaaauauuuaguuagagucu

SEQ ID NO: 118671 - RNA, 18 nt, Artificial Sequence
  Synthetic
cuuacuuucuaggagucu

SEQ ID NO: 118672 - RNA, 19 nt, Artificial Sequence
  Synthetic
ucuuacuuucuaggagucu

SEQ ID NO: 118673 - RNA, 20 nt, Artificial Sequence
  Synthetic
uucuuacuuucuaggagucu

SEQ ID NO: 118674 - RNA, 21 nt, Artificial Sequence
  Synthetic
uuucuuacuuucuaggagucu

SEQ ID NO: 118675 - RNA, 22 nt, Artificial Sequence
  Synthetic
uuuucuuacuuucuaggagucu

SEQ ID NO: 118676 - RNA, 24 nt, Artificial Sequence
  Synthetic
aguuuucuuacuuucuaggagucu

SEQ ID NO: 118677 - RNA, 18 nt, Artificial Sequence
  Synthetic
ugaaugaauaaugagucu

SEQ ID NO: 118678 - RNA, 19 nt, Artificial Sequence
  Synthetic
uugaaugaauaaugagucu

SEQ ID NO: 118679 - RNA, 21 nt, Artificial Sequence
  Synthetic
uguugaaugaauaaugagucu

SEQ ID NO: 118680 - RNA, 22 nt, Artificial Sequence
  Synthetic
uuguugaaugaauaaugagucu

SEQ ID NO: 118681 - RNA, 23 nt, Artificial Sequence
  Synthetic
uuuguugaaugaauaaugagucu

SEQ ID NO: 118682 - RNA, 24 nt, Artificial Sequence
  Synthetic
cuuuguugaaugaauaaugagucu

SEQ ID NO: 118683 - RNA, 19 nt, Artificial Sequence
  Synthetic
ugcaacuccuugugagucu

SEQ ID NO: 118684 - RNA, 20 nt, Artificial Sequence
  Synthetic
uugcaacuccuugugagucu

SEQ ID NO: 118685 - RNA, 21 nt, Artificial Sequence
  Synthetic
uuugcaacuccuugugagucu

SEQ ID NO: 118686 - RNA, 22 nt, Artificial Sequence
  Synthetic
uuuugcaacuccuugugagucu

SEQ ID NO: 118687 - RNA, 23 nt, Artificial Sequence
  Synthetic
uuuuugcaacuccuugugagucu

SEQ ID NO: 118688 - RNA, 19 nt, Artificial Sequence
  Synthetic
ugauguauaaaaauagucu

SEQ ID NO: 118689 - RNA, 20 nt, Artificial Sequence
  Synthetic
uugauguauaaaaauagucu

SEQ ID NO: 118690 - RNA, 18 nt, Artificial Sequence
  Synthetic
caucuuuacaaauagucu

SEQ ID NO: 118691 - RNA, 19 nt, Artificial Sequence
  Synthetic
ucaucuuuacaaauagucu

SEQ ID NO: 118692 - RNA, 21 nt, Artificial Sequence
  Synthetic
cgucaucuuuacaaauagucu

SEQ ID NO: 118693 - RNA, 22 nt, Artificial Sequence
  Synthetic
ucgucaucuuuacaaauagucu

SEQ ID NO: 118694 - RNA, 23 nt, Artificial Sequence
  Synthetic
aucgucaucuuuacaaauagucu

SEQ ID NO: 118695 - RNA, 24 nt, Artificial Sequence
  Synthetic
aaucgucaucuuuacaaauagucu

SEQ ID NO: 118696 - RNA, 19 nt, Artificial Sequence
  Synthetic
aggaaacucccucuagucu

SEQ ID NO: 118697 - RNA, 20 nt, Artificial Sequence
  Synthetic
aaggaaacucccucuagucu

SEQ ID NO: 118698 - RNA, 23 nt, Artificial Sequence
  Synthetic
aggaaggaaacucccucuagucu

SEQ ID NO: 118699 - RNA, 24 nt, Artificial Sequence
  Synthetic
aaggaaggaaacucccucuagucu

SEQ ID NO: 118700 - RNA, 19 nt, Artificial Sequence
  Synthetic
cgacgauaaauccacgucu

SEQ ID NO: 118701 - RNA, 20 nt, Artificial Sequence
  Synthetic
ucgacgauaaauccacgucu

SEQ ID NO: 118702 - RNA, 21 nt, Artificial Sequence
  Synthetic
cucgacgauaaauccacgucu

SEQ ID NO: 118703 - RNA, 22 nt, Artificial Sequence
  Synthetic
acucgacgauaaauccacgucu

SEQ ID NO: 118704 - RNA, 23 nt, Artificial Sequence
  Synthetic
cacucgacgauaaauccacgucu

SEQ ID NO: 118705 - RNA, 24 nt, Artificial Sequence
  Synthetic
ucacucgacgauaaauccacgucu

SEQ ID NO: 118706 - RNA, 18 nt, Artificial Sequence
  Synthetic
aaguauugcccaaggucu

SEQ ID NO: 118707 - RNA, 19 nt, Artificial Sequence
  Synthetic
aaaguauugcccaaggucu

SEQ ID NO: 118708 - RNA, 20 nt, Artificial Sequence
  Synthetic
uaaaguauugcccaaggucu

SEQ ID NO: 118709 - RNA, 21 nt, Artificial Sequence
  Synthetic
uuaaaguauugcccaaggucu

SEQ ID NO: 118710 - RNA, 22 nt, Artificial Sequence
  Synthetic
cuuaaaguauugcccaaggucu

SEQ ID NO: 118711 - RNA, 23 nt, Artificial Sequence
  Synthetic
acuuaaaguauugcccaaggucu

SEQ ID NO: 118712 - RNA, 18 nt, Artificial Sequence
  Synthetic
ucuauucccaagaggucu

SEQ ID NO: 118713 - RNA, 19 nt, Artificial Sequence
  Synthetic
aucuauucccaagaggucu

SEQ ID NO: 118714 - RNA, 20 nt, Artificial Sequence
  Synthetic
uaucuauucccaagaggucu

SEQ ID NO: 118715 - RNA, 21 nt, Artificial Sequence
  Synthetic
uuaucuauucccaagaggucu

SEQ ID NO: 118716 - RNA, 22 nt, Artificial Sequence
  Synthetic
auuaucuauucccaagaggucu

SEQ ID NO: 118717 - RNA, 23 nt, Artificial Sequence
  Synthetic
cauuaucuauucccaagaggucu

SEQ ID NO: 118718 - RNA, 24 nt, Artificial Sequence
  Synthetic
acauuaucuauucccaagaggucu

SEQ ID NO: 118719 - RNA, 18 nt, Artificial Sequence
  Synthetic
aaugaacaaaauaggucu

SEQ ID NO: 118720 - RNA, 19 nt, Artificial Sequence
  Synthetic
uaaugaacaaaauaggucu

SEQ ID NO: 118721 - RNA, 20 nt, Artificial Sequence
  Synthetic
cuaaugaacaaaauaggucu

SEQ ID NO: 118722 - RNA, 21 nt, Artificial Sequence
  Synthetic
ucuaaugaacaaaauaggucu

SEQ ID NO: 118723 - RNA, 22 nt, Artificial Sequence
  Synthetic
cucuaaugaacaaaauaggucu

SEQ ID NO: 118724 - RNA, 23 nt, Artificial Sequence
  Synthetic
ucucuaaugaacaaaauaggucu

SEQ ID NO: 118725 - RNA, 24 nt, Artificial Sequence
  Synthetic
cucucuaaugaacaaaauaggucu

SEQ ID NO: 118726 - RNA, 18 nt, Artificial Sequence
  Synthetic
uacuaugcuacagggucu

SEQ ID NO: 118727 - RNA, 19 nt, Artificial Sequence
  Synthetic
uuacuaugcuacagggucu

SEQ ID NO: 118728 - RNA, 20 nt, Artificial Sequence
  Synthetic
auuacuaugcuacagggucu

SEQ ID NO: 118729 - RNA, 21 nt, Artificial Sequence
  Synthetic
aauuacuaugcuacagggucu

SEQ ID NO: 118730 - RNA, 22 nt, Artificial Sequence
  Synthetic
uaauuacuaugcuacagggucu

SEQ ID NO: 118731 - RNA, 23 nt, Artificial Sequence
  Synthetic
auaauuacuaugcuacagggucu

SEQ ID NO: 118732 - RNA, 24 nt, Artificial Sequence
  Synthetic
cauaauuacuaugcuacagggucu

SEQ ID NO: 118733 - RNA, 18 nt, Artificial Sequence
  Synthetic
ucugugauucuauggucu

SEQ ID NO: 118734 - RNA, 19 nt, Artificial Sequence
  Synthetic
cucugugauucuauggucu

SEQ ID NO: 118735 - RNA, 20 nt, Artificial Sequence
  Synthetic
acucugugauucuauggucu

SEQ ID NO: 118736 - RNA, 21 nt, Artificial Sequence
  Synthetic
aacucugugauucuauggucu

SEQ ID NO: 118737 - RNA, 22 nt, Artificial Sequence
  Synthetic
caacucugugauucuauggucu

SEQ ID NO: 118738 - RNA, 23 nt, Artificial Sequence
  Synthetic
ucaacucugugauucuauggucu

SEQ ID NO: 118739 - RNA, 24 nt, Artificial Sequence
  Synthetic
uucaacucugugauucuauggucu

SEQ ID NO: 118740 - RNA, 18 nt, Artificial Sequence
  Synthetic
uucuguuucauuuggucu

SEQ ID NO: 118741 - RNA, 19 nt, Artificial Sequence
  Synthetic
auucuguuucauuuggucu

SEQ ID NO: 118742 - RNA, 20 nt, Artificial Sequence
  Synthetic
uauucuguuucauuuggucu

SEQ ID NO: 118743 - RNA, 18 nt, Artificial Sequence
  Synthetic
uucaguuauaagaugucu

SEQ ID NO: 118744 - RNA, 19 nt, Artificial Sequence
  Synthetic
uuucaguuauaagaugucu

SEQ ID NO: 118745 - RNA, 20 nt, Artificial Sequence
  Synthetic
cuuucaguuauaagaugucu

SEQ ID NO: 118746 - RNA, 21 nt, Artificial Sequence
  Synthetic
acuuucaguuauaagaugucu

SEQ ID NO: 118747 - RNA, 22 nt, Artificial Sequence
  Synthetic
aacuuucaguuauaagaugucu

SEQ ID NO: 118748 - RNA, 23 nt, Artificial Sequence
  Synthetic
aaacuuucaguuauaagaugucu

SEQ ID NO: 118749 - RNA, 24 nt, Artificial Sequence
  Synthetic
caaacuuucaguuauaagaugucu

SEQ ID NO: 118750 - RNA, 18 nt, Artificial Sequence
  Synthetic
ccucaguaaccuaugucu

SEQ ID NO: 118751 - RNA, 19 nt, Artificial Sequence
  Synthetic
accucaguaaccuaugucu

SEQ ID NO: 118752 - RNA, 20 nt, Artificial Sequence
  Synthetic
caccucaguaaccuaugucu

SEQ ID NO: 118753 - RNA, 21 nt, Artificial Sequence
  Synthetic
ucaccucaguaaccuaugucu

SEQ ID NO: 118754 - RNA, 23 nt, Artificial Sequence
  Synthetic
cgucaccucaguaaccuaugucu

SEQ ID NO: 118755 - RNA, 24 nt, Artificial Sequence
  Synthetic
ccgucaccucaguaaccuaugucu

SEQ ID NO: 118756 - RNA, 19 nt, Artificial Sequence
  Synthetic
ugaaacuagcuguaugucu

SEQ ID NO: 118757 - RNA, 22 nt, Artificial Sequence
  Synthetic
aggugaaacuagcuguaugucu

SEQ ID NO: 118758 - RNA, 23 nt, Artificial Sequence
  Synthetic
caggugaaacuagcuguaugucu

SEQ ID NO: 118759 - RNA, 24 nt, Artificial Sequence
  Synthetic
ucaggugaaacuagcuguaugucu

SEQ ID NO: 118760 - RNA, 18 nt, Artificial Sequence
  Synthetic
acuugggagaaacugucu

SEQ ID NO: 118761 - RNA, 19 nt, Artificial Sequence
  Synthetic
aacuugggagaaacugucu

SEQ ID NO: 118762 - RNA, 20 nt, Artificial Sequence
  Synthetic
uaacuugggagaaacugucu

SEQ ID NO: 118763 - RNA, 21 nt, Artificial Sequence
  Synthetic
auaacuugggagaaacugucu

SEQ ID NO: 118764 - RNA, 22 nt, Artificial Sequence
  Synthetic
uauaacuugggagaaacugucu

SEQ ID NO: 118765 - RNA, 23 nt, Artificial Sequence
  Synthetic
uuauaacuugggagaaacugucu

SEQ ID NO: 118766 - RNA, 24 nt, Artificial Sequence
  Synthetic
uuuauaacuugggagaaacugucu

SEQ ID NO: 118767 - RNA, 18 nt, Artificial Sequence
  Synthetic
auuuucaccugccugucu

SEQ ID NO: 118768 - RNA, 19 nt, Artificial Sequence
  Synthetic
aauuuucaccugccugucu

SEQ ID NO: 118769 - RNA, 20 nt, Artificial Sequence
  Synthetic
uaauuuucaccugccugucu

SEQ ID NO: 118770 - RNA, 21 nt, Artificial Sequence
  Synthetic
uuaauuuucaccugccugucu

SEQ ID NO: 118771 - RNA, 22 nt, Artificial Sequence
  Synthetic
uuuaauuuucaccugccugucu

SEQ ID NO: 118772 - RNA, 23 nt, Artificial Sequence
  Synthetic
uuuuaauuuucaccugccugucu

SEQ ID NO: 118773 - RNA, 24 nt, Artificial Sequence
  Synthetic
auuuuaauuuucaccugccugucu

SEQ ID NO: 118774 - RNA, 18 nt, Artificial Sequence
  Synthetic
caucacaauaugcugucu

SEQ ID NO: 118775 - RNA, 19 nt, Artificial Sequence
  Synthetic
ucaucacaauaugcugucu

SEQ ID NO: 118776 - RNA, 20 nt, Artificial Sequence
  Synthetic
uucaucacaauaugcugucu

SEQ ID NO: 118777 - RNA, 21 nt, Artificial Sequence
  Synthetic
uuucaucacaauaugcugucu

SEQ ID NO: 118778 - RNA, 22 nt, Artificial Sequence
  Synthetic
auuucaucacaauaugcugucu

SEQ ID NO: 118779 - RNA, 23 nt, Artificial Sequence
  Synthetic
aauuucaucacaauaugcugucu

SEQ ID NO: 118780 - RNA, 24 nt, Artificial Sequence
  Synthetic
aaauuucaucacaauaugcugucu

SEQ ID NO: 118781 - RNA, 18 nt, Artificial Sequence
  Synthetic
uucccagggcaucugucu

SEQ ID NO: 118782 - RNA, 20 nt, Artificial Sequence
  Synthetic
aguucccagggcaucugucu

SEQ ID NO: 118783 - RNA, 21 nt, Artificial Sequence
  Synthetic
aaguucccagggcaucugucu

SEQ ID NO: 118784 - RNA, 22 nt, Artificial Sequence
  Synthetic
caaguucccagggcaucugucu

SEQ ID NO: 118785 - RNA, 23 nt, Artificial Sequence
  Synthetic
ccaaguucccagggcaucugucu

SEQ ID NO: 118786 - RNA, 24 nt, Artificial Sequence
  Synthetic
uccaaguucccagggcaucugucu

SEQ ID NO: 118787 - RNA, 18 nt, Artificial Sequence
  Synthetic
uucuccaaaauucugucu

SEQ ID NO: 118788 - RNA, 20 nt, Artificial Sequence
  Synthetic
uguucuccaaaauucugucu

SEQ ID NO: 118789 - RNA, 21 nt, Artificial Sequence
  Synthetic
auguucuccaaaauucugucu

SEQ ID NO: 118790 - RNA, 22 nt, Artificial Sequence
  Synthetic
aauguucuccaaaauucugucu

SEQ ID NO: 118791 - RNA, 23 nt, Artificial Sequence
  Synthetic
uaauguucuccaaaauucugucu

SEQ ID NO: 118792 - RNA, 24 nt, Artificial Sequence
  Synthetic
uuaauguucuccaaaauucugucu

SEQ ID NO: 118793 - RNA, 18 nt, Artificial Sequence
  Synthetic
uacuaugauagagugucu

SEQ ID NO: 118794 - RNA, 18 nt, Artificial Sequence
  Synthetic
uaaauuccucuggugucu

SEQ ID NO: 118795 - RNA, 19 nt, Artificial Sequence
  Synthetic
cuaaauuccucuggugucu

SEQ ID NO: 118796 - RNA, 20 nt, Artificial Sequence
  Synthetic
ucuaaauuccucuggugucu

SEQ ID NO: 118797 - RNA, 21 nt, Artificial Sequence
  Synthetic
uucuaaauuccucuggugucu

SEQ ID NO: 118798 - RNA, 22 nt, Artificial Sequence
  Synthetic
cuucuaaauuccucuggugucu

SEQ ID NO: 118799 - RNA, 23 nt, Artificial Sequence
  Synthetic
ucuucuaaauuccucuggugucu

SEQ ID NO: 118800 - RNA, 24 nt, Artificial Sequence
  Synthetic
uucuucuaaauuccucuggugucu

SEQ ID NO: 118801 - RNA, 20 nt, Artificial Sequence
  Synthetic
aggaugcaugaagauugucu

SEQ ID NO: 118802 - RNA, 21 nt, Artificial Sequence
  Synthetic
aaggaugcaugaagauugucu

SEQ ID NO: 118803 - RNA, 22 nt, Artificial Sequence
  Synthetic
uaaggaugcaugaagauugucu

SEQ ID NO: 118804 - RNA, 23 nt, Artificial Sequence
  Synthetic
auaaggaugcaugaagauugucu

SEQ ID NO: 118805 - RNA, 24 nt, Artificial Sequence
  Synthetic
uauaaggaugcaugaagauugucu

SEQ ID NO: 118806 - RNA, 19 nt, Artificial Sequence
  Synthetic
aguggggaaaugauugucu

SEQ ID NO: 118807 - RNA, 20 nt, Artificial Sequence
  Synthetic
caguggggaaaugauugucu

SEQ ID NO: 118808 - RNA, 21 nt, Artificial Sequence
  Synthetic
acaguggggaaaugauugucu

SEQ ID NO: 118809 - RNA, 22 nt, Artificial Sequence
  Synthetic
uacaguggggaaaugauugucu

SEQ ID NO: 118810 - RNA, 23 nt, Artificial Sequence
  Synthetic
auacaguggggaaaugauugucu

SEQ ID NO: 118811 - RNA, 24 nt, Artificial Sequence
  Synthetic
aauacaguggggaaaugauugucu

SEQ ID NO: 118812 - RNA, 18 nt, Artificial Sequence
  Synthetic
uacaggauuguauugucu

SEQ ID NO: 118813 - RNA, 19 nt, Artificial Sequence
  Synthetic
auacaggauuguauugucu

SEQ ID NO: 118814 - RNA, 20 nt, Artificial Sequence
  Synthetic
cauacaggauuguauugucu

SEQ ID NO: 118815 - RNA, 21 nt, Artificial Sequence
  Synthetic
acauacaggauuguauugucu

SEQ ID NO: 118816 - RNA, 22 nt, Artificial Sequence
  Synthetic
uacauacaggauuguauugucu

SEQ ID NO: 118817 - RNA, 23 nt, Artificial Sequence
  Synthetic
cuacauacaggauuguauugucu

SEQ ID NO: 118818 - RNA, 24 nt, Artificial Sequence
  Synthetic
ucuacauacaggauuguauugucu

SEQ ID NO: 118819 - RNA, 21 nt, Artificial Sequence
  Synthetic
auuuuacuuauuuaguugucu

SEQ ID NO: 118820 - RNA, 23 nt, Artificial Sequence
  Synthetic
ugauuuuacuuauuuaguugucu

SEQ ID NO: 118821 - RNA, 18 nt, Artificial Sequence
  Synthetic
uuuuucuuauuguugucu

SEQ ID NO: 118822 - RNA, 19 nt, Artificial Sequence
  Synthetic
auuuuucuuauuguugucu

SEQ ID NO: 118823 - RNA, 20 nt, Artificial Sequence
  Synthetic
cauuuuucuuauuguugucu

SEQ ID NO: 118824 - RNA, 21 nt, Artificial Sequence
  Synthetic
ccauuuuucuuauuguugucu

SEQ ID NO: 118825 - RNA, 22 nt, Artificial Sequence
  Synthetic
uccauuuuucuuauuguugucu

SEQ ID NO: 118826 - RNA, 23 nt, Artificial Sequence
  Synthetic
uuccauuuuucuuauuguugucu

SEQ ID NO: 118827 - RNA, 18 nt, Artificial Sequence
  Synthetic
ccaugcaacuauuugucu

SEQ ID NO: 118828 - RNA, 19 nt, Artificial Sequence
  Synthetic
accaugcaacuauuugucu

SEQ ID NO: 118829 - RNA, 20 nt, Artificial Sequence
  Synthetic
aaccaugcaacuauuugucu

SEQ ID NO: 118830 - RNA, 21 nt, Artificial Sequence
  Synthetic
caaccaugcaacuauuugucu

SEQ ID NO: 118831 - RNA, 24 nt, Artificial Sequence
  Synthetic
uggcaaccaugcaacuauuugucu

SEQ ID NO: 118832 - RNA, 21 nt, Artificial Sequence
  Synthetic
aaugcuauuauaauuuugucu

SEQ ID NO: 118833 - RNA, 22 nt, Artificial Sequence
  Synthetic
uaaugcuauuauaauuuugucu

SEQ ID NO: 118834 - RNA, 23 nt, Artificial Sequence
  Synthetic
auaaugcuauuauaauuuugucu

SEQ ID NO: 118835 - RNA, 24 nt, Artificial Sequence
  Synthetic
cauaaugcuauuauaauuuugucu

SEQ ID NO: 118836 - RNA, 18 nt, Artificial Sequence
  Synthetic
uuuccgaaauuuuugucu

SEQ ID NO: 118837 - RNA, 19 nt, Artificial Sequence
  Synthetic
cuuuccgaaauuuuugucu

SEQ ID NO: 118838 - RNA, 20 nt, Artificial Sequence
  Synthetic
acuuuccgaaauuuuugucu

SEQ ID NO: 118839 - RNA, 21 nt, Artificial Sequence
  Synthetic
aacuuuccgaaauuuuugucu

SEQ ID NO: 118840 - RNA, 22 nt, Artificial Sequence
  Synthetic
aaacuuuccgaaauuuuugucu

SEQ ID NO: 118841 - RNA, 23 nt, Artificial Sequence
  Synthetic
uaaacuuuccgaaauuuuugucu

SEQ ID NO: 118842 - RNA, 24 nt, Artificial Sequence
  Synthetic
uuaaacuuuccgaaauuuuugucu

SEQ ID NO: 118843 - RNA, 18 nt, Artificial Sequence
  Synthetic
uuuaauuucuaaaauucu

SEQ ID NO: 118844 - RNA, 19 nt, Artificial Sequence
  Synthetic
cuuuaauuucuaaaauucu

SEQ ID NO: 118845 - RNA, 20 nt, Artificial Sequence
  Synthetic
ccuuuaauuucuaaaauucu

SEQ ID NO: 118846 - RNA, 21 nt, Artificial Sequence
  Synthetic
uccuuuaauuucuaaaauucu

SEQ ID NO: 118847 - RNA, 22 nt, Artificial Sequence
  Synthetic
auccuuuaauuucuaaaauucu

SEQ ID NO: 118848 - RNA, 23 nt, Artificial Sequence
  Synthetic
aauccuuuaauuucuaaaauucu

SEQ ID NO: 118849 - RNA, 24 nt, Artificial Sequence
  Synthetic
aaauccuuuaauuucuaaaauucu

SEQ ID NO: 118850 - RNA, 18 nt, Artificial Sequence
  Synthetic
aaagaaccaauaaauucu

SEQ ID NO: 118851 - RNA, 20 nt, Artificial Sequence
  Synthetic
ugaaagaaccaauaaauucu

SEQ ID NO: 118852 - RNA, 21 nt, Artificial Sequence
  Synthetic
uugaaagaaccaauaaauucu

SEQ ID NO: 118853 - RNA, 22 nt, Artificial Sequence
  Synthetic
cuugaaagaaccaauaaauucu

SEQ ID NO: 118854 - RNA, 23 nt, Artificial Sequence
  Synthetic
ucuugaaagaaccaauaaauucu

SEQ ID NO: 118855 - RNA, 24 nt, Artificial Sequence
  Synthetic
uucuugaaagaaccaauaaauucu

SEQ ID NO: 118856 - RNA, 18 nt, Artificial Sequence
  Synthetic
aaguugucacuaaauucu

SEQ ID NO: 118857 - RNA, 19 nt, Artificial Sequence
  Synthetic
aaaguugucacuaaauucu

SEQ ID NO: 118858 - RNA, 21 nt, Artificial Sequence
  Synthetic
agaaaguugucacuaaauucu

SEQ ID NO: 118859 - RNA, 22 nt, Artificial Sequence
  Synthetic
aagaaaguugucacuaaauucu

SEQ ID NO: 118860 - RNA, 24 nt, Artificial Sequence
  Synthetic
ugaagaaaguugucacuaaauucu

SEQ ID NO: 118861 - RNA, 18 nt, Artificial Sequence
  Synthetic
acaaaaaacuggaauucu

SEQ ID NO: 118862 - RNA, 19 nt, Artificial Sequence
  Synthetic
uacaaaaaacuggaauucu

SEQ ID NO: 118863 - RNA, 20 nt, Artificial Sequence
  Synthetic
uuacaaaaaacuggaauucu

SEQ ID NO: 118864 - RNA, 21 nt, Artificial Sequence
  Synthetic
auuacaaaaaacuggaauucu

SEQ ID NO: 118865 - RNA, 24 nt, Artificial Sequence
  Synthetic
aggauuacaaaaaacuggaauucu

SEQ ID NO: 118866 - RNA, 18 nt, Artificial Sequence
  Synthetic
ugaagaaguuuucauucu

SEQ ID NO: 118867 - RNA, 19 nt, Artificial Sequence
  Synthetic
augaagaaguuuucauucu

SEQ ID NO: 118868 - RNA, 20 nt, Artificial Sequence
  Synthetic
aaugaagaaguuuucauucu

SEQ ID NO: 118869 - RNA, 21 nt, Artificial Sequence
  Synthetic
aaaugaagaaguuuucauucu

SEQ ID NO: 118870 - RNA, 22 nt, Artificial Sequence
  Synthetic
uaaaugaagaaguuuucauucu

SEQ ID NO: 118871 - RNA, 23 nt, Artificial Sequence
  Synthetic
auaaaugaagaaguuuucauucu

SEQ ID NO: 118872 - RNA, 24 nt, Artificial Sequence
  Synthetic
aauaaaugaagaaguuuucauucu

SEQ ID NO: 118873 - RNA, 18 nt, Artificial Sequence
  Synthetic
caaccagugaacgauucu

SEQ ID NO: 118874 - RNA, 19 nt, Artificial Sequence
  Synthetic
acaaccagugaacgauucu

SEQ ID NO: 118875 - RNA, 22 nt, Artificial Sequence
  Synthetic
uggacaaccagugaacgauucu

SEQ ID NO: 118876 - RNA, 23 nt, Artificial Sequence
  Synthetic
cuggacaaccagugaacgauucu

SEQ ID NO: 118877 - RNA, 24 nt, Artificial Sequence
  Synthetic
acuggacaaccagugaacgauucu

SEQ ID NO: 118878 - RNA, 19 nt, Artificial Sequence
  Synthetic
agcaacuccugacgauucu

SEQ ID NO: 118879 - RNA, 20 nt, Artificial Sequence
  Synthetic
aagcaacuccugacgauucu

SEQ ID NO: 118880 - RNA, 21 nt, Artificial Sequence
  Synthetic
caagcaacuccugacgauucu

SEQ ID NO: 118881 - RNA, 22 nt, Artificial Sequence
  Synthetic
acaagcaacuccugacgauucu

SEQ ID NO: 118882 - RNA, 23 nt, Artificial Sequence
  Synthetic
cacaagcaacuccugacgauucu

SEQ ID NO: 118883 - RNA, 24 nt, Artificial Sequence
  Synthetic
ucacaagcaacuccugacgauucu

SEQ ID NO: 118884 - RNA, 18 nt, Artificial Sequence
  Synthetic
ugcacuacaaaggauucu

SEQ ID NO: 118885 - RNA, 19 nt, Artificial Sequence
  Synthetic
cugcacuacaaaggauucu

SEQ ID NO: 118886 - RNA, 20 nt, Artificial Sequence
  Synthetic
ccugcacuacaaaggauucu

SEQ ID NO: 118887 - RNA, 21 nt, Artificial Sequence
  Synthetic
uccugcacuacaaaggauucu

SEQ ID NO: 118888 - RNA, 22 nt, Artificial Sequence
  Synthetic
uuccugcacuacaaaggauucu

SEQ ID NO: 118889 - RNA, 23 nt, Artificial Sequence
  Synthetic
cuuccugcacuacaaaggauucu

SEQ ID NO: 118890 - RNA, 24 nt, Artificial Sequence
  Synthetic
ccuuccugcacuacaaaggauucu

SEQ ID NO: 118891 - RNA, 18 nt, Artificial Sequence
  Synthetic
aguguucugaaauauucu

SEQ ID NO: 118892 - RNA, 19 nt, Artificial Sequence
  Synthetic
aaguguucugaaauauucu

SEQ ID NO: 118893 - RNA, 20 nt, Artificial Sequence
  Synthetic
uaaguguucugaaauauucu

SEQ ID NO: 118894 - RNA, 21 nt, Artificial Sequence
  Synthetic
uuaaguguucugaaauauucu

SEQ ID NO: 118895 - RNA, 22 nt, Artificial Sequence
  Synthetic
uuuaaguguucugaaauauucu

SEQ ID NO: 118896 - RNA, 23 nt, Artificial Sequence
  Synthetic
cuuuaaguguucugaaauauucu

SEQ ID NO: 118897 - RNA, 24 nt, Artificial Sequence
  Synthetic
ucuuuaaguguucugaaauauucu

SEQ ID NO: 118898 - RNA, 18 nt, Artificial Sequence
  Synthetic
uuuuguacuacauauucu

SEQ ID NO: 118899 - RNA, 19 nt, Artificial Sequence
  Synthetic
uuuuuguacuacauauucu

SEQ ID NO: 118900 - RNA, 20 nt, Artificial Sequence
  Synthetic
auuuuuguacuacauauucu

SEQ ID NO: 118901 - RNA, 22 nt, Artificial Sequence
  Synthetic
ugauuuuuguacuacauauucu

SEQ ID NO: 118902 - RNA, 23 nt, Artificial Sequence
  Synthetic
augauuuuuguacuacauauucu

SEQ ID NO: 118903 - RNA, 24 nt, Artificial Sequence
  Synthetic
caugauuuuuguacuacauauucu

SEQ ID NO: 118904 - RNA, 18 nt, Artificial Sequence
  Synthetic
uggucgccucuguauucu

SEQ ID NO: 118905 - RNA, 19 nt, Artificial Sequence
  Synthetic
uuggucgccucuguauucu

SEQ ID NO: 118906 - RNA, 20 nt, Artificial Sequence
  Synthetic
uuuggucgccucuguauucu

SEQ ID NO: 118907 - RNA, 21 nt, Artificial Sequence
  Synthetic
uuuuggucgccucuguauucu

SEQ ID NO: 118908 - RNA, 22 nt, Artificial Sequence
  Synthetic
cuuuuggucgccucuguauucu

SEQ ID NO: 118909 - RNA, 23 nt, Artificial Sequence
  Synthetic
ucuuuuggucgccucuguauucu

SEQ ID NO: 118910 - RNA, 24 nt, Artificial Sequence
  Synthetic
cucuuuuggucgccucuguauucu

SEQ ID NO: 118911 - RNA, 18 nt, Artificial Sequence
  Synthetic
uuaucugcuucuuauucu

SEQ ID NO: 118912 - RNA, 19 nt, Artificial Sequence
  Synthetic
uuuaucugcuucuuauucu

SEQ ID NO: 118913 - RNA, 20 nt, Artificial Sequence
  Synthetic
uuuuaucugcuucuuauucu

SEQ ID NO: 118914 - RNA, 21 nt, Artificial Sequence
  Synthetic
auuuuaucugcuucuuauucu

SEQ ID NO: 118915 - RNA, 22 nt, Artificial Sequence
  Synthetic
cauuuuaucugcuucuuauucu

SEQ ID NO: 118916 - RNA, 23 nt, Artificial Sequence
  Synthetic
ccauuuuaucugcuucuuauucu

SEQ ID NO: 118917 - RNA, 18 nt, Artificial Sequence
  Synthetic
ccauauaggauuuauucu

SEQ ID NO: 118918 - RNA, 20 nt, Artificial Sequence
  Synthetic
agccauauaggauuuauucu

SEQ ID NO: 118919 - RNA, 22 nt, Artificial Sequence
  Synthetic
agagccauauaggauuuauucu

SEQ ID NO: 118920 - RNA, 24 nt, Artificial Sequence
  Synthetic
cgagagccauauaggauuuauucu

SEQ ID NO: 118921 - RNA, 18 nt, Artificial Sequence
  Synthetic
uacauuugacuuuauucu

SEQ ID NO: 118922 - RNA, 19 nt, Artificial Sequence
  Synthetic
auacauuugacuuuauucu

SEQ ID NO: 118923 - RNA, 20 nt, Artificial Sequence
  Synthetic
aauacauuugacuuuauucu

SEQ ID NO: 118924 - RNA, 21 nt, Artificial Sequence
  Synthetic
caauacauuugacuuuauucu

SEQ ID NO: 118925 - RNA, 22 nt, Artificial Sequence
  Synthetic
acaauacauuugacuuuauucu

SEQ ID NO: 118926 - RNA, 23 nt, Artificial Sequence
  Synthetic
aacaauacauuugacuuuauucu

SEQ ID NO: 118927 - RNA, 24 nt, Artificial Sequence
  Synthetic
caacaauacauuugacuuuauucu

SEQ ID NO: 118928 - RNA, 18 nt, Artificial Sequence
  Synthetic
auuuccuguguuuauucu

SEQ ID NO: 118929 - RNA, 19 nt, Artificial Sequence
  Synthetic
uauuuccuguguuuauucu

SEQ ID NO: 118930 - RNA, 20 nt, Artificial Sequence
  Synthetic
auauuuccuguguuuauucu

SEQ ID NO: 118931 - RNA, 22 nt, Artificial Sequence
  Synthetic
ugauauuuccuguguuuauucu

SEQ ID NO: 118932 - RNA, 24 nt, Artificial Sequence
  Synthetic
ugugauauuuccuguguuuauucu

SEQ ID NO: 118933 - RNA, 18 nt, Artificial Sequence
  Synthetic
caacauagaaaaacuucu

SEQ ID NO: 118934 - RNA, 19 nt, Artificial Sequence
  Synthetic
acaacauagaaaaacuucu

SEQ ID NO: 118935 - RNA, 20 nt, Artificial Sequence
  Synthetic
cacaacauagaaaaacuucu

SEQ ID NO: 118936 - RNA, 18 nt, Artificial Sequence
  Synthetic
acaaaucuaaaaacuucu

SEQ ID NO: 118937 - RNA, 19 nt, Artificial Sequence
  Synthetic
uacaaaucuaaaaacuucu

SEQ ID NO: 118938 - RNA, 20 nt, Artificial Sequence
  Synthetic
auacaaaucuaaaaacuucu

SEQ ID NO: 118939 - RNA, 21 nt, Artificial Sequence
  Synthetic
uauacaaaucuaaaaacuucu

SEQ ID NO: 118940 - RNA, 22 nt, Artificial Sequence
  Synthetic
cuauacaaaucuaaaaacuucu

SEQ ID NO: 118941 - RNA, 23 nt, Artificial Sequence
  Synthetic
ccuauacaaaucuaaaaacuucu

SEQ ID NO: 118942 - RNA, 24 nt, Artificial Sequence
  Synthetic
uccuauacaaaucuaaaaacuucu

SEQ ID NO: 118943 - RNA, 18 nt, Artificial Sequence
  Synthetic
uaaagaccccaaacuucu

SEQ ID NO: 118944 - RNA, 19 nt, Artificial Sequence
  Synthetic
auaaagaccccaaacuucu

SEQ ID NO: 118945 - RNA, 20 nt, Artificial Sequence
  Synthetic
aauaaagaccccaaacuucu

SEQ ID NO: 118946 - RNA, 22 nt, Artificial Sequence
  Synthetic
ugaauaaagaccccaaacuucu

SEQ ID NO: 118947 - RNA, 23 nt, Artificial Sequence
  Synthetic
uugaauaaagaccccaaacuucu

SEQ ID NO: 118948 - RNA, 24 nt, Artificial Sequence
  Synthetic
uuugaauaaagaccccaaacuucu

SEQ ID NO: 118949 - RNA, 18 nt, Artificial Sequence
  Synthetic
acagugguuagcacuucu

SEQ ID NO: 118950 - RNA, 19 nt, Artificial Sequence
  Synthetic
uacagugguuagcacuucu

SEQ ID NO: 118951 - RNA, 20 nt, Artificial Sequence
  Synthetic
uuacagugguuagcacuucu

SEQ ID NO: 118952 - RNA, 21 nt, Artificial Sequence
  Synthetic
uuuacagugguuagcacuucu

SEQ ID NO: 118953 - RNA, 22 nt, Artificial Sequence
  Synthetic
uuuuacagugguuagcacuucu

SEQ ID NO: 118954 - RNA, 23 nt, Artificial Sequence
  Synthetic
auuuuacagugguuagcacuucu

SEQ ID NO: 118955 - RNA, 24 nt, Artificial Sequence
  Synthetic
aauuuuacagugguuagcacuucu

SEQ ID NO: 118956 - RNA, 18 nt, Artificial Sequence
  Synthetic
uaaugagaucagacuucu

SEQ ID NO: 118957 - RNA, 19 nt, Artificial Sequence
  Synthetic
auaaugagaucagacuucu

SEQ ID NO: 118958 - RNA, 20 nt, Artificial Sequence
  Synthetic
uauaaugagaucagacuucu

SEQ ID NO: 118959 - RNA, 21 nt, Artificial Sequence
  Synthetic
cuauaaugagaucagacuucu

SEQ ID NO: 118960 - RNA, 22 nt, Artificial Sequence
  Synthetic
ucuauaaugagaucagacuucu

SEQ ID NO: 118961 - RNA, 23 nt, Artificial Sequence
  Synthetic
cucuauaaugagaucagacuucu

SEQ ID NO: 118962 - RNA, 24 nt, Artificial Sequence
  Synthetic
acucuauaaugagaucagacuucu

SEQ ID NO: 118963 - RNA, 18 nt, Artificial Sequence
  Synthetic
auaugccaauggacuucu

SEQ ID NO: 118964 - RNA, 19 nt, Artificial Sequence
  Synthetic
cauaugccaauggacuucu

SEQ ID NO: 118965 - RNA, 20 nt, Artificial Sequence
  Synthetic
ucauaugccaauggacuucu

SEQ ID NO: 118966 - RNA, 21 nt, Artificial Sequence
  Synthetic
cucauaugccaauggacuucu

SEQ ID NO: 118967 - RNA, 22 nt, Artificial Sequence
  Synthetic
acucauaugccaauggacuucu

SEQ ID NO: 118968 - RNA, 24 nt, Artificial Sequence
  Synthetic
agacucauaugccaauggacuucu

SEQ ID NO: 118969 - RNA, 19 nt, Artificial Sequence
  Synthetic
ugagcucccacauacuucu

SEQ ID NO: 118970 - RNA, 21 nt, Artificial Sequence
  Synthetic
ugugagcucccacauacuucu

SEQ ID NO: 118971 - RNA, 22 nt, Artificial Sequence
  Synthetic
cugugagcucccacauacuucu

SEQ ID NO: 118972 - RNA, 23 nt, Artificial Sequence
  Synthetic
ucugugagcucccacauacuucu

SEQ ID NO: 118973 - RNA, 24 nt, Artificial Sequence
  Synthetic
uucugugagcucccacauacuucu

SEQ ID NO: 118974 - RNA, 18 nt, Artificial Sequence
  Synthetic
acauacugacauacuucu

SEQ ID NO: 118975 - RNA, 20 nt, Artificial Sequence
  Synthetic
ugacauacugacauacuucu

SEQ ID NO: 118976 - RNA, 22 nt, Artificial Sequence
  Synthetic
ugugacauacugacauacuucu

SEQ ID NO: 118977 - RNA, 23 nt, Artificial Sequence
  Synthetic
augugacauacugacauacuucu

SEQ ID NO: 118978 - RNA, 24 nt, Artificial Sequence
  Synthetic
aaugugacauacugacauacuucu

SEQ ID NO: 118979 - RNA, 18 nt, Artificial Sequence
  Synthetic
cuccaaaaugcuacuucu

SEQ ID NO: 118980 - RNA, 19 nt, Artificial Sequence
  Synthetic
acuccaaaaugcuacuucu

SEQ ID NO: 118981 - RNA, 20 nt, Artificial Sequence
  Synthetic
aacuccaaaaugcuacuucu

SEQ ID NO: 118982 - RNA, 21 nt, Artificial Sequence
  Synthetic
caacuccaaaaugcuacuucu

SEQ ID NO: 118983 - RNA, 22 nt, Artificial Sequence
  Synthetic
ucaacuccaaaaugcuacuucu

SEQ ID NO: 118984 - RNA, 23 nt, Artificial Sequence
  Synthetic
uucaacuccaaaaugcuacuucu

SEQ ID NO: 118985 - RNA, 24 nt, Artificial Sequence
  Synthetic
cuucaacuccaaaaugcuacuucu

SEQ ID NO: 118986 - RNA, 21 nt, Artificial Sequence
  Synthetic
uuaguuguuauuuuuacuucu

SEQ ID NO: 118987 - RNA, 22 nt, Artificial Sequence
  Synthetic
auuaguuguuauuuuuacuucu

SEQ ID NO: 118988 - RNA, 23 nt, Artificial Sequence
  Synthetic
uauuaguuguuauuuuuacuucu

SEQ ID NO: 118989 - RNA, 24 nt, Artificial Sequence
  Synthetic
uuauuaguuguuauuuuuacuucu

SEQ ID NO: 118990 - RNA, 20 nt, Artificial Sequence
  Synthetic
uggccuucuuacauccuucu

SEQ ID NO: 118991 - RNA, 21 nt, Artificial Sequence
  Synthetic
cuggccuucuuacauccuucu

SEQ ID NO: 118992 - RNA, 22 nt, Artificial Sequence
  Synthetic
ucuggccuucuuacauccuucu

SEQ ID NO: 118993 - RNA, 23 nt, Artificial Sequence
  Synthetic
uucuggccuucuuacauccuucu

SEQ ID NO: 118994 - RNA, 24 nt, Artificial Sequence
  Synthetic
cuucuggccuucuuacauccuucu

SEQ ID NO: 118995 - RNA, 18 nt, Artificial Sequence
  Synthetic
aaagacaaguuuccuucu

SEQ ID NO: 118996 - RNA, 20 nt, Artificial Sequence
  Synthetic
agaaagacaaguuuccuucu

SEQ ID NO: 118997 - RNA, 22 nt, Artificial Sequence
  Synthetic
agagaaagacaaguuuccuucu

SEQ ID NO: 118998 - RNA, 23 nt, Artificial Sequence
  Synthetic
cagagaaagacaaguuuccuucu

SEQ ID NO: 118999 - RNA, 24 nt, Artificial Sequence
  Synthetic
ucagagaaagacaaguuuccuucu

SEQ ID NO: 119000 - RNA, 18 nt, Artificial Sequence
  Synthetic
aggaugcuuuuuccuucu

SEQ ID NO: 119001 - RNA, 20 nt, Artificial Sequence
  Synthetic
agaggaugcuuuuuccuucu

SEQ ID NO: 119002 - RNA, 22 nt, Artificial Sequence
  Synthetic
ugagaggaugcuuuuuccuucu

SEQ ID NO: 119003 - RNA, 24 nt, Artificial Sequence
  Synthetic
agugagaggaugcuuuuuccuucu

SEQ ID NO: 119004 - RNA, 19 nt, Artificial Sequence
  Synthetic
ugccuacagcccagcuucu

SEQ ID NO: 119005 - RNA, 20 nt, Artificial Sequence
  Synthetic
augccuacagcccagcuucu

SEQ ID NO: 119006 - RNA, 21 nt, Artificial Sequence
  Synthetic
aaugccuacagcccagcuucu

SEQ ID NO: 119007 - RNA, 23 nt, Artificial Sequence
  Synthetic
agaaugccuacagcccagcuucu

SEQ ID NO: 119008 - RNA, 21 nt, Artificial Sequence
  Synthetic
auggagauggcuucugcuucu

SEQ ID NO: 119009 - RNA, 22 nt, Artificial Sequence
  Synthetic
aauggagauggcuucugcuucu

SEQ ID NO: 119010 - RNA, 23 nt, Artificial Sequence
  Synthetic
aaauggagauggcuucugcuucu

SEQ ID NO: 119011 - RNA, 24 nt, Artificial Sequence
  Synthetic
uaaauggagauggcuucugcuucu

SEQ ID NO: 119012 - RNA, 18 nt, Artificial Sequence
  Synthetic
ugugauguuguaucuucu

SEQ ID NO: 119013 - RNA, 19 nt, Artificial Sequence
  Synthetic
uugugauguuguaucuucu

SEQ ID NO: 119014 - RNA, 20 nt, Artificial Sequence
  Synthetic
cuugugauguuguaucuucu

SEQ ID NO: 119015 - RNA, 22 nt, Artificial Sequence
  Synthetic
ugcuugugauguuguaucuucu

SEQ ID NO: 119016 - RNA, 23 nt, Artificial Sequence
  Synthetic
uugcuugugauguuguaucuucu

SEQ ID NO: 119017 - RNA, 24 nt, Artificial Sequence
  Synthetic
uuugcuugugauguuguaucuucu

SEQ ID NO: 119018 - RNA, 18 nt, Artificial Sequence
  Synthetic
agaaccuuggccucuucu

SEQ ID NO: 119019 - RNA, 19 nt, Artificial Sequence
  Synthetic
aagaaccuuggccucuucu

SEQ ID NO: 119020 - RNA, 20 nt, Artificial Sequence
  Synthetic
aaagaaccuuggccucuucu

SEQ ID NO: 119021 - RNA, 21 nt, Artificial Sequence
  Synthetic
uaaagaaccuuggccucuucu

SEQ ID NO: 119022 - RNA, 22 nt, Artificial Sequence
  Synthetic
uuaaagaaccuuggccucuucu

SEQ ID NO: 119023 - RNA, 23 nt, Artificial Sequence
  Synthetic
auuaaagaaccuuggccucuucu

SEQ ID NO: 119024 - RNA, 24 nt, Artificial Sequence
  Synthetic
uauuaaagaaccuuggccucuucu

SEQ ID NO: 119025 - RNA, 18 nt, Artificial Sequence
  Synthetic
aucuggauauccucuucu

SEQ ID NO: 119026 - RNA, 19 nt, Artificial Sequence
  Synthetic
uaucuggauauccucuucu

SEQ ID NO: 119027 - RNA, 20 nt, Artificial Sequence
  Synthetic
cuaucuggauauccucuucu

SEQ ID NO: 119028 - RNA, 22 nt, Artificial Sequence
  Synthetic
agcuaucuggauauccucuucu

SEQ ID NO: 119029 - RNA, 23 nt, Artificial Sequence
  Synthetic
cagcuaucuggauauccucuucu

SEQ ID NO: 119030 - RNA, 24 nt, Artificial Sequence
  Synthetic
ccagcuaucuggauauccucuucu

SEQ ID NO: 119031 - RNA, 18 nt, Artificial Sequence
  Synthetic
acauaugaaaauucuucu

SEQ ID NO: 119032 - RNA, 19 nt, Artificial Sequence
  Synthetic
uacauaugaaaauucuucu

SEQ ID NO: 119033 - RNA, 20 nt, Artificial Sequence
  Synthetic
auacauaugaaaauucuucu

SEQ ID NO: 119034 - RNA, 21 nt, Artificial Sequence
  Synthetic
aauacauaugaaaauucuucu

SEQ ID NO: 119035 - RNA, 22 nt, Artificial Sequence
  Synthetic
aaauacauaugaaaauucuucu

SEQ ID NO: 119036 - RNA, 24 nt, Artificial Sequence
  Synthetic
agaaauacauaugaaaauucuucu

SEQ ID NO: 119037 - RNA, 19 nt, Artificial Sequence
  Synthetic
uguuuuuggaaauucuucu

SEQ ID NO: 119038 - RNA, 20 nt, Artificial Sequence
  Synthetic
cuguuuuuggaaauucuucu

SEQ ID NO: 119039 - RNA, 21 nt, Artificial Sequence
  Synthetic
acuguuuuuggaaauucuucu

SEQ ID NO: 119040 - RNA, 23 nt, Artificial Sequence
  Synthetic
cgacuguuuuuggaaauucuucu

SEQ ID NO: 119041 - RNA, 18 nt, Artificial Sequence
  Synthetic
aaaacaucuacuucuucu

SEQ ID NO: 119042 - RNA, 19 nt, Artificial Sequence
  Synthetic
aaaaacaucuacuucuucu

SEQ ID NO: 119043 - RNA, 21 nt, Artificial Sequence
  Synthetic
agaaaaacaucuacuucuucu

SEQ ID NO: 119044 - RNA, 22 nt, Artificial Sequence
  Synthetic
uagaaaaacaucuacuucuucu

SEQ ID NO: 119045 - RNA, 23 nt, Artificial Sequence
  Synthetic
uuagaaaaacaucuacuucuucu

SEQ ID NO: 119046 - RNA, 24 nt, Artificial Sequence
  Synthetic
cuuagaaaaacaucuacuucuucu

SEQ ID NO: 119047 - RNA, 18 nt, Artificial Sequence
  Synthetic
caacaauaucuuucuucu

SEQ ID NO: 119048 - RNA, 19 nt, Artificial Sequence
  Synthetic
ucaacaauaucuuucuucu

SEQ ID NO: 119049 - RNA, 20 nt, Artificial Sequence
  Synthetic
cucaacaauaucuuucuucu

SEQ ID NO: 119050 - RNA, 21 nt, Artificial Sequence
  Synthetic
ucucaacaauaucuuucuucu

SEQ ID NO: 119051 - RNA, 22 nt, Artificial Sequence
  Synthetic
uucucaacaauaucuuucuucu

SEQ ID NO: 119052 - RNA, 21 nt, Artificial Sequence
  Synthetic
cuccuuuugaaguaaaguucu

SEQ ID NO: 119053 - RNA, 23 nt, Artificial Sequence
  Synthetic
cgcuccuuuugaaguaaaguucu

SEQ ID NO: 119054 - RNA, 24 nt, Artificial Sequence
  Synthetic
ccgcuccuuuugaaguaaaguucu

SEQ ID NO: 119055 - RNA, 18 nt, Artificial Sequence
  Synthetic
caaccuguucacaguucu

SEQ ID NO: 119056 - RNA, 20 nt, Artificial Sequence
  Synthetic
agcaaccuguucacaguucu

SEQ ID NO: 119057 - RNA, 22 nt, Artificial Sequence
  Synthetic
ugagcaaccuguucacaguucu

SEQ ID NO: 119058 - RNA, 23 nt, Artificial Sequence
  Synthetic
cugagcaaccuguucacaguucu

SEQ ID NO: 119059 - RNA, 24 nt, Artificial Sequence
  Synthetic
ucugagcaaccuguucacaguucu

SEQ ID NO: 119060 - RNA, 18 nt, Artificial Sequence
  Synthetic
acuggcuacaucaguucu

SEQ ID NO: 119061 - RNA, 19 nt, Artificial Sequence
  Synthetic
uacuggcuacaucaguucu

SEQ ID NO: 119062 - RNA, 20 nt, Artificial Sequence
  Synthetic
uuacuggcuacaucaguucu

SEQ ID NO: 119063 - RNA, 21 nt, Artificial Sequence
  Synthetic
auuacuggcuacaucaguucu

SEQ ID NO: 119064 - RNA, 22 nt, Artificial Sequence
  Synthetic
aauuacuggcuacaucaguucu

SEQ ID NO: 119065 - RNA, 23 nt, Artificial Sequence
  Synthetic
uaauuacuggcuacaucaguucu

SEQ ID NO: 119066 - RNA, 24 nt, Artificial Sequence
  Synthetic
auaauuacuggcuacaucaguucu

SEQ ID NO: 119067 - RNA, 18 nt, Artificial Sequence
  Synthetic
agguaaacagagaguucu

SEQ ID NO: 119068 - RNA, 19 nt, Artificial Sequence
  Synthetic
uagguaaacagagaguucu

SEQ ID NO: 119069 - RNA, 20 nt, Artificial Sequence
  Synthetic
auagguaaacagagaguucu

SEQ ID NO: 119070 - RNA, 21 nt, Artificial Sequence
  Synthetic
aauagguaaacagagaguucu

SEQ ID NO: 119071 - RNA, 22 nt, Artificial Sequence
  Synthetic
aaauagguaaacagagaguucu

SEQ ID NO: 119072 - RNA, 23 nt, Artificial Sequence
  Synthetic
uaaauagguaaacagagaguucu

SEQ ID NO: 119073 - RNA, 24 nt, Artificial Sequence
  Synthetic
auaaauagguaaacagagaguucu

SEQ ID NO: 119074 - RNA, 20 nt, Artificial Sequence
  Synthetic
uggucaugcugccuaguucu

SEQ ID NO: 119075 - RNA, 21 nt, Artificial Sequence
  Synthetic
cuggucaugcugccuaguucu

SEQ ID NO: 119076 - RNA, 22 nt, Artificial Sequence
  Synthetic
ucuggucaugcugccuaguucu

SEQ ID NO: 119077 - RNA, 23 nt, Artificial Sequence
  Synthetic
cucuggucaugcugccuaguucu

SEQ ID NO: 119078 - RNA, 24 nt, Artificial Sequence
  Synthetic
ucucuggucaugcugccuaguucu

SEQ ID NO: 119079 - RNA, 18 nt, Artificial Sequence
  Synthetic
aaacaguggcaagguucu

SEQ ID NO: 119080 - RNA, 19 nt, Artificial Sequence
  Synthetic
caaacaguggcaagguucu

SEQ ID NO: 119081 - RNA, 20 nt, Artificial Sequence
  Synthetic
ucaaacaguggcaagguucu

SEQ ID NO: 119082 - RNA, 23 nt, Artificial Sequence
  Synthetic
aggucaaacaguggcaagguucu

SEQ ID NO: 119083 - RNA, 24 nt, Artificial Sequence
  Synthetic
uaggucaaacaguggcaagguucu

SEQ ID NO: 119084 - RNA, 18 nt, Artificial Sequence
  Synthetic
aucagcagaugugguucu

SEQ ID NO: 119085 - RNA, 19 nt, Artificial Sequence
  Synthetic
uaucagcagaugugguucu

SEQ ID NO: 119086 - RNA, 20 nt, Artificial Sequence
  Synthetic
auaucagcagaugugguucu

SEQ ID NO: 119087 - RNA, 21 nt, Artificial Sequence
  Synthetic
cauaucagcagaugugguucu

SEQ ID NO: 119088 - RNA, 22 nt, Artificial Sequence
  Synthetic
acauaucagcagaugugguucu

SEQ ID NO: 119089 - RNA, 23 nt, Artificial Sequence
  Synthetic
aacauaucagcagaugugguucu

SEQ ID NO: 119090 - RNA, 22 nt, Artificial Sequence
  Synthetic
uguguacaauuacugugguucu

SEQ ID NO: 119091 - RNA, 23 nt, Artificial Sequence
  Synthetic
uuguguacaauuacugugguucu

SEQ ID NO: 119092 - RNA, 18 nt, Artificial Sequence
  Synthetic
cuauggaauauugguucu

SEQ ID NO: 119093 - RNA, 19 nt, Artificial Sequence
  Synthetic
acuauggaauauugguucu

SEQ ID NO: 119094 - RNA, 20 nt, Artificial Sequence
  Synthetic
uacuauggaauauugguucu

SEQ ID NO: 119095 - RNA, 21 nt, Artificial Sequence
  Synthetic
uuacuauggaauauugguucu

SEQ ID NO: 119096 - RNA, 22 nt, Artificial Sequence
  Synthetic
uuuacuauggaauauugguucu

SEQ ID NO: 119097 - RNA, 23 nt, Artificial Sequence
  Synthetic
cuuuacuauggaauauugguucu

SEQ ID NO: 119098 - RNA, 18 nt, Artificial Sequence
  Synthetic
auaauggugguauguucu

SEQ ID NO: 119099 - RNA, 19 nt, Artificial Sequence
  Synthetic
aauaauggugguauguucu

SEQ ID NO: 119100 - RNA, 20 nt, Artificial Sequence
  Synthetic
aaauaauggugguauguucu

SEQ ID NO: 119101 - RNA, 18 nt, Artificial Sequence
  Synthetic
caccuagaccccuguucu

SEQ ID NO: 119102 - RNA, 21 nt, Artificial Sequence
  Synthetic
aggcaccuagaccccuguucu

SEQ ID NO: 119103 - RNA, 22 nt, Artificial Sequence
  Synthetic
caggcaccuagaccccuguucu

SEQ ID NO: 119104 - RNA, 23 nt, Artificial Sequence
  Synthetic
acaggcaccuagaccccuguucu

SEQ ID NO: 119105 - RNA, 24 nt, Artificial Sequence
  Synthetic
cacaggcaccuagaccccuguucu

SEQ ID NO: 119106 - RNA, 18 nt, Artificial Sequence
  Synthetic
uguaccgcaggcuguucu

SEQ ID NO: 119107 - RNA, 20 nt, Artificial Sequence
  Synthetic
uguguaccgcaggcuguucu

SEQ ID NO: 119108 - RNA, 21 nt, Artificial Sequence
  Synthetic
auguguaccgcaggcuguucu

SEQ ID NO: 119109 - RNA, 22 nt, Artificial Sequence
  Synthetic
aauguguaccgcaggcuguucu

SEQ ID NO: 119110 - RNA, 23 nt, Artificial Sequence
  Synthetic
aaauguguaccgcaggcuguucu

SEQ ID NO: 119111 - RNA, 24 nt, Artificial Sequence
  Synthetic
aaaauguguaccgcaggcuguucu

SEQ ID NO: 119112 - RNA, 21 nt, Artificial Sequence
  Synthetic
uuaagugcuaggugcuguucu

SEQ ID NO: 119113 - RNA, 22 nt, Artificial Sequence
  Synthetic
uuuaagugcuaggugcuguucu

SEQ ID NO: 119114 - RNA, 23 nt, Artificial Sequence
  Synthetic
cuuuaagugcuaggugcuguucu

SEQ ID NO: 119115 - RNA, 24 nt, Artificial Sequence
  Synthetic
ccuuuaagugcuaggugcuguucu

SEQ ID NO: 119116 - RNA, 21 nt, Artificial Sequence
  Synthetic
uagauuuuauucaucuguucu

SEQ ID NO: 119117 - RNA, 22 nt, Artificial Sequence
  Synthetic
auagauuuuauucaucuguucu

SEQ ID NO: 119118 - RNA, 23 nt, Artificial Sequence
  Synthetic
aauagauuuuauucaucuguucu

SEQ ID NO: 119119 - RNA, 18 nt, Artificial Sequence
  Synthetic
cgguuuuauuucuguucu

SEQ ID NO: 119120 - RNA, 19 nt, Artificial Sequence
  Synthetic
ccgguuuuauuucuguucu

SEQ ID NO: 119121 - RNA, 20 nt, Artificial Sequence
  Synthetic
uccgguuuuauuucuguucu

SEQ ID NO: 119122 - RNA, 21 nt, Artificial Sequence
  Synthetic
cuccgguuuuauuucuguucu

SEQ ID NO: 119123 - RNA, 22 nt, Artificial Sequence
  Synthetic
ucuccgguuuuauuucuguucu

SEQ ID NO: 119124 - RNA, 23 nt, Artificial Sequence
  Synthetic
aucuccgguuuuauuucuguucu

SEQ ID NO: 119125 - RNA, 24 nt, Artificial Sequence
  Synthetic
caucuccgguuuuauuucuguucu

SEQ ID NO: 119126 - RNA, 18 nt, Artificial Sequence
  Synthetic
ccuagauggacguguucu

SEQ ID NO: 119127 - RNA, 20 nt, Artificial Sequence
  Synthetic
agccuagauggacguguucu

SEQ ID NO: 119128 - RNA, 21 nt, Artificial Sequence
  Synthetic
cagccuagauggacguguucu

SEQ ID NO: 119129 - RNA, 23 nt, Artificial Sequence
  Synthetic
agcagccuagauggacguguucu

SEQ ID NO: 119130 - RNA, 24 nt, Artificial Sequence
  Synthetic
cagcagccuagauggacguguucu

SEQ ID NO: 119131 - RNA, 21 nt, Artificial Sequence
  Synthetic
auucuaugaucccaaauuucu

SEQ ID NO: 119132 - RNA, 22 nt, Artificial Sequence
  Synthetic
cauucuaugaucccaaauuucu

SEQ ID NO: 119133 - RNA, 19 nt, Artificial Sequence
  Synthetic
agugguuuaaaagauuucu

SEQ ID NO: 119134 - RNA, 20 nt, Artificial Sequence
  Synthetic
cagugguuuaaaagauuucu

SEQ ID NO: 119135 - RNA, 18 nt, Artificial Sequence
  Synthetic
aaucuacaucagauuucu

SEQ ID NO: 119136 - RNA, 19 nt, Artificial Sequence
  Synthetic
uaaucuacaucagauuucu

SEQ ID NO: 119137 - RNA, 20 nt, Artificial Sequence
  Synthetic
auaaucuacaucagauuucu

SEQ ID NO: 119138 - RNA, 21 nt, Artificial Sequence
  Synthetic
cauaaucuacaucagauuucu

SEQ ID NO: 119139 - RNA, 22 nt, Artificial Sequence
  Synthetic
acauaaucuacaucagauuucu

SEQ ID NO: 119140 - RNA, 23 nt, Artificial Sequence
  Synthetic
cacauaaucuacaucagauuucu

SEQ ID NO: 119141 - RNA, 24 nt, Artificial Sequence
  Synthetic
ccacauaaucuacaucagauuucu

SEQ ID NO: 119142 - RNA, 18 nt, Artificial Sequence
  Synthetic
uuaguaguaaauauuucu

SEQ ID NO: 119143 - RNA, 19 nt, Artificial Sequence
  Synthetic
cuuaguaguaaauauuucu

SEQ ID NO: 119144 - RNA, 20 nt, Artificial Sequence
  Synthetic
ccuuaguaguaaauauuucu

SEQ ID NO: 119145 - RNA, 21 nt, Artificial Sequence
  Synthetic
cccuuaguaguaaauauuucu

SEQ ID NO: 119146 - RNA, 22 nt, Artificial Sequence
  Synthetic
ccccuuaguaguaaauauuucu

SEQ ID NO: 119147 - RNA, 23 nt, Artificial Sequence
  Synthetic
uccccuuaguaguaaauauuucu

SEQ ID NO: 119148 - RNA, 18 nt, Artificial Sequence
  Synthetic
accacugcacauauuucu

SEQ ID NO: 119149 - RNA, 19 nt, Artificial Sequence
  Synthetic
aaccacugcacauauuucu

SEQ ID NO: 119150 - RNA, 20 nt, Artificial Sequence
  Synthetic
uaaccacugcacauauuucu

SEQ ID NO: 119151 - RNA, 21 nt, Artificial Sequence
  Synthetic
uuaaccacugcacauauuucu

SEQ ID NO: 119152 - RNA, 22 nt, Artificial Sequence
  Synthetic
cuuaaccacugcacauauuucu

SEQ ID NO: 119153 - RNA, 24 nt, Artificial Sequence
  Synthetic
ugcuuaaccacugcacauauuucu

SEQ ID NO: 119154 - RNA, 20 nt, Artificial Sequence
  Synthetic
agguuuuuccauauauuucu

SEQ ID NO: 119155 - RNA, 21 nt, Artificial Sequence
  Synthetic
uagguuuuuccauauauuucu

SEQ ID NO: 119156 - RNA, 22 nt, Artificial Sequence
  Synthetic
auagguuuuuccauauauuucu

SEQ ID NO: 119157 - RNA, 23 nt, Artificial Sequence
  Synthetic
aauagguuuuuccauauauuucu

SEQ ID NO: 119158 - RNA, 24 nt, Artificial Sequence
  Synthetic
uaauagguuuuuccauauauuucu

SEQ ID NO: 119159 - RNA, 18 nt, Artificial Sequence
  Synthetic
aaggcaugaacuauuucu

SEQ ID NO: 119160 - RNA, 19 nt, Artificial Sequence
  Synthetic
aaaggcaugaacuauuucu

SEQ ID NO: 119161 - RNA, 20 nt, Artificial Sequence
  Synthetic
caaaggcaugaacuauuucu

SEQ ID NO: 119162 - RNA, 21 nt, Artificial Sequence
  Synthetic
ccaaaggcaugaacuauuucu

SEQ ID NO: 119163 - RNA, 22 nt, Artificial Sequence
  Synthetic
uccaaaggcaugaacuauuucu

SEQ ID NO: 119164 - RNA, 23 nt, Artificial Sequence
  Synthetic
cuccaaaggcaugaacuauuucu

SEQ ID NO: 119165 - RNA, 24 nt, Artificial Sequence
  Synthetic
acuccaaaggcaugaacuauuucu

SEQ ID NO: 119166 - RNA, 18 nt, Artificial Sequence
  Synthetic
aaaauccauucuauuucu

SEQ ID NO: 119167 - RNA, 19 nt, Artificial Sequence
  Synthetic
uaaaauccauucuauuucu

SEQ ID NO: 119168 - RNA, 20 nt, Artificial Sequence
  Synthetic
auaaaauccauucuauuucu

SEQ ID NO: 119169 - RNA, 21 nt, Artificial Sequence
  Synthetic
uauaaaauccauucuauuucu

SEQ ID NO: 119170 - RNA, 22 nt, Artificial Sequence
  Synthetic
uuauaaaauccauucuauuucu

SEQ ID NO: 119171 - RNA, 23 nt, Artificial Sequence
  Synthetic
uuuauaaaauccauucuauuucu

SEQ ID NO: 119172 - RNA, 24 nt, Artificial Sequence
  Synthetic
auuuauaaaauccauucuauuucu

SEQ ID NO: 119173 - RNA, 19 nt, Artificial Sequence
  Synthetic
uggaaauuuauaacuuucu

SEQ ID NO: 119174 - RNA, 21 nt, Artificial Sequence
  Synthetic
cguggaaauuuauaacuuucu

SEQ ID NO: 119175 - RNA, 22 nt, Artificial Sequence
  Synthetic
acguggaaauuuauaacuuucu

SEQ ID NO: 119176 - RNA, 23 nt, Artificial Sequence
  Synthetic
uacguggaaauuuauaacuuucu

SEQ ID NO: 119177 - RNA, 24 nt, Artificial Sequence
  Synthetic
uuacguggaaauuuauaacuuucu

SEQ ID NO: 119178 - RNA, 21 nt, Artificial Sequence
  Synthetic
ccuucaugcuaaucacuuucu

SEQ ID NO: 119179 - RNA, 22 nt, Artificial Sequence
  Synthetic
uccuucaugcuaaucacuuucu

SEQ ID NO: 119180 - RNA, 23 nt, Artificial Sequence
  Synthetic
uuccuucaugcuaaucacuuucu

SEQ ID NO: 119181 - RNA, 24 nt, Artificial Sequence
  Synthetic
auuccuucaugcuaaucacuuucu

SEQ ID NO: 119182 - RNA, 18 nt, Artificial Sequence
  Synthetic
uuaguuuucuuacuuucu

SEQ ID NO: 119183 - RNA, 19 nt, Artificial Sequence
  Synthetic
uuuaguuuucuuacuuucu

SEQ ID NO: 119184 - RNA, 20 nt, Artificial Sequence
  Synthetic
auuuaguuuucuuacuuucu

SEQ ID NO: 119185 - RNA, 21 nt, Artificial Sequence
  Synthetic
uauuuaguuuucuuacuuucu

SEQ ID NO: 119186 - RNA, 22 nt, Artificial Sequence
  Synthetic
uuauuuaguuuucuuacuuucu

SEQ ID NO: 119187 - RNA, 24 nt, Artificial Sequence
  Synthetic
aguuauuuaguuuucuuacuuucu

SEQ ID NO: 119188 - RNA, 21 nt, Artificial Sequence
  Synthetic
aaauaauuuucaucucuuucu

SEQ ID NO: 119189 - RNA, 22 nt, Artificial Sequence
  Synthetic
uaaauaauuuucaucucuuucu

SEQ ID NO: 119190 - RNA, 23 nt, Artificial Sequence
  Synthetic
uuaaauaauuuucaucucuuucu

SEQ ID NO: 119191 - RNA, 24 nt, Artificial Sequence
  Synthetic
uuuaaauaauuuucaucucuuucu

SEQ ID NO: 119192 - RNA, 18 nt, Artificial Sequence
  Synthetic
uuuuaaagaagucuuucu

SEQ ID NO: 119193 - RNA, 20 nt, Artificial Sequence
  Synthetic
uguuuuaaagaagucuuucu

SEQ ID NO: 119194 - RNA, 21 nt, Artificial Sequence
  Synthetic
auguuuuaaagaagucuuucu

SEQ ID NO: 119195 - RNA, 22 nt, Artificial Sequence
  Synthetic
aauguuuuaaagaagucuuucu

SEQ ID NO: 119196 - RNA, 24 nt, Artificial Sequence
  Synthetic
ugaauguuuuaaagaagucuuucu

SEQ ID NO: 119197 - RNA, 18 nt, Artificial Sequence
  Synthetic
ucuugaugaauucuuucu

SEQ ID NO: 119198 - RNA, 19 nt, Artificial Sequence
  Synthetic
aucuugaugaauucuuucu

SEQ ID NO: 119199 - RNA, 21 nt, Artificial Sequence
  Synthetic
ugaucuugaugaauucuuucu

SEQ ID NO: 119200 - RNA, 22 nt, Artificial Sequence
  Synthetic
cugaucuugaugaauucuuucu

SEQ ID NO: 119201 - RNA, 23 nt, Artificial Sequence
  Synthetic
ucugaucuugaugaauucuuucu

SEQ ID NO: 119202 - RNA, 24 nt, Artificial Sequence
  Synthetic
cucugaucuugaugaauucuuucu

SEQ ID NO: 119203 - RNA, 18 nt, Artificial Sequence
  Synthetic
ccuaguuuucacguuucu

SEQ ID NO: 119204 - RNA, 19 nt, Artificial Sequence
  Synthetic
accuaguuuucacguuucu

SEQ ID NO: 119205 - RNA, 20 nt, Artificial Sequence
  Synthetic
caccuaguuuucacguuucu

SEQ ID NO: 119206 - RNA, 21 nt, Artificial Sequence
  Synthetic
ucaccuaguuuucacguuucu

SEQ ID NO: 119207 - RNA, 22 nt, Artificial Sequence
  Synthetic
aucaccuaguuuucacguuucu

SEQ ID NO: 119208 - RNA, 23 nt, Artificial Sequence
  Synthetic
caucaccuaguuuucacguuucu

SEQ ID NO: 119209 - RNA, 24 nt, Artificial Sequence
  Synthetic
acaucaccuaguuuucacguuucu

SEQ ID NO: 119210 - RNA, 18 nt, Artificial Sequence
  Synthetic
acuuuuaguuugguuucu

SEQ ID NO: 119211 - RNA, 20 nt, Artificial Sequence
  Synthetic
ugacuuuuaguuugguuucu

SEQ ID NO: 119212 - RNA, 22 nt, Artificial Sequence
  Synthetic
ugugacuuuuaguuugguuucu

SEQ ID NO: 119213 - RNA, 23 nt, Artificial Sequence
  Synthetic
cugugacuuuuaguuugguuucu

SEQ ID NO: 119214 - RNA, 24 nt, Artificial Sequence
  Synthetic
ucugugacuuuuaguuugguuucu

SEQ ID NO: 119215 - RNA, 21 nt, Artificial Sequence
  Synthetic
uuguuucugauuugauuuucu

SEQ ID NO: 119216 - RNA, 22 nt, Artificial Sequence
  Synthetic
cuuguuucugauuugauuuucu

SEQ ID NO: 119217 - RNA, 23 nt, Artificial Sequence
  Synthetic
acuuguuucugauuugauuuucu

SEQ ID NO: 119218 - RNA, 24 nt, Artificial Sequence
  Synthetic
aacuuguuucugauuugauuuucu

SEQ ID NO: 119219 - RNA, 18 nt, Artificial Sequence
  Synthetic
caauauacaguauuuucu

SEQ ID NO: 119220 - RNA, 19 nt, Artificial Sequence
  Synthetic
acaauauacaguauuuucu

SEQ ID NO: 119221 - RNA, 20 nt, Artificial Sequence
  Synthetic
aacaauauacaguauuuucu

SEQ ID NO: 119222 - RNA, 21 nt, Artificial Sequence
  Synthetic
aagauacugauuuccuuuucu

SEQ ID NO: 119223 - RNA, 22 nt, Artificial Sequence
  Synthetic
aaagauacugauuuccuuuucu

SEQ ID NO: 119224 - RNA, 23 nt, Artificial Sequence
  Synthetic
caaagauacugauuuccuuuucu

SEQ ID NO: 119225 - RNA, 24 nt, Artificial Sequence
  Synthetic
ucaaagauacugauuuccuuuucu

SEQ ID NO: 119226 - RNA, 20 nt, Artificial Sequence
  Synthetic
agggacaccaagaguuuucu

SEQ ID NO: 119227 - RNA, 21 nt, Artificial Sequence
  Synthetic
cagggacaccaagaguuuucu

SEQ ID NO: 119228 - RNA, 22 nt, Artificial Sequence
  Synthetic
ucagggacaccaagaguuuucu

SEQ ID NO: 119229 - RNA, 23 nt, Artificial Sequence
  Synthetic
cucagggacaccaagaguuuucu

SEQ ID NO: 119230 - RNA, 24 nt, Artificial Sequence
  Synthetic
ucucagggacaccaagaguuuucu

SEQ ID NO: 119231 - RNA, 18 nt, Artificial Sequence
  Synthetic
uuauauuguggguuuucu

SEQ ID NO: 119232 - RNA, 19 nt, Artificial Sequence
  Synthetic
auuauauuguggguuuucu

SEQ ID NO: 119233 - RNA, 20 nt, Artificial Sequence
  Synthetic
cauuauauuguggguuuucu

SEQ ID NO: 119234 - RNA, 21 nt, Artificial Sequence
  Synthetic
ccauuauauuguggguuuucu

SEQ ID NO: 119235 - RNA, 23 nt, Artificial Sequence
  Synthetic
agccauuauauuguggguuuucu

SEQ ID NO: 119236 - RNA, 24 nt, Artificial Sequence
  Synthetic
aagccauuauauuguggguuuucu

SEQ ID NO: 119237 - RNA, 18 nt, Artificial Sequence
  Synthetic
acauggacugauuuuucu

SEQ ID NO: 119238 - RNA, 19 nt, Artificial Sequence
  Synthetic
aacauggacugauuuuucu

SEQ ID NO: 119239 - RNA, 21 nt, Artificial Sequence
  Synthetic
agaacauggacugauuuuucu

SEQ ID NO: 119240 - RNA, 22 nt, Artificial Sequence
  Synthetic
uagaacauggacugauuuuucu

SEQ ID NO: 119241 - RNA, 23 nt, Artificial Sequence
  Synthetic
uuagaacauggacugauuuuucu

SEQ ID NO: 119242 - RNA, 24 nt, Artificial Sequence
  Synthetic
auuagaacauggacugauuuuucu

SEQ ID NO: 119243 - RNA, 21 nt, Artificial Sequence
  Synthetic
cuucaaacauuuuauuuuucu

SEQ ID NO: 119244 - RNA, 22 nt, Artificial Sequence
  Synthetic
ucuucaaacauuuuauuuuucu

SEQ ID NO: 119245 - RNA, 23 nt, Artificial Sequence
  Synthetic
aucuucaaacauuuuauuuuucu

SEQ ID NO: 119246 - RNA, 24 nt, Artificial Sequence
  Synthetic
caucuucaaacauuuuauuuuucu

SEQ ID NO: 119247 - RNA, 18 nt, Artificial Sequence
  Synthetic
ccauuucuuccaaaaagu

SEQ ID NO: 119248 - RNA, 19 nt, Artificial Sequence
  Synthetic
uccauuucuuccaaaaagu

SEQ ID NO: 119249 - RNA, 20 nt, Artificial Sequence
  Synthetic
uuccauuucuuccaaaaagu

SEQ ID NO: 119250 - RNA, 21 nt, Artificial Sequence
  Synthetic
uuuccauuucuuccaaaaagu

SEQ ID NO: 119251 - RNA, 22 nt, Artificial Sequence
  Synthetic
uuuuccauuucuuccaaaaagu

SEQ ID NO: 119252 - RNA, 23 nt, Artificial Sequence
  Synthetic
cuuuuccauuucuuccaaaaagu

SEQ ID NO: 119253 - RNA, 24 nt, Artificial Sequence
  Synthetic
ccuuuuccauuucuuccaaaaagu

SEQ ID NO: 119254 - RNA, 21 nt, Artificial Sequence
  Synthetic
uacuucuuucccugaaaaagu

SEQ ID NO: 119255 - RNA, 22 nt, Artificial Sequence
  Synthetic
cuacuucuuucccugaaaaagu

SEQ ID NO: 119256 - RNA, 24 nt, Artificial Sequence
  Synthetic
agcuacuucuuucccugaaaaagu

SEQ ID NO: 119257 - RNA, 20 nt, Artificial Sequence
  Synthetic
cggauacaacuuuaaaaagu

SEQ ID NO: 119258 - RNA, 21 nt, Artificial Sequence
  Synthetic
acggauacaacuuuaaaaagu

SEQ ID NO: 119259 - RNA, 22 nt, Artificial Sequence
  Synthetic
uacggauacaacuuuaaaaagu

SEQ ID NO: 119260 - RNA, 23 nt, Artificial Sequence
  Synthetic
auacggauacaacuuuaaaaagu

SEQ ID NO: 119261 - RNA, 24 nt, Artificial Sequence
  Synthetic
cauacggauacaacuuuaaaaagu

SEQ ID NO: 119262 - RNA, 18 nt, Artificial Sequence
  Synthetic
ucacaaaauuggaaaagu

SEQ ID NO: 119263 - RNA, 20 nt, Artificial Sequence
  Synthetic
ugucacaaaauuggaaaagu

SEQ ID NO: 119264 - RNA, 22 nt, Artificial Sequence
  Synthetic
agugucacaaaauuggaaaagu

SEQ ID NO: 119265 - RNA, 23 nt, Artificial Sequence
  Synthetic
aagugucacaaaauuggaaaagu

SEQ ID NO: 119266 - RNA, 24 nt, Artificial Sequence
  Synthetic
caagugucacaaaauuggaaaagu

SEQ ID NO: 119267 - RNA, 18 nt, Artificial Sequence
  Synthetic
aaccauauacauaaaagu

SEQ ID NO: 119268 - RNA, 19 nt, Artificial Sequence
  Synthetic
uaaccauauacauaaaagu

SEQ ID NO: 119269 - RNA, 21 nt, Artificial Sequence
  Synthetic
aguaaccauauacauaaaagu

SEQ ID NO: 119270 - RNA, 22 nt, Artificial Sequence
  Synthetic
aaguaaccauauacauaaaagu

SEQ ID NO: 119271 - RNA, 23 nt, Artificial Sequence
  Synthetic
uaaguaaccauauacauaaaagu

SEQ ID NO: 119272 - RNA, 24 nt, Artificial Sequence
  Synthetic
auaaguaaccauauacauaaaagu

SEQ ID NO: 119273 - RNA, 18 nt, Artificial Sequence
  Synthetic
ugguucccuuauaaaagu

SEQ ID NO: 119274 - RNA, 19 nt, Artificial Sequence
  Synthetic
uugguucccuuauaaaagu

SEQ ID NO: 119275 - RNA, 20 nt, Artificial Sequence
  Synthetic
uuugguucccuuauaaaagu

SEQ ID NO: 119276 - RNA, 24 nt, Artificial Sequence
  Synthetic
uggguuugguucccuuauaaaagu

SEQ ID NO: 119277 - RNA, 21 nt, Artificial Sequence
  Synthetic
caaaaaaaaaaugcuaaaagu

SEQ ID NO: 119278 - RNA, 22 nt, Artificial Sequence
  Synthetic
acaaaaaaaaaaugcuaaaagu

SEQ ID NO: 119279 - RNA, 23 nt, Artificial Sequence
  Synthetic
uacaaaaaaaaaaugcuaaaagu

SEQ ID NO: 119280 - RNA, 24 nt, Artificial Sequence
  Synthetic
uuacaaaaaaaaaaugcuaaaagu

SEQ ID NO: 119281 - RNA, 18 nt, Artificial Sequence
  Synthetic
uguucauacuuuaaaagu

SEQ ID NO: 119282 - RNA, 19 nt, Artificial Sequence
  Synthetic
auguucauacuuuaaaagu

SEQ ID NO: 119283 - RNA, 20 nt, Artificial Sequence
  Synthetic
uauguucauacuuuaaaagu

SEQ ID NO: 119284 - RNA, 21 nt, Artificial Sequence
  Synthetic
uuauguucauacuuuaaaagu

SEQ ID NO: 119285 - RNA, 22 nt, Artificial Sequence
  Synthetic
auuauguucauacuuuaaaagu

SEQ ID NO: 119286 - RNA, 23 nt, Artificial Sequence
  Synthetic
aauuauguucauacuuuaaaagu

SEQ ID NO: 119287 - RNA, 22 nt, Artificial Sequence
  Synthetic
agagcaaaaagggagacaaagu

SEQ ID NO: 119288 - RNA, 23 nt, Artificial Sequence
  Synthetic
aagagcaaaaagggagacaaagu

SEQ ID NO: 119289 - RNA, 18 nt, Artificial Sequence
  Synthetic
uauaccauuggacaaagu

SEQ ID NO: 119290 - RNA, 19 nt, Artificial Sequence
  Synthetic
uuauaccauuggacaaagu

SEQ ID NO: 119291 - RNA, 20 nt, Artificial Sequence
  Synthetic
auuauaccauuggacaaagu

SEQ ID NO: 119292 - RNA, 22 nt, Artificial Sequence
  Synthetic
agauuauaccauuggacaaagu

SEQ ID NO: 119293 - RNA, 24 nt, Artificial Sequence
  Synthetic
cgagauuauaccauuggacaaagu

SEQ ID NO: 119294 - RNA, 18 nt, Artificial Sequence
  Synthetic
cacuacccauugcaaagu

SEQ ID NO: 119295 - RNA, 19 nt, Artificial Sequence
  Synthetic
ucacuacccauugcaaagu

SEQ ID NO: 119296 - RNA, 20 nt, Artificial Sequence
  Synthetic
uucacuacccauugcaaagu

SEQ ID NO: 119297 - RNA, 21 nt, Artificial Sequence
  Synthetic
auucacuacccauugcaaagu

SEQ ID NO: 119298 - RNA, 22 nt, Artificial Sequence
  Synthetic
aauucacuacccauugcaaagu

SEQ ID NO: 119299 - RNA, 23 nt, Artificial Sequence
  Synthetic
aaauucacuacccauugcaaagu

SEQ ID NO: 119300 - RNA, 24 nt, Artificial Sequence
  Synthetic
aaaauucacuacccauugcaaagu

SEQ ID NO: 119301 - RNA, 21 nt, Artificial Sequence
  Synthetic
caaaacaggaaaagucaaagu

SEQ ID NO: 119302 - RNA, 24 nt, Artificial Sequence
  Synthetic
aggcaaaacaggaaaagucaaagu

SEQ ID NO: 119303 - RNA, 19 nt, Artificial Sequence
  Synthetic
ugacuuguacuuucaaagu

SEQ ID NO: 119304 - RNA, 20 nt, Artificial Sequence
  Synthetic
cugacuuguacuuucaaagu

SEQ ID NO: 119305 - RNA, 18 nt, Artificial Sequence
  Synthetic
uguuccucugaagaaagu

SEQ ID NO: 119306 - RNA, 19 nt, Artificial Sequence
  Synthetic
uuguuccucugaagaaagu

SEQ ID NO: 119307 - RNA, 20 nt, Artificial Sequence
  Synthetic
uuuguuccucugaagaaagu

SEQ ID NO: 119308 - RNA, 21 nt, Artificial Sequence
  Synthetic
auuuguuccucugaagaaagu

SEQ ID NO: 119309 - RNA, 22 nt, Artificial Sequence
  Synthetic
aauuuguuccucugaagaaagu

SEQ ID NO: 119310 - RNA, 24 nt, Artificial Sequence
  Synthetic
agaauuuguuccucugaagaaagu

SEQ ID NO: 119311 - RNA, 18 nt, Artificial Sequence
  Synthetic
ccuguccccccagaaagu

SEQ ID NO: 119312 - RNA, 19 nt, Artificial Sequence
  Synthetic
cccuguccccccagaaagu

SEQ ID NO: 119313 - RNA, 20 nt, Artificial Sequence
  Synthetic
ucccuguccccccagaaagu

SEQ ID NO: 119314 - RNA, 21 nt, Artificial Sequence
  Synthetic
aucccuguccccccagaaagu

SEQ ID NO: 119315 - RNA, 22 nt, Artificial Sequence
  Synthetic
uaucccuguccccccagaaagu

SEQ ID NO: 119316 - RNA, 23 nt, Artificial Sequence
  Synthetic
auaucccuguccccccagaaagu

SEQ ID NO: 119317 - RNA, 24 nt, Artificial Sequence
  Synthetic
cauaucccuguccccccagaaagu

SEQ ID NO: 119318 - RNA, 18 nt, Artificial Sequence
  Synthetic
uguagguuuucagaaagu

SEQ ID NO: 119319 - RNA, 20 nt, Artificial Sequence
  Synthetic
aguguagguuuucagaaagu

SEQ ID NO: 119320 - RNA, 21 nt, Artificial Sequence
  Synthetic
aaguguagguuuucagaaagu

SEQ ID NO: 119321 - RNA, 22 nt, Artificial Sequence
  Synthetic
caaguguagguuuucagaaagu

SEQ ID NO: 119322 - RNA, 23 nt, Artificial Sequence
  Synthetic
ucaaguguagguuuucagaaagu

SEQ ID NO: 119323 - RNA, 24 nt, Artificial Sequence
  Synthetic
aucaaguguagguuuucagaaagu

SEQ ID NO: 119324 - RNA, 21 nt, Artificial Sequence
  Synthetic
aagagaauggggggagaaagu

SEQ ID NO: 119325 - RNA, 22 nt, Artificial Sequence
  Synthetic
uaagagaauggggggagaaagu

SEQ ID NO: 119326 - RNA, 20 nt, Artificial Sequence
  Synthetic
ugguuauauagcuagaaagu

SEQ ID NO: 119327 - RNA, 21 nt, Artificial Sequence
  Synthetic
uugguuauauagcuagaaagu

SEQ ID NO: 119328 - RNA, 22 nt, Artificial Sequence
  Synthetic
uuugguuauauagcuagaaagu

SEQ ID NO: 119329 - RNA, 23 nt, Artificial Sequence
  Synthetic
uuuugguuauauagcuagaaagu

SEQ ID NO: 119330 - RNA, 24 nt, Artificial Sequence
  Synthetic
cuuuugguuauauagcuagaaagu

SEQ ID NO: 119331 - RNA, 21 nt, Artificial Sequence
  Synthetic
agaaauauuguuuuagaaagu

SEQ ID NO: 119332 - RNA, 22 nt, Artificial Sequence
  Synthetic
uagaaauauuguuuuagaaagu

SEQ ID NO: 119333 - RNA, 23 nt, Artificial Sequence
  Synthetic
auagaaauauuguuuuagaaagu

SEQ ID NO: 119334 - RNA, 18 nt, Artificial Sequence
  Synthetic
aacccagaauaugaaagu

SEQ ID NO: 119335 - RNA, 20 nt, Artificial Sequence
  Synthetic
ugaacccagaauaugaaagu

SEQ ID NO: 119336 - RNA, 21 nt, Artificial Sequence
  Synthetic
augaacccagaauaugaaagu

SEQ ID NO: 119337 - RNA, 22 nt, Artificial Sequence
  Synthetic
caugaacccagaauaugaaagu

SEQ ID NO: 119338 - RNA, 24 nt, Artificial Sequence
  Synthetic
ugcaugaacccagaauaugaaagu

SEQ ID NO: 119339 - RNA, 18 nt, Artificial Sequence
  Synthetic
aaauucaacgcauaaagu

SEQ ID NO: 119340 - RNA, 19 nt, Artificial Sequence
  Synthetic
uaaauucaacgcauaaagu

SEQ ID NO: 119341 - RNA, 21 nt, Artificial Sequence
  Synthetic
cguaaauucaacgcauaaagu

SEQ ID NO: 119342 - RNA, 22 nt, Artificial Sequence
  Synthetic
ccguaaauucaacgcauaaagu

SEQ ID NO: 119343 - RNA, 24 nt, Artificial Sequence
  Synthetic
agccguaaauucaacgcauaaagu

SEQ ID NO: 119344 - RNA, 18 nt, Artificial Sequence
  Synthetic
uauauuggcucauaaagu

SEQ ID NO: 119345 - RNA, 19 nt, Artificial Sequence
  Synthetic
uuauauuggcucauaaagu

SEQ ID NO: 119346 - RNA, 20 nt, Artificial Sequence
  Synthetic
auuauauuggcucauaaagu

SEQ ID NO: 119347 - RNA, 21 nt, Artificial Sequence
  Synthetic
cauuauauuggcucauaaagu

SEQ ID NO: 119348 - RNA, 22 nt, Artificial Sequence
  Synthetic
ucauuauauuggcucauaaagu

SEQ ID NO: 119349 - RNA, 23 nt, Artificial Sequence
  Synthetic
aucauuauauuggcucauaaagu

SEQ ID NO: 119350 - RNA, 24 nt, Artificial Sequence
  Synthetic
aaucauuauauuggcucauaaagu

SEQ ID NO: 119351 - RNA, 20 nt, Artificial Sequence
  Synthetic
uggauaagcucagauaaagu

SEQ ID NO: 119352 - RNA, 21 nt, Artificial Sequence
  Synthetic
auggauaagcucagauaaagu

SEQ ID NO: 119353 - RNA, 22 nt, Artificial Sequence
  Synthetic
uauggauaagcucagauaaagu

SEQ ID NO: 119354 - RNA, 24 nt, Artificial Sequence
  Synthetic
aguauggauaagcucagauaaagu

SEQ ID NO: 119355 - RNA, 18 nt, Artificial Sequence
  Synthetic
agaaaugaaggauaaagu

SEQ ID NO: 119356 - RNA, 19 nt, Artificial Sequence
  Synthetic
aagaaaugaaggauaaagu

SEQ ID NO: 119357 - RNA, 22 nt, Artificial Sequence
  Synthetic
aggaagaaaugaaggauaaagu

SEQ ID NO: 119358 - RNA, 23 nt, Artificial Sequence
  Synthetic
aaggaagaaaugaaggauaaagu

SEQ ID NO: 119359 - RNA, 21 nt, Artificial Sequence
  Synthetic
ucccuagaaaacugauaaagu

SEQ ID NO: 119360 - RNA, 22 nt, Artificial Sequence
  Synthetic
cucccuagaaaacugauaaagu

SEQ ID NO: 119361 - RNA, 23 nt, Artificial Sequence
  Synthetic
ucucccuagaaaacugauaaagu

SEQ ID NO: 119362 - RNA, 24 nt, Artificial Sequence
  Synthetic
uucucccuagaaaacugauaaagu

SEQ ID NO: 119363 - RNA, 21 nt, Artificial Sequence
  Synthetic
auauuauuuauuuucuaaagu

SEQ ID NO: 119364 - RNA, 22 nt, Artificial Sequence
  Synthetic
cauauuauuuauuuucuaaagu

SEQ ID NO: 119365 - RNA, 23 nt, Artificial Sequence
  Synthetic
ccauauuauuuauuuucuaaagu

SEQ ID NO: 119366 - RNA, 24 nt, Artificial Sequence
  Synthetic
cccauauuauuuauuuucuaaagu

SEQ ID NO: 119367 - RNA, 18 nt, Artificial Sequence
  Synthetic
cacaucaaacauuaaagu

SEQ ID NO: 119368 - RNA, 19 nt, Artificial Sequence
  Synthetic
acacaucaaacauuaaagu

SEQ ID NO: 119369 - RNA, 20 nt, Artificial Sequence
  Synthetic
cacacaucaaacauuaaagu

SEQ ID NO: 119370 - RNA, 21 nt, Artificial Sequence
  Synthetic
ucacacaucaaacauuaaagu

SEQ ID NO: 119371 - RNA, 22 nt, Artificial Sequence
  Synthetic
uucacacaucaaacauuaaagu

SEQ ID NO: 119372 - RNA, 23 nt, Artificial Sequence
  Synthetic
uuucacacaucaaacauuaaagu

SEQ ID NO: 119373 - RNA, 24 nt, Artificial Sequence
  Synthetic
uuuucacacaucaaacauuaaagu

SEQ ID NO: 119374 - RNA, 18 nt, Artificial Sequence
  Synthetic
agcucuccaccuuaaagu

SEQ ID NO: 119375 - RNA, 19 nt, Artificial Sequence
  Synthetic
aagcucuccaccuuaaagu

SEQ ID NO: 119376 - RNA, 22 nt, Artificial Sequence
  Synthetic
uggaagcucuccaccuuaaagu

SEQ ID NO: 119377 - RNA, 23 nt, Artificial Sequence
  Synthetic
auggaagcucuccaccuuaaagu

SEQ ID NO: 119378 - RNA, 24 nt, Artificial Sequence
  Synthetic
uauggaagcucuccaccuuaaagu

SEQ ID NO: 119379 - RNA, 18 nt, Artificial Sequence
  Synthetic
uaaauugauccuuaaagu

SEQ ID NO: 119380 - RNA, 19 nt, Artificial Sequence
  Synthetic
uuaaauugauccuuaaagu

SEQ ID NO: 119381 - RNA, 20 nt, Artificial Sequence
  Synthetic
cuuaaauugauccuuaaagu

SEQ ID NO: 119382 - RNA, 22 nt, Artificial Sequence
  Synthetic
ugcuuaaauugauccuuaaagu

SEQ ID NO: 119383 - RNA, 23 nt, Artificial Sequence
  Synthetic
augcuuaaauugauccuuaaagu

SEQ ID NO: 119384 - RNA, 24 nt, Artificial Sequence
  Synthetic
caugcuuaaauugauccuuaaagu

SEQ ID NO: 119385 - RNA, 19 nt, Artificial Sequence
  Synthetic
agauaaaaccauaacaagu

SEQ ID NO: 119386 - RNA, 20 nt, Artificial Sequence
  Synthetic
cagauaaaaccauaacaagu

SEQ ID NO: 119387 - RNA, 21 nt, Artificial Sequence
  Synthetic
acagauaaaaccauaacaagu

SEQ ID NO: 119388 - RNA, 22 nt, Artificial Sequence
  Synthetic
aacagauaaaaccauaacaagu

SEQ ID NO: 119389 - RNA, 24 nt, Artificial Sequence
  Synthetic
ugaacagauaaaaccauaacaagu

SEQ ID NO: 119390 - RNA, 19 nt, Artificial Sequence
  Synthetic
ugagauacuugccacaagu

SEQ ID NO: 119391 - RNA, 22 nt, Artificial Sequence
  Synthetic
aggugagauacuugccacaagu

SEQ ID NO: 119392 - RNA, 24 nt, Artificial Sequence
  Synthetic
agaggugagauacuugccacaagu

SEQ ID NO: 119393 - RNA, 18 nt, Artificial Sequence
  Synthetic
uggcaguguuccacaagu

SEQ ID NO: 119394 - RNA, 19 nt, Artificial Sequence
  Synthetic
cuggcaguguuccacaagu

SEQ ID NO: 119395 - RNA, 20 nt, Artificial Sequence
  Synthetic
ucuggcaguguuccacaagu

SEQ ID NO: 119396 - RNA, 21 nt, Artificial Sequence
  Synthetic
aucuggcaguguuccacaagu

SEQ ID NO: 119397 - RNA, 22 nt, Artificial Sequence
  Synthetic
caucuggcaguguuccacaagu

SEQ ID NO: 119398 - RNA, 24 nt, Artificial Sequence
  Synthetic
agcaucuggcaguguuccacaagu

SEQ ID NO: 119399 - RNA, 20 nt, Artificial Sequence
  Synthetic
cggaugcauuuuccccaagu

SEQ ID NO: 119400 - RNA, 21 nt, Artificial Sequence
  Synthetic
ccggaugcauuuuccccaagu

SEQ ID NO: 119401 - RNA, 22 nt, Artificial Sequence
  Synthetic
cccggaugcauuuuccccaagu

SEQ ID NO: 119402 - RNA, 23 nt, Artificial Sequence
  Synthetic
ucccggaugcauuuuccccaagu

SEQ ID NO: 119403 - RNA, 24 nt, Artificial Sequence
  Synthetic
uucccggaugcauuuuccccaagu

SEQ ID NO: 119404 - RNA, 19 nt, Artificial Sequence
  Synthetic
ugcaauaauuauuccaagu

SEQ ID NO: 119405 - RNA, 20 nt, Artificial Sequence
  Synthetic
uugcaauaauuauuccaagu

SEQ ID NO: 119406 - RNA, 21 nt, Artificial Sequence
  Synthetic
auugcaauaauuauuccaagu

SEQ ID NO: 119407 - RNA, 22 nt, Artificial Sequence
  Synthetic
aauugcaauaauuauuccaagu

SEQ ID NO: 119408 - RNA, 23 nt, Artificial Sequence
  Synthetic
uaauugcaauaauuauuccaagu

SEQ ID NO: 119409 - RNA, 24 nt, Artificial Sequence
  Synthetic
auaauugcaauaauuauuccaagu

SEQ ID NO: 119410 - RNA, 18 nt, Artificial Sequence
  Synthetic
uuuuaguuagaggcaagu

SEQ ID NO: 119411 - RNA, 19 nt, Artificial Sequence
  Synthetic
cuuuuaguuagaggcaagu

SEQ ID NO: 119412 - RNA, 20 nt, Artificial Sequence
  Synthetic
acuuuuaguuagaggcaagu

SEQ ID NO: 119413 - RNA, 21 nt, Artificial Sequence
  Synthetic
uacuuuuaguuagaggcaagu

SEQ ID NO: 119414 - RNA, 22 nt, Artificial Sequence
  Synthetic
uuacuuuuaguuagaggcaagu

SEQ ID NO: 119415 - RNA, 23 nt, Artificial Sequence
  Synthetic
auuacuuuuaguuagaggcaagu

SEQ ID NO: 119416 - RNA, 18 nt, Artificial Sequence
  Synthetic
caccuuuccuuggcaagu

SEQ ID NO: 119417 - RNA, 20 nt, Artificial Sequence
  Synthetic
agcaccuuuccuuggcaagu

SEQ ID NO: 119418 - RNA, 21 nt, Artificial Sequence
  Synthetic
cagcaccuuuccuuggcaagu

SEQ ID NO: 119419 - RNA, 22 nt, Artificial Sequence
  Synthetic
ucagcaccuuuccuuggcaagu

SEQ ID NO: 119420 - RNA, 23 nt, Artificial Sequence
  Synthetic
uucagcaccuuuccuuggcaagu

SEQ ID NO: 119421 - RNA, 24 nt, Artificial Sequence
  Synthetic
cuucagcaccuuuccuuggcaagu

SEQ ID NO: 119422 - RNA, 18 nt, Artificial Sequence
  Synthetic
ucauucugucaugcaagu

SEQ ID NO: 119423 - RNA, 19 nt, Artificial Sequence
  Synthetic
cucauucugucaugcaagu

SEQ ID NO: 119424 - RNA, 20 nt, Artificial Sequence
  Synthetic
acucauucugucaugcaagu

SEQ ID NO: 119425 - RNA, 23 nt, Artificial Sequence
  Synthetic
aggacucauucugucaugcaagu

SEQ ID NO: 119426 - RNA, 24 nt, Artificial Sequence
  Synthetic
aaggacucauucugucaugcaagu

SEQ ID NO: 119427 - RNA, 21 nt, Artificial Sequence
  Synthetic
cauuuucuaaaauuaucaagu

SEQ ID NO: 119428 - RNA, 22 nt, Artificial Sequence
  Synthetic
acauuuucuaaaauuaucaagu

SEQ ID NO: 119429 - RNA, 23 nt, Artificial Sequence
  Synthetic
aacauuuucuaaaauuaucaagu

SEQ ID NO: 119430 - RNA, 24 nt, Artificial Sequence
  Synthetic
uaacauuuucuaaaauuaucaagu

SEQ ID NO: 119431 - RNA, 18 nt, Artificial Sequence
  Synthetic
uuggacuuguuuucaagu

SEQ ID NO: 119432 - RNA, 19 nt, Artificial Sequence
  Synthetic
uuuggacuuguuuucaagu

SEQ ID NO: 119433 - RNA, 20 nt, Artificial Sequence
  Synthetic
uuuuggacuuguuuucaagu

SEQ ID NO: 119434 - RNA, 22 nt, Artificial Sequence
  Synthetic
uguuuuggacuuguuuucaagu

SEQ ID NO: 119435 - RNA, 23 nt, Artificial Sequence
  Synthetic
uuguuuuggacuuguuuucaagu

SEQ ID NO: 119436 - RNA, 24 nt, Artificial Sequence
  Synthetic
uuuguuuuggacuuguuuucaagu

SEQ ID NO: 119437 - RNA, 18 nt, Artificial Sequence
  Synthetic
ugaacaacaguaagaagu

SEQ ID NO: 119438 - RNA, 19 nt, Artificial Sequence
  Synthetic
augaacaacaguaagaagu

SEQ ID NO: 119439 - RNA, 20 nt, Artificial Sequence
  Synthetic
aaugaacaacaguaagaagu

SEQ ID NO: 119440 - RNA, 21 nt, Artificial Sequence
  Synthetic
caaugaacaacaguaagaagu

SEQ ID NO: 119441 - RNA, 23 nt, Artificial Sequence
  Synthetic
agcaaugaacaacaguaagaagu

SEQ ID NO: 119442 - RNA, 24 nt, Artificial Sequence
  Synthetic
cagcaaugaacaacaguaagaagu

SEQ ID NO: 119443 - RNA, 19 nt, Artificial Sequence
  Synthetic
ugauaauuauuccagaagu

SEQ ID NO: 119444 - RNA, 21 nt, Artificial Sequence
  Synthetic
ugugauaauuauuccagaagu

SEQ ID NO: 119445 - RNA, 24 nt, Artificial Sequence
  Synthetic
aggugugauaauuauuccagaagu

SEQ ID NO: 119446 - RNA, 18 nt, Artificial Sequence
  Synthetic
ugagccacuagcagaagu

SEQ ID NO: 119447 - RNA, 19 nt, Artificial Sequence
  Synthetic
cugagccacuagcagaagu

SEQ ID NO: 119448 - RNA, 20 nt, Artificial Sequence
  Synthetic
acugagccacuagcagaagu

SEQ ID NO: 119449 - RNA, 21 nt, Artificial Sequence
  Synthetic
uacugagccacuagcagaagu

SEQ ID NO: 119450 - RNA, 21 nt, Artificial Sequence
  Synthetic
agauucuuugaucucagaagu

SEQ ID NO: 119451 - RNA, 22 nt, Artificial Sequence
  Synthetic
cagauucuuugaucucagaagu

SEQ ID NO: 119452 - RNA, 23 nt, Artificial Sequence
  Synthetic
ccagauucuuugaucucagaagu

SEQ ID NO: 119453 - RNA, 24 nt, Artificial Sequence
  Synthetic
cccagauucuuugaucucagaagu

SEQ ID NO: 119454 - RNA, 18 nt, Artificial Sequence
  Synthetic
aacaccugagucagaagu

SEQ ID NO: 119455 - RNA, 19 nt, Artificial Sequence
  Synthetic
aaacaccugagucagaagu

SEQ ID NO: 119456 - RNA, 20 nt, Artificial Sequence
  Synthetic
aaaacaccugagucagaagu

SEQ ID NO: 119457 - RNA, 21 nt, Artificial Sequence
  Synthetic
aaaaacaccugagucagaagu

SEQ ID NO: 119458 - RNA, 22 nt, Artificial Sequence
  Synthetic
uaaaaacaccugagucagaagu

SEQ ID NO: 119459 - RNA, 23 nt, Artificial Sequence
  Synthetic
uuaaaaacaccugagucagaagu

SEQ ID NO: 119460 - RNA, 24 nt, Artificial Sequence
  Synthetic
auuaaaaacaccugagucagaagu

SEQ ID NO: 119461 - RNA, 18 nt, Artificial Sequence
  Synthetic
aaggggguggugagaagu

SEQ ID NO: 119462 - RNA, 20 nt, Artificial Sequence
  Synthetic
agaaggggguggugagaagu

SEQ ID NO: 119463 - RNA, 21 nt, Artificial Sequence
  Synthetic
aagaaggggguggugagaagu

SEQ ID NO: 119464 - RNA, 22 nt, Artificial Sequence
  Synthetic
aaagaaggggguggugagaagu

SEQ ID NO: 119465 - RNA, 23 nt, Artificial Sequence
  Synthetic
uaaagaaggggguggugagaagu

SEQ ID NO: 119466 - RNA, 24 nt, Artificial Sequence
  Synthetic
auaaagaaggggguggugagaagu

SEQ ID NO: 119467 - RNA, 18 nt, Artificial Sequence
  Synthetic
aaacuaaaguguagaagu

SEQ ID NO: 119468 - RNA, 19 nt, Artificial Sequence
  Synthetic
aaaacuaaaguguagaagu

SEQ ID NO: 119469 - RNA, 20 nt, Artificial Sequence
  Synthetic
uaaaacuaaaguguagaagu

SEQ ID NO: 119470 - RNA, 21 nt, Artificial Sequence
  Synthetic
uuaaaacuaaaguguagaagu

SEQ ID NO: 119471 - RNA, 22 nt, Artificial Sequence
  Synthetic
uuuaaaacuaaaguguagaagu

SEQ ID NO: 119472 - RNA, 23 nt, Artificial Sequence
  Synthetic
cuuuaaaacuaaaguguagaagu

SEQ ID NO: 119473 - RNA, 23 nt, Artificial Sequence
  Synthetic
uggcaaugagaaaaaaaggaagu

SEQ ID NO: 119474 - RNA, 24 nt, Artificial Sequence
  Synthetic
cuggcaaugagaaaaaaaggaagu

SEQ ID NO: 119475 - RNA, 19 nt, Artificial Sequence
  Synthetic
uguggcgaaaaagggaagu

SEQ ID NO: 119476 - RNA, 20 nt, Artificial Sequence
  Synthetic
auguggcgaaaaagggaagu

SEQ ID NO: 119477 - RNA, 21 nt, Artificial Sequence
  Synthetic
cauguggcgaaaaagggaagu

SEQ ID NO: 119478 - RNA, 24 nt, Artificial Sequence
  Synthetic
aggcauguggcgaaaaagggaagu

SEQ ID NO: 119479 - RNA, 18 nt, Artificial Sequence
  Synthetic
caaaagacauugggaagu

SEQ ID NO: 119480 - RNA, 19 nt, Artificial Sequence
  Synthetic
ucaaaagacauugggaagu

SEQ ID NO: 119481 - RNA, 20 nt, Artificial Sequence
  Synthetic
uucaaaagacauugggaagu

SEQ ID NO: 119482 - RNA, 21 nt, Artificial Sequence
  Synthetic
uuucaaaagacauugggaagu

SEQ ID NO: 119483 - RNA, 23 nt, Artificial Sequence
  Synthetic
aguuucaaaagacauugggaagu

SEQ ID NO: 119484 - RNA, 24 nt, Artificial Sequence
  Synthetic
aaguuucaaaagacauugggaagu

SEQ ID NO: 119485 - RNA, 19 nt, Artificial Sequence
  Synthetic
agccuagauuuguggaagu

SEQ ID NO: 119486 - RNA, 20 nt, Artificial Sequence
  Synthetic
aagccuagauuuguggaagu

SEQ ID NO: 119487 - RNA, 21 nt, Artificial Sequence
  Synthetic
caagccuagauuuguggaagu

SEQ ID NO: 119488 - RNA, 22 nt, Artificial Sequence
  Synthetic
ucaagccuagauuuguggaagu

SEQ ID NO: 119489 - RNA, 23 nt, Artificial Sequence
  Synthetic
uucaagccuagauuuguggaagu

SEQ ID NO: 119490 - RNA, 24 nt, Artificial Sequence
  Synthetic
uuucaagccuagauuuguggaagu

SEQ ID NO: 119491 - RNA, 18 nt, Artificial Sequence
  Synthetic
aacuguuagcucugaagu

SEQ ID NO: 119492 - RNA, 19 nt, Artificial Sequence
  Synthetic
caacuguuagcucugaagu

SEQ ID NO: 119493 - RNA, 20 nt, Artificial Sequence
  Synthetic
acaacuguuagcucugaagu

SEQ ID NO: 119494 - RNA, 21 nt, Artificial Sequence
  Synthetic
aacaacuguuagcucugaagu

SEQ ID NO: 119495 - RNA, 22 nt, Artificial Sequence
  Synthetic
caacaacuguuagcucugaagu

SEQ ID NO: 119496 - RNA, 23 nt, Artificial Sequence
  Synthetic
acaacaacuguuagcucugaagu

SEQ ID NO: 119497 - RNA, 18 nt, Artificial Sequence
  Synthetic
auagaaaacuuuugaagu

SEQ ID NO: 119498 - RNA, 19 nt, Artificial Sequence
  Synthetic
aauagaaaacuuuugaagu

SEQ ID NO: 119499 - RNA, 20 nt, Artificial Sequence
  Synthetic
uaauagaaaacuuuugaagu

SEQ ID NO: 119500 - RNA, 22 nt, Artificial Sequence
  Synthetic
aguaauagaaaacuuuugaagu

SEQ ID NO: 119501 - RNA, 23 nt, Artificial Sequence
  Synthetic
aaguaauagaaaacuuuugaagu

SEQ ID NO: 119502 - RNA, 24 nt, Artificial Sequence
  Synthetic
aaaguaauagaaaacuuuugaagu

SEQ ID NO: 119503 - RNA, 18 nt, Artificial Sequence
  Synthetic
aauuaggauauaauaagu

SEQ ID NO: 119504 - RNA, 20 nt, Artificial Sequence
  Synthetic
ugaauuaggauauaauaagu

SEQ ID NO: 119505 - RNA, 21 nt, Artificial Sequence
  Synthetic
augaauuaggauauaauaagu

SEQ ID NO: 119506 - RNA, 22 nt, Artificial Sequence
  Synthetic
uaugaauuaggauauaauaagu

SEQ ID NO: 119507 - RNA, 23 nt, Artificial Sequence
  Synthetic
uuaugaauuaggauauaauaagu

SEQ ID NO: 119508 - RNA, 24 nt, Artificial Sequence
  Synthetic
auuaugaauuaggauauaauaagu

SEQ ID NO: 119509 - RNA, 18 nt, Artificial Sequence
  Synthetic
aaucaacaugacauaagu

SEQ ID NO: 119510 - RNA, 19 nt, Artificial Sequence
  Synthetic
uaaucaacaugacauaagu

SEQ ID NO: 119511 - RNA, 21 nt, Artificial Sequence
  Synthetic
uguaaucaacaugacauaagu

SEQ ID NO: 119512 - RNA, 22 nt, Artificial Sequence
  Synthetic
auguaaucaacaugacauaagu

SEQ ID NO: 119513 - RNA, 23 nt, Artificial Sequence
  Synthetic
aauguaaucaacaugacauaagu

SEQ ID NO: 119514 - RNA, 24 nt, Artificial Sequence
  Synthetic
uaauguaaucaacaugacauaagu

SEQ ID NO: 119515 - RNA, 21 nt, Artificial Sequence
  Synthetic
caaauugagauacagauaagu

SEQ ID NO: 119516 - RNA, 23 nt, Artificial Sequence
  Synthetic
ugcaaauugagauacagauaagu

SEQ ID NO: 119517 - RNA, 24 nt, Artificial Sequence
  Synthetic
augcaaauugagauacagauaagu

SEQ ID NO: 119518 - RNA, 18 nt, Artificial Sequence
  Synthetic
aauuuuacuuuuauaagu

SEQ ID NO: 119519 - RNA, 19 nt, Artificial Sequence
  Synthetic
caauuuuacuuuuauaagu

SEQ ID NO: 119520 - RNA, 20 nt, Artificial Sequence
  Synthetic
ccaauuuuacuuuuauaagu

SEQ ID NO: 119521 - RNA, 21 nt, Artificial Sequence
  Synthetic
uccaauuuuacuuuuauaagu

SEQ ID NO: 119522 - RNA, 22 nt, Artificial Sequence
  Synthetic
uuccaauuuuacuuuuauaagu

SEQ ID NO: 119523 - RNA, 23 nt, Artificial Sequence
  Synthetic
auuccaauuuuacuuuuauaagu

SEQ ID NO: 119524 - RNA, 24 nt, Artificial Sequence
  Synthetic
aauuccaauuuuacuuuuauaagu

SEQ ID NO: 119525 - RNA, 18 nt, Artificial Sequence
  Synthetic
aagugacagaagcuaagu

SEQ ID NO: 119526 - RNA, 19 nt, Artificial Sequence
  Synthetic
caagugacagaagcuaagu

SEQ ID NO: 119527 - RNA, 20 nt, Artificial Sequence
  Synthetic
acaagugacagaagcuaagu

SEQ ID NO: 119528 - RNA, 21 nt, Artificial Sequence
  Synthetic
uacaagugacagaagcuaagu

SEQ ID NO: 119529 - RNA, 22 nt, Artificial Sequence
  Synthetic
auacaagugacagaagcuaagu

SEQ ID NO: 119530 - RNA, 24 nt, Artificial Sequence
  Synthetic
agauacaagugacagaagcuaagu

SEQ ID NO: 119531 - RNA, 18 nt, Artificial Sequence
  Synthetic
uaaagaggugagguaagu

SEQ ID NO: 119532 - RNA, 19 nt, Artificial Sequence
  Synthetic
auaaagaggugagguaagu

SEQ ID NO: 119533 - RNA, 20 nt, Artificial Sequence
  Synthetic
cauaaagaggugagguaagu

SEQ ID NO: 119534 - RNA, 24 nt, Artificial Sequence
  Synthetic
ugggcauaaagaggugagguaagu

SEQ ID NO: 119535 - RNA, 18 nt, Artificial Sequence
  Synthetic
aauuccguguuauuaagu

SEQ ID NO: 119536 - RNA, 19 nt, Artificial Sequence
  Synthetic
aaauuccguguuauuaagu

SEQ ID NO: 119537 - RNA, 20 nt, Artificial Sequence
  Synthetic
aaaauuccguguuauuaagu

SEQ ID NO: 119538 - RNA, 22 nt, Artificial Sequence
  Synthetic
agaaaauuccguguuauuaagu

SEQ ID NO: 119539 - RNA, 23 nt, Artificial Sequence
  Synthetic
uagaaaauuccguguuauuaagu

SEQ ID NO: 119540 - RNA, 24 nt, Artificial Sequence
  Synthetic
cuagaaaauuccguguuauuaagu

SEQ ID NO: 119541 - RNA, 18 nt, Artificial Sequence
  Synthetic
agggcaagaaaguuaagu

SEQ ID NO: 119542 - RNA, 19 nt, Artificial Sequence
  Synthetic
cagggcaagaaaguuaagu

SEQ ID NO: 119543 - RNA, 20 nt, Artificial Sequence
  Synthetic
acagggcaagaaaguuaagu

SEQ ID NO: 119544 - RNA, 22 nt, Artificial Sequence
  Synthetic
agacagggcaagaaaguuaagu

SEQ ID NO: 119545 - RNA, 23 nt, Artificial Sequence
  Synthetic
aagacagggcaagaaaguuaagu

SEQ ID NO: 119546 - RNA, 19 nt, Artificial Sequence
  Synthetic
aguuugacagaguuuaagu

SEQ ID NO: 119547 - RNA, 20 nt, Artificial Sequence
  Synthetic
caguuugacagaguuuaagu

SEQ ID NO: 119548 - RNA, 21 nt, Artificial Sequence
  Synthetic
ccaguuugacagaguuuaagu

SEQ ID NO: 119549 - RNA, 22 nt, Artificial Sequence
  Synthetic
accaguuugacagaguuuaagu

SEQ ID NO: 119550 - RNA, 24 nt, Artificial Sequence
  Synthetic
ugaccaguuugacagaguuuaagu

SEQ ID NO: 119551 - RNA, 19 nt, Artificial Sequence
  Synthetic
uggggacuagaagaacagu

SEQ ID NO: 119552 - RNA, 20 nt, Artificial Sequence
  Synthetic
auggggacuagaagaacagu

SEQ ID NO: 119553 - RNA, 21 nt, Artificial Sequence
  Synthetic
uauggggacuagaagaacagu

SEQ ID NO: 119554 - RNA, 22 nt, Artificial Sequence
  Synthetic
uuauggggacuagaagaacagu

SEQ ID NO: 119555 - RNA, 23 nt, Artificial Sequence
  Synthetic
uuuauggggacuagaagaacagu

SEQ ID NO: 119556 - RNA, 24 nt, Artificial Sequence
  Synthetic
uuuuauggggacuagaagaacagu

SEQ ID NO: 119557 - RNA, 18 nt, Artificial Sequence
  Synthetic
ugucaccagaguaacagu

SEQ ID NO: 119558 - RNA, 20 nt, Artificial Sequence
  Synthetic
ugugucaccagaguaacagu

SEQ ID NO: 119559 - RNA, 21 nt, Artificial Sequence
  Synthetic
uugugucaccagaguaacagu

SEQ ID NO: 119560 - RNA, 24 nt, Artificial Sequence
  Synthetic
agguugugucaccagaguaacagu

SEQ ID NO: 119561 - RNA, 18 nt, Artificial Sequence
  Synthetic
ugagaaguguggcacagu

SEQ ID NO: 119562 - RNA, 19 nt, Artificial Sequence
  Synthetic
cugagaaguguggcacagu

SEQ ID NO: 119563 - RNA, 20 nt, Artificial Sequence
  Synthetic
ccugagaaguguggcacagu

SEQ ID NO: 119564 - RNA, 21 nt, Artificial Sequence
  Synthetic
accugagaaguguggcacagu

SEQ ID NO: 119565 - RNA, 22 nt, Artificial Sequence
  Synthetic
uaccugagaaguguggcacagu

SEQ ID NO: 119566 - RNA, 23 nt, Artificial Sequence
  Synthetic
uuaccugagaaguguggcacagu

SEQ ID NO: 119567 - RNA, 24 nt, Artificial Sequence
  Synthetic
uuuaccugagaaguguggcacagu

SEQ ID NO: 119568 - RNA, 18 nt, Artificial Sequence
  Synthetic
ugucacccacaucacagu

SEQ ID NO: 119569 - RNA, 19 nt, Artificial Sequence
  Synthetic
augucacccacaucacagu

SEQ ID NO: 119570 - RNA, 21 nt, Artificial Sequence
  Synthetic
ugaugucacccacaucacagu

SEQ ID NO: 119571 - RNA, 22 nt, Artificial Sequence
  Synthetic
uugaugucacccacaucacagu

SEQ ID NO: 119572 - RNA, 24 nt, Artificial Sequence
  Synthetic
uguugaugucacccacaucacagu

SEQ ID NO: 119573 - RNA, 19 nt, Artificial Sequence
  Synthetic
cggccuccauaaagacagu

SEQ ID NO: 119574 - RNA, 20 nt, Artificial Sequence
  Synthetic
acggccuccauaaagacagu

SEQ ID NO: 119575 - RNA, 21 nt, Artificial Sequence
  Synthetic
aacggccuccauaaagacagu

SEQ ID NO: 119576 - RNA, 22 nt, Artificial Sequence
  Synthetic
uaacggccuccauaaagacagu

SEQ ID NO: 119577 - RNA, 24 nt, Artificial Sequence
  Synthetic
aguaacggccuccauaaagacagu

SEQ ID NO: 119578 - RNA, 22 nt, Artificial Sequence
  Synthetic
ugaauccuuuuuagaagacagu

SEQ ID NO: 119579 - RNA, 24 nt, Artificial Sequence
  Synthetic
agugaauccuuuuuagaagacagu

SEQ ID NO: 119580 - RNA, 18 nt, Artificial Sequence
  Synthetic
aaggcaagucaggacagu

SEQ ID NO: 119581 - RNA, 19 nt, Artificial Sequence
  Synthetic
aaaggcaagucaggacagu

SEQ ID NO: 119582 - RNA, 21 nt, Artificial Sequence
  Synthetic
agaaaggcaagucaggacagu

SEQ ID NO: 119583 - RNA, 23 nt, Artificial Sequence
  Synthetic
ugagaaaggcaagucaggacagu

SEQ ID NO: 119584 - RNA, 24 nt, Artificial Sequence
  Synthetic
augagaaaggcaagucaggacagu

SEQ ID NO: 119585 - RNA, 19 nt, Artificial Sequence
  Synthetic
agagggcaguugugacagu

SEQ ID NO: 119586 - RNA, 20 nt, Artificial Sequence
  Synthetic
uagagggcaguugugacagu

SEQ ID NO: 119587 - RNA, 21 nt, Artificial Sequence
  Synthetic
auagagggcaguugugacagu

SEQ ID NO: 119588 - RNA, 22 nt, Artificial Sequence
  Synthetic
uauagagggcaguugugacagu

SEQ ID NO: 119589 - RNA, 24 nt, Artificial Sequence
  Synthetic
cguauagagggcaguugugacagu

SEQ ID NO: 119590 - RNA, 18 nt, Artificial Sequence
  Synthetic
uuucaaucugaauacagu

SEQ ID NO: 119591 - RNA, 19 nt, Artificial Sequence
  Synthetic
cuuucaaucugaauacagu

SEQ ID NO: 119592 - RNA, 20 nt, Artificial Sequence
  Synthetic
ucuuucaaucugaauacagu

SEQ ID NO: 119593 - RNA, 21 nt, Artificial Sequence
  Synthetic
uucuuucaaucugaauacagu

SEQ ID NO: 119594 - RNA, 22 nt, Artificial Sequence
  Synthetic
auucuuucaaucugaauacagu

SEQ ID NO: 119595 - RNA, 18 nt, Artificial Sequence
  Synthetic
uauuaguugagauacagu

SEQ ID NO: 119596 - RNA, 21 nt, Artificial Sequence
  Synthetic
agguauuaguugagauacagu

SEQ ID NO: 119597 - RNA, 22 nt, Artificial Sequence
  Synthetic
aagguauuaguugagauacagu

SEQ ID NO: 119598 - RNA, 23 nt, Artificial Sequence
  Synthetic
aaagguauuaguugagauacagu

SEQ ID NO: 119599 - RNA, 24 nt, Artificial Sequence
  Synthetic
aaaagguauuaguugagauacagu

SEQ ID NO: 119600 - RNA, 18 nt, Artificial Sequence
  Synthetic
uuugguauaacuaccagu

SEQ ID NO: 119601 - RNA, 19 nt, Artificial Sequence
  Synthetic
cuuugguauaacuaccagu

SEQ ID NO: 119602 - RNA, 20 nt, Artificial Sequence
  Synthetic
acuuugguauaacuaccagu

SEQ ID NO: 119603 - RNA, 22 nt, Artificial Sequence
  Synthetic
agacuuugguauaacuaccagu

SEQ ID NO: 119604 - RNA, 23 nt, Artificial Sequence
  Synthetic
aagacuuugguauaacuaccagu

SEQ ID NO: 119605 - RNA, 24 nt, Artificial Sequence
  Synthetic
uaagacuuugguauaacuaccagu

SEQ ID NO: 119606 - RNA, 20 nt, Artificial Sequence
  Synthetic
uggaucuggcagcuaccagu

SEQ ID NO: 119607 - RNA, 21 nt, Artificial Sequence
  Synthetic
uuggaucuggcagcuaccagu

SEQ ID NO: 119608 - RNA, 22 nt, Artificial Sequence
  Synthetic
cuuggaucuggcagcuaccagu

SEQ ID NO: 119609 - RNA, 23 nt, Artificial Sequence
  Synthetic
acuuggaucuggcagcuaccagu

SEQ ID NO: 119610 - RNA, 24 nt, Artificial Sequence
  Synthetic
cacuuggaucuggcagcuaccagu

SEQ ID NO: 119611 - RNA, 18 nt, Artificial Sequence
  Synthetic
ugauuauuaaaagccagu

SEQ ID NO: 119612 - RNA, 20 nt, Artificial Sequence
  Synthetic
ugugauuauuaaaagccagu

SEQ ID NO: 119613 - RNA, 21 nt, Artificial Sequence
  Synthetic
augugauuauuaaaagccagu

SEQ ID NO: 119614 - RNA, 23 nt, Artificial Sequence
  Synthetic
ugaugugauuauuaaaagccagu

SEQ ID NO: 119615 - RNA, 24 nt, Artificial Sequence
  Synthetic
cugaugugauuauuaaaagccagu

SEQ ID NO: 119616 - RNA, 21 nt, Artificial Sequence
  Synthetic
ccccaaagacagccagccagu

SEQ ID NO: 119617 - RNA, 22 nt, Artificial Sequence
  Synthetic
uccccaaagacagccagccagu

SEQ ID NO: 119618 - RNA, 23 nt, Artificial Sequence
  Synthetic
uuccccaaagacagccagccagu

SEQ ID NO: 119619 - RNA, 24 nt, Artificial Sequence
  Synthetic
cuuccccaaagacagccagccagu

SEQ ID NO: 119620 - RNA, 18 nt, Artificial Sequence
  Synthetic
aacagagucaucuccagu

SEQ ID NO: 119621 - RNA, 19 nt, Artificial Sequence
  Synthetic
aaacagagucaucuccagu

SEQ ID NO: 119622 - RNA, 22 nt, Artificial Sequence
  Synthetic
uggaaacagagucaucuccagu

SEQ ID NO: 119623 - RNA, 23 nt, Artificial Sequence
  Synthetic
uuggaaacagagucaucuccagu

SEQ ID NO: 119624 - RNA, 24 nt, Artificial Sequence
  Synthetic
auuggaaacagagucaucuccagu

SEQ ID NO: 119625 - RNA, 18 nt, Artificial Sequence
  Synthetic
cauaauuuacaguccagu

SEQ ID NO: 119626 - RNA, 19 nt, Artificial Sequence
  Synthetic
acauaauuuacaguccagu

SEQ ID NO: 119627 - RNA, 20 nt, Artificial Sequence
  Synthetic
cacauaauuuacaguccagu

SEQ ID NO: 119628 - RNA, 22 nt, Artificial Sequence
  Synthetic
ugcacauaauuuacaguccagu

SEQ ID NO: 119629 - RNA, 23 nt, Artificial Sequence
  Synthetic
cugcacauaauuuacaguccagu

SEQ ID NO: 119630 - RNA, 24 nt, Artificial Sequence
  Synthetic
ucugcacauaauuuacaguccagu

SEQ ID NO: 119631 - RNA, 18 nt, Artificial Sequence
  Synthetic
caccacaaacauuccagu

SEQ ID NO: 119632 - RNA, 19 nt, Artificial Sequence
  Synthetic
ccaccacaaacauuccagu

SEQ ID NO: 119633 - RNA, 20 nt, Artificial Sequence
  Synthetic
uccaccacaaacauuccagu

SEQ ID NO: 119634 - RNA, 21 nt, Artificial Sequence
  Synthetic
auccaccacaaacauuccagu

SEQ ID NO: 119635 - RNA, 22 nt, Artificial Sequence
  Synthetic
aauccaccacaaacauuccagu

SEQ ID NO: 119636 - RNA, 23 nt, Artificial Sequence
  Synthetic
aaauccaccacaaacauuccagu

SEQ ID NO: 119637 - RNA, 18 nt, Artificial Sequence
  Synthetic
acaucuguauuuuccagu

SEQ ID NO: 119638 - RNA, 20 nt, Artificial Sequence
  Synthetic
ugacaucuguauuuuccagu

SEQ ID NO: 119639 - RNA, 21 nt, Artificial Sequence
  Synthetic
augacaucuguauuuuccagu

SEQ ID NO: 119640 - RNA, 22 nt, Artificial Sequence
  Synthetic
aaugacaucuguauuuuccagu

SEQ ID NO: 119641 - RNA, 24 nt, Artificial Sequence
  Synthetic
ugaaugacaucuguauuuuccagu

SEQ ID NO: 119642 - RNA, 19 nt, Artificial Sequence
  Synthetic
uggccuuaacaaaagcagu

SEQ ID NO: 119643 - RNA, 23 nt, Artificial Sequence
  Synthetic
uggguggccuuaacaaaagcagu

SEQ ID NO: 119644 - RNA, 24 nt, Artificial Sequence
  Synthetic
cuggguggccuuaacaaaagcagu

SEQ ID NO: 119645 - RNA, 18 nt, Artificial Sequence
  Synthetic
uggaggguuagaggcagu

SEQ ID NO: 119646 - RNA, 19 nt, Artificial Sequence
  Synthetic
auggaggguuagaggcagu

SEQ ID NO: 119647 - RNA, 20 nt, Artificial Sequence
  Synthetic
uauggaggguuagaggcagu

SEQ ID NO: 119648 - RNA, 21 nt, Artificial Sequence
  Synthetic
auauggaggguuagaggcagu

SEQ ID NO: 119649 - RNA, 22 nt, Artificial Sequence
  Synthetic
cauauggaggguuagaggcagu

SEQ ID NO: 119650 - RNA, 18 nt, Artificial Sequence
  Synthetic
cucaguagcaacugcagu

SEQ ID NO: 119651 - RNA, 19 nt, Artificial Sequence
  Synthetic
ccucaguagcaacugcagu

SEQ ID NO: 119652 - RNA, 21 nt, Artificial Sequence
  Synthetic
agccucaguagcaacugcagu

SEQ ID NO: 119653 - RNA, 22 nt, Artificial Sequence
  Synthetic
aagccucaguagcaacugcagu

SEQ ID NO: 119654 - RNA, 24 nt, Artificial Sequence
  Synthetic
ugaagccucaguagcaacugcagu

SEQ ID NO: 119655 - RNA, 18 nt, Artificial Sequence
  Synthetic
caacaagaguucugcagu

SEQ ID NO: 119656 - RNA, 19 nt, Artificial Sequence
  Synthetic
ccaacaagaguucugcagu

SEQ ID NO: 119657 - RNA, 20 nt, Artificial Sequence
  Synthetic
uccaacaagaguucugcagu

SEQ ID NO: 119658 - RNA, 21 nt, Artificial Sequence
  Synthetic
uuccaacaagaguucugcagu

SEQ ID NO: 119659 - RNA, 22 nt, Artificial Sequence
  Synthetic
auuccaacaagaguucugcagu

SEQ ID NO: 119660 - RNA, 23 nt, Artificial Sequence
  Synthetic
aauuccaacaagaguucugcagu

SEQ ID NO: 119661 - RNA, 24 nt, Artificial Sequence
  Synthetic
uaauuccaacaagaguucugcagu

SEQ ID NO: 119662 - RNA, 19 nt, Artificial Sequence
  Synthetic
agguugguuuuucugcagu

SEQ ID NO: 119663 - RNA, 20 nt, Artificial Sequence
  Synthetic
cagguugguuuuucugcagu

SEQ ID NO: 119664 - RNA, 21 nt, Artificial Sequence
  Synthetic
ccagguugguuuuucugcagu

SEQ ID NO: 119665 - RNA, 22 nt, Artificial Sequence
  Synthetic
uccagguugguuuuucugcagu

SEQ ID NO: 119666 - RNA, 23 nt, Artificial Sequence
  Synthetic
uuccagguugguuuuucugcagu

SEQ ID NO: 119667 - RNA, 24 nt, Artificial Sequence
  Synthetic
uuuccagguugguuuuucugcagu

SEQ ID NO: 119668 - RNA, 18 nt, Artificial Sequence
  Synthetic
uuaagguuaaugugcagu

SEQ ID NO: 119669 - RNA, 19 nt, Artificial Sequence
  Synthetic
auuaagguuaaugugcagu

SEQ ID NO: 119670 - RNA, 20 nt, Artificial Sequence
  Synthetic
aauuaagguuaaugugcagu

SEQ ID NO: 119671 - RNA, 22 nt, Artificial Sequence
  Synthetic
agaauuaagguuaaugugcagu

SEQ ID NO: 119672 - RNA, 23 nt, Artificial Sequence
  Synthetic
uagaauuaagguuaaugugcagu

SEQ ID NO: 119673 - RNA, 24 nt, Artificial Sequence
  Synthetic
cuagaauuaagguuaaugugcagu

SEQ ID NO: 119674 - RNA, 18 nt, Artificial Sequence
  Synthetic
aguagaaaucucaucagu

SEQ ID NO: 119675 - RNA, 19 nt, Artificial Sequence
  Synthetic
caguagaaaucucaucagu

SEQ ID NO: 119676 - RNA, 20 nt, Artificial Sequence
  Synthetic
acaguagaaaucucaucagu

SEQ ID NO: 119677 - RNA, 21 nt, Artificial Sequence
  Synthetic
aacaguagaaaucucaucagu

SEQ ID NO: 119678 - RNA, 22 nt, Artificial Sequence
  Synthetic
caacaguagaaaucucaucagu

SEQ ID NO: 119679 - RNA, 18 nt, Artificial Sequence
  Synthetic
uuauacauugucaucagu

SEQ ID NO: 119680 - RNA, 19 nt, Artificial Sequence
  Synthetic
uuuauacauugucaucagu

SEQ ID NO: 119681 - RNA, 20 nt, Artificial Sequence
  Synthetic
auuuauacauugucaucagu

SEQ ID NO: 119682 - RNA, 21 nt, Artificial Sequence
  Synthetic
aauuuauacauugucaucagu

SEQ ID NO: 119683 - RNA, 22 nt, Artificial Sequence
  Synthetic
uaauuuauacauugucaucagu

SEQ ID NO: 119684 - RNA, 23 nt, Artificial Sequence
  Synthetic
uuaauuuauacauugucaucagu

SEQ ID NO: 119685 - RNA, 24 nt, Artificial Sequence
  Synthetic
cuuaauuuauacauugucaucagu

SEQ ID NO: 119686 - RNA, 18 nt, Artificial Sequence
  Synthetic
cuguuauggugacucagu

SEQ ID NO: 119687 - RNA, 19 nt, Artificial Sequence
  Synthetic
ucuguuauggugacucagu

SEQ ID NO: 119688 - RNA, 21 nt, Artificial Sequence
  Synthetic
ugucuguuauggugacucagu

SEQ ID NO: 119689 - RNA, 22 nt, Artificial Sequence
  Synthetic
cugucuguuauggugacucagu

SEQ ID NO: 119690 - RNA, 23 nt, Artificial Sequence
  Synthetic
ucugucuguuauggugacucagu

SEQ ID NO: 119691 - RNA, 24 nt, Artificial Sequence
  Synthetic
cucugucuguuauggugacucagu

SEQ ID NO: 119692 - RNA, 18 nt, Artificial Sequence
  Synthetic
acaggcucuugccucagu

SEQ ID NO: 119693 - RNA, 19 nt, Artificial Sequence
  Synthetic
uacaggcucuugccucagu

SEQ ID NO: 119694 - RNA, 21 nt, Artificial Sequence
  Synthetic
uuuuauugcauauaucucagu

SEQ ID NO: 119695 - RNA, 22 nt, Artificial Sequence
  Synthetic
uuuuuauugcauauaucucagu

SEQ ID NO: 119696 - RNA, 24 nt, Artificial Sequence
  Synthetic
uguuuuuauugcauauaucucagu

SEQ ID NO: 119697 - RNA, 18 nt, Artificial Sequence
  Synthetic
aucgcaggagcugucagu

SEQ ID NO: 119698 - RNA, 19 nt, Artificial Sequence
  Synthetic
caucgcaggagcugucagu

SEQ ID NO: 119699 - RNA, 20 nt, Artificial Sequence
  Synthetic
ucaucgcaggagcugucagu

SEQ ID NO: 119700 - RNA, 21 nt, Artificial Sequence
  Synthetic
cucaucgcaggagcugucagu

SEQ ID NO: 119701 - RNA, 22 nt, Artificial Sequence
  Synthetic
ccucaucgcaggagcugucagu

SEQ ID NO: 119702 - RNA, 23 nt, Artificial Sequence
  Synthetic
accucaucgcaggagcugucagu

SEQ ID NO: 119703 - RNA, 24 nt, Artificial Sequence
  Synthetic
caccucaucgcaggagcugucagu

SEQ ID NO: 119704 - RNA, 18 nt, Artificial Sequence
  Synthetic
aacucauacaaauucagu

SEQ ID NO: 119705 - RNA, 19 nt, Artificial Sequence
  Synthetic
aaacucauacaaauucagu

SEQ ID NO: 119706 - RNA, 20 nt, Artificial Sequence
  Synthetic
caaacucauacaaauucagu

SEQ ID NO: 119707 - RNA, 21 nt, Artificial Sequence
  Synthetic
ccaaacucauacaaauucagu

SEQ ID NO: 119708 - RNA, 22 nt, Artificial Sequence
  Synthetic
accaaacucauacaaauucagu

SEQ ID NO: 119709 - RNA, 23 nt, Artificial Sequence
  Synthetic
uaccaaacucauacaaauucagu

SEQ ID NO: 119710 - RNA, 24 nt, Artificial Sequence
  Synthetic
uuaccaaacucauacaaauucagu

SEQ ID NO: 119711 - RNA, 18 nt, Artificial Sequence
  Synthetic
aggcuagguggaaagagu

SEQ ID NO: 119712 - RNA, 20 nt, Artificial Sequence
  Synthetic
ugaggcuagguggaaagagu

SEQ ID NO: 119713 - RNA, 21 nt, Artificial Sequence
  Synthetic
uugaggcuagguggaaagagu

SEQ ID NO: 119714 - RNA, 23 nt, Artificial Sequence
  Synthetic
uguugaggcuagguggaaagagu

SEQ ID NO: 119715 - RNA, 24 nt, Artificial Sequence
  Synthetic
auguugaggcuagguggaaagagu

SEQ ID NO: 119716 - RNA, 18 nt, Artificial Sequence
  Synthetic
aacgaacggguaaagagu

SEQ ID NO: 119717 - RNA, 20 nt, Artificial Sequence
  Synthetic
agaacgaacggguaaagagu

SEQ ID NO: 119718 - RNA, 21 nt, Artificial Sequence
  Synthetic
uagaacgaacggguaaagagu

SEQ ID NO: 119719 - RNA, 22 nt, Artificial Sequence
  Synthetic
cuagaacgaacggguaaagagu

SEQ ID NO: 119720 - RNA, 23 nt, Artificial Sequence
  Synthetic
ucuagaacgaacggguaaagagu

SEQ ID NO: 119721 - RNA, 24 nt, Artificial Sequence
  Synthetic
aucuagaacgaacggguaaagagu

SEQ ID NO: 119722 - RNA, 18 nt, Artificial Sequence
  Synthetic
auguaagucuucaagagu

SEQ ID NO: 119723 - RNA, 19 nt, Artificial Sequence
  Synthetic
uauguaagucuucaagagu

SEQ ID NO: 119724 - RNA, 20 nt, Artificial Sequence
  Synthetic
auauguaagucuucaagagu

SEQ ID NO: 119725 - RNA, 21 nt, Artificial Sequence
  Synthetic
aauauguaagucuucaagagu

SEQ ID NO: 119726 - RNA, 22 nt, Artificial Sequence
  Synthetic
aaauauguaagucuucaagagu

SEQ ID NO: 119727 - RNA, 23 nt, Artificial Sequence
  Synthetic
aaaauauguaagucuucaagagu

SEQ ID NO: 119728 - RNA, 24 nt, Artificial Sequence
  Synthetic
aaaaauauguaagucuucaagagu

SEQ ID NO: 119729 - RNA, 18 nt, Artificial Sequence
  Synthetic
uuugacagucagaagagu

SEQ ID NO: 119730 - RNA, 19 nt, Artificial Sequence
  Synthetic
auuugacagucagaagagu

SEQ ID NO: 119731 - RNA, 20 nt, Artificial Sequence
  Synthetic
aauuugacagucagaagagu

SEQ ID NO: 119732 - RNA, 21 nt, Artificial Sequence
  Synthetic
caauuugacagucagaagagu

SEQ ID NO: 119733 - RNA, 22 nt, Artificial Sequence
  Synthetic
ccaauuugacagucagaagagu

SEQ ID NO: 119734 - RNA, 21 nt, Artificial Sequence
  Synthetic
uagccaaugauggauaagagu

SEQ ID NO: 119735 - RNA, 22 nt, Artificial Sequence
  Synthetic
uuagccaaugauggauaagagu

SEQ ID NO: 119736 - RNA, 23 nt, Artificial Sequence
  Synthetic
uuuagccaaugauggauaagagu

SEQ ID NO: 119737 - RNA, 24 nt, Artificial Sequence
  Synthetic
auuuagccaaugauggauaagagu

SEQ ID NO: 119738 - RNA, 21 nt, Artificial Sequence
  Synthetic
aggguaaaaaauaguaagagu

SEQ ID NO: 119739 - RNA, 24 nt, Artificial Sequence
  Synthetic
aggaggguaaaaaauaguaagagu

SEQ ID NO: 119740 - RNA, 18 nt, Artificial Sequence
  Synthetic
caaauacacccacagagu

SEQ ID NO: 119741 - RNA, 21 nt, Artificial Sequence
  Synthetic
aggcaaauacacccacagagu

SEQ ID NO: 119742 - RNA, 22 nt, Artificial Sequence
  Synthetic
uaggcaaauacacccacagagu

SEQ ID NO: 119743 - RNA, 23 nt, Artificial Sequence
  Synthetic
cuaggcaaauacacccacagagu

SEQ ID NO: 119744 - RNA, 24 nt, Artificial Sequence
  Synthetic
ccuaggcaaauacacccacagagu

SEQ ID NO: 119745 - RNA, 18 nt, Artificial Sequence
  Synthetic
caaagguacagccagagu

SEQ ID NO: 119746 - RNA, 19 nt, Artificial Sequence
  Synthetic
ccaaagguacagccagagu

SEQ ID NO: 119747 - RNA, 20 nt, Artificial Sequence
  Synthetic
cccaaagguacagccagagu

SEQ ID NO: 119748 - RNA, 21 nt, Artificial Sequence
  Synthetic
ucccaaagguacagccagagu

SEQ ID NO: 119749 - RNA, 23 nt, Artificial Sequence
  Synthetic
ugucccaaagguacagccagagu

SEQ ID NO: 119750 - RNA, 24 nt, Artificial Sequence
  Synthetic
uugucccaaagguacagccagagu

SEQ ID NO: 119751 - RNA, 20 nt, Artificial Sequence
  Synthetic
agguuuaagagaagcagagu

SEQ ID NO: 119752 - RNA, 21 nt, Artificial Sequence
  Synthetic
cagguuuaagagaagcagagu

SEQ ID NO: 119753 - RNA, 22 nt, Artificial Sequence
  Synthetic
ccagguuuaagagaagcagagu

SEQ ID NO: 119754 - RNA, 24 nt, Artificial Sequence
  Synthetic
agccagguuuaagagaagcagagu

SEQ ID NO: 119755 - RNA, 18 nt, Artificial Sequence
  Synthetic
aauauugagaggcagagu

SEQ ID NO: 119756 - RNA, 19 nt, Artificial Sequence
  Synthetic
aaauauugagaggcagagu

SEQ ID NO: 119757 - RNA, 20 nt, Artificial Sequence
  Synthetic
caaauauugagaggcagagu

SEQ ID NO: 119758 - RNA, 21 nt, Artificial Sequence
  Synthetic
ucaaauauugagaggcagagu

SEQ ID NO: 119759 - RNA, 22 nt, Artificial Sequence
  Synthetic
cucaaauauugagaggcagagu

SEQ ID NO: 119760 - RNA, 23 nt, Artificial Sequence
  Synthetic
acucaaauauugagaggcagagu

SEQ ID NO: 119761 - RNA, 18 nt, Artificial Sequence
  Synthetic
cucucuuccuugcagagu

SEQ ID NO: 119762 - RNA, 19 nt, Artificial Sequence
  Synthetic
ucucucuuccuugcagagu

SEQ ID NO: 119763 - RNA, 20 nt, Artificial Sequence
  Synthetic
cucucucuuccuugcagagu

SEQ ID NO: 119764 - RNA, 21 nt, Artificial Sequence
  Synthetic
ccucucucuuccuugcagagu

SEQ ID NO: 119765 - RNA, 22 nt, Artificial Sequence
  Synthetic
cccucucucuuccuugcagagu

SEQ ID NO: 119766 - RNA, 23 nt, Artificial Sequence
  Synthetic
ucccucucucuuccuugcagagu

SEQ ID NO: 119767 - RNA, 24 nt, Artificial Sequence
  Synthetic
cucccucucucuuccuugcagagu

SEQ ID NO: 119768 - RNA, 18 nt, Artificial Sequence
  Synthetic
cagaaaaguccucagagu

SEQ ID NO: 119769 - RNA, 19 nt, Artificial Sequence
  Synthetic
ccagaaaaguccucagagu

SEQ ID NO: 119770 - RNA, 20 nt, Artificial Sequence
  Synthetic
accagaaaaguccucagagu

SEQ ID NO: 119771 - RNA, 21 nt, Artificial Sequence
  Synthetic
aaccagaaaaguccucagagu

SEQ ID NO: 119772 - RNA, 22 nt, Artificial Sequence
  Synthetic
aaaccagaaaaguccucagagu

SEQ ID NO: 119773 - RNA, 23 nt, Artificial Sequence
  Synthetic
aaaaccagaaaaguccucagagu

SEQ ID NO: 119774 - RNA, 24 nt, Artificial Sequence
  Synthetic
caaaaccagaaaaguccucagagu

SEQ ID NO: 119775 - RNA, 18 nt, Artificial Sequence
  Synthetic
aaauuucaaggagagagu

SEQ ID NO: 119776 - RNA, 20 nt, Artificial Sequence
  Synthetic
agaaauuucaaggagagagu

SEQ ID NO: 119777 - RNA, 21 nt, Artificial Sequence
  Synthetic
uagaaauuucaaggagagagu

SEQ ID NO: 119778 - RNA, 23 nt, Artificial Sequence
  Synthetic
uguagaaauuucaaggagagagu

SEQ ID NO: 119779 - RNA, 18 nt, Artificial Sequence
  Synthetic
aggaaauuguuggagagu

SEQ ID NO: 119780 - RNA, 20 nt, Artificial Sequence
  Synthetic
ugaggaaauuguuggagagu

SEQ ID NO: 119781 - RNA, 22 nt, Artificial Sequence
  Synthetic
agugaggaaauuguuggagagu

SEQ ID NO: 119782 - RNA, 24 nt, Artificial Sequence
  Synthetic
agagugaggaaauuguuggagagu

SEQ ID NO: 119783 - RNA, 18 nt, Artificial Sequence
  Synthetic
augacaacaccugagagu

SEQ ID NO: 119784 - RNA, 19 nt, Artificial Sequence
  Synthetic
uaugacaacaccugagagu

SEQ ID NO: 119785 - RNA, 21 nt, Artificial Sequence
  Synthetic
aguaugacaacaccugagagu

SEQ ID NO: 119786 - RNA, 24 nt, Artificial Sequence
  Synthetic
cggaguaugacaacaccugagagu

SEQ ID NO: 119787 - RNA, 19 nt, Artificial Sequence
  Synthetic
agcuuuaauaaaauagagu

SEQ ID NO: 119788 - RNA, 20 nt, Artificial Sequence
  Synthetic
cagcuuuaauaaaauagagu

SEQ ID NO: 119789 - RNA, 21 nt, Artificial Sequence
  Synthetic
acagcuuuaauaaaauagagu

SEQ ID NO: 119790 - RNA, 23 nt, Artificial Sequence
  Synthetic
cgacagcuuuaauaaaauagagu

SEQ ID NO: 119791 - RNA, 24 nt, Artificial Sequence
  Synthetic
acgacagcuuuaauaaaauagagu

SEQ ID NO: 119792 - RNA, 18 nt, Artificial Sequence
  Synthetic
uucacguggggauagagu

SEQ ID NO: 119793 - RNA, 19 nt, Artificial Sequence
  Synthetic
auucacguggggauagagu

SEQ ID NO: 119794 - RNA, 20 nt, Artificial Sequence
  Synthetic
aauucacguggggauagagu

SEQ ID NO: 119795 - RNA, 23 nt, Artificial Sequence
  Synthetic
aggaauucacguggggauagagu

SEQ ID NO: 119796 - RNA, 24 nt, Artificial Sequence
  Synthetic
caggaauucacguggggauagagu

SEQ ID NO: 119797 - RNA, 18 nt, Artificial Sequence
  Synthetic
ucuaaaaucugcuagagu

SEQ ID NO: 119798 - RNA, 19 nt, Artificial Sequence
  Synthetic
uucuaaaaucugcuagagu

SEQ ID NO: 119799 - RNA, 20 nt, Artificial Sequence
  Synthetic
uuucuaaaaucugcuagagu

SEQ ID NO: 119800 - RNA, 21 nt, Artificial Sequence
  Synthetic
uuuucuaaaaucugcuagagu

SEQ ID NO: 119801 - RNA, 23 nt, Artificial Sequence
  Synthetic
uguuuucuaaaaucugcuagagu

SEQ ID NO: 119802 - RNA, 24 nt, Artificial Sequence
  Synthetic
cuguuuucuaaaaucugcuagagu

SEQ ID NO: 119803 - RNA, 18 nt, Artificial Sequence
  Synthetic
uuuccuauuacuuagagu

SEQ ID NO: 119804 - RNA, 19 nt, Artificial Sequence
  Synthetic
auuuccuauuacuuagagu

SEQ ID NO: 119805 - RNA, 21 nt, Artificial Sequence
  Synthetic
ugauuuccuauuacuuagagu

SEQ ID NO: 119806 - RNA, 22 nt, Artificial Sequence
  Synthetic
augauuuccuauuacuuagagu

SEQ ID NO: 119807 - RNA, 23 nt, Artificial Sequence
  Synthetic
aaugauuuccuauuacuuagagu

SEQ ID NO: 119808 - RNA, 24 nt, Artificial Sequence
  Synthetic
uaaugauuuccuauuacuuagagu

SEQ ID NO: 119809 - RNA, 18 nt, Artificial Sequence
  Synthetic
ucccaaauuucuuagagu

SEQ ID NO: 119810 - RNA, 19 nt, Artificial Sequence
  Synthetic
aucccaaauuucuuagagu

SEQ ID NO: 119811 - RNA, 21 nt, Artificial Sequence
  Synthetic
ugaucccaaauuucuuagagu

SEQ ID NO: 119812 - RNA, 22 nt, Artificial Sequence
  Synthetic
augaucccaaauuucuuagagu

SEQ ID NO: 119813 - RNA, 23 nt, Artificial Sequence
  Synthetic
uaugaucccaaauuucuuagagu

SEQ ID NO: 119814 - RNA, 24 nt, Artificial Sequence
  Synthetic
cuaugaucccaaauuucuuagagu

SEQ ID NO: 119815 - RNA, 18 nt, Artificial Sequence
  Synthetic
auuucgaggccaacgagu

SEQ ID NO: 119816 - RNA, 20 nt, Artificial Sequence
  Synthetic
ugauuucgaggccaacgagu

SEQ ID NO: 119817 - RNA, 21 nt, Artificial Sequence
  Synthetic
cugauuucgaggccaacgagu

SEQ ID NO: 119818 - RNA, 22 nt, Artificial Sequence
  Synthetic
ucugauuucgaggccaacgagu

SEQ ID NO: 119819 - RNA, 23 nt, Artificial Sequence
  Synthetic
uucugauuucgaggccaacgagu

SEQ ID NO: 119820 - RNA, 24 nt, Artificial Sequence
  Synthetic
cuucugauuucgaggccaacgagu

SEQ ID NO: 119821 - RNA, 18 nt, Artificial Sequence
  Synthetic
uauucucccgcaaggagu

SEQ ID NO: 119822 - RNA, 20 nt, Artificial Sequence
  Synthetic
aguauucucccgcaaggagu

SEQ ID NO: 119823 - RNA, 21 nt, Artificial Sequence
  Synthetic
aaguauucucccgcaaggagu

SEQ ID NO: 119824 - RNA, 22 nt, Artificial Sequence
  Synthetic
caaguauucucccgcaaggagu

SEQ ID NO: 119825 - RNA, 18 nt, Artificial Sequence
  Synthetic
ugggagaauggaaggagu

SEQ ID NO: 119826 - RNA, 19 nt, Artificial Sequence
  Synthetic
cugggagaauggaaggagu

SEQ ID NO: 119827 - RNA, 21 nt, Artificial Sequence
  Synthetic
ugcugggagaauggaaggagu

SEQ ID NO: 119828 - RNA, 22 nt, Artificial Sequence
  Synthetic
cugcugggagaauggaaggagu

SEQ ID NO: 119829 - RNA, 24 nt, Artificial Sequence
  Synthetic
ugcugcugggagaauggaaggagu

SEQ ID NO: 119830 - RNA, 18 nt, Artificial Sequence
  Synthetic
acuauguugguaaggagu

SEQ ID NO: 119831 - RNA, 19 nt, Artificial Sequence
  Synthetic
aacuauguugguaaggagu

SEQ ID NO: 119832 - RNA, 20 nt, Artificial Sequence
  Synthetic
uaacuauguugguaaggagu

SEQ ID NO: 119833 - RNA, 21 nt, Artificial Sequence
  Synthetic
cuaacuauguugguaaggagu

SEQ ID NO: 119834 - RNA, 22 nt, Artificial Sequence
  Synthetic
ucuaacuauguugguaaggagu

SEQ ID NO: 119835 - RNA, 23 nt, Artificial Sequence
  Synthetic
aucuaacuauguugguaaggagu

SEQ ID NO: 119836 - RNA, 24 nt, Artificial Sequence
  Synthetic
uaucuaacuauguugguaaggagu

SEQ ID NO: 119837 - RNA, 18 nt, Artificial Sequence
  Synthetic
uuugcacaauuaaggagu

SEQ ID NO: 119838 - RNA, 19 nt, Artificial Sequence
  Synthetic
uuuugcacaauuaaggagu

SEQ ID NO: 119839 - RNA, 20 nt, Artificial Sequence
  Synthetic
auuuugcacaauuaaggagu

SEQ ID NO: 119840 - RNA, 21 nt, Artificial Sequence
  Synthetic
aauuuugcacaauuaaggagu

SEQ ID NO: 119841 - RNA, 22 nt, Artificial Sequence
  Synthetic
uaauuuugcacaauuaaggagu

SEQ ID NO: 119842 - RNA, 23 nt, Artificial Sequence
  Synthetic
auaauuuugcacaauuaaggagu

SEQ ID NO: 119843 - RNA, 18 nt, Artificial Sequence
  Synthetic
auuccaaauaugcggagu

SEQ ID NO: 119844 - RNA, 19 nt, Artificial Sequence
  Synthetic
aauuccaaauaugcggagu

SEQ ID NO: 119845 - RNA, 21 nt, Artificial Sequence
  Synthetic
cgaauuccaaauaugcggagu

SEQ ID NO: 119846 - RNA, 22 nt, Artificial Sequence
  Synthetic
acgaauuccaaauaugcggagu

SEQ ID NO: 119847 - RNA, 23 nt, Artificial Sequence
  Synthetic
uacgaauuccaaauaugcggagu

SEQ ID NO: 119848 - RNA, 24 nt, Artificial Sequence
  Synthetic
auacgaauuccaaauaugcggagu

SEQ ID NO: 119849 - RNA, 19 nt, Artificial Sequence
  Synthetic
aguccauuaggaggggagu

SEQ ID NO: 119850 - RNA, 20 nt, Artificial Sequence
  Synthetic
aaguccauuaggaggggagu

SEQ ID NO: 119851 - RNA, 22 nt, Artificial Sequence
  Synthetic
agaaguccauuaggaggggagu

SEQ ID NO: 119852 - RNA, 23 nt, Artificial Sequence
  Synthetic
uagaaguccauuaggaggggagu

SEQ ID NO: 119853 - RNA, 24 nt, Artificial Sequence
  Synthetic
cuagaaguccauuaggaggggagu

SEQ ID NO: 119854 - RNA, 18 nt, Artificial Sequence
  Synthetic
caucaauagguuuggagu

SEQ ID NO: 119855 - RNA, 19 nt, Artificial Sequence
  Synthetic
ccaucaauagguuuggagu

SEQ ID NO: 119856 - RNA, 20 nt, Artificial Sequence
  Synthetic
uccaucaauagguuuggagu

SEQ ID NO: 119857 - RNA, 21 nt, Artificial Sequence
  Synthetic
auccaucaauagguuuggagu

SEQ ID NO: 119858 - RNA, 22 nt, Artificial Sequence
  Synthetic
uauccaucaauagguuuggagu

SEQ ID NO: 119859 - RNA, 23 nt, Artificial Sequence
  Synthetic
auauccaucaauagguuuggagu

SEQ ID NO: 119860 - RNA, 24 nt, Artificial Sequence
  Synthetic
aauauccaucaauagguuuggagu

SEQ ID NO: 119861 - RNA, 18 nt, Artificial Sequence
  Synthetic
cuuaaguuaaaaaugagu

SEQ ID NO: 119862 - RNA, 19 nt, Artificial Sequence
  Synthetic
acuuaaguuaaaaaugagu

SEQ ID NO: 119863 - RNA, 20 nt, Artificial Sequence
  Synthetic
aacuuaaguuaaaaaugagu

SEQ ID NO: 119864 - RNA, 21 nt, Artificial Sequence
  Synthetic
caacuuaaguuaaaaaugagu

SEQ ID NO: 119865 - RNA, 22 nt, Artificial Sequence
  Synthetic
ccaacuuaaguuaaaaaugagu

SEQ ID NO: 119866 - RNA, 23 nt, Artificial Sequence
  Synthetic
uccaacuuaaguuaaaaaugagu

SEQ ID NO: 119867 - RNA, 24 nt, Artificial Sequence
  Synthetic
uuccaacuuaaguuaaaaaugagu

SEQ ID NO: 119868 - RNA, 18 nt, Artificial Sequence
  Synthetic
agcccuugauaaaugagu

SEQ ID NO: 119869 - RNA, 19 nt, Artificial Sequence
  Synthetic
cagcccuugauaaaugagu

SEQ ID NO: 119870 - RNA, 20 nt, Artificial Sequence
  Synthetic
acagcccuugauaaaugagu

SEQ ID NO: 119871 - RNA, 21 nt, Artificial Sequence
  Synthetic
cacagcccuugauaaaugagu

SEQ ID NO: 119872 - RNA, 22 nt, Artificial Sequence
  Synthetic
acacagcccuugauaaaugagu

SEQ ID NO: 119873 - RNA, 24 nt, Artificial Sequence
  Synthetic
ugacacagcccuugauaaaugagu

SEQ ID NO: 119874 - RNA, 19 nt, Artificial Sequence
  Synthetic
uguugaugucuugaugagu

SEQ ID NO: 119875 - RNA, 20 nt, Artificial Sequence
  Synthetic
uuguugaugucuugaugagu

SEQ ID NO: 119876 - RNA, 21 nt, Artificial Sequence
  Synthetic
auuguugaugucuugaugagu

SEQ ID NO: 119877 - RNA, 22 nt, Artificial Sequence
  Synthetic
aauuguugaugucuugaugagu

SEQ ID NO: 119878 - RNA, 23 nt, Artificial Sequence
  Synthetic
uaauuguugaugucuugaugagu

SEQ ID NO: 119879 - RNA, 24 nt, Artificial Sequence
  Synthetic
auaauuguugaugucuugaugagu

SEQ ID NO: 119880 - RNA, 21 nt, Artificial Sequence
  Synthetic
auucccaccccaccuaugagu

SEQ ID NO: 119881 - RNA, 22 nt, Artificial Sequence
  Synthetic
aauucccaccccaccuaugagu

SEQ ID NO: 119882 - RNA, 23 nt, Artificial Sequence
  Synthetic
caauucccaccccaccuaugagu

SEQ ID NO: 119883 - RNA, 24 nt, Artificial Sequence
  Synthetic
ucaauucccaccccaccuaugagu

SEQ ID NO: 119884 - RNA, 18 nt, Artificial Sequence
  Synthetic
ccguuucuccaucugagu

SEQ ID NO: 119885 - RNA, 19 nt, Artificial Sequence
  Synthetic
uccguuucuccaucugagu

SEQ ID NO: 119886 - RNA, 20 nt, Artificial Sequence
  Synthetic
cuccguuucuccaucugagu

SEQ ID NO: 119887 - RNA, 21 nt, Artificial Sequence
  Synthetic
ccuccguuucuccaucugagu

SEQ ID NO: 119888 - RNA, 22 nt, Artificial Sequence
  Synthetic
accuccguuucuccaucugagu

SEQ ID NO: 119889 - RNA, 18 nt, Artificial Sequence
  Synthetic
ugauuuaacucagugagu

SEQ ID NO: 119890 - RNA, 19 nt, Artificial Sequence
  Synthetic
augauuuaacucagugagu

SEQ ID NO: 119891 - RNA, 21 nt, Artificial Sequence
  Synthetic
agaugauuuaacucagugagu

SEQ ID NO: 119892 - RNA, 22 nt, Artificial Sequence
  Synthetic
uagaugauuuaacucagugagu

SEQ ID NO: 119893 - RNA, 23 nt, Artificial Sequence
  Synthetic
cuagaugauuuaacucagugagu

SEQ ID NO: 119894 - RNA, 24 nt, Artificial Sequence
  Synthetic
ucuagaugauuuaacucagugagu

SEQ ID NO: 119895 - RNA, 18 nt, Artificial Sequence
  Synthetic
ugugaaaaugacgugagu

SEQ ID NO: 119896 - RNA, 19 nt, Artificial Sequence
  Synthetic
uugugaaaaugacgugagu

SEQ ID NO: 119897 - RNA, 20 nt, Artificial Sequence
  Synthetic
uuugugaaaaugacgugagu

SEQ ID NO: 119898 - RNA, 21 nt, Artificial Sequence
  Synthetic
cuuugugaaaaugacgugagu

SEQ ID NO: 119899 - RNA, 22 nt, Artificial Sequence
  Synthetic
acuuugugaaaaugacgugagu

SEQ ID NO: 119900 - RNA, 23 nt, Artificial Sequence
  Synthetic
cacuuugugaaaaugacgugagu

SEQ ID NO: 119901 - RNA, 24 nt, Artificial Sequence
  Synthetic
ucacuuugugaaaaugacgugagu

SEQ ID NO: 119902 - RNA, 18 nt, Artificial Sequence
  Synthetic
auauaacugagauugagu

SEQ ID NO: 119903 - RNA, 19 nt, Artificial Sequence
  Synthetic
uauauaacugagauugagu

SEQ ID NO: 119904 - RNA, 20 nt, Artificial Sequence
  Synthetic
uuauauaacugagauugagu

SEQ ID NO: 119905 - RNA, 21 nt, Artificial Sequence
  Synthetic
cuuauauaacugagauugagu

SEQ ID NO: 119906 - RNA, 22 nt, Artificial Sequence
  Synthetic
ucuuauauaacugagauugagu

SEQ ID NO: 119907 - RNA, 23 nt, Artificial Sequence
  Synthetic
cucuuauauaacugagauugagu

SEQ ID NO: 119908 - RNA, 24 nt, Artificial Sequence
  Synthetic
ucucuuauauaacugagauugagu

SEQ ID NO: 119909 - RNA, 18 nt, Artificial Sequence
  Synthetic
aauauggaaaacuugagu

SEQ ID NO: 119910 - RNA, 19 nt, Artificial Sequence
  Synthetic
aaauauggaaaacuugagu

SEQ ID NO: 119911 - RNA, 20 nt, Artificial Sequence
  Synthetic
caaauauggaaaacuugagu

SEQ ID NO: 119912 - RNA, 21 nt, Artificial Sequence
  Synthetic
ccaaauauggaaaacuugagu

SEQ ID NO: 119913 - RNA, 22 nt, Artificial Sequence
  Synthetic
cccaaauauggaaaacuugagu

SEQ ID NO: 119914 - RNA, 23 nt, Artificial Sequence
  Synthetic
ucccaaauauggaaaacuugagu

SEQ ID NO: 119915 - RNA, 24 nt, Artificial Sequence
  Synthetic
uucccaaauauggaaaacuugagu

SEQ ID NO: 119916 - RNA, 19 nt, Artificial Sequence
  Synthetic
aguuugguccuuguugagu

SEQ ID NO: 119917 - RNA, 20 nt, Artificial Sequence
  Synthetic
caguuugguccuuguugagu

SEQ ID NO: 119918 - RNA, 21 nt, Artificial Sequence
  Synthetic
ucaguuugguccuuguugagu

SEQ ID NO: 119919 - RNA, 22 nt, Artificial Sequence
  Synthetic
uucaguuugguccuuguugagu

SEQ ID NO: 119920 - RNA, 23 nt, Artificial Sequence
  Synthetic
auucaguuugguccuuguugagu

SEQ ID NO: 119921 - RNA, 24 nt, Artificial Sequence
  Synthetic
cauucaguuugguccuuguugagu

SEQ ID NO: 119922 - RNA, 18 nt, Artificial Sequence
  Synthetic
aggaggguaaaaaauagu

SEQ ID NO: 119923 - RNA, 21 nt, Artificial Sequence
  Synthetic
uggaggaggguaaaaaauagu

SEQ ID NO: 119924 - RNA, 23 nt, Artificial Sequence
  Synthetic
aguggaggaggguaaaaaauagu

SEQ ID NO: 119925 - RNA, 18 nt, Artificial Sequence
  Synthetic
uuuauagguggaaauagu

SEQ ID NO: 119926 - RNA, 19 nt, Artificial Sequence
  Synthetic
uuuuauagguggaaauagu

SEQ ID NO: 119927 - RNA, 20 nt, Artificial Sequence
  Synthetic
cuuuuauagguggaaauagu

SEQ ID NO: 119928 - RNA, 21 nt, Artificial Sequence
  Synthetic
ucuuuuauagguggaaauagu

SEQ ID NO: 119929 - RNA, 22 nt, Artificial Sequence
  Synthetic
uucuuuuauagguggaaauagu

SEQ ID NO: 119930 - RNA, 23 nt, Artificial Sequence
  Synthetic
uuucuuuuauagguggaaauagu

SEQ ID NO: 119931 - RNA, 24 nt, Artificial Sequence
  Synthetic
uuuucuuuuauagguggaaauagu

SEQ ID NO: 119932 - RNA, 18 nt, Artificial Sequence
  Synthetic
cccauaaugugaaauagu

SEQ ID NO: 119933 - RNA, 19 nt, Artificial Sequence
  Synthetic
ucccauaaugugaaauagu

SEQ ID NO: 119934 - RNA, 20 nt, Artificial Sequence
  Synthetic
aucccauaaugugaaauagu

SEQ ID NO: 119935 - RNA, 21 nt, Artificial Sequence
  Synthetic
aaucccauaaugugaaauagu

SEQ ID NO: 119936 - RNA, 22 nt, Artificial Sequence
  Synthetic
uaaucccauaaugugaaauagu

SEQ ID NO: 119937 - RNA, 23 nt, Artificial Sequence
  Synthetic
auaaucccauaaugugaaauagu

SEQ ID NO: 119938 - RNA, 24 nt, Artificial Sequence
  Synthetic
cauaaucccauaaugugaaauagu

SEQ ID NO: 119939 - RNA, 18 nt, Artificial Sequence
  Synthetic
auacuuaggcugaauagu

SEQ ID NO: 119940 - RNA, 19 nt, Artificial Sequence
  Synthetic
uauacuuaggcugaauagu

SEQ ID NO: 119941 - RNA, 20 nt, Artificial Sequence
  Synthetic
uuauacuuaggcugaauagu

SEQ ID NO: 119942 - RNA, 21 nt, Artificial Sequence
  Synthetic
auuauacuuaggcugaauagu

SEQ ID NO: 119943 - RNA, 23 nt, Artificial Sequence
  Synthetic
ugauuauacuuaggcugaauagu

SEQ ID NO: 119944 - RNA, 24 nt, Artificial Sequence
  Synthetic
uugauuauacuuaggcugaauagu

SEQ ID NO: 119945 - RNA, 18 nt, Artificial Sequence
  Synthetic
uuguuguaaaauaauagu

SEQ ID NO: 119946 - RNA, 19 nt, Artificial Sequence
  Synthetic
cuuguuguaaaauaauagu

SEQ ID NO: 119947 - RNA, 20 nt, Artificial Sequence
  Synthetic
ucuuguuguaaaauaauagu

SEQ ID NO: 119948 - RNA, 22 nt, Artificial Sequence
  Synthetic
agucuuguuguaaaauaauagu

SEQ ID NO: 119949 - RNA, 23 nt, Artificial Sequence
  Synthetic
cagucuuguuguaaaauaauagu

SEQ ID NO: 119950 - RNA, 24 nt, Artificial Sequence
  Synthetic
ccagucuuguuguaaaauaauagu

SEQ ID NO: 119951 - RNA, 18 nt, Artificial Sequence
  Synthetic
uucuacauauuuaauagu

SEQ ID NO: 119952 - RNA, 19 nt, Artificial Sequence
  Synthetic
cuucuacauauuuaauagu

SEQ ID NO: 119953 - RNA, 21 nt, Artificial Sequence
  Synthetic
agcuucuacauauuuaauagu

SEQ ID NO: 119954 - RNA, 22 nt, Artificial Sequence
  Synthetic
uagcuucuacauauuuaauagu

SEQ ID NO: 119955 - RNA, 24 nt, Artificial Sequence
  Synthetic
uguagcuucuacauauuuaauagu

SEQ ID NO: 119956 - RNA, 18 nt, Artificial Sequence
  Synthetic
uuucaguucuggcauagu

SEQ ID NO: 119957 - RNA, 19 nt, Artificial Sequence
  Synthetic
cuuucaguucuggcauagu

SEQ ID NO: 119958 - RNA, 20 nt, Artificial Sequence
  Synthetic
ucuuucaguucuggcauagu

SEQ ID NO: 119959 - RNA, 21 nt, Artificial Sequence
  Synthetic
uucuuucaguucuggcauagu

SEQ ID NO: 119960 - RNA, 22 nt, Artificial Sequence
  Synthetic
uuucuuucaguucuggcauagu

SEQ ID NO: 119961 - RNA, 23 nt, Artificial Sequence
  Synthetic
auuucuuucaguucuggcauagu

SEQ ID NO: 119962 - RNA, 24 nt, Artificial Sequence
  Synthetic
aauuucuuucaguucuggcauagu

SEQ ID NO: 119963 - RNA, 18 nt, Artificial Sequence
  Synthetic
uacagcaacuaagauagu

SEQ ID NO: 119964 - RNA, 19 nt, Artificial Sequence
  Synthetic
auacagcaacuaagauagu

SEQ ID NO: 119965 - RNA, 20 nt, Artificial Sequence
  Synthetic
aauacagcaacuaagauagu

SEQ ID NO: 119966 - RNA, 21 nt, Artificial Sequence
  Synthetic
aaauacagcaacuaagauagu

SEQ ID NO: 119967 - RNA, 22 nt, Artificial Sequence
  Synthetic
aaaauacagcaacuaagauagu

SEQ ID NO: 119968 - RNA, 23 nt, Artificial Sequence
  Synthetic
aaaaauacagcaacuaagauagu

SEQ ID NO: 119969 - RNA, 24 nt, Artificial Sequence
  Synthetic
uaaaaauacagcaacuaagauagu

SEQ ID NO: 119970 - RNA, 19 nt, Artificial Sequence
  Synthetic
agcucuucaugaauauagu

SEQ ID NO: 119971 - RNA, 20 nt, Artificial Sequence
  Synthetic
cagcucuucaugaauauagu

SEQ ID NO: 119972 - RNA, 21 nt, Artificial Sequence
  Synthetic
acagcucuucaugaauauagu

SEQ ID NO: 119973 - RNA, 22 nt, Artificial Sequence
  Synthetic
cacagcucuucaugaauauagu

SEQ ID NO: 119974 - RNA, 18 nt, Artificial Sequence
  Synthetic
caugagcccugauauagu

SEQ ID NO: 119975 - RNA, 19 nt, Artificial Sequence
  Synthetic
acaugagcccugauauagu

SEQ ID NO: 119976 - RNA, 22 nt, Artificial Sequence
  Synthetic
uggacaugagcccugauauagu

SEQ ID NO: 119977 - RNA, 23 nt, Artificial Sequence
  Synthetic
cuggacaugagcccugauauagu

SEQ ID NO: 119978 - RNA, 24 nt, Artificial Sequence
  Synthetic
acuggacaugagcccugauauagu

SEQ ID NO: 119979 - RNA, 22 nt, Artificial Sequence
  Synthetic
agaacaaaagauaauauauagu

SEQ ID NO: 119980 - RNA, 23 nt, Artificial Sequence
  Synthetic
aagaacaaaagauaauauauagu

SEQ ID NO: 119981 - RNA, 24 nt, Artificial Sequence
  Synthetic
uaagaacaaaagauaauauauagu

SEQ ID NO: 119982 - RNA, 18 nt, Artificial Sequence
  Synthetic
uauaccacuuacuauagu

SEQ ID NO: 119983 - RNA, 19 nt, Artificial Sequence
  Synthetic
auauaccacuuacuauagu

SEQ ID NO: 119984 - RNA, 20 nt, Artificial Sequence
  Synthetic
aauauaccacuuacuauagu

SEQ ID NO: 119985 - RNA, 22 nt, Artificial Sequence
  Synthetic
ugaauauaccacuuacuauagu

SEQ ID NO: 119986 - RNA, 23 nt, Artificial Sequence
  Synthetic
augaauauaccacuuacuauagu

SEQ ID NO: 119987 - RNA, 24 nt, Artificial Sequence
  Synthetic
uaugaauauaccacuuacuauagu

SEQ ID NO: 119988 - RNA, 18 nt, Artificial Sequence
  Synthetic
cagcuuuuauucuauagu

SEQ ID NO: 119989 - RNA, 20 nt, Artificial Sequence
  Synthetic
agcagcuuuuauucuauagu

SEQ ID NO: 119990 - RNA, 21 nt, Artificial Sequence
  Synthetic
uagcagcuuuuauucuauagu

SEQ ID NO: 119991 - RNA, 22 nt, Artificial Sequence
  Synthetic
auagcagcuuuuauucuauagu

SEQ ID NO: 119992 - RNA, 23 nt, Artificial Sequence
  Synthetic
aauagcagcuuuuauucuauagu

SEQ ID NO: 119993 - RNA, 24 nt, Artificial Sequence
  Synthetic
caauagcagcuuuuauucuauagu

SEQ ID NO: 119994 - RNA, 18 nt, Artificial Sequence
  Synthetic
aacuuccaaauuuauagu

SEQ ID NO: 119995 - RNA, 19 nt, Artificial Sequence
  Synthetic
uaacuuccaaauuuauagu

SEQ ID NO: 119996 - RNA, 21 nt, Artificial Sequence
  Synthetic
uguaacuuccaaauuuauagu

SEQ ID NO: 119997 - RNA, 22 nt, Artificial Sequence
  Synthetic
uuguaacuuccaaauuuauagu

SEQ ID NO: 119998 - RNA, 23 nt, Artificial Sequence
  Synthetic
cuuguaacuuccaaauuuauagu

SEQ ID NO: 119999 - RNA, 24 nt, Artificial Sequence
  Synthetic
ucuuguaacuuccaaauuuauagu

SEQ ID NO: 120000 - RNA, 18 nt, Artificial Sequence
  Synthetic
aaaccucaaacuacuagu

SEQ ID NO: 120001 - RNA, 19 nt, Artificial Sequence
  Synthetic
caaaccucaaacuacuagu

SEQ ID NO: 120002 - RNA, 20 nt, Artificial Sequence
  Synthetic
ccaaaccucaaacuacuagu

SEQ ID NO: 120003 - RNA, 21 nt, Artificial Sequence
  Synthetic
cccaaaccucaaacuacuagu

SEQ ID NO: 120004 - RNA, 22 nt, Artificial Sequence
  Synthetic
acccaaaccucaaacuacuagu

SEQ ID NO: 120005 - RNA, 23 nt, Artificial Sequence
  Synthetic
aacccaaaccucaaacuacuagu

SEQ ID NO: 120006 - RNA, 24 nt, Artificial Sequence
  Synthetic
aaacccaaaccucaaacuacuagu

SEQ ID NO: 120007 - RNA, 18 nt, Artificial Sequence
  Synthetic
cuggcuauucuuccuagu

SEQ ID NO: 120008 - RNA, 19 nt, Artificial Sequence
  Synthetic
ucuggcuauucuuccuagu

SEQ ID NO: 120009 - RNA, 20 nt, Artificial Sequence
  Synthetic
uucuggcuauucuuccuagu

SEQ ID NO: 120010 - RNA, 21 nt, Artificial Sequence
  Synthetic
auucuggcuauucuuccuagu

SEQ ID NO: 120011 - RNA, 22 nt, Artificial Sequence
  Synthetic
cauucuggcuauucuuccuagu

SEQ ID NO: 120012 - RNA, 23 nt, Artificial Sequence
  Synthetic
acauucuggcuauucuuccuagu

SEQ ID NO: 120013 - RNA, 24 nt, Artificial Sequence
  Synthetic
uacauucuggcuauucuuccuagu

SEQ ID NO: 120014 - RNA, 18 nt, Artificial Sequence
  Synthetic
ugauauugacccgcuagu

SEQ ID NO: 120015 - RNA, 19 nt, Artificial Sequence
  Synthetic
cugauauugacccgcuagu

SEQ ID NO: 120016 - RNA, 20 nt, Artificial Sequence
  Synthetic
ccugauauugacccgcuagu

SEQ ID NO: 120017 - RNA, 21 nt, Artificial Sequence
  Synthetic
cccugauauugacccgcuagu

SEQ ID NO: 120018 - RNA, 23 nt, Artificial Sequence
  Synthetic
ugcccugauauugacccgcuagu

SEQ ID NO: 120019 - RNA, 24 nt, Artificial Sequence
  Synthetic
uugcccugauauugacccgcuagu

SEQ ID NO: 120020 - RNA, 18 nt, Artificial Sequence
  Synthetic
acuguaguggcugcuagu

SEQ ID NO: 120021 - RNA, 19 nt, Artificial Sequence
  Synthetic
aacuguaguggcugcuagu

SEQ ID NO: 120022 - RNA, 20 nt, Artificial Sequence
  Synthetic
caacuguaguggcugcuagu

SEQ ID NO: 120023 - RNA, 21 nt, Artificial Sequence
  Synthetic
acaacuguaguggcugcuagu

SEQ ID NO: 120024 - RNA, 23 nt, Artificial Sequence
  Synthetic
ugacaacuguaguggcugcuagu

SEQ ID NO: 120025 - RNA, 24 nt, Artificial Sequence
  Synthetic
augacaacuguaguggcugcuagu

SEQ ID NO: 120026 - RNA, 18 nt, Artificial Sequence
  Synthetic
uuuuaugaaaucucuagu

SEQ ID NO: 120027 - RNA, 19 nt, Artificial Sequence
  Synthetic
uuuuuaugaaaucucuagu

SEQ ID NO: 120028 - RNA, 20 nt, Artificial Sequence
  Synthetic
uuuuuuaugaaaucucuagu

SEQ ID NO: 120029 - RNA, 21 nt, Artificial Sequence
  Synthetic
uuuuuuuaugaaaucucuagu

SEQ ID NO: 120030 - RNA, 22 nt, Artificial Sequence
  Synthetic
uuuuuuuuaugaaaucucuagu

SEQ ID NO: 120031 - RNA, 24 nt, Artificial Sequence
  Synthetic
aguuuuuuuuaugaaaucucuagu

SEQ ID NO: 120032 - RNA, 21 nt, Artificial Sequence
  Synthetic
uaauuuuuuuuaauuucuagu

SEQ ID NO: 120033 - RNA, 22 nt, Artificial Sequence
  Synthetic
uuaauuuuuuuuaauuucuagu

SEQ ID NO: 120034 - RNA, 23 nt, Artificial Sequence
  Synthetic
uuuaauuuuuuuuaauuucuagu

SEQ ID NO: 120035 - RNA, 24 nt, Artificial Sequence
  Synthetic
auuuaauuuuuuuuaauuucuagu

SEQ ID NO: 120036 - RNA, 20 nt, Artificial Sequence
  Synthetic
aggcacauguuauaaguagu

SEQ ID NO: 120037 - RNA, 21 nt, Artificial Sequence
  Synthetic
aaggcacauguuauaaguagu

SEQ ID NO: 120038 - RNA, 22 nt, Artificial Sequence
  Synthetic
aaaggcacauguuauaaguagu

SEQ ID NO: 120039 - RNA, 23 nt, Artificial Sequence
  Synthetic
aaaaggcacauguuauaaguagu

SEQ ID NO: 120040 - RNA, 24 nt, Artificial Sequence
  Synthetic
uaaaaggcacauguuauaaguagu

SEQ ID NO: 120041 - RNA, 18 nt, Artificial Sequence
  Synthetic
ucauuguugcucaguagu

SEQ ID NO: 120042 - RNA, 19 nt, Artificial Sequence
  Synthetic
uucauuguugcucaguagu

SEQ ID NO: 120043 - RNA, 20 nt, Artificial Sequence
  Synthetic
uuucauuguugcucaguagu

SEQ ID NO: 120044 - RNA, 21 nt, Artificial Sequence
  Synthetic
auuucauuguugcucaguagu

SEQ ID NO: 120045 - RNA, 22 nt, Artificial Sequence
  Synthetic
cauuucauuguugcucaguagu

SEQ ID NO: 120046 - RNA, 23 nt, Artificial Sequence
  Synthetic
acauuucauuguugcucaguagu

SEQ ID NO: 120047 - RNA, 24 nt, Artificial Sequence
  Synthetic
aacauuucauuguugcucaguagu

SEQ ID NO: 120048 - RNA, 21 nt, Artificial Sequence
  Synthetic
agugagcaaggggagaguagu

SEQ ID NO: 120049 - RNA, 22 nt, Artificial Sequence
  Synthetic
uagugagcaaggggagaguagu

SEQ ID NO: 120050 - RNA, 23 nt, Artificial Sequence
  Synthetic
cuagugagcaaggggagaguagu

SEQ ID NO: 120051 - RNA, 24 nt, Artificial Sequence
  Synthetic
ucuagugagcaaggggagaguagu

SEQ ID NO: 120052 - RNA, 18 nt, Artificial Sequence
  Synthetic
auggagggaaaauguagu

SEQ ID NO: 120053 - RNA, 21 nt, Artificial Sequence
  Synthetic
aggauggagggaaaauguagu

SEQ ID NO: 120054 - RNA, 22 nt, Artificial Sequence
  Synthetic
caggauggagggaaaauguagu

SEQ ID NO: 120055 - RNA, 23 nt, Artificial Sequence
  Synthetic
ccaggauggagggaaaauguagu

SEQ ID NO: 120056 - RNA, 18 nt, Artificial Sequence
  Synthetic
uggauaagccacuguagu

SEQ ID NO: 120057 - RNA, 19 nt, Artificial Sequence
  Synthetic
cuggauaagccacuguagu

SEQ ID NO: 120058 - RNA, 20 nt, Artificial Sequence
  Synthetic
ucuggauaagccacuguagu

SEQ ID NO: 120059 - RNA, 21 nt, Artificial Sequence
  Synthetic
aucuggauaagccacuguagu

SEQ ID NO: 120060 - RNA, 22 nt, Artificial Sequence
  Synthetic
uaucuggauaagccacuguagu

SEQ ID NO: 120061 - RNA, 23 nt, Artificial Sequence
  Synthetic
cuaucuggauaagccacuguagu

SEQ ID NO: 120062 - RNA, 24 nt, Artificial Sequence
  Synthetic
acuaucuggauaagccacuguagu

SEQ ID NO: 120063 - RNA, 18 nt, Artificial Sequence
  Synthetic
aaacaaaguuaguguagu

SEQ ID NO: 120064 - RNA, 19 nt, Artificial Sequence
  Synthetic
aaaacaaaguuaguguagu

SEQ ID NO: 120065 - RNA, 20 nt, Artificial Sequence
  Synthetic
aaaaacaaaguuaguguagu

SEQ ID NO: 120066 - RNA, 21 nt, Artificial Sequence
  Synthetic
aaaaaacaaaguuaguguagu

SEQ ID NO: 120067 - RNA, 22 nt, Artificial Sequence
  Synthetic
aaaaaaacaaaguuaguguagu

SEQ ID NO: 120068 - RNA, 23 nt, Artificial Sequence
  Synthetic
aaaaaaaacaaaguuaguguagu

SEQ ID NO: 120069 - RNA, 24 nt, Artificial Sequence
  Synthetic
aaaaaaaaacaaaguuaguguagu

SEQ ID NO: 120070 - RNA, 19 nt, Artificial Sequence
  Synthetic
ugaaauauauuauuguagu

SEQ ID NO: 120071 - RNA, 20 nt, Artificial Sequence
  Synthetic
augaaauauauuauuguagu

SEQ ID NO: 120072 - RNA, 21 nt, Artificial Sequence
  Synthetic
uaugaaauauauuauuguagu

SEQ ID NO: 120073 - RNA, 22 nt, Artificial Sequence
  Synthetic
cuaugaaauauauuauuguagu

SEQ ID NO: 120074 - RNA, 23 nt, Artificial Sequence
  Synthetic
ucuaugaaauauauuauuguagu

SEQ ID NO: 120075 - RNA, 24 nt, Artificial Sequence
  Synthetic
aucuaugaaauauauuauuguagu

SEQ ID NO: 120076 - RNA, 18 nt, Artificial Sequence
  Synthetic
augugccuuuauuguagu

SEQ ID NO: 120077 - RNA, 19 nt, Artificial Sequence
  Synthetic
uaugugccuuuauuguagu

SEQ ID NO: 120078 - RNA, 20 nt, Artificial Sequence
  Synthetic
auaugugccuuuauuguagu

SEQ ID NO: 120079 - RNA, 21 nt, Artificial Sequence
  Synthetic
uauaugugccuuuauuguagu

SEQ ID NO: 120080 - RNA, 22 nt, Artificial Sequence
  Synthetic
uuauaugugccuuuauuguagu

SEQ ID NO: 120081 - RNA, 23 nt, Artificial Sequence
  Synthetic
uuuauaugugccuuuauuguagu

SEQ ID NO: 120082 - RNA, 24 nt, Artificial Sequence
  Synthetic
uuuuauaugugccuuuauuguagu

SEQ ID NO: 120083 - RNA, 18 nt, Artificial Sequence
  Synthetic
uuuagagaauaucuuagu

SEQ ID NO: 120084 - RNA, 19 nt, Artificial Sequence
  Synthetic
uuuuagagaauaucuuagu

SEQ ID NO: 120085 - RNA, 20 nt, Artificial Sequence
  Synthetic
auuuuagagaauaucuuagu

SEQ ID NO: 120086 - RNA, 21 nt, Artificial Sequence
  Synthetic
uauuuuagagaauaucuuagu

SEQ ID NO: 120087 - RNA, 22 nt, Artificial Sequence
  Synthetic
cuauuuuagagaauaucuuagu

SEQ ID NO: 120088 - RNA, 23 nt, Artificial Sequence
  Synthetic
ucuauuuuagagaauaucuuagu

SEQ ID NO: 120089 - RNA, 24 nt, Artificial Sequence
  Synthetic
uucuauuuuagagaauaucuuagu

SEQ ID NO: 120090 - RNA, 18 nt, Artificial Sequence
  Synthetic
ugagcacuuccaguuagu

SEQ ID NO: 120091 - RNA, 19 nt, Artificial Sequence
  Synthetic
uugagcacuuccaguuagu

SEQ ID NO: 120092 - RNA, 20 nt, Artificial Sequence
  Synthetic
auugagcacuuccaguuagu

SEQ ID NO: 120093 - RNA, 21 nt, Artificial Sequence
  Synthetic
uauugagcacuuccaguuagu

SEQ ID NO: 120094 - RNA, 22 nt, Artificial Sequence
  Synthetic
auauugagcacuuccaguuagu

SEQ ID NO: 120095 - RNA, 23 nt, Artificial Sequence
  Synthetic
uauauugagcacuuccaguuagu

SEQ ID NO: 120096 - RNA, 24 nt, Artificial Sequence
  Synthetic
uuauauugagcacuuccaguuagu

SEQ ID NO: 120097 - RNA, 18 nt, Artificial Sequence
  Synthetic
uaugagaaaauauuuagu

SEQ ID NO: 120098 - RNA, 21 nt, Artificial Sequence
  Synthetic
ugguaugagaaaauauuuagu

SEQ ID NO: 120099 - RNA, 22 nt, Artificial Sequence
  Synthetic
cugguaugagaaaauauuuagu

SEQ ID NO: 120100 - RNA, 23 nt, Artificial Sequence
  Synthetic
ucugguaugagaaaauauuuagu

SEQ ID NO: 120101 - RNA, 18 nt, Artificial Sequence
  Synthetic
uguaaggcuaauuuuagu

SEQ ID NO: 120102 - RNA, 19 nt, Artificial Sequence
  Synthetic
cuguaaggcuaauuuuagu

SEQ ID NO: 120103 - RNA, 22 nt, Artificial Sequence
  Synthetic
uggcuguaaggcuaauuuuagu

SEQ ID NO: 120104 - RNA, 23 nt, Artificial Sequence
  Synthetic
auggcuguaaggcuaauuuuagu

SEQ ID NO: 120105 - RNA, 24 nt, Artificial Sequence
  Synthetic
uauggcuguaaggcuaauuuuagu

SEQ ID NO: 120106 - RNA, 18 nt, Artificial Sequence
  Synthetic
cuagcuguucauuuuagu

SEQ ID NO: 120107 - RNA, 21 nt, Artificial Sequence
  Synthetic
uggcuagcuguucauuuuagu

SEQ ID NO: 120108 - RNA, 22 nt, Artificial Sequence
  Synthetic
cuggcuagcuguucauuuuagu

SEQ ID NO: 120109 - RNA, 24 nt, Artificial Sequence
  Synthetic
agcuggcuagcuguucauuuuagu

SEQ ID NO: 120110 - RNA, 23 nt, Artificial Sequence
  Synthetic
uggauagacuugaaaguuuuagu

SEQ ID NO: 120111 - RNA, 24 nt, Artificial Sequence
  Synthetic
auggauagacuugaaaguuuuagu

SEQ ID NO: 120112 - RNA, 18 nt, Artificial Sequence
  Synthetic
ccuuugguaguuuuuagu

SEQ ID NO: 120113 - RNA, 19 nt, Artificial Sequence
  Synthetic
uccuuugguaguuuuuagu

SEQ ID NO: 120114 - RNA, 21 nt, Artificial Sequence
  Synthetic
aguccuuugguaguuuuuagu

SEQ ID NO: 120115 - RNA, 23 nt, Artificial Sequence
  Synthetic
ugaguccuuugguaguuuuuagu

SEQ ID NO: 120116 - RNA, 24 nt, Artificial Sequence
  Synthetic
uugaguccuuugguaguuuuuagu

SEQ ID NO: 120117 - RNA, 18 nt, Artificial Sequence
  Synthetic
uauugaggagaaaaacgu

SEQ ID NO: 120118 - RNA, 19 nt, Artificial Sequence
  Synthetic
cuauugaggagaaaaacgu

SEQ ID NO: 120119 - RNA, 21 nt, Artificial Sequence
  Synthetic
agcuauugaggagaaaaacgu

SEQ ID NO: 120120 - RNA, 22 nt, Artificial Sequence
  Synthetic
aagcuauugaggagaaaaacgu

SEQ ID NO: 120121 - RNA, 23 nt, Artificial Sequence
  Synthetic
uaagcuauugaggagaaaaacgu

SEQ ID NO: 120122 - RNA, 24 nt, Artificial Sequence
  Synthetic
uuaagcuauugaggagaaaaacgu

SEQ ID NO: 120123 - RNA, 18 nt, Artificial Sequence
  Synthetic
uaaaauacuuugaaacgu

SEQ ID NO: 120124 - RNA, 19 nt, Artificial Sequence
  Synthetic
uuaaaauacuuugaaacgu

SEQ ID NO: 120125 - RNA, 20 nt, Artificial Sequence
  Synthetic
uuuaaaauacuuugaaacgu

SEQ ID NO: 120126 - RNA, 21 nt, Artificial Sequence
  Synthetic
uuuuaaaauacuuugaaacgu

SEQ ID NO: 120127 - RNA, 22 nt, Artificial Sequence
  Synthetic
auuuuaaaauacuuugaaacgu

SEQ ID NO: 120128 - RNA, 23 nt, Artificial Sequence
  Synthetic
uauuuuaaaauacuuugaaacgu

SEQ ID NO: 120129 - RNA, 24 nt, Artificial Sequence
  Synthetic
uuauuuuaaaauacuuugaaacgu

SEQ ID NO: 120130 - RNA, 19 nt, Artificial Sequence
  Synthetic
agaauaguaacaacaacgu

SEQ ID NO: 120131 - RNA, 20 nt, Artificial Sequence
  Synthetic
cagaauaguaacaacaacgu

SEQ ID NO: 120132 - RNA, 21 nt, Artificial Sequence
  Synthetic
acagaauaguaacaacaacgu

SEQ ID NO: 120133 - RNA, 22 nt, Artificial Sequence
  Synthetic
cacagaauaguaacaacaacgu

SEQ ID NO: 120134 - RNA, 23 nt, Artificial Sequence
  Synthetic
acacagaauaguaacaacaacgu

SEQ ID NO: 120135 - RNA, 18 nt, Artificial Sequence
  Synthetic
ucuuagaaucaagaacgu

SEQ ID NO: 120136 - RNA, 19 nt, Artificial Sequence
  Synthetic
aucuuagaaucaagaacgu

SEQ ID NO: 120137 - RNA, 20 nt, Artificial Sequence
  Synthetic
aaucuuagaaucaagaacgu

SEQ ID NO: 120138 - RNA, 22 nt, Artificial Sequence
  Synthetic
ugaaucuuagaaucaagaacgu

SEQ ID NO: 120139 - RNA, 23 nt, Artificial Sequence
  Synthetic
augaaucuuagaaucaagaacgu

SEQ ID NO: 120140 - RNA, 24 nt, Artificial Sequence
  Synthetic
caugaaucuuagaaucaagaacgu

SEQ ID NO: 120141 - RNA, 18 nt, Artificial Sequence
  Synthetic
aaaaacaacagggaacgu

SEQ ID NO: 120142 - RNA, 19 nt, Artificial Sequence
  Synthetic
aaaaaacaacagggaacgu

SEQ ID NO: 120143 - RNA, 20 nt, Artificial Sequence
  Synthetic
aaaaaaacaacagggaacgu

SEQ ID NO: 120144 - RNA, 22 nt, Artificial Sequence
  Synthetic
cgaaaaaaacaacagggaacgu

SEQ ID NO: 120145 - RNA, 23 nt, Artificial Sequence
  Synthetic
acgaaaaaaacaacagggaacgu

SEQ ID NO: 120146 - RNA, 24 nt, Artificial Sequence
  Synthetic
aacgaaaaaaacaacagggaacgu

SEQ ID NO: 120147 - RNA, 18 nt, Artificial Sequence
  Synthetic
aacuaaaaugaugaacgu

SEQ ID NO: 120148 - RNA, 19 nt, Artificial Sequence
  Synthetic
uaacuaaaaugaugaacgu

SEQ ID NO: 120149 - RNA, 20 nt, Artificial Sequence
  Synthetic
uuaacuaaaaugaugaacgu

SEQ ID NO: 120150 - RNA, 21 nt, Artificial Sequence
  Synthetic
auuaacuaaaaugaugaacgu

SEQ ID NO: 120151 - RNA, 22 nt, Artificial Sequence
  Synthetic
aauuaacuaaaaugaugaacgu

SEQ ID NO: 120152 - RNA, 23 nt, Artificial Sequence
  Synthetic
uaauuaacuaaaaugaugaacgu

SEQ ID NO: 120153 - RNA, 24 nt, Artificial Sequence
  Synthetic
auaauuaacuaaaaugaugaacgu

SEQ ID NO: 120154 - RNA, 18 nt, Artificial Sequence
  Synthetic
uacuaauuugaauaacgu

SEQ ID NO: 120155 - RNA, 19 nt, Artificial Sequence
  Synthetic
uuacuaauuugaauaacgu

SEQ ID NO: 120156 - RNA, 22 nt, Artificial Sequence
  Synthetic
ugguuacuaauuugaauaacgu

SEQ ID NO: 120157 - RNA, 23 nt, Artificial Sequence
  Synthetic
augguuacuaauuugaauaacgu

SEQ ID NO: 120158 - RNA, 24 nt, Artificial Sequence
  Synthetic
aaugguuacuaauuugaauaacgu

SEQ ID NO: 120159 - RNA, 18 nt, Artificial Sequence
  Synthetic
auucuauagugauaacgu

SEQ ID NO: 120160 - RNA, 19 nt, Artificial Sequence
  Synthetic
aauucuauagugauaacgu

SEQ ID NO: 120161 - RNA, 20 nt, Artificial Sequence
  Synthetic
aaauucuauagugauaacgu

SEQ ID NO: 120162 - RNA, 21 nt, Artificial Sequence
  Synthetic
aaaauucuauagugauaacgu

SEQ ID NO: 120163 - RNA, 22 nt, Artificial Sequence
  Synthetic
uaaaauucuauagugauaacgu

SEQ ID NO: 120164 - RNA, 23 nt, Artificial Sequence
  Synthetic
auaaaauucuauagugauaacgu

SEQ ID NO: 120165 - RNA, 18 nt, Artificial Sequence
  Synthetic
augaauuauucuuaacgu

SEQ ID NO: 120166 - RNA, 19 nt, Artificial Sequence
  Synthetic
uaugaauuauucuuaacgu

SEQ ID NO: 120167 - RNA, 22 nt, Artificial Sequence
  Synthetic
ugguaugaauuauucuuaacgu

SEQ ID NO: 120168 - RNA, 23 nt, Artificial Sequence
  Synthetic
augguaugaauuauucuuaacgu

SEQ ID NO: 120169 - RNA, 24 nt, Artificial Sequence
  Synthetic
aaugguaugaauuauucuuaacgu

SEQ ID NO: 120170 - RNA, 18 nt, Artificial Sequence
  Synthetic
uaagucaggaauucacgu

SEQ ID NO: 120171 - RNA, 19 nt, Artificial Sequence
  Synthetic
uuaagucaggaauucacgu

SEQ ID NO: 120172 - RNA, 20 nt, Artificial Sequence
  Synthetic
cuuaagucaggaauucacgu

SEQ ID NO: 120173 - RNA, 21 nt, Artificial Sequence
  Synthetic
acuuaagucaggaauucacgu

SEQ ID NO: 120174 - RNA, 22 nt, Artificial Sequence
  Synthetic
uacuuaagucaggaauucacgu

SEQ ID NO: 120175 - RNA, 23 nt, Artificial Sequence
  Synthetic
uuacuuaagucaggaauucacgu

SEQ ID NO: 120176 - RNA, 18 nt, Artificial Sequence
  Synthetic
aguuagaggguaagacgu

SEQ ID NO: 120177 - RNA, 19 nt, Artificial Sequence
  Synthetic
aaguuagaggguaagacgu

SEQ ID NO: 120178 - RNA, 23 nt, Artificial Sequence
  Synthetic
agggaaguuagaggguaagacgu

SEQ ID NO: 120179 - RNA, 18 nt, Artificial Sequence
  Synthetic
acacaugggugaugacgu

SEQ ID NO: 120180 - RNA, 19 nt, Artificial Sequence
  Synthetic
cacacaugggugaugacgu

SEQ ID NO: 120181 - RNA, 20 nt, Artificial Sequence
  Synthetic
ucacacaugggugaugacgu

SEQ ID NO: 120182 - RNA, 21 nt, Artificial Sequence
  Synthetic
aucacacaugggugaugacgu

SEQ ID NO: 120183 - RNA, 22 nt, Artificial Sequence
  Synthetic
uaucacacaugggugaugacgu

SEQ ID NO: 120184 - RNA, 23 nt, Artificial Sequence
  Synthetic
cuaucacacaugggugaugacgu

SEQ ID NO: 120185 - RNA, 24 nt, Artificial Sequence
  Synthetic
acuaucacacaugggugaugacgu

SEQ ID NO: 120186 - RNA, 18 nt, Artificial Sequence
  Synthetic
acugugucaauauuacgu

SEQ ID NO: 120187 - RNA, 19 nt, Artificial Sequence
  Synthetic
uacugugucaauauuacgu

SEQ ID NO: 120188 - RNA, 20 nt, Artificial Sequence
  Synthetic
auacugugucaauauuacgu

SEQ ID NO: 120189 - RNA, 22 nt, Artificial Sequence
  Synthetic
ugauacugugucaauauuacgu

SEQ ID NO: 120190 - RNA, 23 nt, Artificial Sequence
  Synthetic
uugauacugugucaauauuacgu

SEQ ID NO: 120191 - RNA, 24 nt, Artificial Sequence
  Synthetic
auugauacugugucaauauuacgu

SEQ ID NO: 120192 - RNA, 18 nt, Artificial Sequence
  Synthetic
uuucuuuacaucuuacgu

SEQ ID NO: 120193 - RNA, 19 nt, Artificial Sequence
  Synthetic
uuuucuuuacaucuuacgu

SEQ ID NO: 120194 - RNA, 20 nt, Artificial Sequence
  Synthetic
cuuuucuuuacaucuuacgu

SEQ ID NO: 120195 - RNA, 22 nt, Artificial Sequence
  Synthetic
ugcuuuucuuuacaucuuacgu

SEQ ID NO: 120196 - RNA, 23 nt, Artificial Sequence
  Synthetic
uugcuuuucuuuacaucuuacgu

SEQ ID NO: 120197 - RNA, 24 nt, Artificial Sequence
  Synthetic
uuugcuuuucuuuacaucuuacgu

SEQ ID NO: 120198 - RNA, 18 nt, Artificial Sequence
  Synthetic
caauuaacauguuuacgu

SEQ ID NO: 120199 - RNA, 19 nt, Artificial Sequence
  Synthetic
acaauuaacauguuuacgu

SEQ ID NO: 120200 - RNA, 20 nt, Artificial Sequence
  Synthetic
uacaauuaacauguuuacgu

SEQ ID NO: 120201 - RNA, 21 nt, Artificial Sequence
  Synthetic
auacaauuaacauguuuacgu

SEQ ID NO: 120202 - RNA, 22 nt, Artificial Sequence
  Synthetic
aauacaauuaacauguuuacgu

SEQ ID NO: 120203 - RNA, 23 nt, Artificial Sequence
  Synthetic
uaauacaauuaacauguuuacgu

SEQ ID NO: 120204 - RNA, 24 nt, Artificial Sequence
  Synthetic
uuaauacaauuaacauguuuacgu

SEQ ID NO: 120205 - RNA, 18 nt, Artificial Sequence
  Synthetic
ccaagagaagaaaaccgu

SEQ ID NO: 120206 - RNA, 19 nt, Artificial Sequence
  Synthetic
cccaagagaagaaaaccgu

SEQ ID NO: 120207 - RNA, 20 nt, Artificial Sequence
  Synthetic
ucccaagagaagaaaaccgu

SEQ ID NO: 120208 - RNA, 21 nt, Artificial Sequence
  Synthetic
cucccaagagaagaaaaccgu

SEQ ID NO: 120209 - RNA, 22 nt, Artificial Sequence
  Synthetic
ucucccaagagaagaaaaccgu

SEQ ID NO: 120210 - RNA, 23 nt, Artificial Sequence
  Synthetic
uucucccaagagaagaaaaccgu

SEQ ID NO: 120211 - RNA, 24 nt, Artificial Sequence
  Synthetic
auucucccaagagaagaaaaccgu

SEQ ID NO: 120212 - RNA, 18 nt, Artificial Sequence
  Synthetic
ccauucauuguugaccgu

SEQ ID NO: 120213 - RNA, 19 nt, Artificial Sequence
  Synthetic
accauucauuguugaccgu

SEQ ID NO: 120214 - RNA, 20 nt, Artificial Sequence
  Synthetic
aaccauucauuguugaccgu

SEQ ID NO: 120215 - RNA, 21 nt, Artificial Sequence
  Synthetic
caaccauucauuguugaccgu

SEQ ID NO: 120216 - RNA, 22 nt, Artificial Sequence
  Synthetic
acaaccauucauuguugaccgu

SEQ ID NO: 120217 - RNA, 23 nt, Artificial Sequence
  Synthetic
uacaaccauucauuguugaccgu

SEQ ID NO: 120218 - RNA, 21 nt, Artificial Sequence
  Synthetic
cuuuauauauuuauuggccgu

SEQ ID NO: 120219 - RNA, 22 nt, Artificial Sequence
  Synthetic
ucuuuauauauuuauuggccgu

SEQ ID NO: 120220 - RNA, 23 nt, Artificial Sequence
  Synthetic
uucuuuauauauuuauuggccgu

SEQ ID NO: 120221 - RNA, 24 nt, Artificial Sequence
  Synthetic
auucuuuauauauuuauuggccgu

SEQ ID NO: 120222 - RNA, 18 nt, Artificial Sequence
  Synthetic
ccuaagcugccuguccgu

SEQ ID NO: 120223 - RNA, 19 nt, Artificial Sequence
  Synthetic
uccuaagcugccuguccgu

SEQ ID NO: 120224 - RNA, 20 nt, Artificial Sequence
  Synthetic
cuccuaagcugccuguccgu

SEQ ID NO: 120225 - RNA, 21 nt, Artificial Sequence
  Synthetic
ucuccuaagcugccuguccgu

SEQ ID NO: 120226 - RNA, 22 nt, Artificial Sequence
  Synthetic
uucuccuaagcugccuguccgu

SEQ ID NO: 120227 - RNA, 23 nt, Artificial Sequence
  Synthetic
uuucuccuaagcugccuguccgu

SEQ ID NO: 120228 - RNA, 24 nt, Artificial Sequence
  Synthetic
uuuucuccuaagcugccuguccgu

SEQ ID NO: 120229 - RNA, 18 nt, Artificial Sequence
  Synthetic
uggauuaaugaauuccgu

SEQ ID NO: 120230 - RNA, 19 nt, Artificial Sequence
  Synthetic
uuggauuaaugaauuccgu

SEQ ID NO: 120231 - RNA, 20 nt, Artificial Sequence
  Synthetic
uuuggauuaaugaauuccgu

SEQ ID NO: 120232 - RNA, 21 nt, Artificial Sequence
  Synthetic
auuuggauuaaugaauuccgu

SEQ ID NO: 120233 - RNA, 22 nt, Artificial Sequence
  Synthetic
cauuuggauuaaugaauuccgu

SEQ ID NO: 120234 - RNA, 18 nt, Artificial Sequence
  Synthetic
aacagauuuuuaaagcgu

SEQ ID NO: 120235 - RNA, 19 nt, Artificial Sequence
  Synthetic
aaacagauuuuuaaagcgu

SEQ ID NO: 120236 - RNA, 20 nt, Artificial Sequence
  Synthetic
uaaacagauuuuuaaagcgu

SEQ ID NO: 120237 - RNA, 24 nt, Artificial Sequence
  Synthetic
aggguaaacagauuuuuaaagcgu

SEQ ID NO: 120238 - RNA, 18 nt, Artificial Sequence
  Synthetic
uaaacaguagccaggcgu

SEQ ID NO: 120239 - RNA, 19 nt, Artificial Sequence
  Synthetic
cuaaacaguagccaggcgu

SEQ ID NO: 120240 - RNA, 20 nt, Artificial Sequence
  Synthetic
acuaaacaguagccaggcgu

SEQ ID NO: 120241 - RNA, 21 nt, Artificial Sequence
  Synthetic
cacuaaacaguagccaggcgu

SEQ ID NO: 120242 - RNA, 23 nt, Artificial Sequence
  Synthetic
cgcacuaaacaguagccaggcgu

SEQ ID NO: 120243 - RNA, 24 nt, Artificial Sequence
  Synthetic
ccgcacuaaacaguagccaggcgu

SEQ ID NO: 120244 - RNA, 18 nt, Artificial Sequence
  Synthetic
ccaaagggauuuaggcgu

SEQ ID NO: 120245 - RNA, 19 nt, Artificial Sequence
  Synthetic
uccaaagggauuuaggcgu

SEQ ID NO: 120246 - RNA, 20 nt, Artificial Sequence
  Synthetic
cuccaaagggauuuaggcgu

SEQ ID NO: 120247 - RNA, 21 nt, Artificial Sequence
  Synthetic
ucuccaaagggauuuaggcgu

SEQ ID NO: 120248 - RNA, 22 nt, Artificial Sequence
  Synthetic
uucuccaaagggauuuaggcgu

SEQ ID NO: 120249 - RNA, 24 nt, Artificial Sequence
  Synthetic
aguucuccaaagggauuuaggcgu

SEQ ID NO: 120250 - RNA, 18 nt, Artificial Sequence
  Synthetic
caaaugacucuagggcgu

SEQ ID NO: 120251 - RNA, 19 nt, Artificial Sequence
  Synthetic
acaaaugacucuagggcgu

SEQ ID NO: 120252 - RNA, 20 nt, Artificial Sequence
  Synthetic
cacaaaugacucuagggcgu

SEQ ID NO: 120253 - RNA, 21 nt, Artificial Sequence
  Synthetic
ucacaaaugacucuagggcgu

SEQ ID NO: 120254 - RNA, 22 nt, Artificial Sequence
  Synthetic
aucacaaaugacucuagggcgu

SEQ ID NO: 120255 - RNA, 23 nt, Artificial Sequence
  Synthetic
uaucacaaaugacucuagggcgu

SEQ ID NO: 120256 - RNA, 24 nt, Artificial Sequence
  Synthetic
cuaucacaaaugacucuagggcgu

SEQ ID NO: 120257 - RNA, 18 nt, Artificial Sequence
  Synthetic
ugaauccagaugcugcgu

SEQ ID NO: 120258 - RNA, 19 nt, Artificial Sequence
  Synthetic
uugaauccagaugcugcgu

SEQ ID NO: 120259 - RNA, 20 nt, Artificial Sequence
  Synthetic
cuugaauccagaugcugcgu

SEQ ID NO: 120260 - RNA, 21 nt, Artificial Sequence
  Synthetic
ucuugaauccagaugcugcgu

SEQ ID NO: 120261 - RNA, 22 nt, Artificial Sequence
  Synthetic
cucuugaauccagaugcugcgu

SEQ ID NO: 120262 - RNA, 23 nt, Artificial Sequence
  Synthetic
ucucuugaauccagaugcugcgu

SEQ ID NO: 120263 - RNA, 24 nt, Artificial Sequence
  Synthetic
uucucuugaauccagaugcugcgu

SEQ ID NO: 120264 - RNA, 18 nt, Artificial Sequence
  Synthetic
uuuaacuugagugugcgu

SEQ ID NO: 120265 - RNA, 19 nt, Artificial Sequence
  Synthetic
cuuuaacuugagugugcgu

SEQ ID NO: 120266 - RNA, 20 nt, Artificial Sequence
  Synthetic
ucuuuaacuugagugugcgu

SEQ ID NO: 120267 - RNA, 18 nt, Artificial Sequence
  Synthetic
auacaucguguugugcgu

SEQ ID NO: 120268 - RNA, 20 nt, Artificial Sequence
  Synthetic
ugauacaucguguugugcgu

SEQ ID NO: 120269 - RNA, 21 nt, Artificial Sequence
  Synthetic
cugauacaucguguugugcgu

SEQ ID NO: 120270 - RNA, 22 nt, Artificial Sequence
  Synthetic
acugauacaucguguugugcgu

SEQ ID NO: 120271 - RNA, 23 nt, Artificial Sequence
  Synthetic
uacugauacaucguguugugcgu

SEQ ID NO: 120272 - RNA, 24 nt, Artificial Sequence
  Synthetic
uuacugauacaucguguugugcgu

SEQ ID NO: 120273 - RNA, 18 nt, Artificial Sequence
  Synthetic
ugcaggaaaguuaaucgu

SEQ ID NO: 120274 - RNA, 19 nt, Artificial Sequence
  Synthetic
cugcaggaaaguuaaucgu

SEQ ID NO: 120275 - RNA, 21 nt, Artificial Sequence
  Synthetic
ugcugcaggaaaguuaaucgu

SEQ ID NO: 120276 - RNA, 22 nt, Artificial Sequence
  Synthetic
augcugcaggaaaguuaaucgu

SEQ ID NO: 120277 - RNA, 23 nt, Artificial Sequence
  Synthetic
caugcugcaggaaaguuaaucgu

SEQ ID NO: 120278 - RNA, 24 nt, Artificial Sequence
  Synthetic
acaugcugcaggaaaguuaaucgu

SEQ ID NO: 120279 - RNA, 20 nt, Artificial Sequence
  Synthetic
ugguauuugcaacuucucgu

SEQ ID NO: 120280 - RNA, 21 nt, Artificial Sequence
  Synthetic
augguauuugcaacuucucgu

SEQ ID NO: 120281 - RNA, 22 nt, Artificial Sequence
  Synthetic
caugguauuugcaacuucucgu

SEQ ID NO: 120282 - RNA, 23 nt, Artificial Sequence
  Synthetic
acaugguauuugcaacuucucgu

SEQ ID NO: 120283 - RNA, 24 nt, Artificial Sequence
  Synthetic
aacaugguauuugcaacuucucgu

SEQ ID NO: 120284 - RNA, 18 nt, Artificial Sequence
  Synthetic
aaucaaauucaaggucgu

SEQ ID NO: 120285 - RNA, 19 nt, Artificial Sequence
  Synthetic
uaaucaaauucaaggucgu

SEQ ID NO: 120286 - RNA, 20 nt, Artificial Sequence
  Synthetic
auaaucaaauucaaggucgu

SEQ ID NO: 120287 - RNA, 22 nt, Artificial Sequence
  Synthetic
agauaaucaaauucaaggucgu

SEQ ID NO: 120288 - RNA, 23 nt, Artificial Sequence
  Synthetic
uagauaaucaaauucaaggucgu

SEQ ID NO: 120289 - RNA, 24 nt, Artificial Sequence
  Synthetic
cuagauaaucaaauucaaggucgu

SEQ ID NO: 120290 - RNA, 18 nt, Artificial Sequence
  Synthetic
uuauuuuguguuaaaggu

SEQ ID NO: 120291 - RNA, 19 nt, Artificial Sequence
  Synthetic
auuauuuuguguuaaaggu

SEQ ID NO: 120292 - RNA, 20 nt, Artificial Sequence
  Synthetic
aauuauuuuguguuaaaggu

SEQ ID NO: 120293 - RNA, 21 nt, Artificial Sequence
  Synthetic
caauuauuuuguguuaaaggu

SEQ ID NO: 120294 - RNA, 23 nt, Artificial Sequence
  Synthetic
agcaauuauuuuguguuaaaggu

SEQ ID NO: 120295 - RNA, 24 nt, Artificial Sequence
  Synthetic
cagcaauuauuuuguguuaaaggu

SEQ ID NO: 120296 - RNA, 18 nt, Artificial Sequence
  Synthetic
cacaaagcugaagaaggu

SEQ ID NO: 120297 - RNA, 19 nt, Artificial Sequence
  Synthetic
ucacaaagcugaagaaggu

SEQ ID NO: 120298 - RNA, 20 nt, Artificial Sequence
  Synthetic
uucacaaagcugaagaaggu

SEQ ID NO: 120299 - RNA, 21 nt, Artificial Sequence
  Synthetic
cuucacaaagcugaagaaggu

SEQ ID NO: 120300 - RNA, 22 nt, Artificial Sequence
  Synthetic
ucuucacaaagcugaagaaggu

SEQ ID NO: 120301 - RNA, 23 nt, Artificial Sequence
  Synthetic
uucuucacaaagcugaagaaggu

SEQ ID NO: 120302 - RNA, 24 nt, Artificial Sequence
  Synthetic
uuucuucacaaagcugaagaaggu

SEQ ID NO: 120303 - RNA, 18 nt, Artificial Sequence
  Synthetic
uuagcucauuaugaaggu

SEQ ID NO: 120304 - RNA, 19 nt, Artificial Sequence
  Synthetic
cuuagcucauuaugaaggu

SEQ ID NO: 120305 - RNA, 20 nt, Artificial Sequence
  Synthetic
ccuuagcucauuaugaaggu

SEQ ID NO: 120306 - RNA, 21 nt, Artificial Sequence
  Synthetic
cccuuagcucauuaugaaggu

SEQ ID NO: 120307 - RNA, 23 nt, Artificial Sequence
  Synthetic
agcccuuagcucauuaugaaggu

SEQ ID NO: 120308 - RNA, 24 nt, Artificial Sequence
  Synthetic
uagcccuuagcucauuaugaaggu

SEQ ID NO: 120309 - RNA, 18 nt, Artificial Sequence
  Synthetic
acugcaggaggauaaggu

SEQ ID NO: 120310 - RNA, 19 nt, Artificial Sequence
  Synthetic
aacugcaggaggauaaggu

SEQ ID NO: 120311 - RNA, 20 nt, Artificial Sequence
  Synthetic
aaacugcaggaggauaaggu

SEQ ID NO: 120312 - RNA, 21 nt, Artificial Sequence
  Synthetic
aaaacugcaggaggauaaggu

SEQ ID NO: 120313 - RNA, 23 nt, Artificial Sequence
  Synthetic
agaaaacugcaggaggauaaggu

SEQ ID NO: 120314 - RNA, 24 nt, Artificial Sequence
  Synthetic
uagaaaacugcaggaggauaaggu

SEQ ID NO: 120315 - RNA, 18 nt, Artificial Sequence
  Synthetic
aacuaaccaaaguaaggu

SEQ ID NO: 120316 - RNA, 19 nt, Artificial Sequence
  Synthetic
caacuaaccaaaguaaggu

SEQ ID NO: 120317 - RNA, 20 nt, Artificial Sequence
  Synthetic
ccaacuaaccaaaguaaggu

SEQ ID NO: 120318 - RNA, 21 nt, Artificial Sequence
  Synthetic
accaacuaaccaaaguaaggu

SEQ ID NO: 120319 - RNA, 23 nt, Artificial Sequence
  Synthetic
agaccaacuaaccaaaguaaggu

SEQ ID NO: 120320 - RNA, 24 nt, Artificial Sequence
  Synthetic
aagaccaacuaaccaaaguaaggu

SEQ ID NO: 120321 - RNA, 18 nt, Artificial Sequence
  Synthetic
ucaucugaauaguaaggu

SEQ ID NO: 120322 - RNA, 19 nt, Artificial Sequence
  Synthetic
uucaucugaauaguaaggu

SEQ ID NO: 120323 - RNA, 20 nt, Artificial Sequence
  Synthetic
cuucaucugaauaguaaggu

SEQ ID NO: 120324 - RNA, 21 nt, Artificial Sequence
  Synthetic
acuucaucugaauaguaaggu

SEQ ID NO: 120325 - RNA, 22 nt, Artificial Sequence
  Synthetic
uacuucaucugaauaguaaggu

SEQ ID NO: 120326 - RNA, 23 nt, Artificial Sequence
  Synthetic
auacuucaucugaauaguaaggu

SEQ ID NO: 120327 - RNA, 24 nt, Artificial Sequence
  Synthetic
aauacuucaucugaauaguaaggu

SEQ ID NO: 120328 - RNA, 18 nt, Artificial Sequence
  Synthetic
ucaacccacuuuuaaggu

SEQ ID NO: 120329 - RNA, 21 nt, Artificial Sequence
  Synthetic
uggucaacccacuuuuaaggu

SEQ ID NO: 120330 - RNA, 23 nt, Artificial Sequence
  Synthetic
aguggucaacccacuuuuaaggu

SEQ ID NO: 120331 - RNA, 21 nt, Artificial Sequence
  Synthetic
aggggagagcaggaaacaggu

SEQ ID NO: 120332 - RNA, 22 nt, Artificial Sequence
  Synthetic
aaggggagagcaggaaacaggu

SEQ ID NO: 120333 - RNA, 23 nt, Artificial Sequence
  Synthetic
aaaggggagagcaggaaacaggu

SEQ ID NO: 120334 - RNA, 24 nt, Artificial Sequence
  Synthetic
caaaggggagagcaggaaacaggu

SEQ ID NO: 120335 - RNA, 18 nt, Artificial Sequence
  Synthetic
cagcucuuugaaacaggu

SEQ ID NO: 120336 - RNA, 19 nt, Artificial Sequence
  Synthetic
acagcucuuugaaacaggu

SEQ ID NO: 120337 - RNA, 20 nt, Artificial Sequence
  Synthetic
aacagcucuuugaaacaggu

SEQ ID NO: 120338 - RNA, 21 nt, Artificial Sequence
  Synthetic
aaacagcucuuugaaacaggu

SEQ ID NO: 120339 - RNA, 22 nt, Artificial Sequence
  Synthetic
caaacagcucuuugaaacaggu

SEQ ID NO: 120340 - RNA, 23 nt, Artificial Sequence
  Synthetic
acaaacagcucuuugaaacaggu

SEQ ID NO: 120341 - RNA, 24 nt, Artificial Sequence
  Synthetic
aacaaacagcucuuugaaacaggu

SEQ ID NO: 120342 - RNA, 18 nt, Artificial Sequence
  Synthetic
ccggguagcugaacaggu

SEQ ID NO: 120343 - RNA, 19 nt, Artificial Sequence
  Synthetic
uccggguagcugaacaggu

SEQ ID NO: 120344 - RNA, 20 nt, Artificial Sequence
  Synthetic
uuccggguagcugaacaggu

SEQ ID NO: 120345 - RNA, 21 nt, Artificial Sequence
  Synthetic
cuuccggguagcugaacaggu

SEQ ID NO: 120346 - RNA, 23 nt, Artificial Sequence
  Synthetic
agcuuccggguagcugaacaggu

SEQ ID NO: 120347 - RNA, 18 nt, Artificial Sequence
  Synthetic
cggaaaaauauaacaggu

SEQ ID NO: 120348 - RNA, 19 nt, Artificial Sequence
  Synthetic
acggaaaaauauaacaggu

SEQ ID NO: 120349 - RNA, 20 nt, Artificial Sequence
  Synthetic
cacggaaaaauauaacaggu

SEQ ID NO: 120350 - RNA, 21 nt, Artificial Sequence
  Synthetic
ucacggaaaaauauaacaggu

SEQ ID NO: 120351 - RNA, 22 nt, Artificial Sequence
  Synthetic
uucacggaaaaauauaacaggu

SEQ ID NO: 120352 - RNA, 23 nt, Artificial Sequence
  Synthetic
cuucacggaaaaauauaacaggu

SEQ ID NO: 120353 - RNA, 24 nt, Artificial Sequence
  Synthetic
acuucacggaaaaauauaacaggu

SEQ ID NO: 120354 - RNA, 18 nt, Artificial Sequence
  Synthetic
uaaguccauaccacaggu

SEQ ID NO: 120355 - RNA, 19 nt, Artificial Sequence
  Synthetic
uuaaguccauaccacaggu

SEQ ID NO: 120356 - RNA, 20 nt, Artificial Sequence
  Synthetic
auuaaguccauaccacaggu

SEQ ID NO: 120357 - RNA, 21 nt, Artificial Sequence
  Synthetic
uauuaaguccauaccacaggu

SEQ ID NO: 120358 - RNA, 22 nt, Artificial Sequence
  Synthetic
uuauuaaguccauaccacaggu

SEQ ID NO: 120359 - RNA, 23 nt, Artificial Sequence
  Synthetic
auuauuaaguccauaccacaggu

SEQ ID NO: 120360 - RNA, 24 nt, Artificial Sequence
  Synthetic
aauuauuaaguccauaccacaggu

SEQ ID NO: 120361 - RNA, 19 nt, Artificial Sequence
  Synthetic
agaaaauacucccacaggu

SEQ ID NO: 120362 - RNA, 20 nt, Artificial Sequence
  Synthetic
uagaaaauacucccacaggu

SEQ ID NO: 120363 - RNA, 21 nt, Artificial Sequence
  Synthetic
uuagaaaauacucccacaggu

SEQ ID NO: 120364 - RNA, 22 nt, Artificial Sequence
  Synthetic
auuagaaaauacucccacaggu

SEQ ID NO: 120365 - RNA, 23 nt, Artificial Sequence
  Synthetic
aauuagaaaauacucccacaggu

SEQ ID NO: 120366 - RNA, 18 nt, Artificial Sequence
  Synthetic
uuaagccagaagacaggu

SEQ ID NO: 120367 - RNA, 19 nt, Artificial Sequence
  Synthetic
cuuaagccagaagacaggu

SEQ ID NO: 120368 - RNA, 21 nt, Artificial Sequence
  Synthetic
agcuuaagccagaagacaggu

SEQ ID NO: 120369 - RNA, 22 nt, Artificial Sequence
  Synthetic
cagcuuaagccagaagacaggu

SEQ ID NO: 120370 - RNA, 23 nt, Artificial Sequence
  Synthetic
ucagcuuaagccagaagacaggu

SEQ ID NO: 120371 - RNA, 24 nt, Artificial Sequence
  Synthetic
cucagcuuaagccagaagacaggu

SEQ ID NO: 120372 - RNA, 18 nt, Artificial Sequence
  Synthetic
uauuacuaugggacaggu

SEQ ID NO: 120373 - RNA, 19 nt, Artificial Sequence
  Synthetic
uuauuacuaugggacaggu

SEQ ID NO: 120374 - RNA, 20 nt, Artificial Sequence
  Synthetic
uuuauuacuaugggacaggu

SEQ ID NO: 120375 - RNA, 22 nt, Artificial Sequence
  Synthetic
aguuuauuacuaugggacaggu

SEQ ID NO: 120376 - RNA, 23 nt, Artificial Sequence
  Synthetic
uaguuuauuacuaugggacaggu

SEQ ID NO: 120377 - RNA, 24 nt, Artificial Sequence
  Synthetic
auaguuuauuacuaugggacaggu

SEQ ID NO: 120378 - RNA, 21 nt, Artificial Sequence
  Synthetic
agaaacagaaaugccucaggu

SEQ ID NO: 120379 - RNA, 22 nt, Artificial Sequence
  Synthetic
cagaaacagaaaugccucaggu

SEQ ID NO: 120380 - RNA, 24 nt, Artificial Sequence
  Synthetic
agcagaaacagaaaugccucaggu

SEQ ID NO: 120381 - RNA, 19 nt, Artificial Sequence
  Synthetic
agcuucugaauccucaggu

SEQ ID NO: 120382 - RNA, 20 nt, Artificial Sequence
  Synthetic
cagcuucugaauccucaggu

SEQ ID NO: 120383 - RNA, 21 nt, Artificial Sequence
  Synthetic
acagcuucugaauccucaggu

SEQ ID NO: 120384 - RNA, 22 nt, Artificial Sequence
  Synthetic
aacagcuucugaauccucaggu

SEQ ID NO: 120385 - RNA, 23 nt, Artificial Sequence
  Synthetic
aaacagcuucugaauccucaggu

SEQ ID NO: 120386 - RNA, 24 nt, Artificial Sequence
  Synthetic
uaaacagcuucugaauccucaggu

SEQ ID NO: 120387 - RNA, 18 nt, Artificial Sequence
  Synthetic
cucccuuaagcuucaggu

SEQ ID NO: 120388 - RNA, 19 nt, Artificial Sequence
  Synthetic
ucucccuuaagcuucaggu

SEQ ID NO: 120389 - RNA, 20 nt, Artificial Sequence
  Synthetic
uucucccuuaagcuucaggu

SEQ ID NO: 120390 - RNA, 21 nt, Artificial Sequence
  Synthetic
auucucccuuaagcuucaggu

SEQ ID NO: 120391 - RNA, 22 nt, Artificial Sequence
  Synthetic
uauucucccuuaagcuucaggu

SEQ ID NO: 120392 - RNA, 23 nt, Artificial Sequence
  Synthetic
uuauucucccuuaagcuucaggu

SEQ ID NO: 120393 - RNA, 24 nt, Artificial Sequence
  Synthetic
uuuauucucccuuaagcuucaggu

SEQ ID NO: 120394 - RNA, 18 nt, Artificial Sequence
  Synthetic
cgaauggagaagagaggu

SEQ ID NO: 120395 - RNA, 19 nt, Artificial Sequence
  Synthetic
ccgaauggagaagagaggu

SEQ ID NO: 120396 - RNA, 20 nt, Artificial Sequence
  Synthetic
uccgaauggagaagagaggu

SEQ ID NO: 120397 - RNA, 21 nt, Artificial Sequence
  Synthetic
auccgaauggagaagagaggu

SEQ ID NO: 120398 - RNA, 22 nt, Artificial Sequence
  Synthetic
cauccgaauggagaagagaggu

SEQ ID NO: 120399 - RNA, 23 nt, Artificial Sequence
  Synthetic
acauccgaauggagaagagaggu

SEQ ID NO: 120400 - RNA, 24 nt, Artificial Sequence
  Synthetic
aacauccgaauggagaagagaggu

SEQ ID NO: 120401 - RNA, 21 nt, Artificial Sequence
  Synthetic
uaaggaauuacauagagaggu

SEQ ID NO: 120402 - RNA, 23 nt, Artificial Sequence
  Synthetic
aguaaggaauuacauagagaggu

SEQ ID NO: 120403 - RNA, 24 nt, Artificial Sequence
  Synthetic
uaguaaggaauuacauagagaggu

SEQ ID NO: 120404 - RNA, 18 nt, Artificial Sequence
  Synthetic
uuacaaucaguuagaggu

SEQ ID NO: 120405 - RNA, 19 nt, Artificial Sequence
  Synthetic
cuuacaaucaguuagaggu

SEQ ID NO: 120406 - RNA, 20 nt, Artificial Sequence
  Synthetic
ucuuacaaucaguuagaggu

SEQ ID NO: 120407 - RNA, 21 nt, Artificial Sequence
  Synthetic
cucuuacaaucaguuagaggu

SEQ ID NO: 120408 - RNA, 23 nt, Artificial Sequence
  Synthetic
ugcucuuacaaucaguuagaggu

SEQ ID NO: 120409 - RNA, 19 nt, Artificial Sequence
  Synthetic
aggaaaugccuuuagaggu

SEQ ID NO: 120410 - RNA, 20 nt, Artificial Sequence
  Synthetic
uaggaaaugccuuuagaggu

SEQ ID NO: 120411 - RNA, 21 nt, Artificial Sequence
  Synthetic
auaggaaaugccuuuagaggu

SEQ ID NO: 120412 - RNA, 22 nt, Artificial Sequence
  Synthetic
cauaggaaaugccuuuagaggu

SEQ ID NO: 120413 - RNA, 23 nt, Artificial Sequence
  Synthetic
acauaggaaaugccuuuagaggu

SEQ ID NO: 120414 - RNA, 24 nt, Artificial Sequence
  Synthetic
aacauaggaaaugccuuuagaggu

SEQ ID NO: 120415 - RNA, 18 nt, Artificial Sequence
  Synthetic
augcuacaccaaggaggu

SEQ ID NO: 120416 - RNA, 19 nt, Artificial Sequence
  Synthetic
caugcuacaccaaggaggu

SEQ ID NO: 120417 - RNA, 21 nt, Artificial Sequence
  Synthetic
ugcaugcuacaccaaggaggu

SEQ ID NO: 120418 - RNA, 22 nt, Artificial Sequence
  Synthetic
uugcaugcuacaccaaggaggu

SEQ ID NO: 120419 - RNA, 23 nt, Artificial Sequence
  Synthetic
cuugcaugcuacaccaaggaggu

SEQ ID NO: 120420 - RNA, 24 nt, Artificial Sequence
  Synthetic
ccuugcaugcuacaccaaggaggu

SEQ ID NO: 120421 - RNA, 18 nt, Artificial Sequence
  Synthetic
cuaacucccauaggaggu

SEQ ID NO: 120422 - RNA, 19 nt, Artificial Sequence
  Synthetic
acuaacucccauaggaggu

SEQ ID NO: 120423 - RNA, 20 nt, Artificial Sequence
  Synthetic
uacuaacucccauaggaggu

SEQ ID NO: 120424 - RNA, 22 nt, Artificial Sequence
  Synthetic
uguacuaacucccauaggaggu

SEQ ID NO: 120425 - RNA, 23 nt, Artificial Sequence
  Synthetic
auguacuaacucccauaggaggu

SEQ ID NO: 120426 - RNA, 18 nt, Artificial Sequence
  Synthetic
augaaaguuauaggaggu

SEQ ID NO: 120427 - RNA, 19 nt, Artificial Sequence
  Synthetic
aaugaaaguuauaggaggu

SEQ ID NO: 120428 - RNA, 21 nt, Artificial Sequence
  Synthetic
agaaugaaaguuauaggaggu

SEQ ID NO: 120429 - RNA, 22 nt, Artificial Sequence
  Synthetic
aagaaugaaaguuauaggaggu

SEQ ID NO: 120430 - RNA, 23 nt, Artificial Sequence
  Synthetic
aaagaaugaaaguuauaggaggu

SEQ ID NO: 120431 - RNA, 21 nt, Artificial Sequence
  Synthetic
ugggaagggucguggggaggu

SEQ ID NO: 120432 - RNA, 22 nt, Artificial Sequence
  Synthetic
augggaagggucguggggaggu

SEQ ID NO: 120433 - RNA, 19 nt, Artificial Sequence
  Synthetic
ugccaccgucuguggaggu

SEQ ID NO: 120434 - RNA, 20 nt, Artificial Sequence
  Synthetic
cugccaccgucuguggaggu

SEQ ID NO: 120435 - RNA, 21 nt, Artificial Sequence
  Synthetic
ccugccaccgucuguggaggu

SEQ ID NO: 120436 - RNA, 22 nt, Artificial Sequence
  Synthetic
accugccaccgucuguggaggu

SEQ ID NO: 120437 - RNA, 23 nt, Artificial Sequence
  Synthetic
uaccugccaccgucuguggaggu

SEQ ID NO: 120438 - RNA, 24 nt, Artificial Sequence
  Synthetic
auaccugccaccgucuguggaggu

SEQ ID NO: 120439 - RNA, 21 nt, Artificial Sequence
  Synthetic
acuuuuggagaauuuggaggu

SEQ ID NO: 120440 - RNA, 23 nt, Artificial Sequence
  Synthetic
agacuuuuggagaauuuggaggu

SEQ ID NO: 120441 - RNA, 18 nt, Artificial Sequence
  Synthetic
ucuaccagaauaugaggu

SEQ ID NO: 120442 - RNA, 19 nt, Artificial Sequence
  Synthetic
uucuaccagaauaugaggu

SEQ ID NO: 120443 - RNA, 20 nt, Artificial Sequence
  Synthetic
cuucuaccagaauaugaggu

SEQ ID NO: 120444 - RNA, 21 nt, Artificial Sequence
  Synthetic
acuucuaccagaauaugaggu

SEQ ID NO: 120445 - RNA, 22 nt, Artificial Sequence
  Synthetic
aacuucuaccagaauaugaggu

SEQ ID NO: 120446 - RNA, 23 nt, Artificial Sequence
  Synthetic
aaacuucuaccagaauaugaggu

SEQ ID NO: 120447 - RNA, 24 nt, Artificial Sequence
  Synthetic
uaaacuucuaccagaauaugaggu

SEQ ID NO: 120448 - RNA, 18 nt, Artificial Sequence
  Synthetic
uguaaacaaaggugaggu

SEQ ID NO: 120449 - RNA, 19 nt, Artificial Sequence
  Synthetic
auguaaacaaaggugaggu

SEQ ID NO: 120450 - RNA, 21 nt, Artificial Sequence
  Synthetic
agauguaaacaaaggugaggu

SEQ ID NO: 120451 - RNA, 23 nt, Artificial Sequence
  Synthetic
ugagauguaaacaaaggugaggu

SEQ ID NO: 120452 - RNA, 24 nt, Artificial Sequence
  Synthetic
augagauguaaacaaaggugaggu

SEQ ID NO: 120453 - RNA, 20 nt, Artificial Sequence
  Synthetic
uggauuauaugugaauaggu

SEQ ID NO: 120454 - RNA, 21 nt, Artificial Sequence
  Synthetic
uuggauuauaugugaauaggu

SEQ ID NO: 120455 - RNA, 22 nt, Artificial Sequence
  Synthetic
cuuggauuauaugugaauaggu

SEQ ID NO: 120456 - RNA, 23 nt, Artificial Sequence
  Synthetic
ccuuggauuauaugugaauaggu

SEQ ID NO: 120457 - RNA, 24 nt, Artificial Sequence
  Synthetic
accuuggauuauaugugaauaggu

SEQ ID NO: 120458 - RNA, 18 nt, Artificial Sequence
  Synthetic
uggagguaggggauaggu

SEQ ID NO: 120459 - RNA, 20 nt, Artificial Sequence
  Synthetic
uguggagguaggggauaggu

SEQ ID NO: 120460 - RNA, 18 nt, Artificial Sequence
  Synthetic
auucaaacacagcuaggu

SEQ ID NO: 120461 - RNA, 19 nt, Artificial Sequence
  Synthetic
uauucaaacacagcuaggu

SEQ ID NO: 120462 - RNA, 20 nt, Artificial Sequence
  Synthetic
auauucaaacacagcuaggu

SEQ ID NO: 120463 - RNA, 21 nt, Artificial Sequence
  Synthetic
aauauucaaacacagcuaggu

SEQ ID NO: 120464 - RNA, 22 nt, Artificial Sequence
  Synthetic
uaauauucaaacacagcuaggu

SEQ ID NO: 120465 - RNA, 23 nt, Artificial Sequence
  Synthetic
uuaauauucaaacacagcuaggu

SEQ ID NO: 120466 - RNA, 18 nt, Artificial Sequence
  Synthetic
ugccauaaaaaucuaggu

SEQ ID NO: 120467 - RNA, 19 nt, Artificial Sequence
  Synthetic
augccauaaaaaucuaggu

SEQ ID NO: 120468 - RNA, 20 nt, Artificial Sequence
  Synthetic
aaugccauaaaaaucuaggu

SEQ ID NO: 120469 - RNA, 21 nt, Artificial Sequence
  Synthetic
uaaugccauaaaaaucuaggu

SEQ ID NO: 120470 - RNA, 24 nt, Artificial Sequence
  Synthetic
agguaaugccauaaaaaucuaggu

SEQ ID NO: 120471 - RNA, 18 nt, Artificial Sequence
  Synthetic
aggcuuuucauaguaggu

SEQ ID NO: 120472 - RNA, 19 nt, Artificial Sequence
  Synthetic
caggcuuuucauaguaggu

SEQ ID NO: 120473 - RNA, 20 nt, Artificial Sequence
  Synthetic
ucaggcuuuucauaguaggu

SEQ ID NO: 120474 - RNA, 21 nt, Artificial Sequence
  Synthetic
aucaggcuuuucauaguaggu

SEQ ID NO: 120475 - RNA, 23 nt, Artificial Sequence
  Synthetic
ugaucaggcuuuucauaguaggu

SEQ ID NO: 120476 - RNA, 18 nt, Artificial Sequence
  Synthetic
aaugaggagagauuaggu

SEQ ID NO: 120477 - RNA, 20 nt, Artificial Sequence
  Synthetic
ugaaugaggagagauuaggu

SEQ ID NO: 120478 - RNA, 21 nt, Artificial Sequence
  Synthetic
augaaugaggagagauuaggu

SEQ ID NO: 120479 - RNA, 22 nt, Artificial Sequence
  Synthetic
aaugaaugaggagagauuaggu

SEQ ID NO: 120480 - RNA, 23 nt, Artificial Sequence
  Synthetic
aaaugaaugaggagagauuaggu

SEQ ID NO: 120481 - RNA, 18 nt, Artificial Sequence
  Synthetic
uaggaauaaaaacacggu

SEQ ID NO: 120482 - RNA, 20 nt, Artificial Sequence
  Synthetic
aguaggaauaaaaacacggu

SEQ ID NO: 120483 - RNA, 21 nt, Artificial Sequence
  Synthetic
caguaggaauaaaaacacggu

SEQ ID NO: 120484 - RNA, 22 nt, Artificial Sequence
  Synthetic
acaguaggaauaaaaacacggu

SEQ ID NO: 120485 - RNA, 23 nt, Artificial Sequence
  Synthetic
cacaguaggaauaaaaacacggu

SEQ ID NO: 120486 - RNA, 18 nt, Artificial Sequence
  Synthetic
caguuugccuggcacggu

SEQ ID NO: 120487 - RNA, 20 nt, Artificial Sequence
  Synthetic
agcaguuugccuggcacggu

SEQ ID NO: 120488 - RNA, 22 nt, Artificial Sequence
  Synthetic
agagcaguuugccuggcacggu

SEQ ID NO: 120489 - RNA, 24 nt, Artificial Sequence
  Synthetic
ugagagcaguuugccuggcacggu

SEQ ID NO: 120490 - RNA, 18 nt, Artificial Sequence
  Synthetic
uuugcucuaugcuacggu

SEQ ID NO: 120491 - RNA, 20 nt, Artificial Sequence
  Synthetic
uguuugcucuaugcuacggu

SEQ ID NO: 120492 - RNA, 21 nt, Artificial Sequence
  Synthetic
auguuugcucuaugcuacggu

SEQ ID NO: 120493 - RNA, 22 nt, Artificial Sequence
  Synthetic
aauguuugcucuaugcuacggu

SEQ ID NO: 120494 - RNA, 23 nt, Artificial Sequence
  Synthetic
uaauguuugcucuaugcuacggu

SEQ ID NO: 120495 - RNA, 18 nt, Artificial Sequence
  Synthetic
augaaagaguauuccggu

SEQ ID NO: 120496 - RNA, 19 nt, Artificial Sequence
  Synthetic
aaugaaagaguauuccggu

SEQ ID NO: 120497 - RNA, 21 nt, Artificial Sequence
  Synthetic
ugaaugaaagaguauuccggu

SEQ ID NO: 120498 - RNA, 23 nt, Artificial Sequence
  Synthetic
ugugaaugaaagaguauuccggu

SEQ ID NO: 120499 - RNA, 24 nt, Artificial Sequence
  Synthetic
augugaaugaaagaguauuccggu

SEQ ID NO: 120500 - RNA, 21 nt, Artificial Sequence
  Synthetic
auaaccacaacaggaaagggu

SEQ ID NO: 120501 - RNA, 22 nt, Artificial Sequence
  Synthetic
cauaaccacaacaggaaagggu

SEQ ID NO: 120502 - RNA, 23 nt, Artificial Sequence
  Synthetic
acauaaccacaacaggaaagggu

SEQ ID NO: 120503 - RNA, 24 nt, Artificial Sequence
  Synthetic
aacauaaccacaacaggaaagggu

SEQ ID NO: 120504 - RNA, 18 nt, Artificial Sequence
  Synthetic
agugcuaauggcaagggu

SEQ ID NO: 120505 - RNA, 20 nt, Artificial Sequence
  Synthetic
agagugcuaauggcaagggu

SEQ ID NO: 120506 - RNA, 21 nt, Artificial Sequence
  Synthetic
cagagugcuaauggcaagggu

SEQ ID NO: 120507 - RNA, 22 nt, Artificial Sequence
  Synthetic
ucagagugcuaauggcaagggu

SEQ ID NO: 120508 - RNA, 23 nt, Artificial Sequence
  Synthetic
cucagagugcuaauggcaagggu

SEQ ID NO: 120509 - RNA, 18 nt, Artificial Sequence
  Synthetic
uuauuaaaugagaagggu

SEQ ID NO: 120510 - RNA, 19 nt, Artificial Sequence
  Synthetic
auuauuaaaugagaagggu

SEQ ID NO: 120511 - RNA, 22 nt, Artificial Sequence
  Synthetic
uggauuauuaaaugagaagggu

SEQ ID NO: 120512 - RNA, 23 nt, Artificial Sequence
  Synthetic
cuggauuauuaaaugagaagggu

SEQ ID NO: 120513 - RNA, 24 nt, Artificial Sequence
  Synthetic
ucuggauuauuaaaugagaagggu

SEQ ID NO: 120514 - RNA, 18 nt, Artificial Sequence
  Synthetic
aauauacauacgaagggu

SEQ ID NO: 120515 - RNA, 20 nt, Artificial Sequence
  Synthetic
agaauauacauacgaagggu

SEQ ID NO: 120516 - RNA, 21 nt, Artificial Sequence
  Synthetic
uagaauauacauacgaagggu

SEQ ID NO: 120517 - RNA, 22 nt, Artificial Sequence
  Synthetic
cuagaauauacauacgaagggu

SEQ ID NO: 120518 - RNA, 23 nt, Artificial Sequence
  Synthetic
ucuagaauauacauacgaagggu

SEQ ID NO: 120519 - RNA, 24 nt, Artificial Sequence
  Synthetic
uucuagaauauacauacgaagggu

SEQ ID NO: 120520 - RNA, 18 nt, Artificial Sequence
  Synthetic
agguuugggaugaagggu

SEQ ID NO: 120521 - RNA, 19 nt, Artificial Sequence
  Synthetic
uagguuugggaugaagggu

SEQ ID NO: 120522 - RNA, 20 nt, Artificial Sequence
  Synthetic
auagguuugggaugaagggu

SEQ ID NO: 120523 - RNA, 21 nt, Artificial Sequence
  Synthetic
aauagguuugggaugaagggu

SEQ ID NO: 120524 - RNA, 22 nt, Artificial Sequence
  Synthetic
caauagguuugggaugaagggu

SEQ ID NO: 120525 - RNA, 23 nt, Artificial Sequence
  Synthetic
ucaauagguuugggaugaagggu

SEQ ID NO: 120526 - RNA, 24 nt, Artificial Sequence
  Synthetic
uucaauagguuugggaugaagggu

SEQ ID NO: 120527 - RNA, 18 nt, Artificial Sequence
  Synthetic
aacuuauuauuuaagggu

SEQ ID NO: 120528 - RNA, 19 nt, Artificial Sequence
  Synthetic
uaacuuauuauuuaagggu

SEQ ID NO: 120529 - RNA, 20 nt, Artificial Sequence
  Synthetic
auaacuuauuauuuaagggu

SEQ ID NO: 120530 - RNA, 22 nt, Artificial Sequence
  Synthetic
agauaacuuauuauuuaagggu

SEQ ID NO: 120531 - RNA, 23 nt, Artificial Sequence
  Synthetic
aagauaacuuauuauuuaagggu

SEQ ID NO: 120532 - RNA, 24 nt, Artificial Sequence
  Synthetic
aaagauaacuuauuauuuaagggu

SEQ ID NO: 120533 - RNA, 19 nt, Artificial Sequence
  Synthetic
aggguaaauguagcagggu

SEQ ID NO: 120534 - RNA, 20 nt, Artificial Sequence
  Synthetic
caggguaaauguagcagggu

SEQ ID NO: 120535 - RNA, 21 nt, Artificial Sequence
  Synthetic
ucaggguaaauguagcagggu

SEQ ID NO: 120536 - RNA, 22 nt, Artificial Sequence
  Synthetic
uucaggguaaauguagcagggu

SEQ ID NO: 120537 - RNA, 24 nt, Artificial Sequence
  Synthetic
uguucaggguaaauguagcagggu

SEQ ID NO: 120538 - RNA, 18 nt, Artificial Sequence
  Synthetic
cauaaaaaugaggagggu

SEQ ID NO: 120539 - RNA, 19 nt, Artificial Sequence
  Synthetic
ccauaaaaaugaggagggu

SEQ ID NO: 120540 - RNA, 20 nt, Artificial Sequence
  Synthetic
cccauaaaaaugaggagggu

SEQ ID NO: 120541 - RNA, 23 nt, Artificial Sequence
  Synthetic
aggcccauaaaaaugaggagggu

SEQ ID NO: 120542 - RNA, 24 nt, Artificial Sequence
  Synthetic
aaggcccauaaaaaugaggagggu

SEQ ID NO: 120543 - RNA, 18 nt, Artificial Sequence
  Synthetic
uugacaaaaauggagggu

SEQ ID NO: 120544 - RNA, 19 nt, Artificial Sequence
  Synthetic
uuugacaaaaauggagggu

SEQ ID NO: 120545 - RNA, 20 nt, Artificial Sequence
  Synthetic
auuugacaaaaauggagggu

SEQ ID NO: 120546 - RNA, 24 nt, Artificial Sequence
  Synthetic
agggauuugacaaaaauggagggu

SEQ ID NO: 120547 - RNA, 18 nt, Artificial Sequence
  Synthetic
cagcaaaggaaagcgggu

SEQ ID NO: 120548 - RNA, 19 nt, Artificial Sequence
  Synthetic
ucagcaaaggaaagcgggu

SEQ ID NO: 120549 - RNA, 20 nt, Artificial Sequence
  Synthetic
aucagcaaaggaaagcgggu

SEQ ID NO: 120550 - RNA, 21 nt, Artificial Sequence
  Synthetic
aaucagcaaaggaaagcgggu

SEQ ID NO: 120551 - RNA, 22 nt, Artificial Sequence
  Synthetic
aaaucagcaaaggaaagcgggu

SEQ ID NO: 120552 - RNA, 23 nt, Artificial Sequence
  Synthetic
aaaaucagcaaaggaaagcgggu

SEQ ID NO: 120553 - RNA, 24 nt, Artificial Sequence
  Synthetic
caaaaucagcaaaggaaagcgggu

SEQ ID NO: 120554 - RNA, 18 nt, Artificial Sequence
  Synthetic
agagccaugaugaggggu

SEQ ID NO: 120555 - RNA, 19 nt, Artificial Sequence
  Synthetic
cagagccaugaugaggggu

SEQ ID NO: 120556 - RNA, 21 nt, Artificial Sequence
  Synthetic
ugcagagccaugaugaggggu

SEQ ID NO: 120557 - RNA, 22 nt, Artificial Sequence
  Synthetic
uugcagagccaugaugaggggu

SEQ ID NO: 120558 - RNA, 23 nt, Artificial Sequence
  Synthetic
uuugcagagccaugaugaggggu

SEQ ID NO: 120559 - RNA, 24 nt, Artificial Sequence
  Synthetic
uuuugcagagccaugaugaggggu

SEQ ID NO: 120560 - RNA, 18 nt, Artificial Sequence
  Synthetic
caauaauugccuaggggu

SEQ ID NO: 120561 - RNA, 19 nt, Artificial Sequence
  Synthetic
ucaauaauugccuaggggu

SEQ ID NO: 120562 - RNA, 20 nt, Artificial Sequence
  Synthetic
aucaauaauugccuaggggu

SEQ ID NO: 120563 - RNA, 21 nt, Artificial Sequence
  Synthetic
uaucaauaauugccuaggggu

SEQ ID NO: 120564 - RNA, 22 nt, Artificial Sequence
  Synthetic
uuaucaauaauugccuaggggu

SEQ ID NO: 120565 - RNA, 24 nt, Artificial Sequence
  Synthetic
aguuaucaauaauugccuaggggu

SEQ ID NO: 120566 - RNA, 18 nt, Artificial Sequence
  Synthetic
cccaagaggucugggggu

SEQ ID NO: 120567 - RNA, 19 nt, Artificial Sequence
  Synthetic
ucccaagaggucugggggu

SEQ ID NO: 120568 - RNA, 20 nt, Artificial Sequence
  Synthetic
uucccaagaggucugggggu

SEQ ID NO: 120569 - RNA, 21 nt, Artificial Sequence
  Synthetic
auucccaagaggucugggggu

SEQ ID NO: 120570 - RNA, 22 nt, Artificial Sequence
  Synthetic
uauucccaagaggucugggggu

SEQ ID NO: 120571 - RNA, 23 nt, Artificial Sequence
  Synthetic
cuauucccaagaggucugggggu

SEQ ID NO: 120572 - RNA, 24 nt, Artificial Sequence
  Synthetic
ucuauucccaagaggucugggggu

SEQ ID NO: 120573 - RNA, 19 nt, Artificial Sequence
  Synthetic
ugaaggauaaagugggggu

SEQ ID NO: 120574 - RNA, 20 nt, Artificial Sequence
  Synthetic
augaaggauaaagugggggu

SEQ ID NO: 120575 - RNA, 21 nt, Artificial Sequence
  Synthetic
aaugaaggauaaagugggggu

SEQ ID NO: 120576 - RNA, 22 nt, Artificial Sequence
  Synthetic
aaaugaaggauaaagugggggu

SEQ ID NO: 120577 - RNA, 24 nt, Artificial Sequence
  Synthetic
agaaaugaaggauaaagugggggu

SEQ ID NO: 120578 - RNA, 18 nt, Artificial Sequence
  Synthetic
uuuuauugaagauggggu

SEQ ID NO: 120579 - RNA, 19 nt, Artificial Sequence
  Synthetic
cuuuuauugaagauggggu

SEQ ID NO: 120580 - RNA, 20 nt, Artificial Sequence
  Synthetic
ucuuuuauugaagauggggu

SEQ ID NO: 120581 - RNA, 21 nt, Artificial Sequence
  Synthetic
uucuuuuauugaagauggggu

SEQ ID NO: 120582 - RNA, 22 nt, Artificial Sequence
  Synthetic
cuucuuuuauugaagauggggu

SEQ ID NO: 120583 - RNA, 23 nt, Artificial Sequence
  Synthetic
ucuucuuuuauugaagauggggu

SEQ ID NO: 120584 - RNA, 24 nt, Artificial Sequence
  Synthetic
uucuucuuuuauugaagauggggu

SEQ ID NO: 120585 - RNA, 18 nt, Artificial Sequence
  Synthetic
acuauguuucacuggggu

SEQ ID NO: 120586 - RNA, 19 nt, Artificial Sequence
  Synthetic
uacuauguuucacuggggu

SEQ ID NO: 120587 - RNA, 20 nt, Artificial Sequence
  Synthetic
uuacuauguuucacuggggu

SEQ ID NO: 120588 - RNA, 21 nt, Artificial Sequence
  Synthetic
cuuacuauguuucacuggggu

SEQ ID NO: 120589 - RNA, 23 nt, Artificial Sequence
  Synthetic
ugcuuacuauguuucacuggggu

SEQ ID NO: 120590 - RNA, 18 nt, Artificial Sequence
  Synthetic
uucugacuauucuggggu

SEQ ID NO: 120591 - RNA, 19 nt, Artificial Sequence
  Synthetic
uuucugacuauucuggggu

SEQ ID NO: 120592 - RNA, 20 nt, Artificial Sequence
  Synthetic
auuucugacuauucuggggu

SEQ ID NO: 120593 - RNA, 21 nt, Artificial Sequence
  Synthetic
cauuucugacuauucuggggu

SEQ ID NO: 120594 - RNA, 23 nt, Artificial Sequence
  Synthetic
agcauuucugacuauucuggggu

SEQ ID NO: 120595 - RNA, 24 nt, Artificial Sequence
  Synthetic
cagcauuucugacuauucuggggu

SEQ ID NO: 120596 - RNA, 21 nt, Artificial Sequence
  Synthetic
cuauuugguuggggguggggu

SEQ ID NO: 120597 - RNA, 23 nt, Artificial Sequence
  Synthetic
agcuauuugguuggggguggggu

SEQ ID NO: 120598 - RNA, 24 nt, Artificial Sequence
  Synthetic
aagcuauuugguuggggguggggu

SEQ ID NO: 120599 - RNA, 19 nt, Artificial Sequence
  Synthetic
agacauggguuacaugggu

SEQ ID NO: 120600 - RNA, 20 nt, Artificial Sequence
  Synthetic
cagacauggguuacaugggu

SEQ ID NO: 120601 - RNA, 21 nt, Artificial Sequence
  Synthetic
acagacauggguuacaugggu

SEQ ID NO: 120602 - RNA, 22 nt, Artificial Sequence
  Synthetic
aacagacauggguuacaugggu

SEQ ID NO: 120603 - RNA, 23 nt, Artificial Sequence
  Synthetic
aaacagacauggguuacaugggu

SEQ ID NO: 120604 - RNA, 24 nt, Artificial Sequence
  Synthetic
caaacagacauggguuacaugggu

SEQ ID NO: 120605 - RNA, 18 nt, Artificial Sequence
  Synthetic
acuuaguuagauaugggu

SEQ ID NO: 120606 - RNA, 19 nt, Artificial Sequence
  Synthetic
aacuuaguuagauaugggu

SEQ ID NO: 120607 - RNA, 21 nt, Artificial Sequence
  Synthetic
ugaacuuaguuagauaugggu

SEQ ID NO: 120608 - RNA, 22 nt, Artificial Sequence
  Synthetic
uugaacuuaguuagauaugggu

SEQ ID NO: 120609 - RNA, 23 nt, Artificial Sequence
  Synthetic
uuugaacuuaguuagauaugggu

SEQ ID NO: 120610 - RNA, 24 nt, Artificial Sequence
  Synthetic
cuuugaacuuaguuagauaugggu

SEQ ID NO: 120611 - RNA, 18 nt, Artificial Sequence
  Synthetic
uaauaaaugaaacugggu

SEQ ID NO: 120612 - RNA, 19 nt, Artificial Sequence
  Synthetic
auaauaaaugaaacugggu

SEQ ID NO: 120613 - RNA, 20 nt, Artificial Sequence
  Synthetic
uauaauaaaugaaacugggu

SEQ ID NO: 120614 - RNA, 21 nt, Artificial Sequence
  Synthetic
auauaauaaaugaaacugggu

SEQ ID NO: 120615 - RNA, 23 nt, Artificial Sequence
  Synthetic
ugauauaauaaaugaaacugggu

SEQ ID NO: 120616 - RNA, 18 nt, Artificial Sequence
  Synthetic
acaaugagccugcugggu

SEQ ID NO: 120617 - RNA, 19 nt, Artificial Sequence
  Synthetic
uacaaugagccugcugggu

SEQ ID NO: 120618 - RNA, 20 nt, Artificial Sequence
  Synthetic
auacaaugagccugcugggu

SEQ ID NO: 120619 - RNA, 21 nt, Artificial Sequence
  Synthetic
aauacaaugagccugcugggu

SEQ ID NO: 120620 - RNA, 22 nt, Artificial Sequence
  Synthetic
caauacaaugagccugcugggu

SEQ ID NO: 120621 - RNA, 24 nt, Artificial Sequence
  Synthetic
agcaauacaaugagccugcugggu

SEQ ID NO: 120622 - RNA, 19 nt, Artificial Sequence
  Synthetic
uguaugauggaaucugggu

SEQ ID NO: 120623 - RNA, 20 nt, Artificial Sequence
  Synthetic
uuguaugauggaaucugggu

SEQ ID NO: 120624 - RNA, 21 nt, Artificial Sequence
  Synthetic
cuuguaugauggaaucugggu

SEQ ID NO: 120625 - RNA, 23 nt, Artificial Sequence
  Synthetic
ugcuuguaugauggaaucugggu

SEQ ID NO: 120626 - RNA, 24 nt, Artificial Sequence
  Synthetic
uugcuuguaugauggaaucugggu

SEQ ID NO: 120627 - RNA, 19 nt, Artificial Sequence
  Synthetic
agccuuucccugugugggu

SEQ ID NO: 120628 - RNA, 20 nt, Artificial Sequence
  Synthetic
cagccuuucccugugugggu

SEQ ID NO: 120629 - RNA, 23 nt, Artificial Sequence
  Synthetic
uggcagccuuucccugugugggu

SEQ ID NO: 120630 - RNA, 24 nt, Artificial Sequence
  Synthetic
cuggcagccuuucccugugugggu

SEQ ID NO: 120631 - RNA, 18 nt, Artificial Sequence
  Synthetic
cagcagaaucaauugggu

SEQ ID NO: 120632 - RNA, 19 nt, Artificial Sequence
  Synthetic
acagcagaaucaauugggu

SEQ ID NO: 120633 - RNA, 20 nt, Artificial Sequence
  Synthetic
cacagcagaaucaauugggu

SEQ ID NO: 120634 - RNA, 21 nt, Artificial Sequence
  Synthetic
acacagcagaaucaauugggu

SEQ ID NO: 120635 - RNA, 22 nt, Artificial Sequence
  Synthetic
cacacagcagaaucaauugggu

SEQ ID NO: 120636 - RNA, 24 nt, Artificial Sequence
  Synthetic
agcacacagcagaaucaauugggu

SEQ ID NO: 120637 - RNA, 19 nt, Artificial Sequence
  Synthetic
agaagggagagucuugggu

SEQ ID NO: 120638 - RNA, 21 nt, Artificial Sequence
  Synthetic
agagaagggagagucuugggu

SEQ ID NO: 120639 - RNA, 22 nt, Artificial Sequence
  Synthetic
cagagaagggagagucuugggu

SEQ ID NO: 120640 - RNA, 24 nt, Artificial Sequence
  Synthetic
ugcagagaagggagagucuugggu

SEQ ID NO: 120641 - RNA, 21 nt, Artificial Sequence
  Synthetic
ucuuuaucucuucauuugggu

SEQ ID NO: 120642 - RNA, 22 nt, Artificial Sequence
  Synthetic
uucuuuaucucuucauuugggu

SEQ ID NO: 120643 - RNA, 23 nt, Artificial Sequence
  Synthetic
auucuuuaucucuucauuugggu

SEQ ID NO: 120644 - RNA, 18 nt, Artificial Sequence
  Synthetic
ugagacauuuauuugggu

SEQ ID NO: 120645 - RNA, 19 nt, Artificial Sequence
  Synthetic
cugagacauuuauuugggu

SEQ ID NO: 120646 - RNA, 20 nt, Artificial Sequence
  Synthetic
acugagacauuuauuugggu

SEQ ID NO: 120647 - RNA, 21 nt, Artificial Sequence
  Synthetic
cacugagacauuuauuugggu

SEQ ID NO: 120648 - RNA, 22 nt, Artificial Sequence
  Synthetic
ucacugagacauuuauuugggu

SEQ ID NO: 120649 - RNA, 23 nt, Artificial Sequence
  Synthetic
aucacugagacauuuauuugggu

SEQ ID NO: 120650 - RNA, 24 nt, Artificial Sequence
  Synthetic
uaucacugagacauuuauuugggu

SEQ ID NO: 120651 - RNA, 19 nt, Artificial Sequence
  Synthetic
ugagucuuacuguuugggu

SEQ ID NO: 120652 - RNA, 20 nt, Artificial Sequence
  Synthetic
uugagucuuacuguuugggu

SEQ ID NO: 120653 - RNA, 21 nt, Artificial Sequence
  Synthetic
cuugagucuuacuguuugggu

SEQ ID NO: 120654 - RNA, 22 nt, Artificial Sequence
  Synthetic
ccuugagucuuacuguuugggu

SEQ ID NO: 120655 - RNA, 23 nt, Artificial Sequence
  Synthetic
uccuugagucuuacuguuugggu

SEQ ID NO: 120656 - RNA, 24 nt, Artificial Sequence
  Synthetic
auccuugagucuuacuguuugggu

SEQ ID NO: 120657 - RNA, 19 nt, Artificial Sequence
  Synthetic
agcuaaguggagaaauggu

SEQ ID NO: 120658 - RNA, 20 nt, Artificial Sequence
  Synthetic
uagcuaaguggagaaauggu

SEQ ID NO: 120659 - RNA, 21 nt, Artificial Sequence
  Synthetic
cuagcuaaguggagaaauggu

SEQ ID NO: 120660 - RNA, 22 nt, Artificial Sequence
  Synthetic
acuagcuaaguggagaaauggu

SEQ ID NO: 120661 - RNA, 23 nt, Artificial Sequence
  Synthetic
uacuagcuaaguggagaaauggu

SEQ ID NO: 120662 - RNA, 18 nt, Artificial Sequence
  Synthetic
uaaaggacaagcaauggu

SEQ ID NO: 120663 - RNA, 19 nt, Artificial Sequence
  Synthetic
auaaaggacaagcaauggu

SEQ ID NO: 120664 - RNA, 20 nt, Artificial Sequence
  Synthetic
uauaaaggacaagcaauggu

SEQ ID NO: 120665 - RNA, 21 nt, Artificial Sequence
  Synthetic
auauaaaggacaagcaauggu

SEQ ID NO: 120666 - RNA, 22 nt, Artificial Sequence
  Synthetic
aauauaaaggacaagcaauggu

SEQ ID NO: 120667 - RNA, 23 nt, Artificial Sequence
  Synthetic
aaauauaaaggacaagcaauggu

SEQ ID NO: 120668 - RNA, 18 nt, Artificial Sequence
  Synthetic
cagcagcaaaaccauggu

SEQ ID NO: 120669 - RNA, 19 nt, Artificial Sequence
  Synthetic
ucagcagcaaaaccauggu

SEQ ID NO: 120670 - RNA, 21 nt, Artificial Sequence
  Synthetic
agucagcagcaaaaccauggu

SEQ ID NO: 120671 - RNA, 22 nt, Artificial Sequence
  Synthetic
cagucagcagcaaaaccauggu

SEQ ID NO: 120672 - RNA, 23 nt, Artificial Sequence
  Synthetic
ucagucagcagcaaaaccauggu

SEQ ID NO: 120673 - RNA, 24 nt, Artificial Sequence
  Synthetic
aucagucagcagcaaaaccauggu

SEQ ID NO: 120674 - RNA, 18 nt, Artificial Sequence
  Synthetic
cuucucaagagccauggu

SEQ ID NO: 120675 - RNA, 20 nt, Artificial Sequence
  Synthetic
ugcuucucaagagccauggu

SEQ ID NO: 120676 - RNA, 21 nt, Artificial Sequence
  Synthetic
augcuucucaagagccauggu

SEQ ID NO: 120677 - RNA, 22 nt, Artificial Sequence
  Synthetic
caugcuucucaagagccauggu

SEQ ID NO: 120678 - RNA, 23 nt, Artificial Sequence
  Synthetic
ucaugcuucucaagagccauggu

SEQ ID NO: 120679 - RNA, 24 nt, Artificial Sequence
  Synthetic
uucaugcuucucaagagccauggu

SEQ ID NO: 120680 - RNA, 18 nt, Artificial Sequence
  Synthetic
uugaaugguuugcauggu

SEQ ID NO: 120681 - RNA, 19 nt, Artificial Sequence
  Synthetic
cuugaaugguuugcauggu

SEQ ID NO: 120682 - RNA, 20 nt, Artificial Sequence
  Synthetic
acuugaaugguuugcauggu

SEQ ID NO: 120683 - RNA, 22 nt, Artificial Sequence
  Synthetic
ugacuugaaugguuugcauggu

SEQ ID NO: 120684 - RNA, 23 nt, Artificial Sequence
  Synthetic
augacuugaaugguuugcauggu

SEQ ID NO: 120685 - RNA, 24 nt, Artificial Sequence
  Synthetic
aaugacuugaaugguuugcauggu

SEQ ID NO: 120686 - RNA, 18 nt, Artificial Sequence
  Synthetic
cgguccuuaggggauggu

SEQ ID NO: 120687 - RNA, 19 nt, Artificial Sequence
  Synthetic
acgguccuuaggggauggu

SEQ ID NO: 120688 - RNA, 20 nt, Artificial Sequence
  Synthetic
aacgguccuuaggggauggu

SEQ ID NO: 120689 - RNA, 21 nt, Artificial Sequence
  Synthetic
caacgguccuuaggggauggu

SEQ ID NO: 120690 - RNA, 22 nt, Artificial Sequence
  Synthetic
ucaacgguccuuaggggauggu

SEQ ID NO: 120691 - RNA, 23 nt, Artificial Sequence
  Synthetic
cucaacgguccuuaggggauggu

SEQ ID NO: 120692 - RNA, 24 nt, Artificial Sequence
  Synthetic
ccucaacgguccuuaggggauggu

SEQ ID NO: 120693 - RNA, 21 nt, Artificial Sequence
  Synthetic
uagguuuguuugggggauggu

SEQ ID NO: 120694 - RNA, 22 nt, Artificial Sequence
  Synthetic
auagguuuguuugggggauggu

SEQ ID NO: 120695 - RNA, 23 nt, Artificial Sequence
  Synthetic
aauagguuuguuugggggauggu

SEQ ID NO: 120696 - RNA, 24 nt, Artificial Sequence
  Synthetic
caauagguuuguuugggggauggu

SEQ ID NO: 120697 - RNA, 18 nt, Artificial Sequence
  Synthetic
uucuuaaggaaugauggu

SEQ ID NO: 120698 - RNA, 19 nt, Artificial Sequence
  Synthetic
uuucuuaaggaaugauggu

SEQ ID NO: 120699 - RNA, 20 nt, Artificial Sequence
  Synthetic
uuuucuuaaggaaugauggu

SEQ ID NO: 120700 - RNA, 21 nt, Artificial Sequence
  Synthetic
cuuuucuuaaggaaugauggu

SEQ ID NO: 120701 - RNA, 22 nt, Artificial Sequence
  Synthetic
ucuuuucuuaaggaaugauggu

SEQ ID NO: 120702 - RNA, 23 nt, Artificial Sequence
  Synthetic
uucuuuucuuaaggaaugauggu

SEQ ID NO: 120703 - RNA, 24 nt, Artificial Sequence
  Synthetic
uuucuuuucuuaaggaaugauggu

SEQ ID NO: 120704 - RNA, 19 nt, Artificial Sequence
  Synthetic
uguucuagagcaugauggu

SEQ ID NO: 120705 - RNA, 20 nt, Artificial Sequence
  Synthetic
auguucuagagcaugauggu

SEQ ID NO: 120706 - RNA, 22 nt, Artificial Sequence
  Synthetic
ugauguucuagagcaugauggu

SEQ ID NO: 120707 - RNA, 23 nt, Artificial Sequence
  Synthetic
cugauguucuagagcaugauggu

SEQ ID NO: 120708 - RNA, 18 nt, Artificial Sequence
  Synthetic
ugaauaacuugugauggu

SEQ ID NO: 120709 - RNA, 19 nt, Artificial Sequence
  Synthetic
augaauaacuugugauggu

SEQ ID NO: 120710 - RNA, 20 nt, Artificial Sequence
  Synthetic
caugaauaacuugugauggu

SEQ ID NO: 120711 - RNA, 21 nt, Artificial Sequence
  Synthetic
acaugaauaacuugugauggu

SEQ ID NO: 120712 - RNA, 22 nt, Artificial Sequence
  Synthetic
uacaugaauaacuugugauggu

SEQ ID NO: 120713 - RNA, 23 nt, Artificial Sequence
  Synthetic
uuacaugaauaacuugugauggu

SEQ ID NO: 120714 - RNA, 18 nt, Artificial Sequence
  Synthetic
agaacacaagcauauggu

SEQ ID NO: 120715 - RNA, 19 nt, Artificial Sequence
  Synthetic
aagaacacaagcauauggu

SEQ ID NO: 120716 - RNA, 20 nt, Artificial Sequence
  Synthetic
uaagaacacaagcauauggu

SEQ ID NO: 120717 - RNA, 21 nt, Artificial Sequence
  Synthetic
auaagaacacaagcauauggu

SEQ ID NO: 120718 - RNA, 22 nt, Artificial Sequence
  Synthetic
aauaagaacacaagcauauggu

SEQ ID NO: 120719 - RNA, 23 nt, Artificial Sequence
  Synthetic
uaauaagaacacaagcauauggu

SEQ ID NO: 120720 - RNA, 24 nt, Artificial Sequence
  Synthetic
cuaauaagaacacaagcauauggu

SEQ ID NO: 120721 - RNA, 18 nt, Artificial Sequence
  Synthetic
acaagaaucaucuauggu

SEQ ID NO: 120722 - RNA, 19 nt, Artificial Sequence
  Synthetic
aacaagaaucaucuauggu

SEQ ID NO: 120723 - RNA, 21 nt, Artificial Sequence
  Synthetic
agaacaagaaucaucuauggu

SEQ ID NO: 120724 - RNA, 22 nt, Artificial Sequence
  Synthetic
aagaacaagaaucaucuauggu

SEQ ID NO: 120725 - RNA, 24 nt, Artificial Sequence
  Synthetic
ugaagaacaagaaucaucuauggu

SEQ ID NO: 120726 - RNA, 18 nt, Artificial Sequence
  Synthetic
ucuucccaaaaguauggu

SEQ ID NO: 120727 - RNA, 19 nt, Artificial Sequence
  Synthetic
aucuucccaaaaguauggu

SEQ ID NO: 120728 - RNA, 20 nt, Artificial Sequence
  Synthetic
uaucuucccaaaaguauggu

SEQ ID NO: 120729 - RNA, 21 nt, Artificial Sequence
  Synthetic
uuaucuucccaaaaguauggu

SEQ ID NO: 120730 - RNA, 23 nt, Artificial Sequence
  Synthetic
uguuaucuucccaaaaguauggu

SEQ ID NO: 120731 - RNA, 19 nt, Artificial Sequence
  Synthetic
uggaggcaaaagguauggu

SEQ ID NO: 120732 - RNA, 20 nt, Artificial Sequence
  Synthetic
cuggaggcaaaagguauggu

SEQ ID NO: 120733 - RNA, 21 nt, Artificial Sequence
  Synthetic
ucuggaggcaaaagguauggu

SEQ ID NO: 120734 - RNA, 22 nt, Artificial Sequence
  Synthetic
cucuggaggcaaaagguauggu

SEQ ID NO: 120735 - RNA, 23 nt, Artificial Sequence
  Synthetic
ccucuggaggcaaaagguauggu

SEQ ID NO: 120736 - RNA, 18 nt, Artificial Sequence
  Synthetic
aucuaauauuuuuauggu

SEQ ID NO: 120737 - RNA, 22 nt, Artificial Sequence
  Synthetic
ugggaucuaauauuuuuauggu

SEQ ID NO: 120738 - RNA, 23 nt, Artificial Sequence
  Synthetic
augggaucuaauauuuuuauggu

SEQ ID NO: 120739 - RNA, 24 nt, Artificial Sequence
  Synthetic
aaugggaucuaauauuuuuauggu

SEQ ID NO: 120740 - RNA, 18 nt, Artificial Sequence
  Synthetic
cgaaaggguuuuacuggu

SEQ ID NO: 120741 - RNA, 19 nt, Artificial Sequence
  Synthetic
ccgaaaggguuuuacuggu

SEQ ID NO: 120742 - RNA, 20 nt, Artificial Sequence
  Synthetic
accgaaaggguuuuacuggu

SEQ ID NO: 120743 - RNA, 21 nt, Artificial Sequence
  Synthetic
uaccgaaaggguuuuacuggu

SEQ ID NO: 120744 - RNA, 22 nt, Artificial Sequence
  Synthetic
uuaccgaaaggguuuuacuggu

SEQ ID NO: 120745 - RNA, 24 nt, Artificial Sequence
  Synthetic
aguuaccgaaaggguuuuacuggu

SEQ ID NO: 120746 - RNA, 19 nt, Artificial Sequence
  Synthetic
ugagaaauacagaccuggu

SEQ ID NO: 120747 - RNA, 20 nt, Artificial Sequence
  Synthetic
uugagaaauacagaccuggu

SEQ ID NO: 120748 - RNA, 21 nt, Artificial Sequence
  Synthetic
auugagaaauacagaccuggu

SEQ ID NO: 120749 - RNA, 22 nt, Artificial Sequence
  Synthetic
aauugagaaauacagaccuggu

SEQ ID NO: 120750 - RNA, 23 nt, Artificial Sequence
  Synthetic
uaauugagaaauacagaccuggu

SEQ ID NO: 120751 - RNA, 24 nt, Artificial Sequence
  Synthetic
cuaauugagaaauacagaccuggu

SEQ ID NO: 120752 - RNA, 18 nt, Artificial Sequence
  Synthetic
accucuuaggucccuggu

SEQ ID NO: 120753 - RNA, 19 nt, Artificial Sequence
  Synthetic
caccucuuaggucccuggu

SEQ ID NO: 120754 - RNA, 20 nt, Artificial Sequence
  Synthetic
ucaccucuuaggucccuggu

SEQ ID NO: 120755 - RNA, 21 nt, Artificial Sequence
  Synthetic
uucaccucuuaggucccuggu

SEQ ID NO: 120756 - RNA, 22 nt, Artificial Sequence
  Synthetic
auucaccucuuaggucccuggu

SEQ ID NO: 120757 - RNA, 23 nt, Artificial Sequence
  Synthetic
cauucaccucuuaggucccuggu

SEQ ID NO: 120758 - RNA, 24 nt, Artificial Sequence
  Synthetic
ucauucaccucuuaggucccuggu

SEQ ID NO: 120759 - RNA, 18 nt, Artificial Sequence
  Synthetic
uaauaaaugcugccuggu

SEQ ID NO: 120760 - RNA, 20 nt, Artificial Sequence
  Synthetic
cguaauaaaugcugccuggu

SEQ ID NO: 120761 - RNA, 21 nt, Artificial Sequence
  Synthetic
acguaauaaaugcugccuggu

SEQ ID NO: 120762 - RNA, 22 nt, Artificial Sequence
  Synthetic
cacguaauaaaugcugccuggu

SEQ ID NO: 120763 - RNA, 23 nt, Artificial Sequence
  Synthetic
acacguaauaaaugcugccuggu

SEQ ID NO: 120764 - RNA, 24 nt, Artificial Sequence
  Synthetic
aacacguaauaaaugcugccuggu

SEQ ID NO: 120765 - RNA, 21 nt, Artificial Sequence
  Synthetic
uuuucuugucuuucagcuggu

SEQ ID NO: 120766 - RNA, 22 nt, Artificial Sequence
  Synthetic
uuuuucuugucuuucagcuggu

SEQ ID NO: 120767 - RNA, 24 nt, Artificial Sequence
  Synthetic
aguuuuucuugucuuucagcuggu

SEQ ID NO: 120768 - RNA, 18 nt, Artificial Sequence
  Synthetic
ccucaugcccuagcuggu

SEQ ID NO: 120769 - RNA, 19 nt, Artificial Sequence
  Synthetic
accucaugcccuagcuggu

SEQ ID NO: 120770 - RNA, 21 nt, Artificial Sequence
  Synthetic
agaccucaugcccuagcuggu

SEQ ID NO: 120771 - RNA, 22 nt, Artificial Sequence
  Synthetic
aagaccucaugcccuagcuggu

SEQ ID NO: 120772 - RNA, 23 nt, Artificial Sequence
  Synthetic
caagaccucaugcccuagcuggu

SEQ ID NO: 120773 - RNA, 24 nt, Artificial Sequence
  Synthetic
ccaagaccucaugcccuagcuggu

SEQ ID NO: 120774 - RNA, 18 nt, Artificial Sequence
  Synthetic
agggcugaacuugcuggu

SEQ ID NO: 120775 - RNA, 20 nt, Artificial Sequence
  Synthetic
agagggcugaacuugcuggu

SEQ ID NO: 120776 - RNA, 21 nt, Artificial Sequence
  Synthetic
aagagggcugaacuugcuggu

SEQ ID NO: 120777 - RNA, 23 nt, Artificial Sequence
  Synthetic
ugaagagggcugaacuugcuggu

SEQ ID NO: 120778 - RNA, 24 nt, Artificial Sequence
  Synthetic
uugaagagggcugaacuugcuggu

SEQ ID NO: 120779 - RNA, 18 nt, Artificial Sequence
  Synthetic
ucaucauaccacucuggu

SEQ ID NO: 120780 - RNA, 19 nt, Artificial Sequence
  Synthetic
cucaucauaccacucuggu

SEQ ID NO: 120781 - RNA, 20 nt, Artificial Sequence
  Synthetic
ccucaucauaccacucuggu

SEQ ID NO: 120782 - RNA, 21 nt, Artificial Sequence
  Synthetic
uccucaucauaccacucuggu

SEQ ID NO: 120783 - RNA, 22 nt, Artificial Sequence
  Synthetic
uuccucaucauaccacucuggu

SEQ ID NO: 120784 - RNA, 19 nt, Artificial Sequence
  Synthetic
ugguuacagacugucuggu

SEQ ID NO: 120785 - RNA, 20 nt, Artificial Sequence
  Synthetic
augguuacagacugucuggu

SEQ ID NO: 120786 - RNA, 21 nt, Artificial Sequence
  Synthetic
aaugguuacagacugucuggu

SEQ ID NO: 120787 - RNA, 22 nt, Artificial Sequence
  Synthetic
uaaugguuacagacugucuggu

SEQ ID NO: 120788 - RNA, 23 nt, Artificial Sequence
  Synthetic
uuaaugguuacagacugucuggu

SEQ ID NO: 120789 - RNA, 24 nt, Artificial Sequence
  Synthetic
cuuaaugguuacagacugucuggu

SEQ ID NO: 120790 - RNA, 18 nt, Artificial Sequence
  Synthetic
uuguauggccugucuggu

SEQ ID NO: 120791 - RNA, 19 nt, Artificial Sequence
  Synthetic
auuguauggccugucuggu

SEQ ID NO: 120792 - RNA, 22 nt, Artificial Sequence
  Synthetic
uggauuguauggccugucuggu

SEQ ID NO: 120793 - RNA, 23 nt, Artificial Sequence
  Synthetic
auggauuguauggccugucuggu

SEQ ID NO: 120794 - RNA, 24 nt, Artificial Sequence
  Synthetic
uauggauuguauggccugucuggu

SEQ ID NO: 120795 - RNA, 19 nt, Artificial Sequence
  Synthetic
agauuuuguucuuucuggu

SEQ ID NO: 120796 - RNA, 20 nt, Artificial Sequence
  Synthetic
uagauuuuguucuuucuggu

SEQ ID NO: 120797 - RNA, 21 nt, Artificial Sequence
  Synthetic
auagauuuuguucuuucuggu

SEQ ID NO: 120798 - RNA, 22 nt, Artificial Sequence
  Synthetic
cauagauuuuguucuuucuggu

SEQ ID NO: 120799 - RNA, 23 nt, Artificial Sequence
  Synthetic
ccauagauuuuguucuuucuggu

SEQ ID NO: 120800 - RNA, 24 nt, Artificial Sequence
  Synthetic
uccauagauuuuguucuuucuggu

SEQ ID NO: 120801 - RNA, 18 nt, Artificial Sequence
  Synthetic
cauaaauaaggaaguggu

SEQ ID NO: 120802 - RNA, 19 nt, Artificial Sequence
  Synthetic
ccauaaauaaggaaguggu

SEQ ID NO: 120803 - RNA, 21 nt, Artificial Sequence
  Synthetic
agccauaaauaaggaaguggu

SEQ ID NO: 120804 - RNA, 22 nt, Artificial Sequence
  Synthetic
cagccauaaauaaggaaguggu

SEQ ID NO: 120805 - RNA, 23 nt, Artificial Sequence
  Synthetic
ccagccauaaauaaggaaguggu

SEQ ID NO: 120806 - RNA, 24 nt, Artificial Sequence
  Synthetic
accagccauaaauaaggaaguggu

SEQ ID NO: 120807 - RNA, 18 nt, Artificial Sequence
  Synthetic
ugguuucugagcaguggu

SEQ ID NO: 120808 - RNA, 19 nt, Artificial Sequence
  Synthetic
augguuucugagcaguggu

SEQ ID NO: 120809 - RNA, 20 nt, Artificial Sequence
  Synthetic
aaugguuucugagcaguggu

SEQ ID NO: 120810 - RNA, 21 nt, Artificial Sequence
  Synthetic
uaaugguuucugagcaguggu

SEQ ID NO: 120811 - RNA, 22 nt, Artificial Sequence
  Synthetic
auaaugguuucugagcaguggu

SEQ ID NO: 120812 - RNA, 23 nt, Artificial Sequence
  Synthetic
aauaaugguuucugagcaguggu

SEQ ID NO: 120813 - RNA, 24 nt, Artificial Sequence
  Synthetic
caauaaugguuucugagcaguggu

SEQ ID NO: 120814 - RNA, 18 nt, Artificial Sequence
  Synthetic
ccccgaaaugguaguggu

SEQ ID NO: 120815 - RNA, 20 nt, Artificial Sequence
  Synthetic
agccccgaaaugguaguggu

SEQ ID NO: 120816 - RNA, 21 nt, Artificial Sequence
  Synthetic
uagccccgaaaugguaguggu

SEQ ID NO: 120817 - RNA, 22 nt, Artificial Sequence
  Synthetic
auagccccgaaaugguaguggu

SEQ ID NO: 120818 - RNA, 23 nt, Artificial Sequence
  Synthetic
uauagccccgaaaugguaguggu

SEQ ID NO: 120819 - RNA, 18 nt, Artificial Sequence
  Synthetic
aaugacaggaaacguggu

SEQ ID NO: 120820 - RNA, 19 nt, Artificial Sequence
  Synthetic
uaaugacaggaaacguggu

SEQ ID NO: 120821 - RNA, 21 nt, Artificial Sequence
  Synthetic
uguaaugacaggaaacguggu

SEQ ID NO: 120822 - RNA, 22 nt, Artificial Sequence
  Synthetic
cuguaaugacaggaaacguggu

SEQ ID NO: 120823 - RNA, 24 nt, Artificial Sequence
  Synthetic
ugcuguaaugacaggaaacguggu

SEQ ID NO: 120824 - RNA, 19 nt, Artificial Sequence
  Synthetic
aggaagauuuauagguggu

SEQ ID NO: 120825 - RNA, 20 nt, Artificial Sequence
  Synthetic
caggaagauuuauagguggu

SEQ ID NO: 120826 - RNA, 21 nt, Artificial Sequence
  Synthetic
ccaggaagauuuauagguggu

SEQ ID NO: 120827 - RNA, 22 nt, Artificial Sequence
  Synthetic
accaggaagauuuauagguggu

SEQ ID NO: 120828 - RNA, 23 nt, Artificial Sequence
  Synthetic
aaccaggaagauuuauagguggu

SEQ ID NO: 120829 - RNA, 18 nt, Artificial Sequence
  Synthetic
ccaaugauuggguguggu

SEQ ID NO: 120830 - RNA, 19 nt, Artificial Sequence
  Synthetic
cccaaugauuggguguggu

SEQ ID NO: 120831 - RNA, 20 nt, Artificial Sequence
  Synthetic
acccaaugauuggguguggu

SEQ ID NO: 120832 - RNA, 21 nt, Artificial Sequence
  Synthetic
cacccaaugauuggguguggu

SEQ ID NO: 120833 - RNA, 22 nt, Artificial Sequence
  Synthetic
ucacccaaugauuggguguggu

SEQ ID NO: 120834 - RNA, 23 nt, Artificial Sequence
  Synthetic
cucacccaaugauuggguguggu

SEQ ID NO: 120835 - RNA, 24 nt, Artificial Sequence
  Synthetic
ccucacccaaugauuggguguggu

SEQ ID NO: 120836 - RNA, 18 nt, Artificial Sequence
  Synthetic
aaccucauagauuguggu

SEQ ID NO: 120837 - RNA, 19 nt, Artificial Sequence
  Synthetic
uaaccucauagauuguggu

SEQ ID NO: 120838 - RNA, 21 nt, Artificial Sequence
  Synthetic
aguaaccucauagauuguggu

SEQ ID NO: 120839 - RNA, 22 nt, Artificial Sequence
  Synthetic
uaguaaccucauagauuguggu

SEQ ID NO: 120840 - RNA, 23 nt, Artificial Sequence
  Synthetic
auaguaaccucauagauuguggu

SEQ ID NO: 120841 - RNA, 24 nt, Artificial Sequence
  Synthetic
aauaguaaccucauagauuguggu

SEQ ID NO: 120842 - RNA, 19 nt, Artificial Sequence
  Synthetic
aguggaaguuuaaauuggu

SEQ ID NO: 120843 - RNA, 21 nt, Artificial Sequence
  Synthetic
ugaguggaaguuuaaauuggu

SEQ ID NO: 120844 - RNA, 22 nt, Artificial Sequence
  Synthetic
augaguggaaguuuaaauuggu

SEQ ID NO: 120845 - RNA, 23 nt, Artificial Sequence
  Synthetic
uaugaguggaaguuuaaauuggu

SEQ ID NO: 120846 - RNA, 24 nt, Artificial Sequence
  Synthetic
auaugaguggaaguuuaaauuggu

SEQ ID NO: 120847 - RNA, 18 nt, Artificial Sequence
  Synthetic
aaaguguaaagaauuggu

SEQ ID NO: 120848 - RNA, 19 nt, Artificial Sequence
  Synthetic
uaaaguguaaagaauuggu

SEQ ID NO: 120849 - RNA, 21 nt, Artificial Sequence
  Synthetic
uguaaaguguaaagaauuggu

SEQ ID NO: 120850 - RNA, 22 nt, Artificial Sequence
  Synthetic
auguaaaguguaaagaauuggu

SEQ ID NO: 120851 - RNA, 23 nt, Artificial Sequence
  Synthetic
uauguaaaguguaaagaauuggu

SEQ ID NO: 120852 - RNA, 24 nt, Artificial Sequence
  Synthetic
uuauguaaaguguaaagaauuggu

SEQ ID NO: 120853 - RNA, 18 nt, Artificial Sequence
  Synthetic
uauauacuauucauuggu

SEQ ID NO: 120854 - RNA, 19 nt, Artificial Sequence
  Synthetic
auauauacuauucauuggu

SEQ ID NO: 120855 - RNA, 20 nt, Artificial Sequence
  Synthetic
uauauauacuauucauuggu

SEQ ID NO: 120856 - RNA, 21 nt, Artificial Sequence
  Synthetic
cuauauauacuauucauuggu

SEQ ID NO: 120857 - RNA, 22 nt, Artificial Sequence
  Synthetic
ucuauauauacuauucauuggu

SEQ ID NO: 120858 - RNA, 23 nt, Artificial Sequence
  Synthetic
aucuauauauacuauucauuggu

SEQ ID NO: 120859 - RNA, 24 nt, Artificial Sequence
  Synthetic
uaucuauauauacuauucauuggu

SEQ ID NO: 120860 - RNA, 18 nt, Artificial Sequence
  Synthetic
aacaggcaacggauuggu

SEQ ID NO: 120861 - RNA, 19 nt, Artificial Sequence
  Synthetic
uaacaggcaacggauuggu

SEQ ID NO: 120862 - RNA, 20 nt, Artificial Sequence
  Synthetic
cuaacaggcaacggauuggu

SEQ ID NO: 120863 - RNA, 21 nt, Artificial Sequence
  Synthetic
ccuaacaggcaacggauuggu

SEQ ID NO: 120864 - RNA, 22 nt, Artificial Sequence
  Synthetic
cccuaacaggcaacggauuggu

SEQ ID NO: 120865 - RNA, 23 nt, Artificial Sequence
  Synthetic
ucccuaacaggcaacggauuggu

SEQ ID NO: 120866 - RNA, 19 nt, Artificial Sequence
  Synthetic
agaucaagcacguauuggu

SEQ ID NO: 120867 - RNA, 20 nt, Artificial Sequence
  Synthetic
aagaucaagcacguauuggu

SEQ ID NO: 120868 - RNA, 21 nt, Artificial Sequence
  Synthetic
uaagaucaagcacguauuggu

SEQ ID NO: 120869 - RNA, 22 nt, Artificial Sequence
  Synthetic
auaagaucaagcacguauuggu

SEQ ID NO: 120870 - RNA, 23 nt, Artificial Sequence
  Synthetic
cauaagaucaagcacguauuggu

SEQ ID NO: 120871 - RNA, 24 nt, Artificial Sequence
  Synthetic
ucauaagaucaagcacguauuggu

SEQ ID NO: 120872 - RNA, 18 nt, Artificial Sequence
  Synthetic
aguacauaggaccuuggu

SEQ ID NO: 120873 - RNA, 19 nt, Artificial Sequence
  Synthetic
aaguacauaggaccuuggu

SEQ ID NO: 120874 - RNA, 20 nt, Artificial Sequence
  Synthetic
aaaguacauaggaccuuggu

SEQ ID NO: 120875 - RNA, 23 nt, Artificial Sequence
  Synthetic
uggaaaguacauaggaccuuggu

SEQ ID NO: 120876 - RNA, 18 nt, Artificial Sequence
  Synthetic
caguuucuucugcuuggu

SEQ ID NO: 120877 - RNA, 20 nt, Artificial Sequence
  Synthetic
agcaguuucuucugcuuggu

SEQ ID NO: 120878 - RNA, 21 nt, Artificial Sequence
  Synthetic
aagcaguuucuucugcuuggu

SEQ ID NO: 120879 - RNA, 22 nt, Artificial Sequence
  Synthetic
uaagcaguuucuucugcuuggu

SEQ ID NO: 120880 - RNA, 24 nt, Artificial Sequence
  Synthetic
uguaagcaguuucuucugcuuggu

SEQ ID NO: 120881 - RNA, 18 nt, Artificial Sequence
  Synthetic
uaguucugguuucuuggu

SEQ ID NO: 120882 - RNA, 19 nt, Artificial Sequence
  Synthetic
auaguucugguuucuuggu

SEQ ID NO: 120883 - RNA, 20 nt, Artificial Sequence
  Synthetic
aauaguucugguuucuuggu

SEQ ID NO: 120884 - RNA, 21 nt, Artificial Sequence
  Synthetic
aaauaguucugguuucuuggu

SEQ ID NO: 120885 - RNA, 22 nt, Artificial Sequence
  Synthetic
uaaauaguucugguuucuuggu

SEQ ID NO: 120886 - RNA, 23 nt, Artificial Sequence
  Synthetic
cuaaauaguucugguuucuuggu

SEQ ID NO: 120887 - RNA, 24 nt, Artificial Sequence
  Synthetic
ccuaaauaguucugguuucuuggu

SEQ ID NO: 120888 - RNA, 19 nt, Artificial Sequence
  Synthetic
ugguugaaaagaaguuggu

SEQ ID NO: 120889 - RNA, 21 nt, Artificial Sequence
  Synthetic
agugguugaaaagaaguuggu

SEQ ID NO: 120890 - RNA, 22 nt, Artificial Sequence
  Synthetic
cagugguugaaaagaaguuggu

SEQ ID NO: 120891 - RNA, 23 nt, Artificial Sequence
  Synthetic
acagugguugaaaagaaguuggu

SEQ ID NO: 120892 - RNA, 18 nt, Artificial Sequence
  Synthetic
uauuguuuagugguuggu

SEQ ID NO: 120893 - RNA, 19 nt, Artificial Sequence
  Synthetic
uuauuguuuagugguuggu

SEQ ID NO: 120894 - RNA, 20 nt, Artificial Sequence
  Synthetic
auuauuguuuagugguuggu

SEQ ID NO: 120895 - RNA, 21 nt, Artificial Sequence
  Synthetic
aauuauuguuuagugguuggu

SEQ ID NO: 120896 - RNA, 22 nt, Artificial Sequence
  Synthetic
caauuauuguuuagugguuggu

SEQ ID NO: 120897 - RNA, 23 nt, Artificial Sequence
  Synthetic
acaauuauuguuuagugguuggu

SEQ ID NO: 120898 - RNA, 18 nt, Artificial Sequence
  Synthetic
uugaauaaauaauuuggu

SEQ ID NO: 120899 - RNA, 19 nt, Artificial Sequence
  Synthetic
auugaauaaauaauuuggu

SEQ ID NO: 120900 - RNA, 20 nt, Artificial Sequence
  Synthetic
cauugaauaaauaauuuggu

SEQ ID NO: 120901 - RNA, 21 nt, Artificial Sequence
  Synthetic
acauugaauaaauaauuuggu

SEQ ID NO: 120902 - RNA, 22 nt, Artificial Sequence
  Synthetic
cacauugaauaaauaauuuggu

SEQ ID NO: 120903 - RNA, 23 nt, Artificial Sequence
  Synthetic
ucacauugaauaaauaauuuggu

SEQ ID NO: 120904 - RNA, 24 nt, Artificial Sequence
  Synthetic
uucacauugaauaaauaauuuggu

SEQ ID NO: 120905 - RNA, 20 nt, Artificial Sequence
  Synthetic
ugguuaacauuaacuuuggu

SEQ ID NO: 120906 - RNA, 22 nt, Artificial Sequence
  Synthetic
agugguuaacauuaacuuuggu

SEQ ID NO: 120907 - RNA, 23 nt, Artificial Sequence
  Synthetic
aagugguuaacauuaacuuuggu

SEQ ID NO: 120908 - RNA, 24 nt, Artificial Sequence
  Synthetic
caagugguuaacauuaacuuuggu

SEQ ID NO: 120909 - RNA, 19 nt, Artificial Sequence
  Synthetic
ugccagccacuucuuuggu

SEQ ID NO: 120910 - RNA, 20 nt, Artificial Sequence
  Synthetic
uugccagccacuucuuuggu

SEQ ID NO: 120911 - RNA, 21 nt, Artificial Sequence
  Synthetic
cuugccagccacuucuuuggu

SEQ ID NO: 120912 - RNA, 22 nt, Artificial Sequence
  Synthetic
ucuugccagccacuucuuuggu

SEQ ID NO: 120913 - RNA, 23 nt, Artificial Sequence
  Synthetic
aucuugccagccacuucuuuggu

SEQ ID NO: 120914 - RNA, 24 nt, Artificial Sequence
  Synthetic
caucuugccagccacuucuuuggu

SEQ ID NO: 120915 - RNA, 19 nt, Artificial Sequence
  Synthetic
ugcacgucuaagguuuggu

SEQ ID NO: 120916 - RNA, 20 nt, Artificial Sequence
  Synthetic
cugcacgucuaagguuuggu

SEQ ID NO: 120917 - RNA, 21 nt, Artificial Sequence
  Synthetic
acugcacgucuaagguuuggu

SEQ ID NO: 120918 - RNA, 22 nt, Artificial Sequence
  Synthetic
uacugcacgucuaagguuuggu

SEQ ID NO: 120919 - RNA, 23 nt, Artificial Sequence
  Synthetic
uuacugcacgucuaagguuuggu

SEQ ID NO: 120920 - RNA, 24 nt, Artificial Sequence
  Synthetic
auuacugcacgucuaagguuuggu

SEQ ID NO: 120921 - RNA, 18 nt, Artificial Sequence
  Synthetic
uauguagcauuuuuuggu

SEQ ID NO: 120922 - RNA, 19 nt, Artificial Sequence
  Synthetic
uuauguagcauuuuuuggu

SEQ ID NO: 120923 - RNA, 20 nt, Artificial Sequence
  Synthetic
cuuauguagcauuuuuuggu

SEQ ID NO: 120924 - RNA, 21 nt, Artificial Sequence
  Synthetic
acuuauguagcauuuuuuggu

SEQ ID NO: 120925 - RNA, 22 nt, Artificial Sequence
  Synthetic
cacuuauguagcauuuuuuggu

SEQ ID NO: 120926 - RNA, 23 nt, Artificial Sequence
  Synthetic
ccacuuauguagcauuuuuuggu

SEQ ID NO: 120927 - RNA, 24 nt, Artificial Sequence
  Synthetic
accacuuauguagcauuuuuuggu

SEQ ID NO: 120928 - RNA, 18 nt, Artificial Sequence
  Synthetic
agucauagaaaaaaaugu

SEQ ID NO: 120929 - RNA, 21 nt, Artificial Sequence
  Synthetic
aggagucauagaaaaaaaugu

SEQ ID NO: 120930 - RNA, 24 nt, Artificial Sequence
  Synthetic
uggaggagucauagaaaaaaaugu

SEQ ID NO: 120931 - RNA, 18 nt, Artificial Sequence
  Synthetic
aauagugagacaaaaugu

SEQ ID NO: 120932 - RNA, 19 nt, Artificial Sequence
  Synthetic
aaauagugagacaaaaugu

SEQ ID NO: 120933 - RNA, 20 nt, Artificial Sequence
  Synthetic
aaaauagugagacaaaaugu

SEQ ID NO: 120934 - RNA, 21 nt, Artificial Sequence
  Synthetic
aaaaauagugagacaaaaugu

SEQ ID NO: 120935 - RNA, 23 nt, Artificial Sequence
  Synthetic
agaaaaauagugagacaaaaugu

SEQ ID NO: 120936 - RNA, 21 nt, Artificial Sequence
  Synthetic
auaaacaaauguacaaaaugu

SEQ ID NO: 120937 - RNA, 24 nt, Artificial Sequence
  Synthetic
aggauaaacaaauguacaaaaugu

SEQ ID NO: 120938 - RNA, 18 nt, Artificial Sequence
  Synthetic
uuagcugacugaaaaugu

SEQ ID NO: 120939 - RNA, 19 nt, Artificial Sequence
  Synthetic
auuagcugacugaaaaugu

SEQ ID NO: 120940 - RNA, 20 nt, Artificial Sequence
  Synthetic
cauuagcugacugaaaaugu

SEQ ID NO: 120941 - RNA, 21 nt, Artificial Sequence
  Synthetic
ccauuagcugacugaaaaugu

SEQ ID NO: 120942 - RNA, 22 nt, Artificial Sequence
  Synthetic
cccauuagcugacugaaaaugu

SEQ ID NO: 120943 - RNA, 23 nt, Artificial Sequence
  Synthetic
acccauuagcugacugaaaaugu

SEQ ID NO: 120944 - RNA, 24 nt, Artificial Sequence
  Synthetic
cacccauuagcugacugaaaaugu

SEQ ID NO: 120945 - RNA, 18 nt, Artificial Sequence
  Synthetic
uuaggacuuugaaaaugu

SEQ ID NO: 120946 - RNA, 19 nt, Artificial Sequence
  Synthetic
uuuaggacuuugaaaaugu

SEQ ID NO: 120947 - RNA, 20 nt, Artificial Sequence
  Synthetic
uuuuaggacuuugaaaaugu

SEQ ID NO: 120948 - RNA, 21 nt, Artificial Sequence
  Synthetic
cuuuuaggacuuugaaaaugu

SEQ ID NO: 120949 - RNA, 22 nt, Artificial Sequence
  Synthetic
ucuuuuaggacuuugaaaaugu

SEQ ID NO: 120950 - RNA, 18 nt, Artificial Sequence
  Synthetic
uugccuacccuaaaaugu

SEQ ID NO: 120951 - RNA, 19 nt, Artificial Sequence
  Synthetic
auugccuacccuaaaaugu

SEQ ID NO: 120952 - RNA, 20 nt, Artificial Sequence
  Synthetic
aauugccuacccuaaaaugu

SEQ ID NO: 120953 - RNA, 23 nt, Artificial Sequence
  Synthetic
uggaauugccuacccuaaaaugu

SEQ ID NO: 120954 - RNA, 24 nt, Artificial Sequence
  Synthetic
uuggaauugccuacccuaaaaugu

SEQ ID NO: 120955 - RNA, 18 nt, Artificial Sequence
  Synthetic
aaucagcuaaguaaaugu

SEQ ID NO: 120956 - RNA, 19 nt, Artificial Sequence
  Synthetic
uaaucagcuaaguaaaugu

SEQ ID NO: 120957 - RNA, 20 nt, Artificial Sequence
  Synthetic
uuaaucagcuaaguaaaugu

SEQ ID NO: 120958 - RNA, 21 nt, Artificial Sequence
  Synthetic
cuuaaucagcuaaguaaaugu

SEQ ID NO: 120959 - RNA, 23 nt, Artificial Sequence
  Synthetic
agcuuaaucagcuaaguaaaugu

SEQ ID NO: 120960 - RNA, 24 nt, Artificial Sequence
  Synthetic
aagcuuaaucagcuaaguaaaugu

SEQ ID NO: 120961 - RNA, 18 nt, Artificial Sequence
  Synthetic
acagauuacuaucaaugu

SEQ ID NO: 120962 - RNA, 20 nt, Artificial Sequence
  Synthetic
ugacagauuacuaucaaugu

SEQ ID NO: 120963 - RNA, 21 nt, Artificial Sequence
  Synthetic
augacagauuacuaucaaugu

SEQ ID NO: 120964 - RNA, 22 nt, Artificial Sequence
  Synthetic
aaugacagauuacuaucaaugu

SEQ ID NO: 120965 - RNA, 23 nt, Artificial Sequence
  Synthetic
aaaugacagauuacuaucaaugu

SEQ ID NO: 120966 - RNA, 24 nt, Artificial Sequence
  Synthetic
uaaaugacagauuacuaucaaugu

SEQ ID NO: 120967 - RNA, 18 nt, Artificial Sequence
  Synthetic
cacuauugauuucaaugu

SEQ ID NO: 120968 - RNA, 19 nt, Artificial Sequence
  Synthetic
acacuauugauuucaaugu

SEQ ID NO: 120969 - RNA, 20 nt, Artificial Sequence
  Synthetic
uacacuauugauuucaaugu

SEQ ID NO: 120970 - RNA, 23 nt, Artificial Sequence
  Synthetic
agguacacuauugauuucaaugu

SEQ ID NO: 120971 - RNA, 24 nt, Artificial Sequence
  Synthetic
aagguacacuauugauuucaaugu

SEQ ID NO: 120972 - RNA, 18 nt, Artificial Sequence
  Synthetic
uggaaagugacagaaugu

SEQ ID NO: 120973 - RNA, 19 nt, Artificial Sequence
  Synthetic
uuggaaagugacagaaugu

SEQ ID NO: 120974 - RNA, 20 nt, Artificial Sequence
  Synthetic
auuggaaagugacagaaugu

SEQ ID NO: 120975 - RNA, 21 nt, Artificial Sequence
  Synthetic
uauuggaaagugacagaaugu

SEQ ID NO: 120976 - RNA, 22 nt, Artificial Sequence
  Synthetic
uuauuggaaagugacagaaugu

SEQ ID NO: 120977 - RNA, 23 nt, Artificial Sequence
  Synthetic
auuauuggaaagugacagaaugu

SEQ ID NO: 120978 - RNA, 24 nt, Artificial Sequence
  Synthetic
aauuauuggaaagugacagaaugu

SEQ ID NO: 120979 - RNA, 19 nt, Artificial Sequence
  Synthetic
ugcauuuggaaaggaaugu

SEQ ID NO: 120980 - RNA, 20 nt, Artificial Sequence
  Synthetic
augcauuuggaaaggaaugu

SEQ ID NO: 120981 - RNA, 21 nt, Artificial Sequence
  Synthetic
aaugcauuuggaaaggaaugu

SEQ ID NO: 120982 - RNA, 23 nt, Artificial Sequence
  Synthetic
ugaaugcauuuggaaaggaaugu

SEQ ID NO: 120983 - RNA, 24 nt, Artificial Sequence
  Synthetic
augaaugcauuuggaaaggaaugu

SEQ ID NO: 120984 - RNA, 21 nt, Artificial Sequence
  Synthetic
uaaucaacauuugaugaaugu

SEQ ID NO: 120985 - RNA, 22 nt, Artificial Sequence
  Synthetic
auaaucaacauuugaugaaugu

SEQ ID NO: 120986 - RNA, 23 nt, Artificial Sequence
  Synthetic
cauaaucaacauuugaugaaugu

SEQ ID NO: 120987 - RNA, 24 nt, Artificial Sequence
  Synthetic
acauaaucaacauuugaugaaugu

SEQ ID NO: 120988 - RNA, 19 nt, Artificial Sequence
  Synthetic
aggccaggucauugaaugu

SEQ ID NO: 120989 - RNA, 21 nt, Artificial Sequence
  Synthetic
agaggccaggucauugaaugu

SEQ ID NO: 120990 - RNA, 22 nt, Artificial Sequence
  Synthetic
aagaggccaggucauugaaugu

SEQ ID NO: 120991 - RNA, 23 nt, Artificial Sequence
  Synthetic
uaagaggccaggucauugaaugu

SEQ ID NO: 120992 - RNA, 24 nt, Artificial Sequence
  Synthetic
cuaagaggccaggucauugaaugu

SEQ ID NO: 120993 - RNA, 21 nt, Artificial Sequence
  Synthetic
cagauaugagaacuauaaugu

SEQ ID NO: 120994 - RNA, 23 nt, Artificial Sequence
  Synthetic
cgcagauaugagaacuauaaugu

SEQ ID NO: 120995 - RNA, 24 nt, Artificial Sequence
  Synthetic
acgcagauaugagaacuauaaugu

SEQ ID NO: 120996 - RNA, 19 nt, Artificial Sequence
  Synthetic
uggcauacauuucuaaugu

SEQ ID NO: 120997 - RNA, 20 nt, Artificial Sequence
  Synthetic
cuggcauacauuucuaaugu

SEQ ID NO: 120998 - RNA, 21 nt, Artificial Sequence
  Synthetic
ccuggcauacauuucuaaugu

SEQ ID NO: 120999 - RNA, 22 nt, Artificial Sequence
  Synthetic
cccuggcauacauuucuaaugu

SEQ ID NO: 121000 - RNA, 23 nt, Artificial Sequence
  Synthetic
ucccuggcauacauuucuaaugu

SEQ ID NO: 121001 - RNA, 24 nt, Artificial Sequence
  Synthetic
uucccuggcauacauuucuaaugu

SEQ ID NO: 121002 - RNA, 21 nt, Artificial Sequence
  Synthetic
uccuugaaaaguagguaaugu

SEQ ID NO: 121003 - RNA, 22 nt, Artificial Sequence
  Synthetic
uuccuugaaaaguagguaaugu

SEQ ID NO: 121004 - RNA, 23 nt, Artificial Sequence
  Synthetic
uuuccuugaaaaguagguaaugu

SEQ ID NO: 121005 - RNA, 24 nt, Artificial Sequence
  Synthetic
cuuuccuugaaaaguagguaaugu

SEQ ID NO: 121006 - RNA, 18 nt, Artificial Sequence
  Synthetic
caauccaccucuuaaugu

SEQ ID NO: 121007 - RNA, 19 nt, Artificial Sequence
  Synthetic
ucaauccaccucuuaaugu

SEQ ID NO: 121008 - RNA, 21 nt, Artificial Sequence
  Synthetic
ugucaauccaccucuuaaugu

SEQ ID NO: 121009 - RNA, 22 nt, Artificial Sequence
  Synthetic
uugucaauccaccucuuaaugu

SEQ ID NO: 121010 - RNA, 23 nt, Artificial Sequence
  Synthetic
uuugucaauccaccucuuaaugu

SEQ ID NO: 121011 - RNA, 24 nt, Artificial Sequence
  Synthetic
cuuugucaauccaccucuuaaugu

SEQ ID NO: 121012 - RNA, 19 nt, Artificial Sequence
  Synthetic
agguaaaugcucaacaugu

SEQ ID NO: 121013 - RNA, 20 nt, Artificial Sequence
  Synthetic
cagguaaaugcucaacaugu

SEQ ID NO: 121014 - RNA, 21 nt, Artificial Sequence
  Synthetic
ccagguaaaugcucaacaugu

SEQ ID NO: 121015 - RNA, 23 nt, Artificial Sequence
  Synthetic
agccagguaaaugcucaacaugu

SEQ ID NO: 121016 - RNA, 24 nt, Artificial Sequence
  Synthetic
cagccagguaaaugcucaacaugu

SEQ ID NO: 121017 - RNA, 19 nt, Artificial Sequence
  Synthetic
agaguugaugaagacaugu

SEQ ID NO: 121018 - RNA, 20 nt, Artificial Sequence
  Synthetic
uagaguugaugaagacaugu

SEQ ID NO: 121019 - RNA, 21 nt, Artificial Sequence
  Synthetic
auagaguugaugaagacaugu

SEQ ID NO: 121020 - RNA, 22 nt, Artificial Sequence
  Synthetic
uauagaguugaugaagacaugu

SEQ ID NO: 121021 - RNA, 23 nt, Artificial Sequence
  Synthetic
auauagaguugaugaagacaugu

SEQ ID NO: 121022 - RNA, 24 nt, Artificial Sequence
  Synthetic
aauauagaguugaugaagacaugu

SEQ ID NO: 121023 - RNA, 18 nt, Artificial Sequence
  Synthetic
aaugaugucuggacaugu

SEQ ID NO: 121024 - RNA, 19 nt, Artificial Sequence
  Synthetic
caaugaugucuggacaugu

SEQ ID NO: 121025 - RNA, 20 nt, Artificial Sequence
  Synthetic
ucaaugaugucuggacaugu

SEQ ID NO: 121026 - RNA, 21 nt, Artificial Sequence
  Synthetic
cucaaugaugucuggacaugu

SEQ ID NO: 121027 - RNA, 22 nt, Artificial Sequence
  Synthetic
ucucaaugaugucuggacaugu

SEQ ID NO: 121028 - RNA, 23 nt, Artificial Sequence
  Synthetic
uucucaaugaugucuggacaugu

SEQ ID NO: 121029 - RNA, 24 nt, Artificial Sequence
  Synthetic
auucucaaugaugucuggacaugu

SEQ ID NO: 121030 - RNA, 21 nt, Artificial Sequence
  Synthetic
uuauuuacauauauuacaugu

SEQ ID NO: 121031 - RNA, 22 nt, Artificial Sequence
  Synthetic
auuauuuacauauauuacaugu

SEQ ID NO: 121032 - RNA, 24 nt, Artificial Sequence
  Synthetic
ugauuauuuacauauauuacaugu

SEQ ID NO: 121033 - RNA, 18 nt, Artificial Sequence
  Synthetic
aacagcagcguaccaugu

SEQ ID NO: 121034 - RNA, 20 nt, Artificial Sequence
  Synthetic
agaacagcagcguaccaugu

SEQ ID NO: 121035 - RNA, 21 nt, Artificial Sequence
  Synthetic
aagaacagcagcguaccaugu

SEQ ID NO: 121036 - RNA, 22 nt, Artificial Sequence
  Synthetic
aaagaacagcagcguaccaugu

SEQ ID NO: 121037 - RNA, 23 nt, Artificial Sequence
  Synthetic
aaaagaacagcagcguaccaugu

SEQ ID NO: 121038 - RNA, 24 nt, Artificial Sequence
  Synthetic
aaaaagaacagcagcguaccaugu

SEQ ID NO: 121039 - RNA, 20 nt, Artificial Sequence
  Synthetic
agggaaauuugaaagcaugu

SEQ ID NO: 121040 - RNA, 21 nt, Artificial Sequence
  Synthetic
cagggaaauuugaaagcaugu

SEQ ID NO: 121041 - RNA, 22 nt, Artificial Sequence
  Synthetic
ucagggaaauuugaaagcaugu

SEQ ID NO: 121042 - RNA, 23 nt, Artificial Sequence
  Synthetic
cucagggaaauuugaaagcaugu

SEQ ID NO: 121043 - RNA, 24 nt, Artificial Sequence
  Synthetic
ucucagggaaauuugaaagcaugu

SEQ ID NO: 121044 - RNA, 18 nt, Artificial Sequence
  Synthetic
ugcaagugcagagcaugu

SEQ ID NO: 121045 - RNA, 19 nt, Artificial Sequence
  Synthetic
uugcaagugcagagcaugu

SEQ ID NO: 121046 - RNA, 20 nt, Artificial Sequence
  Synthetic
auugcaagugcagagcaugu

SEQ ID NO: 121047 - RNA, 21 nt, Artificial Sequence
  Synthetic
aauugcaagugcagagcaugu

SEQ ID NO: 121048 - RNA, 22 nt, Artificial Sequence
  Synthetic
aaauugcaagugcagagcaugu

SEQ ID NO: 121049 - RNA, 23 nt, Artificial Sequence
  Synthetic
caaauugcaagugcagagcaugu

SEQ ID NO: 121050 - RNA, 18 nt, Artificial Sequence
  Synthetic
agaacacaaggagcaugu

SEQ ID NO: 121051 - RNA, 19 nt, Artificial Sequence
  Synthetic
aagaacacaaggagcaugu

SEQ ID NO: 121052 - RNA, 20 nt, Artificial Sequence
  Synthetic
uaagaacacaaggagcaugu

SEQ ID NO: 121053 - RNA, 21 nt, Artificial Sequence
  Synthetic
uuaagaacacaaggagcaugu

SEQ ID NO: 121054 - RNA, 23 nt, Artificial Sequence
  Synthetic
aguuaagaacacaaggagcaugu

SEQ ID NO: 121055 - RNA, 24 nt, Artificial Sequence
  Synthetic
uaguuaagaacacaaggagcaugu

SEQ ID NO: 121056 - RNA, 18 nt, Artificial Sequence
  Synthetic
uccuacauagaggcaugu

SEQ ID NO: 121057 - RNA, 19 nt, Artificial Sequence
  Synthetic
cuccuacauagaggcaugu

SEQ ID NO: 121058 - RNA, 20 nt, Artificial Sequence
  Synthetic
acuccuacauagaggcaugu

SEQ ID NO: 121059 - RNA, 21 nt, Artificial Sequence
  Synthetic
cacuccuacauagaggcaugu

SEQ ID NO: 121060 - RNA, 22 nt, Artificial Sequence
  Synthetic
ucacuccuacauagaggcaugu

SEQ ID NO: 121061 - RNA, 23 nt, Artificial Sequence
  Synthetic
aucacuccuacauagaggcaugu

SEQ ID NO: 121062 - RNA, 24 nt, Artificial Sequence
  Synthetic
uaucacuccuacauagaggcaugu

SEQ ID NO: 121063 - RNA, 18 nt, Artificial Sequence
  Synthetic
uaagcuaccucugcaugu

SEQ ID NO: 121064 - RNA, 19 nt, Artificial Sequence
  Synthetic
uuaagcuaccucugcaugu

SEQ ID NO: 121065 - RNA, 20 nt, Artificial Sequence
  Synthetic
auuaagcuaccucugcaugu

SEQ ID NO: 121066 - RNA, 21 nt, Artificial Sequence
  Synthetic
aauuaagcuaccucugcaugu

SEQ ID NO: 121067 - RNA, 22 nt, Artificial Sequence
  Synthetic
aaauuaagcuaccucugcaugu

SEQ ID NO: 121068 - RNA, 23 nt, Artificial Sequence
  Synthetic
caaauuaagcuaccucugcaugu

SEQ ID NO: 121069 - RNA, 21 nt, Artificial Sequence
  Synthetic
aaaacagcaguuuauucaugu

SEQ ID NO: 121070 - RNA, 22 nt, Artificial Sequence
  Synthetic
aaaaacagcaguuuauucaugu

SEQ ID NO: 121071 - RNA, 23 nt, Artificial Sequence
  Synthetic
uaaaaacagcaguuuauucaugu

SEQ ID NO: 121072 - RNA, 24 nt, Artificial Sequence
  Synthetic
cuaaaaacagcaguuuauucaugu

SEQ ID NO: 121073 - RNA, 18 nt, Artificial Sequence
  Synthetic
uuuucugcaacuucaugu

SEQ ID NO: 121074 - RNA, 19 nt, Artificial Sequence
  Synthetic
auuuucugcaacuucaugu

SEQ ID NO: 121075 - RNA, 20 nt, Artificial Sequence
  Synthetic
cauuuucugcaacuucaugu

SEQ ID NO: 121076 - RNA, 21 nt, Artificial Sequence
  Synthetic
ucauuuucugcaacuucaugu

SEQ ID NO: 121077 - RNA, 22 nt, Artificial Sequence
  Synthetic
uucauuuucugcaacuucaugu

SEQ ID NO: 121078 - RNA, 23 nt, Artificial Sequence
  Synthetic
auucauuuucugcaacuucaugu

SEQ ID NO: 121079 - RNA, 24 nt, Artificial Sequence
  Synthetic
uauucauuuucugcaacuucaugu

SEQ ID NO: 121080 - RNA, 18 nt, Artificial Sequence
  Synthetic
auuuucagaacaagaugu

SEQ ID NO: 121081 - RNA, 19 nt, Artificial Sequence
  Synthetic
uauuuucagaacaagaugu

SEQ ID NO: 121082 - RNA, 20 nt, Artificial Sequence
  Synthetic
uuauuuucagaacaagaugu

SEQ ID NO: 121083 - RNA, 22 nt, Artificial Sequence
  Synthetic
cguuauuuucagaacaagaugu

SEQ ID NO: 121084 - RNA, 23 nt, Artificial Sequence
  Synthetic
ccguuauuuucagaacaagaugu

SEQ ID NO: 121085 - RNA, 24 nt, Artificial Sequence
  Synthetic
cccguuauuuucagaacaagaugu

SEQ ID NO: 121086 - RNA, 18 nt, Artificial Sequence
  Synthetic
cggaguggugcaagaugu

SEQ ID NO: 121087 - RNA, 19 nt, Artificial Sequence
  Synthetic
acggaguggugcaagaugu

SEQ ID NO: 121088 - RNA, 21 nt, Artificial Sequence
  Synthetic
agacggaguggugcaagaugu

SEQ ID NO: 121089 - RNA, 23 nt, Artificial Sequence
  Synthetic
ugagacggaguggugcaagaugu

SEQ ID NO: 121090 - RNA, 18 nt, Artificial Sequence
  Synthetic
auaagcacauugggaugu

SEQ ID NO: 121091 - RNA, 19 nt, Artificial Sequence
  Synthetic
uauaagcacauugggaugu

SEQ ID NO: 121092 - RNA, 20 nt, Artificial Sequence
  Synthetic
cuauaagcacauugggaugu

SEQ ID NO: 121093 - RNA, 22 nt, Artificial Sequence
  Synthetic
agcuauaagcacauugggaugu

SEQ ID NO: 121094 - RNA, 23 nt, Artificial Sequence
  Synthetic
uagcuauaagcacauugggaugu

SEQ ID NO: 121095 - RNA, 18 nt, Artificial Sequence
  Synthetic
uugagcuauuauggaugu

SEQ ID NO: 121096 - RNA, 19 nt, Artificial Sequence
  Synthetic
uuugagcuauuauggaugu

SEQ ID NO: 121097 - RNA, 20 nt, Artificial Sequence
  Synthetic
uuuugagcuauuauggaugu

SEQ ID NO: 121098 - RNA, 22 nt, Artificial Sequence
  Synthetic
uguuuugagcuauuauggaugu

SEQ ID NO: 121099 - RNA, 23 nt, Artificial Sequence
  Synthetic
auguuuugagcuauuauggaugu

SEQ ID NO: 121100 - RNA, 24 nt, Artificial Sequence
  Synthetic
aauguuuugagcuauuauggaugu

SEQ ID NO: 121101 - RNA, 21 nt, Artificial Sequence
  Synthetic
aauauuuuaaaauacugaugu

SEQ ID NO: 121102 - RNA, 22 nt, Artificial Sequence
  Synthetic
aaauauuuuaaaauacugaugu

SEQ ID NO: 121103 - RNA, 24 nt, Artificial Sequence
  Synthetic
agaaauauuuuaaaauacugaugu

SEQ ID NO: 121104 - RNA, 18 nt, Artificial Sequence
  Synthetic
aaacucacaucuugaugu

SEQ ID NO: 121105 - RNA, 19 nt, Artificial Sequence
  Synthetic
uaaacucacaucuugaugu

SEQ ID NO: 121106 - RNA, 20 nt, Artificial Sequence
  Synthetic
auaaacucacaucuugaugu

SEQ ID NO: 121107 - RNA, 21 nt, Artificial Sequence
  Synthetic
aauaaacucacaucuugaugu

SEQ ID NO: 121108 - RNA, 22 nt, Artificial Sequence
  Synthetic
aaauaaacucacaucuugaugu

SEQ ID NO: 121109 - RNA, 23 nt, Artificial Sequence
  Synthetic
uaaauaaacucacaucuugaugu

SEQ ID NO: 121110 - RNA, 24 nt, Artificial Sequence
  Synthetic
auaaauaaacucacaucuugaugu

SEQ ID NO: 121111 - RNA, 18 nt, Artificial Sequence
  Synthetic
agcuguauacucauaugu

SEQ ID NO: 121112 - RNA, 19 nt, Artificial Sequence
  Synthetic
uagcuguauacucauaugu

SEQ ID NO: 121113 - RNA, 20 nt, Artificial Sequence
  Synthetic
cuagcuguauacucauaugu

SEQ ID NO: 121114 - RNA, 21 nt, Artificial Sequence
  Synthetic
ucuagcuguauacucauaugu

SEQ ID NO: 121115 - RNA, 22 nt, Artificial Sequence
  Synthetic
uucuagcuguauacucauaugu

SEQ ID NO: 121116 - RNA, 23 nt, Artificial Sequence
  Synthetic
auucuagcuguauacucauaugu

SEQ ID NO: 121117 - RNA, 24 nt, Artificial Sequence
  Synthetic
uauucuagcuguauacucauaugu

SEQ ID NO: 121118 - RNA, 18 nt, Artificial Sequence
  Synthetic
auaaauaaccuuauaugu

SEQ ID NO: 121119 - RNA, 19 nt, Artificial Sequence
  Synthetic
uauaaauaaccuuauaugu

SEQ ID NO: 121120 - RNA, 22 nt, Artificial Sequence
  Synthetic
agguauaaauaaccuuauaugu

SEQ ID NO: 121121 - RNA, 23 nt, Artificial Sequence
  Synthetic
aagguauaaauaaccuuauaugu

SEQ ID NO: 121122 - RNA, 24 nt, Artificial Sequence
  Synthetic
aaagguauaaauaaccuuauaugu

SEQ ID NO: 121123 - RNA, 18 nt, Artificial Sequence
  Synthetic
cuugagcacucacuaugu

SEQ ID NO: 121124 - RNA, 19 nt, Artificial Sequence
  Synthetic
ccuugagcacucacuaugu

SEQ ID NO: 121125 - RNA, 20 nt, Artificial Sequence
  Synthetic
uccuugagcacucacuaugu

SEQ ID NO: 121126 - RNA, 21 nt, Artificial Sequence
  Synthetic
uuccuugagcacucacuaugu

SEQ ID NO: 121127 - RNA, 22 nt, Artificial Sequence
  Synthetic
uuuccuugagcacucacuaugu

SEQ ID NO: 121128 - RNA, 23 nt, Artificial Sequence
  Synthetic
auuuccuugagcacucacuaugu

SEQ ID NO: 121129 - RNA, 18 nt, Artificial Sequence
  Synthetic
uaccauaagaggcuaugu

SEQ ID NO: 121130 - RNA, 19 nt, Artificial Sequence
  Synthetic
auaccauaagaggcuaugu

SEQ ID NO: 121131 - RNA, 20 nt, Artificial Sequence
  Synthetic
uauaccauaagaggcuaugu

SEQ ID NO: 121132 - RNA, 21 nt, Artificial Sequence
  Synthetic
auauaccauaagaggcuaugu

SEQ ID NO: 121133 - RNA, 23 nt, Artificial Sequence
  Synthetic
ugauauaccauaagaggcuaugu

SEQ ID NO: 121134 - RNA, 24 nt, Artificial Sequence
  Synthetic
augauauaccauaagaggcuaugu

SEQ ID NO: 121135 - RNA, 18 nt, Artificial Sequence
  Synthetic
ucccauuuuaggcuaugu

SEQ ID NO: 121136 - RNA, 19 nt, Artificial Sequence
  Synthetic
uucccauuuuaggcuaugu

SEQ ID NO: 121137 - RNA, 20 nt, Artificial Sequence
  Synthetic
uuucccauuuuaggcuaugu

SEQ ID NO: 121138 - RNA, 22 nt, Artificial Sequence
  Synthetic
uguuucccauuuuaggcuaugu

SEQ ID NO: 121139 - RNA, 23 nt, Artificial Sequence
  Synthetic
cuguuucccauuuuaggcuaugu

SEQ ID NO: 121140 - RNA, 24 nt, Artificial Sequence
  Synthetic
ucuguuucccauuuuaggcuaugu

SEQ ID NO: 121141 - RNA, 20 nt, Artificial Sequence
  Synthetic
aggaagcuuucaaucuaugu

SEQ ID NO: 121142 - RNA, 21 nt, Artificial Sequence
  Synthetic
caggaagcuuucaaucuaugu

SEQ ID NO: 121143 - RNA, 22 nt, Artificial Sequence
  Synthetic
ucaggaagcuuucaaucuaugu

SEQ ID NO: 121144 - RNA, 23 nt, Artificial Sequence
  Synthetic
cucaggaagcuuucaaucuaugu

SEQ ID NO: 121145 - RNA, 24 nt, Artificial Sequence
  Synthetic
ccucaggaagcuuucaaucuaugu

SEQ ID NO: 121146 - RNA, 18 nt, Artificial Sequence
  Synthetic
ugaauuuacacaguaugu

SEQ ID NO: 121147 - RNA, 19 nt, Artificial Sequence
  Synthetic
cugaauuuacacaguaugu

SEQ ID NO: 121148 - RNA, 20 nt, Artificial Sequence
  Synthetic
ccugaauuuacacaguaugu

SEQ ID NO: 121149 - RNA, 21 nt, Artificial Sequence
  Synthetic
accugaauuuacacaguaugu

SEQ ID NO: 121150 - RNA, 22 nt, Artificial Sequence
  Synthetic
uaccugaauuuacacaguaugu

SEQ ID NO: 121151 - RNA, 23 nt, Artificial Sequence
  Synthetic
uuaccugaauuuacacaguaugu

SEQ ID NO: 121152 - RNA, 24 nt, Artificial Sequence
  Synthetic
auuaccugaauuuacacaguaugu

SEQ ID NO: 121153 - RNA, 18 nt, Artificial Sequence
  Synthetic
ccacguuccucaguaugu

SEQ ID NO: 121154 - RNA, 19 nt, Artificial Sequence
  Synthetic
accacguuccucaguaugu

SEQ ID NO: 121155 - RNA, 20 nt, Artificial Sequence
  Synthetic
uaccacguuccucaguaugu

SEQ ID NO: 121156 - RNA, 23 nt, Artificial Sequence
  Synthetic
agguaccacguuccucaguaugu

SEQ ID NO: 121157 - RNA, 24 nt, Artificial Sequence
  Synthetic
uagguaccacguuccucaguaugu

SEQ ID NO: 121158 - RNA, 19 nt, Artificial Sequence
  Synthetic
agauaaauauuagguaugu

SEQ ID NO: 121159 - RNA, 20 nt, Artificial Sequence
  Synthetic
aagauaaauauuagguaugu

SEQ ID NO: 121160 - RNA, 21 nt, Artificial Sequence
  Synthetic
uaagauaaauauuagguaugu

SEQ ID NO: 121161 - RNA, 22 nt, Artificial Sequence
  Synthetic
cuaagauaaauauuagguaugu

SEQ ID NO: 121162 - RNA, 23 nt, Artificial Sequence
  Synthetic
ccuaagauaaauauuagguaugu

SEQ ID NO: 121163 - RNA, 24 nt, Artificial Sequence
  Synthetic
cccuaagauaaauauuagguaugu

SEQ ID NO: 121164 - RNA, 22 nt, Artificial Sequence
  Synthetic
ugaauaguauugccugguaugu

SEQ ID NO: 121165 - RNA, 23 nt, Artificial Sequence
  Synthetic
cugaauaguauugccugguaugu

SEQ ID NO: 121166 - RNA, 18 nt, Artificial Sequence
  Synthetic
augguccaaacuguaugu

SEQ ID NO: 121167 - RNA, 19 nt, Artificial Sequence
  Synthetic
caugguccaaacuguaugu

SEQ ID NO: 121168 - RNA, 20 nt, Artificial Sequence
  Synthetic
ucaugguccaaacuguaugu

SEQ ID NO: 121169 - RNA, 21 nt, Artificial Sequence
  Synthetic
cucaugguccaaacuguaugu

SEQ ID NO: 121170 - RNA, 22 nt, Artificial Sequence
  Synthetic
ucucaugguccaaacuguaugu

SEQ ID NO: 121171 - RNA, 24 nt, Artificial Sequence
  Synthetic
ugucucaugguccaaacuguaugu

SEQ ID NO: 121172 - RNA, 20 nt, Artificial Sequence
  Synthetic
aggaacacacguguguaugu

SEQ ID NO: 121173 - RNA, 21 nt, Artificial Sequence
  Synthetic
caggaacacacguguguaugu

SEQ ID NO: 121174 - RNA, 22 nt, Artificial Sequence
  Synthetic
ucaggaacacacguguguaugu

SEQ ID NO: 121175 - RNA, 23 nt, Artificial Sequence
  Synthetic
uucaggaacacacguguguaugu

SEQ ID NO: 121176 - RNA, 24 nt, Artificial Sequence
  Synthetic
uuucaggaacacacguguguaugu

SEQ ID NO: 121177 - RNA, 18 nt, Artificial Sequence
  Synthetic
acuaugaaagaauuaugu

SEQ ID NO: 121178 - RNA, 19 nt, Artificial Sequence
  Synthetic
aacuaugaaagaauuaugu

SEQ ID NO: 121179 - RNA, 21 nt, Artificial Sequence
  Synthetic
agaacuaugaaagaauuaugu

SEQ ID NO: 121180 - RNA, 22 nt, Artificial Sequence
  Synthetic
aagaacuaugaaagaauuaugu

SEQ ID NO: 121181 - RNA, 23 nt, Artificial Sequence
  Synthetic
aaagaacuaugaaagaauuaugu

SEQ ID NO: 121182 - RNA, 18 nt, Artificial Sequence
  Synthetic
aaagaaaagacauuaugu

SEQ ID NO: 121183 - RNA, 20 nt, Artificial Sequence
  Synthetic
ugaaagaaaagacauuaugu

SEQ ID NO: 121184 - RNA, 21 nt, Artificial Sequence
  Synthetic
augaaagaaaagacauuaugu

SEQ ID NO: 121185 - RNA, 22 nt, Artificial Sequence
  Synthetic
caugaaagaaaagacauuaugu

SEQ ID NO: 121186 - RNA, 23 nt, Artificial Sequence
  Synthetic
ccaugaaagaaaagacauuaugu

SEQ ID NO: 121187 - RNA, 24 nt, Artificial Sequence
  Synthetic
accaugaaagaaaagacauuaugu

SEQ ID NO: 121188 - RNA, 18 nt, Artificial Sequence
  Synthetic
auacuucaaugauuaugu

SEQ ID NO: 121189 - RNA, 19 nt, Artificial Sequence
  Synthetic
uauacuucaaugauuaugu

SEQ ID NO: 121190 - RNA, 23 nt, Artificial Sequence
  Synthetic
uggguauacuucaaugauuaugu

SEQ ID NO: 121191 - RNA, 24 nt, Artificial Sequence
  Synthetic
auggguauacuucaaugauuaugu

SEQ ID NO: 121192 - RNA, 18 nt, Artificial Sequence
  Synthetic
cuuauaucccuauuaugu

SEQ ID NO: 121193 - RNA, 19 nt, Artificial Sequence
  Synthetic
ucuuauaucccuauuaugu

SEQ ID NO: 121194 - RNA, 20 nt, Artificial Sequence
  Synthetic
uucuuauaucccuauuaugu

SEQ ID NO: 121195 - RNA, 21 nt, Artificial Sequence
  Synthetic
cuucuuauaucccuauuaugu

SEQ ID NO: 121196 - RNA, 22 nt, Artificial Sequence
  Synthetic
ccuucuuauaucccuauuaugu

SEQ ID NO: 121197 - RNA, 21 nt, Artificial Sequence
  Synthetic
agggcuuucagaguauuaugu

SEQ ID NO: 121198 - RNA, 23 nt, Artificial Sequence
  Synthetic
agagggcuuucagaguauuaugu

SEQ ID NO: 121199 - RNA, 24 nt, Artificial Sequence
  Synthetic
cagagggcuuucagaguauuaugu

SEQ ID NO: 121200 - RNA, 22 nt, Artificial Sequence
  Synthetic
aguuaaauguuaaaacuuaugu

SEQ ID NO: 121201 - RNA, 23 nt, Artificial Sequence
  Synthetic
caguuaaauguuaaaacuuaugu

SEQ ID NO: 121202 - RNA, 24 nt, Artificial Sequence
  Synthetic
ccaguuaaauguuaaaacuuaugu

SEQ ID NO: 121203 - RNA, 19 nt, Artificial Sequence
  Synthetic
aguuuuaucuauguuaugu

SEQ ID NO: 121204 - RNA, 20 nt, Artificial Sequence
  Synthetic
aaguuuuaucuauguuaugu

SEQ ID NO: 121205 - RNA, 21 nt, Artificial Sequence
  Synthetic
caaguuuuaucuauguuaugu

SEQ ID NO: 121206 - RNA, 22 nt, Artificial Sequence
  Synthetic
ccaaguuuuaucuauguuaugu

SEQ ID NO: 121207 - RNA, 23 nt, Artificial Sequence
  Synthetic
accaaguuuuaucuauguuaugu

SEQ ID NO: 121208 - RNA, 24 nt, Artificial Sequence
  Synthetic
aaccaaguuuuaucuauguuaugu

SEQ ID NO: 121209 - RNA, 18 nt, Artificial Sequence
  Synthetic
auagugaaggauuuaugu

SEQ ID NO: 121210 - RNA, 21 nt, Artificial Sequence
  Synthetic
aggauagugaaggauuuaugu

SEQ ID NO: 121211 - RNA, 23 nt, Artificial Sequence
  Synthetic
agaggauagugaaggauuuaugu

SEQ ID NO: 121212 - RNA, 22 nt, Artificial Sequence
  Synthetic
ugauuuaaauuuuaaaaacugu

SEQ ID NO: 121213 - RNA, 23 nt, Artificial Sequence
  Synthetic
augauuuaaauuuuaaaaacugu

SEQ ID NO: 121214 - RNA, 24 nt, Artificial Sequence
  Synthetic
aaugauuuaaauuuuaaaaacugu

SEQ ID NO: 121215 - RNA, 18 nt, Artificial Sequence
  Synthetic
uaagaagaggaaaacugu

SEQ ID NO: 121216 - RNA, 19 nt, Artificial Sequence
  Synthetic
auaagaagaggaaaacugu

SEQ ID NO: 121217 - RNA, 21 nt, Artificial Sequence
  Synthetic
agauaagaagaggaaaacugu

SEQ ID NO: 121218 - RNA, 22 nt, Artificial Sequence
  Synthetic
uagauaagaagaggaaaacugu

SEQ ID NO: 121219 - RNA, 23 nt, Artificial Sequence
  Synthetic
uuagauaagaagaggaaaacugu

SEQ ID NO: 121220 - RNA, 24 nt, Artificial Sequence
  Synthetic
uuuagauaagaagaggaaaacugu

SEQ ID NO: 121221 - RNA, 20 nt, Artificial Sequence
  Synthetic
aggacuccacugaaaacugu

SEQ ID NO: 121222 - RNA, 18 nt, Artificial Sequence
  Synthetic
ugaugccuauaaaacugu

SEQ ID NO: 121223 - RNA, 19 nt, Artificial Sequence
  Synthetic
uugaugccuauaaaacugu

SEQ ID NO: 121224 - RNA, 20 nt, Artificial Sequence
  Synthetic
uuugaugccuauaaaacugu

SEQ ID NO: 121225 - RNA, 21 nt, Artificial Sequence
  Synthetic
uuuugaugccuauaaaacugu

SEQ ID NO: 121226 - RNA, 22 nt, Artificial Sequence
  Synthetic
cuuuugaugccuauaaaacugu

SEQ ID NO: 121227 - RNA, 23 nt, Artificial Sequence
  Synthetic
acuuuugaugccuauaaaacugu

SEQ ID NO: 121228 - RNA, 24 nt, Artificial Sequence
  Synthetic
uacuuuugaugccuauaaaacugu

SEQ ID NO: 121229 - RNA, 20 nt, Artificial Sequence
  Synthetic
cggauuacuuaaaccacugu

SEQ ID NO: 121230 - RNA, 21 nt, Artificial Sequence
  Synthetic
ucggauuacuuaaaccacugu

SEQ ID NO: 121231 - RNA, 22 nt, Artificial Sequence
  Synthetic
cucggauuacuuaaaccacugu

SEQ ID NO: 121232 - RNA, 23 nt, Artificial Sequence
  Synthetic
ccucggauuacuuaaaccacugu

SEQ ID NO: 121233 - RNA, 24 nt, Artificial Sequence
  Synthetic
accucggauuacuuaaaccacugu

SEQ ID NO: 121234 - RNA, 22 nt, Artificial Sequence
  Synthetic
agguagguacuaugcucacugu

SEQ ID NO: 121235 - RNA, 23 nt, Artificial Sequence
  Synthetic
cagguagguacuaugcucacugu

SEQ ID NO: 121236 - RNA, 24 nt, Artificial Sequence
  Synthetic
ucagguagguacuaugcucacugu

SEQ ID NO: 121237 - RNA, 18 nt, Artificial Sequence
  Synthetic
acucaguacugucacugu

SEQ ID NO: 121238 - RNA, 19 nt, Artificial Sequence
  Synthetic
cacucaguacugucacugu

SEQ ID NO: 121239 - RNA, 20 nt, Artificial Sequence
  Synthetic
ucacucaguacugucacugu

SEQ ID NO: 121240 - RNA, 21 nt, Artificial Sequence
  Synthetic
uucacucaguacugucacugu

SEQ ID NO: 121241 - RNA, 22 nt, Artificial Sequence
  Synthetic
cuucacucaguacugucacugu

SEQ ID NO: 121242 - RNA, 23 nt, Artificial Sequence
  Synthetic
acuucacucaguacugucacugu

SEQ ID NO: 121243 - RNA, 24 nt, Artificial Sequence
  Synthetic
uacuucacucaguacugucacugu

SEQ ID NO: 121244 - RNA, 18 nt, Artificial Sequence
  Synthetic
augcucauucccuacugu

SEQ ID NO: 121245 - RNA, 19 nt, Artificial Sequence
  Synthetic
caugcucauucccuacugu

SEQ ID NO: 121246 - RNA, 21 nt, Artificial Sequence
  Synthetic
ugcaugcucauucccuacugu

SEQ ID NO: 121247 - RNA, 22 nt, Artificial Sequence
  Synthetic
uugcaugcucauucccuacugu

SEQ ID NO: 121248 - RNA, 23 nt, Artificial Sequence
  Synthetic
auugcaugcucauucccuacugu

SEQ ID NO: 121249 - RNA, 24 nt, Artificial Sequence
  Synthetic
aauugcaugcucauucccuacugu

SEQ ID NO: 121250 - RNA, 18 nt, Artificial Sequence
  Synthetic
auccuugagucuuacugu

SEQ ID NO: 121251 - RNA, 19 nt, Artificial Sequence
  Synthetic
uauccuugagucuuacugu

SEQ ID NO: 121252 - RNA, 22 nt, Artificial Sequence
  Synthetic
agguauccuugagucuuacugu

SEQ ID NO: 121253 - RNA, 23 nt, Artificial Sequence
  Synthetic
aagguauccuugagucuuacugu

SEQ ID NO: 121254 - RNA, 24 nt, Artificial Sequence
  Synthetic
aaagguauccuugagucuuacugu

SEQ ID NO: 121255 - RNA, 20 nt, Artificial Sequence
  Synthetic
aggcacaugucuaaaccugu

SEQ ID NO: 121256 - RNA, 21 nt, Artificial Sequence
  Synthetic
aaggcacaugucuaaaccugu

SEQ ID NO: 121257 - RNA, 24 nt, Artificial Sequence
  Synthetic
cggaaggcacaugucuaaaccugu

SEQ ID NO: 121258 - RNA, 18 nt, Artificial Sequence
  Synthetic
cuggaauugccuaccugu

SEQ ID NO: 121259 - RNA, 19 nt, Artificial Sequence
  Synthetic
ucuggaauugccuaccugu

SEQ ID NO: 121260 - RNA, 20 nt, Artificial Sequence
  Synthetic
uucuggaauugccuaccugu

SEQ ID NO: 121261 - RNA, 21 nt, Artificial Sequence
  Synthetic
cuucuggaauugccuaccugu

SEQ ID NO: 121262 - RNA, 18 nt, Artificial Sequence
  Synthetic
agaucuuuucuccccugu

SEQ ID NO: 121263 - RNA, 20 nt, Artificial Sequence
  Synthetic
agagaucuuuucuccccugu

SEQ ID NO: 121264 - RNA, 21 nt, Artificial Sequence
  Synthetic
aagagaucuuuucuccccugu

SEQ ID NO: 121265 - RNA, 22 nt, Artificial Sequence
  Synthetic
aaagagaucuuuucuccccugu

SEQ ID NO: 121266 - RNA, 23 nt, Artificial Sequence
  Synthetic
aaaagagaucuuuucuccccugu

SEQ ID NO: 121267 - RNA, 18 nt, Artificial Sequence
  Synthetic
uucauuacuucucccugu

SEQ ID NO: 121268 - RNA, 19 nt, Artificial Sequence
  Synthetic
uuucauuacuucucccugu

SEQ ID NO: 121269 - RNA, 20 nt, Artificial Sequence
  Synthetic
uuuucauuacuucucccugu

SEQ ID NO: 121270 - RNA, 21 nt, Artificial Sequence
  Synthetic
cuuuucauuacuucucccugu

SEQ ID NO: 121271 - RNA, 22 nt, Artificial Sequence
  Synthetic
ucuuuucauuacuucucccugu

SEQ ID NO: 121272 - RNA, 23 nt, Artificial Sequence
  Synthetic
aucuuuucauuacuucucccugu

SEQ ID NO: 121273 - RNA, 24 nt, Artificial Sequence
  Synthetic
aaucuuuucauuacuucucccugu

SEQ ID NO: 121274 - RNA, 18 nt, Artificial Sequence
  Synthetic
ccaaauaauauucccugu

SEQ ID NO: 121275 - RNA, 21 nt, Artificial Sequence
  Synthetic
aggccaaauaauauucccugu

SEQ ID NO: 121276 - RNA, 22 nt, Artificial Sequence
  Synthetic
aaggccaaauaauauucccugu

SEQ ID NO: 121277 - RNA, 23 nt, Artificial Sequence
  Synthetic
uaaggccaaauaauauucccugu

SEQ ID NO: 121278 - RNA, 24 nt, Artificial Sequence
  Synthetic
uuaaggccaaauaauauucccugu

SEQ ID NO: 121279 - RNA, 18 nt, Artificial Sequence
  Synthetic
cuggcagccuuucccugu

SEQ ID NO: 121280 - RNA, 19 nt, Artificial Sequence
  Synthetic
ccuggcagccuuucccugu

SEQ ID NO: 121281 - RNA, 20 nt, Artificial Sequence
  Synthetic
uccuggcagccuuucccugu

SEQ ID NO: 121282 - RNA, 21 nt, Artificial Sequence
  Synthetic
uuccuggcagccuuucccugu

SEQ ID NO: 121283 - RNA, 22 nt, Artificial Sequence
  Synthetic
auuccuggcagccuuucccugu

SEQ ID NO: 121284 - RNA, 23 nt, Artificial Sequence
  Synthetic
cauuccuggcagccuuucccugu

SEQ ID NO: 121285 - RNA, 24 nt, Artificial Sequence
  Synthetic
ucauuccuggcagccuuucccugu

SEQ ID NO: 121286 - RNA, 18 nt, Artificial Sequence
  Synthetic
ugucccauuuuauccugu

SEQ ID NO: 121287 - RNA, 19 nt, Artificial Sequence
  Synthetic
uugucccauuuuauccugu

SEQ ID NO: 121288 - RNA, 20 nt, Artificial Sequence
  Synthetic
auugucccauuuuauccugu

SEQ ID NO: 121289 - RNA, 21 nt, Artificial Sequence
  Synthetic
uauugucccauuuuauccugu

SEQ ID NO: 121290 - RNA, 22 nt, Artificial Sequence
  Synthetic
auauugucccauuuuauccugu

SEQ ID NO: 121291 - RNA, 23 nt, Artificial Sequence
  Synthetic
aauauugucccauuuuauccugu

SEQ ID NO: 121292 - RNA, 24 nt, Artificial Sequence
  Synthetic
aaauauugucccauuuuauccugu

SEQ ID NO: 121293 - RNA, 18 nt, Artificial Sequence
  Synthetic
uugcuuaucuauuccugu

SEQ ID NO: 121294 - RNA, 19 nt, Artificial Sequence
  Synthetic
cuugcuuaucuauuccugu

SEQ ID NO: 121295 - RNA, 20 nt, Artificial Sequence
  Synthetic
acuugcuuaucuauuccugu

SEQ ID NO: 121296 - RNA, 21 nt, Artificial Sequence
  Synthetic
uacuugcuuaucuauuccugu

SEQ ID NO: 121297 - RNA, 22 nt, Artificial Sequence
  Synthetic
auacuugcuuaucuauuccugu

SEQ ID NO: 121298 - RNA, 19 nt, Artificial Sequence
  Synthetic
uguuauuuccuguagcugu

SEQ ID NO: 121299 - RNA, 20 nt, Artificial Sequence
  Synthetic
uuguuauuuccuguagcugu

SEQ ID NO: 121300 - RNA, 21 nt, Artificial Sequence
  Synthetic
auuguuauuuccuguagcugu

SEQ ID NO: 121301 - RNA, 22 nt, Artificial Sequence
  Synthetic
cauuguuauuuccuguagcugu

SEQ ID NO: 121302 - RNA, 23 nt, Artificial Sequence
  Synthetic
ccauuguuauuuccuguagcugu

SEQ ID NO: 121303 - RNA, 24 nt, Artificial Sequence
  Synthetic
uccauuguuauuuccuguagcugu

SEQ ID NO: 121304 - RNA, 18 nt, Artificial Sequence
  Synthetic
ccacauaauauuagcugu

SEQ ID NO: 121305 - RNA, 19 nt, Artificial Sequence
  Synthetic
accacauaauauuagcugu

SEQ ID NO: 121306 - RNA, 20 nt, Artificial Sequence
  Synthetic
caccacauaauauuagcugu

SEQ ID NO: 121307 - RNA, 21 nt, Artificial Sequence
  Synthetic
ucaccacauaauauuagcugu

SEQ ID NO: 121308 - RNA, 22 nt, Artificial Sequence
  Synthetic
uucaccacauaauauuagcugu

SEQ ID NO: 121309 - RNA, 23 nt, Artificial Sequence
  Synthetic
cuucaccacauaauauuagcugu

SEQ ID NO: 121310 - RNA, 24 nt, Artificial Sequence
  Synthetic
acuucaccacauaauauuagcugu

SEQ ID NO: 121311 - RNA, 18 nt, Artificial Sequence
  Synthetic
ugaacugaguugcgcugu

SEQ ID NO: 121312 - RNA, 19 nt, Artificial Sequence
  Synthetic
cugaacugaguugcgcugu

SEQ ID NO: 121313 - RNA, 20 nt, Artificial Sequence
  Synthetic
ucugaacugaguugcgcugu

SEQ ID NO: 121314 - RNA, 21 nt, Artificial Sequence
  Synthetic
aucugaacugaguugcgcugu

SEQ ID NO: 121315 - RNA, 23 nt, Artificial Sequence
  Synthetic
ugaucugaacugaguugcgcugu

SEQ ID NO: 121316 - RNA, 24 nt, Artificial Sequence
  Synthetic
cugaucugaacugaguugcgcugu

SEQ ID NO: 121317 - RNA, 18 nt, Artificial Sequence
  Synthetic
uaaguagcaucaggcugu

SEQ ID NO: 121318 - RNA, 19 nt, Artificial Sequence
  Synthetic
uuaaguagcaucaggcugu

SEQ ID NO: 121319 - RNA, 20 nt, Artificial Sequence
  Synthetic
uuuaaguagcaucaggcugu

SEQ ID NO: 121320 - RNA, 21 nt, Artificial Sequence
  Synthetic
uuuuaaguagcaucaggcugu

SEQ ID NO: 121321 - RNA, 22 nt, Artificial Sequence
  Synthetic
cuuuuaaguagcaucaggcugu

SEQ ID NO: 121322 - RNA, 23 nt, Artificial Sequence
  Synthetic
ucuuuuaaguagcaucaggcugu

SEQ ID NO: 121323 - RNA, 24 nt, Artificial Sequence
  Synthetic
aucuuuuaaguagcaucaggcugu

SEQ ID NO: 121324 - RNA, 18 nt, Artificial Sequence
  Synthetic
aucugaaggagaggcugu

SEQ ID NO: 121325 - RNA, 19 nt, Artificial Sequence
  Synthetic
caucugaaggagaggcugu

SEQ ID NO: 121326 - RNA, 20 nt, Artificial Sequence
  Synthetic
ucaucugaaggagaggcugu

SEQ ID NO: 121327 - RNA, 21 nt, Artificial Sequence
  Synthetic
uucaucugaaggagaggcugu

SEQ ID NO: 121328 - RNA, 22 nt, Artificial Sequence
  Synthetic
cuucaucugaaggagaggcugu

SEQ ID NO: 121329 - RNA, 23 nt, Artificial Sequence
  Synthetic
ucuucaucugaaggagaggcugu

SEQ ID NO: 121330 - RNA, 24 nt, Artificial Sequence
  Synthetic
uucuucaucugaaggagaggcugu

SEQ ID NO: 121331 - RNA, 18 nt, Artificial Sequence
  Synthetic
auaucauacauaggcugu

SEQ ID NO: 121332 - RNA, 19 nt, Artificial Sequence
  Synthetic
uauaucauacauaggcugu

SEQ ID NO: 121333 - RNA, 20 nt, Artificial Sequence
  Synthetic
uuauaucauacauaggcugu

SEQ ID NO: 121334 - RNA, 23 nt, Artificial Sequence
  Synthetic
ugguuauaucauacauaggcugu

SEQ ID NO: 121335 - RNA, 24 nt, Artificial Sequence
  Synthetic
cugguuauaucauacauaggcugu

SEQ ID NO: 121336 - RNA, 20 nt, Artificial Sequence
  Synthetic
ugguaccaacuugcugcugu

SEQ ID NO: 121337 - RNA, 21 nt, Artificial Sequence
  Synthetic
cugguaccaacuugcugcugu

SEQ ID NO: 121338 - RNA, 22 nt, Artificial Sequence
  Synthetic
ucugguaccaacuugcugcugu

SEQ ID NO: 121339 - RNA, 23 nt, Artificial Sequence
  Synthetic
uucugguaccaacuugcugcugu

SEQ ID NO: 121340 - RNA, 24 nt, Artificial Sequence
  Synthetic
uuucugguaccaacuugcugcugu

SEQ ID NO: 121341 - RNA, 18 nt, Artificial Sequence
  Synthetic
agaauacuguucugcugu

SEQ ID NO: 121342 - RNA, 19 nt, Artificial Sequence
  Synthetic
cagaauacuguucugcugu

SEQ ID NO: 121343 - RNA, 21 nt, Artificial Sequence
  Synthetic
agcagaauacuguucugcugu

SEQ ID NO: 121344 - RNA, 22 nt, Artificial Sequence
  Synthetic
aagcagaauacuguucugcugu

SEQ ID NO: 121345 - RNA, 23 nt, Artificial Sequence
  Synthetic
aaagcagaauacuguucugcugu

SEQ ID NO: 121346 - RNA, 24 nt, Artificial Sequence
  Synthetic
uaaagcagaauacuguucugcugu

SEQ ID NO: 121347 - RNA, 19 nt, Artificial Sequence
  Synthetic
agugcccucaaaaaucugu

SEQ ID NO: 121348 - RNA, 20 nt, Artificial Sequence
  Synthetic
uagugcccucaaaaaucugu

SEQ ID NO: 121349 - RNA, 21 nt, Artificial Sequence
  Synthetic
uuagugcccucaaaaaucugu

SEQ ID NO: 121350 - RNA, 22 nt, Artificial Sequence
  Synthetic
uuuagugcccucaaaaaucugu

SEQ ID NO: 121351 - RNA, 23 nt, Artificial Sequence
  Synthetic
auuuagugcccucaaaaaucugu

SEQ ID NO: 121352 - RNA, 19 nt, Artificial Sequence
  Synthetic
agacagugccgugaucugu

SEQ ID NO: 121353 - RNA, 20 nt, Artificial Sequence
  Synthetic
cagacagugccgugaucugu

SEQ ID NO: 121354 - RNA, 21 nt, Artificial Sequence
  Synthetic
acagacagugccgugaucugu

SEQ ID NO: 121355 - RNA, 22 nt, Artificial Sequence
  Synthetic
aacagacagugccgugaucugu

SEQ ID NO: 121356 - RNA, 24 nt, Artificial Sequence
  Synthetic
cgaacagacagugccgugaucugu

SEQ ID NO: 121357 - RNA, 19 nt, Artificial Sequence
  Synthetic
agaauuuuuaauugucugu

SEQ ID NO: 121358 - RNA, 21 nt, Artificial Sequence
  Synthetic
agagaauuuuuaauugucugu

SEQ ID NO: 121359 - RNA, 22 nt, Artificial Sequence
  Synthetic
cagagaauuuuuaauugucugu

SEQ ID NO: 121360 - RNA, 23 nt, Artificial Sequence
  Synthetic
ucagagaauuuuuaauugucugu

SEQ ID NO: 121361 - RNA, 24 nt, Artificial Sequence
  Synthetic
cucagagaauuuuuaauugucugu

SEQ ID NO: 121362 - RNA, 18 nt, Artificial Sequence
  Synthetic
ucuuauagaguugucugu

SEQ ID NO: 121363 - RNA, 19 nt, Artificial Sequence
  Synthetic
aucuuauagaguugucugu

SEQ ID NO: 121364 - RNA, 20 nt, Artificial Sequence
  Synthetic
uaucuuauagaguugucugu

SEQ ID NO: 121365 - RNA, 21 nt, Artificial Sequence
  Synthetic
uuaucuuauagaguugucugu

SEQ ID NO: 121366 - RNA, 22 nt, Artificial Sequence
  Synthetic
uuuaucuuauagaguugucugu

SEQ ID NO: 121367 - RNA, 23 nt, Artificial Sequence
  Synthetic
cuuuaucuuauagaguugucugu

SEQ ID NO: 121368 - RNA, 24 nt, Artificial Sequence
  Synthetic
acuuuaucuuauagaguugucugu

SEQ ID NO: 121369 - RNA, 18 nt, Artificial Sequence
  Synthetic
auuuuuaucugauucugu

SEQ ID NO: 121370 - RNA, 20 nt, Artificial Sequence
  Synthetic
agauuuuuaucugauucugu

SEQ ID NO: 121371 - RNA, 23 nt, Artificial Sequence
  Synthetic
uggagauuuuuaucugauucugu

SEQ ID NO: 121372 - RNA, 24 nt, Artificial Sequence
  Synthetic
cuggagauuuuuaucugauucugu

SEQ ID NO: 121373 - RNA, 20 nt, Artificial Sequence
  Synthetic
agguaaauaaauccuucugu

SEQ ID NO: 121374 - RNA, 21 nt, Artificial Sequence
  Synthetic
uagguaaauaaauccuucugu

SEQ ID NO: 121375 - RNA, 22 nt, Artificial Sequence
  Synthetic
uuagguaaauaaauccuucugu

SEQ ID NO: 121376 - RNA, 23 nt, Artificial Sequence
  Synthetic
cuuagguaaauaaauccuucugu

SEQ ID NO: 121377 - RNA, 24 nt, Artificial Sequence
  Synthetic
ccuuagguaaauaaauccuucugu

SEQ ID NO: 121378 - RNA, 18 nt, Artificial Sequence
  Synthetic
uaucagguuuauuucugu

SEQ ID NO: 121379 - RNA, 19 nt, Artificial Sequence
  Synthetic
uuaucagguuuauuucugu

SEQ ID NO: 121380 - RNA, 20 nt, Artificial Sequence
  Synthetic
uuuaucagguuuauuucugu

SEQ ID NO: 121381 - RNA, 21 nt, Artificial Sequence
  Synthetic
uuuuaucagguuuauuucugu

SEQ ID NO: 121382 - RNA, 22 nt, Artificial Sequence
  Synthetic
uuuuuaucagguuuauuucugu

SEQ ID NO: 121383 - RNA, 23 nt, Artificial Sequence
  Synthetic
uuuuuuaucagguuuauuucugu

SEQ ID NO: 121384 - RNA, 24 nt, Artificial Sequence
  Synthetic
uuuuuuuaucagguuuauuucugu

SEQ ID NO: 121385 - RNA, 18 nt, Artificial Sequence
  Synthetic
ugcccuaugguuuucugu

SEQ ID NO: 121386 - RNA, 19 nt, Artificial Sequence
  Synthetic
augcccuaugguuuucugu

SEQ ID NO: 121387 - RNA, 20 nt, Artificial Sequence
  Synthetic
uaugcccuaugguuuucugu

SEQ ID NO: 121388 - RNA, 18 nt, Artificial Sequence
  Synthetic
ugguccuauggaaagugu

SEQ ID NO: 121389 - RNA, 19 nt, Artificial Sequence
  Synthetic
cugguccuauggaaagugu

SEQ ID NO: 121390 - RNA, 20 nt, Artificial Sequence
  Synthetic
ucugguccuauggaaagugu

SEQ ID NO: 121391 - RNA, 21 nt, Artificial Sequence
  Synthetic
uucugguccuauggaaagugu

SEQ ID NO: 121392 - RNA, 22 nt, Artificial Sequence
  Synthetic
uuucugguccuauggaaagugu

SEQ ID NO: 121393 - RNA, 23 nt, Artificial Sequence
  Synthetic
cuuucugguccuauggaaagugu

SEQ ID NO: 121394 - RNA, 24 nt, Artificial Sequence
  Synthetic
ccuuucugguccuauggaaagugu

SEQ ID NO: 121395 - RNA, 18 nt, Artificial Sequence
  Synthetic
cugauuacuaccaagugu

SEQ ID NO: 121396 - RNA, 19 nt, Artificial Sequence
  Synthetic
ucugauuacuaccaagugu

SEQ ID NO: 121397 - RNA, 21 nt, Artificial Sequence
  Synthetic
ugucugauuacuaccaagugu

SEQ ID NO: 121398 - RNA, 22 nt, Artificial Sequence
  Synthetic
augucugauuacuaccaagugu

SEQ ID NO: 121399 - RNA, 23 nt, Artificial Sequence
  Synthetic
aaugucugauuacuaccaagugu

SEQ ID NO: 121400 - RNA, 24 nt, Artificial Sequence
  Synthetic
aaaugucugauuacuaccaagugu

SEQ ID NO: 121401 - RNA, 18 nt, Artificial Sequence
  Synthetic
aaaagguuggucaagugu

SEQ ID NO: 121402 - RNA, 19 nt, Artificial Sequence
  Synthetic
uaaaagguuggucaagugu

SEQ ID NO: 121403 - RNA, 20 nt, Artificial Sequence
  Synthetic
uuaaaagguuggucaagugu

SEQ ID NO: 121404 - RNA, 21 nt, Artificial Sequence
  Synthetic
auuaaaagguuggucaagugu

SEQ ID NO: 121405 - RNA, 22 nt, Artificial Sequence
  Synthetic
aauuaaaagguuggucaagugu

SEQ ID NO: 121406 - RNA, 23 nt, Artificial Sequence
  Synthetic
aaauuaaaagguuggucaagugu

SEQ ID NO: 121407 - RNA, 18 nt, Artificial Sequence
  Synthetic
acaaggaaaaauaagugu

SEQ ID NO: 121408 - RNA, 19 nt, Artificial Sequence
  Synthetic
cacaaggaaaaauaagugu

SEQ ID NO: 121409 - RNA, 20 nt, Artificial Sequence
  Synthetic
ucacaaggaaaaauaagugu

SEQ ID NO: 121410 - RNA, 21 nt, Artificial Sequence
  Synthetic
uucacaaggaaaaauaagugu

SEQ ID NO: 121411 - RNA, 22 nt, Artificial Sequence
  Synthetic
uuucacaaggaaaaauaagugu

SEQ ID NO: 121412 - RNA, 23 nt, Artificial Sequence
  Synthetic
uuuucacaaggaaaaauaagugu

SEQ ID NO: 121413 - RNA, 24 nt, Artificial Sequence
  Synthetic
auuuucacaaggaaaaauaagugu

SEQ ID NO: 121414 - RNA, 19 nt, Artificial Sequence
  Synthetic
agugcaaaagucuaagugu

SEQ ID NO: 121415 - RNA, 20 nt, Artificial Sequence
  Synthetic
aagugcaaaagucuaagugu

SEQ ID NO: 121416 - RNA, 21 nt, Artificial Sequence
  Synthetic
aaagugcaaaagucuaagugu

SEQ ID NO: 121417 - RNA, 22 nt, Artificial Sequence
  Synthetic
uaaagugcaaaagucuaagugu

SEQ ID NO: 121418 - RNA, 23 nt, Artificial Sequence
  Synthetic
auaaagugcaaaagucuaagugu

SEQ ID NO: 121419 - RNA, 24 nt, Artificial Sequence
  Synthetic
aauaaagugcaaaagucuaagugu

SEQ ID NO: 121420 - RNA, 18 nt, Artificial Sequence
  Synthetic
agcacgugucuuaagugu

SEQ ID NO: 121421 - RNA, 19 nt, Artificial Sequence
  Synthetic
uagcacgugucuuaagugu

SEQ ID NO: 121422 - RNA, 20 nt, Artificial Sequence
  Synthetic
uuagcacgugucuuaagugu

SEQ ID NO: 121423 - RNA, 24 nt, Artificial Sequence
  Synthetic
uggguuagcacgugucuuaagugu

SEQ ID NO: 121424 - RNA, 19 nt, Artificial Sequence
  Synthetic
agaaaaauagauacagugu

SEQ ID NO: 121425 - RNA, 20 nt, Artificial Sequence
  Synthetic
aagaaaaauagauacagugu

SEQ ID NO: 121426 - RNA, 21 nt, Artificial Sequence
  Synthetic
aaagaaaaauagauacagugu

SEQ ID NO: 121427 - RNA, 22 nt, Artificial Sequence
  Synthetic
aaaagaaaaauagauacagugu

SEQ ID NO: 121428 - RNA, 24 nt, Artificial Sequence
  Synthetic
agaaaagaaaaauagauacagugu

SEQ ID NO: 121429 - RNA, 18 nt, Artificial Sequence
  Synthetic
accacagccccccagugu

SEQ ID NO: 121430 - RNA, 19 nt, Artificial Sequence
  Synthetic
caccacagccccccagugu

SEQ ID NO: 121431 - RNA, 20 nt, Artificial Sequence
  Synthetic
acaccacagccccccagugu

SEQ ID NO: 121432 - RNA, 21 nt, Artificial Sequence
  Synthetic
uacaccacagccccccagugu

SEQ ID NO: 121433 - RNA, 22 nt, Artificial Sequence
  Synthetic
uuacaccacagccccccagugu

SEQ ID NO: 121434 - RNA, 23 nt, Artificial Sequence
  Synthetic
cuuacaccacagccccccagugu

SEQ ID NO: 121435 - RNA, 24 nt, Artificial Sequence
  Synthetic
ccuuacaccacagccccccagugu

SEQ ID NO: 121436 - RNA, 18 nt, Artificial Sequence
  Synthetic
uaagauguuuuccagugu

SEQ ID NO: 121437 - RNA, 19 nt, Artificial Sequence
  Synthetic
auaagauguuuuccagugu

SEQ ID NO: 121438 - RNA, 20 nt, Artificial Sequence
  Synthetic
aauaagauguuuuccagugu

SEQ ID NO: 121439 - RNA, 21 nt, Artificial Sequence
  Synthetic
aaauaagauguuuuccagugu

SEQ ID NO: 121440 - RNA, 23 nt, Artificial Sequence
  Synthetic
ugaaauaagauguuuuccagugu

SEQ ID NO: 121441 - RNA, 24 nt, Artificial Sequence
  Synthetic
augaaauaagauguuuuccagugu

SEQ ID NO: 121442 - RNA, 18 nt, Artificial Sequence
  Synthetic
ugucccugaaaagagugu

SEQ ID NO: 121443 - RNA, 19 nt, Artificial Sequence
  Synthetic
cugucccugaaaagagugu

SEQ ID NO: 121444 - RNA, 20 nt, Artificial Sequence
  Synthetic
ccugucccugaaaagagugu

SEQ ID NO: 121445 - RNA, 21 nt, Artificial Sequence
  Synthetic
uccugucccugaaaagagugu

SEQ ID NO: 121446 - RNA, 22 nt, Artificial Sequence
  Synthetic
uuccugucccugaaaagagugu

SEQ ID NO: 121447 - RNA, 23 nt, Artificial Sequence
  Synthetic
uuuccugucccugaaaagagugu

SEQ ID NO: 121448 - RNA, 24 nt, Artificial Sequence
  Synthetic
uuuuccugucccugaaaagagugu

SEQ ID NO: 121449 - RNA, 19 nt, Artificial Sequence
  Synthetic
uggcccaguaguugagugu

SEQ ID NO: 121450 - RNA, 21 nt, Artificial Sequence
  Synthetic
aguggcccaguaguugagugu

SEQ ID NO: 121451 - RNA, 22 nt, Artificial Sequence
  Synthetic
aaguggcccaguaguugagugu

SEQ ID NO: 121452 - RNA, 23 nt, Artificial Sequence
  Synthetic
caaguggcccaguaguugagugu

SEQ ID NO: 121453 - RNA, 24 nt, Artificial Sequence
  Synthetic
ccaaguggcccaguaguugagugu

SEQ ID NO: 121454 - RNA, 18 nt, Artificial Sequence
  Synthetic
aguaguuaaaccaggugu

SEQ ID NO: 121455 - RNA, 19 nt, Artificial Sequence
  Synthetic
aaguaguuaaaccaggugu

SEQ ID NO: 121456 - RNA, 20 nt, Artificial Sequence
  Synthetic
uaaguaguuaaaccaggugu

SEQ ID NO: 121457 - RNA, 21 nt, Artificial Sequence
  Synthetic
uuaaguaguuaaaccaggugu

SEQ ID NO: 121458 - RNA, 22 nt, Artificial Sequence
  Synthetic
auuaaguaguuaaaccaggugu

SEQ ID NO: 121459 - RNA, 23 nt, Artificial Sequence
  Synthetic
cauuaaguaguuaaaccaggugu

SEQ ID NO: 121460 - RNA, 24 nt, Artificial Sequence
  Synthetic
ccauuaaguaguuaaaccaggugu

SEQ ID NO: 121461 - RNA, 18 nt, Artificial Sequence
  Synthetic
caugcuaugauucggugu

SEQ ID NO: 121462 - RNA, 19 nt, Artificial Sequence
  Synthetic
ucaugcuaugauucggugu

SEQ ID NO: 121463 - RNA, 20 nt, Artificial Sequence
  Synthetic
cucaugcuaugauucggugu

SEQ ID NO: 121464 - RNA, 23 nt, Artificial Sequence
  Synthetic
uggcucaugcuaugauucggugu

SEQ ID NO: 121465 - RNA, 24 nt, Artificial Sequence
  Synthetic
cuggcucaugcuaugauucggugu

SEQ ID NO: 121466 - RNA, 19 nt, Artificial Sequence
  Synthetic
aguaaaaaaaauauggugu

SEQ ID NO: 121467 - RNA, 20 nt, Artificial Sequence
  Synthetic
caguaaaaaaaauauggugu

SEQ ID NO: 121468 - RNA, 21 nt, Artificial Sequence
  Synthetic
acaguaaaaaaaauauggugu

SEQ ID NO: 121469 - RNA, 22 nt, Artificial Sequence
  Synthetic
aacaguaaaaaaaauauggugu

SEQ ID NO: 121470 - RNA, 24 nt, Artificial Sequence
  Synthetic
ugaacaguaaaaaaaauauggugu

SEQ ID NO: 121471 - RNA, 18 nt, Artificial Sequence
  Synthetic
agauggccauuuuggugu

SEQ ID NO: 121472 - RNA, 19 nt, Artificial Sequence
  Synthetic
uagauggccauuuuggugu

SEQ ID NO: 121473 - RNA, 20 nt, Artificial Sequence
  Synthetic
auagauggccauuuuggugu

SEQ ID NO: 121474 - RNA, 22 nt, Artificial Sequence
  Synthetic
ugauagauggccauuuuggugu

SEQ ID NO: 121475 - RNA, 23 nt, Artificial Sequence
  Synthetic
augauagauggccauuuuggugu

SEQ ID NO: 121476 - RNA, 24 nt, Artificial Sequence
  Synthetic
aaugauagauggccauuuuggugu

SEQ ID NO: 121477 - RNA, 18 nt, Artificial Sequence
  Synthetic
auccuuaaacaaaugugu

SEQ ID NO: 121478 - RNA, 19 nt, Artificial Sequence
  Synthetic
uauccuuaaacaaaugugu

SEQ ID NO: 121479 - RNA, 20 nt, Artificial Sequence
  Synthetic
uuauccuuaaacaaaugugu

SEQ ID NO: 121480 - RNA, 21 nt, Artificial Sequence
  Synthetic
uuuauccuuaaacaaaugugu

SEQ ID NO: 121481 - RNA, 23 nt, Artificial Sequence
  Synthetic
aguuuauccuuaaacaaaugugu

SEQ ID NO: 121482 - RNA, 24 nt, Artificial Sequence
  Synthetic
caguuuauccuuaaacaaaugugu

SEQ ID NO: 121483 - RNA, 18 nt, Artificial Sequence
  Synthetic
uuaugcucacaaaugugu

SEQ ID NO: 121484 - RNA, 19 nt, Artificial Sequence
  Synthetic
uuuaugcucacaaaugugu

SEQ ID NO: 121485 - RNA, 20 nt, Artificial Sequence
  Synthetic
cuuuaugcucacaaaugugu

SEQ ID NO: 121486 - RNA, 21 nt, Artificial Sequence
  Synthetic
acuuuaugcucacaaaugugu

SEQ ID NO: 121487 - RNA, 23 nt, Artificial Sequence
  Synthetic
cgacuuuaugcucacaaaugugu

SEQ ID NO: 121488 - RNA, 24 nt, Artificial Sequence
  Synthetic
ucgacuuuaugcucacaaaugugu

SEQ ID NO: 121489 - RNA, 19 nt, Artificial Sequence
  Synthetic
aguuuugcuccaaaugugu

SEQ ID NO: 121490 - RNA, 21 nt, Artificial Sequence
  Synthetic
ugaguuuugcuccaaaugugu

SEQ ID NO: 121491 - RNA, 23 nt, Artificial Sequence
  Synthetic
ugugaguuuugcuccaaaugugu

SEQ ID NO: 121492 - RNA, 24 nt, Artificial Sequence
  Synthetic
augugaguuuugcuccaaaugugu

SEQ ID NO: 121493 - RNA, 19 nt, Artificial Sequence
  Synthetic
ugcaugcaugcccaugugu

SEQ ID NO: 121494 - RNA, 20 nt, Artificial Sequence
  Synthetic
augcaugcaugcccaugugu

SEQ ID NO: 121495 - RNA, 21 nt, Artificial Sequence
  Synthetic
uaugcaugcaugcccaugugu

SEQ ID NO: 121496 - RNA, 23 nt, Artificial Sequence
  Synthetic
uguaugcaugcaugcccaugugu

SEQ ID NO: 121497 - RNA, 24 nt, Artificial Sequence
  Synthetic
cuguaugcaugcaugcccaugugu

SEQ ID NO: 121498 - RNA, 18 nt, Artificial Sequence
  Synthetic
cagagaggaugcaugugu

SEQ ID NO: 121499 - RNA, 19 nt, Artificial Sequence
  Synthetic
ccagagaggaugcaugugu

SEQ ID NO: 121500 - RNA, 20 nt, Artificial Sequence
  Synthetic
uccagagaggaugcaugugu

SEQ ID NO: 121501 - RNA, 21 nt, Artificial Sequence
  Synthetic
auccagagaggaugcaugugu

SEQ ID NO: 121502 - RNA, 22 nt, Artificial Sequence
  Synthetic
uauccagagaggaugcaugugu

SEQ ID NO: 121503 - RNA, 23 nt, Artificial Sequence
  Synthetic
auauccagagaggaugcaugugu

SEQ ID NO: 121504 - RNA, 24 nt, Artificial Sequence
  Synthetic
aauauccagagaggaugcaugugu

SEQ ID NO: 121505 - RNA, 21 nt, Artificial Sequence
  Synthetic
uauucuuuuauuuauaugugu

SEQ ID NO: 121506 - RNA, 22 nt, Artificial Sequence
  Synthetic
auauucuuuuauuuauaugugu

SEQ ID NO: 121507 - RNA, 23 nt, Artificial Sequence
  Synthetic
cauauucuuuuauuuauaugugu

SEQ ID NO: 121508 - RNA, 24 nt, Artificial Sequence
  Synthetic
acauauucuuuuauuuauaugugu

SEQ ID NO: 121509 - RNA, 18 nt, Artificial Sequence
  Synthetic
ucaggacuuaugcugugu

SEQ ID NO: 121510 - RNA, 19 nt, Artificial Sequence
  Synthetic
aucaggacuuaugcugugu

SEQ ID NO: 121511 - RNA, 20 nt, Artificial Sequence
  Synthetic
aaucaggacuuaugcugugu

SEQ ID NO: 121512 - RNA, 21 nt, Artificial Sequence
  Synthetic
uaaucaggacuuaugcugugu

SEQ ID NO: 121513 - RNA, 22 nt, Artificial Sequence
  Synthetic
auaaucaggacuuaugcugugu

SEQ ID NO: 121514 - RNA, 23 nt, Artificial Sequence
  Synthetic
aauaaucaggacuuaugcugugu

SEQ ID NO: 121515 - RNA, 18 nt, Artificial Sequence
  Synthetic
ucgagaccaggucugugu

SEQ ID NO: 121516 - RNA, 19 nt, Artificial Sequence
  Synthetic
cucgagaccaggucugugu

SEQ ID NO: 121517 - RNA, 20 nt, Artificial Sequence
  Synthetic
ccucgagaccaggucugugu

SEQ ID NO: 121518 - RNA, 21 nt, Artificial Sequence
  Synthetic
uccucgagaccaggucugugu

SEQ ID NO: 121519 - RNA, 22 nt, Artificial Sequence
  Synthetic
uuccucgagaccaggucugugu

SEQ ID NO: 121520 - RNA, 23 nt, Artificial Sequence
  Synthetic
auuccucgagaccaggucugugu

SEQ ID NO: 121521 - RNA, 24 nt, Artificial Sequence
  Synthetic
aauuccucgagaccaggucugugu

SEQ ID NO: 121522 - RNA, 18 nt, Artificial Sequence
  Synthetic
auacaagaauuucugugu

SEQ ID NO: 121523 - RNA, 19 nt, Artificial Sequence
  Synthetic
aauacaagaauuucugugu

SEQ ID NO: 121524 - RNA, 20 nt, Artificial Sequence
  Synthetic
aaauacaagaauuucugugu

SEQ ID NO: 121525 - RNA, 21 nt, Artificial Sequence
  Synthetic
caaauacaagaauuucugugu

SEQ ID NO: 121526 - RNA, 23 nt, Artificial Sequence
  Synthetic
agcaaauacaagaauuucugugu

SEQ ID NO: 121527 - RNA, 24 nt, Artificial Sequence
  Synthetic
uagcaaauacaagaauuucugugu

SEQ ID NO: 121528 - RNA, 18 nt, Artificial Sequence
  Synthetic
acugauuuuuuucugugu

SEQ ID NO: 121529 - RNA, 19 nt, Artificial Sequence
  Synthetic
aacugauuuuuuucugugu

SEQ ID NO: 121530 - RNA, 20 nt, Artificial Sequence
  Synthetic
caacugauuuuuuucugugu

SEQ ID NO: 121531 - RNA, 21 nt, Artificial Sequence
  Synthetic
ccaacugauuuuuuucugugu

SEQ ID NO: 121532 - RNA, 22 nt, Artificial Sequence
  Synthetic
uccaacugauuuuuuucugugu

SEQ ID NO: 121533 - RNA, 24 nt, Artificial Sequence
  Synthetic
aguccaacugauuuuuuucugugu

SEQ ID NO: 121534 - RNA, 18 nt, Artificial Sequence
  Synthetic
caaaaacauccagugugu

SEQ ID NO: 121535 - RNA, 19 nt, Artificial Sequence
  Synthetic
ucaaaaacauccagugugu

SEQ ID NO: 121536 - RNA, 21 nt, Artificial Sequence
  Synthetic
ugucaaaaacauccagugugu

SEQ ID NO: 121537 - RNA, 22 nt, Artificial Sequence
  Synthetic
cugucaaaaacauccagugugu

SEQ ID NO: 121538 - RNA, 23 nt, Artificial Sequence
  Synthetic
ucugucaaaaacauccagugugu

SEQ ID NO: 121539 - RNA, 24 nt, Artificial Sequence
  Synthetic
uucugucaaaaacauccagugugu

SEQ ID NO: 121540 - RNA, 21 nt, Artificial Sequence
  Synthetic
acugaaugcugaauggugugu

SEQ ID NO: 121541 - RNA, 22 nt, Artificial Sequence
  Synthetic
cacugaaugcugaauggugugu

SEQ ID NO: 121542 - RNA, 24 nt, Artificial Sequence
  Synthetic
ugcacugaaugcugaauggugugu

SEQ ID NO: 121543 - RNA, 21 nt, Artificial Sequence
  Synthetic
cuaaaaguaauauaugugugu

SEQ ID NO: 121544 - RNA, 22 nt, Artificial Sequence
  Synthetic
ucuaaaaguaauauaugugugu

SEQ ID NO: 121545 - RNA, 23 nt, Artificial Sequence
  Synthetic
uucuaaaaguaauauaugugugu

SEQ ID NO: 121546 - RNA, 24 nt, Artificial Sequence
  Synthetic
uuucuaaaaguaauauaugugugu

SEQ ID NO: 121547 - RNA, 19 nt, Artificial Sequence
  Synthetic
uguuguuuccugcuugugu

SEQ ID NO: 121548 - RNA, 20 nt, Artificial Sequence
  Synthetic
cuguuguuuccugcuugugu

SEQ ID NO: 121549 - RNA, 21 nt, Artificial Sequence
  Synthetic
acuguuguuuccugcuugugu

SEQ ID NO: 121550 - RNA, 23 nt, Artificial Sequence
  Synthetic
agacuguuguuuccugcuugugu

SEQ ID NO: 121551 - RNA, 24 nt, Artificial Sequence
  Synthetic
aagacuguuguuuccugcuugugu

SEQ ID NO: 121552 - RNA, 18 nt, Artificial Sequence
  Synthetic
aauuaauucuuaaauugu

SEQ ID NO: 121553 - RNA, 20 nt, Artificial Sequence
  Synthetic
ugaauuaauucuuaaauugu

SEQ ID NO: 121554 - RNA, 21 nt, Artificial Sequence
  Synthetic
uugaauuaauucuuaaauugu

SEQ ID NO: 121555 - RNA, 23 nt, Artificial Sequence
  Synthetic
aguugaauuaauucuuaaauugu

SEQ ID NO: 121556 - RNA, 24 nt, Artificial Sequence
  Synthetic
aaguugaauuaauucuuaaauugu

SEQ ID NO: 121557 - RNA, 18 nt, Artificial Sequence
  Synthetic
agauaaugaggcaauugu

SEQ ID NO: 121558 - RNA, 20 nt, Artificial Sequence
  Synthetic
agagauaaugaggcaauugu

SEQ ID NO: 121559 - RNA, 22 nt, Artificial Sequence
  Synthetic
agagagauaaugaggcaauugu

SEQ ID NO: 121560 - RNA, 23 nt, Artificial Sequence
  Synthetic
cagagagauaaugaggcaauugu

SEQ ID NO: 121561 - RNA, 24 nt, Artificial Sequence
  Synthetic
ucagagagauaaugaggcaauugu

SEQ ID NO: 121562 - RNA, 20 nt, Artificial Sequence
  Synthetic
aggaacaggaagucaauugu

SEQ ID NO: 121563 - RNA, 21 nt, Artificial Sequence
  Synthetic
aaggaacaggaagucaauugu

SEQ ID NO: 121564 - RNA, 24 nt, Artificial Sequence
  Synthetic
uggaaggaacaggaagucaauugu

SEQ ID NO: 121565 - RNA, 21 nt, Artificial Sequence
  Synthetic
ccaaaauaaauacauaauugu

SEQ ID NO: 121566 - RNA, 22 nt, Artificial Sequence
  Synthetic
cccaaaauaaauacauaauugu

SEQ ID NO: 121567 - RNA, 23 nt, Artificial Sequence
  Synthetic
ucccaaaauaaauacauaauugu

SEQ ID NO: 121568 - RNA, 24 nt, Artificial Sequence
  Synthetic
cucccaaaauaaauacauaauugu

SEQ ID NO: 121569 - RNA, 18 nt, Artificial Sequence
  Synthetic
uauauaaugacuaauugu

SEQ ID NO: 121570 - RNA, 20 nt, Artificial Sequence
  Synthetic
uguauauaaugacuaauugu

SEQ ID NO: 121571 - RNA, 21 nt, Artificial Sequence
  Synthetic
cuguauauaaugacuaauugu

SEQ ID NO: 121572 - RNA, 22 nt, Artificial Sequence
  Synthetic
ccuguauauaaugacuaauugu

SEQ ID NO: 121573 - RNA, 24 nt, Artificial Sequence
  Synthetic
agccuguauauaaugacuaauugu

SEQ ID NO: 121574 - RNA, 21 nt, Artificial Sequence
  Synthetic
aggggguacaaucugcauugu

SEQ ID NO: 121575 - RNA, 22 nt, Artificial Sequence
  Synthetic
aaggggguacaaucugcauugu

SEQ ID NO: 121576 - RNA, 23 nt, Artificial Sequence
  Synthetic
uaaggggguacaaucugcauugu

SEQ ID NO: 121577 - RNA, 24 nt, Artificial Sequence
  Synthetic
uuaaggggguacaaucugcauugu

SEQ ID NO: 121578 - RNA, 18 nt, Artificial Sequence
  Synthetic
aaagaaaauacucauugu

SEQ ID NO: 121579 - RNA, 19 nt, Artificial Sequence
  Synthetic
uaaagaaaauacucauugu

SEQ ID NO: 121580 - RNA, 21 nt, Artificial Sequence
  Synthetic
cguaaagaaaauacucauugu

SEQ ID NO: 121581 - RNA, 22 nt, Artificial Sequence
  Synthetic
acguaaagaaaauacucauugu

SEQ ID NO: 121582 - RNA, 23 nt, Artificial Sequence
  Synthetic
cacguaaagaaaauacucauugu

SEQ ID NO: 121583 - RNA, 24 nt, Artificial Sequence
  Synthetic
acacguaaagaaaauacucauugu

SEQ ID NO: 121584 - RNA, 22 nt, Artificial Sequence
  Synthetic
uguucuuuuuuuucuucauugu

SEQ ID NO: 121585 - RNA, 23 nt, Artificial Sequence
  Synthetic
uuguucuuuuuuuucuucauugu

SEQ ID NO: 121586 - RNA, 24 nt, Artificial Sequence
  Synthetic
cuuguucuuuuuuuucuucauugu

SEQ ID NO: 121587 - RNA, 20 nt, Artificial Sequence
  Synthetic
cggauuagcaucauuauugu

SEQ ID NO: 121588 - RNA, 21 nt, Artificial Sequence
  Synthetic
acggauuagcaucauuauugu

SEQ ID NO: 121589 - RNA, 22 nt, Artificial Sequence
  Synthetic
aacggauuagcaucauuauugu

SEQ ID NO: 121590 - RNA, 24 nt, Artificial Sequence
  Synthetic
ugaacggauuagcaucauuauugu

SEQ ID NO: 121591 - RNA, 18 nt, Artificial Sequence
  Synthetic
uaccgaaaacagacuugu

SEQ ID NO: 121592 - RNA, 19 nt, Artificial Sequence
  Synthetic
uuaccgaaaacagacuugu

SEQ ID NO: 121593 - RNA, 20 nt, Artificial Sequence
  Synthetic
auuaccgaaaacagacuugu

SEQ ID NO: 121594 - RNA, 22 nt, Artificial Sequence
  Synthetic
ugauuaccgaaaacagacuugu

SEQ ID NO: 121595 - RNA, 24 nt, Artificial Sequence
  Synthetic
agugauuaccgaaaacagacuugu

SEQ ID NO: 121596 - RNA, 18 nt, Artificial Sequence
  Synthetic
aauaucugguugacuugu

SEQ ID NO: 121597 - RNA, 20 nt, Artificial Sequence
  Synthetic
ugaauaucugguugacuugu

SEQ ID NO: 121598 - RNA, 22 nt, Artificial Sequence
  Synthetic
ugugaauaucugguugacuugu

SEQ ID NO: 121599 - RNA, 23 nt, Artificial Sequence
  Synthetic
cugugaauaucugguugacuugu

SEQ ID NO: 121600 - RNA, 24 nt, Artificial Sequence
  Synthetic
ucugugaauaucugguugacuugu

SEQ ID NO: 121601 - RNA, 18 nt, Artificial Sequence
  Synthetic
aauuucuucccuccuugu

SEQ ID NO: 121602 - RNA, 19 nt, Artificial Sequence
  Synthetic
caauuucuucccuccuugu

SEQ ID NO: 121603 - RNA, 20 nt, Artificial Sequence
  Synthetic
acaauuucuucccuccuugu

SEQ ID NO: 121604 - RNA, 21 nt, Artificial Sequence
  Synthetic
cacaauuucuucccuccuugu

SEQ ID NO: 121605 - RNA, 23 nt, Artificial Sequence
  Synthetic
agcacaauuucuucccuccuugu

SEQ ID NO: 121606 - RNA, 24 nt, Artificial Sequence
  Synthetic
aagcacaauuucuucccuccuugu

SEQ ID NO: 121607 - RNA, 18 nt, Artificial Sequence
  Synthetic
agcucugugcaugcuugu

SEQ ID NO: 121608 - RNA, 19 nt, Artificial Sequence
  Synthetic
aagcucugugcaugcuugu

SEQ ID NO: 121609 - RNA, 20 nt, Artificial Sequence
  Synthetic
aaagcucugugcaugcuugu

SEQ ID NO: 121610 - RNA, 21 nt, Artificial Sequence
  Synthetic
aaaagcucugugcaugcuugu

SEQ ID NO: 121611 - RNA, 22 nt, Artificial Sequence
  Synthetic
uaaaagcucugugcaugcuugu

SEQ ID NO: 121612 - RNA, 24 nt, Artificial Sequence
  Synthetic
aguaaaagcucugugcaugcuugu

SEQ ID NO: 121613 - RNA, 18 nt, Artificial Sequence
  Synthetic
uagauaaacauaucuugu

SEQ ID NO: 121614 - RNA, 19 nt, Artificial Sequence
  Synthetic
uuagauaaacauaucuugu

SEQ ID NO: 121615 - RNA, 20 nt, Artificial Sequence
  Synthetic
uuuagauaaacauaucuugu

SEQ ID NO: 121616 - RNA, 22 nt, Artificial Sequence
  Synthetic
uguuuagauaaacauaucuugu

SEQ ID NO: 121617 - RNA, 23 nt, Artificial Sequence
  Synthetic
uuguuuagauaaacauaucuugu

SEQ ID NO: 121618 - RNA, 24 nt, Artificial Sequence
  Synthetic
auuguuuagauaaacauaucuugu

SEQ ID NO: 121619 - RNA, 18 nt, Artificial Sequence
  Synthetic
cuaaaguuugugucuugu

SEQ ID NO: 121620 - RNA, 19 nt, Artificial Sequence
  Synthetic
ccuaaaguuugugucuugu

SEQ ID NO: 121621 - RNA, 20 nt, Artificial Sequence
  Synthetic
cccuaaaguuugugucuugu

SEQ ID NO: 121622 - RNA, 21 nt, Artificial Sequence
  Synthetic
ucccuaaaguuugugucuugu

SEQ ID NO: 121623 - RNA, 22 nt, Artificial Sequence
  Synthetic
uucccuaaaguuugugucuugu

SEQ ID NO: 121624 - RNA, 23 nt, Artificial Sequence
  Synthetic
uuucccuaaaguuugugucuugu

SEQ ID NO: 121625 - RNA, 24 nt, Artificial Sequence
  Synthetic
uuuucccuaaaguuugugucuugu

SEQ ID NO: 121626 - RNA, 19 nt, Artificial Sequence
  Synthetic
aguaacuguacuuucuugu

SEQ ID NO: 121627 - RNA, 20 nt, Artificial Sequence
  Synthetic
aaguaacuguacuuucuugu

SEQ ID NO: 121628 - RNA, 21 nt, Artificial Sequence
  Synthetic
caaguaacuguacuuucuugu

SEQ ID NO: 121629 - RNA, 22 nt, Artificial Sequence
  Synthetic
ccaaguaacuguacuuucuugu

SEQ ID NO: 121630 - RNA, 22 nt, Artificial Sequence
  Synthetic
uggaaaacaccacagaaguugu

SEQ ID NO: 121631 - RNA, 23 nt, Artificial Sequence
  Synthetic
auggaaaacaccacagaaguugu

SEQ ID NO: 121632 - RNA, 18 nt, Artificial Sequence
  Synthetic
caauuacucugcaguugu

SEQ ID NO: 121633 - RNA, 19 nt, Artificial Sequence
  Synthetic
acaauuacucugcaguugu

SEQ ID NO: 121634 - RNA, 21 nt, Artificial Sequence
  Synthetic
agacaauuacucugcaguugu

SEQ ID NO: 121635 - RNA, 22 nt, Artificial Sequence
  Synthetic
uagacaauuacucugcaguugu

SEQ ID NO: 121636 - RNA, 23 nt, Artificial Sequence
  Synthetic
auagacaauuacucugcaguugu

SEQ ID NO: 121637 - RNA, 24 nt, Artificial Sequence
  Synthetic
uauagacaauuacucugcaguugu

SEQ ID NO: 121638 - RNA, 18 nt, Artificial Sequence
  Synthetic
ccaauucuguucaguugu

SEQ ID NO: 121639 - RNA, 19 nt, Artificial Sequence
  Synthetic
cccaauucuguucaguugu

SEQ ID NO: 121640 - RNA, 22 nt, Artificial Sequence
  Synthetic
aggcccaauucuguucaguugu

SEQ ID NO: 121641 - RNA, 23 nt, Artificial Sequence
  Synthetic
aaggcccaauucuguucaguugu

SEQ ID NO: 121642 - RNA, 24 nt, Artificial Sequence
  Synthetic
caaggcccaauucuguucaguugu

SEQ ID NO: 121643 - RNA, 18 nt, Artificial Sequence
  Synthetic
ugacuagguuauaguugu

SEQ ID NO: 121644 - RNA, 19 nt, Artificial Sequence
  Synthetic
uugacuagguuauaguugu

SEQ ID NO: 121645 - RNA, 20 nt, Artificial Sequence
  Synthetic
cuugacuagguuauaguugu

SEQ ID NO: 121646 - RNA, 21 nt, Artificial Sequence
  Synthetic
ccuugacuagguuauaguugu

SEQ ID NO: 121647 - RNA, 22 nt, Artificial Sequence
  Synthetic
accuugacuagguuauaguugu

SEQ ID NO: 121648 - RNA, 23 nt, Artificial Sequence
  Synthetic
aaccuugacuagguuauaguugu

SEQ ID NO: 121649 - RNA, 18 nt, Artificial Sequence
  Synthetic
aguuuuguacuggguugu

SEQ ID NO: 121650 - RNA, 19 nt, Artificial Sequence
  Synthetic
caguuuuguacuggguugu

SEQ ID NO: 121651 - RNA, 20 nt, Artificial Sequence
  Synthetic
ccaguuuuguacuggguugu

SEQ ID NO: 121652 - RNA, 23 nt, Artificial Sequence
  Synthetic
cggccaguuuuguacuggguugu

SEQ ID NO: 121653 - RNA, 24 nt, Artificial Sequence
  Synthetic
ucggccaguuuuguacuggguugu

SEQ ID NO: 121654 - RNA, 18 nt, Artificial Sequence
  Synthetic
ucaucaaaaaaauguugu

SEQ ID NO: 121655 - RNA, 19 nt, Artificial Sequence
  Synthetic
aucaucaaaaaaauguugu

SEQ ID NO: 121656 - RNA, 20 nt, Artificial Sequence
  Synthetic
aaucaucaaaaaaauguugu

SEQ ID NO: 121657 - RNA, 22 nt, Artificial Sequence
  Synthetic
ugaaucaucaaaaaaauguugu

SEQ ID NO: 121658 - RNA, 23 nt, Artificial Sequence
  Synthetic
cugaaucaucaaaaaaauguugu

SEQ ID NO: 121659 - RNA, 24 nt, Artificial Sequence
  Synthetic
ucugaaucaucaaaaaaauguugu

SEQ ID NO: 121660 - RNA, 18 nt, Artificial Sequence
  Synthetic
aacauuuuagaguguugu

SEQ ID NO: 121661 - RNA, 19 nt, Artificial Sequence
  Synthetic
aaacauuuuagaguguugu

SEQ ID NO: 121662 - RNA, 20 nt, Artificial Sequence
  Synthetic
uaaacauuuuagaguguugu

SEQ ID NO: 121663 - RNA, 21 nt, Artificial Sequence
  Synthetic
auaaacauuuuagaguguugu

SEQ ID NO: 121664 - RNA, 22 nt, Artificial Sequence
  Synthetic
aauaaacauuuuagaguguugu

SEQ ID NO: 121665 - RNA, 23 nt, Artificial Sequence
  Synthetic
caauaaacauuuuagaguguugu

SEQ ID NO: 121666 - RNA, 24 nt, Artificial Sequence
  Synthetic
acaauaaacauuuuagaguguugu

SEQ ID NO: 121667 - RNA, 18 nt, Artificial Sequence
  Synthetic
cuggcacucucuuguugu

SEQ ID NO: 121668 - RNA, 19 nt, Artificial Sequence
  Synthetic
acuggcacucucuuguugu

SEQ ID NO: 121669 - RNA, 20 nt, Artificial Sequence
  Synthetic
cacuggcacucucuuguugu

SEQ ID NO: 121670 - RNA, 21 nt, Artificial Sequence
  Synthetic
ucacuggcacucucuuguugu

SEQ ID NO: 121671 - RNA, 22 nt, Artificial Sequence
  Synthetic
cucacuggcacucucuuguugu

SEQ ID NO: 121672 - RNA, 23 nt, Artificial Sequence
  Synthetic
acucacuggcacucucuuguugu

SEQ ID NO: 121673 - RNA, 24 nt, Artificial Sequence
  Synthetic
cacucacuggcacucucuuguugu

SEQ ID NO: 121674 - RNA, 18 nt, Artificial Sequence
  Synthetic
aguaugauugacauuugu

SEQ ID NO: 121675 - RNA, 20 nt, Artificial Sequence
  Synthetic
agaguaugauugacauuugu

SEQ ID NO: 121676 - RNA, 21 nt, Artificial Sequence
  Synthetic
aagaguaugauugacauuugu

SEQ ID NO: 121677 - RNA, 22 nt, Artificial Sequence
  Synthetic
aaagaguaugauugacauuugu

SEQ ID NO: 121678 - RNA, 23 nt, Artificial Sequence
  Synthetic
caaagaguaugauugacauuugu

SEQ ID NO: 121679 - RNA, 18 nt, Artificial Sequence
  Synthetic
caaauuugaugcauuugu

SEQ ID NO: 121680 - RNA, 19 nt, Artificial Sequence
  Synthetic
ucaaauuugaugcauuugu

SEQ ID NO: 121681 - RNA, 20 nt, Artificial Sequence
  Synthetic
aucaaauuugaugcauuugu

SEQ ID NO: 121682 - RNA, 21 nt, Artificial Sequence
  Synthetic
caucaaauuugaugcauuugu

SEQ ID NO: 121683 - RNA, 22 nt, Artificial Sequence
  Synthetic
acaucaaauuugaugcauuugu

SEQ ID NO: 121684 - RNA, 23 nt, Artificial Sequence
  Synthetic
cacaucaaauuugaugcauuugu

SEQ ID NO: 121685 - RNA, 18 nt, Artificial Sequence
  Synthetic
acaguucagcucauuugu

SEQ ID NO: 121686 - RNA, 19 nt, Artificial Sequence
  Synthetic
uacaguucagcucauuugu

SEQ ID NO: 121687 - RNA, 20 nt, Artificial Sequence
  Synthetic
cuacaguucagcucauuugu

SEQ ID NO: 121688 - RNA, 21 nt, Artificial Sequence
  Synthetic
ucuacaguucagcucauuugu

SEQ ID NO: 121689 - RNA, 22 nt, Artificial Sequence
  Synthetic
uucuacaguucagcucauuugu

SEQ ID NO: 121690 - RNA, 23 nt, Artificial Sequence
  Synthetic
uuucuacaguucagcucauuugu

SEQ ID NO: 121691 - RNA, 24 nt, Artificial Sequence
  Synthetic
auuucuacaguucagcucauuugu

SEQ ID NO: 121692 - RNA, 22 nt, Artificial Sequence
  Synthetic
uguucuuuucugaaagauuugu

SEQ ID NO: 121693 - RNA, 23 nt, Artificial Sequence
  Synthetic
cuguucuuuucugaaagauuugu

SEQ ID NO: 121694 - RNA, 24 nt, Artificial Sequence
  Synthetic
ucuguucuuuucugaaagauuugu

SEQ ID NO: 121695 - RNA, 19 nt, Artificial Sequence
  Synthetic
agauuucuaaacuauuugu

SEQ ID NO: 121696 - RNA, 20 nt, Artificial Sequence
  Synthetic
aagauuucuaaacuauuugu

SEQ ID NO: 121697 - RNA, 21 nt, Artificial Sequence
  Synthetic
aaagauuucuaaacuauuugu

SEQ ID NO: 121698 - RNA, 22 nt, Artificial Sequence
  Synthetic
caaagauuucuaaacuauuugu

SEQ ID NO: 121699 - RNA, 23 nt, Artificial Sequence
  Synthetic
acaaagauuucuaaacuauuugu

SEQ ID NO: 121700 - RNA, 18 nt, Artificial Sequence
  Synthetic
uuuucaauaguuauuugu

SEQ ID NO: 121701 - RNA, 19 nt, Artificial Sequence
  Synthetic
cuuuucaauaguuauuugu

SEQ ID NO: 121702 - RNA, 21 nt, Artificial Sequence
  Synthetic
ugcuuuucaauaguuauuugu

SEQ ID NO: 121703 - RNA, 22 nt, Artificial Sequence
  Synthetic
augcuuuucaauaguuauuugu

SEQ ID NO: 121704 - RNA, 23 nt, Artificial Sequence
  Synthetic
uaugcuuuucaauaguuauuugu

SEQ ID NO: 121705 - RNA, 24 nt, Artificial Sequence
  Synthetic
uuaugcuuuucaauaguuauuugu

SEQ ID NO: 121706 - RNA, 19 nt, Artificial Sequence
  Synthetic
uguaguuugauuuauuugu

SEQ ID NO: 121707 - RNA, 20 nt, Artificial Sequence
  Synthetic
cuguaguuugauuuauuugu

SEQ ID NO: 121708 - RNA, 22 nt, Artificial Sequence
  Synthetic
ugcuguaguuugauuuauuugu

SEQ ID NO: 121709 - RNA, 23 nt, Artificial Sequence
  Synthetic
uugcuguaguuugauuuauuugu

SEQ ID NO: 121710 - RNA, 24 nt, Artificial Sequence
  Synthetic
uuugcuguaguuugauuuauuugu

SEQ ID NO: 121711 - RNA, 18 nt, Artificial Sequence
  Synthetic
cuuauuagcucacuuugu

SEQ ID NO: 121712 - RNA, 19 nt, Artificial Sequence
  Synthetic
ucuuauuagcucacuuugu

SEQ ID NO: 121713 - RNA, 21 nt, Artificial Sequence
  Synthetic
ugucuuauuagcucacuuugu

SEQ ID NO: 121714 - RNA, 22 nt, Artificial Sequence
  Synthetic
uugucuuauuagcucacuuugu

SEQ ID NO: 121715 - RNA, 23 nt, Artificial Sequence
  Synthetic
uuugucuuauuagcucacuuugu

SEQ ID NO: 121716 - RNA, 24 nt, Artificial Sequence
  Synthetic
auuugucuuauuagcucacuuugu

SEQ ID NO: 121717 - RNA, 18 nt, Artificial Sequence
  Synthetic
uuuuggaaacggcuuugu

SEQ ID NO: 121718 - RNA, 19 nt, Artificial Sequence
  Synthetic
cuuuuggaaacggcuuugu

SEQ ID NO: 121719 - RNA, 20 nt, Artificial Sequence
  Synthetic
ucuuuuggaaacggcuuugu

SEQ ID NO: 121720 - RNA, 21 nt, Artificial Sequence
  Synthetic
uucuuuuggaaacggcuuugu

SEQ ID NO: 121721 - RNA, 22 nt, Artificial Sequence
  Synthetic
uuucuuuuggaaacggcuuugu

SEQ ID NO: 121722 - RNA, 23 nt, Artificial Sequence
  Synthetic
auuucuuuuggaaacggcuuugu

SEQ ID NO: 121723 - RNA, 24 nt, Artificial Sequence
  Synthetic
uauuucuuuuggaaacggcuuugu

SEQ ID NO: 121724 - RNA, 21 nt, Artificial Sequence
  Synthetic
agaaauuuaauuuaaguuugu

SEQ ID NO: 121725 - RNA, 24 nt, Artificial Sequence
  Synthetic
uggagaaauuuaauuuaaguuugu

SEQ ID NO: 121726 - RNA, 18 nt, Artificial Sequence
  Synthetic
uugagcugaguaguuugu

SEQ ID NO: 121727 - RNA, 19 nt, Artificial Sequence
  Synthetic
auugagcugaguaguuugu

SEQ ID NO: 121728 - RNA, 21 nt, Artificial Sequence
  Synthetic
agauugagcugaguaguuugu

SEQ ID NO: 121729 - RNA, 22 nt, Artificial Sequence
  Synthetic
uagauugagcugaguaguuugu

SEQ ID NO: 121730 - RNA, 23 nt, Artificial Sequence
  Synthetic
uuagauugagcugaguaguuugu

SEQ ID NO: 121731 - RNA, 24 nt, Artificial Sequence
  Synthetic
auuagauugagcugaguaguuugu

SEQ ID NO: 121732 - RNA, 22 nt, Artificial Sequence
  Synthetic
agaaauauaaauuaauguuugu

SEQ ID NO: 121733 - RNA, 23 nt, Artificial Sequence
  Synthetic
uagaaauauaaauuaauguuugu

SEQ ID NO: 121734 - RNA, 24 nt, Artificial Sequence
  Synthetic
auagaaauauaaauuaauguuugu

SEQ ID NO: 121735 - RNA, 18 nt, Artificial Sequence
  Synthetic
cugaucaauacauuuugu

SEQ ID NO: 121736 - RNA, 19 nt, Artificial Sequence
  Synthetic
acugaucaauacauuuugu

SEQ ID NO: 121737 - RNA, 20 nt, Artificial Sequence
  Synthetic
cacugaucaauacauuuugu

SEQ ID NO: 121738 - RNA, 21 nt, Artificial Sequence
  Synthetic
acacugaucaauacauuuugu

SEQ ID NO: 121739 - RNA, 23 nt, Artificial Sequence
  Synthetic
ugacacugaucaauacauuuugu

SEQ ID NO: 121740 - RNA, 24 nt, Artificial Sequence
  Synthetic
augacacugaucaauacauuuugu

SEQ ID NO: 121741 - RNA, 18 nt, Artificial Sequence
  Synthetic
uuaacuaaaucauuuugu

SEQ ID NO: 121742 - RNA, 19 nt, Artificial Sequence
  Synthetic
auuaacuaaaucauuuugu

SEQ ID NO: 121743 - RNA, 20 nt, Artificial Sequence
  Synthetic
aauuaacuaaaucauuuugu

SEQ ID NO: 121744 - RNA, 21 nt, Artificial Sequence
  Synthetic
aaauuaacuaaaucauuuugu

SEQ ID NO: 121745 - RNA, 22 nt, Artificial Sequence
  Synthetic
uaaauuaacuaaaucauuuugu

SEQ ID NO: 121746 - RNA, 23 nt, Artificial Sequence
  Synthetic
uuaaauuaacuaaaucauuuugu

SEQ ID NO: 121747 - RNA, 24 nt, Artificial Sequence
  Synthetic
uuuaaauuaacuaaaucauuuugu

SEQ ID NO: 121748 - RNA, 18 nt, Artificial Sequence
  Synthetic
uuccuucagauauuuugu

SEQ ID NO: 121749 - RNA, 19 nt, Artificial Sequence
  Synthetic
uuuccuucagauauuuugu

SEQ ID NO: 121750 - RNA, 20 nt, Artificial Sequence
  Synthetic
uuuuccuucagauauuuugu

SEQ ID NO: 121751 - RNA, 21 nt, Artificial Sequence
  Synthetic
auuuuccuucagauauuuugu

SEQ ID NO: 121752 - RNA, 22 nt, Artificial Sequence
  Synthetic
uauuuuccuucagauauuuugu

SEQ ID NO: 121753 - RNA, 23 nt, Artificial Sequence
  Synthetic
uuauuuuccuucagauauuuugu

SEQ ID NO: 121754 - RNA, 24 nt, Artificial Sequence
  Synthetic
uuuauuuuccuucagauauuuugu

SEQ ID NO: 121755 - RNA, 18 nt, Artificial Sequence
  Synthetic
ugcugacucuccuuuugu

SEQ ID NO: 121756 - RNA, 19 nt, Artificial Sequence
  Synthetic
uugcugacucuccuuuugu

SEQ ID NO: 121757 - RNA, 20 nt, Artificial Sequence
  Synthetic
uuugcugacucuccuuuugu

SEQ ID NO: 121758 - RNA, 21 nt, Artificial Sequence
  Synthetic
auuugcugacucuccuuuugu

SEQ ID NO: 121759 - RNA, 18 nt, Artificial Sequence
  Synthetic
aucagacuacaguuuugu

SEQ ID NO: 121760 - RNA, 19 nt, Artificial Sequence
  Synthetic
caucagacuacaguuuugu

SEQ ID NO: 121761 - RNA, 20 nt, Artificial Sequence
  Synthetic
acaucagacuacaguuuugu

SEQ ID NO: 121762 - RNA, 21 nt, Artificial Sequence
  Synthetic
aacaucagacuacaguuuugu

SEQ ID NO: 121763 - RNA, 22 nt, Artificial Sequence
  Synthetic
caacaucagacuacaguuuugu

SEQ ID NO: 121764 - RNA, 24 nt, Artificial Sequence
  Synthetic
ugcaacaucagacuacaguuuugu

SEQ ID NO: 121765 - RNA, 18 nt, Artificial Sequence
  Synthetic
auacugcccagguuuugu

SEQ ID NO: 121766 - RNA, 19 nt, Artificial Sequence
  Synthetic
aauacugcccagguuuugu

SEQ ID NO: 121767 - RNA, 21 nt, Artificial Sequence
  Synthetic
ugaauacugcccagguuuugu

SEQ ID NO: 121768 - RNA, 22 nt, Artificial Sequence
  Synthetic
cugaauacugcccagguuuugu

SEQ ID NO: 121769 - RNA, 23 nt, Artificial Sequence
  Synthetic
acugaauacugcccagguuuugu

SEQ ID NO: 121770 - RNA, 24 nt, Artificial Sequence
  Synthetic
cacugaauacugcccagguuuugu

SEQ ID NO: 121771 - RNA, 18 nt, Artificial Sequence
  Synthetic
cuuucugccugguuuugu

SEQ ID NO: 121772 - RNA, 19 nt, Artificial Sequence
  Synthetic
ccuuucugccugguuuugu

SEQ ID NO: 121773 - RNA, 20 nt, Artificial Sequence
  Synthetic
accuuucugccugguuuugu

SEQ ID NO: 121774 - RNA, 21 nt, Artificial Sequence
  Synthetic
aaccuuucugccugguuuugu

SEQ ID NO: 121775 - RNA, 22 nt, Artificial Sequence
  Synthetic
aaaccuuucugccugguuuugu

SEQ ID NO: 121776 - RNA, 23 nt, Artificial Sequence
  Synthetic
aaaaccuuucugccugguuuugu

SEQ ID NO: 121777 - RNA, 24 nt, Artificial Sequence
  Synthetic
aaaaaccuuucugccugguuuugu

SEQ ID NO: 121778 - RNA, 18 nt, Artificial Sequence
  Synthetic
aaguacuacauguuuugu

SEQ ID NO: 121779 - RNA, 19 nt, Artificial Sequence
  Synthetic
uaaguacuacauguuuugu

SEQ ID NO: 121780 - RNA, 20 nt, Artificial Sequence
  Synthetic
uuaaguacuacauguuuugu

SEQ ID NO: 121781 - RNA, 21 nt, Artificial Sequence
  Synthetic
uuuaaguacuacauguuuugu

SEQ ID NO: 121782 - RNA, 22 nt, Artificial Sequence
  Synthetic
cuuuaaguacuacauguuuugu

SEQ ID NO: 121783 - RNA, 24 nt, Artificial Sequence
  Synthetic
agcuuuaaguacuacauguuuugu

SEQ ID NO: 121784 - RNA, 20 nt, Artificial Sequence
  Synthetic
aggauauaaaauauuuuugu

SEQ ID NO: 121785 - RNA, 21 nt, Artificial Sequence
  Synthetic
aaggauauaaaauauuuuugu

SEQ ID NO: 121786 - RNA, 22 nt, Artificial Sequence
  Synthetic
uaaggauauaaaauauuuuugu

SEQ ID NO: 121787 - RNA, 23 nt, Artificial Sequence
  Synthetic
auaaggauauaaaauauuuuugu

SEQ ID NO: 121788 - RNA, 24 nt, Artificial Sequence
  Synthetic
aauaaggauauaaaauauuuuugu

SEQ ID NO: 121789 - RNA, 18 nt, Artificial Sequence
  Synthetic
ugcagcauuucuuuuugu

SEQ ID NO: 121790 - RNA, 19 nt, Artificial Sequence
  Synthetic
cugcagcauuucuuuuugu

SEQ ID NO: 121791 - RNA, 20 nt, Artificial Sequence
  Synthetic
acugcagcauuucuuuuugu

SEQ ID NO: 121792 - RNA, 22 nt, Artificial Sequence
  Synthetic
agacugcagcauuucuuuuugu

SEQ ID NO: 121793 - RNA, 23 nt, Artificial Sequence
  Synthetic
uagacugcagcauuucuuuuugu

SEQ ID NO: 121794 - RNA, 24 nt, Artificial Sequence
  Synthetic
cuagacugcagcauuucuuuuugu

SEQ ID NO: 121795 - RNA, 18 nt, Artificial Sequence
  Synthetic
cuuugcaauuguuuuugu

SEQ ID NO: 121796 - RNA, 19 nt, Artificial Sequence
  Synthetic
ucuuugcaauuguuuuugu

SEQ ID NO: 121797 - RNA, 21 nt, Artificial Sequence
  Synthetic
agucuuugcaauuguuuuugu

SEQ ID NO: 121798 - RNA, 22 nt, Artificial Sequence
  Synthetic
uagucuuugcaauuguuuuugu

SEQ ID NO: 121799 - RNA, 23 nt, Artificial Sequence
  Synthetic
auagucuuugcaauuguuuuugu

SEQ ID NO: 121800 - RNA, 24 nt, Artificial Sequence
  Synthetic
aauagucuuugcaauuguuuuugu

SEQ ID NO: 121801 - RNA, 22 nt, Artificial Sequence
  Synthetic
uguuuuuguuuuagaaaaaauu

SEQ ID NO: 121802 - RNA, 23 nt, Artificial Sequence
  Synthetic
auguuuuuguuuuagaaaaaauu

SEQ ID NO: 121803 - RNA, 24 nt, Artificial Sequence
  Synthetic
cauguuuuuguuuuagaaaaaauu

SEQ ID NO: 121804 - RNA, 21 nt, Artificial Sequence
  Synthetic
uggguacaacaggacaaaauu

SEQ ID NO: 121805 - RNA, 23 nt, Artificial Sequence
  Synthetic
cguggguacaacaggacaaaauu

SEQ ID NO: 121806 - RNA, 24 nt, Artificial Sequence
  Synthetic
acguggguacaacaggacaaaauu

SEQ ID NO: 121807 - RNA, 22 nt, Artificial Sequence
  Synthetic
ugggaaaaaaauccucaaaauu

SEQ ID NO: 121808 - RNA, 24 nt, Artificial Sequence
  Synthetic
ugugggaaaaaaauccucaaaauu

SEQ ID NO: 121809 - RNA, 18 nt, Artificial Sequence
  Synthetic
cacacuguuaggaaaauu

SEQ ID NO: 121810 - RNA, 19 nt, Artificial Sequence
  Synthetic
acacacuguuaggaaaauu

SEQ ID NO: 121811 - RNA, 20 nt, Artificial Sequence
  Synthetic
aacacacuguuaggaaaauu

SEQ ID NO: 121812 - RNA, 21 nt, Artificial Sequence
  Synthetic
uaacacacuguuaggaaaauu

SEQ ID NO: 121813 - RNA, 22 nt, Artificial Sequence
  Synthetic
uuaacacacuguuaggaaaauu

SEQ ID NO: 121814 - RNA, 23 nt, Artificial Sequence
  Synthetic
auuaacacacuguuaggaaaauu

SEQ ID NO: 121815 - RNA, 24 nt, Artificial Sequence
  Synthetic
uauuaacacacuguuaggaaaauu

SEQ ID NO: 121816 - RNA, 18 nt, Artificial Sequence
  Synthetic
aacguacaguugaaaauu

SEQ ID NO: 121817 - RNA, 19 nt, Artificial Sequence
  Synthetic
caacguacaguugaaaauu

SEQ ID NO: 121818 - RNA, 20 nt, Artificial Sequence
  Synthetic
ccaacguacaguugaaaauu

SEQ ID NO: 121819 - RNA, 21 nt, Artificial Sequence
  Synthetic
cccaacguacaguugaaaauu

SEQ ID NO: 121820 - RNA, 22 nt, Artificial Sequence
  Synthetic
acccaacguacaguugaaaauu

SEQ ID NO: 121821 - RNA, 23 nt, Artificial Sequence
  Synthetic
uacccaacguacaguugaaaauu

SEQ ID NO: 121822 - RNA, 18 nt, Artificial Sequence
  Synthetic
cguaucuuguugaaaauu

SEQ ID NO: 121823 - RNA, 19 nt, Artificial Sequence
  Synthetic
acguaucuuguugaaaauu

SEQ ID NO: 121824 - RNA, 20 nt, Artificial Sequence
  Synthetic
cacguaucuuguugaaaauu

SEQ ID NO: 121825 - RNA, 21 nt, Artificial Sequence
  Synthetic
ccacguaucuuguugaaaauu

SEQ ID NO: 121826 - RNA, 22 nt, Artificial Sequence
  Synthetic
accacguaucuuguugaaaauu

SEQ ID NO: 121827 - RNA, 23 nt, Artificial Sequence
  Synthetic
aaccacguaucuuguugaaaauu

SEQ ID NO: 121828 - RNA, 24 nt, Artificial Sequence
  Synthetic
caaccacguaucuuguugaaaauu

SEQ ID NO: 121829 - RNA, 18 nt, Artificial Sequence
  Synthetic
aguuugauaaauaaaauu

SEQ ID NO: 121830 - RNA, 20 nt, Artificial Sequence
  Synthetic
agaguuugauaaauaaaauu

SEQ ID NO: 121831 - RNA, 21 nt, Artificial Sequence
  Synthetic
cagaguuugauaaauaaaauu

SEQ ID NO: 121832 - RNA, 22 nt, Artificial Sequence
  Synthetic
ccagaguuugauaaauaaaauu

SEQ ID NO: 121833 - RNA, 24 nt, Artificial Sequence
  Synthetic
agccagaguuugauaaauaaaauu

SEQ ID NO: 121834 - RNA, 18 nt, Artificial Sequence
  Synthetic
ucauguaugacuaaaauu

SEQ ID NO: 121835 - RNA, 19 nt, Artificial Sequence
  Synthetic
aucauguaugacuaaaauu

SEQ ID NO: 121836 - RNA, 21 nt, Artificial Sequence
  Synthetic
ugaucauguaugacuaaaauu

SEQ ID NO: 121837 - RNA, 23 nt, Artificial Sequence
  Synthetic
ugugaucauguaugacuaaaauu

SEQ ID NO: 121838 - RNA, 24 nt, Artificial Sequence
  Synthetic
uugugaucauguaugacuaaaauu

SEQ ID NO: 121839 - RNA, 18 nt, Artificial Sequence
  Synthetic
augaauggguuuaaaauu

SEQ ID NO: 121840 - RNA, 20 nt, Artificial Sequence
  Synthetic
ugaugaauggguuuaaaauu

SEQ ID NO: 121841 - RNA, 21 nt, Artificial Sequence
  Synthetic
uugaugaauggguuuaaaauu

SEQ ID NO: 121842 - RNA, 22 nt, Artificial Sequence
  Synthetic
uuugaugaauggguuuaaaauu

SEQ ID NO: 121843 - RNA, 23 nt, Artificial Sequence
  Synthetic
uuuugaugaauggguuuaaaauu

SEQ ID NO: 121844 - RNA, 24 nt, Artificial Sequence
  Synthetic
cuuuugaugaauggguuuaaaauu

SEQ ID NO: 121845 - RNA, 20 nt, Artificial Sequence
  Synthetic
agguaucauaauuacaaauu

SEQ ID NO: 121846 - RNA, 22 nt, Artificial Sequence
  Synthetic
agagguaucauaauuacaaauu

SEQ ID NO: 121847 - RNA, 23 nt, Artificial Sequence
  Synthetic
uagagguaucauaauuacaaauu

SEQ ID NO: 121848 - RNA, 24 nt, Artificial Sequence
  Synthetic
uuagagguaucauaauuacaaauu

SEQ ID NO: 121849 - RNA, 18 nt, Artificial Sequence
  Synthetic
uucugauuuugccaaauu

SEQ ID NO: 121850 - RNA, 19 nt, Artificial Sequence
  Synthetic
cuucugauuuugccaaauu

SEQ ID NO: 121851 - RNA, 20 nt, Artificial Sequence
  Synthetic
ccuucugauuuugccaaauu

SEQ ID NO: 121852 - RNA, 22 nt, Artificial Sequence
  Synthetic
agccuucugauuuugccaaauu

SEQ ID NO: 121853 - RNA, 23 nt, Artificial Sequence
  Synthetic
cagccuucugauuuugccaaauu

SEQ ID NO: 121854 - RNA, 24 nt, Artificial Sequence
  Synthetic
ucagccuucugauuuugccaaauu

SEQ ID NO: 121855 - RNA, 22 nt, Artificial Sequence
  Synthetic
uguuaaaaacaauuuccaaauu

SEQ ID NO: 121856 - RNA, 23 nt, Artificial Sequence
  Synthetic
uuguuaaaaacaauuuccaaauu

SEQ ID NO: 121857 - RNA, 24 nt, Artificial Sequence
  Synthetic
uuuguuaaaaacaauuuccaaauu

SEQ ID NO: 121858 - RNA, 18 nt, Artificial Sequence
  Synthetic
ucugagaaaaaucaaauu

SEQ ID NO: 121859 - RNA, 19 nt, Artificial Sequence
  Synthetic
uucugagaaaaaucaaauu

SEQ ID NO: 121860 - RNA, 20 nt, Artificial Sequence
  Synthetic
auucugagaaaaaucaaauu

SEQ ID NO: 121861 - RNA, 22 nt, Artificial Sequence
  Synthetic
ugauucugagaaaaaucaaauu

SEQ ID NO: 121862 - RNA, 23 nt, Artificial Sequence
  Synthetic
augauucugagaaaaaucaaauu

SEQ ID NO: 121863 - RNA, 21 nt, Artificial Sequence
  Synthetic
uaagaaaccauacuucaaauu

SEQ ID NO: 121864 - RNA, 22 nt, Artificial Sequence
  Synthetic
uuaagaaaccauacuucaaauu

SEQ ID NO: 121865 - RNA, 23 nt, Artificial Sequence
  Synthetic
auuaagaaaccauacuucaaauu

SEQ ID NO: 121866 - RNA, 24 nt, Artificial Sequence
  Synthetic
cauuaagaaaccauacuucaaauu

SEQ ID NO: 121867 - RNA, 18 nt, Artificial Sequence
  Synthetic
acuaaacaugaagaaauu

SEQ ID NO: 121868 - RNA, 22 nt, Artificial Sequence
  Synthetic
agggacuaaacaugaagaaauu

SEQ ID NO: 121869 - RNA, 23 nt, Artificial Sequence
  Synthetic
cagggacuaaacaugaagaaauu

SEQ ID NO: 121870 - RNA, 24 nt, Artificial Sequence
  Synthetic
ucagggacuaaacaugaagaaauu

SEQ ID NO: 121871 - RNA, 18 nt, Artificial Sequence
  Synthetic
ugcuuccccuaagaaauu

SEQ ID NO: 121872 - RNA, 19 nt, Artificial Sequence
  Synthetic
augcuuccccuaagaaauu

SEQ ID NO: 121873 - RNA, 20 nt, Artificial Sequence
  Synthetic
uaugcuuccccuaagaaauu

SEQ ID NO: 121874 - RNA, 21 nt, Artificial Sequence
  Synthetic
auaugcuuccccuaagaaauu

SEQ ID NO: 121875 - RNA, 22 nt, Artificial Sequence
  Synthetic
uauaugcuuccccuaagaaauu

SEQ ID NO: 121876 - RNA, 23 nt, Artificial Sequence
  Synthetic
uuauaugcuuccccuaagaaauu

SEQ ID NO: 121877 - RNA, 18 nt, Artificial Sequence
  Synthetic
cagcuguuuuaagaaauu

SEQ ID NO: 121878 - RNA, 19 nt, Artificial Sequence
  Synthetic
acagcuguuuuaagaaauu

SEQ ID NO: 121879 - RNA, 22 nt, Artificial Sequence
  Synthetic
aggacagcuguuuuaagaaauu

SEQ ID NO: 121880 - RNA, 24 nt, Artificial Sequence
  Synthetic
ugaggacagcuguuuuaagaaauu

SEQ ID NO: 121881 - RNA, 18 nt, Artificial Sequence
  Synthetic
uucaauggaaaauaaauu

SEQ ID NO: 121882 - RNA, 19 nt, Artificial Sequence
  Synthetic
auucaauggaaaauaaauu

SEQ ID NO: 121883 - RNA, 21 nt, Artificial Sequence
  Synthetic
agauucaauggaaaauaaauu

SEQ ID NO: 121884 - RNA, 22 nt, Artificial Sequence
  Synthetic
uagauucaauggaaaauaaauu

SEQ ID NO: 121885 - RNA, 23 nt, Artificial Sequence
  Synthetic
auagauucaauggaaaauaaauu

SEQ ID NO: 121886 - RNA, 24 nt, Artificial Sequence
  Synthetic
uauagauucaauggaaaauaaauu

SEQ ID NO: 121887 - RNA, 18 nt, Artificial Sequence
  Synthetic
ccaaaauaagcauaaauu

SEQ ID NO: 121888 - RNA, 19 nt, Artificial Sequence
  Synthetic
uccaaaauaagcauaaauu

SEQ ID NO: 121889 - RNA, 20 nt, Artificial Sequence
  Synthetic
cuccaaaauaagcauaaauu

SEQ ID NO: 121890 - RNA, 21 nt, Artificial Sequence
  Synthetic
ccuccaaaauaagcauaaauu

SEQ ID NO: 121891 - RNA, 23 nt, Artificial Sequence
  Synthetic
agccuccaaaauaagcauaaauu

SEQ ID NO: 121892 - RNA, 24 nt, Artificial Sequence
  Synthetic
aagccuccaaaauaagcauaaauu

SEQ ID NO: 121893 - RNA, 19 nt, Artificial Sequence
  Synthetic
ugccuguugagcauaaauu

SEQ ID NO: 121894 - RNA, 20 nt, Artificial Sequence
  Synthetic
uugccuguugagcauaaauu

SEQ ID NO: 121895 - RNA, 21 nt, Artificial Sequence
  Synthetic
cuugccuguugagcauaaauu

SEQ ID NO: 121896 - RNA, 22 nt, Artificial Sequence
  Synthetic
ucuugccuguugagcauaaauu

SEQ ID NO: 121897 - RNA, 23 nt, Artificial Sequence
  Synthetic
aucuugccuguugagcauaaauu

SEQ ID NO: 121898 - RNA, 24 nt, Artificial Sequence
  Synthetic
aaucuugccuguugagcauaaauu

SEQ ID NO: 121899 - RNA, 18 nt, Artificial Sequence
  Synthetic
aaagaauacucauaaauu

SEQ ID NO: 121900 - RNA, 19 nt, Artificial Sequence
  Synthetic
uaaagaauacucauaaauu

SEQ ID NO: 121901 - RNA, 20 nt, Artificial Sequence
  Synthetic
auaaagaauacucauaaauu

SEQ ID NO: 121902 - RNA, 21 nt, Artificial Sequence
  Synthetic
aauaaagaauacucauaaauu

SEQ ID NO: 121903 - RNA, 22 nt, Artificial Sequence
  Synthetic
caauaaagaauacucauaaauu

SEQ ID NO: 121904 - RNA, 18 nt, Artificial Sequence
  Synthetic
uuauaugagagauaaauu

SEQ ID NO: 121905 - RNA, 19 nt, Artificial Sequence
  Synthetic
cuuauaugagagauaaauu

SEQ ID NO: 121906 - RNA, 20 nt, Artificial Sequence
  Synthetic
acuuauaugagagauaaauu

SEQ ID NO: 121907 - RNA, 21 nt, Artificial Sequence
  Synthetic
aacuuauaugagagauaaauu

SEQ ID NO: 121908 - RNA, 22 nt, Artificial Sequence
  Synthetic
caacuuauaugagagauaaauu

SEQ ID NO: 121909 - RNA, 23 nt, Artificial Sequence
  Synthetic
acaacuuauaugagagauaaauu

SEQ ID NO: 121910 - RNA, 24 nt, Artificial Sequence
  Synthetic
cacaacuuauaugagagauaaauu

SEQ ID NO: 121911 - RNA, 18 nt, Artificial Sequence
  Synthetic
uuaguauauugauaaauu

SEQ ID NO: 121912 - RNA, 19 nt, Artificial Sequence
  Synthetic
auuaguauauugauaaauu

SEQ ID NO: 121913 - RNA, 21 nt, Artificial Sequence
  Synthetic
agauuaguauauugauaaauu

SEQ ID NO: 121914 - RNA, 22 nt, Artificial Sequence
  Synthetic
cagauuaguauauugauaaauu

SEQ ID NO: 121915 - RNA, 23 nt, Artificial Sequence
  Synthetic
ucagauuaguauauugauaaauu

SEQ ID NO: 121916 - RNA, 18 nt, Artificial Sequence
  Synthetic
uuaucuauccuauaaauu

SEQ ID NO: 121917 - RNA, 20 nt, Artificial Sequence
  Synthetic
aguuaucuauccuauaaauu

SEQ ID NO: 121918 - RNA, 21 nt, Artificial Sequence
  Synthetic
aaguuaucuauccuauaaauu

SEQ ID NO: 121919 - RNA, 22 nt, Artificial Sequence
  Synthetic
aaaguuaucuauccuauaaauu

SEQ ID NO: 121920 - RNA, 23 nt, Artificial Sequence
  Synthetic
aaaaguuaucuauccuauaaauu

SEQ ID NO: 121921 - RNA, 24 nt, Artificial Sequence
  Synthetic
caaaaguuaucuauccuauaaauu

SEQ ID NO: 121922 - RNA, 19 nt, Artificial Sequence
  Synthetic
agauacaauguuauaaauu

SEQ ID NO: 121923 - RNA, 21 nt, Artificial Sequence
  Synthetic
agagauacaauguuauaaauu

SEQ ID NO: 121924 - RNA, 22 nt, Artificial Sequence
  Synthetic
uagagauacaauguuauaaauu

SEQ ID NO: 121925 - RNA, 24 nt, Artificial Sequence
  Synthetic
aguagagauacaauguuauaaauu

SEQ ID NO: 121926 - RNA, 18 nt, Artificial Sequence
  Synthetic
cugucuuauuuauaaauu

SEQ ID NO: 121927 - RNA, 20 nt, Artificial Sequence
  Synthetic
agcugucuuauuuauaaauu

SEQ ID NO: 121928 - RNA, 22 nt, Artificial Sequence
  Synthetic
ugagcugucuuauuuauaaauu

SEQ ID NO: 121929 - RNA, 23 nt, Artificial Sequence
  Synthetic
uugagcugucuuauuuauaaauu

SEQ ID NO: 121930 - RNA, 24 nt, Artificial Sequence
  Synthetic
cuugagcugucuuauuuauaaauu

SEQ ID NO: 121931 - RNA, 18 nt, Artificial Sequence
  Synthetic
auccuaaguggcuaaauu

SEQ ID NO: 121932 - RNA, 19 nt, Artificial Sequence
  Synthetic
uauccuaaguggcuaaauu

SEQ ID NO: 121933 - RNA, 20 nt, Artificial Sequence
  Synthetic
uuauccuaaguggcuaaauu

SEQ ID NO: 121934 - RNA, 21 nt, Artificial Sequence
  Synthetic
auuauccuaaguggcuaaauu

SEQ ID NO: 121935 - RNA, 22 nt, Artificial Sequence
  Synthetic
aauuauccuaaguggcuaaauu

SEQ ID NO: 121936 - RNA, 23 nt, Artificial Sequence
  Synthetic
aaauuauccuaaguggcuaaauu

SEQ ID NO: 121937 - RNA, 18 nt, Artificial Sequence
  Synthetic
uaaccgcugaucuaaauu

SEQ ID NO: 121938 - RNA, 19 nt, Artificial Sequence
  Synthetic
auaaccgcugaucuaaauu

SEQ ID NO: 121939 - RNA, 20 nt, Artificial Sequence
  Synthetic
cauaaccgcugaucuaaauu

SEQ ID NO: 121940 - RNA, 21 nt, Artificial Sequence
  Synthetic
ucauaaccgcugaucuaaauu

SEQ ID NO: 121941 - RNA, 22 nt, Artificial Sequence
  Synthetic
uucauaaccgcugaucuaaauu

SEQ ID NO: 121942 - RNA, 23 nt, Artificial Sequence
  Synthetic
uuucauaaccgcugaucuaaauu

SEQ ID NO: 121943 - RNA, 24 nt, Artificial Sequence
  Synthetic
auuucauaaccgcugaucuaaauu

SEQ ID NO: 121944 - RNA, 18 nt, Artificial Sequence
  Synthetic
auauuuuaugucuaaauu

SEQ ID NO: 121945 - RNA, 19 nt, Artificial Sequence
  Synthetic
cauauuuuaugucuaaauu

SEQ ID NO: 121946 - RNA, 20 nt, Artificial Sequence
  Synthetic
acauauuuuaugucuaaauu

SEQ ID NO: 121947 - RNA, 21 nt, Artificial Sequence
  Synthetic
aacauauuuuaugucuaaauu

SEQ ID NO: 121948 - RNA, 22 nt, Artificial Sequence
  Synthetic
caacauauuuuaugucuaaauu

SEQ ID NO: 121949 - RNA, 23 nt, Artificial Sequence
  Synthetic
ucaacauauuuuaugucuaaauu

SEQ ID NO: 121950 - RNA, 24 nt, Artificial Sequence
  Synthetic
aucaacauauuuuaugucuaaauu

SEQ ID NO: 121951 - RNA, 18 nt, Artificial Sequence
  Synthetic
uugucaccugaguaaauu

SEQ ID NO: 121952 - RNA, 20 nt, Artificial Sequence
  Synthetic
uguugucaccugaguaaauu

SEQ ID NO: 121953 - RNA, 21 nt, Artificial Sequence
  Synthetic
uuguugucaccugaguaaauu

SEQ ID NO: 121954 - RNA, 22 nt, Artificial Sequence
  Synthetic
auuguugucaccugaguaaauu

SEQ ID NO: 121955 - RNA, 23 nt, Artificial Sequence
  Synthetic
aauuguugucaccugaguaaauu

SEQ ID NO: 121956 - RNA, 24 nt, Artificial Sequence
  Synthetic
uaauuguugucaccugaguaaauu

SEQ ID NO: 121957 - RNA, 19 nt, Artificial Sequence
  Synthetic
uguaggugcuuaguaaauu

SEQ ID NO: 121958 - RNA, 20 nt, Artificial Sequence
  Synthetic
auguaggugcuuaguaaauu

SEQ ID NO: 121959 - RNA, 21 nt, Artificial Sequence
  Synthetic
aauguaggugcuuaguaaauu

SEQ ID NO: 121960 - RNA, 22 nt, Artificial Sequence
  Synthetic
aaauguaggugcuuaguaaauu

SEQ ID NO: 121961 - RNA, 23 nt, Artificial Sequence
  Synthetic
uaaauguaggugcuuaguaaauu

SEQ ID NO: 121962 - RNA, 24 nt, Artificial Sequence
  Synthetic
cuaaauguaggugcuuaguaaauu

SEQ ID NO: 121963 - RNA, 18 nt, Artificial Sequence
  Synthetic
aauaaugugguguaaauu

SEQ ID NO: 121964 - RNA, 19 nt, Artificial Sequence
  Synthetic
aaauaaugugguguaaauu

SEQ ID NO: 121965 - RNA, 20 nt, Artificial Sequence
  Synthetic
uaaauaaugugguguaaauu

SEQ ID NO: 121966 - RNA, 22 nt, Artificial Sequence
  Synthetic
aguaaauaaugugguguaaauu

SEQ ID NO: 121967 - RNA, 23 nt, Artificial Sequence
  Synthetic
aaguaaauaaugugguguaaauu

SEQ ID NO: 121968 - RNA, 24 nt, Artificial Sequence
  Synthetic
uaaguaaauaaugugguguaaauu

SEQ ID NO: 121969 - RNA, 18 nt, Artificial Sequence
  Synthetic
uaauacauugauuaaauu

SEQ ID NO: 121970 - RNA, 19 nt, Artificial Sequence
  Synthetic
auaauacauugauuaaauu

SEQ ID NO: 121971 - RNA, 20 nt, Artificial Sequence
  Synthetic
uauaauacauugauuaaauu

SEQ ID NO: 121972 - RNA, 21 nt, Artificial Sequence
  Synthetic
aaaauaauggaaauuuaaauu

SEQ ID NO: 121973 - RNA, 22 nt, Artificial Sequence
  Synthetic
aaaaauaauggaaauuuaaauu

SEQ ID NO: 121974 - RNA, 23 nt, Artificial Sequence
  Synthetic
caaaaauaauggaaauuuaaauu

SEQ ID NO: 121975 - RNA, 24 nt, Artificial Sequence
  Synthetic
ucaaaaauaauggaaauuuaaauu

SEQ ID NO: 121976 - RNA, 18 nt, Artificial Sequence
  Synthetic
uacuacauacuuuaaauu

SEQ ID NO: 121977 - RNA, 19 nt, Artificial Sequence
  Synthetic
cuacuacauacuuuaaauu

SEQ ID NO: 121978 - RNA, 20 nt, Artificial Sequence
  Synthetic
acuacuacauacuuuaaauu

SEQ ID NO: 121979 - RNA, 22 nt, Artificial Sequence
  Synthetic
ugacuacuacauacuuuaaauu

SEQ ID NO: 121980 - RNA, 24 nt, Artificial Sequence
  Synthetic
agugacuacuacauacuuuaaauu

SEQ ID NO: 121981 - RNA, 18 nt, Artificial Sequence
  Synthetic
uugggauuugaaacaauu

SEQ ID NO: 121982 - RNA, 19 nt, Artificial Sequence
  Synthetic
cuugggauuugaaacaauu

SEQ ID NO: 121983 - RNA, 20 nt, Artificial Sequence
  Synthetic
ucuugggauuugaaacaauu

SEQ ID NO: 121984 - RNA, 22 nt, Artificial Sequence
  Synthetic
ugucuugggauuugaaacaauu

SEQ ID NO: 121985 - RNA, 21 nt, Artificial Sequence
  Synthetic
uuuuaauauuggagaacaauu

SEQ ID NO: 121986 - RNA, 22 nt, Artificial Sequence
  Synthetic
uuuuuaauauuggagaacaauu

SEQ ID NO: 121987 - RNA, 19 nt, Artificial Sequence
  Synthetic
ugagaccaagcuaacaauu

SEQ ID NO: 121988 - RNA, 21 nt, Artificial Sequence
  Synthetic
agugagaccaagcuaacaauu

SEQ ID NO: 121989 - RNA, 22 nt, Artificial Sequence
  Synthetic
aagugagaccaagcuaacaauu

SEQ ID NO: 121990 - RNA, 24 nt, Artificial Sequence
  Synthetic
agaagugagaccaagcuaacaauu

SEQ ID NO: 121991 - RNA, 20 nt, Artificial Sequence
  Synthetic
uggaucuuuaaaacacaauu

SEQ ID NO: 121992 - RNA, 24 nt, Artificial Sequence
  Synthetic
uggguggaucuuuaaaacacaauu

SEQ ID NO: 121993 - RNA, 18 nt, Artificial Sequence
  Synthetic
agcuacaagcagacaauu

SEQ ID NO: 121994 - RNA, 19 nt, Artificial Sequence
  Synthetic
cagcuacaagcagacaauu

SEQ ID NO: 121995 - RNA, 20 nt, Artificial Sequence
  Synthetic
acagcuacaagcagacaauu

SEQ ID NO: 121996 - RNA, 21 nt, Artificial Sequence
  Synthetic
uacagcuacaagcagacaauu

SEQ ID NO: 121997 - RNA, 22 nt, Artificial Sequence
  Synthetic
auacagcuacaagcagacaauu

SEQ ID NO: 121998 - RNA, 23 nt, Artificial Sequence
  Synthetic
cauacagcuacaagcagacaauu

SEQ ID NO: 121999 - RNA, 24 nt, Artificial Sequence
  Synthetic
ucauacagcuacaagcagacaauu

SEQ ID NO: 122000 - RNA, 19 nt, Artificial Sequence
  Synthetic
ugaauguauugauacaauu

SEQ ID NO: 122001 - RNA, 20 nt, Artificial Sequence
  Synthetic
augaauguauugauacaauu

SEQ ID NO: 122002 - RNA, 21 nt, Artificial Sequence
  Synthetic
uaugaauguauugauacaauu

SEQ ID NO: 122003 - RNA, 22 nt, Artificial Sequence
  Synthetic
auaugaauguauugauacaauu

SEQ ID NO: 122004 - RNA, 23 nt, Artificial Sequence
  Synthetic
uauaugaauguauugauacaauu

SEQ ID NO: 122005 - RNA, 24 nt, Artificial Sequence
  Synthetic
uuauaugaauguauugauacaauu

SEQ ID NO: 122006 - RNA, 21 nt, Artificial Sequence
  Synthetic
aacccauaaauuuauacaauu

SEQ ID NO: 122007 - RNA, 22 nt, Artificial Sequence
  Synthetic
uaacccauaaauuuauacaauu

SEQ ID NO: 122008 - RNA, 19 nt, Artificial Sequence
  Synthetic
agaaccuaacaaagcaauu

SEQ ID NO: 122009 - RNA, 20 nt, Artificial Sequence
  Synthetic
uagaaccuaacaaagcaauu

SEQ ID NO: 122010 - RNA, 21 nt, Artificial Sequence
  Synthetic
auagaaccuaacaaagcaauu

SEQ ID NO: 122011 - RNA, 22 nt, Artificial Sequence
  Synthetic
aauagaaccuaacaaagcaauu

SEQ ID NO: 122012 - RNA, 24 nt, Artificial Sequence
  Synthetic
agaauagaaccuaacaaagcaauu

SEQ ID NO: 122013 - RNA, 18 nt, Artificial Sequence
  Synthetic
caauaaagauuagcaauu

SEQ ID NO: 122014 - RNA, 19 nt, Artificial Sequence
  Synthetic
ucaauaaagauuagcaauu

SEQ ID NO: 122015 - RNA, 21 nt, Artificial Sequence
  Synthetic
ugucaauaaagauuagcaauu

SEQ ID NO: 122016 - RNA, 22 nt, Artificial Sequence
  Synthetic
cugucaauaaagauuagcaauu

SEQ ID NO: 122017 - RNA, 23 nt, Artificial Sequence
  Synthetic
acugucaauaaagauuagcaauu

SEQ ID NO: 122018 - RNA, 18 nt, Artificial Sequence
  Synthetic
agaauaucacuugcaauu

SEQ ID NO: 122019 - RNA, 20 nt, Artificial Sequence
  Synthetic
ugagaauaucacuugcaauu

SEQ ID NO: 122020 - RNA, 21 nt, Artificial Sequence
  Synthetic
cugagaauaucacuugcaauu

SEQ ID NO: 122021 - RNA, 22 nt, Artificial Sequence
  Synthetic
ccugagaauaucacuugcaauu

SEQ ID NO: 122022 - RNA, 23 nt, Artificial Sequence
  Synthetic
uccugagaauaucacuugcaauu

SEQ ID NO: 122023 - RNA, 24 nt, Artificial Sequence
  Synthetic
uuccugagaauaucacuugcaauu

SEQ ID NO: 122024 - RNA, 18 nt, Artificial Sequence
  Synthetic
ccucucuccagcucaauu

SEQ ID NO: 122025 - RNA, 20 nt, Artificial Sequence
  Synthetic
agccucucuccagcucaauu

SEQ ID NO: 122026 - RNA, 21 nt, Artificial Sequence
  Synthetic
uagccucucuccagcucaauu

SEQ ID NO: 122027 - RNA, 22 nt, Artificial Sequence
  Synthetic
cuagccucucuccagcucaauu

SEQ ID NO: 122028 - RNA, 23 nt, Artificial Sequence
  Synthetic
ccuagccucucuccagcucaauu

SEQ ID NO: 122029 - RNA, 24 nt, Artificial Sequence
  Synthetic
cccuagccucucuccagcucaauu

SEQ ID NO: 122030 - RNA, 20 nt, Artificial Sequence
  Synthetic
aggagacuucugggucaauu

SEQ ID NO: 122031 - RNA, 23 nt, Artificial Sequence
  Synthetic
cggaggagacuucugggucaauu

SEQ ID NO: 122032 - RNA, 18 nt, Artificial Sequence
  Synthetic
aucuaaacgaauucaauu

SEQ ID NO: 122033 - RNA, 19 nt, Artificial Sequence
  Synthetic
uaucuaaacgaauucaauu

SEQ ID NO: 122034 - RNA, 20 nt, Artificial Sequence
  Synthetic
uuaucuaaacgaauucaauu

SEQ ID NO: 122035 - RNA, 21 nt, Artificial Sequence
  Synthetic
uuuaucuaaacgaauucaauu

SEQ ID NO: 122036 - RNA, 22 nt, Artificial Sequence
  Synthetic
auuuaucuaaacgaauucaauu

SEQ ID NO: 122037 - RNA, 23 nt, Artificial Sequence
  Synthetic
uauuuaucuaaacgaauucaauu

SEQ ID NO: 122038 - RNA, 24 nt, Artificial Sequence
  Synthetic
auauuuaucuaaacgaauucaauu

SEQ ID NO: 122039 - RNA, 18 nt, Artificial Sequence
  Synthetic
aaauaauccgauucaauu

SEQ ID NO: 122040 - RNA, 20 nt, Artificial Sequence
  Synthetic
agaaauaauccgauucaauu

SEQ ID NO: 122041 - RNA, 22 nt, Artificial Sequence
  Synthetic
agagaaauaauccgauucaauu

SEQ ID NO: 122042 - RNA, 23 nt, Artificial Sequence
  Synthetic
uagagaaauaauccgauucaauu

SEQ ID NO: 122043 - RNA, 24 nt, Artificial Sequence
  Synthetic
auagagaaauaauccgauucaauu

SEQ ID NO: 122044 - RNA, 18 nt, Artificial Sequence
  Synthetic
uggaacugauauucaauu

SEQ ID NO: 122045 - RNA, 19 nt, Artificial Sequence
  Synthetic
uuggaacugauauucaauu

SEQ ID NO: 122046 - RNA, 21 nt, Artificial Sequence
  Synthetic
aguuggaacugauauucaauu

SEQ ID NO: 122047 - RNA, 23 nt, Artificial Sequence
  Synthetic
agaguuggaacugauauucaauu

SEQ ID NO: 122048 - RNA, 24 nt, Artificial Sequence
  Synthetic
uagaguuggaacugauauucaauu

SEQ ID NO: 122049 - RNA, 18 nt, Artificial Sequence
  Synthetic
ucauaaacaacuucaauu

SEQ ID NO: 122050 - RNA, 19 nt, Artificial Sequence
  Synthetic
cucauaaacaacuucaauu

SEQ ID NO: 122051 - RNA, 20 nt, Artificial Sequence
  Synthetic
ucucauaaacaacuucaauu

SEQ ID NO: 122052 - RNA, 21 nt, Artificial Sequence
  Synthetic
aucucauaaacaacuucaauu

SEQ ID NO: 122053 - RNA, 22 nt, Artificial Sequence
  Synthetic
aaucucauaaacaacuucaauu

SEQ ID NO: 122054 - RNA, 23 nt, Artificial Sequence
  Synthetic
uaaucucauaaacaacuucaauu

SEQ ID NO: 122055 - RNA, 24 nt, Artificial Sequence
  Synthetic
cuaaucucauaaacaacuucaauu

SEQ ID NO: 122056 - RNA, 19 nt, Artificial Sequence
  Synthetic
ugaauuaauuucaagaauu

SEQ ID NO: 122057 - RNA, 20 nt, Artificial Sequence
  Synthetic
cugaauuaauuucaagaauu

SEQ ID NO: 122058 - RNA, 21 nt, Artificial Sequence
  Synthetic
ccugaauuaauuucaagaauu

SEQ ID NO: 122059 - RNA, 22 nt, Artificial Sequence
  Synthetic
accugaauuaauuucaagaauu

SEQ ID NO: 122060 - RNA, 23 nt, Artificial Sequence
  Synthetic
aaccugaauuaauuucaagaauu

SEQ ID NO: 122061 - RNA, 24 nt, Artificial Sequence
  Synthetic
caaccugaauuaauuucaagaauu

SEQ ID NO: 122062 - RNA, 19 nt, Artificial Sequence
  Synthetic
agucuuuugaugaagaauu

SEQ ID NO: 122063 - RNA, 20 nt, Artificial Sequence
  Synthetic
uagucuuuugaugaagaauu

SEQ ID NO: 122064 - RNA, 21 nt, Artificial Sequence
  Synthetic
auagucuuuugaugaagaauu

SEQ ID NO: 122065 - RNA, 22 nt, Artificial Sequence
  Synthetic
cauagucuuuugaugaagaauu

SEQ ID NO: 122066 - RNA, 23 nt, Artificial Sequence
  Synthetic
ucauagucuuuugaugaagaauu

SEQ ID NO: 122067 - RNA, 24 nt, Artificial Sequence
  Synthetic
uucauagucuuuugaugaagaauu

SEQ ID NO: 122068 - RNA, 21 nt, Artificial Sequence
  Synthetic
ucuuaauccuggaacagaauu

SEQ ID NO: 122069 - RNA, 18 nt, Artificial Sequence
  Synthetic
uaauaccgacacagaauu

SEQ ID NO: 122070 - RNA, 19 nt, Artificial Sequence
  Synthetic
uuaauaccgacacagaauu

SEQ ID NO: 122071 - RNA, 20 nt, Artificial Sequence
  Synthetic
uuuaauaccgacacagaauu

SEQ ID NO: 122072 - RNA, 21 nt, Artificial Sequence
  Synthetic
uuuuaauaccgacacagaauu

SEQ ID NO: 122073 - RNA, 22 nt, Artificial Sequence
  Synthetic
uuuuuaauaccgacacagaauu

SEQ ID NO: 122074 - RNA, 23 nt, Artificial Sequence
  Synthetic
auuuuuaauaccgacacagaauu

SEQ ID NO: 122075 - RNA, 24 nt, Artificial Sequence
  Synthetic
aauuuuuaauaccgacacagaauu

SEQ ID NO: 122076 - RNA, 18 nt, Artificial Sequence
  Synthetic
cucuuaagaugcagaauu

SEQ ID NO: 122077 - RNA, 19 nt, Artificial Sequence
  Synthetic
ccucuuaagaugcagaauu

SEQ ID NO: 122078 - RNA, 21 nt, Artificial Sequence
  Synthetic
agccucuuaagaugcagaauu

SEQ ID NO: 122079 - RNA, 22 nt, Artificial Sequence
  Synthetic
cagccucuuaagaugcagaauu

SEQ ID NO: 122080 - RNA, 23 nt, Artificial Sequence
  Synthetic
acagccucuuaagaugcagaauu

SEQ ID NO: 122081 - RNA, 24 nt, Artificial Sequence
  Synthetic
cacagccucuuaagaugcagaauu

SEQ ID NO: 122082 - RNA, 18 nt, Artificial Sequence
  Synthetic
cuauaacucaugagaauu

SEQ ID NO: 122083 - RNA, 19 nt, Artificial Sequence
  Synthetic
ucuauaacucaugagaauu

SEQ ID NO: 122084 - RNA, 20 nt, Artificial Sequence
  Synthetic
aucuauaacucaugagaauu

SEQ ID NO: 122085 - RNA, 21 nt, Artificial Sequence
  Synthetic
uaucuauaacucaugagaauu

SEQ ID NO: 122086 - RNA, 22 nt, Artificial Sequence
  Synthetic
uuaucuauaacucaugagaauu

SEQ ID NO: 122087 - RNA, 24 nt, Artificial Sequence
  Synthetic
aguuaucuauaacucaugagaauu

SEQ ID NO: 122088 - RNA, 19 nt, Artificial Sequence
  Synthetic
agcuauaaaagauagaauu

SEQ ID NO: 122089 - RNA, 21 nt, Artificial Sequence
  Synthetic
agagcuauaaaagauagaauu

SEQ ID NO: 122090 - RNA, 22 nt, Artificial Sequence
  Synthetic
uagagcuauaaaagauagaauu

SEQ ID NO: 122091 - RNA, 23 nt, Artificial Sequence
  Synthetic
uuagagcuauaaaagauagaauu

SEQ ID NO: 122092 - RNA, 24 nt, Artificial Sequence
  Synthetic
cuuagagcuauaaaagauagaauu

SEQ ID NO: 122093 - RNA, 21 nt, Artificial Sequence
  Synthetic
uuaauagaggaaucuagaauu

SEQ ID NO: 122094 - RNA, 22 nt, Artificial Sequence
  Synthetic
auuaauagaggaaucuagaauu

SEQ ID NO: 122095 - RNA, 24 nt, Artificial Sequence
  Synthetic
ugauuaauagaggaaucuagaauu

SEQ ID NO: 122096 - RNA, 18 nt, Artificial Sequence
  Synthetic
cugauaggugguagaauu

SEQ ID NO: 122097 - RNA, 20 nt, Artificial Sequence
  Synthetic
ugcugauaggugguagaauu

SEQ ID NO: 122098 - RNA, 22 nt, Artificial Sequence
  Synthetic
ugugcugauaggugguagaauu

SEQ ID NO: 122099 - RNA, 23 nt, Artificial Sequence
  Synthetic
cugugcugauaggugguagaauu

SEQ ID NO: 122100 - RNA, 24 nt, Artificial Sequence
  Synthetic
acugugcugauaggugguagaauu

SEQ ID NO: 122101 - RNA, 18 nt, Artificial Sequence
  Synthetic
uuucuucuccuuagaauu

SEQ ID NO: 122102 - RNA, 21 nt, Artificial Sequence
  Synthetic
agguuucuucuccuuagaauu

SEQ ID NO: 122103 - RNA, 22 nt, Artificial Sequence
  Synthetic
aagguuucuucuccuuagaauu

SEQ ID NO: 122104 - RNA, 23 nt, Artificial Sequence
  Synthetic
aaagguuucuucuccuuagaauu

SEQ ID NO: 122105 - RNA, 24 nt, Artificial Sequence
  Synthetic
uaaagguuucuucuccuuagaauu

SEQ ID NO: 122106 - RNA, 18 nt, Artificial Sequence
  Synthetic
auaguuaugcuuagaauu

SEQ ID NO: 122107 - RNA, 19 nt, Artificial Sequence
  Synthetic
cauaguuaugcuuagaauu

SEQ ID NO: 122108 - RNA, 20 nt, Artificial Sequence
  Synthetic
acauaguuaugcuuagaauu

SEQ ID NO: 122109 - RNA, 24 nt, Artificial Sequence
  Synthetic
ugggacauaguuaugcuuagaauu

SEQ ID NO: 122110 - RNA, 18 nt, Artificial Sequence
  Synthetic
uauaacuuucuuagaauu

SEQ ID NO: 122111 - RNA, 19 nt, Artificial Sequence
  Synthetic
uuauaacuuucuuagaauu

SEQ ID NO: 122112 - RNA, 20 nt, Artificial Sequence
  Synthetic
uuuauaacuuucuuagaauu

SEQ ID NO: 122113 - RNA, 21 nt, Artificial Sequence
  Synthetic
auuuauaacuuucuuagaauu

SEQ ID NO: 122114 - RNA, 22 nt, Artificial Sequence
  Synthetic
aauuuauaacuuucuuagaauu

SEQ ID NO: 122115 - RNA, 23 nt, Artificial Sequence
  Synthetic
aaauuuauaacuuucuuagaauu

SEQ ID NO: 122116 - RNA, 21 nt, Artificial Sequence
  Synthetic
agauaaauauauuaaggaauu

SEQ ID NO: 122117 - RNA, 22 nt, Artificial Sequence
  Synthetic
uagauaaauauauuaaggaauu

SEQ ID NO: 122118 - RNA, 18 nt, Artificial Sequence
  Synthetic
cugagaucuacaggaauu

SEQ ID NO: 122119 - RNA, 19 nt, Artificial Sequence
  Synthetic
ucugagaucuacaggaauu

SEQ ID NO: 122120 - RNA, 20 nt, Artificial Sequence
  Synthetic
cucugagaucuacaggaauu

SEQ ID NO: 122121 - RNA, 21 nt, Artificial Sequence
  Synthetic
ucucugagaucuacaggaauu

SEQ ID NO: 122122 - RNA, 22 nt, Artificial Sequence
  Synthetic
uucucugagaucuacaggaauu

SEQ ID NO: 122123 - RNA, 23 nt, Artificial Sequence
  Synthetic
uuucucugagaucuacaggaauu

SEQ ID NO: 122124 - RNA, 24 nt, Artificial Sequence
  Synthetic
uuuucucugagaucuacaggaauu

SEQ ID NO: 122125 - RNA, 19 nt, Artificial Sequence
  Synthetic
aggguaaagacgaggaauu

SEQ ID NO: 122126 - RNA, 20 nt, Artificial Sequence
  Synthetic
uaggguaaagacgaggaauu

SEQ ID NO: 122127 - RNA, 21 nt, Artificial Sequence
  Synthetic
cuaggguaaagacgaggaauu

SEQ ID NO: 122128 - RNA, 22 nt, Artificial Sequence
  Synthetic
ccuaggguaaagacgaggaauu

SEQ ID NO: 122129 - RNA, 23 nt, Artificial Sequence
  Synthetic
uccuaggguaaagacgaggaauu

SEQ ID NO: 122130 - RNA, 24 nt, Artificial Sequence
  Synthetic
uuccuaggguaaagacgaggaauu

SEQ ID NO: 122131 - RNA, 18 nt, Artificial Sequence
  Synthetic
cagggaaaauacggaauu

SEQ ID NO: 122132 - RNA, 21 nt, Artificial Sequence
  Synthetic
uggcagggaaaauacggaauu

SEQ ID NO: 122133 - RNA, 22 nt, Artificial Sequence
  Synthetic
auggcagggaaaauacggaauu

SEQ ID NO: 122134 - RNA, 23 nt, Artificial Sequence
  Synthetic
aauggcagggaaaauacggaauu

SEQ ID NO: 122135 - RNA, 24 nt, Artificial Sequence
  Synthetic
aaauggcagggaaaauacggaauu

SEQ ID NO: 122136 - RNA, 18 nt, Artificial Sequence
  Synthetic
acaguggaauagggaauu

SEQ ID NO: 122137 - RNA, 19 nt, Artificial Sequence
  Synthetic
uacaguggaauagggaauu

SEQ ID NO: 122138 - RNA, 20 nt, Artificial Sequence
  Synthetic
cuacaguggaauagggaauu

SEQ ID NO: 122139 - RNA, 21 nt, Artificial Sequence
  Synthetic
ucuacaguggaauagggaauu

SEQ ID NO: 122140 - RNA, 22 nt, Artificial Sequence
  Synthetic
aucuacaguggaauagggaauu

SEQ ID NO: 122141 - RNA, 24 nt, Artificial Sequence
  Synthetic
agaucuacaguggaauagggaauu

SEQ ID NO: 122142 - RNA, 18 nt, Artificial Sequence
  Synthetic
aggauguaaaauggaauu

SEQ ID NO: 122143 - RNA, 19 nt, Artificial Sequence
  Synthetic
aaggauguaaaauggaauu

SEQ ID NO: 122144 - RNA, 20 nt, Artificial Sequence
  Synthetic
uaaggauguaaaauggaauu

SEQ ID NO: 122145 - RNA, 21 nt, Artificial Sequence
  Synthetic
auaaggauguaaaauggaauu

SEQ ID NO: 122146 - RNA, 22 nt, Artificial Sequence
  Synthetic
aauaaggauguaaaauggaauu

SEQ ID NO: 122147 - RNA, 23 nt, Artificial Sequence
  Synthetic
aaauaaggauguaaaauggaauu

SEQ ID NO: 122148 - RNA, 18 nt, Artificial Sequence
  Synthetic
caccuacugucuggaauu

SEQ ID NO: 122149 - RNA, 19 nt, Artificial Sequence
  Synthetic
acaccuacugucuggaauu

SEQ ID NO: 122150 - RNA, 20 nt, Artificial Sequence
  Synthetic
uacaccuacugucuggaauu

SEQ ID NO: 122151 - RNA, 21 nt, Artificial Sequence
  Synthetic
auacaccuacugucuggaauu

SEQ ID NO: 122152 - RNA, 22 nt, Artificial Sequence
  Synthetic
uauacaccuacugucuggaauu

SEQ ID NO: 122153 - RNA, 23 nt, Artificial Sequence
  Synthetic
cuauacaccuacugucuggaauu

SEQ ID NO: 122154 - RNA, 24 nt, Artificial Sequence
  Synthetic
ucuauacaccuacugucuggaauu

SEQ ID NO: 122155 - RNA, 18 nt, Artificial Sequence
  Synthetic
cgauucagcauuggaauu

SEQ ID NO: 122156 - RNA, 21 nt, Artificial Sequence
  Synthetic
aggcgauucagcauuggaauu

SEQ ID NO: 122157 - RNA, 22 nt, Artificial Sequence
  Synthetic
aaggcgauucagcauuggaauu

SEQ ID NO: 122158 - RNA, 24 nt, Artificial Sequence
  Synthetic
agaaggcgauucagcauuggaauu

SEQ ID NO: 122159 - RNA, 18 nt, Artificial Sequence
  Synthetic
agaggcagaguuggaauu

SEQ ID NO: 122160 - RNA, 20 nt, Artificial Sequence
  Synthetic
ugagaggcagaguuggaauu

SEQ ID NO: 122161 - RNA, 21 nt, Artificial Sequence
  Synthetic
uugagaggcagaguuggaauu

SEQ ID NO: 122162 - RNA, 22 nt, Artificial Sequence
  Synthetic
auugagaggcagaguuggaauu

SEQ ID NO: 122163 - RNA, 23 nt, Artificial Sequence
  Synthetic
uauugagaggcagaguuggaauu

SEQ ID NO: 122164 - RNA, 24 nt, Artificial Sequence
  Synthetic
auauugagaggcagaguuggaauu

SEQ ID NO: 122165 - RNA, 21 nt, Artificial Sequence
  Synthetic
cacugaaugaaaacaugaauu

SEQ ID NO: 122166 - RNA, 22 nt, Artificial Sequence
  Synthetic
ucacugaaugaaaacaugaauu

SEQ ID NO: 122167 - RNA, 24 nt, Artificial Sequence
  Synthetic
agucacugaaugaaaacaugaauu

SEQ ID NO: 122168 - RNA, 18 nt, Artificial Sequence
  Synthetic
ugaaauaugacaugaauu

SEQ ID NO: 122169 - RNA, 19 nt, Artificial Sequence
  Synthetic
augaaauaugacaugaauu

SEQ ID NO: 122170 - RNA, 20 nt, Artificial Sequence
  Synthetic
uaugaaauaugacaugaauu

SEQ ID NO: 122171 - RNA, 21 nt, Artificial Sequence
  Synthetic
uuaugaaauaugacaugaauu

SEQ ID NO: 122172 - RNA, 22 nt, Artificial Sequence
  Synthetic
uuuaugaaauaugacaugaauu

SEQ ID NO: 122173 - RNA, 23 nt, Artificial Sequence
  Synthetic
auuuaugaaauaugacaugaauu

SEQ ID NO: 122174 - RNA, 24 nt, Artificial Sequence
  Synthetic
uauuuaugaaauaugacaugaauu

SEQ ID NO: 122175 - RNA, 18 nt, Artificial Sequence
  Synthetic
augacaucaccaugaauu

SEQ ID NO: 122176 - RNA, 19 nt, Artificial Sequence
  Synthetic
aaugacaucaccaugaauu

SEQ ID NO: 122177 - RNA, 20 nt, Artificial Sequence
  Synthetic
aaaugacaucaccaugaauu

SEQ ID NO: 122178 - RNA, 21 nt, Artificial Sequence
  Synthetic
aaaaugacaucaccaugaauu

SEQ ID NO: 122179 - RNA, 22 nt, Artificial Sequence
  Synthetic
caaaaugacaucaccaugaauu

SEQ ID NO: 122180 - RNA, 23 nt, Artificial Sequence
  Synthetic
ucaaaaugacaucaccaugaauu

SEQ ID NO: 122181 - RNA, 24 nt, Artificial Sequence
  Synthetic
uucaaaaugacaucaccaugaauu

SEQ ID NO: 122182 - RNA, 18 nt, Artificial Sequence
  Synthetic
auggaugaaagaugaauu

SEQ ID NO: 122183 - RNA, 19 nt, Artificial Sequence
  Synthetic
cauggaugaaagaugaauu

SEQ ID NO: 122184 - RNA, 20 nt, Artificial Sequence
  Synthetic
ucauggaugaaagaugaauu

SEQ ID NO: 122185 - RNA, 23 nt, Artificial Sequence
  Synthetic
aggucauggaugaaagaugaauu

SEQ ID NO: 122186 - RNA, 24 nt, Artificial Sequence
  Synthetic
caggucauggaugaaagaugaauu

SEQ ID NO: 122187 - RNA, 18 nt, Artificial Sequence
  Synthetic
auaugcaggauaugaauu

SEQ ID NO: 122188 - RNA, 19 nt, Artificial Sequence
  Synthetic
aauaugcaggauaugaauu

SEQ ID NO: 122189 - RNA, 20 nt, Artificial Sequence
  Synthetic
uaauaugcaggauaugaauu

SEQ ID NO: 122190 - RNA, 22 nt, Artificial Sequence
  Synthetic
uguaauaugcaggauaugaauu

SEQ ID NO: 122191 - RNA, 23 nt, Artificial Sequence
  Synthetic
auguaauaugcaggauaugaauu

SEQ ID NO: 122192 - RNA, 24 nt, Artificial Sequence
  Synthetic
uauguaauaugcaggauaugaauu

SEQ ID NO: 122193 - RNA, 21 nt, Artificial Sequence
  Synthetic
uaccaaacagguauaugaauu

SEQ ID NO: 122194 - RNA, 23 nt, Artificial Sequence
  Synthetic
aguaccaaacagguauaugaauu

SEQ ID NO: 122195 - RNA, 24 nt, Artificial Sequence
  Synthetic
aaguaccaaacagguauaugaauu

SEQ ID NO: 122196 - RNA, 18 nt, Artificial Sequence
  Synthetic
agugccagacuaugaauu

SEQ ID NO: 122197 - RNA, 19 nt, Artificial Sequence
  Synthetic
aagugccagacuaugaauu

SEQ ID NO: 122198 - RNA, 20 nt, Artificial Sequence
  Synthetic
uaagugccagacuaugaauu

SEQ ID NO: 122199 - RNA, 21 nt, Artificial Sequence
  Synthetic
auaagugccagacuaugaauu

SEQ ID NO: 122200 - RNA, 22 nt, Artificial Sequence
  Synthetic
uauaagugccagacuaugaauu

SEQ ID NO: 122201 - RNA, 23 nt, Artificial Sequence
  Synthetic
uuauaagugccagacuaugaauu

SEQ ID NO: 122202 - RNA, 24 nt, Artificial Sequence
  Synthetic
uuuauaagugccagacuaugaauu

SEQ ID NO: 122203 - RNA, 19 nt, Artificial Sequence
  Synthetic
uguaauuacaaacugaauu

SEQ ID NO: 122204 - RNA, 20 nt, Artificial Sequence
  Synthetic
auguaauuacaaacugaauu

SEQ ID NO: 122205 - RNA, 21 nt, Artificial Sequence
  Synthetic
cauguaauuacaaacugaauu

SEQ ID NO: 122206 - RNA, 22 nt, Artificial Sequence
  Synthetic
acauguaauuacaaacugaauu

SEQ ID NO: 122207 - RNA, 23 nt, Artificial Sequence
  Synthetic
aacauguaauuacaaacugaauu

SEQ ID NO: 122208 - RNA, 24 nt, Artificial Sequence
  Synthetic
uaacauguaauuacaaacugaauu

SEQ ID NO: 122209 - RNA, 18 nt, Artificial Sequence
  Synthetic
cccuucacauucugaauu

SEQ ID NO: 122210 - RNA, 19 nt, Artificial Sequence
  Synthetic
ccccuucacauucugaauu

SEQ ID NO: 122211 - RNA, 20 nt, Artificial Sequence
  Synthetic
cccccuucacauucugaauu

SEQ ID NO: 122212 - RNA, 22 nt, Artificial Sequence
  Synthetic
agcccccuucacauucugaauu

SEQ ID NO: 122213 - RNA, 23 nt, Artificial Sequence
  Synthetic
uagcccccuucacauucugaauu

SEQ ID NO: 122214 - RNA, 24 nt, Artificial Sequence
  Synthetic
auagcccccuucacauucugaauu

SEQ ID NO: 122215 - RNA, 18 nt, Artificial Sequence
  Synthetic
uggauaugauucugaauu

SEQ ID NO: 122216 - RNA, 19 nt, Artificial Sequence
  Synthetic
uuggauaugauucugaauu

SEQ ID NO: 122217 - RNA, 20 nt, Artificial Sequence
  Synthetic
uuuggauaugauucugaauu

SEQ ID NO: 122218 - RNA, 23 nt, Artificial Sequence
  Synthetic
cgguuuggauaugauucugaauu

SEQ ID NO: 122219 - RNA, 24 nt, Artificial Sequence
  Synthetic
ccgguuuggauaugauucugaauu

SEQ ID NO: 122220 - RNA, 18 nt, Artificial Sequence
  Synthetic
uggaggcaggguugaauu

SEQ ID NO: 122221 - RNA, 20 nt, Artificial Sequence
  Synthetic
aguggaggcaggguugaauu

SEQ ID NO: 122222 - RNA, 22 nt, Artificial Sequence
  Synthetic
agaguggaggcaggguugaauu

SEQ ID NO: 122223 - RNA, 23 nt, Artificial Sequence
  Synthetic
cagaguggaggcaggguugaauu

SEQ ID NO: 122224 - RNA, 24 nt, Artificial Sequence
  Synthetic
ucagaguggaggcaggguugaauu

SEQ ID NO: 122225 - RNA, 18 nt, Artificial Sequence
  Synthetic
ucugucuauuguugaauu

SEQ ID NO: 122226 - RNA, 19 nt, Artificial Sequence
  Synthetic
uucugucuauuguugaauu

SEQ ID NO: 122227 - RNA, 20 nt, Artificial Sequence
  Synthetic
uuucugucuauuguugaauu

SEQ ID NO: 122228 - RNA, 21 nt, Artificial Sequence
  Synthetic
uuuucugucuauuguugaauu

SEQ ID NO: 122229 - RNA, 22 nt, Artificial Sequence
  Synthetic
auuuucugucuauuguugaauu

SEQ ID NO: 122230 - RNA, 18 nt, Artificial Sequence
  Synthetic
ccuuuuuguuguugaauu

SEQ ID NO: 122231 - RNA, 19 nt, Artificial Sequence
  Synthetic
uccuuuuuguuguugaauu

SEQ ID NO: 122232 - RNA, 20 nt, Artificial Sequence
  Synthetic
auccuuuuuguuguugaauu

SEQ ID NO: 122233 - RNA, 21 nt, Artificial Sequence
  Synthetic
uauccuuuuuguuguugaauu

SEQ ID NO: 122234 - RNA, 22 nt, Artificial Sequence
  Synthetic
uuauccuuuuuguuguugaauu

SEQ ID NO: 122235 - RNA, 23 nt, Artificial Sequence
  Synthetic
uuuauccuuuuuguuguugaauu

SEQ ID NO: 122236 - RNA, 24 nt, Artificial Sequence
  Synthetic
auuuauccuuuuuguuguugaauu

SEQ ID NO: 122237 - RNA, 18 nt, Artificial Sequence
  Synthetic
auaaacuuuuguugaauu

SEQ ID NO: 122238 - RNA, 20 nt, Artificial Sequence
  Synthetic
ugauaaacuuuuguugaauu

SEQ ID NO: 122239 - RNA, 21 nt, Artificial Sequence
  Synthetic
uugauaaacuuuuguugaauu

SEQ ID NO: 122240 - RNA, 22 nt, Artificial Sequence
  Synthetic
uuugauaaacuuuuguugaauu

SEQ ID NO: 122241 - RNA, 24 nt, Artificial Sequence
  Synthetic
uguuugauaaacuuuuguugaauu

SEQ ID NO: 122242 - RNA, 18 nt, Artificial Sequence
  Synthetic
ucuaacuauaaaauaauu

SEQ ID NO: 122243 - RNA, 19 nt, Artificial Sequence
  Synthetic
aucuaacuauaaaauaauu

SEQ ID NO: 122244 - RNA, 20 nt, Artificial Sequence
  Synthetic
aaucuaacuauaaaauaauu

SEQ ID NO: 122245 - RNA, 21 nt, Artificial Sequence
  Synthetic
uaaucuaacuauaaaauaauu

SEQ ID NO: 122246 - RNA, 22 nt, Artificial Sequence
  Synthetic
auaaucuaacuauaaaauaauu

SEQ ID NO: 122247 - RNA, 23 nt, Artificial Sequence
  Synthetic
cauaaucuaacuauaaaauaauu

SEQ ID NO: 122248 - RNA, 24 nt, Artificial Sequence
  Synthetic
ccauaaucuaacuauaaaauaauu

SEQ ID NO: 122249 - RNA, 18 nt, Artificial Sequence
  Synthetic
agccuaauuuaaauaauu

SEQ ID NO: 122250 - RNA, 19 nt, Artificial Sequence
  Synthetic
uagccuaauuuaaauaauu

SEQ ID NO: 122251 - RNA, 20 nt, Artificial Sequence
  Synthetic
auagccuaauuuaaauaauu

SEQ ID NO: 122252 - RNA, 21 nt, Artificial Sequence
  Synthetic
aauagccuaauuuaaauaauu

SEQ ID NO: 122253 - RNA, 22 nt, Artificial Sequence
  Synthetic
aaauagccuaauuuaaauaauu

SEQ ID NO: 122254 - RNA, 23 nt, Artificial Sequence
  Synthetic
aaaauagccuaauuuaaauaauu

SEQ ID NO: 122255 - RNA, 24 nt, Artificial Sequence
  Synthetic
uaaaauagccuaauuuaaauaauu

SEQ ID NO: 122256 - RNA, 18 nt, Artificial Sequence
  Synthetic
cagaaucuuggaauaauu

SEQ ID NO: 122257 - RNA, 19 nt, Artificial Sequence
  Synthetic
acagaaucuuggaauaauu

SEQ ID NO: 122258 - RNA, 20 nt, Artificial Sequence
  Synthetic
cacagaaucuuggaauaauu

SEQ ID NO: 122259 - RNA, 21 nt, Artificial Sequence
  Synthetic
acacagaaucuuggaauaauu

SEQ ID NO: 122260 - RNA, 22 nt, Artificial Sequence
  Synthetic
uacacagaaucuuggaauaauu

SEQ ID NO: 122261 - RNA, 18 nt, Artificial Sequence
  Synthetic
caaaggauauuaauaauu

SEQ ID NO: 122262 - RNA, 20 nt, Artificial Sequence
  Synthetic
agcaaaggauauuaauaauu

SEQ ID NO: 122263 - RNA, 21 nt, Artificial Sequence
  Synthetic
cagcaaaggauauuaauaauu

SEQ ID NO: 122264 - RNA, 22 nt, Artificial Sequence
  Synthetic
ucagcaaaggauauuaauaauu

SEQ ID NO: 122265 - RNA, 23 nt, Artificial Sequence
  Synthetic
aucagcaaaggauauuaauaauu

SEQ ID NO: 122266 - RNA, 24 nt, Artificial Sequence
  Synthetic
caucagcaaaggauauuaauaauu

SEQ ID NO: 122267 - RNA, 18 nt, Artificial Sequence
  Synthetic
auuugggucuuaauaauu

SEQ ID NO: 122268 - RNA, 19 nt, Artificial Sequence
  Synthetic
uauuugggucuuaauaauu

SEQ ID NO: 122269 - RNA, 20 nt, Artificial Sequence
  Synthetic
uuauuugggucuuaauaauu

SEQ ID NO: 122270 - RNA, 21 nt, Artificial Sequence
  Synthetic
uuuauuugggucuuaauaauu

SEQ ID NO: 122271 - RNA, 21 nt, Artificial Sequence
  Synthetic
aacaaaaaccuucacauaauu

SEQ ID NO: 122272 - RNA, 22 nt, Artificial Sequence
  Synthetic
aaacaaaaaccuucacauaauu

SEQ ID NO: 122273 - RNA, 23 nt, Artificial Sequence
  Synthetic
aaaacaaaaaccuucacauaauu

SEQ ID NO: 122274 - RNA, 24 nt, Artificial Sequence
  Synthetic
uaaaacaaaaaccuucacauaauu

SEQ ID NO: 122275 - RNA, 19 nt, Artificial Sequence
  Synthetic
uguaaugaguaucauaauu

SEQ ID NO: 122276 - RNA, 20 nt, Artificial Sequence
  Synthetic
auguaaugaguaucauaauu

SEQ ID NO: 122277 - RNA, 22 nt, Artificial Sequence
  Synthetic
ugauguaaugaguaucauaauu

SEQ ID NO: 122278 - RNA, 24 nt, Artificial Sequence
  Synthetic
agugauguaaugaguaucauaauu

SEQ ID NO: 122279 - RNA, 18 nt, Artificial Sequence
  Synthetic
uucuucucccucauaauu

SEQ ID NO: 122280 - RNA, 19 nt, Artificial Sequence
  Synthetic
uuucuucucccucauaauu

SEQ ID NO: 122281 - RNA, 20 nt, Artificial Sequence
  Synthetic
auuucuucucccucauaauu

SEQ ID NO: 122282 - RNA, 21 nt, Artificial Sequence
  Synthetic
aauuucuucucccucauaauu

SEQ ID NO: 122283 - RNA, 22 nt, Artificial Sequence
  Synthetic
caauuucuucucccucauaauu

SEQ ID NO: 122284 - RNA, 23 nt, Artificial Sequence
  Synthetic
ucaauuucuucucccucauaauu

SEQ ID NO: 122285 - RNA, 24 nt, Artificial Sequence
  Synthetic
uucaauuucuucucccucauaauu

SEQ ID NO: 122286 - RNA, 18 nt, Artificial Sequence
  Synthetic
uaaagaacagucauaauu

SEQ ID NO: 122287 - RNA, 19 nt, Artificial Sequence
  Synthetic
auaaagaacagucauaauu

SEQ ID NO: 122288 - RNA, 20 nt, Artificial Sequence
  Synthetic
uauaaagaacagucauaauu

SEQ ID NO: 122289 - RNA, 21 nt, Artificial Sequence
  Synthetic
uuauaaagaacagucauaauu

SEQ ID NO: 122290 - RNA, 22 nt, Artificial Sequence
  Synthetic
uuuauaaagaacagucauaauu

SEQ ID NO: 122291 - RNA, 23 nt, Artificial Sequence
  Synthetic
auuuauaaagaacagucauaauu

SEQ ID NO: 122292 - RNA, 24 nt, Artificial Sequence
  Synthetic
aauuuauaaagaacagucauaauu

SEQ ID NO: 122293 - RNA, 18 nt, Artificial Sequence
  Synthetic
ucaaaggaaaagauaauu

SEQ ID NO: 122294 - RNA, 19 nt, Artificial Sequence
  Synthetic
aucaaaggaaaagauaauu

SEQ ID NO: 122295 - RNA, 21 nt, Artificial Sequence
  Synthetic
agaucaaaggaaaagauaauu

SEQ ID NO: 122296 - RNA, 22 nt, Artificial Sequence
  Synthetic
aagaucaaaggaaaagauaauu

SEQ ID NO: 122297 - RNA, 23 nt, Artificial Sequence
  Synthetic
caagaucaaaggaaaagauaauu

SEQ ID NO: 122298 - RNA, 24 nt, Artificial Sequence
  Synthetic
ucaagaucaaaggaaaagauaauu

SEQ ID NO: 122299 - RNA, 18 nt, Artificial Sequence
  Synthetic
acuggauauaagauaauu

SEQ ID NO: 122300 - RNA, 19 nt, Artificial Sequence
  Synthetic
uacuggauauaagauaauu

SEQ ID NO: 122301 - RNA, 20 nt, Artificial Sequence
  Synthetic
auacuggauauaagauaauu

SEQ ID NO: 122302 - RNA, 21 nt, Artificial Sequence
  Synthetic
uauacuggauauaagauaauu

SEQ ID NO: 122303 - RNA, 22 nt, Artificial Sequence
  Synthetic
auauacuggauauaagauaauu

SEQ ID NO: 122304 - RNA, 23 nt, Artificial Sequence
  Synthetic
aauauacuggauauaagauaauu

SEQ ID NO: 122305 - RNA, 18 nt, Artificial Sequence
  Synthetic
uuauuaucauggauaauu

SEQ ID NO: 122306 - RNA, 19 nt, Artificial Sequence
  Synthetic
uuuauuaucauggauaauu

SEQ ID NO: 122307 - RNA, 20 nt, Artificial Sequence
  Synthetic
cuuuauuaucauggauaauu

SEQ ID NO: 122308 - RNA, 21 nt, Artificial Sequence
  Synthetic
acuuuauuaucauggauaauu

SEQ ID NO: 122309 - RNA, 22 nt, Artificial Sequence
  Synthetic
uacuuuauuaucauggauaauu

SEQ ID NO: 122310 - RNA, 23 nt, Artificial Sequence
  Synthetic
uuacuuuauuaucauggauaauu

SEQ ID NO: 122311 - RNA, 24 nt, Artificial Sequence
  Synthetic
auuacuuuauuaucauggauaauu

SEQ ID NO: 122312 - RNA, 21 nt, Artificial Sequence
  Synthetic
acaauggcuggagauauaauu

SEQ ID NO: 122313 - RNA, 22 nt, Artificial Sequence
  Synthetic
cacaauggcuggagauauaauu

SEQ ID NO: 122314 - RNA, 23 nt, Artificial Sequence
  Synthetic
acacaauggcuggagauauaauu

SEQ ID NO: 122315 - RNA, 24 nt, Artificial Sequence
  Synthetic
cacacaauggcuggagauauaauu

SEQ ID NO: 122316 - RNA, 18 nt, Artificial Sequence
  Synthetic
aaguacuaugcuauaauu

SEQ ID NO: 122317 - RNA, 19 nt, Artificial Sequence
  Synthetic
caaguacuaugcuauaauu

SEQ ID NO: 122318 - RNA, 20 nt, Artificial Sequence
  Synthetic
ucaaguacuaugcuauaauu

SEQ ID NO: 122319 - RNA, 21 nt, Artificial Sequence
  Synthetic
uucaaguacuaugcuauaauu

SEQ ID NO: 122320 - RNA, 22 nt, Artificial Sequence
  Synthetic
uuucaaguacuaugcuauaauu

SEQ ID NO: 122321 - RNA, 23 nt, Artificial Sequence
  Synthetic
uuuucaaguacuaugcuauaauu

SEQ ID NO: 122322 - RNA, 18 nt, Artificial Sequence
  Synthetic
cuuucugaacuucuaauu

SEQ ID NO: 122323 - RNA, 20 nt, Artificial Sequence
  Synthetic
agcuuucugaacuucuaauu

SEQ ID NO: 122324 - RNA, 23 nt, Artificial Sequence
  Synthetic
uggagcuuucugaacuucuaauu

SEQ ID NO: 122325 - RNA, 18 nt, Artificial Sequence
  Synthetic
uuaauaaauauaguaauu

SEQ ID NO: 122326 - RNA, 19 nt, Artificial Sequence
  Synthetic
cuuaauaaauauaguaauu

SEQ ID NO: 122327 - RNA, 21 nt, Artificial Sequence
  Synthetic
ugcuuaauaaauauaguaauu

SEQ ID NO: 122328 - RNA, 24 nt, Artificial Sequence
  Synthetic
uggugcuuaauaaauauaguaauu

SEQ ID NO: 122329 - RNA, 18 nt, Artificial Sequence
  Synthetic
augaaagaggauguaauu

SEQ ID NO: 122330 - RNA, 19 nt, Artificial Sequence
  Synthetic
aaugaaagaggauguaauu

SEQ ID NO: 122331 - RNA, 20 nt, Artificial Sequence
  Synthetic
aaaugaaagaggauguaauu

SEQ ID NO: 122332 - RNA, 22 nt, Artificial Sequence
  Synthetic
ugaaaugaaagaggauguaauu

SEQ ID NO: 122333 - RNA, 23 nt, Artificial Sequence
  Synthetic
augaaaugaaagaggauguaauu

SEQ ID NO: 122334 - RNA, 24 nt, Artificial Sequence
  Synthetic
caugaaaugaaagaggauguaauu

SEQ ID NO: 122335 - RNA, 18 nt, Artificial Sequence
  Synthetic
acuccugacugauuaauu

SEQ ID NO: 122336 - RNA, 19 nt, Artificial Sequence
  Synthetic
cacuccugacugauuaauu

SEQ ID NO: 122337 - RNA, 20 nt, Artificial Sequence
  Synthetic
acacuccugacugauuaauu

SEQ ID NO: 122338 - RNA, 21 nt, Artificial Sequence
  Synthetic
uacacuccugacugauuaauu

SEQ ID NO: 122339 - RNA, 23 nt, Artificial Sequence
  Synthetic
aguacacuccugacugauuaauu

SEQ ID NO: 122340 - RNA, 18 nt, Artificial Sequence
  Synthetic
uccaacaaauauuuaauu

SEQ ID NO: 122341 - RNA, 19 nt, Artificial Sequence
  Synthetic
cuccaacaaauauuuaauu

SEQ ID NO: 122342 - RNA, 20 nt, Artificial Sequence
  Synthetic
acuccaacaaauauuuaauu

SEQ ID NO: 122343 - RNA, 22 nt, Artificial Sequence
  Synthetic
ugacuccaacaaauauuuaauu

SEQ ID NO: 122344 - RNA, 23 nt, Artificial Sequence
  Synthetic
cugacuccaacaaauauuuaauu

SEQ ID NO: 122345 - RNA, 24 nt, Artificial Sequence
  Synthetic
acugacuccaacaaauauuuaauu

SEQ ID NO: 122346 - RNA, 21 nt, Artificial Sequence
  Synthetic
uaaaaacauauauauuuaauu

SEQ ID NO: 122347 - RNA, 22 nt, Artificial Sequence
  Synthetic
auaaaaacauauauauuuaauu

SEQ ID NO: 122348 - RNA, 23 nt, Artificial Sequence
  Synthetic
aauaaaaacauauauauuuaauu

SEQ ID NO: 122349 - RNA, 24 nt, Artificial Sequence
  Synthetic
uaauaaaaacauauauauuuaauu

SEQ ID NO: 122350 - RNA, 18 nt, Artificial Sequence
  Synthetic
aucuauacauguuuaauu

SEQ ID NO: 122351 - RNA, 19 nt, Artificial Sequence
  Synthetic
uaucuauacauguuuaauu

SEQ ID NO: 122352 - RNA, 20 nt, Artificial Sequence
  Synthetic
uuaucuauacauguuuaauu

SEQ ID NO: 122353 - RNA, 21 nt, Artificial Sequence
  Synthetic
uuuaucuauacauguuuaauu

SEQ ID NO: 122354 - RNA, 22 nt, Artificial Sequence
  Synthetic
auuuaucuauacauguuuaauu

SEQ ID NO: 122355 - RNA, 23 nt, Artificial Sequence
  Synthetic
cauuuaucuauacauguuuaauu

SEQ ID NO: 122356 - RNA, 24 nt, Artificial Sequence
  Synthetic
ucauuuaucuauacauguuuaauu

SEQ ID NO: 122357 - RNA, 21 nt, Artificial Sequence
  Synthetic
uaaaaguauuuauaaaacauu

SEQ ID NO: 122358 - RNA, 22 nt, Artificial Sequence
  Synthetic
auaaaaguauuuauaaaacauu

SEQ ID NO: 122359 - RNA, 24 nt, Artificial Sequence
  Synthetic
agauaaaaguauuuauaaaacauu

SEQ ID NO: 122360 - RNA, 23 nt, Artificial Sequence
  Synthetic
aggcauauacacacauaaacauu

SEQ ID NO: 122361 - RNA, 24 nt, Artificial Sequence
  Synthetic
aaggcauauacacacauaaacauu

SEQ ID NO: 122362 - RNA, 18 nt, Artificial Sequence
  Synthetic
agaaaaaagguaaacauu

SEQ ID NO: 122363 - RNA, 19 nt, Artificial Sequence
  Synthetic
uagaaaaaagguaaacauu

SEQ ID NO: 122364 - RNA, 20 nt, Artificial Sequence
  Synthetic
uuagaaaaaagguaaacauu

SEQ ID NO: 122365 - RNA, 21 nt, Artificial Sequence
  Synthetic
uuuagaaaaaagguaaacauu

SEQ ID NO: 122366 - RNA, 23 nt, Artificial Sequence
  Synthetic
aguuuagaaaaaagguaaacauu

SEQ ID NO: 122367 - RNA, 24 nt, Artificial Sequence
  Synthetic
caguuuagaaaaaagguaaacauu

SEQ ID NO: 122368 - RNA, 21 nt, Artificial Sequence
  Synthetic
aaauuauaaaauuuaaacauu

SEQ ID NO: 122369 - RNA, 22 nt, Artificial Sequence
  Synthetic
uaaauuauaaaauuuaaacauu

SEQ ID NO: 122370 - RNA, 23 nt, Artificial Sequence
  Synthetic
uuaaauuauaaaauuuaaacauu

SEQ ID NO: 122371 - RNA, 24 nt, Artificial Sequence
  Synthetic
auuaaauuauaaaauuuaaacauu

SEQ ID NO: 122372 - RNA, 22 nt, Artificial Sequence
  Synthetic
agucucuuccauugucaacauu

SEQ ID NO: 122373 - RNA, 24 nt, Artificial Sequence
  Synthetic
cgagucucuuccauugucaacauu

SEQ ID NO: 122374 - RNA, 19 nt, Artificial Sequence
  Synthetic
ugagauauuguagaacauu

SEQ ID NO: 122375 - RNA, 20 nt, Artificial Sequence
  Synthetic
cugagauauuguagaacauu

SEQ ID NO: 122376 - RNA, 18 nt, Artificial Sequence
  Synthetic
uucugaaacuugaacauu

SEQ ID NO: 122377 - RNA, 20 nt, Artificial Sequence
  Synthetic
cguucugaaacuugaacauu

SEQ ID NO: 122378 - RNA, 22 nt, Artificial Sequence
  Synthetic
agcguucugaaacuugaacauu

SEQ ID NO: 122379 - RNA, 23 nt, Artificial Sequence
  Synthetic
uagcguucugaaacuugaacauu

SEQ ID NO: 122380 - RNA, 18 nt, Artificial Sequence
  Synthetic
agccaagggucuaacauu

SEQ ID NO: 122381 - RNA, 19 nt, Artificial Sequence
  Synthetic
uagccaagggucuaacauu

SEQ ID NO: 122382 - RNA, 21 nt, Artificial Sequence
  Synthetic
uguagccaagggucuaacauu

SEQ ID NO: 122383 - RNA, 23 nt, Artificial Sequence
  Synthetic
aguguagccaagggucuaacauu

SEQ ID NO: 122384 - RNA, 18 nt, Artificial Sequence
  Synthetic
cuuuauuuuuugcacauu

SEQ ID NO: 122385 - RNA, 19 nt, Artificial Sequence
  Synthetic
ccuuuauuuuuugcacauu

SEQ ID NO: 122386 - RNA, 20 nt, Artificial Sequence
  Synthetic
cccuuuauuuuuugcacauu

SEQ ID NO: 122387 - RNA, 21 nt, Artificial Sequence
  Synthetic
acccuuuauuuuuugcacauu

SEQ ID NO: 122388 - RNA, 22 nt, Artificial Sequence
  Synthetic
aacccuuuauuuuuugcacauu

SEQ ID NO: 122389 - RNA, 23 nt, Artificial Sequence
  Synthetic
uaacccuuuauuuuuugcacauu

SEQ ID NO: 122390 - RNA, 24 nt, Artificial Sequence
  Synthetic
auaacccuuuauuuuuugcacauu

SEQ ID NO: 122391 - RNA, 18 nt, Artificial Sequence
  Synthetic
uuaucagaaacucacauu

SEQ ID NO: 122392 - RNA, 19 nt, Artificial Sequence
  Synthetic
cuuaucagaaacucacauu

SEQ ID NO: 122393 - RNA, 20 nt, Artificial Sequence
  Synthetic
ucuuaucagaaacucacauu

SEQ ID NO: 122394 - RNA, 21 nt, Artificial Sequence
  Synthetic
uucuuaucagaaacucacauu

SEQ ID NO: 122395 - RNA, 22 nt, Artificial Sequence
  Synthetic
auucuuaucagaaacucacauu

SEQ ID NO: 122396 - RNA, 23 nt, Artificial Sequence
  Synthetic
aauucuuaucagaaacucacauu

SEQ ID NO: 122397 - RNA, 24 nt, Artificial Sequence
  Synthetic
aaauucuuaucagaaacucacauu

SEQ ID NO: 122398 - RNA, 18 nt, Artificial Sequence
  Synthetic
aauagcccccuucacauu

SEQ ID NO: 122399 - RNA, 19 nt, Artificial Sequence
  Synthetic
aaauagcccccuucacauu

SEQ ID NO: 122400 - RNA, 20 nt, Artificial Sequence
  Synthetic
aaaauagcccccuucacauu

SEQ ID NO: 122401 - RNA, 21 nt, Artificial Sequence
  Synthetic
aaaaauagcccccuucacauu

SEQ ID NO: 122402 - RNA, 22 nt, Artificial Sequence
  Synthetic
caaaaauagcccccuucacauu

SEQ ID NO: 122403 - RNA, 23 nt, Artificial Sequence
  Synthetic
acaaaaauagcccccuucacauu

SEQ ID NO: 122404 - RNA, 24 nt, Artificial Sequence
  Synthetic
cacaaaaauagcccccuucacauu

SEQ ID NO: 122405 - RNA, 21 nt, Artificial Sequence
  Synthetic
uaaguuaccaauuuucacauu

SEQ ID NO: 122406 - RNA, 22 nt, Artificial Sequence
  Synthetic
cuaaguuaccaauuuucacauu

SEQ ID NO: 122407 - RNA, 23 nt, Artificial Sequence
  Synthetic
acuaaguuaccaauuuucacauu

SEQ ID NO: 122408 - RNA, 24 nt, Artificial Sequence
  Synthetic
aacuaaguuaccaauuuucacauu

SEQ ID NO: 122409 - RNA, 18 nt, Artificial Sequence
  Synthetic
agccuugccccagacauu

SEQ ID NO: 122410 - RNA, 19 nt, Artificial Sequence
  Synthetic
uagccuugccccagacauu

SEQ ID NO: 122411 - RNA, 20 nt, Artificial Sequence
  Synthetic
uuagccuugccccagacauu

SEQ ID NO: 122412 - RNA, 21 nt, Artificial Sequence
  Synthetic
cuuagccuugccccagacauu

SEQ ID NO: 122413 - RNA, 22 nt, Artificial Sequence
  Synthetic
ucuuagccuugccccagacauu

SEQ ID NO: 122414 - RNA, 23 nt, Artificial Sequence
  Synthetic
uucuuagccuugccccagacauu

SEQ ID NO: 122415 - RNA, 24 nt, Artificial Sequence
  Synthetic
cuucuuagccuugccccagacauu

SEQ ID NO: 122416 - RNA, 21 nt, Artificial Sequence
  Synthetic
ucuuaagagguaacugacauu

SEQ ID NO: 122417 - RNA, 22 nt, Artificial Sequence
  Synthetic
aucuuaagagguaacugacauu

SEQ ID NO: 122418 - RNA, 23 nt, Artificial Sequence
  Synthetic
caucuuaagagguaacugacauu

SEQ ID NO: 122419 - RNA, 24 nt, Artificial Sequence
  Synthetic
ucaucuuaagagguaacugacauu

SEQ ID NO: 122420 - RNA, 18 nt, Artificial Sequence
  Synthetic
uaauuuuguucugacauu

SEQ ID NO: 122421 - RNA, 19 nt, Artificial Sequence
  Synthetic
cuaauuuuguucugacauu

SEQ ID NO: 122422 - RNA, 20 nt, Artificial Sequence
  Synthetic
ucuaauuuuguucugacauu

SEQ ID NO: 122423 - RNA, 21 nt, Artificial Sequence
  Synthetic
cucuaauuuuguucugacauu

SEQ ID NO: 122424 - RNA, 23 nt, Artificial Sequence
  Synthetic
ugcucuaauuuuguucugacauu

SEQ ID NO: 122425 - RNA, 24 nt, Artificial Sequence
  Synthetic
uugcucuaauuuuguucugacauu

SEQ ID NO: 122426 - RNA, 19 nt, Artificial Sequence
  Synthetic
ugauccauuccacuacauu

SEQ ID NO: 122427 - RNA, 20 nt, Artificial Sequence
  Synthetic
augauccauuccacuacauu

SEQ ID NO: 122428 - RNA, 21 nt, Artificial Sequence
  Synthetic
caugauccauuccacuacauu

SEQ ID NO: 122429 - RNA, 22 nt, Artificial Sequence
  Synthetic
ccaugauccauuccacuacauu

SEQ ID NO: 122430 - RNA, 23 nt, Artificial Sequence
  Synthetic
cccaugauccauuccacuacauu

SEQ ID NO: 122431 - RNA, 19 nt, Artificial Sequence
  Synthetic
aggcaaguuucuuuacauu

SEQ ID NO: 122432 - RNA, 20 nt, Artificial Sequence
  Synthetic
aaggcaaguuucuuuacauu

SEQ ID NO: 122433 - RNA, 21 nt, Artificial Sequence
  Synthetic
caaggcaaguuucuuuacauu

SEQ ID NO: 122434 - RNA, 22 nt, Artificial Sequence
  Synthetic
acaaggcaaguuucuuuacauu

SEQ ID NO: 122435 - RNA, 24 nt, Artificial Sequence
  Synthetic
agacaaggcaaguuucuuuacauu

SEQ ID NO: 122436 - RNA, 18 nt, Artificial Sequence
  Synthetic
uggcauuauaaaaccauu

SEQ ID NO: 122437 - RNA, 19 nt, Artificial Sequence
  Synthetic
uuggcauuauaaaaccauu

SEQ ID NO: 122438 - RNA, 20 nt, Artificial Sequence
  Synthetic
auuggcauuauaaaaccauu

SEQ ID NO: 122439 - RNA, 21 nt, Artificial Sequence
  Synthetic
aauuggcauuauaaaaccauu

SEQ ID NO: 122440 - RNA, 24 nt, Artificial Sequence
  Synthetic
uggaauuggcauuauaaaaccauu

SEQ ID NO: 122441 - RNA, 18 nt, Artificial Sequence
  Synthetic
ccagcuuaugaaaccauu

SEQ ID NO: 122442 - RNA, 19 nt, Artificial Sequence
  Synthetic
accagcuuaugaaaccauu

SEQ ID NO: 122443 - RNA, 20 nt, Artificial Sequence
  Synthetic
aaccagcuuaugaaaccauu

SEQ ID NO: 122444 - RNA, 21 nt, Artificial Sequence
  Synthetic
caaccagcuuaugaaaccauu

SEQ ID NO: 122445 - RNA, 22 nt, Artificial Sequence
  Synthetic
ucaaccagcuuaugaaaccauu

SEQ ID NO: 122446 - RNA, 23 nt, Artificial Sequence
  Synthetic
aucaaccagcuuaugaaaccauu

SEQ ID NO: 122447 - RNA, 24 nt, Artificial Sequence
  Synthetic
aaucaaccagcuuaugaaaccauu

SEQ ID NO: 122448 - RNA, 20 nt, Artificial Sequence
  Synthetic
aggcuccuaaggugaccauu

SEQ ID NO: 122449 - RNA, 21 nt, Artificial Sequence
  Synthetic
uaggcuccuaaggugaccauu

SEQ ID NO: 122450 - RNA, 22 nt, Artificial Sequence
  Synthetic
auaggcuccuaaggugaccauu

SEQ ID NO: 122451 - RNA, 23 nt, Artificial Sequence
  Synthetic
uauaggcuccuaaggugaccauu

SEQ ID NO: 122452 - RNA, 19 nt, Artificial Sequence
  Synthetic
agauuuauuccuugccauu

SEQ ID NO: 122453 - RNA, 20 nt, Artificial Sequence
  Synthetic
uagauuuauuccuugccauu

SEQ ID NO: 122454 - RNA, 21 nt, Artificial Sequence
  Synthetic
auagauuuauuccuugccauu

SEQ ID NO: 122455 - RNA, 22 nt, Artificial Sequence
  Synthetic
aauagauuuauuccuugccauu

SEQ ID NO: 122456 - RNA, 23 nt, Artificial Sequence
  Synthetic
uaauagauuuauuccuugccauu

SEQ ID NO: 122457 - RNA, 18 nt, Artificial Sequence
  Synthetic
acaugucuucaauccauu

SEQ ID NO: 122458 - RNA, 19 nt, Artificial Sequence
  Synthetic
cacaugucuucaauccauu

SEQ ID NO: 122459 - RNA, 20 nt, Artificial Sequence
  Synthetic
acacaugucuucaauccauu

SEQ ID NO: 122460 - RNA, 21 nt, Artificial Sequence
  Synthetic
aacacaugucuucaauccauu

SEQ ID NO: 122461 - RNA, 22 nt, Artificial Sequence
  Synthetic
aaacacaugucuucaauccauu

SEQ ID NO: 122462 - RNA, 23 nt, Artificial Sequence
  Synthetic
uaaacacaugucuucaauccauu

SEQ ID NO: 122463 - RNA, 24 nt, Artificial Sequence
  Synthetic
uuaaacacaugucuucaauccauu

SEQ ID NO: 122464 - RNA, 18 nt, Artificial Sequence
  Synthetic
uaaugccucuucuccauu

SEQ ID NO: 122465 - RNA, 19 nt, Artificial Sequence
  Synthetic
auaaugccucuucuccauu

SEQ ID NO: 122466 - RNA, 21 nt, Artificial Sequence
  Synthetic
agauaaugccucuucuccauu

SEQ ID NO: 122467 - RNA, 22 nt, Artificial Sequence
  Synthetic
cagauaaugccucuucuccauu

SEQ ID NO: 122468 - RNA, 23 nt, Artificial Sequence
  Synthetic
acagauaaugccucuucuccauu

SEQ ID NO: 122469 - RNA, 24 nt, Artificial Sequence
  Synthetic
uacagauaaugccucuucuccauu

SEQ ID NO: 122470 - RNA, 18 nt, Artificial Sequence
  Synthetic
aaucauguuaauuccauu

SEQ ID NO: 122471 - RNA, 19 nt, Artificial Sequence
  Synthetic
uaaucauguuaauuccauu

SEQ ID NO: 122472 - RNA, 20 nt, Artificial Sequence
  Synthetic
uuaaucauguuaauuccauu

SEQ ID NO: 122473 - RNA, 21 nt, Artificial Sequence
  Synthetic
auuaaucauguuaauuccauu

SEQ ID NO: 122474 - RNA, 22 nt, Artificial Sequence
  Synthetic
aauuaaucauguuaauuccauu

SEQ ID NO: 122475 - RNA, 24 nt, Artificial Sequence
  Synthetic
agaauuaaucauguuaauuccauu

SEQ ID NO: 122476 - RNA, 21 nt, Artificial Sequence
  Synthetic
aaagagaaaaggaagagcauu

SEQ ID NO: 122477 - RNA, 22 nt, Artificial Sequence
  Synthetic
caaagagaaaaggaagagcauu

SEQ ID NO: 122478 - RNA, 23 nt, Artificial Sequence
  Synthetic
acaaagagaaaaggaagagcauu

SEQ ID NO: 122479 - RNA, 24 nt, Artificial Sequence
  Synthetic
cacaaagagaaaaggaagagcauu

SEQ ID NO: 122480 - RNA, 21 nt, Artificial Sequence
  Synthetic
uggggagauggggggagcauu

SEQ ID NO: 122481 - RNA, 22 nt, Artificial Sequence
  Synthetic
cuggggagauggggggagcauu

SEQ ID NO: 122482 - RNA, 23 nt, Artificial Sequence
  Synthetic
ucuggggagauggggggagcauu

SEQ ID NO: 122483 - RNA, 24 nt, Artificial Sequence
  Synthetic
uucuggggagauggggggagcauu

SEQ ID NO: 122484 - RNA, 18 nt, Artificial Sequence
  Synthetic
agggggauggggagcauu

SEQ ID NO: 122485 - RNA, 20 nt, Artificial Sequence
  Synthetic
ugagggggauggggagcauu

SEQ ID NO: 122486 - RNA, 21 nt, Artificial Sequence
  Synthetic
uugagggggauggggagcauu

SEQ ID NO: 122487 - RNA, 22 nt, Artificial Sequence
  Synthetic
uuugagggggauggggagcauu

SEQ ID NO: 122488 - RNA, 23 nt, Artificial Sequence
  Synthetic
cuuugagggggauggggagcauu

SEQ ID NO: 122489 - RNA, 24 nt, Artificial Sequence
  Synthetic
acuuugagggggauggggagcauu

SEQ ID NO: 122490 - RNA, 18 nt, Artificial Sequence
  Synthetic
ucaauauuaacaggcauu

SEQ ID NO: 122491 - RNA, 19 nt, Artificial Sequence
  Synthetic
uucaauauuaacaggcauu

SEQ ID NO: 122492 - RNA, 20 nt, Artificial Sequence
  Synthetic
auucaauauuaacaggcauu

SEQ ID NO: 122493 - RNA, 21 nt, Artificial Sequence
  Synthetic
cauucaauauuaacaggcauu

SEQ ID NO: 122494 - RNA, 22 nt, Artificial Sequence
  Synthetic
acauucaauauuaacaggcauu

SEQ ID NO: 122495 - RNA, 23 nt, Artificial Sequence
  Synthetic
aacauucaauauuaacaggcauu

SEQ ID NO: 122496 - RNA, 24 nt, Artificial Sequence
  Synthetic
aaacauucaauauuaacaggcauu

SEQ ID NO: 122497 - RNA, 18 nt, Artificial Sequence
  Synthetic
cucccaugaucuggcauu

SEQ ID NO: 122498 - RNA, 20 nt, Artificial Sequence
  Synthetic
cgcucccaugaucuggcauu

SEQ ID NO: 122499 - RNA, 21 nt, Artificial Sequence
  Synthetic
ccgcucccaugaucuggcauu

SEQ ID NO: 122500 - RNA, 22 nt, Artificial Sequence
  Synthetic
cccgcucccaugaucuggcauu

SEQ ID NO: 122501 - RNA, 23 nt, Artificial Sequence
  Synthetic
ccccgcucccaugaucuggcauu

SEQ ID NO: 122502 - RNA, 18 nt, Artificial Sequence
  Synthetic
aaacuaguguuuggcauu

SEQ ID NO: 122503 - RNA, 19 nt, Artificial Sequence
  Synthetic
caaacuaguguuuggcauu

SEQ ID NO: 122504 - RNA, 20 nt, Artificial Sequence
  Synthetic
acaaacuaguguuuggcauu

SEQ ID NO: 122505 - RNA, 21 nt, Artificial Sequence
  Synthetic
cacaaacuaguguuuggcauu

SEQ ID NO: 122506 - RNA, 23 nt, Artificial Sequence
  Synthetic
ugcacaaacuaguguuuggcauu

SEQ ID NO: 122507 - RNA, 18 nt, Artificial Sequence
  Synthetic
aaaaauacugcaugcauu

SEQ ID NO: 122508 - RNA, 19 nt, Artificial Sequence
  Synthetic
caaaaauacugcaugcauu

SEQ ID NO: 122509 - RNA, 21 nt, Artificial Sequence
  Synthetic
ugcaaaaauacugcaugcauu

SEQ ID NO: 122510 - RNA, 22 nt, Artificial Sequence
  Synthetic
augcaaaaauacugcaugcauu

SEQ ID NO: 122511 - RNA, 23 nt, Artificial Sequence
  Synthetic
uaugcaaaaauacugcaugcauu

SEQ ID NO: 122512 - RNA, 24 nt, Artificial Sequence
  Synthetic
cuaugcaaaaauacugcaugcauu

SEQ ID NO: 122513 - RNA, 18 nt, Artificial Sequence
  Synthetic
aacuucacuuauugcauu

SEQ ID NO: 122514 - RNA, 19 nt, Artificial Sequence
  Synthetic
uaacuucacuuauugcauu

SEQ ID NO: 122515 - RNA, 20 nt, Artificial Sequence
  Synthetic
auaacuucacuuauugcauu

SEQ ID NO: 122516 - RNA, 21 nt, Artificial Sequence
  Synthetic
cauaacuucacuuauugcauu

SEQ ID NO: 122517 - RNA, 22 nt, Artificial Sequence
  Synthetic
ucauaacuucacuuauugcauu

SEQ ID NO: 122518 - RNA, 23 nt, Artificial Sequence
  Synthetic
cucauaacuucacuuauugcauu

SEQ ID NO: 122519 - RNA, 24 nt, Artificial Sequence
  Synthetic
ucucauaacuucacuuauugcauu

SEQ ID NO: 122520 - RNA, 21 nt, Artificial Sequence
  Synthetic
auaaaaucauaaauaaucauu

SEQ ID NO: 122521 - RNA, 22 nt, Artificial Sequence
  Synthetic
cauaaaaucauaaauaaucauu

SEQ ID NO: 122522 - RNA, 23 nt, Artificial Sequence
  Synthetic
acauaaaaucauaaauaaucauu

SEQ ID NO: 122523 - RNA, 24 nt, Artificial Sequence
  Synthetic
aacauaaaaucauaaauaaucauu

SEQ ID NO: 122524 - RNA, 18 nt, Artificial Sequence
  Synthetic
cucagcuauucuaucauu

SEQ ID NO: 122525 - RNA, 21 nt, Artificial Sequence
  Synthetic
aggcucagcuauucuaucauu

SEQ ID NO: 122526 - RNA, 22 nt, Artificial Sequence
  Synthetic
caggcucagcuauucuaucauu

SEQ ID NO: 122527 - RNA, 23 nt, Artificial Sequence
  Synthetic
ucaggcucagcuauucuaucauu

SEQ ID NO: 122528 - RNA, 24 nt, Artificial Sequence
  Synthetic
uucaggcucagcuauucuaucauu

SEQ ID NO: 122529 - RNA, 19 nt, Artificial Sequence
  Synthetic
uguaauaaauuggcucauu

SEQ ID NO: 122530 - RNA, 20 nt, Artificial Sequence
  Synthetic
uuguaauaaauuggcucauu

SEQ ID NO: 122531 - RNA, 21 nt, Artificial Sequence
  Synthetic
auuguaauaaauuggcucauu

SEQ ID NO: 122532 - RNA, 22 nt, Artificial Sequence
  Synthetic
uauuguaauaaauuggcucauu

SEQ ID NO: 122533 - RNA, 23 nt, Artificial Sequence
  Synthetic
uuauuguaauaaauuggcucauu

SEQ ID NO: 122534 - RNA, 24 nt, Artificial Sequence
  Synthetic
cuuauuguaauaaauuggcucauu

SEQ ID NO: 122535 - RNA, 19 nt, Artificial Sequence
  Synthetic
agaaccccucaugcucauu

SEQ ID NO: 122536 - RNA, 20 nt, Artificial Sequence
  Synthetic
cagaaccccucaugcucauu

SEQ ID NO: 122537 - RNA, 21 nt, Artificial Sequence
  Synthetic
ucagaaccccucaugcucauu

SEQ ID NO: 122538 - RNA, 22 nt, Artificial Sequence
  Synthetic
uucagaaccccucaugcucauu

SEQ ID NO: 122539 - RNA, 23 nt, Artificial Sequence
  Synthetic
auucagaaccccucaugcucauu

SEQ ID NO: 122540 - RNA, 18 nt, Artificial Sequence
  Synthetic
aauugcucucaucucauu

SEQ ID NO: 122541 - RNA, 19 nt, Artificial Sequence
  Synthetic
caauugcucucaucucauu

SEQ ID NO: 122542 - RNA, 20 nt, Artificial Sequence
  Synthetic
acaauugcucucaucucauu

SEQ ID NO: 122543 - RNA, 21 nt, Artificial Sequence
  Synthetic
uacaauugcucucaucucauu

SEQ ID NO: 122544 - RNA, 22 nt, Artificial Sequence
  Synthetic
uuacaauugcucucaucucauu

SEQ ID NO: 122545 - RNA, 23 nt, Artificial Sequence
  Synthetic
cuuacaauugcucucaucucauu

SEQ ID NO: 122546 - RNA, 24 nt, Artificial Sequence
  Synthetic
acuuacaauugcucucaucucauu

SEQ ID NO: 122547 - RNA, 19 nt, Artificial Sequence
  Synthetic
aggcaggaguucucucauu

SEQ ID NO: 122548 - RNA, 20 nt, Artificial Sequence
  Synthetic
aaggcaggaguucucucauu

SEQ ID NO: 122549 - RNA, 21 nt, Artificial Sequence
  Synthetic
uaaggcaggaguucucucauu

SEQ ID NO: 122550 - RNA, 22 nt, Artificial Sequence
  Synthetic
uuaaggcaggaguucucucauu

SEQ ID NO: 122551 - RNA, 23 nt, Artificial Sequence
  Synthetic
auuaaggcaggaguucucucauu

SEQ ID NO: 122552 - RNA, 24 nt, Artificial Sequence
  Synthetic
aauuaaggcaggaguucucucauu

SEQ ID NO: 122553 - RNA, 18 nt, Artificial Sequence
  Synthetic
aaagcacuuacagucauu

SEQ ID NO: 122554 - RNA, 19 nt, Artificial Sequence
  Synthetic
aaaagcacuuacagucauu

SEQ ID NO: 122555 - RNA, 20 nt, Artificial Sequence
  Synthetic
caaaagcacuuacagucauu

SEQ ID NO: 122556 - RNA, 21 nt, Artificial Sequence
  Synthetic
acaaaagcacuuacagucauu

SEQ ID NO: 122557 - RNA, 22 nt, Artificial Sequence
  Synthetic
aacaaaagcacuuacagucauu

SEQ ID NO: 122558 - RNA, 24 nt, Artificial Sequence
  Synthetic
agaacaaaagcacuuacagucauu

SEQ ID NO: 122559 - RNA, 18 nt, Artificial Sequence
  Synthetic
aagaguaggaaggucauu

SEQ ID NO: 122560 - RNA, 19 nt, Artificial Sequence
  Synthetic
caagaguaggaaggucauu

SEQ ID NO: 122561 - RNA, 20 nt, Artificial Sequence
  Synthetic
acaagaguaggaaggucauu

SEQ ID NO: 122562 - RNA, 24 nt, Artificial Sequence
  Synthetic
agggacaagaguaggaaggucauu

SEQ ID NO: 122563 - RNA, 18 nt, Artificial Sequence
  Synthetic
uaaugaacuacugucauu

SEQ ID NO: 122564 - RNA, 19 nt, Artificial Sequence
  Synthetic
auaaugaacuacugucauu

SEQ ID NO: 122565 - RNA, 20 nt, Artificial Sequence
  Synthetic
aauaaugaacuacugucauu

SEQ ID NO: 122566 - RNA, 21 nt, Artificial Sequence
  Synthetic
aaauaaugaacuacugucauu

SEQ ID NO: 122567 - RNA, 22 nt, Artificial Sequence
  Synthetic
aaaauaaugaacuacugucauu

SEQ ID NO: 122568 - RNA, 23 nt, Artificial Sequence
  Synthetic
caaaauaaugaacuacugucauu

SEQ ID NO: 122569 - RNA, 24 nt, Artificial Sequence
  Synthetic
ucaaaauaaugaacuacugucauu

SEQ ID NO: 122570 - RNA, 18 nt, Artificial Sequence
  Synthetic
cuaggaaauucugucauu

SEQ ID NO: 122571 - RNA, 19 nt, Artificial Sequence
  Synthetic
ccuaggaaauucugucauu

SEQ ID NO: 122572 - RNA, 20 nt, Artificial Sequence
  Synthetic
accuaggaaauucugucauu

SEQ ID NO: 122573 - RNA, 18 nt, Artificial Sequence
  Synthetic
caaaucacacaauucauu

SEQ ID NO: 122574 - RNA, 19 nt, Artificial Sequence
  Synthetic
ucaaaucacacaauucauu

SEQ ID NO: 122575 - RNA, 21 nt, Artificial Sequence
  Synthetic
agucaaaucacacaauucauu

SEQ ID NO: 122576 - RNA, 22 nt, Artificial Sequence
  Synthetic
uagucaaaucacacaauucauu

SEQ ID NO: 122577 - RNA, 23 nt, Artificial Sequence
  Synthetic
auagucaaaucacacaauucauu

SEQ ID NO: 122578 - RNA, 24 nt, Artificial Sequence
  Synthetic
aauagucaaaucacacaauucauu

SEQ ID NO: 122579 - RNA, 18 nt, Artificial Sequence
  Synthetic
ccccaguggcuauucauu

SEQ ID NO: 122580 - RNA, 19 nt, Artificial Sequence
  Synthetic
cccccaguggcuauucauu

SEQ ID NO: 122581 - RNA, 20 nt, Artificial Sequence
  Synthetic
ccccccaguggcuauucauu

SEQ ID NO: 122582 - RNA, 21 nt, Artificial Sequence
  Synthetic
uccccccaguggcuauucauu

SEQ ID NO: 122583 - RNA, 22 nt, Artificial Sequence
  Synthetic
uuccccccaguggcuauucauu

SEQ ID NO: 122584 - RNA, 23 nt, Artificial Sequence
  Synthetic
uuuccccccaguggcuauucauu

SEQ ID NO: 122585 - RNA, 24 nt, Artificial Sequence
  Synthetic
uuuuccccccaguggcuauucauu

SEQ ID NO: 122586 - RNA, 18 nt, Artificial Sequence
  Synthetic
uaaguauuguccuucauu

SEQ ID NO: 122587 - RNA, 19 nt, Artificial Sequence
  Synthetic
uuaaguauuguccuucauu

SEQ ID NO: 122588 - RNA, 20 nt, Artificial Sequence
  Synthetic
cuuaaguauuguccuucauu

SEQ ID NO: 122589 - RNA, 21 nt, Artificial Sequence
  Synthetic
ucuuaaguauuguccuucauu

SEQ ID NO: 122590 - RNA, 22 nt, Artificial Sequence
  Synthetic
cucuuaaguauuguccuucauu

SEQ ID NO: 122591 - RNA, 23 nt, Artificial Sequence
  Synthetic
acucuuaaguauuguccuucauu

SEQ ID NO: 122592 - RNA, 18 nt, Artificial Sequence
  Synthetic
uagaaugucacguucauu

SEQ ID NO: 122593 - RNA, 19 nt, Artificial Sequence
  Synthetic
auagaaugucacguucauu

SEQ ID NO: 122594 - RNA, 20 nt, Artificial Sequence
  Synthetic
uauagaaugucacguucauu

SEQ ID NO: 122595 - RNA, 21 nt, Artificial Sequence
  Synthetic
cuauagaaugucacguucauu

SEQ ID NO: 122596 - RNA, 22 nt, Artificial Sequence
  Synthetic
ccuauagaaugucacguucauu

SEQ ID NO: 122597 - RNA, 23 nt, Artificial Sequence
  Synthetic
accuauagaaugucacguucauu

SEQ ID NO: 122598 - RNA, 19 nt, Artificial Sequence
  Synthetic
aggaacacuaaauuucauu

SEQ ID NO: 122599 - RNA, 20 nt, Artificial Sequence
  Synthetic
caggaacacuaaauuucauu

SEQ ID NO: 122600 - RNA, 22 nt, Artificial Sequence
  Synthetic
ugcaggaacacuaaauuucauu

SEQ ID NO: 122601 - RNA, 23 nt, Artificial Sequence
  Synthetic
cugcaggaacacuaaauuucauu

SEQ ID NO: 122602 - RNA, 18 nt, Artificial Sequence
  Synthetic
auacuauaauauuucauu

SEQ ID NO: 122603 - RNA, 19 nt, Artificial Sequence
  Synthetic
uauacuauaauauuucauu

SEQ ID NO: 122604 - RNA, 23 nt, Artificial Sequence
  Synthetic
uggguauacuauaauauuucauu

SEQ ID NO: 122605 - RNA, 24 nt, Artificial Sequence
  Synthetic
cuggguauacuauaauauuucauu

SEQ ID NO: 122606 - RNA, 21 nt, Artificial Sequence
  Synthetic
aauuauuuucauuauuucauu

SEQ ID NO: 122607 - RNA, 22 nt, Artificial Sequence
  Synthetic
uaauuauuuucauuauuucauu

SEQ ID NO: 122608 - RNA, 23 nt, Artificial Sequence
  Synthetic
uuaauuauuuucauuauuucauu

SEQ ID NO: 122609 - RNA, 24 nt, Artificial Sequence
  Synthetic
uuuaauuauuuucauuauuucauu

SEQ ID NO: 122610 - RNA, 18 nt, Artificial Sequence
  Synthetic
uagacuucuuauuucauu

SEQ ID NO: 122611 - RNA, 20 nt, Artificial Sequence
  Synthetic
aguagacuucuuauuucauu

SEQ ID NO: 122612 - RNA, 22 nt, Artificial Sequence
  Synthetic
agaguagacuucuuauuucauu

SEQ ID NO: 122613 - RNA, 23 nt, Artificial Sequence
  Synthetic
aagaguagacuucuuauuucauu

SEQ ID NO: 122614 - RNA, 24 nt, Artificial Sequence
  Synthetic
aaagaguagacuucuuauuucauu

SEQ ID NO: 122615 - RNA, 18 nt, Artificial Sequence
  Synthetic
cuucacuuuguuuucauu

SEQ ID NO: 122616 - RNA, 19 nt, Artificial Sequence
  Synthetic
ccuucacuuuguuuucauu

SEQ ID NO: 122617 - RNA, 22 nt, Artificial Sequence
  Synthetic
uggccuucacuuuguuuucauu

SEQ ID NO: 122618 - RNA, 24 nt, Artificial Sequence
  Synthetic
aguggccuucacuuuguuuucauu

SEQ ID NO: 122619 - RNA, 21 nt, Artificial Sequence
  Synthetic
caaauuccugcuuucaagauu

SEQ ID NO: 122620 - RNA, 22 nt, Artificial Sequence
  Synthetic
ccaaauuccugcuuucaagauu

SEQ ID NO: 122621 - RNA, 23 nt, Artificial Sequence
  Synthetic
uccaaauuccugcuuucaagauu

SEQ ID NO: 122622 - RNA, 24 nt, Artificial Sequence
  Synthetic
auccaaauuccugcuuucaagauu

SEQ ID NO: 122623 - RNA, 18 nt, Artificial Sequence
  Synthetic
aaagucaacgauaagauu

SEQ ID NO: 122624 - RNA, 19 nt, Artificial Sequence
  Synthetic
aaaagucaacgauaagauu

SEQ ID NO: 122625 - RNA, 18 nt, Artificial Sequence
  Synthetic
ucuauauuaaagcagauu

SEQ ID NO: 122626 - RNA, 19 nt, Artificial Sequence
  Synthetic
uucuauauuaaagcagauu

SEQ ID NO: 122627 - RNA, 20 nt, Artificial Sequence
  Synthetic
cuucuauauuaaagcagauu

SEQ ID NO: 122628 - RNA, 21 nt, Artificial Sequence
  Synthetic
ucuucuauauuaaagcagauu

SEQ ID NO: 122629 - RNA, 22 nt, Artificial Sequence
  Synthetic
aucuucuauauuaaagcagauu

SEQ ID NO: 122630 - RNA, 23 nt, Artificial Sequence
  Synthetic
uaucuucuauauuaaagcagauu

SEQ ID NO: 122631 - RNA, 18 nt, Artificial Sequence
  Synthetic
aagcguagugugcagauu

SEQ ID NO: 122632 - RNA, 20 nt, Artificial Sequence
  Synthetic
agaagcguagugugcagauu

SEQ ID NO: 122633 - RNA, 21 nt, Artificial Sequence
  Synthetic
aagaagcguagugugcagauu

SEQ ID NO: 122634 - RNA, 22 nt, Artificial Sequence
  Synthetic
aaagaagcguagugugcagauu

SEQ ID NO: 122635 - RNA, 23 nt, Artificial Sequence
  Synthetic
aaaagaagcguagugugcagauu

SEQ ID NO: 122636 - RNA, 24 nt, Artificial Sequence
  Synthetic
aaaaagaagcguagugugcagauu

SEQ ID NO: 122637 - RNA, 20 nt, Artificial Sequence
  Synthetic
aggccucagaguugcagauu

SEQ ID NO: 122638 - RNA, 21 nt, Artificial Sequence
  Synthetic
uaggccucagaguugcagauu

SEQ ID NO: 122639 - RNA, 22 nt, Artificial Sequence
  Synthetic
auaggccucagaguugcagauu

SEQ ID NO: 122640 - RNA, 23 nt, Artificial Sequence
  Synthetic
cauaggccucagaguugcagauu

SEQ ID NO: 122641 - RNA, 18 nt, Artificial Sequence
  Synthetic
ucaaccuacagucagauu

SEQ ID NO: 122642 - RNA, 21 nt, Artificial Sequence
  Synthetic
uggucaaccuacagucagauu

SEQ ID NO: 122643 - RNA, 22 nt, Artificial Sequence
  Synthetic
uuggucaaccuacagucagauu

SEQ ID NO: 122644 - RNA, 23 nt, Artificial Sequence
  Synthetic
uuuggucaaccuacagucagauu

SEQ ID NO: 122645 - RNA, 18 nt, Artificial Sequence
  Synthetic
aauaggauaaaagagauu

SEQ ID NO: 122646 - RNA, 19 nt, Artificial Sequence
  Synthetic
caauaggauaaaagagauu

SEQ ID NO: 122647 - RNA, 20 nt, Artificial Sequence
  Synthetic
acaauaggauaaaagagauu

SEQ ID NO: 122648 - RNA, 21 nt, Artificial Sequence
  Synthetic
uacaauaggauaaaagagauu

SEQ ID NO: 122649 - RNA, 22 nt, Artificial Sequence
  Synthetic
uuacaauaggauaaaagagauu

SEQ ID NO: 122650 - RNA, 23 nt, Artificial Sequence
  Synthetic
auuacaauaggauaaaagagauu

SEQ ID NO: 122651 - RNA, 24 nt, Artificial Sequence
  Synthetic
aauuacaauaggauaaaagagauu

SEQ ID NO: 122652 - RNA, 18 nt, Artificial Sequence
  Synthetic
cagcaugagucauagauu

SEQ ID NO: 122653 - RNA, 21 nt, Artificial Sequence
  Synthetic
aggcagcaugagucauagauu

SEQ ID NO: 122654 - RNA, 22 nt, Artificial Sequence
  Synthetic
aaggcagcaugagucauagauu

SEQ ID NO: 122655 - RNA, 23 nt, Artificial Sequence
  Synthetic
uaaggcagcaugagucauagauu

SEQ ID NO: 122656 - RNA, 24 nt, Artificial Sequence
  Synthetic
auaaggcagcaugagucauagauu

SEQ ID NO: 122657 - RNA, 20 nt, Artificial Sequence
  Synthetic
aggagagauagugauagauu

SEQ ID NO: 122658 - RNA, 21 nt, Artificial Sequence
  Synthetic
aaggagagauagugauagauu

SEQ ID NO: 122659 - RNA, 22 nt, Artificial Sequence
  Synthetic
aaaggagagauagugauagauu

SEQ ID NO: 122660 - RNA, 23 nt, Artificial Sequence
  Synthetic
aaaaggagagauagugauagauu

SEQ ID NO: 122661 - RNA, 18 nt, Artificial Sequence
  Synthetic
cuucuuuucaccuagauu

SEQ ID NO: 122662 - RNA, 19 nt, Artificial Sequence
  Synthetic
ucuucuuuucaccuagauu

SEQ ID NO: 122663 - RNA, 20 nt, Artificial Sequence
  Synthetic
uucuucuuuucaccuagauu

SEQ ID NO: 122664 - RNA, 18 nt, Artificial Sequence
  Synthetic
acuucuauuuuagcgauu

SEQ ID NO: 122665 - RNA, 19 nt, Artificial Sequence
  Synthetic
cacuucuauuuuagcgauu

SEQ ID NO: 122666 - RNA, 21 nt, Artificial Sequence
  Synthetic
cgcacuucuauuuuagcgauu

SEQ ID NO: 122667 - RNA, 22 nt, Artificial Sequence
  Synthetic
ucgcacuucuauuuuagcgauu

SEQ ID NO: 122668 - RNA, 23 nt, Artificial Sequence
  Synthetic
cucgcacuucuauuuuagcgauu

SEQ ID NO: 122669 - RNA, 18 nt, Artificial Sequence
  Synthetic
cuucaauaaacaucgauu

SEQ ID NO: 122670 - RNA, 19 nt, Artificial Sequence
  Synthetic
ucuucaauaaacaucgauu

SEQ ID NO: 122671 - RNA, 20 nt, Artificial Sequence
  Synthetic
uucuucaauaaacaucgauu

SEQ ID NO: 122672 - RNA, 21 nt, Artificial Sequence
  Synthetic
uuucuucaauaaacaucgauu

SEQ ID NO: 122673 - RNA, 22 nt, Artificial Sequence
  Synthetic
auuucuucaauaaacaucgauu

SEQ ID NO: 122674 - RNA, 23 nt, Artificial Sequence
  Synthetic
aauuucuucaauaaacaucgauu

SEQ ID NO: 122675 - RNA, 24 nt, Artificial Sequence
  Synthetic
uaauuucuucaauaaacaucgauu

SEQ ID NO: 122676 - RNA, 18 nt, Artificial Sequence
  Synthetic
auuaaaaaugcaaggauu

SEQ ID NO: 122677 - RNA, 19 nt, Artificial Sequence
  Synthetic
aauuaaaaaugcaaggauu

SEQ ID NO: 122678 - RNA, 20 nt, Artificial Sequence
  Synthetic
aaauuaaaaaugcaaggauu

SEQ ID NO: 122679 - RNA, 21 nt, Artificial Sequence
  Synthetic
aaaauuaaaaaugcaaggauu

SEQ ID NO: 122680 - RNA, 22 nt, Artificial Sequence
  Synthetic
uaaaauuaaaaaugcaaggauu

SEQ ID NO: 122681 - RNA, 23 nt, Artificial Sequence
  Synthetic
cuaaaauuaaaaaugcaaggauu

SEQ ID NO: 122682 - RNA, 24 nt, Artificial Sequence
  Synthetic
ucuaaaauuaaaaaugcaaggauu

SEQ ID NO: 122683 - RNA, 19 nt, Artificial Sequence
  Synthetic
agaagggcacaucaggauu

SEQ ID NO: 122684 - RNA, 20 nt, Artificial Sequence
  Synthetic
aagaagggcacaucaggauu

SEQ ID NO: 122685 - RNA, 21 nt, Artificial Sequence
  Synthetic
aaagaagggcacaucaggauu

SEQ ID NO: 122686 - RNA, 24 nt, Artificial Sequence
  Synthetic
uggaaagaagggcacaucaggauu

SEQ ID NO: 122687 - RNA, 18 nt, Artificial Sequence
  Synthetic
auaagaugaaagaggauu

SEQ ID NO: 122688 - RNA, 19 nt, Artificial Sequence
  Synthetic
cauaagaugaaagaggauu

SEQ ID NO: 122689 - RNA, 20 nt, Artificial Sequence
  Synthetic
ccauaagaugaaagaggauu

SEQ ID NO: 122690 - RNA, 21 nt, Artificial Sequence
  Synthetic
uccauaagaugaaagaggauu

SEQ ID NO: 122691 - RNA, 22 nt, Artificial Sequence
  Synthetic
cuccauaagaugaaagaggauu

SEQ ID NO: 122692 - RNA, 23 nt, Artificial Sequence
  Synthetic
ucuccauaagaugaaagaggauu

SEQ ID NO: 122693 - RNA, 24 nt, Artificial Sequence
  Synthetic
uucuccauaagaugaaagaggauu

SEQ ID NO: 122694 - RNA, 18 nt, Artificial Sequence
  Synthetic
uuauggcuaaugaggauu

SEQ ID NO: 122695 - RNA, 19 nt, Artificial Sequence
  Synthetic
cuuauggcuaaugaggauu

SEQ ID NO: 122696 - RNA, 20 nt, Artificial Sequence
  Synthetic
ccuuauggcuaaugaggauu

SEQ ID NO: 122697 - RNA, 21 nt, Artificial Sequence
  Synthetic
accuuauggcuaaugaggauu

SEQ ID NO: 122698 - RNA, 22 nt, Artificial Sequence
  Synthetic
aaccuuauggcuaaugaggauu

SEQ ID NO: 122699 - RNA, 23 nt, Artificial Sequence
  Synthetic
caaccuuauggcuaaugaggauu

SEQ ID NO: 122700 - RNA, 24 nt, Artificial Sequence
  Synthetic
acaaccuuauggcuaaugaggauu

SEQ ID NO: 122701 - RNA, 18 nt, Artificial Sequence
  Synthetic
uuuacuuagucuaggauu

SEQ ID NO: 122702 - RNA, 19 nt, Artificial Sequence
  Synthetic
auuuacuuagucuaggauu

SEQ ID NO: 122703 - RNA, 20 nt, Artificial Sequence
  Synthetic
aauuuacuuagucuaggauu

SEQ ID NO: 122704 - RNA, 21 nt, Artificial Sequence
  Synthetic
aaauuuacuuagucuaggauu

SEQ ID NO: 122705 - RNA, 22 nt, Artificial Sequence
  Synthetic
uaaauuuacuuagucuaggauu

SEQ ID NO: 122706 - RNA, 23 nt, Artificial Sequence
  Synthetic
auaaauuuacuuagucuaggauu

SEQ ID NO: 122707 - RNA, 24 nt, Artificial Sequence
  Synthetic
aauaaauuuacuuagucuaggauu

SEQ ID NO: 122708 - RNA, 21 nt, Artificial Sequence
  Synthetic
aacucuacuacccuuaggauu

SEQ ID NO: 122709 - RNA, 22 nt, Artificial Sequence
  Synthetic
uaacucuacuacccuuaggauu

SEQ ID NO: 122710 - RNA, 18 nt, Artificial Sequence
  Synthetic
cucccagguaaggggauu

SEQ ID NO: 122711 - RNA, 19 nt, Artificial Sequence
  Synthetic
ucucccagguaaggggauu

SEQ ID NO: 122712 - RNA, 20 nt, Artificial Sequence
  Synthetic
uucucccagguaaggggauu

SEQ ID NO: 122713 - RNA, 21 nt, Artificial Sequence
  Synthetic
auucucccagguaaggggauu

SEQ ID NO: 122714 - RNA, 22 nt, Artificial Sequence
  Synthetic
cauucucccagguaaggggauu

SEQ ID NO: 122715 - RNA, 23 nt, Artificial Sequence
  Synthetic
acauucucccagguaaggggauu

SEQ ID NO: 122716 - RNA, 19 nt, Artificial Sequence
  Synthetic
agggaaaaaauaugggauu

SEQ ID NO: 122717 - RNA, 20 nt, Artificial Sequence
  Synthetic
uagggaaaaaauaugggauu

SEQ ID NO: 122718 - RNA, 21 nt, Artificial Sequence
  Synthetic
uuagggaaaaaauaugggauu

SEQ ID NO: 122719 - RNA, 22 nt, Artificial Sequence
  Synthetic
uuuagggaaaaaauaugggauu

SEQ ID NO: 122720 - RNA, 23 nt, Artificial Sequence
  Synthetic
auuuagggaaaaaauaugggauu

SEQ ID NO: 122721 - RNA, 24 nt, Artificial Sequence
  Synthetic
cauuuagggaaaaaauaugggauu

SEQ ID NO: 122722 - RNA, 18 nt, Artificial Sequence
  Synthetic
cuugugaaaaaauggauu

SEQ ID NO: 122723 - RNA, 19 nt, Artificial Sequence
  Synthetic
acuugugaaaaaauggauu

SEQ ID NO: 122724 - RNA, 20 nt, Artificial Sequence
  Synthetic
aacuugugaaaaaauggauu

SEQ ID NO: 122725 - RNA, 21 nt, Artificial Sequence
  Synthetic
aaacuugugaaaaaauggauu

SEQ ID NO: 122726 - RNA, 22 nt, Artificial Sequence
  Synthetic
aaaacuugugaaaaaauggauu

SEQ ID NO: 122727 - RNA, 24 nt, Artificial Sequence
  Synthetic
agaaaacuugugaaaaaauggauu

SEQ ID NO: 122728 - RNA, 21 nt, Artificial Sequence
  Synthetic
acaucuaaugacuaauggauu

SEQ ID NO: 122729 - RNA, 22 nt, Artificial Sequence
  Synthetic
cacaucuaaugacuaauggauu

SEQ ID NO: 122730 - RNA, 23 nt, Artificial Sequence
  Synthetic
ucacaucuaaugacuaauggauu

SEQ ID NO: 122731 - RNA, 24 nt, Artificial Sequence
  Synthetic
cucacaucuaaugacuaauggauu

SEQ ID NO: 122732 - RNA, 18 nt, Artificial Sequence
  Synthetic
aucagucuauuauggauu

SEQ ID NO: 122733 - RNA, 19 nt, Artificial Sequence
  Synthetic
uaucagucuauuauggauu

SEQ ID NO: 122734 - RNA, 21 nt, Artificial Sequence
  Synthetic
aguaucagucuauuauggauu

SEQ ID NO: 122735 - RNA, 22 nt, Artificial Sequence
  Synthetic
aaguaucagucuauuauggauu

SEQ ID NO: 122736 - RNA, 23 nt, Artificial Sequence
  Synthetic
aaaguaucagucuauuauggauu

SEQ ID NO: 122737 - RNA, 24 nt, Artificial Sequence
  Synthetic
aaaaguaucagucuauuauggauu

SEQ ID NO: 122738 - RNA, 18 nt, Artificial Sequence
  Synthetic
uccuggggacaguggauu

SEQ ID NO: 122739 - RNA, 19 nt, Artificial Sequence
  Synthetic
cuccuggggacaguggauu

SEQ ID NO: 122740 - RNA, 20 nt, Artificial Sequence
  Synthetic
ucuccuggggacaguggauu

SEQ ID NO: 122741 - RNA, 21 nt, Artificial Sequence
  Synthetic
uucuccuggggacaguggauu

SEQ ID NO: 122742 - RNA, 22 nt, Artificial Sequence
  Synthetic
uuucuccuggggacaguggauu

SEQ ID NO: 122743 - RNA, 23 nt, Artificial Sequence
  Synthetic
cuuucuccuggggacaguggauu

SEQ ID NO: 122744 - RNA, 18 nt, Artificial Sequence
  Synthetic
cuaaucuccauuuggauu

SEQ ID NO: 122745 - RNA, 19 nt, Artificial Sequence
  Synthetic
ucuaaucuccauuuggauu

SEQ ID NO: 122746 - RNA, 20 nt, Artificial Sequence
  Synthetic
aucuaaucuccauuuggauu

SEQ ID NO: 122747 - RNA, 22 nt, Artificial Sequence
  Synthetic
agaucuaaucuccauuuggauu

SEQ ID NO: 122748 - RNA, 23 nt, Artificial Sequence
  Synthetic
aagaucuaaucuccauuuggauu

SEQ ID NO: 122749 - RNA, 24 nt, Artificial Sequence
  Synthetic
caagaucuaaucuccauuuggauu

SEQ ID NO: 122750 - RNA, 18 nt, Artificial Sequence
  Synthetic
uuguguacugaaaugauu

SEQ ID NO: 122751 - RNA, 19 nt, Artificial Sequence
  Synthetic
uuuguguacugaaaugauu

SEQ ID NO: 122752 - RNA, 20 nt, Artificial Sequence
  Synthetic
uuuuguguacugaaaugauu

SEQ ID NO: 122753 - RNA, 21 nt, Artificial Sequence
  Synthetic
auuuuguguacugaaaugauu

SEQ ID NO: 122754 - RNA, 22 nt, Artificial Sequence
  Synthetic
cauuuuguguacugaaaugauu

SEQ ID NO: 122755 - RNA, 23 nt, Artificial Sequence
  Synthetic
acauuuuguguacugaaaugauu

SEQ ID NO: 122756 - RNA, 24 nt, Artificial Sequence
  Synthetic
aacauuuuguguacugaaaugauu

SEQ ID NO: 122757 - RNA, 21 nt, Artificial Sequence
  Synthetic
uaaauagaaaaauaaaugauu

SEQ ID NO: 122758 - RNA, 22 nt, Artificial Sequence
  Synthetic
uuaaauagaaaaauaaaugauu

SEQ ID NO: 122759 - RNA, 23 nt, Artificial Sequence
  Synthetic
cuuaaauagaaaaauaaaugauu

SEQ ID NO: 122760 - RNA, 24 nt, Artificial Sequence
  Synthetic
acuuaaauagaaaaauaaaugauu

SEQ ID NO: 122761 - RNA, 18 nt, Artificial Sequence
  Synthetic
cauuucauaaagaugauu

SEQ ID NO: 122762 - RNA, 19 nt, Artificial Sequence
  Synthetic
ucauuucauaaagaugauu

SEQ ID NO: 122763 - RNA, 21 nt, Artificial Sequence
  Synthetic
agucauuucauaaagaugauu

SEQ ID NO: 122764 - RNA, 22 nt, Artificial Sequence
  Synthetic
cagucauuucauaaagaugauu

SEQ ID NO: 122765 - RNA, 23 nt, Artificial Sequence
  Synthetic
ccagucauuucauaaagaugauu

SEQ ID NO: 122766 - RNA, 24 nt, Artificial Sequence
  Synthetic
uccagucauuucauaaagaugauu

SEQ ID NO: 122767 - RNA, 18 nt, Artificial Sequence
  Synthetic
uccgguuuggauaugauu

SEQ ID NO: 122768 - RNA, 19 nt, Artificial Sequence
  Synthetic
uuccgguuuggauaugauu

SEQ ID NO: 122769 - RNA, 20 nt, Artificial Sequence
  Synthetic
auuccgguuuggauaugauu

SEQ ID NO: 122770 - RNA, 21 nt, Artificial Sequence
  Synthetic
uauuccgguuuggauaugauu

SEQ ID NO: 122771 - RNA, 23 nt, Artificial Sequence
  Synthetic
aguauuccgguuuggauaugauu

SEQ ID NO: 122772 - RNA, 18 nt, Artificial Sequence
  Synthetic
uuguuauuggaacugauu

SEQ ID NO: 122773 - RNA, 19 nt, Artificial Sequence
  Synthetic
uuuguuauuggaacugauu

SEQ ID NO: 122774 - RNA, 20 nt, Artificial Sequence
  Synthetic
uuuuguuauuggaacugauu

SEQ ID NO: 122775 - RNA, 21 nt, Artificial Sequence
  Synthetic
auuuuguuauuggaacugauu

SEQ ID NO: 122776 - RNA, 22 nt, Artificial Sequence
  Synthetic
uauuuuguuauuggaacugauu

SEQ ID NO: 122777 - RNA, 23 nt, Artificial Sequence
  Synthetic
uuauuuuguuauuggaacugauu

SEQ ID NO: 122778 - RNA, 24 nt, Artificial Sequence
  Synthetic
uuuauuuuguuauuggaacugauu

SEQ ID NO: 122779 - RNA, 18 nt, Artificial Sequence
  Synthetic
uacuucaucccacugauu

SEQ ID NO: 122780 - RNA, 20 nt, Artificial Sequence
  Synthetic
uguacuucaucccacugauu

SEQ ID NO: 122781 - RNA, 21 nt, Artificial Sequence
  Synthetic
uuguacuucaucccacugauu

SEQ ID NO: 122782 - RNA, 22 nt, Artificial Sequence
  Synthetic
cuuguacuucaucccacugauu

SEQ ID NO: 122783 - RNA, 23 nt, Artificial Sequence
  Synthetic
ucuuguacuucaucccacugauu

SEQ ID NO: 122784 - RNA, 24 nt, Artificial Sequence
  Synthetic
uucuuguacuucaucccacugauu

SEQ ID NO: 122785 - RNA, 19 nt, Artificial Sequence
  Synthetic
agauacaaaaguacugauu

SEQ ID NO: 122786 - RNA, 20 nt, Artificial Sequence
  Synthetic
uagauacaaaaguacugauu

SEQ ID NO: 122787 - RNA, 21 nt, Artificial Sequence
  Synthetic
auagauacaaaaguacugauu

SEQ ID NO: 122788 - RNA, 22 nt, Artificial Sequence
  Synthetic
uauagauacaaaaguacugauu

SEQ ID NO: 122789 - RNA, 23 nt, Artificial Sequence
  Synthetic
uuauagauacaaaaguacugauu

SEQ ID NO: 122790 - RNA, 24 nt, Artificial Sequence
  Synthetic
auuauagauacaaaaguacugauu

SEQ ID NO: 122791 - RNA, 19 nt, Artificial Sequence
  Synthetic
ugaaucaaauauccugauu

SEQ ID NO: 122792 - RNA, 20 nt, Artificial Sequence
  Synthetic
uugaaucaaauauccugauu

SEQ ID NO: 122793 - RNA, 21 nt, Artificial Sequence
  Synthetic
uuugaaucaaauauccugauu

SEQ ID NO: 122794 - RNA, 22 nt, Artificial Sequence
  Synthetic
auuugaaucaaauauccugauu

SEQ ID NO: 122795 - RNA, 23 nt, Artificial Sequence
  Synthetic
cauuugaaucaaauauccugauu

SEQ ID NO: 122796 - RNA, 24 nt, Artificial Sequence
  Synthetic
acauuugaaucaaauauccugauu

SEQ ID NO: 122797 - RNA, 18 nt, Artificial Sequence
  Synthetic
aaaggcaaagcucugauu

SEQ ID NO: 122798 - RNA, 19 nt, Artificial Sequence
  Synthetic
caaaggcaaagcucugauu

SEQ ID NO: 122799 - RNA, 20 nt, Artificial Sequence
  Synthetic
ucaaaggcaaagcucugauu

SEQ ID NO: 122800 - RNA, 21 nt, Artificial Sequence
  Synthetic
uucaaaggcaaagcucugauu

SEQ ID NO: 122801 - RNA, 22 nt, Artificial Sequence
  Synthetic
uuucaaaggcaaagcucugauu

SEQ ID NO: 122802 - RNA, 23 nt, Artificial Sequence
  Synthetic
cuuucaaaggcaaagcucugauu

SEQ ID NO: 122803 - RNA, 19 nt, Artificial Sequence
  Synthetic
ugcagcuaguguucugauu

SEQ ID NO: 122804 - RNA, 20 nt, Artificial Sequence
  Synthetic
augcagcuaguguucugauu

SEQ ID NO: 122805 - RNA, 21 nt, Artificial Sequence
  Synthetic
caugcagcuaguguucugauu

SEQ ID NO: 122806 - RNA, 22 nt, Artificial Sequence
  Synthetic
ccaugcagcuaguguucugauu

SEQ ID NO: 122807 - RNA, 23 nt, Artificial Sequence
  Synthetic
uccaugcagcuaguguucugauu

SEQ ID NO: 122808 - RNA, 24 nt, Artificial Sequence
  Synthetic
uuccaugcagcuaguguucugauu

SEQ ID NO: 122809 - RNA, 18 nt, Artificial Sequence
  Synthetic
uaguacaauacagugauu

SEQ ID NO: 122810 - RNA, 20 nt, Artificial Sequence
  Synthetic
aguaguacaauacagugauu

SEQ ID NO: 122811 - RNA, 21 nt, Artificial Sequence
  Synthetic
aaguaguacaauacagugauu

SEQ ID NO: 122812 - RNA, 23 nt, Artificial Sequence
  Synthetic
agaaguaguacaauacagugauu

SEQ ID NO: 122813 - RNA, 21 nt, Artificial Sequence
  Synthetic
ugggagcuuuaggaggugauu

SEQ ID NO: 122814 - RNA, 18 nt, Artificial Sequence
  Synthetic
uuaauuuacauugugauu

SEQ ID NO: 122815 - RNA, 20 nt, Artificial Sequence
  Synthetic
aguuaauuuacauugugauu

SEQ ID NO: 122816 - RNA, 21 nt, Artificial Sequence
  Synthetic
aaguuaauuuacauugugauu

SEQ ID NO: 122817 - RNA, 22 nt, Artificial Sequence
  Synthetic
aaaguuaauuuacauugugauu

SEQ ID NO: 122818 - RNA, 23 nt, Artificial Sequence
  Synthetic
aaaaguuaauuuacauugugauu

SEQ ID NO: 122819 - RNA, 18 nt, Artificial Sequence
  Synthetic
ugcagcaggaacuugauu

SEQ ID NO: 122820 - RNA, 22 nt, Artificial Sequence
  Synthetic
ugggugcagcaggaacuugauu

SEQ ID NO: 122821 - RNA, 23 nt, Artificial Sequence
  Synthetic
cugggugcagcaggaacuugauu

SEQ ID NO: 122822 - RNA, 24 nt, Artificial Sequence
  Synthetic
ucugggugcagcaggaacuugauu

SEQ ID NO: 122823 - RNA, 21 nt, Artificial Sequence
  Synthetic
cuaaaauuacugauuuugauu

SEQ ID NO: 122824 - RNA, 22 nt, Artificial Sequence
  Synthetic
ccuaaaauuacugauuuugauu

SEQ ID NO: 122825 - RNA, 23 nt, Artificial Sequence
  Synthetic
uccuaaaauuacugauuuugauu

SEQ ID NO: 122826 - RNA, 24 nt, Artificial Sequence
  Synthetic
auccuaaaauuacugauuuugauu

SEQ ID NO: 122827 - RNA, 18 nt, Artificial Sequence
  Synthetic
aaucauuucuuuuugauu

SEQ ID NO: 122828 - RNA, 19 nt, Artificial Sequence
  Synthetic
uaaucauuucuuuuugauu

SEQ ID NO: 122829 - RNA, 20 nt, Artificial Sequence
  Synthetic
uuaaucauuucuuuuugauu

SEQ ID NO: 122830 - RNA, 21 nt, Artificial Sequence
  Synthetic
uuuaaucauuucuuuuugauu

SEQ ID NO: 122831 - RNA, 22 nt, Artificial Sequence
  Synthetic
uuuuaaucauuucuuuuugauu

SEQ ID NO: 122832 - RNA, 23 nt, Artificial Sequence
  Synthetic
auuuuaaucauuucuuuuugauu

SEQ ID NO: 122833 - RNA, 24 nt, Artificial Sequence
  Synthetic
cauuuuaaucauuucuuuuugauu

SEQ ID NO: 122834 - RNA, 18 nt, Artificial Sequence
  Synthetic
ucaugauggaaaaauauu

SEQ ID NO: 122835 - RNA, 19 nt, Artificial Sequence
  Synthetic
aucaugauggaaaaauauu

SEQ ID NO: 122836 - RNA, 20 nt, Artificial Sequence
  Synthetic
caucaugauggaaaaauauu

SEQ ID NO: 122837 - RNA, 21 nt, Artificial Sequence
  Synthetic
ccaucaugauggaaaaauauu

SEQ ID NO: 122838 - RNA, 22 nt, Artificial Sequence
  Synthetic
uccaucaugauggaaaaauauu

SEQ ID NO: 122839 - RNA, 23 nt, Artificial Sequence
  Synthetic
uuccaucaugauggaaaaauauu

SEQ ID NO: 122840 - RNA, 24 nt, Artificial Sequence
  Synthetic
auuccaucaugauggaaaaauauu

SEQ ID NO: 122841 - RNA, 22 nt, Artificial Sequence
  Synthetic
ugaaaaucaaaaucaaaauauu

SEQ ID NO: 122842 - RNA, 23 nt, Artificial Sequence
  Synthetic
augaaaaucaaaaucaaaauauu

SEQ ID NO: 122843 - RNA, 21 nt, Artificial Sequence
  Synthetic
cucacauaauuugaaaauauu

SEQ ID NO: 122844 - RNA, 23 nt, Artificial Sequence
  Synthetic
agcucacauaauuugaaaauauu

SEQ ID NO: 122845 - RNA, 24 nt, Artificial Sequence
  Synthetic
aagcucacauaauuugaaaauauu

SEQ ID NO: 122846 - RNA, 18 nt, Artificial Sequence
  Synthetic
aguaggagcuaaaauauu

SEQ ID NO: 122847 - RNA, 20 nt, Artificial Sequence
  Synthetic
ugaguaggagcuaaaauauu

SEQ ID NO: 122848 - RNA, 21 nt, Artificial Sequence
  Synthetic
cugaguaggagcuaaaauauu

SEQ ID NO: 122849 - RNA, 22 nt, Artificial Sequence
  Synthetic
ucugaguaggagcuaaaauauu

SEQ ID NO: 122850 - RNA, 24 nt, Artificial Sequence
  Synthetic
agucugaguaggagcuaaaauauu

SEQ ID NO: 122851 - RNA, 18 nt, Artificial Sequence
  Synthetic
ccuuaaauuccaaauauu

SEQ ID NO: 122852 - RNA, 19 nt, Artificial Sequence
  Synthetic
accuuaaauuccaaauauu

SEQ ID NO: 122853 - RNA, 20 nt, Artificial Sequence
  Synthetic
aaccuuaaauuccaaauauu

SEQ ID NO: 122854 - RNA, 21 nt, Artificial Sequence
  Synthetic
caaccuuaaauuccaaauauu

SEQ ID NO: 122855 - RNA, 22 nt, Artificial Sequence
  Synthetic
ucaaccuuaaauuccaaauauu

SEQ ID NO: 122856 - RNA, 23 nt, Artificial Sequence
  Synthetic
cucaaccuuaaauuccaaauauu

SEQ ID NO: 122857 - RNA, 24 nt, Artificial Sequence
  Synthetic
ccucaaccuuaaauuccaaauauu

SEQ ID NO: 122858 - RNA, 19 nt, Artificial Sequence
  Synthetic
ugaaguuuuaggaaauauu

SEQ ID NO: 122859 - RNA, 21 nt, Artificial Sequence
  Synthetic
agugaaguuuuaggaaauauu

SEQ ID NO: 122860 - RNA, 22 nt, Artificial Sequence
  Synthetic
cagugaaguuuuaggaaauauu

SEQ ID NO: 122861 - RNA, 23 nt, Artificial Sequence
  Synthetic
ucagugaaguuuuaggaaauauu

SEQ ID NO: 122862 - RNA, 24 nt, Artificial Sequence
  Synthetic
uucagugaaguuuuaggaaauauu

SEQ ID NO: 122863 - RNA, 18 nt, Artificial Sequence
  Synthetic
uucaguuaaguaaauauu

SEQ ID NO: 122864 - RNA, 19 nt, Artificial Sequence
  Synthetic
cuucaguuaaguaaauauu

SEQ ID NO: 122865 - RNA, 23 nt, Artificial Sequence
  Synthetic
agggcuucaguuaaguaaauauu

SEQ ID NO: 122866 - RNA, 24 nt, Artificial Sequence
  Synthetic
cagggcuucaguuaaguaaauauu

SEQ ID NO: 122867 - RNA, 19 nt, Artificial Sequence
  Synthetic
agggacauucuuaaauauu

SEQ ID NO: 122868 - RNA, 20 nt, Artificial Sequence
  Synthetic
aagggacauucuuaaauauu

SEQ ID NO: 122869 - RNA, 21 nt, Artificial Sequence
  Synthetic
aaagggacauucuuaaauauu

SEQ ID NO: 122870 - RNA, 22 nt, Artificial Sequence
  Synthetic
caaagggacauucuuaaauauu

SEQ ID NO: 122871 - RNA, 23 nt, Artificial Sequence
  Synthetic
ucaaagggacauucuuaaauauu

SEQ ID NO: 122872 - RNA, 24 nt, Artificial Sequence
  Synthetic
cucaaagggacauucuuaaauauu

SEQ ID NO: 122873 - RNA, 21 nt, Artificial Sequence
  Synthetic
uaauuuauauuuaggaauauu

SEQ ID NO: 122874 - RNA, 22 nt, Artificial Sequence
  Synthetic
auaauuuauauuuaggaauauu

SEQ ID NO: 122875 - RNA, 23 nt, Artificial Sequence
  Synthetic
uauaauuuauauuuaggaauauu

SEQ ID NO: 122876 - RNA, 24 nt, Artificial Sequence
  Synthetic
uuauaauuuauauuuaggaauauu

SEQ ID NO: 122877 - RNA, 18 nt, Artificial Sequence
  Synthetic
cacuuagaaaauaauauu

SEQ ID NO: 122878 - RNA, 19 nt, Artificial Sequence
  Synthetic
ccacuuagaaaauaauauu

SEQ ID NO: 122879 - RNA, 21 nt, Artificial Sequence
  Synthetic
ugccacuuagaaaauaauauu

SEQ ID NO: 122880 - RNA, 22 nt, Artificial Sequence
  Synthetic
cugccacuuagaaaauaauauu

SEQ ID NO: 122881 - RNA, 23 nt, Artificial Sequence
  Synthetic
acugccacuuagaaaauaauauu

SEQ ID NO: 122882 - RNA, 24 nt, Artificial Sequence
  Synthetic
cacugccacuuagaaaauaauauu

SEQ ID NO: 122883 - RNA, 18 nt, Artificial Sequence
  Synthetic
agaaaguauaaacauauu

SEQ ID NO: 122884 - RNA, 19 nt, Artificial Sequence
  Synthetic
aagaaaguauaaacauauu

SEQ ID NO: 122885 - RNA, 20 nt, Artificial Sequence
  Synthetic
caagaaaguauaaacauauu

SEQ ID NO: 122886 - RNA, 21 nt, Artificial Sequence
  Synthetic
ucaagaaaguauaaacauauu

SEQ ID NO: 122887 - RNA, 22 nt, Artificial Sequence
  Synthetic
uucaagaaaguauaaacauauu

SEQ ID NO: 122888 - RNA, 23 nt, Artificial Sequence
  Synthetic
uuucaagaaaguauaaacauauu

SEQ ID NO: 122889 - RNA, 24 nt, Artificial Sequence
  Synthetic
auuucaagaaaguauaaacauauu

SEQ ID NO: 122890 - RNA, 23 nt, Artificial Sequence
  Synthetic
uggaaaauauguguacacauauu

SEQ ID NO: 122891 - RNA, 24 nt, Artificial Sequence
  Synthetic
cuggaaaauauguguacacauauu

SEQ ID NO: 122892 - RNA, 21 nt, Artificial Sequence
  Synthetic
ugaaaaaggcaggcacauauu

SEQ ID NO: 122893 - RNA, 22 nt, Artificial Sequence
  Synthetic
augaaaaaggcaggcacauauu

SEQ ID NO: 122894 - RNA, 23 nt, Artificial Sequence
  Synthetic
uaugaaaaaggcaggcacauauu

SEQ ID NO: 122895 - RNA, 24 nt, Artificial Sequence
  Synthetic
auaugaaaaaggcaggcacauauu

SEQ ID NO: 122896 - RNA, 18 nt, Artificial Sequence
  Synthetic
cuaccauacucacauauu

SEQ ID NO: 122897 - RNA, 19 nt, Artificial Sequence
  Synthetic
ucuaccauacucacauauu

SEQ ID NO: 122898 - RNA, 20 nt, Artificial Sequence
  Synthetic
cucuaccauacucacauauu

SEQ ID NO: 122899 - RNA, 21 nt, Artificial Sequence
  Synthetic
acucuaccauacucacauauu

SEQ ID NO: 122900 - RNA, 22 nt, Artificial Sequence
  Synthetic
uacucuaccauacucacauauu

SEQ ID NO: 122901 - RNA, 23 nt, Artificial Sequence
  Synthetic
cuacucuaccauacucacauauu

SEQ ID NO: 122902 - RNA, 24 nt, Artificial Sequence
  Synthetic
ucuacucuaccauacucacauauu

SEQ ID NO: 122903 - RNA, 18 nt, Artificial Sequence
  Synthetic
ucucuauagcaccauauu

SEQ ID NO: 122904 - RNA, 19 nt, Artificial Sequence
  Synthetic
aucucuauagcaccauauu

SEQ ID NO: 122905 - RNA, 20 nt, Artificial Sequence
  Synthetic
aaucucuauagcaccauauu

SEQ ID NO: 122906 - RNA, 21 nt, Artificial Sequence
  Synthetic
aaaucucuauagcaccauauu

SEQ ID NO: 122907 - RNA, 22 nt, Artificial Sequence
  Synthetic
caaaucucuauagcaccauauu

SEQ ID NO: 122908 - RNA, 23 nt, Artificial Sequence
  Synthetic
ucaaaucucuauagcaccauauu

SEQ ID NO: 122909 - RNA, 24 nt, Artificial Sequence
  Synthetic
uucaaaucucuauagcaccauauu

SEQ ID NO: 122910 - RNA, 18 nt, Artificial Sequence
  Synthetic
cuauguuaucuccauauu

SEQ ID NO: 122911 - RNA, 19 nt, Artificial Sequence
  Synthetic
ucuauguuaucuccauauu

SEQ ID NO: 122912 - RNA, 20 nt, Artificial Sequence
  Synthetic
cucuauguuaucuccauauu

SEQ ID NO: 122913 - RNA, 21 nt, Artificial Sequence
  Synthetic
acucuauguuaucuccauauu

SEQ ID NO: 122914 - RNA, 22 nt, Artificial Sequence
  Synthetic
aacucuauguuaucuccauauu

SEQ ID NO: 122915 - RNA, 23 nt, Artificial Sequence
  Synthetic
aaacucuauguuaucuccauauu

SEQ ID NO: 122916 - RNA, 24 nt, Artificial Sequence
  Synthetic
aaaacucuauguuaucuccauauu

SEQ ID NO: 122917 - RNA, 18 nt, Artificial Sequence
  Synthetic
caaugugcuuuucauauu

SEQ ID NO: 122918 - RNA, 19 nt, Artificial Sequence
  Synthetic
acaaugugcuuuucauauu

SEQ ID NO: 122919 - RNA, 20 nt, Artificial Sequence
  Synthetic
uacaaugugcuuuucauauu

SEQ ID NO: 122920 - RNA, 21 nt, Artificial Sequence
  Synthetic
cuacaaugugcuuuucauauu

SEQ ID NO: 122921 - RNA, 22 nt, Artificial Sequence
  Synthetic
ucuacaaugugcuuuucauauu

SEQ ID NO: 122922 - RNA, 24 nt, Artificial Sequence
  Synthetic
ugucuacaaugugcuuuucauauu

SEQ ID NO: 122923 - RNA, 21 nt, Artificial Sequence
  Synthetic
uuggcauaggaaacagauauu

SEQ ID NO: 122924 - RNA, 22 nt, Artificial Sequence
  Synthetic
uuuggcauaggaaacagauauu

SEQ ID NO: 122925 - RNA, 23 nt, Artificial Sequence
  Synthetic
uuuuggcauaggaaacagauauu

SEQ ID NO: 122926 - RNA, 24 nt, Artificial Sequence
  Synthetic
auuuuggcauaggaaacagauauu

SEQ ID NO: 122927 - RNA, 19 nt, Artificial Sequence
  Synthetic
agaugauaaccaggauauu

SEQ ID NO: 122928 - RNA, 20 nt, Artificial Sequence
  Synthetic
uagaugauaaccaggauauu

SEQ ID NO: 122929 - RNA, 21 nt, Artificial Sequence
  Synthetic
uuagaugauaaccaggauauu

SEQ ID NO: 122930 - RNA, 22 nt, Artificial Sequence
  Synthetic
auuagaugauaaccaggauauu

SEQ ID NO: 122931 - RNA, 23 nt, Artificial Sequence
  Synthetic
uauuagaugauaaccaggauauu

SEQ ID NO: 122932 - RNA, 24 nt, Artificial Sequence
  Synthetic
uuauuagaugauaaccaggauauu

SEQ ID NO: 122933 - RNA, 18 nt, Artificial Sequence
  Synthetic
cggcucaaugaugauauu

SEQ ID NO: 122934 - RNA, 19 nt, Artificial Sequence
  Synthetic
acggcucaaugaugauauu

SEQ ID NO: 122935 - RNA, 20 nt, Artificial Sequence
  Synthetic
aacggcucaaugaugauauu

SEQ ID NO: 122936 - RNA, 22 nt, Artificial Sequence
  Synthetic
agaacggcucaaugaugauauu

SEQ ID NO: 122937 - RNA, 23 nt, Artificial Sequence
  Synthetic
aagaacggcucaaugaugauauu

SEQ ID NO: 122938 - RNA, 24 nt, Artificial Sequence
  Synthetic
uaagaacggcucaaugaugauauu

SEQ ID NO: 122939 - RNA, 18 nt, Artificial Sequence
  Synthetic
acaguuuccucugauauu

SEQ ID NO: 122940 - RNA, 19 nt, Artificial Sequence
  Synthetic
aacaguuuccucugauauu

SEQ ID NO: 122941 - RNA, 20 nt, Artificial Sequence
  Synthetic
caacaguuuccucugauauu

SEQ ID NO: 122942 - RNA, 21 nt, Artificial Sequence
  Synthetic
ccaacaguuuccucugauauu

SEQ ID NO: 122943 - RNA, 22 nt, Artificial Sequence
  Synthetic
uccaacaguuuccucugauauu

SEQ ID NO: 122944 - RNA, 24 nt, Artificial Sequence
  Synthetic
aguccaacaguuuccucugauauu

SEQ ID NO: 122945 - RNA, 19 nt, Artificial Sequence
  Synthetic
uguuccauaauaauauauu

SEQ ID NO: 122946 - RNA, 20 nt, Artificial Sequence
  Synthetic
cuguuccauaauaauauauu

SEQ ID NO: 122947 - RNA, 21 nt, Artificial Sequence
  Synthetic
ucuguuccauaauaauauauu

SEQ ID NO: 122948 - RNA, 22 nt, Artificial Sequence
  Synthetic
aucuguuccauaauaauauauu

SEQ ID NO: 122949 - RNA, 23 nt, Artificial Sequence
  Synthetic
caucuguuccauaauaauauauu

SEQ ID NO: 122950 - RNA, 24 nt, Artificial Sequence
  Synthetic
acaucuguuccauaauaauauauu

SEQ ID NO: 122951 - RNA, 18 nt, Artificial Sequence
  Synthetic
cuugauaguagauauauu

SEQ ID NO: 122952 - RNA, 20 nt, Artificial Sequence
  Synthetic
agcuugauaguagauauauu

SEQ ID NO: 122953 - RNA, 21 nt, Artificial Sequence
  Synthetic
uagcuugauaguagauauauu

SEQ ID NO: 122954 - RNA, 22 nt, Artificial Sequence
  Synthetic
auagcuugauaguagauauauu

SEQ ID NO: 122955 - RNA, 23 nt, Artificial Sequence
  Synthetic
cauagcuugauaguagauauauu

SEQ ID NO: 122956 - RNA, 24 nt, Artificial Sequence
  Synthetic
ucauagcuugauaguagauauauu

SEQ ID NO: 122957 - RNA, 21 nt, Artificial Sequence
  Synthetic
auauaugauuauauauauauu

SEQ ID NO: 122958 - RNA, 22 nt, Artificial Sequence
  Synthetic
aauauaugauuauauauauauu

SEQ ID NO: 122959 - RNA, 24 nt, Artificial Sequence
  Synthetic
agaauauaugauuauauauauauu

SEQ ID NO: 122960 - RNA, 18 nt, Artificial Sequence
  Synthetic
cuuguugacguauauauu

SEQ ID NO: 122961 - RNA, 20 nt, Artificial Sequence
  Synthetic
agcuuguugacguauauauu

SEQ ID NO: 122962 - RNA, 21 nt, Artificial Sequence
  Synthetic
uagcuuguugacguauauauu

SEQ ID NO: 122963 - RNA, 22 nt, Artificial Sequence
  Synthetic
auagcuuguugacguauauauu

SEQ ID NO: 122964 - RNA, 23 nt, Artificial Sequence
  Synthetic
uauagcuuguugacguauauauu

SEQ ID NO: 122965 - RNA, 24 nt, Artificial Sequence
  Synthetic
auauagcuuguugacguauauauu

SEQ ID NO: 122966 - RNA, 18 nt, Artificial Sequence
  Synthetic
cauauccauaacuauauu

SEQ ID NO: 122967 - RNA, 19 nt, Artificial Sequence
  Synthetic
ccauauccauaacuauauu

SEQ ID NO: 122968 - RNA, 20 nt, Artificial Sequence
  Synthetic
uccauauccauaacuauauu

SEQ ID NO: 122969 - RNA, 21 nt, Artificial Sequence
  Synthetic
auccauauccauaacuauauu

SEQ ID NO: 122970 - RNA, 22 nt, Artificial Sequence
  Synthetic
cauccauauccauaacuauauu

SEQ ID NO: 122971 - RNA, 23 nt, Artificial Sequence
  Synthetic
acauccauauccauaacuauauu

SEQ ID NO: 122972 - RNA, 24 nt, Artificial Sequence
  Synthetic
uacauccauauccauaacuauauu

SEQ ID NO: 122973 - RNA, 18 nt, Artificial Sequence
  Synthetic
uuauccauacucuauauu

SEQ ID NO: 122974 - RNA, 19 nt, Artificial Sequence
  Synthetic
cuuauccauacucuauauu

SEQ ID NO: 122975 - RNA, 20 nt, Artificial Sequence
  Synthetic
ucuuauccauacucuauauu

SEQ ID NO: 122976 - RNA, 21 nt, Artificial Sequence
  Synthetic
aucuuauccauacucuauauu

SEQ ID NO: 122977 - RNA, 22 nt, Artificial Sequence
  Synthetic
aaucuuauccauacucuauauu

SEQ ID NO: 122978 - RNA, 23 nt, Artificial Sequence
  Synthetic
uaaucuuauccauacucuauauu

SEQ ID NO: 122979 - RNA, 24 nt, Artificial Sequence
  Synthetic
auaaucuuauccauacucuauauu

SEQ ID NO: 122980 - RNA, 18 nt, Artificial Sequence
  Synthetic
auuggcagucaguauauu

SEQ ID NO: 122981 - RNA, 19 nt, Artificial Sequence
  Synthetic
uauuggcagucaguauauu

SEQ ID NO: 122982 - RNA, 20 nt, Artificial Sequence
  Synthetic
cuauuggcagucaguauauu

SEQ ID NO: 122983 - RNA, 22 nt, Artificial Sequence
  Synthetic
ugcuauuggcagucaguauauu

SEQ ID NO: 122984 - RNA, 23 nt, Artificial Sequence
  Synthetic
cugcuauuggcagucaguauauu

SEQ ID NO: 122985 - RNA, 24 nt, Artificial Sequence
  Synthetic
acugcuauuggcagucaguauauu

SEQ ID NO: 122986 - RNA, 19 nt, Artificial Sequence
  Synthetic
ugaagaaagccauuauauu

SEQ ID NO: 122987 - RNA, 20 nt, Artificial Sequence
  Synthetic
uugaagaaagccauuauauu

SEQ ID NO: 122988 - RNA, 21 nt, Artificial Sequence
  Synthetic
auugaagaaagccauuauauu

SEQ ID NO: 122989 - RNA, 22 nt, Artificial Sequence
  Synthetic
cauugaagaaagccauuauauu

SEQ ID NO: 122990 - RNA, 23 nt, Artificial Sequence
  Synthetic
acauugaagaaagccauuauauu

SEQ ID NO: 122991 - RNA, 24 nt, Artificial Sequence
  Synthetic
aacauugaagaaagccauuauauu

SEQ ID NO: 122992 - RNA, 18 nt, Artificial Sequence
  Synthetic
ucaaggacagauuauauu

SEQ ID NO: 122993 - RNA, 19 nt, Artificial Sequence
  Synthetic
uucaaggacagauuauauu

SEQ ID NO: 122994 - RNA, 20 nt, Artificial Sequence
  Synthetic
auucaaggacagauuauauu

SEQ ID NO: 122995 - RNA, 21 nt, Artificial Sequence
  Synthetic
cauucaaggacagauuauauu

SEQ ID NO: 122996 - RNA, 22 nt, Artificial Sequence
  Synthetic
ucauucaaggacagauuauauu

SEQ ID NO: 122997 - RNA, 23 nt, Artificial Sequence
  Synthetic
uucauucaaggacagauuauauu

SEQ ID NO: 122998 - RNA, 24 nt, Artificial Sequence
  Synthetic
uuucauucaaggacagauuauauu

SEQ ID NO: 122999 - RNA, 19 nt, Artificial Sequence
  Synthetic
ugaaaugcaguauuauauu

SEQ ID NO: 123000 - RNA, 20 nt, Artificial Sequence
  Synthetic
uugaaaugcaguauuauauu

SEQ ID NO: 123001 - RNA, 21 nt, Artificial Sequence
  Synthetic
uuugaaaugcaguauuauauu

SEQ ID NO: 123002 - RNA, 22 nt, Artificial Sequence
  Synthetic
uuuugaaaugcaguauuauauu

SEQ ID NO: 123003 - RNA, 23 nt, Artificial Sequence
  Synthetic
auuuugaaaugcaguauuauauu

SEQ ID NO: 123004 - RNA, 18 nt, Artificial Sequence
  Synthetic
uccuuugcaacuuauauu

SEQ ID NO: 123005 - RNA, 19 nt, Artificial Sequence
  Synthetic
cuccuuugcaacuuauauu

SEQ ID NO: 123006 - RNA, 20 nt, Artificial Sequence
  Synthetic
acuccuuugcaacuuauauu

SEQ ID NO: 123007 - RNA, 21 nt, Artificial Sequence
  Synthetic
aacuccuuugcaacuuauauu

SEQ ID NO: 123008 - RNA, 22 nt, Artificial Sequence
  Synthetic
aaacuccuuugcaacuuauauu

SEQ ID NO: 123009 - RNA, 23 nt, Artificial Sequence
  Synthetic
caaacuccuuugcaacuuauauu

SEQ ID NO: 123010 - RNA, 24 nt, Artificial Sequence
  Synthetic
acaaacuccuuugcaacuuauauu

SEQ ID NO: 123011 - RNA, 18 nt, Artificial Sequence
  Synthetic
ugucaucaaauuuauauu

SEQ ID NO: 123012 - RNA, 19 nt, Artificial Sequence
  Synthetic
cugucaucaaauuuauauu

SEQ ID NO: 123013 - RNA, 20 nt, Artificial Sequence
  Synthetic
ucugucaucaaauuuauauu

SEQ ID NO: 123014 - RNA, 22 nt, Artificial Sequence
  Synthetic
ugucugucaucaaauuuauauu

SEQ ID NO: 123015 - RNA, 23 nt, Artificial Sequence
  Synthetic
cugucugucaucaaauuuauauu

SEQ ID NO: 123016 - RNA, 24 nt, Artificial Sequence
  Synthetic
ucugucugucaucaaauuuauauu

SEQ ID NO: 123017 - RNA, 18 nt, Artificial Sequence
  Synthetic
auucaauuucuuuauauu

SEQ ID NO: 123018 - RNA, 19 nt, Artificial Sequence
  Synthetic
uauucaauuucuuuauauu

SEQ ID NO: 123019 - RNA, 20 nt, Artificial Sequence
  Synthetic
cuauucaauuucuuuauauu

SEQ ID NO: 123020 - RNA, 19 nt, Artificial Sequence
  Synthetic
ugguguauacuuuuauauu

SEQ ID NO: 123021 - RNA, 18 nt, Artificial Sequence
  Synthetic
uauuaacuggccacuauu

SEQ ID NO: 123022 - RNA, 19 nt, Artificial Sequence
  Synthetic
uuauuaacuggccacuauu

SEQ ID NO: 123023 - RNA, 20 nt, Artificial Sequence
  Synthetic
auuauuaacuggccacuauu

SEQ ID NO: 123024 - RNA, 21 nt, Artificial Sequence
  Synthetic
uauuauuaacuggccacuauu

SEQ ID NO: 123025 - RNA, 22 nt, Artificial Sequence
  Synthetic
auauuauuaacuggccacuauu

SEQ ID NO: 123026 - RNA, 23 nt, Artificial Sequence
  Synthetic
cauauuauuaacuggccacuauu

SEQ ID NO: 123027 - RNA, 24 nt, Artificial Sequence
  Synthetic
ucauauuauuaacuggccacuauu

SEQ ID NO: 123028 - RNA, 18 nt, Artificial Sequence
  Synthetic
uggaaauucagcacuauu

SEQ ID NO: 123029 - RNA, 19 nt, Artificial Sequence
  Synthetic
cuggaaauucagcacuauu

SEQ ID NO: 123030 - RNA, 21 nt, Artificial Sequence
  Synthetic
agcuggaaauucagcacuauu

SEQ ID NO: 123031 - RNA, 23 nt, Artificial Sequence
  Synthetic
agagcuggaaauucagcacuauu

SEQ ID NO: 123032 - RNA, 24 nt, Artificial Sequence
  Synthetic
uagagcuggaaauucagcacuauu

SEQ ID NO: 123033 - RNA, 18 nt, Artificial Sequence
  Synthetic
ucaggaaaugauacuauu

SEQ ID NO: 123034 - RNA, 19 nt, Artificial Sequence
  Synthetic
aucaggaaaugauacuauu

SEQ ID NO: 123035 - RNA, 20 nt, Artificial Sequence
  Synthetic
caucaggaaaugauacuauu

SEQ ID NO: 123036 - RNA, 21 nt, Artificial Sequence
  Synthetic
ucaucaggaaaugauacuauu

SEQ ID NO: 123037 - RNA, 22 nt, Artificial Sequence
  Synthetic
aucaucaggaaaugauacuauu

SEQ ID NO: 123038 - RNA, 23 nt, Artificial Sequence
  Synthetic
uaucaucaggaaaugauacuauu

SEQ ID NO: 123039 - RNA, 24 nt, Artificial Sequence
  Synthetic
auaucaucaggaaaugauacuauu

SEQ ID NO: 123040 - RNA, 19 nt, Artificial Sequence
  Synthetic
agcccagaauaugccuauu

SEQ ID NO: 123041 - RNA, 20 nt, Artificial Sequence
  Synthetic
cagcccagaauaugccuauu

SEQ ID NO: 123042 - RNA, 21 nt, Artificial Sequence
  Synthetic
ccagcccagaauaugccuauu

SEQ ID NO: 123043 - RNA, 22 nt, Artificial Sequence
  Synthetic
cccagcccagaauaugccuauu

SEQ ID NO: 123044 - RNA, 23 nt, Artificial Sequence
  Synthetic
acccagcccagaauaugccuauu

SEQ ID NO: 123045 - RNA, 24 nt, Artificial Sequence
  Synthetic
cacccagcccagaauaugccuauu

SEQ ID NO: 123046 - RNA, 18 nt, Artificial Sequence
  Synthetic
auuggccugccagcuauu

SEQ ID NO: 123047 - RNA, 19 nt, Artificial Sequence
  Synthetic
aauuggccugccagcuauu

SEQ ID NO: 123048 - RNA, 20 nt, Artificial Sequence
  Synthetic
uaauuggccugccagcuauu

SEQ ID NO: 123049 - RNA, 21 nt, Artificial Sequence
  Synthetic
cuaauuggccugccagcuauu

SEQ ID NO: 123050 - RNA, 22 nt, Artificial Sequence
  Synthetic
ucuaauuggccugccagcuauu

SEQ ID NO: 123051 - RNA, 24 nt, Artificial Sequence
  Synthetic
ugucuaauuggccugccagcuauu

SEQ ID NO: 123052 - RNA, 19 nt, Artificial Sequence
  Synthetic
agaaauguuuugagcuauu

SEQ ID NO: 123053 - RNA, 20 nt, Artificial Sequence
  Synthetic
uagaaauguuuugagcuauu

SEQ ID NO: 123054 - RNA, 22 nt, Artificial Sequence
  Synthetic
aguagaaauguuuugagcuauu

SEQ ID NO: 123055 - RNA, 23 nt, Artificial Sequence
  Synthetic
uaguagaaauguuuugagcuauu

SEQ ID NO: 123056 - RNA, 24 nt, Artificial Sequence
  Synthetic
auaguagaaauguuuugagcuauu

SEQ ID NO: 123057 - RNA, 18 nt, Artificial Sequence
  Synthetic
ccaaauacuaacucuauu

SEQ ID NO: 123058 - RNA, 19 nt, Artificial Sequence
  Synthetic
cccaaauacuaacucuauu

SEQ ID NO: 123059 - RNA, 20 nt, Artificial Sequence
  Synthetic
ccccaaauacuaacucuauu

SEQ ID NO: 123060 - RNA, 22 nt, Artificial Sequence
  Synthetic
ugccccaaauacuaacucuauu

SEQ ID NO: 123061 - RNA, 24 nt, Artificial Sequence
  Synthetic
ugugccccaaauacuaacucuauu

SEQ ID NO: 123062 - RNA, 18 nt, Artificial Sequence
  Synthetic
caaaaguaucagucuauu

SEQ ID NO: 123063 - RNA, 19 nt, Artificial Sequence
  Synthetic
acaaaaguaucagucuauu

SEQ ID NO: 123064 - RNA, 20 nt, Artificial Sequence
  Synthetic
uacaaaaguaucagucuauu

SEQ ID NO: 123065 - RNA, 21 nt, Artificial Sequence
  Synthetic
uuacaaaaguaucagucuauu

SEQ ID NO: 123066 - RNA, 23 nt, Artificial Sequence
  Synthetic
uguuacaaaaguaucagucuauu

SEQ ID NO: 123067 - RNA, 24 nt, Artificial Sequence
  Synthetic
auguuacaaaaguaucagucuauu

SEQ ID NO: 123068 - RNA, 18 nt, Artificial Sequence
  Synthetic
agaauauguuagucuauu

SEQ ID NO: 123069 - RNA, 19 nt, Artificial Sequence
  Synthetic
aagaauauguuagucuauu

SEQ ID NO: 123070 - RNA, 20 nt, Artificial Sequence
  Synthetic
aaagaauauguuagucuauu

SEQ ID NO: 123071 - RNA, 22 nt, Artificial Sequence
  Synthetic
agaaagaauauguuagucuauu

SEQ ID NO: 123072 - RNA, 23 nt, Artificial Sequence
  Synthetic
cagaaagaauauguuagucuauu

SEQ ID NO: 123073 - RNA, 18 nt, Artificial Sequence
  Synthetic
uuccucucucauucuauu

SEQ ID NO: 123074 - RNA, 19 nt, Artificial Sequence
  Synthetic
uuuccucucucauucuauu

SEQ ID NO: 123075 - RNA, 20 nt, Artificial Sequence
  Synthetic
uuuuccucucucauucuauu

SEQ ID NO: 123076 - RNA, 21 nt, Artificial Sequence
  Synthetic
uuuuuccucucucauucuauu

SEQ ID NO: 123077 - RNA, 22 nt, Artificial Sequence
  Synthetic
cuuuuuccucucucauucuauu

SEQ ID NO: 123078 - RNA, 23 nt, Artificial Sequence
  Synthetic
acuuuuuccucucucauucuauu

SEQ ID NO: 123079 - RNA, 18 nt, Artificial Sequence
  Synthetic
uccaggucucauucuauu

SEQ ID NO: 123080 - RNA, 19 nt, Artificial Sequence
  Synthetic
auccaggucucauucuauu

SEQ ID NO: 123081 - RNA, 20 nt, Artificial Sequence
  Synthetic
uauccaggucucauucuauu

SEQ ID NO: 123082 - RNA, 21 nt, Artificial Sequence
  Synthetic
auauccaggucucauucuauu

SEQ ID NO: 123083 - RNA, 22 nt, Artificial Sequence
  Synthetic
aauauccaggucucauucuauu

SEQ ID NO: 123084 - RNA, 23 nt, Artificial Sequence
  Synthetic
aaauauccaggucucauucuauu

SEQ ID NO: 123085 - RNA, 24 nt, Artificial Sequence
  Synthetic
uaaauauccaggucucauucuauu

SEQ ID NO: 123086 - RNA, 21 nt, Artificial Sequence
  Synthetic
ucucuucguguuuauucuauu

SEQ ID NO: 123087 - RNA, 22 nt, Artificial Sequence
  Synthetic
aucucuucguguuuauucuauu

SEQ ID NO: 123088 - RNA, 24 nt, Artificial Sequence
  Synthetic
ugaucucuucguguuuauucuauu

SEQ ID NO: 123089 - RNA, 18 nt, Artificial Sequence
  Synthetic
agcucugcucaaaguauu

SEQ ID NO: 123090 - RNA, 19 nt, Artificial Sequence
  Synthetic
aagcucugcucaaaguauu

SEQ ID NO: 123091 - RNA, 22 nt, Artificial Sequence
  Synthetic
uggaagcucugcucaaaguauu

SEQ ID NO: 123092 - RNA, 23 nt, Artificial Sequence
  Synthetic
uuggaagcucugcucaaaguauu

SEQ ID NO: 123093 - RNA, 24 nt, Artificial Sequence
  Synthetic
uuuggaagcucugcucaaaguauu

SEQ ID NO: 123094 - RNA, 18 nt, Artificial Sequence
  Synthetic
uggcaauuuugaaguauu

SEQ ID NO: 123095 - RNA, 19 nt, Artificial Sequence
  Synthetic
auggcaauuuugaaguauu

SEQ ID NO: 123096 - RNA, 20 nt, Artificial Sequence
  Synthetic
uauggcaauuuugaaguauu

SEQ ID NO: 123097 - RNA, 21 nt, Artificial Sequence
  Synthetic
auauggcaauuuugaaguauu

SEQ ID NO: 123098 - RNA, 22 nt, Artificial Sequence
  Synthetic
cauauggcaauuuugaaguauu

SEQ ID NO: 123099 - RNA, 24 nt, Artificial Sequence
  Synthetic
agcauauggcaauuuugaaguauu

SEQ ID NO: 123100 - RNA, 18 nt, Artificial Sequence
  Synthetic
uuaaauuauaacaguauu

SEQ ID NO: 123101 - RNA, 19 nt, Artificial Sequence
  Synthetic
auuaaauuauaacaguauu

SEQ ID NO: 123102 - RNA, 20 nt, Artificial Sequence
  Synthetic
cauuaaauuauaacaguauu

SEQ ID NO: 123103 - RNA, 21 nt, Artificial Sequence
  Synthetic
ccauuaaauuauaacaguauu

SEQ ID NO: 123104 - RNA, 22 nt, Artificial Sequence
  Synthetic
cccauuaaauuauaacaguauu

SEQ ID NO: 123105 - RNA, 23 nt, Artificial Sequence
  Synthetic
ucccauuaaauuauaacaguauu

SEQ ID NO: 123106 - RNA, 24 nt, Artificial Sequence
  Synthetic
cucccauuaaauuauaacaguauu

SEQ ID NO: 123107 - RNA, 20 nt, Artificial Sequence
  Synthetic
aggguagagacaguaguauu

SEQ ID NO: 123108 - RNA, 22 nt, Artificial Sequence
  Synthetic
cgaggguagagacaguaguauu

SEQ ID NO: 123109 - RNA, 23 nt, Artificial Sequence
  Synthetic
ucgaggguagagacaguaguauu

SEQ ID NO: 123110 - RNA, 24 nt, Artificial Sequence
  Synthetic
aucgaggguagagacaguaguauu

SEQ ID NO: 123111 - RNA, 18 nt, Artificial Sequence
  Synthetic
uccacuauugguaguauu

SEQ ID NO: 123112 - RNA, 19 nt, Artificial Sequence
  Synthetic
auccacuauugguaguauu

SEQ ID NO: 123113 - RNA, 20 nt, Artificial Sequence
  Synthetic
uauccacuauugguaguauu

SEQ ID NO: 123114 - RNA, 21 nt, Artificial Sequence
  Synthetic
uuauccacuauugguaguauu

SEQ ID NO: 123115 - RNA, 22 nt, Artificial Sequence
  Synthetic
cuuauccacuauugguaguauu

SEQ ID NO: 123116 - RNA, 23 nt, Artificial Sequence
  Synthetic
ccuuauccacuauugguaguauu

SEQ ID NO: 123117 - RNA, 24 nt, Artificial Sequence
  Synthetic
accuuauccacuauugguaguauu

SEQ ID NO: 123118 - RNA, 18 nt, Artificial Sequence
  Synthetic
caguaucucauucguauu

SEQ ID NO: 123119 - RNA, 20 nt, Artificial Sequence
  Synthetic
ugcaguaucucauucguauu

SEQ ID NO: 123120 - RNA, 21 nt, Artificial Sequence
  Synthetic
cugcaguaucucauucguauu

SEQ ID NO: 123121 - RNA, 22 nt, Artificial Sequence
  Synthetic
ccugcaguaucucauucguauu

SEQ ID NO: 123122 - RNA, 23 nt, Artificial Sequence
  Synthetic
accugcaguaucucauucguauu

SEQ ID NO: 123123 - RNA, 24 nt, Artificial Sequence
  Synthetic
uaccugcaguaucucauucguauu

SEQ ID NO: 123124 - RNA, 18 nt, Artificial Sequence
  Synthetic
aaaauuauaucagguauu

SEQ ID NO: 123125 - RNA, 21 nt, Artificial Sequence
  Synthetic
aggaaaauuauaucagguauu

SEQ ID NO: 123126 - RNA, 22 nt, Artificial Sequence
  Synthetic
caggaaaauuauaucagguauu

SEQ ID NO: 123127 - RNA, 23 nt, Artificial Sequence
  Synthetic
ucaggaaaauuauaucagguauu

SEQ ID NO: 123128 - RNA, 24 nt, Artificial Sequence
  Synthetic
uucaggaaaauuauaucagguauu

SEQ ID NO: 123129 - RNA, 18 nt, Artificial Sequence
  Synthetic
ucugguucuuaauguauu

SEQ ID NO: 123130 - RNA, 19 nt, Artificial Sequence
  Synthetic
uucugguucuuaauguauu

SEQ ID NO: 123131 - RNA, 20 nt, Artificial Sequence
  Synthetic
uuucugguucuuaauguauu

SEQ ID NO: 123132 - RNA, 18 nt, Artificial Sequence
  Synthetic
cuuccacugugcuguauu

SEQ ID NO: 123133 - RNA, 19 nt, Artificial Sequence
  Synthetic
acuuccacugugcuguauu

SEQ ID NO: 123134 - RNA, 20 nt, Artificial Sequence
  Synthetic
uacuuccacugugcuguauu

SEQ ID NO: 123135 - RNA, 21 nt, Artificial Sequence
  Synthetic
cuacuuccacugugcuguauu

SEQ ID NO: 123136 - RNA, 22 nt, Artificial Sequence
  Synthetic
ccuacuuccacugugcuguauu

SEQ ID NO: 123137 - RNA, 23 nt, Artificial Sequence
  Synthetic
uccuacuuccacugugcuguauu

SEQ ID NO: 123138 - RNA, 24 nt, Artificial Sequence
  Synthetic
uuccuacuuccacugugcuguauu

SEQ ID NO: 123139 - RNA, 18 nt, Artificial Sequence
  Synthetic
uauuacugugucuguauu

SEQ ID NO: 123140 - RNA, 19 nt, Artificial Sequence
  Synthetic
uuauuacugugucuguauu

SEQ ID NO: 123141 - RNA, 20 nt, Artificial Sequence
  Synthetic
uuuauuacugugucuguauu

SEQ ID NO: 123142 - RNA, 21 nt, Artificial Sequence
  Synthetic
uuuuauuacugugucuguauu

SEQ ID NO: 123143 - RNA, 22 nt, Artificial Sequence
  Synthetic
uuuuuauuacugugucuguauu

SEQ ID NO: 123144 - RNA, 23 nt, Artificial Sequence
  Synthetic
auuuuuauuacugugucuguauu

SEQ ID NO: 123145 - RNA, 18 nt, Artificial Sequence
  Synthetic
ugagcucacucaauuauu

SEQ ID NO: 123146 - RNA, 19 nt, Artificial Sequence
  Synthetic
uugagcucacucaauuauu

SEQ ID NO: 123147 - RNA, 20 nt, Artificial Sequence
  Synthetic
uuugagcucacucaauuauu

SEQ ID NO: 123148 - RNA, 21 nt, Artificial Sequence
  Synthetic
uuuugagcucacucaauuauu

SEQ ID NO: 123149 - RNA, 23 nt, Artificial Sequence
  Synthetic
uguuuugagcucacucaauuauu

SEQ ID NO: 123150 - RNA, 24 nt, Artificial Sequence
  Synthetic
uuguuuugagcucacucaauuauu

SEQ ID NO: 123151 - RNA, 21 nt, Artificial Sequence
  Synthetic
auuauuacuaaaauaauuauu

SEQ ID NO: 123152 - RNA, 22 nt, Artificial Sequence
  Synthetic
cauuauuacuaaaauaauuauu

SEQ ID NO: 123153 - RNA, 24 nt, Artificial Sequence
  Synthetic
agcauuauuacuaaaauaauuauu

SEQ ID NO: 123154 - RNA, 18 nt, Artificial Sequence
  Synthetic
caucucagaauaauuauu

SEQ ID NO: 123155 - RNA, 19 nt, Artificial Sequence
  Synthetic
ccaucucagaauaauuauu

SEQ ID NO: 123156 - RNA, 20 nt, Artificial Sequence
  Synthetic
uccaucucagaauaauuauu

SEQ ID NO: 123157 - RNA, 22 nt, Artificial Sequence
  Synthetic
uguccaucucagaauaauuauu

SEQ ID NO: 123158 - RNA, 23 nt, Artificial Sequence
  Synthetic
cuguccaucucagaauaauuauu

SEQ ID NO: 123159 - RNA, 24 nt, Artificial Sequence
  Synthetic
ccuguccaucucagaauaauuauu

SEQ ID NO: 123160 - RNA, 18 nt, Artificial Sequence
  Synthetic
uggauccuauacauuauu

SEQ ID NO: 123161 - RNA, 19 nt, Artificial Sequence
  Synthetic
uuggauccuauacauuauu

SEQ ID NO: 123162 - RNA, 20 nt, Artificial Sequence
  Synthetic
cuuggauccuauacauuauu

SEQ ID NO: 123163 - RNA, 21 nt, Artificial Sequence
  Synthetic
acuuggauccuauacauuauu

SEQ ID NO: 123164 - RNA, 22 nt, Artificial Sequence
  Synthetic
uacuuggauccuauacauuauu

SEQ ID NO: 123165 - RNA, 23 nt, Artificial Sequence
  Synthetic
uuacuuggauccuauacauuauu

SEQ ID NO: 123166 - RNA, 24 nt, Artificial Sequence
  Synthetic
uuuacuuggauccuauacauuauu

SEQ ID NO: 123167 - RNA, 18 nt, Artificial Sequence
  Synthetic
agaaaaaugugcauuauu

SEQ ID NO: 123168 - RNA, 19 nt, Artificial Sequence
  Synthetic
aagaaaaaugugcauuauu

SEQ ID NO: 123169 - RNA, 21 nt, Artificial Sequence
  Synthetic
agaagaaaaaugugcauuauu

SEQ ID NO: 123170 - RNA, 22 nt, Artificial Sequence
  Synthetic
aagaagaaaaaugugcauuauu

SEQ ID NO: 123171 - RNA, 23 nt, Artificial Sequence
  Synthetic
aaagaagaaaaaugugcauuauu

SEQ ID NO: 123172 - RNA, 24 nt, Artificial Sequence
  Synthetic
caaagaagaaaaaugugcauuauu

SEQ ID NO: 123173 - RNA, 18 nt, Artificial Sequence
  Synthetic
uacccauccaucauuauu

SEQ ID NO: 123174 - RNA, 19 nt, Artificial Sequence
  Synthetic
uuacccauccaucauuauu

SEQ ID NO: 123175 - RNA, 20 nt, Artificial Sequence
  Synthetic
cuuacccauccaucauuauu

SEQ ID NO: 123176 - RNA, 21 nt, Artificial Sequence
  Synthetic
ccuuacccauccaucauuauu

SEQ ID NO: 123177 - RNA, 22 nt, Artificial Sequence
  Synthetic
uccuuacccauccaucauuauu

SEQ ID NO: 123178 - RNA, 24 nt, Artificial Sequence
  Synthetic
aguccuuacccauccaucauuauu

SEQ ID NO: 123179 - RNA, 18 nt, Artificial Sequence
  Synthetic
auaugauccaugauuauu

SEQ ID NO: 123180 - RNA, 19 nt, Artificial Sequence
  Synthetic
uauaugauccaugauuauu

SEQ ID NO: 123181 - RNA, 20 nt, Artificial Sequence
  Synthetic
uuauaugauccaugauuauu

SEQ ID NO: 123182 - RNA, 21 nt, Artificial Sequence
  Synthetic
uuuauaugauccaugauuauu

SEQ ID NO: 123183 - RNA, 22 nt, Artificial Sequence
  Synthetic
uuuuauaugauccaugauuauu

SEQ ID NO: 123184 - RNA, 23 nt, Artificial Sequence
  Synthetic
auuuuauaugauccaugauuauu

SEQ ID NO: 123185 - RNA, 24 nt, Artificial Sequence
  Synthetic
aauuuuauaugauccaugauuauu

SEQ ID NO: 123186 - RNA, 18 nt, Artificial Sequence
  Synthetic
cugaaguucaauauuauu

SEQ ID NO: 123187 - RNA, 19 nt, Artificial Sequence
  Synthetic
acugaaguucaauauuauu

SEQ ID NO: 123188 - RNA, 21 nt, Artificial Sequence
  Synthetic
agacugaaguucaauauuauu

SEQ ID NO: 123189 - RNA, 22 nt, Artificial Sequence
  Synthetic
cagacugaaguucaauauuauu

SEQ ID NO: 123190 - RNA, 23 nt, Artificial Sequence
  Synthetic
ucagacugaaguucaauauuauu

SEQ ID NO: 123191 - RNA, 22 nt, Artificial Sequence
  Synthetic
aggaguaucuauguauauuauu

SEQ ID NO: 123192 - RNA, 23 nt, Artificial Sequence
  Synthetic
aaggaguaucuauguauauuauu

SEQ ID NO: 123193 - RNA, 24 nt, Artificial Sequence
  Synthetic
aaaggaguaucuauguauauuauu

SEQ ID NO: 123194 - RNA, 21 nt, Artificial Sequence
  Synthetic
uuaauuuaaaaaccuauuauu

SEQ ID NO: 123195 - RNA, 22 nt, Artificial Sequence
  Synthetic
auuaauuuaaaaaccuauuauu

SEQ ID NO: 123196 - RNA, 23 nt, Artificial Sequence
  Synthetic
aauuaauuuaaaaaccuauuauu

SEQ ID NO: 123197 - RNA, 24 nt, Artificial Sequence
  Synthetic
uaauuaauuuaaaaaccuauuauu

SEQ ID NO: 123198 - RNA, 19 nt, Artificial Sequence
  Synthetic
uguauuuccugcuauuauu

SEQ ID NO: 123199 - RNA, 20 nt, Artificial Sequence
  Synthetic
uuguauuuccugcuauuauu

SEQ ID NO: 123200 - RNA, 21 nt, Artificial Sequence
  Synthetic
auuguauuuccugcuauuauu

SEQ ID NO: 123201 - RNA, 22 nt, Artificial Sequence
  Synthetic
cauuguauuuccugcuauuauu

SEQ ID NO: 123202 - RNA, 23 nt, Artificial Sequence
  Synthetic
acauuguauuuccugcuauuauu

SEQ ID NO: 123203 - RNA, 24 nt, Artificial Sequence
  Synthetic
cacauuguauuuccugcuauuauu

SEQ ID NO: 123204 - RNA, 18 nt, Artificial Sequence
  Synthetic
ugacaaaaucaacuuauu

SEQ ID NO: 123205 - RNA, 20 nt, Artificial Sequence
  Synthetic
agugacaaaaucaacuuauu

SEQ ID NO: 123206 - RNA, 21 nt, Artificial Sequence
  Synthetic
uagugacaaaaucaacuuauu

SEQ ID NO: 123207 - RNA, 22 nt, Artificial Sequence
  Synthetic
auagugacaaaaucaacuuauu

SEQ ID NO: 123208 - RNA, 23 nt, Artificial Sequence
  Synthetic
aauagugacaaaaucaacuuauu

SEQ ID NO: 123209 - RNA, 24 nt, Artificial Sequence
  Synthetic
aaauagugacaaaaucaacuuauu

SEQ ID NO: 123210 - RNA, 18 nt, Artificial Sequence
  Synthetic
cuaucucccugacuuauu

SEQ ID NO: 123211 - RNA, 20 nt, Artificial Sequence
  Synthetic
ugcuaucucccugacuuauu

SEQ ID NO: 123212 - RNA, 21 nt, Artificial Sequence
  Synthetic
cugcuaucucccugacuuauu

SEQ ID NO: 123213 - RNA, 22 nt, Artificial Sequence
  Synthetic
ccugcuaucucccugacuuauu

SEQ ID NO: 123214 - RNA, 23 nt, Artificial Sequence
  Synthetic
uccugcuaucucccugacuuauu

SEQ ID NO: 123215 - RNA, 24 nt, Artificial Sequence
  Synthetic
uuccugcuaucucccugacuuauu

SEQ ID NO: 123216 - RNA, 18 nt, Artificial Sequence
  Synthetic
auuuguggguuacuuauu

SEQ ID NO: 123217 - RNA, 19 nt, Artificial Sequence
  Synthetic
uauuuguggguuacuuauu

SEQ ID NO: 123218 - RNA, 20 nt, Artificial Sequence
  Synthetic
auauuuguggguuacuuauu

SEQ ID NO: 123219 - RNA, 21 nt, Artificial Sequence
  Synthetic
uauauuuguggguuacuuauu

SEQ ID NO: 123220 - RNA, 22 nt, Artificial Sequence
  Synthetic
auauauuuguggguuacuuauu

SEQ ID NO: 123221 - RNA, 23 nt, Artificial Sequence
  Synthetic
uauauauuuguggguuacuuauu

SEQ ID NO: 123222 - RNA, 24 nt, Artificial Sequence
  Synthetic
auauauauuuguggguuacuuauu

SEQ ID NO: 123223 - RNA, 18 nt, Artificial Sequence
  Synthetic
ugccaggggccccuuauu

SEQ ID NO: 123224 - RNA, 19 nt, Artificial Sequence
  Synthetic
augccaggggccccuuauu

SEQ ID NO: 123225 - RNA, 20 nt, Artificial Sequence
  Synthetic
uaugccaggggccccuuauu

SEQ ID NO: 123226 - RNA, 21 nt, Artificial Sequence
  Synthetic
auaugccaggggccccuuauu

SEQ ID NO: 123227 - RNA, 22 nt, Artificial Sequence
  Synthetic
aauaugccaggggccccuuauu

SEQ ID NO: 123228 - RNA, 23 nt, Artificial Sequence
  Synthetic
aaauaugccaggggccccuuauu

SEQ ID NO: 123229 - RNA, 24 nt, Artificial Sequence
  Synthetic
uaaauaugccaggggccccuuauu

SEQ ID NO: 123230 - RNA, 18 nt, Artificial Sequence
  Synthetic
aaaucuaugaggcuuauu

SEQ ID NO: 123231 - RNA, 19 nt, Artificial Sequence
  Synthetic
uaaaucuaugaggcuuauu

SEQ ID NO: 123232 - RNA, 20 nt, Artificial Sequence
  Synthetic
uuaaaucuaugaggcuuauu

SEQ ID NO: 123233 - RNA, 21 nt, Artificial Sequence
  Synthetic
uuuaaaucuaugaggcuuauu

SEQ ID NO: 123234 - RNA, 22 nt, Artificial Sequence
  Synthetic
uuuuaaaucuaugaggcuuauu

SEQ ID NO: 123235 - RNA, 23 nt, Artificial Sequence
  Synthetic
uuuuuaaaucuaugaggcuuauu

SEQ ID NO: 123236 - RNA, 24 nt, Artificial Sequence
  Synthetic
auuuuuaaaucuaugaggcuuauu

SEQ ID NO: 123237 - RNA, 18 nt, Artificial Sequence
  Synthetic
cguauugacgugcuuauu

SEQ ID NO: 123238 - RNA, 19 nt, Artificial Sequence
  Synthetic
acguauugacgugcuuauu

SEQ ID NO: 123239 - RNA, 20 nt, Artificial Sequence
  Synthetic
uacguauugacgugcuuauu

SEQ ID NO: 123240 - RNA, 21 nt, Artificial Sequence
  Synthetic
auacguauugacgugcuuauu

SEQ ID NO: 123241 - RNA, 22 nt, Artificial Sequence
  Synthetic
uauacguauugacgugcuuauu

SEQ ID NO: 123242 - RNA, 24 nt, Artificial Sequence
  Synthetic
uguauacguauugacgugcuuauu

SEQ ID NO: 123243 - RNA, 19 nt, Artificial Sequence
  Synthetic
ugugaauaucucaguuauu

SEQ ID NO: 123244 - RNA, 20 nt, Artificial Sequence
  Synthetic
uugugaauaucucaguuauu

SEQ ID NO: 123245 - RNA, 21 nt, Artificial Sequence
  Synthetic
auugugaauaucucaguuauu

SEQ ID NO: 123246 - RNA, 22 nt, Artificial Sequence
  Synthetic
uauugugaauaucucaguuauu

SEQ ID NO: 123247 - RNA, 23 nt, Artificial Sequence
  Synthetic
uuauugugaauaucucaguuauu

SEQ ID NO: 123248 - RNA, 18 nt, Artificial Sequence
  Synthetic
ugaguaagaaauguuauu

SEQ ID NO: 123249 - RNA, 19 nt, Artificial Sequence
  Synthetic
uugaguaagaaauguuauu

SEQ ID NO: 123250 - RNA, 20 nt, Artificial Sequence
  Synthetic
cuugaguaagaaauguuauu

SEQ ID NO: 123251 - RNA, 21 nt, Artificial Sequence
  Synthetic
ccuugaguaagaaauguuauu

SEQ ID NO: 123252 - RNA, 23 nt, Artificial Sequence
  Synthetic
ugccuugaguaagaaauguuauu

SEQ ID NO: 123253 - RNA, 24 nt, Artificial Sequence
  Synthetic
augccuugaguaagaaauguuauu

SEQ ID NO: 123254 - RNA, 18 nt, Artificial Sequence
  Synthetic
caccauuauuguguuauu

SEQ ID NO: 123255 - RNA, 19 nt, Artificial Sequence
  Synthetic
ucaccauuauuguguuauu

SEQ ID NO: 123256 - RNA, 20 nt, Artificial Sequence
  Synthetic
uucaccauuauuguguuauu

SEQ ID NO: 123257 - RNA, 21 nt, Artificial Sequence
  Synthetic
uuucaccauuauuguguuauu

SEQ ID NO: 123258 - RNA, 22 nt, Artificial Sequence
  Synthetic
auuucaccauuauuguguuauu

SEQ ID NO: 123259 - RNA, 23 nt, Artificial Sequence
  Synthetic
uauuucaccauuauuguguuauu

SEQ ID NO: 123260 - RNA, 24 nt, Artificial Sequence
  Synthetic
auauuucaccauuauuguguuauu

SEQ ID NO: 123261 - RNA, 21 nt, Artificial Sequence
  Synthetic
cauauugauaucuuuguuauu

SEQ ID NO: 123262 - RNA, 22 nt, Artificial Sequence
  Synthetic
acauauugauaucuuuguuauu

SEQ ID NO: 123263 - RNA, 23 nt, Artificial Sequence
  Synthetic
uacauauugauaucuuuguuauu

SEQ ID NO: 123264 - RNA, 24 nt, Artificial Sequence
  Synthetic
cuacauauugauaucuuuguuauu

SEQ ID NO: 123265 - RNA, 18 nt, Artificial Sequence
  Synthetic
acagucaaaaaauuuauu

SEQ ID NO: 123266 - RNA, 19 nt, Artificial Sequence
  Synthetic
uacagucaaaaaauuuauu

SEQ ID NO: 123267 - RNA, 20 nt, Artificial Sequence
  Synthetic
cuacagucaaaaaauuuauu

SEQ ID NO: 123268 - RNA, 21 nt, Artificial Sequence
  Synthetic
acuacagucaaaaaauuuauu

SEQ ID NO: 123269 - RNA, 23 nt, Artificial Sequence
  Synthetic
ugacuacagucaaaaaauuuauu

SEQ ID NO: 123270 - RNA, 24 nt, Artificial Sequence
  Synthetic
augacuacagucaaaaaauuuauu

SEQ ID NO: 123271 - RNA, 18 nt, Artificial Sequence
  Synthetic
augcaacagccauuuauu

SEQ ID NO: 123272 - RNA, 19 nt, Artificial Sequence
  Synthetic
aaugcaacagccauuuauu

SEQ ID NO: 123273 - RNA, 20 nt, Artificial Sequence
  Synthetic
caaugcaacagccauuuauu

SEQ ID NO: 123274 - RNA, 21 nt, Artificial Sequence
  Synthetic
acaaugcaacagccauuuauu

SEQ ID NO: 123275 - RNA, 22 nt, Artificial Sequence
  Synthetic
cacaaugcaacagccauuuauu

SEQ ID NO: 123276 - RNA, 23 nt, Artificial Sequence
  Synthetic
ucacaaugcaacagccauuuauu

SEQ ID NO: 123277 - RNA, 24 nt, Artificial Sequence
  Synthetic
aucacaaugcaacagccauuuauu

SEQ ID NO: 123278 - RNA, 18 nt, Artificial Sequence
  Synthetic
agaaaaaaguccuuuauu

SEQ ID NO: 123279 - RNA, 19 nt, Artificial Sequence
  Synthetic
aagaaaaaaguccuuuauu

SEQ ID NO: 123280 - RNA, 20 nt, Artificial Sequence
  Synthetic
uaagaaaaaaguccuuuauu

SEQ ID NO: 123281 - RNA, 21 nt, Artificial Sequence
  Synthetic
cuaagaaaaaaguccuuuauu

SEQ ID NO: 123282 - RNA, 22 nt, Artificial Sequence
  Synthetic
ucuaagaaaaaaguccuuuauu

SEQ ID NO: 123283 - RNA, 23 nt, Artificial Sequence
  Synthetic
aucuaagaaaaaaguccuuuauu

SEQ ID NO: 123284 - RNA, 24 nt, Artificial Sequence
  Synthetic
uaucuaagaaaaaaguccuuuauu

SEQ ID NO: 123285 - RNA, 18 nt, Artificial Sequence
  Synthetic
uuagaaaaaugcuuuauu

SEQ ID NO: 123286 - RNA, 19 nt, Artificial Sequence
  Synthetic
auuagaaaaaugcuuuauu

SEQ ID NO: 123287 - RNA, 22 nt, Artificial Sequence
  Synthetic
uggauuagaaaaaugcuuuauu

SEQ ID NO: 123288 - RNA, 23 nt, Artificial Sequence
  Synthetic
uuggauuagaaaaaugcuuuauu

SEQ ID NO: 123289 - RNA, 24 nt, Artificial Sequence
  Synthetic
cuuggauuagaaaaaugcuuuauu

SEQ ID NO: 123290 - RNA, 18 nt, Artificial Sequence
  Synthetic
agauaucacaaguuuauu

SEQ ID NO: 123291 - RNA, 19 nt, Artificial Sequence
  Synthetic
aagauaucacaaguuuauu

SEQ ID NO: 123292 - RNA, 21 nt, Artificial Sequence
  Synthetic
ugaagauaucacaaguuuauu

SEQ ID NO: 123293 - RNA, 22 nt, Artificial Sequence
  Synthetic
augaagauaucacaaguuuauu

SEQ ID NO: 123294 - RNA, 23 nt, Artificial Sequence
  Synthetic
uaugaagauaucacaaguuuauu

SEQ ID NO: 123295 - RNA, 24 nt, Artificial Sequence
  Synthetic
uuaugaagauaucacaaguuuauu

SEQ ID NO: 123296 - RNA, 18 nt, Artificial Sequence
  Synthetic
auaacaucuaaguuuauu

SEQ ID NO: 123297 - RNA, 20 nt, Artificial Sequence
  Synthetic
ugauaacaucuaaguuuauu

SEQ ID NO: 123298 - RNA, 21 nt, Artificial Sequence
  Synthetic
cugauaacaucuaaguuuauu

SEQ ID NO: 123299 - RNA, 22 nt, Artificial Sequence
  Synthetic
acugauaacaucuaaguuuauu

SEQ ID NO: 123300 - RNA, 23 nt, Artificial Sequence
  Synthetic
uacugauaacaucuaaguuuauu

SEQ ID NO: 123301 - RNA, 24 nt, Artificial Sequence
  Synthetic
auacugauaacaucuaaguuuauu

SEQ ID NO: 123302 - RNA, 19 nt, Artificial Sequence
  Synthetic
ugugguuaggggguuuauu

SEQ ID NO: 123303 - RNA, 20 nt, Artificial Sequence
  Synthetic
cugugguuaggggguuuauu

SEQ ID NO: 123304 - RNA, 21 nt, Artificial Sequence
  Synthetic
ccugugguuaggggguuuauu

SEQ ID NO: 123305 - RNA, 24 nt, Artificial Sequence
  Synthetic
uggccugugguuaggggguuuauu

SEQ ID NO: 123306 - RNA, 21 nt, Artificial Sequence
  Synthetic
uuuuaaaaauuauauuuuauu

SEQ ID NO: 123307 - RNA, 22 nt, Artificial Sequence
  Synthetic
cuuuuaaaaauuauauuuuauu

SEQ ID NO: 123308 - RNA, 23 nt, Artificial Sequence
  Synthetic
acuuuuaaaaauuauauuuuauu

SEQ ID NO: 123309 - RNA, 24 nt, Artificial Sequence
  Synthetic
aacuuuuaaaaauuauauuuuauu

SEQ ID NO: 123310 - RNA, 18 nt, Artificial Sequence
  Synthetic
cuuggugugacuuuuauu

SEQ ID NO: 123311 - RNA, 19 nt, Artificial Sequence
  Synthetic
acuuggugugacuuuuauu

SEQ ID NO: 123312 - RNA, 20 nt, Artificial Sequence
  Synthetic
aacuuggugugacuuuuauu

SEQ ID NO: 123313 - RNA, 21 nt, Artificial Sequence
  Synthetic
uaacuuggugugacuuuuauu

SEQ ID NO: 123314 - RNA, 22 nt, Artificial Sequence
  Synthetic
auaacuuggugugacuuuuauu

SEQ ID NO: 123315 - RNA, 23 nt, Artificial Sequence
  Synthetic
aauaacuuggugugacuuuuauu

SEQ ID NO: 123316 - RNA, 18 nt, Artificial Sequence
  Synthetic
uauguauucgguuuuauu

SEQ ID NO: 123317 - RNA, 19 nt, Artificial Sequence
  Synthetic
auauguauucgguuuuauu

SEQ ID NO: 123318 - RNA, 20 nt, Artificial Sequence
  Synthetic
uauauguauucgguuuuauu

SEQ ID NO: 123319 - RNA, 18 nt, Artificial Sequence
  Synthetic
aacuuugccauuuuuauu

SEQ ID NO: 123320 - RNA, 19 nt, Artificial Sequence
  Synthetic
aaacuuugccauuuuuauu

SEQ ID NO: 123321 - RNA, 20 nt, Artificial Sequence
  Synthetic
caaacuuugccauuuuuauu

SEQ ID NO: 123322 - RNA, 21 nt, Artificial Sequence
  Synthetic
ucaaacuuugccauuuuuauu

SEQ ID NO: 123323 - RNA, 22 nt, Artificial Sequence
  Synthetic
cucaaacuuugccauuuuuauu

SEQ ID NO: 123324 - RNA, 23 nt, Artificial Sequence
  Synthetic
ccucaaacuuugccauuuuuauu

SEQ ID NO: 123325 - RNA, 24 nt, Artificial Sequence
  Synthetic
accucaaacuuugccauuuuuauu

SEQ ID NO: 123326 - RNA, 18 nt, Artificial Sequence
  Synthetic
caaacuuuggcaaaacuu

SEQ ID NO: 123327 - RNA, 20 nt, Artificial Sequence
  Synthetic
agcaaacuuuggcaaaacuu

SEQ ID NO: 123328 - RNA, 21 nt, Artificial Sequence
  Synthetic
aagcaaacuuuggcaaaacuu

SEQ ID NO: 123329 - RNA, 22 nt, Artificial Sequence
  Synthetic
aaagcaaacuuuggcaaaacuu

SEQ ID NO: 123330 - RNA, 23 nt, Artificial Sequence
  Synthetic
aaaagcaaacuuuggcaaaacuu

SEQ ID NO: 123331 - RNA, 24 nt, Artificial Sequence
  Synthetic
caaaagcaaacuuuggcaaaacuu

SEQ ID NO: 123332 - RNA, 18 nt, Artificial Sequence
  Synthetic
uggauugcuggaaaacuu

SEQ ID NO: 123333 - RNA, 19 nt, Artificial Sequence
  Synthetic
cuggauugcuggaaaacuu

SEQ ID NO: 123334 - RNA, 20 nt, Artificial Sequence
  Synthetic
acuggauugcuggaaaacuu

SEQ ID NO: 123335 - RNA, 18 nt, Artificial Sequence
  Synthetic
acaggaggaauaaaacuu

SEQ ID NO: 123336 - RNA, 19 nt, Artificial Sequence
  Synthetic
uacaggaggaauaaaacuu

SEQ ID NO: 123337 - RNA, 20 nt, Artificial Sequence
  Synthetic
cuacaggaggaauaaaacuu

SEQ ID NO: 123338 - RNA, 21 nt, Artificial Sequence
  Synthetic
acuacaggaggaauaaaacuu

SEQ ID NO: 123339 - RNA, 23 nt, Artificial Sequence
  Synthetic
ugacuacaggaggaauaaaacuu

SEQ ID NO: 123340 - RNA, 24 nt, Artificial Sequence
  Synthetic
augacuacaggaggaauaaaacuu

SEQ ID NO: 123341 - RNA, 18 nt, Artificial Sequence
  Synthetic
cuuuaauauauaaaacuu

SEQ ID NO: 123342 - RNA, 19 nt, Artificial Sequence
  Synthetic
ucuuuaauauauaaaacuu

SEQ ID NO: 123343 - RNA, 20 nt, Artificial Sequence
  Synthetic
aucuuuaauauauaaaacuu

SEQ ID NO: 123344 - RNA, 23 nt, Artificial Sequence
  Synthetic
uggaucuuuaauauauaaaacuu

SEQ ID NO: 123345 - RNA, 24 nt, Artificial Sequence
  Synthetic
uuggaucuuuaauauauaaaacuu

SEQ ID NO: 123346 - RNA, 18 nt, Artificial Sequence
  Synthetic
aaaagcaaggacaaacuu

SEQ ID NO: 123347 - RNA, 20 nt, Artificial Sequence
  Synthetic
ugaaaagcaaggacaaacuu

SEQ ID NO: 123348 - RNA, 21 nt, Artificial Sequence
  Synthetic
augaaaagcaaggacaaacuu

SEQ ID NO: 123349 - RNA, 22 nt, Artificial Sequence
  Synthetic
uaugaaaagcaaggacaaacuu

SEQ ID NO: 123350 - RNA, 23 nt, Artificial Sequence
  Synthetic
cuaugaaaagcaaggacaaacuu

SEQ ID NO: 123351 - RNA, 18 nt, Artificial Sequence
  Synthetic
ucaccugcuauuaaacuu

SEQ ID NO: 123352 - RNA, 19 nt, Artificial Sequence
  Synthetic
uucaccugcuauuaaacuu

SEQ ID NO: 123353 - RNA, 20 nt, Artificial Sequence
  Synthetic
auucaccugcuauuaaacuu

SEQ ID NO: 123354 - RNA, 21 nt, Artificial Sequence
  Synthetic
aauucaccugcuauuaaacuu

SEQ ID NO: 123355 - RNA, 22 nt, Artificial Sequence
  Synthetic
uaauucaccugcuauuaaacuu

SEQ ID NO: 123356 - RNA, 23 nt, Artificial Sequence
  Synthetic
auaauucaccugcuauuaaacuu

SEQ ID NO: 123357 - RNA, 24 nt, Artificial Sequence
  Synthetic
aauaauucaccugcuauuaaacuu

SEQ ID NO: 123358 - RNA, 20 nt, Artificial Sequence
  Synthetic
aggcuugauaccuuaaacuu

SEQ ID NO: 123359 - RNA, 21 nt, Artificial Sequence
  Synthetic
aaggcuugauaccuuaaacuu

SEQ ID NO: 123360 - RNA, 22 nt, Artificial Sequence
  Synthetic
aaaggcuugauaccuuaaacuu

SEQ ID NO: 123361 - RNA, 23 nt, Artificial Sequence
  Synthetic
caaaggcuugauaccuuaaacuu

SEQ ID NO: 123362 - RNA, 24 nt, Artificial Sequence
  Synthetic
ucaaaggcuugauaccuuaaacuu

SEQ ID NO: 123363 - RNA, 19 nt, Artificial Sequence
  Synthetic
uguauguuuggaacaacuu

SEQ ID NO: 123364 - RNA, 21 nt, Artificial Sequence
  Synthetic
uguguauguuuggaacaacuu

SEQ ID NO: 123365 - RNA, 22 nt, Artificial Sequence
  Synthetic
uuguguauguuuggaacaacuu

SEQ ID NO: 123366 - RNA, 23 nt, Artificial Sequence
  Synthetic
uuuguguauguuuggaacaacuu

SEQ ID NO: 123367 - RNA, 24 nt, Artificial Sequence
  Synthetic
uuuuguguauguuuggaacaacuu

SEQ ID NO: 123368 - RNA, 18 nt, Artificial Sequence
  Synthetic
ugggacagacagcaacuu

SEQ ID NO: 123369 - RNA, 19 nt, Artificial Sequence
  Synthetic
augggacagacagcaacuu

SEQ ID NO: 123370 - RNA, 21 nt, Artificial Sequence
  Synthetic
agaugggacagacagcaacuu

SEQ ID NO: 123371 - RNA, 22 nt, Artificial Sequence
  Synthetic
uagaugggacagacagcaacuu

SEQ ID NO: 123372 - RNA, 23 nt, Artificial Sequence
  Synthetic
auagaugggacagacagcaacuu

SEQ ID NO: 123373 - RNA, 24 nt, Artificial Sequence
  Synthetic
aauagaugggacagacagcaacuu

SEQ ID NO: 123374 - RNA, 19 nt, Artificial Sequence
  Synthetic
aggaaaugauuagcaacuu

SEQ ID NO: 123375 - RNA, 20 nt, Artificial Sequence
  Synthetic
aaggaaaugauuagcaacuu

SEQ ID NO: 123376 - RNA, 21 nt, Artificial Sequence
  Synthetic
uaaggaaaugauuagcaacuu

SEQ ID NO: 123377 - RNA, 22 nt, Artificial Sequence
  Synthetic
uuaaggaaaugauuagcaacuu

SEQ ID NO: 123378 - RNA, 23 nt, Artificial Sequence
  Synthetic
auuaaggaaaugauuagcaacuu

SEQ ID NO: 123379 - RNA, 24 nt, Artificial Sequence
  Synthetic
uauuaaggaaaugauuagcaacuu

SEQ ID NO: 123380 - RNA, 19 nt, Artificial Sequence
  Synthetic
uguaagcaauaugcaacuu

SEQ ID NO: 123381 - RNA, 20 nt, Artificial Sequence
  Synthetic
auguaagcaauaugcaacuu

SEQ ID NO: 123382 - RNA, 21 nt, Artificial Sequence
  Synthetic
cauguaagcaauaugcaacuu

SEQ ID NO: 123383 - RNA, 24 nt, Artificial Sequence
  Synthetic
uggcauguaagcaauaugcaacuu

SEQ ID NO: 123384 - RNA, 18 nt, Artificial Sequence
  Synthetic
uuagugauuuuucaacuu

SEQ ID NO: 123385 - RNA, 19 nt, Artificial Sequence
  Synthetic
cuuagugauuuuucaacuu

SEQ ID NO: 123386 - RNA, 20 nt, Artificial Sequence
  Synthetic
acuuagugauuuuucaacuu

SEQ ID NO: 123387 - RNA, 21 nt, Artificial Sequence
  Synthetic
uacuuagugauuuuucaacuu

SEQ ID NO: 123388 - RNA, 22 nt, Artificial Sequence
  Synthetic
cuacuuagugauuuuucaacuu

SEQ ID NO: 123389 - RNA, 23 nt, Artificial Sequence
  Synthetic
ucuacuuagugauuuuucaacuu

SEQ ID NO: 123390 - RNA, 24 nt, Artificial Sequence
  Synthetic
uucuacuuagugauuuuucaacuu

SEQ ID NO: 123391 - RNA, 18 nt, Artificial Sequence
  Synthetic
augcauguugaagaacuu

SEQ ID NO: 123392 - RNA, 19 nt, Artificial Sequence
  Synthetic
caugcauguugaagaacuu

SEQ ID NO: 123393 - RNA, 20 nt, Artificial Sequence
  Synthetic
acaugcauguugaagaacuu

SEQ ID NO: 123394 - RNA, 22 nt, Artificial Sequence
  Synthetic
ugacaugcauguugaagaacuu

SEQ ID NO: 123395 - RNA, 23 nt, Artificial Sequence
  Synthetic
augacaugcauguugaagaacuu

SEQ ID NO: 123396 - RNA, 24 nt, Artificial Sequence
  Synthetic
aaugacaugcauguugaagaacuu

SEQ ID NO: 123397 - RNA, 18 nt, Artificial Sequence
  Synthetic
agacauuccagguaacuu

SEQ ID NO: 123398 - RNA, 19 nt, Artificial Sequence
  Synthetic
cagacauuccagguaacuu

SEQ ID NO: 123399 - RNA, 20 nt, Artificial Sequence
  Synthetic
ucagacauuccagguaacuu

SEQ ID NO: 123400 - RNA, 21 nt, Artificial Sequence
  Synthetic
cucagacauuccagguaacuu

SEQ ID NO: 123401 - RNA, 23 nt, Artificial Sequence
  Synthetic
agcucagacauuccagguaacuu

SEQ ID NO: 123402 - RNA, 24 nt, Artificial Sequence
  Synthetic
aagcucagacauuccagguaacuu

SEQ ID NO: 123403 - RNA, 18 nt, Artificial Sequence
  Synthetic
aauuaucuuguguaacuu

SEQ ID NO: 123404 - RNA, 19 nt, Artificial Sequence
  Synthetic
uaauuaucuuguguaacuu

SEQ ID NO: 123405 - RNA, 21 nt, Artificial Sequence
  Synthetic
cguaauuaucuuguguaacuu

SEQ ID NO: 123406 - RNA, 22 nt, Artificial Sequence
  Synthetic
ucguaauuaucuuguguaacuu

SEQ ID NO: 123407 - RNA, 23 nt, Artificial Sequence
  Synthetic
cucguaauuaucuuguguaacuu

SEQ ID NO: 123408 - RNA, 18 nt, Artificial Sequence
  Synthetic
ucauugaaaaaaacacuu

SEQ ID NO: 123409 - RNA, 19 nt, Artificial Sequence
  Synthetic
uucauugaaaaaaacacuu

SEQ ID NO: 123410 - RNA, 20 nt, Artificial Sequence
  Synthetic
auucauugaaaaaaacacuu

SEQ ID NO: 123411 - RNA, 22 nt, Artificial Sequence
  Synthetic
agauucauugaaaaaaacacuu

SEQ ID NO: 123412 - RNA, 23 nt, Artificial Sequence
  Synthetic
aagauucauugaaaaaaacacuu

SEQ ID NO: 123413 - RNA, 24 nt, Artificial Sequence
  Synthetic
aaagauucauugaaaaaaacacuu

SEQ ID NO: 123414 - RNA, 20 nt, Artificial Sequence
  Synthetic
uggcagugccauucacacuu

SEQ ID NO: 123415 - RNA, 24 nt, Artificial Sequence
  Synthetic
aggguggcagugccauucacacuu

SEQ ID NO: 123416 - RNA, 21 nt, Artificial Sequence
  Synthetic
caaagugauggguucacacuu

SEQ ID NO: 123417 - RNA, 23 nt, Artificial Sequence
  Synthetic
agcaaagugauggguucacacuu

SEQ ID NO: 123418 - RNA, 24 nt, Artificial Sequence
  Synthetic
uagcaaagugauggguucacacuu

SEQ ID NO: 123419 - RNA, 18 nt, Artificial Sequence
  Synthetic
uauccacucuuuacacuu

SEQ ID NO: 123420 - RNA, 19 nt, Artificial Sequence
  Synthetic
uuauccacucuuuacacuu

SEQ ID NO: 123421 - RNA, 20 nt, Artificial Sequence
  Synthetic
cuuauccacucuuuacacuu

SEQ ID NO: 123422 - RNA, 21 nt, Artificial Sequence
  Synthetic
ucuuauccacucuuuacacuu

SEQ ID NO: 123423 - RNA, 22 nt, Artificial Sequence
  Synthetic
uucuuauccacucuuuacacuu

SEQ ID NO: 123424 - RNA, 23 nt, Artificial Sequence
  Synthetic
cuucuuauccacucuuuacacuu

SEQ ID NO: 123425 - RNA, 24 nt, Artificial Sequence
  Synthetic
ccuucuuauccacucuuuacacuu

SEQ ID NO: 123426 - RNA, 19 nt, Artificial Sequence
  Synthetic
uguccgcaguagaccacuu

SEQ ID NO: 123427 - RNA, 22 nt, Artificial Sequence
  Synthetic
ugguguccgcaguagaccacuu

SEQ ID NO: 123428 - RNA, 23 nt, Artificial Sequence
  Synthetic
augguguccgcaguagaccacuu

SEQ ID NO: 123429 - RNA, 24 nt, Artificial Sequence
  Synthetic
uaugguguccgcaguagaccacuu

SEQ ID NO: 123430 - RNA, 18 nt, Artificial Sequence
  Synthetic
aguguugagggcccacuu

SEQ ID NO: 123431 - RNA, 19 nt, Artificial Sequence
  Synthetic
caguguugagggcccacuu

SEQ ID NO: 123432 - RNA, 20 nt, Artificial Sequence
  Synthetic
acaguguugagggcccacuu

SEQ ID NO: 123433 - RNA, 21 nt, Artificial Sequence
  Synthetic
aacaguguugagggcccacuu

SEQ ID NO: 123434 - RNA, 22 nt, Artificial Sequence
  Synthetic
aaacaguguugagggcccacuu

SEQ ID NO: 123435 - RNA, 23 nt, Artificial Sequence
  Synthetic
caaacaguguugagggcccacuu

SEQ ID NO: 123436 - RNA, 18 nt, Artificial Sequence
  Synthetic
cuacuggauuugccacuu

SEQ ID NO: 123437 - RNA, 19 nt, Artificial Sequence
  Synthetic
ucuacuggauuugccacuu

SEQ ID NO: 123438 - RNA, 20 nt, Artificial Sequence
  Synthetic
cucuacuggauuugccacuu

SEQ ID NO: 123439 - RNA, 22 nt, Artificial Sequence
  Synthetic
agcucuacuggauuugccacuu

SEQ ID NO: 123440 - RNA, 23 nt, Artificial Sequence
  Synthetic
uagcucuacuggauuugccacuu

SEQ ID NO: 123441 - RNA, 24 nt, Artificial Sequence
  Synthetic
uuagcucuacuggauuugccacuu

SEQ ID NO: 123442 - RNA, 18 nt, Artificial Sequence
  Synthetic
cuuauuuucacuccacuu

SEQ ID NO: 123443 - RNA, 19 nt, Artificial Sequence
  Synthetic
ccuuauuuucacuccacuu

SEQ ID NO: 123444 - RNA, 21 nt, Artificial Sequence
  Synthetic
cgccuuauuuucacuccacuu

SEQ ID NO: 123445 - RNA, 22 nt, Artificial Sequence
  Synthetic
ccgccuuauuuucacuccacuu

SEQ ID NO: 123446 - RNA, 23 nt, Artificial Sequence
  Synthetic
uccgccuuauuuucacuccacuu

SEQ ID NO: 123447 - RNA, 24 nt, Artificial Sequence
  Synthetic
cuccgccuuauuuucacuccacuu

SEQ ID NO: 123448 - RNA, 18 nt, Artificial Sequence
  Synthetic
ccauacugcauuccacuu

SEQ ID NO: 123449 - RNA, 19 nt, Artificial Sequence
  Synthetic
accauacugcauuccacuu

SEQ ID NO: 123450 - RNA, 20 nt, Artificial Sequence
  Synthetic
aaccauacugcauuccacuu

SEQ ID NO: 123451 - RNA, 21 nt, Artificial Sequence
  Synthetic
aaaccauacugcauuccacuu

SEQ ID NO: 123452 - RNA, 23 nt, Artificial Sequence
  Synthetic
ugaaaccauacugcauuccacuu

SEQ ID NO: 123453 - RNA, 24 nt, Artificial Sequence
  Synthetic
augaaaccauacugcauuccacuu

SEQ ID NO: 123454 - RNA, 18 nt, Artificial Sequence
  Synthetic
ccaagucugacagcacuu

SEQ ID NO: 123455 - RNA, 19 nt, Artificial Sequence
  Synthetic
cccaagucugacagcacuu

SEQ ID NO: 123456 - RNA, 20 nt, Artificial Sequence
  Synthetic
ucccaagucugacagcacuu

SEQ ID NO: 123457 - RNA, 21 nt, Artificial Sequence
  Synthetic
cucccaagucugacagcacuu

SEQ ID NO: 123458 - RNA, 22 nt, Artificial Sequence
  Synthetic
ucucccaagucugacagcacuu

SEQ ID NO: 123459 - RNA, 23 nt, Artificial Sequence
  Synthetic
cucucccaagucugacagcacuu

SEQ ID NO: 123460 - RNA, 24 nt, Artificial Sequence
  Synthetic
acucucccaagucugacagcacuu

SEQ ID NO: 123461 - RNA, 18 nt, Artificial Sequence
  Synthetic
acuguauacuaggcacuu

SEQ ID NO: 123462 - RNA, 19 nt, Artificial Sequence
  Synthetic
uacuguauacuaggcacuu

SEQ ID NO: 123463 - RNA, 20 nt, Artificial Sequence
  Synthetic
cuacuguauacuaggcacuu

SEQ ID NO: 123464 - RNA, 21 nt, Artificial Sequence
  Synthetic
ucuacuguauacuaggcacuu

SEQ ID NO: 123465 - RNA, 23 nt, Artificial Sequence
  Synthetic
ugucuacuguauacuaggcacuu

SEQ ID NO: 123466 - RNA, 21 nt, Artificial Sequence
  Synthetic
ccaacugugaacucugcacuu

SEQ ID NO: 123467 - RNA, 22 nt, Artificial Sequence
  Synthetic
accaacugugaacucugcacuu

SEQ ID NO: 123468 - RNA, 23 nt, Artificial Sequence
  Synthetic
caccaacugugaacucugcacuu

SEQ ID NO: 123469 - RNA, 24 nt, Artificial Sequence
  Synthetic
acaccaacugugaacucugcacuu

SEQ ID NO: 123470 - RNA, 18 nt, Artificial Sequence
  Synthetic
uuauauuagauugcacuu

SEQ ID NO: 123471 - RNA, 19 nt, Artificial Sequence
  Synthetic
uuuauauuagauugcacuu

SEQ ID NO: 123472 - RNA, 20 nt, Artificial Sequence
  Synthetic
auuuauauuagauugcacuu

SEQ ID NO: 123473 - RNA, 21 nt, Artificial Sequence
  Synthetic
aauuuauauuagauugcacuu

SEQ ID NO: 123474 - RNA, 22 nt, Artificial Sequence
  Synthetic
uaauuuauauuagauugcacuu

SEQ ID NO: 123475 - RNA, 23 nt, Artificial Sequence
  Synthetic
cuaauuuauauuagauugcacuu

SEQ ID NO: 123476 - RNA, 24 nt, Artificial Sequence
  Synthetic
ucuaauuuauauuagauugcacuu

SEQ ID NO: 123477 - RNA, 18 nt, Artificial Sequence
  Synthetic
ccauucuuaccaucacuu

SEQ ID NO: 123478 - RNA, 19 nt, Artificial Sequence
  Synthetic
accauucuuaccaucacuu

SEQ ID NO: 123479 - RNA, 20 nt, Artificial Sequence
  Synthetic
aaccauucuuaccaucacuu

SEQ ID NO: 123480 - RNA, 21 nt, Artificial Sequence
  Synthetic
uaaccauucuuaccaucacuu

SEQ ID NO: 123481 - RNA, 22 nt, Artificial Sequence
  Synthetic
cuaaccauucuuaccaucacuu

SEQ ID NO: 123482 - RNA, 23 nt, Artificial Sequence
  Synthetic
ccuaaccauucuuaccaucacuu

SEQ ID NO: 123483 - RNA, 24 nt, Artificial Sequence
  Synthetic
cccuaaccauucuuaccaucacuu

SEQ ID NO: 123484 - RNA, 18 nt, Artificial Sequence
  Synthetic
aaauguaguuuaucacuu

SEQ ID NO: 123485 - RNA, 19 nt, Artificial Sequence
  Synthetic
uaaauguaguuuaucacuu

SEQ ID NO: 123486 - RNA, 20 nt, Artificial Sequence
  Synthetic
auaaauguaguuuaucacuu

SEQ ID NO: 123487 - RNA, 21 nt, Artificial Sequence
  Synthetic
aauaaauguaguuuaucacuu

SEQ ID NO: 123488 - RNA, 23 nt, Artificial Sequence
  Synthetic
agaauaaauguaguuuaucacuu

SEQ ID NO: 123489 - RNA, 18 nt, Artificial Sequence
  Synthetic
auuugcagaacaagacuu

SEQ ID NO: 123490 - RNA, 19 nt, Artificial Sequence
  Synthetic
cauuugcagaacaagacuu

SEQ ID NO: 123491 - RNA, 20 nt, Artificial Sequence
  Synthetic
ucauuugcagaacaagacuu

SEQ ID NO: 123492 - RNA, 22 nt, Artificial Sequence
  Synthetic
agucauuugcagaacaagacuu

SEQ ID NO: 123493 - RNA, 23 nt, Artificial Sequence
  Synthetic
cagucauuugcagaacaagacuu

SEQ ID NO: 123494 - RNA, 24 nt, Artificial Sequence
  Synthetic
ucagucauuugcagaacaagacuu

SEQ ID NO: 123495 - RNA, 20 nt, Artificial Sequence
  Synthetic
aggaugagcggaggagacuu

SEQ ID NO: 123496 - RNA, 21 nt, Artificial Sequence
  Synthetic
aaggaugagcggaggagacuu

SEQ ID NO: 123497 - RNA, 22 nt, Artificial Sequence
  Synthetic
aaaggaugagcggaggagacuu

SEQ ID NO: 123498 - RNA, 23 nt, Artificial Sequence
  Synthetic
aaaaggaugagcggaggagacuu

SEQ ID NO: 123499 - RNA, 18 nt, Artificial Sequence
  Synthetic
cacauuugggugagacuu

SEQ ID NO: 123500 - RNA, 19 nt, Artificial Sequence
  Synthetic
acacauuugggugagacuu

SEQ ID NO: 123501 - RNA, 21 nt, Artificial Sequence
  Synthetic
agacacauuugggugagacuu

SEQ ID NO: 123502 - RNA, 22 nt, Artificial Sequence
  Synthetic
aagacacauuugggugagacuu

SEQ ID NO: 123503 - RNA, 24 nt, Artificial Sequence
  Synthetic
ugaagacacauuugggugagacuu

SEQ ID NO: 123504 - RNA, 19 nt, Artificial Sequence
  Synthetic
ugcuacugucuuaggacuu

SEQ ID NO: 123505 - RNA, 20 nt, Artificial Sequence
  Synthetic
cugcuacugucuuaggacuu

SEQ ID NO: 123506 - RNA, 21 nt, Artificial Sequence
  Synthetic
ccugcuacugucuuaggacuu

SEQ ID NO: 123507 - RNA, 22 nt, Artificial Sequence
  Synthetic
cccugcuacugucuuaggacuu

SEQ ID NO: 123508 - RNA, 23 nt, Artificial Sequence
  Synthetic
ccccugcuacugucuuaggacuu

SEQ ID NO: 123509 - RNA, 24 nt, Artificial Sequence
  Synthetic
accccugcuacugucuuaggacuu

SEQ ID NO: 123510 - RNA, 18 nt, Artificial Sequence
  Synthetic
uuaagaauccucugacuu

SEQ ID NO: 123511 - RNA, 19 nt, Artificial Sequence
  Synthetic
uuuaagaauccucugacuu

SEQ ID NO: 123512 - RNA, 20 nt, Artificial Sequence
  Synthetic
uuuuaagaauccucugacuu

SEQ ID NO: 123513 - RNA, 23 nt, Artificial Sequence
  Synthetic
ugguuuuaagaauccucugacuu

SEQ ID NO: 123514 - RNA, 24 nt, Artificial Sequence
  Synthetic
cugguuuuaagaauccucugacuu

SEQ ID NO: 123515 - RNA, 18 nt, Artificial Sequence
  Synthetic
cagacucaguauugacuu

SEQ ID NO: 123516 - RNA, 20 nt, Artificial Sequence
  Synthetic
agcagacucaguauugacuu

SEQ ID NO: 123517 - RNA, 21 nt, Artificial Sequence
  Synthetic
uagcagacucaguauugacuu

SEQ ID NO: 123518 - RNA, 22 nt, Artificial Sequence
  Synthetic
uuagcagacucaguauugacuu

SEQ ID NO: 123519 - RNA, 23 nt, Artificial Sequence
  Synthetic
auuagcagacucaguauugacuu

SEQ ID NO: 123520 - RNA, 24 nt, Artificial Sequence
  Synthetic
cauuagcagacucaguauugacuu

SEQ ID NO: 123521 - RNA, 18 nt, Artificial Sequence
  Synthetic
uaauucauuuacauacuu

SEQ ID NO: 123522 - RNA, 19 nt, Artificial Sequence
  Synthetic
uuaauucauuuacauacuu

SEQ ID NO: 123523 - RNA, 20 nt, Artificial Sequence
  Synthetic
uuuaauucauuuacauacuu

SEQ ID NO: 123524 - RNA, 21 nt, Artificial Sequence
  Synthetic
uuuuaauucauuuacauacuu

SEQ ID NO: 123525 - RNA, 22 nt, Artificial Sequence
  Synthetic
auuuuaauucauuuacauacuu

SEQ ID NO: 123526 - RNA, 24 nt, Artificial Sequence
  Synthetic
agauuuuaauucauuuacauacuu

SEQ ID NO: 123527 - RNA, 18 nt, Artificial Sequence
  Synthetic
aagcaauggaucauacuu

SEQ ID NO: 123528 - RNA, 20 nt, Artificial Sequence
  Synthetic
agaagcaauggaucauacuu

SEQ ID NO: 123529 - RNA, 21 nt, Artificial Sequence
  Synthetic
aagaagcaauggaucauacuu

SEQ ID NO: 123530 - RNA, 22 nt, Artificial Sequence
  Synthetic
uaagaagcaauggaucauacuu

SEQ ID NO: 123531 - RNA, 23 nt, Artificial Sequence
  Synthetic
uuaagaagcaauggaucauacuu

SEQ ID NO: 123532 - RNA, 24 nt, Artificial Sequence
  Synthetic
cuuaagaagcaauggaucauacuu

SEQ ID NO: 123533 - RNA, 21 nt, Artificial Sequence
  Synthetic
agggcaguuguucucauacuu

SEQ ID NO: 123534 - RNA, 22 nt, Artificial Sequence
  Synthetic
uagggcaguuguucucauacuu

SEQ ID NO: 123535 - RNA, 23 nt, Artificial Sequence
  Synthetic
cuagggcaguuguucucauacuu

SEQ ID NO: 123536 - RNA, 24 nt, Artificial Sequence
  Synthetic
ccuagggcaguuguucucauacuu

SEQ ID NO: 123537 - RNA, 18 nt, Artificial Sequence
  Synthetic
aguguuuccaagauacuu

SEQ ID NO: 123538 - RNA, 19 nt, Artificial Sequence
  Synthetic
uaguguuuccaagauacuu

SEQ ID NO: 123539 - RNA, 20 nt, Artificial Sequence
  Synthetic
cuaguguuuccaagauacuu

SEQ ID NO: 123540 - RNA, 22 nt, Artificial Sequence
  Synthetic
ugcuaguguuuccaagauacuu

SEQ ID NO: 123541 - RNA, 23 nt, Artificial Sequence
  Synthetic
uugcuaguguuuccaagauacuu

SEQ ID NO: 123542 - RNA, 24 nt, Artificial Sequence
  Synthetic
cuugcuaguguuuccaagauacuu

SEQ ID NO: 123543 - RNA, 18 nt, Artificial Sequence
  Synthetic
cacaguaucaugauacuu

SEQ ID NO: 123544 - RNA, 19 nt, Artificial Sequence
  Synthetic
ucacaguaucaugauacuu

SEQ ID NO: 123545 - RNA, 20 nt, Artificial Sequence
  Synthetic
aucacaguaucaugauacuu

SEQ ID NO: 123546 - RNA, 21 nt, Artificial Sequence
  Synthetic
aaucacaguaucaugauacuu

SEQ ID NO: 123547 - RNA, 22 nt, Artificial Sequence
  Synthetic
aaaucacaguaucaugauacuu

SEQ ID NO: 123548 - RNA, 23 nt, Artificial Sequence
  Synthetic
aaaaucacaguaucaugauacuu

SEQ ID NO: 123549 - RNA, 24 nt, Artificial Sequence
  Synthetic
uaaaaucacaguaucaugauacuu

SEQ ID NO: 123550 - RNA, 18 nt, Artificial Sequence
  Synthetic
uaucuuucaaauauacuu

SEQ ID NO: 123551 - RNA, 19 nt, Artificial Sequence
  Synthetic
auaucuuucaaauauacuu

SEQ ID NO: 123552 - RNA, 20 nt, Artificial Sequence
  Synthetic
cauaucuuucaaauauacuu

SEQ ID NO: 123553 - RNA, 21 nt, Artificial Sequence
  Synthetic
ucauaucuuucaaauauacuu

SEQ ID NO: 123554 - RNA, 22 nt, Artificial Sequence
  Synthetic
cucauaucuuucaaauauacuu

SEQ ID NO: 123555 - RNA, 23 nt, Artificial Sequence
  Synthetic
ucucauaucuuucaaauauacuu

SEQ ID NO: 123556 - RNA, 24 nt, Artificial Sequence
  Synthetic
uucucauaucuuucaaauauacuu

SEQ ID NO: 123557 - RNA, 18 nt, Artificial Sequence
  Synthetic
cuuuugcuacauauacuu

SEQ ID NO: 123558 - RNA, 21 nt, Artificial Sequence
  Synthetic
uggcuuuugcuacauauacuu

SEQ ID NO: 123559 - RNA, 22 nt, Artificial Sequence
  Synthetic
auggcuuuugcuacauauacuu

SEQ ID NO: 123560 - RNA, 23 nt, Artificial Sequence
  Synthetic
uauggcuuuugcuacauauacuu

SEQ ID NO: 123561 - RNA, 24 nt, Artificial Sequence
  Synthetic
uuauggcuuuugcuacauauacuu

SEQ ID NO: 123562 - RNA, 19 nt, Artificial Sequence
  Synthetic
uguguguauacguauacuu

SEQ ID NO: 123563 - RNA, 21 nt, Artificial Sequence
  Synthetic
uguguguguauacguauacuu

SEQ ID NO: 123564 - RNA, 24 nt, Artificial Sequence
  Synthetic
agguguguguguauacguauacuu

SEQ ID NO: 123565 - RNA, 18 nt, Artificial Sequence
  Synthetic
uaacuggcauggcuacuu

SEQ ID NO: 123566 - RNA, 19 nt, Artificial Sequence
  Synthetic
uuaacuggcauggcuacuu

SEQ ID NO: 123567 - RNA, 21 nt, Artificial Sequence
  Synthetic
uguuaacuggcauggcuacuu

SEQ ID NO: 123568 - RNA, 22 nt, Artificial Sequence
  Synthetic
auguuaacuggcauggcuacuu

SEQ ID NO: 123569 - RNA, 23 nt, Artificial Sequence
  Synthetic
uauguuaacuggcauggcuacuu

SEQ ID NO: 123570 - RNA, 24 nt, Artificial Sequence
  Synthetic
auauguuaacuggcauggcuacuu

SEQ ID NO: 123571 - RNA, 18 nt, Artificial Sequence
  Synthetic
augaaaauguaucuacuu

SEQ ID NO: 123572 - RNA, 19 nt, Artificial Sequence
  Synthetic
caugaaaauguaucuacuu

SEQ ID NO: 123573 - RNA, 21 nt, Artificial Sequence
  Synthetic
ugcaugaaaauguaucuacuu

SEQ ID NO: 123574 - RNA, 22 nt, Artificial Sequence
  Synthetic
augcaugaaaauguaucuacuu

SEQ ID NO: 123575 - RNA, 23 nt, Artificial Sequence
  Synthetic
uaugcaugaaaauguaucuacuu

SEQ ID NO: 123576 - RNA, 19 nt, Artificial Sequence
  Synthetic
aguacugcaaauucuacuu

SEQ ID NO: 123577 - RNA, 21 nt, Artificial Sequence
  Synthetic
ugaguacugcaaauucuacuu

SEQ ID NO: 123578 - RNA, 22 nt, Artificial Sequence
  Synthetic
uugaguacugcaaauucuacuu

SEQ ID NO: 123579 - RNA, 23 nt, Artificial Sequence
  Synthetic
cuugaguacugcaaauucuacuu

SEQ ID NO: 123580 - RNA, 24 nt, Artificial Sequence
  Synthetic
ucuugaguacugcaaauucuacuu

SEQ ID NO: 123581 - RNA, 18 nt, Artificial Sequence
  Synthetic
cuccuuuaucaaguacuu

SEQ ID NO: 123582 - RNA, 20 nt, Artificial Sequence
  Synthetic
ugcuccuuuaucaaguacuu

SEQ ID NO: 123583 - RNA, 21 nt, Artificial Sequence
  Synthetic
uugcuccuuuaucaaguacuu

SEQ ID NO: 123584 - RNA, 22 nt, Artificial Sequence
  Synthetic
auugcuccuuuaucaaguacuu

SEQ ID NO: 123585 - RNA, 23 nt, Artificial Sequence
  Synthetic
cauugcuccuuuaucaaguacuu

SEQ ID NO: 123586 - RNA, 24 nt, Artificial Sequence
  Synthetic
ccauugcuccuuuaucaaguacuu

SEQ ID NO: 123587 - RNA, 18 nt, Artificial Sequence
  Synthetic
uugguuuuccacguacuu

SEQ ID NO: 123588 - RNA, 19 nt, Artificial Sequence
  Synthetic
auugguuuuccacguacuu

SEQ ID NO: 123589 - RNA, 20 nt, Artificial Sequence
  Synthetic
aauugguuuuccacguacuu

SEQ ID NO: 123590 - RNA, 22 nt, Artificial Sequence
  Synthetic
agaauugguuuuccacguacuu

SEQ ID NO: 123591 - RNA, 23 nt, Artificial Sequence
  Synthetic
cagaauugguuuuccacguacuu

SEQ ID NO: 123592 - RNA, 24 nt, Artificial Sequence
  Synthetic
ccagaauugguuuuccacguacuu

SEQ ID NO: 123593 - RNA, 18 nt, Artificial Sequence
  Synthetic
aaaauuucuaugguacuu

SEQ ID NO: 123594 - RNA, 19 nt, Artificial Sequence
  Synthetic
uaaaauuucuaugguacuu

SEQ ID NO: 123595 - RNA, 20 nt, Artificial Sequence
  Synthetic
uuaaaauuucuaugguacuu

SEQ ID NO: 123596 - RNA, 21 nt, Artificial Sequence
  Synthetic
uuuaaaauuucuaugguacuu

SEQ ID NO: 123597 - RNA, 22 nt, Artificial Sequence
  Synthetic
uuuuaaaauuucuaugguacuu

SEQ ID NO: 123598 - RNA, 23 nt, Artificial Sequence
  Synthetic
cuuuuaaaauuucuaugguacuu

SEQ ID NO: 123599 - RNA, 24 nt, Artificial Sequence
  Synthetic
ccuuuuaaaauuucuaugguacuu

SEQ ID NO: 123600 - RNA, 18 nt, Artificial Sequence
  Synthetic
auauaaaucacuguacuu

SEQ ID NO: 123601 - RNA, 19 nt, Artificial Sequence
  Synthetic
uauauaaaucacuguacuu

SEQ ID NO: 123602 - RNA, 20 nt, Artificial Sequence
  Synthetic
uuauauaaaucacuguacuu

SEQ ID NO: 123603 - RNA, 21 nt, Artificial Sequence
  Synthetic
uuuauauaaaucacuguacuu

SEQ ID NO: 123604 - RNA, 22 nt, Artificial Sequence
  Synthetic
uuuuauauaaaucacuguacuu

SEQ ID NO: 123605 - RNA, 23 nt, Artificial Sequence
  Synthetic
cuuuuauauaaaucacuguacuu

SEQ ID NO: 123606 - RNA, 24 nt, Artificial Sequence
  Synthetic
acuuuuauauaaaucacuguacuu

SEQ ID NO: 123607 - RNA, 18 nt, Artificial Sequence
  Synthetic
auaauauauagauuacuu

SEQ ID NO: 123608 - RNA, 20 nt, Artificial Sequence
  Synthetic
agauaauauauagauuacuu

SEQ ID NO: 123609 - RNA, 21 nt, Artificial Sequence
  Synthetic
uagauaauauauagauuacuu

SEQ ID NO: 123610 - RNA, 22 nt, Artificial Sequence
  Synthetic
uuagauaauauauagauuacuu

SEQ ID NO: 123611 - RNA, 23 nt, Artificial Sequence
  Synthetic
uuuagauaauauauagauuacuu

SEQ ID NO: 123612 - RNA, 24 nt, Artificial Sequence
  Synthetic
uuuuagauaauauauagauuacuu

SEQ ID NO: 123613 - RNA, 21 nt, Artificial Sequence
  Synthetic
aaaaaaaaaaauggauuacuu

SEQ ID NO: 123614 - RNA, 23 nt, Artificial Sequence
  Synthetic
ugaaaaaaaaaaauggauuacuu

SEQ ID NO: 123615 - RNA, 24 nt, Artificial Sequence
  Synthetic
cugaaaaaaaaaaauggauuacuu

SEQ ID NO: 123616 - RNA, 18 nt, Artificial Sequence
  Synthetic
ucauuauuugccuuacuu

SEQ ID NO: 123617 - RNA, 19 nt, Artificial Sequence
  Synthetic
aucauuauuugccuuacuu

SEQ ID NO: 123618 - RNA, 20 nt, Artificial Sequence
  Synthetic
caucauuauuugccuuacuu

SEQ ID NO: 123619 - RNA, 21 nt, Artificial Sequence
  Synthetic
ucaucauuauuugccuuacuu

SEQ ID NO: 123620 - RNA, 22 nt, Artificial Sequence
  Synthetic
aucaucauuauuugccuuacuu

SEQ ID NO: 123621 - RNA, 23 nt, Artificial Sequence
  Synthetic
caucaucauuauuugccuuacuu

SEQ ID NO: 123622 - RNA, 24 nt, Artificial Sequence
  Synthetic
ucaucaucauuauuugccuuacuu

SEQ ID NO: 123623 - RNA, 18 nt, Artificial Sequence
  Synthetic
cugaaagauuccuuacuu

SEQ ID NO: 123624 - RNA, 20 nt, Artificial Sequence
  Synthetic
ugcugaaagauuccuuacuu

SEQ ID NO: 123625 - RNA, 22 nt, Artificial Sequence
  Synthetic
ugugcugaaagauuccuuacuu

SEQ ID NO: 123626 - RNA, 23 nt, Artificial Sequence
  Synthetic
augugcugaaagauuccuuacuu

SEQ ID NO: 123627 - RNA, 24 nt, Artificial Sequence
  Synthetic
aaugugcugaaagauuccuuacuu

SEQ ID NO: 123628 - RNA, 19 nt, Artificial Sequence
  Synthetic
ugaucugauagucuuacuu

SEQ ID NO: 123629 - RNA, 20 nt, Artificial Sequence
  Synthetic
augaucugauagucuuacuu

SEQ ID NO: 123630 - RNA, 21 nt, Artificial Sequence
  Synthetic
uaugaucugauagucuuacuu

SEQ ID NO: 123631 - RNA, 22 nt, Artificial Sequence
  Synthetic
auaugaucugauagucuuacuu

SEQ ID NO: 123632 - RNA, 23 nt, Artificial Sequence
  Synthetic
uauaugaucugauagucuuacuu

SEQ ID NO: 123633 - RNA, 24 nt, Artificial Sequence
  Synthetic
uuauaugaucugauagucuuacuu

SEQ ID NO: 123634 - RNA, 18 nt, Artificial Sequence
  Synthetic
uguauaacacaguuacuu

SEQ ID NO: 123635 - RNA, 19 nt, Artificial Sequence
  Synthetic
uuguauaacacaguuacuu

SEQ ID NO: 123636 - RNA, 22 nt, Artificial Sequence
  Synthetic
ugguuguauaacacaguuacuu

SEQ ID NO: 123637 - RNA, 23 nt, Artificial Sequence
  Synthetic
uugguuguauaacacaguuacuu

SEQ ID NO: 123638 - RNA, 24 nt, Artificial Sequence
  Synthetic
uuugguuguauaacacaguuacuu

SEQ ID NO: 123639 - RNA, 18 nt, Artificial Sequence
  Synthetic
ucuaauuuuauguuacuu

SEQ ID NO: 123640 - RNA, 19 nt, Artificial Sequence
  Synthetic
aucuaauuuuauguuacuu

SEQ ID NO: 123641 - RNA, 21 nt, Artificial Sequence
  Synthetic
ugaucuaauuuuauguuacuu

SEQ ID NO: 123642 - RNA, 22 nt, Artificial Sequence
  Synthetic
augaucuaauuuuauguuacuu

SEQ ID NO: 123643 - RNA, 23 nt, Artificial Sequence
  Synthetic
caugaucuaauuuuauguuacuu

SEQ ID NO: 123644 - RNA, 24 nt, Artificial Sequence
  Synthetic
acaugaucuaauuuuauguuacuu

SEQ ID NO: 123645 - RNA, 18 nt, Artificial Sequence
  Synthetic
auuccuuaggaaaaccuu

SEQ ID NO: 123646 - RNA, 19 nt, Artificial Sequence
  Synthetic
aauuccuuaggaaaaccuu

SEQ ID NO: 123647 - RNA, 20 nt, Artificial Sequence
  Synthetic
uaauuccuuaggaaaaccuu

SEQ ID NO: 123648 - RNA, 21 nt, Artificial Sequence
  Synthetic
uuaauuccuuaggaaaaccuu

SEQ ID NO: 123649 - RNA, 22 nt, Artificial Sequence
  Synthetic
uuuaauuccuuaggaaaaccuu

SEQ ID NO: 123650 - RNA, 23 nt, Artificial Sequence
  Synthetic
cuuuaauuccuuaggaaaaccuu

SEQ ID NO: 123651 - RNA, 24 nt, Artificial Sequence
  Synthetic
ccuuuaauuccuuaggaaaaccuu

SEQ ID NO: 123652 - RNA, 18 nt, Artificial Sequence
  Synthetic
agagaaggaauaaaccuu

SEQ ID NO: 123653 - RNA, 20 nt, Artificial Sequence
  Synthetic
ugagagaaggaauaaaccuu

SEQ ID NO: 123654 - RNA, 21 nt, Artificial Sequence
  Synthetic
augagagaaggaauaaaccuu

SEQ ID NO: 123655 - RNA, 23 nt, Artificial Sequence
  Synthetic
agaugagagaaggaauaaaccuu

SEQ ID NO: 123656 - RNA, 24 nt, Artificial Sequence
  Synthetic
aagaugagagaaggaauaaaccuu

SEQ ID NO: 123657 - RNA, 18 nt, Artificial Sequence
  Synthetic
ucucauuuuuuuaaccuu

SEQ ID NO: 123658 - RNA, 19 nt, Artificial Sequence
  Synthetic
cucucauuuuuuuaaccuu

SEQ ID NO: 123659 - RNA, 20 nt, Artificial Sequence
  Synthetic
ucucucauuuuuuuaaccuu

SEQ ID NO: 123660 - RNA, 21 nt, Artificial Sequence
  Synthetic
aucucucauuuuuuuaaccuu

SEQ ID NO: 123661 - RNA, 22 nt, Artificial Sequence
  Synthetic
caucucucauuuuuuuaaccuu

SEQ ID NO: 123662 - RNA, 23 nt, Artificial Sequence
  Synthetic
ucaucucucauuuuuuuaaccuu

SEQ ID NO: 123663 - RNA, 24 nt, Artificial Sequence
  Synthetic
uucaucucucauuuuuuuaaccuu

SEQ ID NO: 123664 - RNA, 18 nt, Artificial Sequence
  Synthetic
uuucagguaaaugaccuu

SEQ ID NO: 123665 - RNA, 19 nt, Artificial Sequence
  Synthetic
uuuucagguaaaugaccuu

SEQ ID NO: 123666 - RNA, 20 nt, Artificial Sequence
  Synthetic
auuuucagguaaaugaccuu

SEQ ID NO: 123667 - RNA, 21 nt, Artificial Sequence
  Synthetic
cauuuucagguaaaugaccuu

SEQ ID NO: 123668 - RNA, 22 nt, Artificial Sequence
  Synthetic
ucauuuucagguaaaugaccuu

SEQ ID NO: 123669 - RNA, 23 nt, Artificial Sequence
  Synthetic
aucauuuucagguaaaugaccuu

SEQ ID NO: 123670 - RNA, 24 nt, Artificial Sequence
  Synthetic
uaucauuuucagguaaaugaccuu

SEQ ID NO: 123671 - RNA, 18 nt, Artificial Sequence
  Synthetic
cuugucacaagugaccuu

SEQ ID NO: 123672 - RNA, 20 nt, Artificial Sequence
  Synthetic
ugcuugucacaagugaccuu

SEQ ID NO: 123673 - RNA, 21 nt, Artificial Sequence
  Synthetic
augcuugucacaagugaccuu

SEQ ID NO: 123674 - RNA, 22 nt, Artificial Sequence
  Synthetic
aaugcuugucacaagugaccuu

SEQ ID NO: 123675 - RNA, 23 nt, Artificial Sequence
  Synthetic
aaaugcuugucacaagugaccuu

SEQ ID NO: 123676 - RNA, 24 nt, Artificial Sequence
  Synthetic
caaaugcuugucacaagugaccuu

SEQ ID NO: 123677 - RNA, 18 nt, Artificial Sequence
  Synthetic
auuugaaaaccauaccuu

SEQ ID NO: 123678 - RNA, 20 nt, Artificial Sequence
  Synthetic
ugauuugaaaaccauaccuu

SEQ ID NO: 123679 - RNA, 21 nt, Artificial Sequence
  Synthetic
augauuugaaaaccauaccuu

SEQ ID NO: 123680 - RNA, 22 nt, Artificial Sequence
  Synthetic
aaugauuugaaaaccauaccuu

SEQ ID NO: 123681 - RNA, 24 nt, Artificial Sequence
  Synthetic
agaaugauuugaaaaccauaccuu

SEQ ID NO: 123682 - RNA, 18 nt, Artificial Sequence
  Synthetic
caucugacuuacuaccuu

SEQ ID NO: 123683 - RNA, 19 nt, Artificial Sequence
  Synthetic
acaucugacuuacuaccuu

SEQ ID NO: 123684 - RNA, 20 nt, Artificial Sequence
  Synthetic
cacaucugacuuacuaccuu

SEQ ID NO: 123685 - RNA, 21 nt, Artificial Sequence
  Synthetic
ucacaucugacuuacuaccuu

SEQ ID NO: 123686 - RNA, 22 nt, Artificial Sequence
  Synthetic
aucacaucugacuuacuaccuu

SEQ ID NO: 123687 - RNA, 23 nt, Artificial Sequence
  Synthetic
caucacaucugacuuacuaccuu

SEQ ID NO: 123688 - RNA, 24 nt, Artificial Sequence
  Synthetic
ucaucacaucugacuuacuaccuu

SEQ ID NO: 123689 - RNA, 18 nt, Artificial Sequence
  Synthetic
aauuaagaagccuaccuu

SEQ ID NO: 123690 - RNA, 19 nt, Artificial Sequence
  Synthetic
uaauuaagaagccuaccuu

SEQ ID NO: 123691 - RNA, 20 nt, Artificial Sequence
  Synthetic
auaauuaagaagccuaccuu

SEQ ID NO: 123692 - RNA, 21 nt, Artificial Sequence
  Synthetic
aauaauuaagaagccuaccuu

SEQ ID NO: 123693 - RNA, 23 nt, Artificial Sequence
  Synthetic
agaauaauuaagaagccuaccuu

SEQ ID NO: 123694 - RNA, 19 nt, Artificial Sequence
  Synthetic
ugccauuccaugcuaccuu

SEQ ID NO: 123695 - RNA, 21 nt, Artificial Sequence
  Synthetic
cgugccauuccaugcuaccuu

SEQ ID NO: 123696 - RNA, 22 nt, Artificial Sequence
  Synthetic
acgugccauuccaugcuaccuu

SEQ ID NO: 123697 - RNA, 23 nt, Artificial Sequence
  Synthetic
uacgugccauuccaugcuaccuu

SEQ ID NO: 123698 - RNA, 24 nt, Artificial Sequence
  Synthetic
uuacgugccauuccaugcuaccuu

SEQ ID NO: 123699 - RNA, 18 nt, Artificial Sequence
  Synthetic
acaagaaaugauuaccuu

SEQ ID NO: 123700 - RNA, 19 nt, Artificial Sequence
  Synthetic
cacaagaaaugauuaccuu

SEQ ID NO: 123701 - RNA, 20 nt, Artificial Sequence
  Synthetic
acacaagaaaugauuaccuu

SEQ ID NO: 123702 - RNA, 21 nt, Artificial Sequence
  Synthetic
uacacaagaaaugauuaccuu

SEQ ID NO: 123703 - RNA, 22 nt, Artificial Sequence
  Synthetic
auacacaagaaaugauuaccuu

SEQ ID NO: 123704 - RNA, 23 nt, Artificial Sequence
  Synthetic
uauacacaagaaaugauuaccuu

SEQ ID NO: 123705 - RNA, 24 nt, Artificial Sequence
  Synthetic
uuauacacaagaaaugauuaccuu

SEQ ID NO: 123706 - RNA, 18 nt, Artificial Sequence
  Synthetic
ccuuccuuuucuuaccuu

SEQ ID NO: 123707 - RNA, 20 nt, Artificial Sequence
  Synthetic
ugccuuccuuuucuuaccuu

SEQ ID NO: 123708 - RNA, 21 nt, Artificial Sequence
  Synthetic
cugccuuccuuuucuuaccuu

SEQ ID NO: 123709 - RNA, 22 nt, Artificial Sequence
  Synthetic
ucugccuuccuuuucuuaccuu

SEQ ID NO: 123710 - RNA, 21 nt, Artificial Sequence
  Synthetic
agguagaaaaaaaaaacccuu

SEQ ID NO: 123711 - RNA, 23 nt, Artificial Sequence
  Synthetic
agagguagaaaaaaaaaacccuu

SEQ ID NO: 123712 - RNA, 24 nt, Artificial Sequence
  Synthetic
aagagguagaaaaaaaaaacccuu

SEQ ID NO: 123713 - RNA, 19 nt, Artificial Sequence
  Synthetic
aguauuacuuaaaacccuu

SEQ ID NO: 123714 - RNA, 20 nt, Artificial Sequence
  Synthetic
aaguauuacuuaaaacccuu

SEQ ID NO: 123715 - RNA, 22 nt, Artificial Sequence
  Synthetic
ugaaguauuacuuaaaacccuu

SEQ ID NO: 123716 - RNA, 23 nt, Artificial Sequence
  Synthetic
augaaguauuacuuaaaacccuu

SEQ ID NO: 123717 - RNA, 24 nt, Artificial Sequence
  Synthetic
uaugaaguauuacuuaaaacccuu

SEQ ID NO: 123718 - RNA, 18 nt, Artificial Sequence
  Synthetic
auuuagucauuaacccuu

SEQ ID NO: 123719 - RNA, 19 nt, Artificial Sequence
  Synthetic
aauuuagucauuaacccuu

SEQ ID NO: 123720 - RNA, 20 nt, Artificial Sequence
  Synthetic
aaauuuagucauuaacccuu

SEQ ID NO: 123721 - RNA, 21 nt, Artificial Sequence
  Synthetic
aaaauuuagucauuaacccuu

SEQ ID NO: 123722 - RNA, 22 nt, Artificial Sequence
  Synthetic
uaaaauuuagucauuaacccuu

SEQ ID NO: 123723 - RNA, 23 nt, Artificial Sequence
  Synthetic
auaaaauuuagucauuaacccuu

SEQ ID NO: 123724 - RNA, 24 nt, Artificial Sequence
  Synthetic
aauaaaauuuagucauuaacccuu

SEQ ID NO: 123725 - RNA, 18 nt, Artificial Sequence
  Synthetic
auccagguuuucacccuu

SEQ ID NO: 123726 - RNA, 19 nt, Artificial Sequence
  Synthetic
aauccagguuuucacccuu

SEQ ID NO: 123727 - RNA, 20 nt, Artificial Sequence
  Synthetic
aaauccagguuuucacccuu

SEQ ID NO: 123728 - RNA, 21 nt, Artificial Sequence
  Synthetic
aaaauccagguuuucacccuu

SEQ ID NO: 123729 - RNA, 22 nt, Artificial Sequence
  Synthetic
uaaaauccagguuuucacccuu

SEQ ID NO: 123730 - RNA, 23 nt, Artificial Sequence
  Synthetic
auaaaauccagguuuucacccuu

SEQ ID NO: 123731 - RNA, 24 nt, Artificial Sequence
  Synthetic
aauaaaauccagguuuucacccuu

SEQ ID NO: 123732 - RNA, 19 nt, Artificial Sequence
  Synthetic
ugggcuuggagagacccuu

SEQ ID NO: 123733 - RNA, 22 nt, Artificial Sequence
  Synthetic
aggugggcuuggagagacccuu

SEQ ID NO: 123734 - RNA, 24 nt, Artificial Sequence
  Synthetic
agaggugggcuuggagagacccuu

SEQ ID NO: 123735 - RNA, 18 nt, Artificial Sequence
  Synthetic
caguuucacaugacccuu

SEQ ID NO: 123736 - RNA, 20 nt, Artificial Sequence
  Synthetic
agcaguuucacaugacccuu

SEQ ID NO: 123737 - RNA, 21 nt, Artificial Sequence
  Synthetic
uagcaguuucacaugacccuu

SEQ ID NO: 123738 - RNA, 22 nt, Artificial Sequence
  Synthetic
uuagcaguuucacaugacccuu

SEQ ID NO: 123739 - RNA, 23 nt, Artificial Sequence
  Synthetic
cuuagcaguuucacaugacccuu

SEQ ID NO: 123740 - RNA, 24 nt, Artificial Sequence
  Synthetic
ccuuagcaguuucacaugacccuu

SEQ ID NO: 123741 - RNA, 18 nt, Artificial Sequence
  Synthetic
ccacagugugagccccuu

SEQ ID NO: 123742 - RNA, 19 nt, Artificial Sequence
  Synthetic
cccacagugugagccccuu

SEQ ID NO: 123743 - RNA, 20 nt, Artificial Sequence
  Synthetic
ccccacagugugagccccuu

SEQ ID NO: 123744 - RNA, 21 nt, Artificial Sequence
  Synthetic
uccccacagugugagccccuu

SEQ ID NO: 123745 - RNA, 22 nt, Artificial Sequence
  Synthetic
uuccccacagugugagccccuu

SEQ ID NO: 123746 - RNA, 23 nt, Artificial Sequence
  Synthetic
auuccccacagugugagccccuu

SEQ ID NO: 123747 - RNA, 24 nt, Artificial Sequence
  Synthetic
uauuccccacagugugagccccuu

SEQ ID NO: 123748 - RNA, 18 nt, Artificial Sequence
  Synthetic
cuucagacaaggccccuu

SEQ ID NO: 123749 - RNA, 19 nt, Artificial Sequence
  Synthetic
acuucagacaaggccccuu

SEQ ID NO: 123750 - RNA, 20 nt, Artificial Sequence
  Synthetic
cacuucagacaaggccccuu

SEQ ID NO: 123751 - RNA, 21 nt, Artificial Sequence
  Synthetic
acacuucagacaaggccccuu

SEQ ID NO: 123752 - RNA, 18 nt, Artificial Sequence
  Synthetic
cuucccacucugccccuu

SEQ ID NO: 123753 - RNA, 19 nt, Artificial Sequence
  Synthetic
ccuucccacucugccccuu

SEQ ID NO: 123754 - RNA, 20 nt, Artificial Sequence
  Synthetic
accuucccacucugccccuu

SEQ ID NO: 123755 - RNA, 21 nt, Artificial Sequence
  Synthetic
uaccuucccacucugccccuu

SEQ ID NO: 123756 - RNA, 22 nt, Artificial Sequence
  Synthetic
cuaccuucccacucugccccuu

SEQ ID NO: 123757 - RNA, 23 nt, Artificial Sequence
  Synthetic
acuaccuucccacucugccccuu

SEQ ID NO: 123758 - RNA, 24 nt, Artificial Sequence
  Synthetic
cacuaccuucccacucugccccuu

SEQ ID NO: 123759 - RNA, 18 nt, Artificial Sequence
  Synthetic
uaauaauuuccuccccuu

SEQ ID NO: 123760 - RNA, 19 nt, Artificial Sequence
  Synthetic
uuaauaauuuccuccccuu

SEQ ID NO: 123761 - RNA, 20 nt, Artificial Sequence
  Synthetic
uuuaauaauuuccuccccuu

SEQ ID NO: 123762 - RNA, 21 nt, Artificial Sequence
  Synthetic
cuuuaauaauuuccuccccuu

SEQ ID NO: 123763 - RNA, 22 nt, Artificial Sequence
  Synthetic
ccuuuaauaauuuccuccccuu

SEQ ID NO: 123764 - RNA, 23 nt, Artificial Sequence
  Synthetic
uccuuuaauaauuuccuccccuu

SEQ ID NO: 123765 - RNA, 18 nt, Artificial Sequence
  Synthetic
cacuugcugaguccccuu

SEQ ID NO: 123766 - RNA, 20 nt, Artificial Sequence
  Synthetic
ugcacuugcugaguccccuu

SEQ ID NO: 123767 - RNA, 21 nt, Artificial Sequence
  Synthetic
uugcacuugcugaguccccuu

SEQ ID NO: 123768 - RNA, 22 nt, Artificial Sequence
  Synthetic
cuugcacuugcugaguccccuu

SEQ ID NO: 123769 - RNA, 23 nt, Artificial Sequence
  Synthetic
acuugcacuugcugaguccccuu

SEQ ID NO: 123770 - RNA, 24 nt, Artificial Sequence
  Synthetic
uacuugcacuugcugaguccccuu

SEQ ID NO: 123771 - RNA, 18 nt, Artificial Sequence
  Synthetic
uaagaaugggaaucccuu

SEQ ID NO: 123772 - RNA, 19 nt, Artificial Sequence
  Synthetic
cuaagaaugggaaucccuu

SEQ ID NO: 123773 - RNA, 20 nt, Artificial Sequence
  Synthetic
ucuaagaaugggaaucccuu

SEQ ID NO: 123774 - RNA, 21 nt, Artificial Sequence
  Synthetic
cucuaagaaugggaaucccuu

SEQ ID NO: 123775 - RNA, 23 nt, Artificial Sequence
  Synthetic
ugcucuaagaaugggaaucccuu

SEQ ID NO: 123776 - RNA, 24 nt, Artificial Sequence
  Synthetic
augcucuaagaaugggaaucccuu

SEQ ID NO: 123777 - RNA, 21 nt, Artificial Sequence
  Synthetic
caacgugcgugcagaucccuu

SEQ ID NO: 123778 - RNA, 23 nt, Artificial Sequence
  Synthetic
ugcaacgugcgugcagaucccuu

SEQ ID NO: 123779 - RNA, 24 nt, Artificial Sequence
  Synthetic
cugcaacgugcgugcagaucccuu

SEQ ID NO: 123780 - RNA, 18 nt, Artificial Sequence
  Synthetic
auuuauuccuuaucccuu

SEQ ID NO: 123781 - RNA, 19 nt, Artificial Sequence
  Synthetic
cauuuauuccuuaucccuu

SEQ ID NO: 123782 - RNA, 20 nt, Artificial Sequence
  Synthetic
acauuuauuccuuaucccuu

SEQ ID NO: 123783 - RNA, 21 nt, Artificial Sequence
  Synthetic
uacauuuauuccuuaucccuu

SEQ ID NO: 123784 - RNA, 22 nt, Artificial Sequence
  Synthetic
auacauuuauuccuuaucccuu

SEQ ID NO: 123785 - RNA, 24 nt, Artificial Sequence
  Synthetic
ugauacauuuauuccuuaucccuu

SEQ ID NO: 123786 - RNA, 18 nt, Artificial Sequence
  Synthetic
aauuuuccccacucccuu

SEQ ID NO: 123787 - RNA, 19 nt, Artificial Sequence
  Synthetic
uaauuuuccccacucccuu

SEQ ID NO: 123788 - RNA, 20 nt, Artificial Sequence
  Synthetic
uuaauuuuccccacucccuu

SEQ ID NO: 123789 - RNA, 21 nt, Artificial Sequence
  Synthetic
auuaauuuuccccacucccuu

SEQ ID NO: 123790 - RNA, 22 nt, Artificial Sequence
  Synthetic
uauuaauuuuccccacucccuu

SEQ ID NO: 123791 - RNA, 23 nt, Artificial Sequence
  Synthetic
auauuaauuuuccccacucccuu

SEQ ID NO: 123792 - RNA, 24 nt, Artificial Sequence
  Synthetic
uauauuaauuuuccccacucccuu

SEQ ID NO: 123793 - RNA, 18 nt, Artificial Sequence
  Synthetic
uuguaaacuugcucccuu

SEQ ID NO: 123794 - RNA, 19 nt, Artificial Sequence
  Synthetic
cuuguaaacuugcucccuu

SEQ ID NO: 123795 - RNA, 20 nt, Artificial Sequence
  Synthetic
acuuguaaacuugcucccuu

SEQ ID NO: 123796 - RNA, 21 nt, Artificial Sequence
  Synthetic
aacuuguaaacuugcucccuu

SEQ ID NO: 123797 - RNA, 22 nt, Artificial Sequence
  Synthetic
uaacuuguaaacuugcucccuu

SEQ ID NO: 123798 - RNA, 23 nt, Artificial Sequence
  Synthetic
auaacuuguaaacuugcucccuu

SEQ ID NO: 123799 - RNA, 24 nt, Artificial Sequence
  Synthetic
aauaacuuguaaacuugcucccuu

SEQ ID NO: 123800 - RNA, 18 nt, Artificial Sequence
  Synthetic
acuuuuuaaaauucccuu

SEQ ID NO: 123801 - RNA, 21 nt, Artificial Sequence
  Synthetic
uggacuuuuuaaaauucccuu

SEQ ID NO: 123802 - RNA, 23 nt, Artificial Sequence
  Synthetic
uguggacuuuuuaaaauucccuu

SEQ ID NO: 123803 - RNA, 24 nt, Artificial Sequence
  Synthetic
uuguggacuuuuuaaaauucccuu

SEQ ID NO: 123804 - RNA, 18 nt, Artificial Sequence
  Synthetic
aaaacuaaacauucccuu

SEQ ID NO: 123805 - RNA, 19 nt, Artificial Sequence
  Synthetic
uaaaacuaaacauucccuu

SEQ ID NO: 123806 - RNA, 20 nt, Artificial Sequence
  Synthetic
auaaaacuaaacauucccuu

SEQ ID NO: 123807 - RNA, 21 nt, Artificial Sequence
  Synthetic
cauaaaacuaaacauucccuu

SEQ ID NO: 123808 - RNA, 22 nt, Artificial Sequence
  Synthetic
acauaaaacuaaacauucccuu

SEQ ID NO: 123809 - RNA, 23 nt, Artificial Sequence
  Synthetic
aacauaaaacuaaacauucccuu

SEQ ID NO: 123810 - RNA, 19 nt, Artificial Sequence
  Synthetic
agaggaucuuucuucccuu

SEQ ID NO: 123811 - RNA, 19 nt, Artificial Sequence
  Synthetic
agaacaagggcaaagccuu

SEQ ID NO: 123812 - RNA, 20 nt, Artificial Sequence
  Synthetic
aagaacaagggcaaagccuu

SEQ ID NO: 123813 - RNA, 21 nt, Artificial Sequence
  Synthetic
aaagaacaagggcaaagccuu

SEQ ID NO: 123814 - RNA, 22 nt, Artificial Sequence
  Synthetic
uaaagaacaagggcaaagccuu

SEQ ID NO: 123815 - RNA, 18 nt, Artificial Sequence
  Synthetic
cauuauucugugagccuu

SEQ ID NO: 123816 - RNA, 19 nt, Artificial Sequence
  Synthetic
acauuauucugugagccuu

SEQ ID NO: 123817 - RNA, 20 nt, Artificial Sequence
  Synthetic
aacauuauucugugagccuu

SEQ ID NO: 123818 - RNA, 21 nt, Artificial Sequence
  Synthetic
caacauuauucugugagccuu

SEQ ID NO: 123819 - RNA, 22 nt, Artificial Sequence
  Synthetic
acaacauuauucugugagccuu

SEQ ID NO: 123820 - RNA, 24 nt, Artificial Sequence
  Synthetic
agacaacauuauucugugagccuu

SEQ ID NO: 123821 - RNA, 19 nt, Artificial Sequence
  Synthetic
ugaauuuaguuuuagccuu

SEQ ID NO: 123822 - RNA, 20 nt, Artificial Sequence
  Synthetic
uugaauuuaguuuuagccuu

SEQ ID NO: 123823 - RNA, 21 nt, Artificial Sequence
  Synthetic
uuugaauuuaguuuuagccuu

SEQ ID NO: 123824 - RNA, 22 nt, Artificial Sequence
  Synthetic
auuugaauuuaguuuuagccuu

SEQ ID NO: 123825 - RNA, 23 nt, Artificial Sequence
  Synthetic
cauuugaauuuaguuuuagccuu

SEQ ID NO: 123826 - RNA, 24 nt, Artificial Sequence
  Synthetic
ccauuugaauuuaguuuuagccuu

SEQ ID NO: 123827 - RNA, 18 nt, Artificial Sequence
  Synthetic
ccugaacuuguccgccuu

SEQ ID NO: 123828 - RNA, 19 nt, Artificial Sequence
  Synthetic
cccugaacuuguccgccuu

SEQ ID NO: 123829 - RNA, 20 nt, Artificial Sequence
  Synthetic
ucccugaacuuguccgccuu

SEQ ID NO: 123830 - RNA, 21 nt, Artificial Sequence
  Synthetic
uucccugaacuuguccgccuu

SEQ ID NO: 123831 - RNA, 22 nt, Artificial Sequence
  Synthetic
auucccugaacuuguccgccuu

SEQ ID NO: 123832 - RNA, 23 nt, Artificial Sequence
  Synthetic
uauucccugaacuuguccgccuu

SEQ ID NO: 123833 - RNA, 24 nt, Artificial Sequence
  Synthetic
auauucccugaacuuguccgccuu

SEQ ID NO: 123834 - RNA, 18 nt, Artificial Sequence
  Synthetic
uugguagagaaaggccuu

SEQ ID NO: 123835 - RNA, 20 nt, Artificial Sequence
  Synthetic
uguugguagagaaaggccuu

SEQ ID NO: 123836 - RNA, 22 nt, Artificial Sequence
  Synthetic
uguguugguagagaaaggccuu

SEQ ID NO: 123837 - RNA, 24 nt, Artificial Sequence
  Synthetic
uguguguugguagagaaaggccuu

SEQ ID NO: 123838 - RNA, 18 nt, Artificial Sequence
  Synthetic
auagcucccaguggccuu

SEQ ID NO: 123839 - RNA, 19 nt, Artificial Sequence
  Synthetic
cauagcucccaguggccuu

SEQ ID NO: 123840 - RNA, 20 nt, Artificial Sequence
  Synthetic
ucauagcucccaguggccuu

SEQ ID NO: 123841 - RNA, 21 nt, Artificial Sequence
  Synthetic
uucauagcucccaguggccuu

SEQ ID NO: 123842 - RNA, 22 nt, Artificial Sequence
  Synthetic
uuucauagcucccaguggccuu

SEQ ID NO: 123843 - RNA, 23 nt, Artificial Sequence
  Synthetic
uuuucauagcucccaguggccuu

SEQ ID NO: 123844 - RNA, 24 nt, Artificial Sequence
  Synthetic
auuuucauagcucccaguggccuu

SEQ ID NO: 123845 - RNA, 18 nt, Artificial Sequence
  Synthetic
uaauggaguaaaugccuu

SEQ ID NO: 123846 - RNA, 21 nt, Artificial Sequence
  Synthetic
agguaauggaguaaaugccuu

SEQ ID NO: 123847 - RNA, 22 nt, Artificial Sequence
  Synthetic
aagguaauggaguaaaugccuu

SEQ ID NO: 123848 - RNA, 23 nt, Artificial Sequence
  Synthetic
uaagguaauggaguaaaugccuu

SEQ ID NO: 123849 - RNA, 18 nt, Artificial Sequence
  Synthetic
ugaguauucacaugccuu

SEQ ID NO: 123850 - RNA, 19 nt, Artificial Sequence
  Synthetic
uugaguauucacaugccuu

SEQ ID NO: 123851 - RNA, 20 nt, Artificial Sequence
  Synthetic
auugaguauucacaugccuu

SEQ ID NO: 123852 - RNA, 21 nt, Artificial Sequence
  Synthetic
aauugaguauucacaugccuu

SEQ ID NO: 123853 - RNA, 22 nt, Artificial Sequence
  Synthetic
uaauugaguauucacaugccuu

SEQ ID NO: 123854 - RNA, 23 nt, Artificial Sequence
  Synthetic
auaauugaguauucacaugccuu

SEQ ID NO: 123855 - RNA, 24 nt, Artificial Sequence
  Synthetic
cauaauugaguauucacaugccuu

SEQ ID NO: 123856 - RNA, 18 nt, Artificial Sequence
  Synthetic
uuuauaaaccagugccuu

SEQ ID NO: 123857 - RNA, 21 nt, Artificial Sequence
  Synthetic
ugguuuauaaaccagugccuu

SEQ ID NO: 123858 - RNA, 22 nt, Artificial Sequence
  Synthetic
augguuuauaaaccagugccuu

SEQ ID NO: 123859 - RNA, 23 nt, Artificial Sequence
  Synthetic
aaugguuuauaaaccagugccuu

SEQ ID NO: 123860 - RNA, 24 nt, Artificial Sequence
  Synthetic
aaaugguuuauaaaccagugccuu

SEQ ID NO: 123861 - RNA, 18 nt, Artificial Sequence
  Synthetic
auaauuggcaguugccuu

SEQ ID NO: 123862 - RNA, 19 nt, Artificial Sequence
  Synthetic
uauaauuggcaguugccuu

SEQ ID NO: 123863 - RNA, 20 nt, Artificial Sequence
  Synthetic
auauaauuggcaguugccuu

SEQ ID NO: 123864 - RNA, 21 nt, Artificial Sequence
  Synthetic
aauauaauuggcaguugccuu

SEQ ID NO: 123865 - RNA, 22 nt, Artificial Sequence
  Synthetic
aaauauaauuggcaguugccuu

SEQ ID NO: 123866 - RNA, 23 nt, Artificial Sequence
  Synthetic
aaaauauaauuggcaguugccuu

SEQ ID NO: 123867 - RNA, 24 nt, Artificial Sequence
  Synthetic
uaaaauauaauuggcaguugccuu

SEQ ID NO: 123868 - RNA, 18 nt, Artificial Sequence
  Synthetic
uuuaacuucuguugccuu

SEQ ID NO: 123869 - RNA, 19 nt, Artificial Sequence
  Synthetic
uuuuaacuucuguugccuu

SEQ ID NO: 123870 - RNA, 20 nt, Artificial Sequence
  Synthetic
cuuuuaacuucuguugccuu

SEQ ID NO: 123871 - RNA, 22 nt, Artificial Sequence
  Synthetic
cgcuuuuaacuucuguugccuu

SEQ ID NO: 123872 - RNA, 23 nt, Artificial Sequence
  Synthetic
ucgcuuuuaacuucuguugccuu

SEQ ID NO: 123873 - RNA, 24 nt, Artificial Sequence
  Synthetic
aucgcuuuuaacuucuguugccuu

SEQ ID NO: 123874 - RNA, 18 nt, Artificial Sequence
  Synthetic
aauggcuuggaaauccuu

SEQ ID NO: 123875 - RNA, 19 nt, Artificial Sequence
  Synthetic
uaauggcuuggaaauccuu

SEQ ID NO: 123876 - RNA, 20 nt, Artificial Sequence
  Synthetic
uuaauggcuuggaaauccuu

SEQ ID NO: 123877 - RNA, 21 nt, Artificial Sequence
  Synthetic
auuaauggcuuggaaauccuu

SEQ ID NO: 123878 - RNA, 22 nt, Artificial Sequence
  Synthetic
uauuaauggcuuggaaauccuu

SEQ ID NO: 123879 - RNA, 23 nt, Artificial Sequence
  Synthetic
auauuaauggcuuggaaauccuu

SEQ ID NO: 123880 - RNA, 24 nt, Artificial Sequence
  Synthetic
uauauuaauggcuuggaaauccuu

SEQ ID NO: 123881 - RNA, 18 nt, Artificial Sequence
  Synthetic
augguuugaguaauccuu

SEQ ID NO: 123882 - RNA, 20 nt, Artificial Sequence
  Synthetic
ugaugguuugaguaauccuu

SEQ ID NO: 123883 - RNA, 21 nt, Artificial Sequence
  Synthetic
augaugguuugaguaauccuu

SEQ ID NO: 123884 - RNA, 22 nt, Artificial Sequence
  Synthetic
aaugaugguuugaguaauccuu

SEQ ID NO: 123885 - RNA, 18 nt, Artificial Sequence
  Synthetic
uuagcauauaagauccuu

SEQ ID NO: 123886 - RNA, 19 nt, Artificial Sequence
  Synthetic
auuagcauauaagauccuu

SEQ ID NO: 123887 - RNA, 20 nt, Artificial Sequence
  Synthetic
cauuagcauauaagauccuu

SEQ ID NO: 123888 - RNA, 21 nt, Artificial Sequence
  Synthetic
ucauuagcauauaagauccuu

SEQ ID NO: 123889 - RNA, 22 nt, Artificial Sequence
  Synthetic
uucauuagcauauaagauccuu

SEQ ID NO: 123890 - RNA, 23 nt, Artificial Sequence
  Synthetic
uuucauuagcauauaagauccuu

SEQ ID NO: 123891 - RNA, 24 nt, Artificial Sequence
  Synthetic
auuucauuagcauauaagauccuu

SEQ ID NO: 123892 - RNA, 18 nt, Artificial Sequence
  Synthetic
aaaagacaaucuauccuu

SEQ ID NO: 123893 - RNA, 20 nt, Artificial Sequence
  Synthetic
agaaaagacaaucuauccuu

SEQ ID NO: 123894 - RNA, 21 nt, Artificial Sequence
  Synthetic
uagaaaagacaaucuauccuu

SEQ ID NO: 123895 - RNA, 22 nt, Artificial Sequence
  Synthetic
uuagaaaagacaaucuauccuu

SEQ ID NO: 123896 - RNA, 18 nt, Artificial Sequence
  Synthetic
uugaauaauuuuauccuu

SEQ ID NO: 123897 - RNA, 19 nt, Artificial Sequence
  Synthetic
cuugaauaauuuuauccuu

SEQ ID NO: 123898 - RNA, 20 nt, Artificial Sequence
  Synthetic
ccuugaauaauuuuauccuu

SEQ ID NO: 123899 - RNA, 22 nt, Artificial Sequence
  Synthetic
ugccuugaauaauuuuauccuu

SEQ ID NO: 123900 - RNA, 23 nt, Artificial Sequence
  Synthetic
cugccuugaauaauuuuauccuu

SEQ ID NO: 123901 - RNA, 24 nt, Artificial Sequence
  Synthetic
ucugccuugaauaauuuuauccuu

SEQ ID NO: 123902 - RNA, 18 nt, Artificial Sequence
  Synthetic
aagugaccaaaucuccuu

SEQ ID NO: 123903 - RNA, 19 nt, Artificial Sequence
  Synthetic
uaagugaccaaaucuccuu

SEQ ID NO: 123904 - RNA, 20 nt, Artificial Sequence
  Synthetic
auaagugaccaaaucuccuu

SEQ ID NO: 123905 - RNA, 21 nt, Artificial Sequence
  Synthetic
aauaagugaccaaaucuccuu

SEQ ID NO: 123906 - RNA, 22 nt, Artificial Sequence
  Synthetic
caauaagugaccaaaucuccuu

SEQ ID NO: 123907 - RNA, 23 nt, Artificial Sequence
  Synthetic
acaauaagugaccaaaucuccuu

SEQ ID NO: 123908 - RNA, 24 nt, Artificial Sequence
  Synthetic
aacaauaagugaccaaaucuccuu

SEQ ID NO: 123909 - RNA, 19 nt, Artificial Sequence
  Synthetic
aguuggagaucaucuccuu

SEQ ID NO: 123910 - RNA, 22 nt, Artificial Sequence
  Synthetic
aggaguuggagaucaucuccuu

SEQ ID NO: 123911 - RNA, 24 nt, Artificial Sequence
  Synthetic
agaggaguuggagaucaucuccuu

SEQ ID NO: 123912 - RNA, 19 nt, Artificial Sequence
  Synthetic
aggcauucaucuucuccuu

SEQ ID NO: 123913 - RNA, 20 nt, Artificial Sequence
  Synthetic
uaggcauucaucuucuccuu

SEQ ID NO: 123914 - RNA, 21 nt, Artificial Sequence
  Synthetic
uuaggcauucaucuucuccuu

SEQ ID NO: 123915 - RNA, 22 nt, Artificial Sequence
  Synthetic
cuuaggcauucaucuucuccuu

SEQ ID NO: 123916 - RNA, 24 nt, Artificial Sequence
  Synthetic
ugcuuaggcauucaucuucuccuu

SEQ ID NO: 123917 - RNA, 18 nt, Artificial Sequence
  Synthetic
cuaaacacuucaguccuu

SEQ ID NO: 123918 - RNA, 19 nt, Artificial Sequence
  Synthetic
acuaaacacuucaguccuu

SEQ ID NO: 123919 - RNA, 20 nt, Artificial Sequence
  Synthetic
aacuaaacacuucaguccuu

SEQ ID NO: 123920 - RNA, 21 nt, Artificial Sequence
  Synthetic
caacuaaacacuucaguccuu

SEQ ID NO: 123921 - RNA, 22 nt, Artificial Sequence
  Synthetic
ucaacuaaacacuucaguccuu

SEQ ID NO: 123922 - RNA, 23 nt, Artificial Sequence
  Synthetic
uucaacuaaacacuucaguccuu

SEQ ID NO: 123923 - RNA, 24 nt, Artificial Sequence
  Synthetic
uuucaacuaaacacuucaguccuu

SEQ ID NO: 123924 - RNA, 18 nt, Artificial Sequence
  Synthetic
uuacaauuauagguccuu

SEQ ID NO: 123925 - RNA, 19 nt, Artificial Sequence
  Synthetic
uuuacaauuauagguccuu

SEQ ID NO: 123926 - RNA, 20 nt, Artificial Sequence
  Synthetic
auuuacaauuauagguccuu

SEQ ID NO: 123927 - RNA, 21 nt, Artificial Sequence
  Synthetic
cauuuacaauuauagguccuu

SEQ ID NO: 123928 - RNA, 22 nt, Artificial Sequence
  Synthetic
acauuuacaauuauagguccuu

SEQ ID NO: 123929 - RNA, 23 nt, Artificial Sequence
  Synthetic
uacauuuacaauuauagguccuu

SEQ ID NO: 123930 - RNA, 24 nt, Artificial Sequence
  Synthetic
uuacauuuacaauuauagguccuu

SEQ ID NO: 123931 - RNA, 18 nt, Artificial Sequence
  Synthetic
uguguccauucauuccuu

SEQ ID NO: 123932 - RNA, 19 nt, Artificial Sequence
  Synthetic
cuguguccauucauuccuu

SEQ ID NO: 123933 - RNA, 20 nt, Artificial Sequence
  Synthetic
ucuguguccauucauuccuu

SEQ ID NO: 123934 - RNA, 21 nt, Artificial Sequence
  Synthetic
cucuguguccauucauuccuu

SEQ ID NO: 123935 - RNA, 22 nt, Artificial Sequence
  Synthetic
acucuguguccauucauuccuu

SEQ ID NO: 123936 - RNA, 23 nt, Artificial Sequence
  Synthetic
uacucuguguccauucauuccuu

SEQ ID NO: 123937 - RNA, 24 nt, Artificial Sequence
  Synthetic
uuacucuguguccauucauuccuu

SEQ ID NO: 123938 - RNA, 18 nt, Artificial Sequence
  Synthetic
ccuuuauuuguauuccuu

SEQ ID NO: 123939 - RNA, 19 nt, Artificial Sequence
  Synthetic
cccuuuauuuguauuccuu

SEQ ID NO: 123940 - RNA, 20 nt, Artificial Sequence
  Synthetic
ucccuuuauuuguauuccuu

SEQ ID NO: 123941 - RNA, 21 nt, Artificial Sequence
  Synthetic
uucccuuuauuuguauuccuu

SEQ ID NO: 123942 - RNA, 22 nt, Artificial Sequence
  Synthetic
auucccuuuauuuguauuccuu

SEQ ID NO: 123943 - RNA, 24 nt, Artificial Sequence
  Synthetic
agauucccuuuauuuguauuccuu

SEQ ID NO: 123944 - RNA, 18 nt, Artificial Sequence
  Synthetic
ugugcucuucucuuccuu

SEQ ID NO: 123945 - RNA, 19 nt, Artificial Sequence
  Synthetic
uugugcucuucucuuccuu

SEQ ID NO: 123946 - RNA, 20 nt, Artificial Sequence
  Synthetic
cuugugcucuucucuuccuu

SEQ ID NO: 123947 - RNA, 21 nt, Artificial Sequence
  Synthetic
ccuugugcucuucucuuccuu

SEQ ID NO: 123948 - RNA, 22 nt, Artificial Sequence
  Synthetic
cccuugugcucuucucuuccuu

SEQ ID NO: 123949 - RNA, 23 nt, Artificial Sequence
  Synthetic
ucccuugugcucuucucuuccuu

SEQ ID NO: 123950 - RNA, 24 nt, Artificial Sequence
  Synthetic
cucccuugugcucuucucuuccuu

SEQ ID NO: 123951 - RNA, 18 nt, Artificial Sequence
  Synthetic
aguucauccauguuccuu

SEQ ID NO: 123952 - RNA, 19 nt, Artificial Sequence
  Synthetic
uaguucauccauguuccuu

SEQ ID NO: 123953 - RNA, 20 nt, Artificial Sequence
  Synthetic
auaguucauccauguuccuu

SEQ ID NO: 123954 - RNA, 21 nt, Artificial Sequence
  Synthetic
cauaguucauccauguuccuu

SEQ ID NO: 123955 - RNA, 22 nt, Artificial Sequence
  Synthetic
acauaguucauccauguuccuu

SEQ ID NO: 123956 - RNA, 23 nt, Artificial Sequence
  Synthetic
aacauaguucauccauguuccuu

SEQ ID NO: 123957 - RNA, 24 nt, Artificial Sequence
  Synthetic
aaacauaguucauccauguuccuu

SEQ ID NO: 123958 - RNA, 21 nt, Artificial Sequence
  Synthetic
uaaauauuguuccauuuccuu

SEQ ID NO: 123959 - RNA, 23 nt, Artificial Sequence
  Synthetic
aguaaauauuguuccauuuccuu

SEQ ID NO: 123960 - RNA, 24 nt, Artificial Sequence
  Synthetic
uaguaaauauuguuccauuuccuu

SEQ ID NO: 123961 - RNA, 21 nt, Artificial Sequence
  Synthetic
uguucucuccuuccuuuccuu

SEQ ID NO: 123962 - RNA, 22 nt, Artificial Sequence
  Synthetic
uuguucucuccuuccuuuccuu

SEQ ID NO: 123963 - RNA, 23 nt, Artificial Sequence
  Synthetic
uuuguucucuccuuccuuuccuu

SEQ ID NO: 123964 - RNA, 24 nt, Artificial Sequence
  Synthetic
cuuuguucucuccuuccuuuccuu

SEQ ID NO: 123965 - RNA, 18 nt, Artificial Sequence
  Synthetic
cuacuacccccaaagcuu

SEQ ID NO: 123966 - RNA, 19 nt, Artificial Sequence
  Synthetic
acuacuacccccaaagcuu

SEQ ID NO: 123967 - RNA, 20 nt, Artificial Sequence
  Synthetic
aacuacuacccccaaagcuu

SEQ ID NO: 123968 - RNA, 21 nt, Artificial Sequence
  Synthetic
aaacuacuacccccaaagcuu

SEQ ID NO: 123969 - RNA, 22 nt, Artificial Sequence
  Synthetic
uaaacuacuacccccaaagcuu

SEQ ID NO: 123970 - RNA, 24 nt, Artificial Sequence
  Synthetic
uguaaacuacuacccccaaagcuu

SEQ ID NO: 123971 - RNA, 18 nt, Artificial Sequence
  Synthetic
caauauaugcuaaagcuu

SEQ ID NO: 123972 - RNA, 19 nt, Artificial Sequence
  Synthetic
ccaauauaugcuaaagcuu

SEQ ID NO: 123973 - RNA, 20 nt, Artificial Sequence
  Synthetic
uccaauauaugcuaaagcuu

SEQ ID NO: 123974 - RNA, 21 nt, Artificial Sequence
  Synthetic
uuccaauauaugcuaaagcuu

SEQ ID NO: 123975 - RNA, 22 nt, Artificial Sequence
  Synthetic
cuuccaauauaugcuaaagcuu

SEQ ID NO: 123976 - RNA, 23 nt, Artificial Sequence
  Synthetic
ccuuccaauauaugcuaaagcuu

SEQ ID NO: 123977 - RNA, 18 nt, Artificial Sequence
  Synthetic
aaguaauaacacaagcuu

SEQ ID NO: 123978 - RNA, 19 nt, Artificial Sequence
  Synthetic
caaguaauaacacaagcuu

SEQ ID NO: 123979 - RNA, 21 nt, Artificial Sequence
  Synthetic
agcaaguaauaacacaagcuu

SEQ ID NO: 123980 - RNA, 22 nt, Artificial Sequence
  Synthetic
uagcaaguaauaacacaagcuu

SEQ ID NO: 123981 - RNA, 24 nt, Artificial Sequence
  Synthetic
aguagcaaguaauaacacaagcuu

SEQ ID NO: 123982 - RNA, 18 nt, Artificial Sequence
  Synthetic
cuccccaauuagaagcuu

SEQ ID NO: 123983 - RNA, 19 nt, Artificial Sequence
  Synthetic
ccuccccaauuagaagcuu

SEQ ID NO: 123984 - RNA, 20 nt, Artificial Sequence
  Synthetic
accuccccaauuagaagcuu

SEQ ID NO: 123985 - RNA, 22 nt, Artificial Sequence
  Synthetic
agaccuccccaauuagaagcuu

SEQ ID NO: 123986 - RNA, 23 nt, Artificial Sequence
  Synthetic
cagaccuccccaauuagaagcuu

SEQ ID NO: 123987 - RNA, 24 nt, Artificial Sequence
  Synthetic
ccagaccuccccaauuagaagcuu

SEQ ID NO: 123988 - RNA, 18 nt, Artificial Sequence
  Synthetic
ugaacucgagguaagcuu

SEQ ID NO: 123989 - RNA, 19 nt, Artificial Sequence
  Synthetic
uugaacucgagguaagcuu

SEQ ID NO: 123990 - RNA, 20 nt, Artificial Sequence
  Synthetic
uuugaacucgagguaagcuu

SEQ ID NO: 123991 - RNA, 21 nt, Artificial Sequence
  Synthetic
cuuugaacucgagguaagcuu

SEQ ID NO: 123992 - RNA, 22 nt, Artificial Sequence
  Synthetic
acuuugaacucgagguaagcuu

SEQ ID NO: 123993 - RNA, 23 nt, Artificial Sequence
  Synthetic
aacuuugaacucgagguaagcuu

SEQ ID NO: 123994 - RNA, 18 nt, Artificial Sequence
  Synthetic
auacuucguaaacagcuu

SEQ ID NO: 123995 - RNA, 19 nt, Artificial Sequence
  Synthetic
aauacuucguaaacagcuu

SEQ ID NO: 123996 - RNA, 20 nt, Artificial Sequence
  Synthetic
aaauacuucguaaacagcuu

SEQ ID NO: 123997 - RNA, 21 nt, Artificial Sequence
  Synthetic
aaaauacuucguaaacagcuu

SEQ ID NO: 123998 - RNA, 22 nt, Artificial Sequence
  Synthetic
uaaaauacuucguaaacagcuu

SEQ ID NO: 123999 - RNA, 23 nt, Artificial Sequence
  Synthetic
uuaaaauacuucguaaacagcuu

SEQ ID NO: 124000 - RNA, 24 nt, Artificial Sequence
  Synthetic
cuuaaaauacuucguaaacagcuu

SEQ ID NO: 124001 - RNA, 18 nt, Artificial Sequence
  Synthetic
ucuagaauauuacagcuu

SEQ ID NO: 124002 - RNA, 19 nt, Artificial Sequence
  Synthetic
uucuagaauauuacagcuu

SEQ ID NO: 124003 - RNA, 20 nt, Artificial Sequence
  Synthetic
auucuagaauauuacagcuu

SEQ ID NO: 124004 - RNA, 21 nt, Artificial Sequence
  Synthetic
cauucuagaauauuacagcuu

SEQ ID NO: 124005 - RNA, 22 nt, Artificial Sequence
  Synthetic
ucauucuagaauauuacagcuu

SEQ ID NO: 124006 - RNA, 23 nt, Artificial Sequence
  Synthetic
uucauucuagaauauuacagcuu

SEQ ID NO: 124007 - RNA, 24 nt, Artificial Sequence
  Synthetic
auucauucuagaauauuacagcuu

SEQ ID NO: 124008 - RNA, 18 nt, Artificial Sequence
  Synthetic
ucucaggcccagcagcuu

SEQ ID NO: 124009 - RNA, 19 nt, Artificial Sequence
  Synthetic
uucucaggcccagcagcuu

SEQ ID NO: 124010 - RNA, 21 nt, Artificial Sequence
  Synthetic
uguucucaggcccagcagcuu

SEQ ID NO: 124011 - RNA, 22 nt, Artificial Sequence
  Synthetic
auguucucaggcccagcagcuu

SEQ ID NO: 124012 - RNA, 23 nt, Artificial Sequence
  Synthetic
aauguucucaggcccagcagcuu

SEQ ID NO: 124013 - RNA, 24 nt, Artificial Sequence
  Synthetic
uaauguucucaggcccagcagcuu

SEQ ID NO: 124014 - RNA, 18 nt, Artificial Sequence
  Synthetic
auuccaaaauuucagcuu

SEQ ID NO: 124015 - RNA, 19 nt, Artificial Sequence
  Synthetic
uauuccaaaauuucagcuu

SEQ ID NO: 124016 - RNA, 20 nt, Artificial Sequence
  Synthetic
cuauuccaaaauuucagcuu

SEQ ID NO: 124017 - RNA, 22 nt, Artificial Sequence
  Synthetic
agcuauuccaaaauuucagcuu

SEQ ID NO: 124018 - RNA, 23 nt, Artificial Sequence
  Synthetic
aagcuauuccaaaauuucagcuu

SEQ ID NO: 124019 - RNA, 24 nt, Artificial Sequence
  Synthetic
uaagcuauuccaaaauuucagcuu

SEQ ID NO: 124020 - RNA, 18 nt, Artificial Sequence
  Synthetic
uagugaagacaagagcuu

SEQ ID NO: 124021 - RNA, 19 nt, Artificial Sequence
  Synthetic
uuagugaagacaagagcuu

SEQ ID NO: 124022 - RNA, 20 nt, Artificial Sequence
  Synthetic
auuagugaagacaagagcuu

SEQ ID NO: 124023 - RNA, 21 nt, Artificial Sequence
  Synthetic
uauuagugaagacaagagcuu

SEQ ID NO: 124024 - RNA, 22 nt, Artificial Sequence
  Synthetic
uuauuagugaagacaagagcuu

SEQ ID NO: 124025 - RNA, 23 nt, Artificial Sequence
  Synthetic
uuuauuagugaagacaagagcuu

SEQ ID NO: 124026 - RNA, 24 nt, Artificial Sequence
  Synthetic
cuuuauuagugaagacaagagcuu

SEQ ID NO: 124027 - RNA, 18 nt, Artificial Sequence
  Synthetic
acucuaaguggggagcuu

SEQ ID NO: 124028 - RNA, 23 nt, Artificial Sequence
  Synthetic
uggggacucuaaguggggagcuu

SEQ ID NO: 124029 - RNA, 24 nt, Artificial Sequence
  Synthetic
uuggggacucuaaguggggagcuu

SEQ ID NO: 124030 - RNA, 18 nt, Artificial Sequence
  Synthetic
uuauguuuucaugagcuu

SEQ ID NO: 124031 - RNA, 19 nt, Artificial Sequence
  Synthetic
uuuauguuuucaugagcuu

SEQ ID NO: 124032 - RNA, 21 nt, Artificial Sequence
  Synthetic
uguuuauguuuucaugagcuu

SEQ ID NO: 124033 - RNA, 22 nt, Artificial Sequence
  Synthetic
cuguuuauguuuucaugagcuu

SEQ ID NO: 124034 - RNA, 23 nt, Artificial Sequence
  Synthetic
ucuguuuauguuuucaugagcuu

SEQ ID NO: 124035 - RNA, 24 nt, Artificial Sequence
  Synthetic
uucuguuuauguuuucaugagcuu

SEQ ID NO: 124036 - RNA, 19 nt, Artificial Sequence
  Synthetic
ugggcuggaauuauagcuu

SEQ ID NO: 124037 - RNA, 20 nt, Artificial Sequence
  Synthetic
uugggcuggaauuauagcuu

SEQ ID NO: 124038 - RNA, 21 nt, Artificial Sequence
  Synthetic
uuugggcuggaauuauagcuu

SEQ ID NO: 124039 - RNA, 22 nt, Artificial Sequence
  Synthetic
auuugggcuggaauuauagcuu

SEQ ID NO: 124040 - RNA, 24 nt, Artificial Sequence
  Synthetic
ugauuugggcuggaauuauagcuu

SEQ ID NO: 124041 - RNA, 18 nt, Artificial Sequence
  Synthetic
auuuuuuccuuauagcuu

SEQ ID NO: 124042 - RNA, 19 nt, Artificial Sequence
  Synthetic
uauuuuuuccuuauagcuu

SEQ ID NO: 124043 - RNA, 20 nt, Artificial Sequence
  Synthetic
auauuuuuuccuuauagcuu

SEQ ID NO: 124044 - RNA, 21 nt, Artificial Sequence
  Synthetic
uauauuuuuuccuuauagcuu

SEQ ID NO: 124045 - RNA, 24 nt, Artificial Sequence
  Synthetic
agguauauuuuuuccuuauagcuu

SEQ ID NO: 124046 - RNA, 21 nt, Artificial Sequence
  Synthetic
auuuuaaaguuuuuuuagcuu

SEQ ID NO: 124047 - RNA, 22 nt, Artificial Sequence
  Synthetic
uauuuuaaaguuuuuuuagcuu

SEQ ID NO: 124048 - RNA, 23 nt, Artificial Sequence
  Synthetic
uuauuuuaaaguuuuuuuagcuu

SEQ ID NO: 124049 - RNA, 24 nt, Artificial Sequence
  Synthetic
cuuauuuuaaaguuuuuuuagcuu

SEQ ID NO: 124050 - RNA, 18 nt, Artificial Sequence
  Synthetic
auuaggauaauaaggcuu

SEQ ID NO: 124051 - RNA, 19 nt, Artificial Sequence
  Synthetic
uauuaggauaauaaggcuu

SEQ ID NO: 124052 - RNA, 20 nt, Artificial Sequence
  Synthetic
uuauuaggauaauaaggcuu

SEQ ID NO: 124053 - RNA, 22 nt, Artificial Sequence
  Synthetic
uguuauuaggauaauaaggcuu

SEQ ID NO: 124054 - RNA, 24 nt, Artificial Sequence
  Synthetic
uguguuauuaggauaauaaggcuu

SEQ ID NO: 124055 - RNA, 18 nt, Artificial Sequence
  Synthetic
cuccauccugccaggcuu

SEQ ID NO: 124056 - RNA, 19 nt, Artificial Sequence
  Synthetic
ucuccauccugccaggcuu

SEQ ID NO: 124057 - RNA, 22 nt, Artificial Sequence
  Synthetic
uggucuccauccugccaggcuu

SEQ ID NO: 124058 - RNA, 23 nt, Artificial Sequence
  Synthetic
uuggucuccauccugccaggcuu

SEQ ID NO: 124059 - RNA, 24 nt, Artificial Sequence
  Synthetic
cuuggucuccauccugccaggcuu

SEQ ID NO: 124060 - RNA, 18 nt, Artificial Sequence
  Synthetic
caaaggaugaagaggcuu

SEQ ID NO: 124061 - RNA, 19 nt, Artificial Sequence
  Synthetic
acaaaggaugaagaggcuu

SEQ ID NO: 124062 - RNA, 20 nt, Artificial Sequence
  Synthetic
uacaaaggaugaagaggcuu

SEQ ID NO: 124063 - RNA, 21 nt, Artificial Sequence
  Synthetic
cuacaaaggaugaagaggcuu

SEQ ID NO: 124064 - RNA, 22 nt, Artificial Sequence
  Synthetic
ucuacaaaggaugaagaggcuu

SEQ ID NO: 124065 - RNA, 23 nt, Artificial Sequence
  Synthetic
aucuacaaaggaugaagaggcuu

SEQ ID NO: 124066 - RNA, 24 nt, Artificial Sequence
  Synthetic
aaucuacaaaggaugaagaggcuu

SEQ ID NO: 124067 - RNA, 19 nt, Artificial Sequence
  Synthetic
uguuaaaauacagaggcuu

SEQ ID NO: 124068 - RNA, 20 nt, Artificial Sequence
  Synthetic
auguuaaaauacagaggcuu

SEQ ID NO: 124069 - RNA, 21 nt, Artificial Sequence
  Synthetic
aauguuaaaauacagaggcuu

SEQ ID NO: 124070 - RNA, 22 nt, Artificial Sequence
  Synthetic
uaauguuaaaauacagaggcuu

SEQ ID NO: 124071 - RNA, 23 nt, Artificial Sequence
  Synthetic
auaauguuaaaauacagaggcuu

SEQ ID NO: 124072 - RNA, 24 nt, Artificial Sequence
  Synthetic
aauaauguuaaaauacagaggcuu

SEQ ID NO: 124073 - RNA, 18 nt, Artificial Sequence
  Synthetic
ugaucaguauaagggcuu

SEQ ID NO: 124074 - RNA, 19 nt, Artificial Sequence
  Synthetic
cugaucaguauaagggcuu

SEQ ID NO: 124075 - RNA, 20 nt, Artificial Sequence
  Synthetic
acugaucaguauaagggcuu

SEQ ID NO: 124076 - RNA, 21 nt, Artificial Sequence
  Synthetic
uacugaucaguauaagggcuu

SEQ ID NO: 124077 - RNA, 22 nt, Artificial Sequence
  Synthetic
auacugaucaguauaagggcuu

SEQ ID NO: 124078 - RNA, 23 nt, Artificial Sequence
  Synthetic
cauacugaucaguauaagggcuu

SEQ ID NO: 124079 - RNA, 24 nt, Artificial Sequence
  Synthetic
acauacugaucaguauaagggcuu

SEQ ID NO: 124080 - RNA, 18 nt, Artificial Sequence
  Synthetic
ccucagaguucagggcuu

SEQ ID NO: 124081 - RNA, 19 nt, Artificial Sequence
  Synthetic
cccucagaguucagggcuu

SEQ ID NO: 124082 - RNA, 20 nt, Artificial Sequence
  Synthetic
ccccucagaguucagggcuu

SEQ ID NO: 124083 - RNA, 21 nt, Artificial Sequence
  Synthetic
accccucagaguucagggcuu

SEQ ID NO: 124084 - RNA, 22 nt, Artificial Sequence
  Synthetic
aaccccucagaguucagggcuu

SEQ ID NO: 124085 - RNA, 23 nt, Artificial Sequence
  Synthetic
aaaccccucagaguucagggcuu

SEQ ID NO: 124086 - RNA, 24 nt, Artificial Sequence
  Synthetic
caaaccccucagaguucagggcuu

SEQ ID NO: 124087 - RNA, 19 nt, Artificial Sequence
  Synthetic
uguucuuaccauugggcuu

SEQ ID NO: 124088 - RNA, 20 nt, Artificial Sequence
  Synthetic
cuguucuuaccauugggcuu

SEQ ID NO: 124089 - RNA, 21 nt, Artificial Sequence
  Synthetic
ccuguucuuaccauugggcuu

SEQ ID NO: 124090 - RNA, 22 nt, Artificial Sequence
  Synthetic
accuguucuuaccauugggcuu

SEQ ID NO: 124091 - RNA, 23 nt, Artificial Sequence
  Synthetic
aaccuguucuuaccauugggcuu

SEQ ID NO: 124092 - RNA, 24 nt, Artificial Sequence
  Synthetic
aaaccuguucuuaccauugggcuu

SEQ ID NO: 124093 - RNA, 18 nt, Artificial Sequence
  Synthetic
cagauaaaccgauggcuu

SEQ ID NO: 124094 - RNA, 20 nt, Artificial Sequence
  Synthetic
agcagauaaaccgauggcuu

SEQ ID NO: 124095 - RNA, 21 nt, Artificial Sequence
  Synthetic
cagcagauaaaccgauggcuu

SEQ ID NO: 124096 - RNA, 22 nt, Artificial Sequence
  Synthetic
acagcagauaaaccgauggcuu

SEQ ID NO: 124097 - RNA, 23 nt, Artificial Sequence
  Synthetic
aacagcagauaaaccgauggcuu

SEQ ID NO: 124098 - RNA, 24 nt, Artificial Sequence
  Synthetic
aaacagcagauaaaccgauggcuu

SEQ ID NO: 124099 - RNA, 20 nt, Artificial Sequence
  Synthetic
agggcagcaaacuauggcuu

SEQ ID NO: 124100 - RNA, 19 nt, Artificial Sequence
  Synthetic
agaaacacaggacuggcuu

SEQ ID NO: 124101 - RNA, 20 nt, Artificial Sequence
  Synthetic
uagaaacacaggacuggcuu

SEQ ID NO: 124102 - RNA, 21 nt, Artificial Sequence
  Synthetic
auagaaacacaggacuggcuu

SEQ ID NO: 124103 - RNA, 22 nt, Artificial Sequence
  Synthetic
uauagaaacacaggacuggcuu

SEQ ID NO: 124104 - RNA, 23 nt, Artificial Sequence
  Synthetic
uuauagaaacacaggacuggcuu

SEQ ID NO: 124105 - RNA, 24 nt, Artificial Sequence
  Synthetic
uuuauagaaacacaggacuggcuu

SEQ ID NO: 124106 - RNA, 18 nt, Artificial Sequence
  Synthetic
ccaaaacagcaguggcuu

SEQ ID NO: 124107 - RNA, 19 nt, Artificial Sequence
  Synthetic
accaaaacagcaguggcuu

SEQ ID NO: 124108 - RNA, 20 nt, Artificial Sequence
  Synthetic
aaccaaaacagcaguggcuu

SEQ ID NO: 124109 - RNA, 23 nt, Artificial Sequence
  Synthetic
aggaaccaaaacagcaguggcuu

SEQ ID NO: 124110 - RNA, 24 nt, Artificial Sequence
  Synthetic
caggaaccaaaacagcaguggcuu

SEQ ID NO: 124111 - RNA, 19 nt, Artificial Sequence
  Synthetic
aggguugaacugguggcuu

SEQ ID NO: 124112 - RNA, 21 nt, Artificial Sequence
  Synthetic
agaggguugaacugguggcuu

SEQ ID NO: 124113 - RNA, 23 nt, Artificial Sequence
  Synthetic
ugagaggguugaacugguggcuu

SEQ ID NO: 124114 - RNA, 24 nt, Artificial Sequence
  Synthetic
uugagaggguugaacugguggcuu

SEQ ID NO: 124115 - RNA, 18 nt, Artificial Sequence
  Synthetic
cagaggauuucaaugcuu

SEQ ID NO: 124116 - RNA, 19 nt, Artificial Sequence
  Synthetic
acagaggauuucaaugcuu

SEQ ID NO: 124117 - RNA, 20 nt, Artificial Sequence
  Synthetic
aacagaggauuucaaugcuu

SEQ ID NO: 124118 - RNA, 21 nt, Artificial Sequence
  Synthetic
caacagaggauuucaaugcuu

SEQ ID NO: 124119 - RNA, 23 nt, Artificial Sequence
  Synthetic
ugcaacagaggauuucaaugcuu

SEQ ID NO: 124120 - RNA, 24 nt, Artificial Sequence
  Synthetic
augcaacagaggauuucaaugcuu

SEQ ID NO: 124121 - RNA, 24 nt, Artificial Sequence
  Synthetic
ugggucagagcauaaaucaugcuu

SEQ ID NO: 124122 - RNA, 21 nt, Artificial Sequence
  Synthetic
acaucuugcccugagaugcuu

SEQ ID NO: 124123 - RNA, 22 nt, Artificial Sequence
  Synthetic
aacaucuugcccugagaugcuu

SEQ ID NO: 124124 - RNA, 23 nt, Artificial Sequence
  Synthetic
aaacaucuugcccugagaugcuu

SEQ ID NO: 124125 - RNA, 24 nt, Artificial Sequence
  Synthetic
uaaacaucuugcccugagaugcuu

SEQ ID NO: 124126 - RNA, 18 nt, Artificial Sequence
  Synthetic
ucccuuucccuccugcuu

SEQ ID NO: 124127 - RNA, 19 nt, Artificial Sequence
  Synthetic
cucccuuucccuccugcuu

SEQ ID NO: 124128 - RNA, 20 nt, Artificial Sequence
  Synthetic
ccucccuuucccuccugcuu

SEQ ID NO: 124129 - RNA, 21 nt, Artificial Sequence
  Synthetic
cccucccuuucccuccugcuu

SEQ ID NO: 124130 - RNA, 22 nt, Artificial Sequence
  Synthetic
ccccucccuuucccuccugcuu

SEQ ID NO: 124131 - RNA, 24 nt, Artificial Sequence
  Synthetic
agccccucccuuucccuccugcuu

SEQ ID NO: 124132 - RNA, 21 nt, Artificial Sequence
  Synthetic
ccauuucucuuccagcugcuu

SEQ ID NO: 124133 - RNA, 22 nt, Artificial Sequence
  Synthetic
cccauuucucuuccagcugcuu

SEQ ID NO: 124134 - RNA, 23 nt, Artificial Sequence
  Synthetic
ccccauuucucuuccagcugcuu

SEQ ID NO: 124135 - RNA, 19 nt, Artificial Sequence
  Synthetic
agagucuacucuucugcuu

SEQ ID NO: 124136 - RNA, 20 nt, Artificial Sequence
  Synthetic
cagagucuacucuucugcuu

SEQ ID NO: 124137 - RNA, 21 nt, Artificial Sequence
  Synthetic
acagagucuacucuucugcuu

SEQ ID NO: 124138 - RNA, 22 nt, Artificial Sequence
  Synthetic
uacagagucuacucuucugcuu

SEQ ID NO: 124139 - RNA, 23 nt, Artificial Sequence
  Synthetic
auacagagucuacucuucugcuu

SEQ ID NO: 124140 - RNA, 24 nt, Artificial Sequence
  Synthetic
aauacagagucuacucuucugcuu

SEQ ID NO: 124141 - RNA, 18 nt, Artificial Sequence
  Synthetic
ugggguaucuuucugcuu

SEQ ID NO: 124142 - RNA, 19 nt, Artificial Sequence
  Synthetic
augggguaucuuucugcuu

SEQ ID NO: 124143 - RNA, 20 nt, Artificial Sequence
  Synthetic
caugggguaucuuucugcuu

SEQ ID NO: 124144 - RNA, 21 nt, Artificial Sequence
  Synthetic
acaugggguaucuuucugcuu

SEQ ID NO: 124145 - RNA, 22 nt, Artificial Sequence
  Synthetic
aacaugggguaucuuucugcuu

SEQ ID NO: 124146 - RNA, 24 nt, Artificial Sequence
  Synthetic
agaacaugggguaucuuucugcuu

SEQ ID NO: 124147 - RNA, 21 nt, Artificial Sequence
  Synthetic
uggguccuuuaaaaagugcuu

SEQ ID NO: 124148 - RNA, 22 nt, Artificial Sequence
  Synthetic
uuggguccuuuaaaaagugcuu

SEQ ID NO: 124149 - RNA, 23 nt, Artificial Sequence
  Synthetic
auuggguccuuuaaaaagugcuu

SEQ ID NO: 124150 - RNA, 24 nt, Artificial Sequence
  Synthetic
aauuggguccuuuaaaaagugcuu

SEQ ID NO: 124151 - RNA, 18 nt, Artificial Sequence
  Synthetic
acauuuacaauagugcuu

SEQ ID NO: 124152 - RNA, 20 nt, Artificial Sequence
  Synthetic
agacauuuacaauagugcuu

SEQ ID NO: 124153 - RNA, 21 nt, Artificial Sequence
  Synthetic
cagacauuuacaauagugcuu

SEQ ID NO: 124154 - RNA, 23 nt, Artificial Sequence
  Synthetic
ugcagacauuuacaauagugcuu

SEQ ID NO: 124155 - RNA, 24 nt, Artificial Sequence
  Synthetic
augcagacauuuacaauagugcuu

SEQ ID NO: 124156 - RNA, 18 nt, Artificial Sequence
  Synthetic
cauacguucauggugcuu

SEQ ID NO: 124157 - RNA, 19 nt, Artificial Sequence
  Synthetic
ccauacguucauggugcuu

SEQ ID NO: 124158 - RNA, 20 nt, Artificial Sequence
  Synthetic
uccauacguucauggugcuu

SEQ ID NO: 124159 - RNA, 21 nt, Artificial Sequence
  Synthetic
auccauacguucauggugcuu

SEQ ID NO: 124160 - RNA, 22 nt, Artificial Sequence
  Synthetic
uauccauacguucauggugcuu

SEQ ID NO: 124161 - RNA, 23 nt, Artificial Sequence
  Synthetic
cuauccauacguucauggugcuu

SEQ ID NO: 124162 - RNA, 24 nt, Artificial Sequence
  Synthetic
ucuauccauacguucauggugcuu

SEQ ID NO: 124163 - RNA, 18 nt, Artificial Sequence
  Synthetic
aucuaucuucuggugcuu

SEQ ID NO: 124164 - RNA, 19 nt, Artificial Sequence
  Synthetic
uaucuaucuucuggugcuu

SEQ ID NO: 124165 - RNA, 20 nt, Artificial Sequence
  Synthetic
uuaucuaucuucuggugcuu

SEQ ID NO: 124166 - RNA, 21 nt, Artificial Sequence
  Synthetic
cuuaucuaucuucuggugcuu

SEQ ID NO: 124167 - RNA, 22 nt, Artificial Sequence
  Synthetic
ucuuaucuaucuucuggugcuu

SEQ ID NO: 124168 - RNA, 23 nt, Artificial Sequence
  Synthetic
aucuuaucuaucuucuggugcuu

SEQ ID NO: 124169 - RNA, 24 nt, Artificial Sequence
  Synthetic
uaucuuaucuaucuucuggugcuu

SEQ ID NO: 124170 - RNA, 19 nt, Artificial Sequence
  Synthetic
aguccgcuuguaauugcuu

SEQ ID NO: 124171 - RNA, 21 nt, Artificial Sequence
  Synthetic
agaguccgcuuguaauugcuu

SEQ ID NO: 124172 - RNA, 22 nt, Artificial Sequence
  Synthetic
aagaguccgcuuguaauugcuu

SEQ ID NO: 124173 - RNA, 23 nt, Artificial Sequence
  Synthetic
caagaguccgcuuguaauugcuu

SEQ ID NO: 124174 - RNA, 24 nt, Artificial Sequence
  Synthetic
ucaagaguccgcuuguaauugcuu

SEQ ID NO: 124175 - RNA, 19 nt, Artificial Sequence
  Synthetic
uggagucaaagaguugcuu

SEQ ID NO: 124176 - RNA, 20 nt, Artificial Sequence
  Synthetic
cuggagucaaagaguugcuu

SEQ ID NO: 124177 - RNA, 21 nt, Artificial Sequence
  Synthetic
ugggaagcugaaagguugcuu

SEQ ID NO: 124178 - RNA, 22 nt, Artificial Sequence
  Synthetic
augggaagcugaaagguugcuu

SEQ ID NO: 124179 - RNA, 23 nt, Artificial Sequence
  Synthetic
caugggaagcugaaagguugcuu

SEQ ID NO: 124180 - RNA, 24 nt, Artificial Sequence
  Synthetic
acaugggaagcugaaagguugcuu

SEQ ID NO: 124181 - RNA, 18 nt, Artificial Sequence
  Synthetic
uaauaaucccuguugcuu

SEQ ID NO: 124182 - RNA, 19 nt, Artificial Sequence
  Synthetic
auaauaaucccuguugcuu

SEQ ID NO: 124183 - RNA, 21 nt, Artificial Sequence
  Synthetic
agauaauaaucccuguugcuu

SEQ ID NO: 124184 - RNA, 23 nt, Artificial Sequence
  Synthetic
agagauaauaaucccuguugcuu

SEQ ID NO: 124185 - RNA, 24 nt, Artificial Sequence
  Synthetic
uagagauaauaaucccuguugcuu

SEQ ID NO: 124186 - RNA, 18 nt, Artificial Sequence
  Synthetic
aucacaaagcuguugcuu

SEQ ID NO: 124187 - RNA, 19 nt, Artificial Sequence
  Synthetic
aaucacaaagcuguugcuu

SEQ ID NO: 124188 - RNA, 20 nt, Artificial Sequence
  Synthetic
aaaucacaaagcuguugcuu

SEQ ID NO: 124189 - RNA, 21 nt, Artificial Sequence
  Synthetic
uaaaucacaaagcuguugcuu

SEQ ID NO: 124190 - RNA, 22 nt, Artificial Sequence
  Synthetic
auaaaucacaaagcuguugcuu

SEQ ID NO: 124191 - RNA, 23 nt, Artificial Sequence
  Synthetic
aauaaaucacaaagcuguugcuu

SEQ ID NO: 124192 - RNA, 24 nt, Artificial Sequence
  Synthetic
uaauaaaucacaaagcuguugcuu

SEQ ID NO: 124193 - RNA, 18 nt, Artificial Sequence
  Synthetic
uaugcuugcccuuugcuu

SEQ ID NO: 124194 - RNA, 19 nt, Artificial Sequence
  Synthetic
auaugcuugcccuuugcuu

SEQ ID NO: 124195 - RNA, 21 nt, Artificial Sequence
  Synthetic
agauaugcuugcccuuugcuu

SEQ ID NO: 124196 - RNA, 22 nt, Artificial Sequence
  Synthetic
uagauaugcuugcccuuugcuu

SEQ ID NO: 124197 - RNA, 24 nt, Artificial Sequence
  Synthetic
aguagauaugcuugcccuuugcuu

SEQ ID NO: 124198 - RNA, 18 nt, Artificial Sequence
  Synthetic
ugauacguagaaaaucuu

SEQ ID NO: 124199 - RNA, 19 nt, Artificial Sequence
  Synthetic
cugauacguagaaaaucuu

SEQ ID NO: 124200 - RNA, 20 nt, Artificial Sequence
  Synthetic
ucugauacguagaaaaucuu

SEQ ID NO: 124201 - RNA, 21 nt, Artificial Sequence
  Synthetic
cauaaaacauacugaaaucuu

SEQ ID NO: 124202 - RNA, 22 nt, Artificial Sequence
  Synthetic
ucauaaaacauacugaaaucuu

SEQ ID NO: 124203 - RNA, 24 nt, Artificial Sequence
  Synthetic
agucauaaaacauacugaaaucuu

SEQ ID NO: 124204 - RNA, 21 nt, Artificial Sequence
  Synthetic
uucauuuuuaaacuaaaucuu

SEQ ID NO: 124205 - RNA, 22 nt, Artificial Sequence
  Synthetic
auucauuuuuaaacuaaaucuu

SEQ ID NO: 124206 - RNA, 23 nt, Artificial Sequence
  Synthetic
cauucauuuuuaaacuaaaucuu

SEQ ID NO: 124207 - RNA, 19 nt, Artificial Sequence
  Synthetic
uguacagauauucaaucuu

SEQ ID NO: 124208 - RNA, 20 nt, Artificial Sequence
  Synthetic
auguacagauauucaaucuu

SEQ ID NO: 124209 - RNA, 21 nt, Artificial Sequence
  Synthetic
aauguacagauauucaaucuu

SEQ ID NO: 124210 - RNA, 22 nt, Artificial Sequence
  Synthetic
aaauguacagauauucaaucuu

SEQ ID NO: 124211 - RNA, 23 nt, Artificial Sequence
  Synthetic
caaauguacagauauucaaucuu

SEQ ID NO: 124212 - RNA, 19 nt, Artificial Sequence
  Synthetic
agcauauugaaagaaucuu

SEQ ID NO: 124213 - RNA, 20 nt, Artificial Sequence
  Synthetic
cagcauauugaaagaaucuu

SEQ ID NO: 124214 - RNA, 18 nt, Artificial Sequence
  Synthetic
uuacuggcucaacaucuu

SEQ ID NO: 124215 - RNA, 19 nt, Artificial Sequence
  Synthetic
uuuacuggcucaacaucuu

SEQ ID NO: 124216 - RNA, 20 nt, Artificial Sequence
  Synthetic
auuuacuggcucaacaucuu

SEQ ID NO: 124217 - RNA, 21 nt, Artificial Sequence
  Synthetic
uauuuacuggcucaacaucuu

SEQ ID NO: 124218 - RNA, 22 nt, Artificial Sequence
  Synthetic
auauuuacuggcucaacaucuu

SEQ ID NO: 124219 - RNA, 24 nt, Artificial Sequence
  Synthetic
ugauauuuacuggcucaacaucuu

SEQ ID NO: 124220 - RNA, 18 nt, Artificial Sequence
  Synthetic
ccuuuaccaaaccaucuu

SEQ ID NO: 124221 - RNA, 19 nt, Artificial Sequence
  Synthetic
accuuuaccaaaccaucuu

SEQ ID NO: 124222 - RNA, 20 nt, Artificial Sequence
  Synthetic
caccuuuaccaaaccaucuu

SEQ ID NO: 124223 - RNA, 21 nt, Artificial Sequence
  Synthetic
ucaccuuuaccaaaccaucuu

SEQ ID NO: 124224 - RNA, 22 nt, Artificial Sequence
  Synthetic
uucaccuuuaccaaaccaucuu

SEQ ID NO: 124225 - RNA, 23 nt, Artificial Sequence
  Synthetic
uuucaccuuuaccaaaccaucuu

SEQ ID NO: 124226 - RNA, 24 nt, Artificial Sequence
  Synthetic
auuucaccuuuaccaaaccaucuu

SEQ ID NO: 124227 - RNA, 18 nt, Artificial Sequence
  Synthetic
uuaauuaaagaccaucuu

SEQ ID NO: 124228 - RNA, 20 nt, Artificial Sequence
  Synthetic
aguuaauuaaagaccaucuu

SEQ ID NO: 124229 - RNA, 21 nt, Artificial Sequence
  Synthetic
uaguuaauuaaagaccaucuu

SEQ ID NO: 124230 - RNA, 22 nt, Artificial Sequence
  Synthetic
uuaguuaauuaaagaccaucuu

SEQ ID NO: 124231 - RNA, 23 nt, Artificial Sequence
  Synthetic
uuuaguuaauuaaagaccaucuu

SEQ ID NO: 124232 - RNA, 18 nt, Artificial Sequence
  Synthetic
auuuucaaagaagaucuu

SEQ ID NO: 124233 - RNA, 20 nt, Artificial Sequence
  Synthetic
ugauuuucaaagaagaucuu

SEQ ID NO: 124234 - RNA, 21 nt, Artificial Sequence
  Synthetic
augauuuucaaagaagaucuu

SEQ ID NO: 124235 - RNA, 22 nt, Artificial Sequence
  Synthetic
caugauuuucaaagaagaucuu

SEQ ID NO: 124236 - RNA, 23 nt, Artificial Sequence
  Synthetic
ucaugauuuucaaagaagaucuu

SEQ ID NO: 124237 - RNA, 24 nt, Artificial Sequence
  Synthetic
aucaugauuuucaaagaagaucuu

SEQ ID NO: 124238 - RNA, 21 nt, Artificial Sequence
  Synthetic
uggggaugcucugaggaucuu

SEQ ID NO: 124239 - RNA, 22 nt, Artificial Sequence
  Synthetic
uuggggaugcucugaggaucuu

SEQ ID NO: 124240 - RNA, 24 nt, Artificial Sequence
  Synthetic
uguuggggaugcucugaggaucuu

SEQ ID NO: 124241 - RNA, 18 nt, Artificial Sequence
  Synthetic
uuuacuccagaugaucuu

SEQ ID NO: 124242 - RNA, 19 nt, Artificial Sequence
  Synthetic
uuuuacuccagaugaucuu

SEQ ID NO: 124243 - RNA, 20 nt, Artificial Sequence
  Synthetic
auuuuacuccagaugaucuu

SEQ ID NO: 124244 - RNA, 22 nt, Artificial Sequence
  Synthetic
agauuuuacuccagaugaucuu

SEQ ID NO: 124245 - RNA, 23 nt, Artificial Sequence
  Synthetic
cagauuuuacuccagaugaucuu

SEQ ID NO: 124246 - RNA, 24 nt, Artificial Sequence
  Synthetic
ccagauuuuacuccagaugaucuu

SEQ ID NO: 124247 - RNA, 18 nt, Artificial Sequence
  Synthetic
agauguuaguuugaucuu

SEQ ID NO: 124248 - RNA, 19 nt, Artificial Sequence
  Synthetic
uagauguuaguuugaucuu

SEQ ID NO: 124249 - RNA, 20 nt, Artificial Sequence
  Synthetic
uuagauguuaguuugaucuu

SEQ ID NO: 124250 - RNA, 21 nt, Artificial Sequence
  Synthetic
cuuagauguuaguuugaucuu

SEQ ID NO: 124251 - RNA, 22 nt, Artificial Sequence
  Synthetic
acuuagauguuaguuugaucuu

SEQ ID NO: 124252 - RNA, 23 nt, Artificial Sequence
  Synthetic
aacuuagauguuaguuugaucuu

SEQ ID NO: 124253 - RNA, 24 nt, Artificial Sequence
  Synthetic
uaacuuagauguuaguuugaucuu

SEQ ID NO: 124254 - RNA, 18 nt, Artificial Sequence
  Synthetic
aagguuuaucucuaucuu

SEQ ID NO: 124255 - RNA, 19 nt, Artificial Sequence
  Synthetic
aaagguuuaucucuaucuu

SEQ ID NO: 124256 - RNA, 20 nt, Artificial Sequence
  Synthetic
caaagguuuaucucuaucuu

SEQ ID NO: 124257 - RNA, 21 nt, Artificial Sequence
  Synthetic
acaaagguuuaucucuaucuu

SEQ ID NO: 124258 - RNA, 22 nt, Artificial Sequence
  Synthetic
cacaaagguuuaucucuaucuu

SEQ ID NO: 124259 - RNA, 23 nt, Artificial Sequence
  Synthetic
acacaaagguuuaucucuaucuu

SEQ ID NO: 124260 - RNA, 24 nt, Artificial Sequence
  Synthetic
aacacaaagguuuaucucuaucuu

SEQ ID NO: 124261 - RNA, 21 nt, Artificial Sequence
  Synthetic
aggguuaagugauuguaucuu

SEQ ID NO: 124262 - RNA, 23 nt, Artificial Sequence
  Synthetic
agaggguuaagugauuguaucuu

SEQ ID NO: 124263 - RNA, 19 nt, Artificial Sequence
  Synthetic
cgaguuuucuuguuaucuu

SEQ ID NO: 124264 - RNA, 20 nt, Artificial Sequence
  Synthetic
acgaguuuucuuguuaucuu

SEQ ID NO: 124265 - RNA, 21 nt, Artificial Sequence
  Synthetic
uacgaguuuucuuguuaucuu

SEQ ID NO: 124266 - RNA, 24 nt, Artificial Sequence
  Synthetic
agguacgaguuuucuuguuaucuu

SEQ ID NO: 124267 - RNA, 18 nt, Artificial Sequence
  Synthetic
cucugaaucuaaacucuu

SEQ ID NO: 124268 - RNA, 19 nt, Artificial Sequence
  Synthetic
ucucugaaucuaaacucuu

SEQ ID NO: 124269 - RNA, 20 nt, Artificial Sequence
  Synthetic
cucucugaaucuaaacucuu

SEQ ID NO: 124270 - RNA, 22 nt, Artificial Sequence
  Synthetic
ugcucucugaaucuaaacucuu

SEQ ID NO: 124271 - RNA, 24 nt, Artificial Sequence
  Synthetic
ugugcucucugaaucuaaacucuu

SEQ ID NO: 124272 - RNA, 18 nt, Artificial Sequence
  Synthetic
uguggccuguaaacucuu

SEQ ID NO: 124273 - RNA, 19 nt, Artificial Sequence
  Synthetic
auguggccuguaaacucuu

SEQ ID NO: 124274 - RNA, 20 nt, Artificial Sequence
  Synthetic
cauguggccuguaaacucuu

SEQ ID NO: 124275 - RNA, 21 nt, Artificial Sequence
  Synthetic
ucauguggccuguaaacucuu

SEQ ID NO: 124276 - RNA, 22 nt, Artificial Sequence
  Synthetic
cucauguggccuguaaacucuu

SEQ ID NO: 124277 - RNA, 18 nt, Artificial Sequence
  Synthetic
ugauaguggaacacucuu

SEQ ID NO: 124278 - RNA, 19 nt, Artificial Sequence
  Synthetic
augauaguggaacacucuu

SEQ ID NO: 124279 - RNA, 20 nt, Artificial Sequence
  Synthetic
aaugauaguggaacacucuu

SEQ ID NO: 124280 - RNA, 21 nt, Artificial Sequence
  Synthetic
aaaugauaguggaacacucuu

SEQ ID NO: 124281 - RNA, 22 nt, Artificial Sequence
  Synthetic
caaaugauaguggaacacucuu

SEQ ID NO: 124282 - RNA, 23 nt, Artificial Sequence
  Synthetic
ucaaaugauaguggaacacucuu

SEQ ID NO: 124283 - RNA, 24 nt, Artificial Sequence
  Synthetic
uucaaaugauaguggaacacucuu

SEQ ID NO: 124284 - RNA, 18 nt, Artificial Sequence
  Synthetic
ucacuaagauucacucuu

SEQ ID NO: 124285 - RNA, 19 nt, Artificial Sequence
  Synthetic
cucacuaagauucacucuu

SEQ ID NO: 124286 - RNA, 20 nt, Artificial Sequence
  Synthetic
acucacuaagauucacucuu

SEQ ID NO: 124287 - RNA, 21 nt, Artificial Sequence
  Synthetic
cacucacuaagauucacucuu

SEQ ID NO: 124288 - RNA, 22 nt, Artificial Sequence
  Synthetic
ucacucacuaagauucacucuu

SEQ ID NO: 124289 - RNA, 23 nt, Artificial Sequence
  Synthetic
aucacucacuaagauucacucuu

SEQ ID NO: 124290 - RNA, 24 nt, Artificial Sequence
  Synthetic
aaucacucacuaagauucacucuu

SEQ ID NO: 124291 - RNA, 19 nt, Artificial Sequence
  Synthetic
ugcuaaaagcuuuacucuu

SEQ ID NO: 124292 - RNA, 21 nt, Artificial Sequence
  Synthetic
agugcuaaaagcuuuacucuu

SEQ ID NO: 124293 - RNA, 22 nt, Artificial Sequence
  Synthetic
aagugcuaaaagcuuuacucuu

SEQ ID NO: 124294 - RNA, 20 nt, Artificial Sequence
  Synthetic
aggcguuuuauuaaccucuu

SEQ ID NO: 124295 - RNA, 21 nt, Artificial Sequence
  Synthetic
aaggcguuuuauuaaccucuu

SEQ ID NO: 124296 - RNA, 22 nt, Artificial Sequence
  Synthetic
caaggcguuuuauuaaccucuu

SEQ ID NO: 124297 - RNA, 23 nt, Artificial Sequence
  Synthetic
acaaggcguuuuauuaaccucuu

SEQ ID NO: 124298 - RNA, 24 nt, Artificial Sequence
  Synthetic
aacaaggcguuuuauuaaccucuu

SEQ ID NO: 124299 - RNA, 18 nt, Artificial Sequence
  Synthetic
aagaggguagacccucuu

SEQ ID NO: 124300 - RNA, 20 nt, Artificial Sequence
  Synthetic
agaagaggguagacccucuu

SEQ ID NO: 124301 - RNA, 21 nt, Artificial Sequence
  Synthetic
uagaagaggguagacccucuu

SEQ ID NO: 124302 - RNA, 23 nt, Artificial Sequence
  Synthetic
aguagaagaggguagacccucuu

SEQ ID NO: 124303 - RNA, 18 nt, Artificial Sequence
  Synthetic
aagccuguaaaagcucuu

SEQ ID NO: 124304 - RNA, 19 nt, Artificial Sequence
  Synthetic
aaagccuguaaaagcucuu

SEQ ID NO: 124305 - RNA, 21 nt, Artificial Sequence
  Synthetic
agaaagccuguaaaagcucuu

SEQ ID NO: 124306 - RNA, 22 nt, Artificial Sequence
  Synthetic
aagaaagccuguaaaagcucuu

SEQ ID NO: 124307 - RNA, 23 nt, Artificial Sequence
  Synthetic
caagaaagccuguaaaagcucuu

SEQ ID NO: 124308 - RNA, 24 nt, Artificial Sequence
  Synthetic
ucaagaaagccuguaaaagcucuu

SEQ ID NO: 124309 - RNA, 18 nt, Artificial Sequence
  Synthetic
uaaauaaugcaagcucuu

SEQ ID NO: 124310 - RNA, 20 nt, Artificial Sequence
  Synthetic
uguaaauaaugcaagcucuu

SEQ ID NO: 124311 - RNA, 21 nt, Artificial Sequence
  Synthetic
cuguaaauaaugcaagcucuu

SEQ ID NO: 124312 - RNA, 22 nt, Artificial Sequence
  Synthetic
ucuguaaauaaugcaagcucuu

SEQ ID NO: 124313 - RNA, 23 nt, Artificial Sequence
  Synthetic
cucuguaaauaaugcaagcucuu

SEQ ID NO: 124314 - RNA, 24 nt, Artificial Sequence
  Synthetic
ccucuguaaauaaugcaagcucuu

SEQ ID NO: 124315 - RNA, 18 nt, Artificial Sequence
  Synthetic
uucagauuagaagcucuu

SEQ ID NO: 124316 - RNA, 20 nt, Artificial Sequence
  Synthetic
aguucagauuagaagcucuu

SEQ ID NO: 124317 - RNA, 21 nt, Artificial Sequence
  Synthetic
aaguucagauuagaagcucuu

SEQ ID NO: 124318 - RNA, 22 nt, Artificial Sequence
  Synthetic
caaguucagauuagaagcucuu

SEQ ID NO: 124319 - RNA, 23 nt, Artificial Sequence
  Synthetic
ucaaguucagauuagaagcucuu

SEQ ID NO: 124320 - RNA, 24 nt, Artificial Sequence
  Synthetic
cucaaguucagauuagaagcucuu

SEQ ID NO: 124321 - RNA, 18 nt, Artificial Sequence
  Synthetic
auaacuggauaagcucuu

SEQ ID NO: 124322 - RNA, 19 nt, Artificial Sequence
  Synthetic
aauaacuggauaagcucuu

SEQ ID NO: 124323 - RNA, 20 nt, Artificial Sequence
  Synthetic
uaauaacuggauaagcucuu

SEQ ID NO: 124324 - RNA, 21 nt, Artificial Sequence
  Synthetic
cuaauaacuggauaagcucuu

SEQ ID NO: 124325 - RNA, 23 nt, Artificial Sequence
  Synthetic
agcuaauaacuggauaagcucuu

SEQ ID NO: 124326 - RNA, 24 nt, Artificial Sequence
  Synthetic
cagcuaauaacuggauaagcucuu

SEQ ID NO: 124327 - RNA, 19 nt, Artificial Sequence
  Synthetic
ugucguuucucaggcucuu

SEQ ID NO: 124328 - RNA, 20 nt, Artificial Sequence
  Synthetic
cugucguuucucaggcucuu

SEQ ID NO: 124329 - RNA, 22 nt, Artificial Sequence
  Synthetic
agcugucguuucucaggcucuu

SEQ ID NO: 124330 - RNA, 23 nt, Artificial Sequence
  Synthetic
aagcugucguuucucaggcucuu

SEQ ID NO: 124331 - RNA, 24 nt, Artificial Sequence
  Synthetic
aaagcugucguuucucaggcucuu

SEQ ID NO: 124332 - RNA, 21 nt, Artificial Sequence
  Synthetic
cauccccacuuuguggcucuu

SEQ ID NO: 124333 - RNA, 22 nt, Artificial Sequence
  Synthetic
acauccccacuuuguggcucuu

SEQ ID NO: 124334 - RNA, 23 nt, Artificial Sequence
  Synthetic
aacauccccacuuuguggcucuu

SEQ ID NO: 124335 - RNA, 24 nt, Artificial Sequence
  Synthetic
uaacauccccacuuuguggcucuu

SEQ ID NO: 124336 - RNA, 18 nt, Artificial Sequence
  Synthetic
cccccagcaccaucucuu

SEQ ID NO: 124337 - RNA, 19 nt, Artificial Sequence
  Synthetic
ucccccagcaccaucucuu

SEQ ID NO: 124338 - RNA, 20 nt, Artificial Sequence
  Synthetic
uucccccagcaccaucucuu

SEQ ID NO: 124339 - RNA, 21 nt, Artificial Sequence
  Synthetic
uuucccccagcaccaucucuu

SEQ ID NO: 124340 - RNA, 22 nt, Artificial Sequence
  Synthetic
uuuucccccagcaccaucucuu

SEQ ID NO: 124341 - RNA, 23 nt, Artificial Sequence
  Synthetic
uuuuucccccagcaccaucucuu

SEQ ID NO: 124342 - RNA, 24 nt, Artificial Sequence
  Synthetic
uuuuuucccccagcaccaucucuu

SEQ ID NO: 124343 - RNA, 18 nt, Artificial Sequence
  Synthetic
cacauacugaccucucuu

SEQ ID NO: 124344 - RNA, 19 nt, Artificial Sequence
  Synthetic
acacauacugaccucucuu

SEQ ID NO: 124345 - RNA, 20 nt, Artificial Sequence
  Synthetic
cacacauacugaccucucuu

SEQ ID NO: 124346 - RNA, 21 nt, Artificial Sequence
  Synthetic
ucacacauacugaccucucuu

SEQ ID NO: 124347 - RNA, 22 nt, Artificial Sequence
  Synthetic
aucacacauacugaccucucuu

SEQ ID NO: 124348 - RNA, 23 nt, Artificial Sequence
  Synthetic
caucacacauacugaccucucuu

SEQ ID NO: 124349 - RNA, 24 nt, Artificial Sequence
  Synthetic
ucaucacacauacugaccucucuu

SEQ ID NO: 124350 - RNA, 18 nt, Artificial Sequence
  Synthetic
auaucugcauucucucuu

SEQ ID NO: 124351 - RNA, 19 nt, Artificial Sequence
  Synthetic
uauaucugcauucucucuu

SEQ ID NO: 124352 - RNA, 20 nt, Artificial Sequence
  Synthetic
auauaucugcauucucucuu

SEQ ID NO: 124353 - RNA, 21 nt, Artificial Sequence
  Synthetic
aauauaucugcauucucucuu

SEQ ID NO: 124354 - RNA, 22 nt, Artificial Sequence
  Synthetic
caauauaucugcauucucucuu

SEQ ID NO: 124355 - RNA, 23 nt, Artificial Sequence
  Synthetic
acaauauaucugcauucucucuu

SEQ ID NO: 124356 - RNA, 24 nt, Artificial Sequence
  Synthetic
aacaauauaucugcauucucucuu

SEQ ID NO: 124357 - RNA, 18 nt, Artificial Sequence
  Synthetic
aaaugaaaucauucucuu

SEQ ID NO: 124358 - RNA, 19 nt, Artificial Sequence
  Synthetic
aaaaugaaaucauucucuu

SEQ ID NO: 124359 - RNA, 20 nt, Artificial Sequence
  Synthetic
caaaaugaaaucauucucuu

SEQ ID NO: 124360 - RNA, 21 nt, Artificial Sequence
  Synthetic
acaaaaugaaaucauucucuu

SEQ ID NO: 124361 - RNA, 22 nt, Artificial Sequence
  Synthetic
uacaaaaugaaaucauucucuu

SEQ ID NO: 124362 - RNA, 23 nt, Artificial Sequence
  Synthetic
uuacaaaaugaaaucauucucuu

SEQ ID NO: 124363 - RNA, 18 nt, Artificial Sequence
  Synthetic
accugggcuuauucucuu

SEQ ID NO: 124364 - RNA, 19 nt, Artificial Sequence
  Synthetic
uaccugggcuuauucucuu

SEQ ID NO: 124365 - RNA, 20 nt, Artificial Sequence
  Synthetic
auaccugggcuuauucucuu

SEQ ID NO: 124366 - RNA, 22 nt, Artificial Sequence
  Synthetic
ugauaccugggcuuauucucuu

SEQ ID NO: 124367 - RNA, 23 nt, Artificial Sequence
  Synthetic
cugauaccugggcuuauucucuu

SEQ ID NO: 124368 - RNA, 24 nt, Artificial Sequence
  Synthetic
acugauaccugggcuuauucucuu

SEQ ID NO: 124369 - RNA, 18 nt, Artificial Sequence
  Synthetic
uaaaauuaagguucucuu

SEQ ID NO: 124370 - RNA, 19 nt, Artificial Sequence
  Synthetic
cuaaaauuaagguucucuu

SEQ ID NO: 124371 - RNA, 20 nt, Artificial Sequence
  Synthetic
ucuaaaauuaagguucucuu

SEQ ID NO: 124372 - RNA, 21 nt, Artificial Sequence
  Synthetic
cucuaaaauuaagguucucuu

SEQ ID NO: 124373 - RNA, 22 nt, Artificial Sequence
  Synthetic
ucucuaaaauuaagguucucuu

SEQ ID NO: 124374 - RNA, 24 nt, Artificial Sequence
  Synthetic
cgucucuaaaauuaagguucucuu

SEQ ID NO: 124375 - RNA, 18 nt, Artificial Sequence
  Synthetic
auggugggcuuuucucuu

SEQ ID NO: 124376 - RNA, 19 nt, Artificial Sequence
  Synthetic
uauggugggcuuuucucuu

SEQ ID NO: 124377 - RNA, 20 nt, Artificial Sequence
  Synthetic
uuauggugggcuuuucucuu

SEQ ID NO: 124378 - RNA, 21 nt, Artificial Sequence
  Synthetic
cuuauggugggcuuuucucuu

SEQ ID NO: 124379 - RNA, 22 nt, Artificial Sequence
  Synthetic
ucuuauggugggcuuuucucuu

SEQ ID NO: 124380 - RNA, 24 nt, Artificial Sequence
  Synthetic
ugucuuauggugggcuuuucucuu

SEQ ID NO: 124381 - RNA, 18 nt, Artificial Sequence
  Synthetic
uucaaauucaauagucuu

SEQ ID NO: 124382 - RNA, 19 nt, Artificial Sequence
  Synthetic
auucaaauucaauagucuu

SEQ ID NO: 124383 - RNA, 20 nt, Artificial Sequence
  Synthetic
aauucaaauucaauagucuu

SEQ ID NO: 124384 - RNA, 21 nt, Artificial Sequence
  Synthetic
aaauucaaauucaauagucuu

SEQ ID NO: 124385 - RNA, 22 nt, Artificial Sequence
  Synthetic
aaaauucaaauucaauagucuu

SEQ ID NO: 124386 - RNA, 23 nt, Artificial Sequence
  Synthetic
aaaaauucaaauucaauagucuu

SEQ ID NO: 124387 - RNA, 24 nt, Artificial Sequence
  Synthetic
aaaaaauucaaauucaauagucuu

SEQ ID NO: 124388 - RNA, 18 nt, Artificial Sequence
  Synthetic
uauuuacauaaucgucuu

SEQ ID NO: 124389 - RNA, 21 nt, Artificial Sequence
  Synthetic
ugguauuuacauaaucgucuu

SEQ ID NO: 124390 - RNA, 22 nt, Artificial Sequence
  Synthetic
cugguauuuacauaaucgucuu

SEQ ID NO: 124391 - RNA, 18 nt, Artificial Sequence
  Synthetic
ugaauaucuaucggucuu

SEQ ID NO: 124392 - RNA, 19 nt, Artificial Sequence
  Synthetic
cugaauaucuaucggucuu

SEQ ID NO: 124393 - RNA, 20 nt, Artificial Sequence
  Synthetic
acugaauaucuaucggucuu

SEQ ID NO: 124394 - RNA, 21 nt, Artificial Sequence
  Synthetic
aacugaauaucuaucggucuu

SEQ ID NO: 124395 - RNA, 22 nt, Artificial Sequence
  Synthetic
uaacugaauaucuaucggucuu

SEQ ID NO: 124396 - RNA, 23 nt, Artificial Sequence
  Synthetic
uuaacugaauaucuaucggucuu

SEQ ID NO: 124397 - RNA, 24 nt, Artificial Sequence
  Synthetic
cuuaacugaauaucuaucggucuu

SEQ ID NO: 124398 - RNA, 21 nt, Artificial Sequence
  Synthetic
aaaaccuuuuccaagggucuu

SEQ ID NO: 124399 - RNA, 22 nt, Artificial Sequence
  Synthetic
uaaaaccuuuuccaagggucuu

SEQ ID NO: 124400 - RNA, 23 nt, Artificial Sequence
  Synthetic
uuaaaaccuuuuccaagggucuu

SEQ ID NO: 124401 - RNA, 24 nt, Artificial Sequence
  Synthetic
cuuaaaaccuuuuccaagggucuu

SEQ ID NO: 124402 - RNA, 18 nt, Artificial Sequence
  Synthetic
aauuuuuuaaggggucuu

SEQ ID NO: 124403 - RNA, 19 nt, Artificial Sequence
  Synthetic
caauuuuuuaaggggucuu

SEQ ID NO: 124404 - RNA, 20 nt, Artificial Sequence
  Synthetic
acaauuuuuuaaggggucuu

SEQ ID NO: 124405 - RNA, 21 nt, Artificial Sequence
  Synthetic
cacaauuuuuuaaggggucuu

SEQ ID NO: 124406 - RNA, 22 nt, Artificial Sequence
  Synthetic
ucacaauuuuuuaaggggucuu

SEQ ID NO: 124407 - RNA, 23 nt, Artificial Sequence
  Synthetic
cucacaauuuuuuaaggggucuu

SEQ ID NO: 124408 - RNA, 24 nt, Artificial Sequence
  Synthetic
ccucacaauuuuuuaaggggucuu

SEQ ID NO: 124409 - RNA, 18 nt, Artificial Sequence
  Synthetic
ugugaauucuguggucuu

SEQ ID NO: 124410 - RNA, 19 nt, Artificial Sequence
  Synthetic
cugugaauucuguggucuu

SEQ ID NO: 124411 - RNA, 20 nt, Artificial Sequence
  Synthetic
acugugaauucuguggucuu

SEQ ID NO: 124412 - RNA, 22 nt, Artificial Sequence
  Synthetic
ugacugugaauucuguggucuu

SEQ ID NO: 124413 - RNA, 23 nt, Artificial Sequence
  Synthetic
augacugugaauucuguggucuu

SEQ ID NO: 124414 - RNA, 24 nt, Artificial Sequence
  Synthetic
aaugacugugaauucuguggucuu

SEQ ID NO: 124415 - RNA, 18 nt, Artificial Sequence
  Synthetic
aaucuaucauuuggucuu

SEQ ID NO: 124416 - RNA, 19 nt, Artificial Sequence
  Synthetic
uaaucuaucauuuggucuu

SEQ ID NO: 124417 - RNA, 20 nt, Artificial Sequence
  Synthetic
auaaucuaucauuuggucuu

SEQ ID NO: 124418 - RNA, 21 nt, Artificial Sequence
  Synthetic
aauaaucuaucauuuggucuu

SEQ ID NO: 124419 - RNA, 22 nt, Artificial Sequence
  Synthetic
caauaaucuaucauuuggucuu

SEQ ID NO: 124420 - RNA, 23 nt, Artificial Sequence
  Synthetic
acaauaaucuaucauuuggucuu

SEQ ID NO: 124421 - RNA, 24 nt, Artificial Sequence
  Synthetic
aacaauaaucuaucauuuggucuu

SEQ ID NO: 124422 - RNA, 18 nt, Artificial Sequence
  Synthetic
ccgugacaauucugucuu

SEQ ID NO: 124423 - RNA, 20 nt, Artificial Sequence
  Synthetic
agccgugacaauucugucuu

SEQ ID NO: 124424 - RNA, 21 nt, Artificial Sequence
  Synthetic
uagccgugacaauucugucuu

SEQ ID NO: 124425 - RNA, 22 nt, Artificial Sequence
  Synthetic
auagccgugacaauucugucuu

SEQ ID NO: 124426 - RNA, 23 nt, Artificial Sequence
  Synthetic
aauagccgugacaauucugucuu

SEQ ID NO: 124427 - RNA, 24 nt, Artificial Sequence
  Synthetic
aaauagccgugacaauucugucuu

SEQ ID NO: 124428 - RNA, 19 nt, Artificial Sequence
  Synthetic
uguucgaucuaauugucuu

SEQ ID NO: 124429 - RNA, 20 nt, Artificial Sequence
  Synthetic
cuguucgaucuaauugucuu

SEQ ID NO: 124430 - RNA, 21 nt, Artificial Sequence
  Synthetic
acuguucgaucuaauugucuu

SEQ ID NO: 124431 - RNA, 22 nt, Artificial Sequence
  Synthetic
uacuguucgaucuaauugucuu

SEQ ID NO: 124432 - RNA, 23 nt, Artificial Sequence
  Synthetic
auacuguucgaucuaauugucuu

SEQ ID NO: 124433 - RNA, 24 nt, Artificial Sequence
  Synthetic
aauacuguucgaucuaauugucuu

SEQ ID NO: 124434 - RNA, 18 nt, Artificial Sequence
  Synthetic
cguuauauaccuugucuu

SEQ ID NO: 124435 - RNA, 19 nt, Artificial Sequence
  Synthetic
acguuauauaccuugucuu

SEQ ID NO: 124436 - RNA, 20 nt, Artificial Sequence
  Synthetic
uacguuauauaccuugucuu

SEQ ID NO: 124437 - RNA, 21 nt, Artificial Sequence
  Synthetic
auacguuauauaccuugucuu

SEQ ID NO: 124438 - RNA, 22 nt, Artificial Sequence
  Synthetic
uauacguuauauaccuugucuu

SEQ ID NO: 124439 - RNA, 23 nt, Artificial Sequence
  Synthetic
auauacguuauauaccuugucuu

SEQ ID NO: 124440 - RNA, 24 nt, Artificial Sequence
  Synthetic
uauauacguuauauaccuugucuu

SEQ ID NO: 124441 - RNA, 19 nt, Artificial Sequence
  Synthetic
uggggagcuaccaauucuu

SEQ ID NO: 124442 - RNA, 20 nt, Artificial Sequence
  Synthetic
cuggggagcuaccaauucuu

SEQ ID NO: 124443 - RNA, 21 nt, Artificial Sequence
  Synthetic
ucuggggagcuaccaauucuu

SEQ ID NO: 124444 - RNA, 22 nt, Artificial Sequence
  Synthetic
cucuggggagcuaccaauucuu

SEQ ID NO: 124445 - RNA, 23 nt, Artificial Sequence
  Synthetic
ucucuggggagcuaccaauucuu

SEQ ID NO: 124446 - RNA, 18 nt, Artificial Sequence
  Synthetic
aucuuugacugaauucuu

SEQ ID NO: 124447 - RNA, 19 nt, Artificial Sequence
  Synthetic
uaucuuugacugaauucuu

SEQ ID NO: 124448 - RNA, 20 nt, Artificial Sequence
  Synthetic
auaucuuugacugaauucuu

SEQ ID NO: 124449 - RNA, 21 nt, Artificial Sequence
  Synthetic
uauaucuuugacugaauucuu

SEQ ID NO: 124450 - RNA, 22 nt, Artificial Sequence
  Synthetic
uuauaucuuugacugaauucuu

SEQ ID NO: 124451 - RNA, 23 nt, Artificial Sequence
  Synthetic
cuuauaucuuugacugaauucuu

SEQ ID NO: 124452 - RNA, 24 nt, Artificial Sequence
  Synthetic
acuuauaucuuugacugaauucuu

SEQ ID NO: 124453 - RNA, 18 nt, Artificial Sequence
  Synthetic
ucuccgagucacauucuu

SEQ ID NO: 124454 - RNA, 19 nt, Artificial Sequence
  Synthetic
uucuccgagucacauucuu

SEQ ID NO: 124455 - RNA, 20 nt, Artificial Sequence
  Synthetic
cuucuccgagucacauucuu

SEQ ID NO: 124456 - RNA, 21 nt, Artificial Sequence
  Synthetic
ucuucuccgagucacauucuu

SEQ ID NO: 124457 - RNA, 22 nt, Artificial Sequence
  Synthetic
uucuucuccgagucacauucuu

SEQ ID NO: 124458 - RNA, 23 nt, Artificial Sequence
  Synthetic
cuucuucuccgagucacauucuu

SEQ ID NO: 124459 - RNA, 24 nt, Artificial Sequence
  Synthetic
acuucuucuccgagucacauucuu

SEQ ID NO: 124460 - RNA, 18 nt, Artificial Sequence
  Synthetic
uucuucagucugauucuu

SEQ ID NO: 124461 - RNA, 19 nt, Artificial Sequence
  Synthetic
uuucuucagucugauucuu

SEQ ID NO: 124462 - RNA, 20 nt, Artificial Sequence
  Synthetic
auuucuucagucugauucuu

SEQ ID NO: 124463 - RNA, 21 nt, Artificial Sequence
  Synthetic
cauuucuucagucugauucuu

SEQ ID NO: 124464 - RNA, 22 nt, Artificial Sequence
  Synthetic
ccauuucuucagucugauucuu

SEQ ID NO: 124465 - RNA, 24 nt, Artificial Sequence
  Synthetic
cgccauuucuucagucugauucuu

SEQ ID NO: 124466 - RNA, 18 nt, Artificial Sequence
  Synthetic
uauggaaccuguauucuu

SEQ ID NO: 124467 - RNA, 19 nt, Artificial Sequence
  Synthetic
uuauggaaccuguauucuu

SEQ ID NO: 124468 - RNA, 21 nt, Artificial Sequence
  Synthetic
aguuauggaaccuguauucuu

SEQ ID NO: 124469 - RNA, 22 nt, Artificial Sequence
  Synthetic
aaguuauggaaccuguauucuu

SEQ ID NO: 124470 - RNA, 23 nt, Artificial Sequence
  Synthetic
uaaguuauggaaccuguauucuu

SEQ ID NO: 124471 - RNA, 18 nt, Artificial Sequence
  Synthetic
aaguacaaggaacuucuu

SEQ ID NO: 124472 - RNA, 21 nt, Artificial Sequence
  Synthetic
aggaaguacaaggaacuucuu

SEQ ID NO: 124473 - RNA, 23 nt, Artificial Sequence
  Synthetic
agaggaaguacaaggaacuucuu

SEQ ID NO: 124474 - RNA, 24 nt, Artificial Sequence
  Synthetic
aagaggaaguacaaggaacuucuu

SEQ ID NO: 124475 - RNA, 18 nt, Artificial Sequence
  Synthetic
cuccaucgguaacuucuu

SEQ ID NO: 124476 - RNA, 19 nt, Artificial Sequence
  Synthetic
ccuccaucgguaacuucuu

SEQ ID NO: 124477 - RNA, 20 nt, Artificial Sequence
  Synthetic
accuccaucgguaacuucuu

SEQ ID NO: 124478 - RNA, 21 nt, Artificial Sequence
  Synthetic
caccuccaucgguaacuucuu

SEQ ID NO: 124479 - RNA, 23 nt, Artificial Sequence
  Synthetic
agcaccuccaucgguaacuucuu

SEQ ID NO: 124480 - RNA, 24 nt, Artificial Sequence
  Synthetic
uagcaccuccaucgguaacuucuu

SEQ ID NO: 124481 - RNA, 19 nt, Artificial Sequence
  Synthetic
ugagggaauuuaacuucuu

SEQ ID NO: 124482 - RNA, 20 nt, Artificial Sequence
  Synthetic
augagggaauuuaacuucuu

SEQ ID NO: 124483 - RNA, 21 nt, Artificial Sequence
  Synthetic
caugagggaauuuaacuucuu

SEQ ID NO: 124484 - RNA, 23 nt, Artificial Sequence
  Synthetic
ugcaugagggaauuuaacuucuu

SEQ ID NO: 124485 - RNA, 18 nt, Artificial Sequence
  Synthetic
cuuaugugcagacuucuu

SEQ ID NO: 124486 - RNA, 19 nt, Artificial Sequence
  Synthetic
ucuuaugugcagacuucuu

SEQ ID NO: 124487 - RNA, 20 nt, Artificial Sequence
  Synthetic
cucuuaugugcagacuucuu

SEQ ID NO: 124488 - RNA, 21 nt, Artificial Sequence
  Synthetic
acucuuaugugcagacuucuu

SEQ ID NO: 124489 - RNA, 22 nt, Artificial Sequence
  Synthetic
aacucuuaugugcagacuucuu

SEQ ID NO: 124490 - RNA, 23 nt, Artificial Sequence
  Synthetic
aaacucuuaugugcagacuucuu

SEQ ID NO: 124491 - RNA, 18 nt, Artificial Sequence
  Synthetic
ugaaaaacuucccuucuu

SEQ ID NO: 124492 - RNA, 19 nt, Artificial Sequence
  Synthetic
uugaaaaacuucccuucuu

SEQ ID NO: 124493 - RNA, 20 nt, Artificial Sequence
  Synthetic
uuugaaaaacuucccuucuu

SEQ ID NO: 124494 - RNA, 22 nt, Artificial Sequence
  Synthetic
uguuugaaaaacuucccuucuu

SEQ ID NO: 124495 - RNA, 24 nt, Artificial Sequence
  Synthetic
aguguuugaaaaacuucccuucuu

SEQ ID NO: 124496 - RNA, 18 nt, Artificial Sequence
  Synthetic
auauuaugcagccuucuu

SEQ ID NO: 124497 - RNA, 19 nt, Artificial Sequence
  Synthetic
cauauuaugcagccuucuu

SEQ ID NO: 124498 - RNA, 20 nt, Artificial Sequence
  Synthetic
ucauauuaugcagccuucuu

SEQ ID NO: 124499 - RNA, 21 nt, Artificial Sequence
  Synthetic
uucauauuaugcagccuucuu

SEQ ID NO: 124500 - RNA, 22 nt, Artificial Sequence
  Synthetic
cuucauauuaugcagccuucuu

SEQ ID NO: 124501 - RNA, 23 nt, Artificial Sequence
  Synthetic
acuucauauuaugcagccuucuu

SEQ ID NO: 124502 - RNA, 24 nt, Artificial Sequence
  Synthetic
aacuucauauuaugcagccuucuu

SEQ ID NO: 124503 - RNA, 19 nt, Artificial Sequence
  Synthetic
uguaaaccauuaucuucuu

SEQ ID NO: 124504 - RNA, 20 nt, Artificial Sequence
  Synthetic
auguaaaccauuaucuucuu

SEQ ID NO: 124505 - RNA, 21 nt, Artificial Sequence
  Synthetic
cauguaaaccauuaucuucuu

SEQ ID NO: 124506 - RNA, 22 nt, Artificial Sequence
  Synthetic
ucauguaaaccauuaucuucuu

SEQ ID NO: 124507 - RNA, 23 nt, Artificial Sequence
  Synthetic
uucauguaaaccauuaucuucuu

SEQ ID NO: 124508 - RNA, 24 nt, Artificial Sequence
  Synthetic
auucauguaaaccauuaucuucuu

SEQ ID NO: 124509 - RNA, 18 nt, Artificial Sequence
  Synthetic
uauaauacuucauuucuu

SEQ ID NO: 124510 - RNA, 19 nt, Artificial Sequence
  Synthetic
uuauaauacuucauuucuu

SEQ ID NO: 124511 - RNA, 20 nt, Artificial Sequence
  Synthetic
auuauaauacuucauuucuu

SEQ ID NO: 124512 - RNA, 21 nt, Artificial Sequence
  Synthetic
cauuauaauacuucauuucuu

SEQ ID NO: 124513 - RNA, 22 nt, Artificial Sequence
  Synthetic
acauuauaauacuucauuucuu

SEQ ID NO: 124514 - RNA, 23 nt, Artificial Sequence
  Synthetic
aacauuauaauacuucauuucuu

SEQ ID NO: 124515 - RNA, 24 nt, Artificial Sequence
  Synthetic
aaacauuauaauacuucauuucuu

SEQ ID NO: 124516 - RNA, 18 nt, Artificial Sequence
  Synthetic
agagugcacauauuucuu

SEQ ID NO: 124517 - RNA, 19 nt, Artificial Sequence
  Synthetic
aagagugcacauauuucuu

SEQ ID NO: 124518 - RNA, 20 nt, Artificial Sequence
  Synthetic
uaagagugcacauauuucuu

SEQ ID NO: 124519 - RNA, 21 nt, Artificial Sequence
  Synthetic
uuaagagugcacauauuucuu

SEQ ID NO: 124520 - RNA, 22 nt, Artificial Sequence
  Synthetic
uuuaagagugcacauauuucuu

SEQ ID NO: 124521 - RNA, 23 nt, Artificial Sequence
  Synthetic
uuuuaagagugcacauauuucuu

SEQ ID NO: 124522 - RNA, 24 nt, Artificial Sequence
  Synthetic
auuuuaagagugcacauauuucuu

SEQ ID NO: 124523 - RNA, 18 nt, Artificial Sequence
  Synthetic
cagaauuacaccuuucuu

SEQ ID NO: 124524 - RNA, 19 nt, Artificial Sequence
  Synthetic
acagaauuacaccuuucuu

SEQ ID NO: 124525 - RNA, 20 nt, Artificial Sequence
  Synthetic
aacagaauuacaccuuucuu

SEQ ID NO: 124526 - RNA, 23 nt, Artificial Sequence
  Synthetic
aggaacagaauuacaccuuucuu

SEQ ID NO: 124527 - RNA, 21 nt, Artificial Sequence
  Synthetic
uugcauucuuucuucuuucuu

SEQ ID NO: 124528 - RNA, 22 nt, Artificial Sequence
  Synthetic
auugcauucuuucuucuuucuu

SEQ ID NO: 124529 - RNA, 24 nt, Artificial Sequence
  Synthetic
agauugcauucuuucuucuuucuu

SEQ ID NO: 124530 - RNA, 18 nt, Artificial Sequence
  Synthetic
agucucuuguucuuucuu

SEQ ID NO: 124531 - RNA, 19 nt, Artificial Sequence
  Synthetic
uagucucuuguucuuucuu

SEQ ID NO: 124532 - RNA, 20 nt, Artificial Sequence
  Synthetic
auagucucuuguucuuucuu

SEQ ID NO: 124533 - RNA, 21 nt, Artificial Sequence
  Synthetic
uauagucucuuguucuuucuu

SEQ ID NO: 124534 - RNA, 22 nt, Artificial Sequence
  Synthetic
cuauagucucuuguucuuucuu

SEQ ID NO: 124535 - RNA, 23 nt, Artificial Sequence
  Synthetic
ucuauagucucuuguucuuucuu

SEQ ID NO: 124536 - RNA, 24 nt, Artificial Sequence
  Synthetic
uucuauagucucuuguucuuucuu

SEQ ID NO: 124537 - RNA, 18 nt, Artificial Sequence
  Synthetic
accuggucagauuuucuu

SEQ ID NO: 124538 - RNA, 19 nt, Artificial Sequence
  Synthetic
aaccuggucagauuuucuu

SEQ ID NO: 124539 - RNA, 20 nt, Artificial Sequence
  Synthetic
uaaccuggucagauuuucuu

SEQ ID NO: 124540 - RNA, 21 nt, Artificial Sequence
  Synthetic
cuaaccuggucagauuuucuu

SEQ ID NO: 124541 - RNA, 22 nt, Artificial Sequence
  Synthetic
ccuaaccuggucagauuuucuu

SEQ ID NO: 124542 - RNA, 23 nt, Artificial Sequence
  Synthetic
cccuaaccuggucagauuuucuu

SEQ ID NO: 124543 - RNA, 24 nt, Artificial Sequence
  Synthetic
ucccuaaccuggucagauuuucuu

SEQ ID NO: 124544 - RNA, 21 nt, Artificial Sequence
  Synthetic
cuugguuucugugauuuucuu

SEQ ID NO: 124545 - RNA, 22 nt, Artificial Sequence
  Synthetic
ccuugguuucugugauuuucuu

SEQ ID NO: 124546 - RNA, 23 nt, Artificial Sequence
  Synthetic
accuugguuucugugauuuucuu

SEQ ID NO: 124547 - RNA, 24 nt, Artificial Sequence
  Synthetic
aaccuugguuucugugauuuucuu

SEQ ID NO: 124548 - RNA, 19 nt, Artificial Sequence
  Synthetic
agaguaaagcuauuuucuu

SEQ ID NO: 124549 - RNA, 20 nt, Artificial Sequence
  Synthetic
aagaguaaagcuauuuucuu

SEQ ID NO: 124550 - RNA, 21 nt, Artificial Sequence
  Synthetic
caagaguaaagcuauuuucuu

SEQ ID NO: 124551 - RNA, 22 nt, Artificial Sequence
  Synthetic
acaagaguaaagcuauuuucuu

SEQ ID NO: 124552 - RNA, 23 nt, Artificial Sequence
  Synthetic
aacaagaguaaagcuauuuucuu

SEQ ID NO: 124553 - RNA, 24 nt, Artificial Sequence
  Synthetic
aaacaagaguaaagcuauuuucuu

SEQ ID NO: 124554 - RNA, 21 nt, Artificial Sequence
  Synthetic
ugggcagagcagaguuuucuu

SEQ ID NO: 124555 - RNA, 22 nt, Artificial Sequence
  Synthetic
augggcagagcagaguuuucuu

SEQ ID NO: 124556 - RNA, 23 nt, Artificial Sequence
  Synthetic
caugggcagagcagaguuuucuu

SEQ ID NO: 124557 - RNA, 24 nt, Artificial Sequence
  Synthetic
ccaugggcagagcagaguuuucuu

SEQ ID NO: 124558 - RNA, 21 nt, Artificial Sequence
  Synthetic
ucuauaauuucagguuuucuu

SEQ ID NO: 124559 - RNA, 22 nt, Artificial Sequence
  Synthetic
cucuauaauuucagguuuucuu

SEQ ID NO: 124560 - RNA, 23 nt, Artificial Sequence
  Synthetic
ccucuauaauuucagguuuucuu

SEQ ID NO: 124561 - RNA, 24 nt, Artificial Sequence
  Synthetic
uccucuauaauuucagguuuucuu

SEQ ID NO: 124562 - RNA, 21 nt, Artificial Sequence
  Synthetic
auuuacuaaaauuuuuuucuu

SEQ ID NO: 124563 - RNA, 22 nt, Artificial Sequence
  Synthetic
aauuuacuaaaauuuuuuucuu

SEQ ID NO: 124564 - RNA, 23 nt, Artificial Sequence
  Synthetic
aaauuuacuaaaauuuuuuucuu

SEQ ID NO: 124565 - RNA, 24 nt, Artificial Sequence
  Synthetic
caaauuuacuaaaauuuuuuucuu

SEQ ID NO: 124566 - RNA, 19 nt, Artificial Sequence
  Synthetic
ugucuuuggaaaaaaaguu

SEQ ID NO: 124567 - RNA, 20 nt, Artificial Sequence
  Synthetic
augucuuuggaaaaaaaguu

SEQ ID NO: 124568 - RNA, 21 nt, Artificial Sequence
  Synthetic
aaugucuuuggaaaaaaaguu

SEQ ID NO: 124569 - RNA, 22 nt, Artificial Sequence
  Synthetic
aaaugucuuuggaaaaaaaguu

SEQ ID NO: 124570 - RNA, 23 nt, Artificial Sequence
  Synthetic
caaaugucuuuggaaaaaaaguu

SEQ ID NO: 124571 - RNA, 21 nt, Artificial Sequence
  Synthetic
uggggaagaauaggaaaaguu

SEQ ID NO: 124572 - RNA, 22 nt, Artificial Sequence
  Synthetic
cuggggaagaauaggaaaaguu

SEQ ID NO: 124573 - RNA, 23 nt, Artificial Sequence
  Synthetic
acuggggaagaauaggaaaaguu

SEQ ID NO: 124574 - RNA, 24 nt, Artificial Sequence
  Synthetic
aacuggggaagaauaggaaaaguu

SEQ ID NO: 124575 - RNA, 19 nt, Artificial Sequence
  Synthetic
agguaucacucacaaaguu

SEQ ID NO: 124576 - RNA, 20 nt, Artificial Sequence
  Synthetic
cagguaucacucacaaaguu

SEQ ID NO: 124577 - RNA, 21 nt, Artificial Sequence
  Synthetic
acagguaucacucacaaaguu

SEQ ID NO: 124578 - RNA, 22 nt, Artificial Sequence
  Synthetic
cacagguaucacucacaaaguu

SEQ ID NO: 124579 - RNA, 18 nt, Artificial Sequence
  Synthetic
ucagagauauuacaaguu

SEQ ID NO: 124580 - RNA, 19 nt, Artificial Sequence
  Synthetic
aucagagauauuacaaguu

SEQ ID NO: 124581 - RNA, 20 nt, Artificial Sequence
  Synthetic
uaucagagauauuacaaguu

SEQ ID NO: 124582 - RNA, 21 nt, Artificial Sequence
  Synthetic
auaucagagauauuacaaguu

SEQ ID NO: 124583 - RNA, 22 nt, Artificial Sequence
  Synthetic
uauaucagagauauuacaaguu

SEQ ID NO: 124584 - RNA, 24 nt, Artificial Sequence
  Synthetic
uguauaucagagauauuacaaguu

SEQ ID NO: 124585 - RNA, 18 nt, Artificial Sequence
  Synthetic
aauuuuacaucagaaguu

SEQ ID NO: 124586 - RNA, 19 nt, Artificial Sequence
  Synthetic
aaauuuuacaucagaaguu

SEQ ID NO: 124587 - RNA, 20 nt, Artificial Sequence
  Synthetic
aaaauuuuacaucagaaguu

SEQ ID NO: 124588 - RNA, 21 nt, Artificial Sequence
  Synthetic
uaaaauuuuacaucagaaguu

SEQ ID NO: 124589 - RNA, 22 nt, Artificial Sequence
  Synthetic
auaaaauuuuacaucagaaguu

SEQ ID NO: 124590 - RNA, 23 nt, Artificial Sequence
  Synthetic
aauaaaauuuuacaucagaaguu

SEQ ID NO: 124591 - RNA, 24 nt, Artificial Sequence
  Synthetic
uaauaaaauuuuacaucagaaguu

SEQ ID NO: 124592 - RNA, 18 nt, Artificial Sequence
  Synthetic
ccaagauccuuagaaguu

SEQ ID NO: 124593 - RNA, 19 nt, Artificial Sequence
  Synthetic
cccaagauccuuagaaguu

SEQ ID NO: 124594 - RNA, 20 nt, Artificial Sequence
  Synthetic
ucccaagauccuuagaaguu

SEQ ID NO: 124595 - RNA, 21 nt, Artificial Sequence
  Synthetic
cucccaagauccuuagaaguu

SEQ ID NO: 124596 - RNA, 22 nt, Artificial Sequence
  Synthetic
ccucccaagauccuuagaaguu

SEQ ID NO: 124597 - RNA, 23 nt, Artificial Sequence
  Synthetic
uccucccaagauccuuagaaguu

SEQ ID NO: 124598 - RNA, 24 nt, Artificial Sequence
  Synthetic
auccucccaagauccuuagaaguu

SEQ ID NO: 124599 - RNA, 18 nt, Artificial Sequence
  Synthetic
agcccuaggccggaaguu

SEQ ID NO: 124600 - RNA, 19 nt, Artificial Sequence
  Synthetic
aagcccuaggccggaaguu

SEQ ID NO: 124601 - RNA, 20 nt, Artificial Sequence
  Synthetic
uaagcccuaggccggaaguu

SEQ ID NO: 124602 - RNA, 21 nt, Artificial Sequence
  Synthetic
uuaagcccuaggccggaaguu

SEQ ID NO: 124603 - RNA, 23 nt, Artificial Sequence
  Synthetic
cguuaagcccuaggccggaaguu

SEQ ID NO: 124604 - RNA, 18 nt, Artificial Sequence
  Synthetic
ugaauggguauugaaguu

SEQ ID NO: 124605 - RNA, 20 nt, Artificial Sequence
  Synthetic
ugugaauggguauugaaguu

SEQ ID NO: 124606 - RNA, 21 nt, Artificial Sequence
  Synthetic
uugugaauggguauugaaguu

SEQ ID NO: 124607 - RNA, 22 nt, Artificial Sequence
  Synthetic
uuugugaauggguauugaaguu

SEQ ID NO: 124608 - RNA, 23 nt, Artificial Sequence
  Synthetic
uuuugugaauggguauugaaguu

SEQ ID NO: 124609 - RNA, 24 nt, Artificial Sequence
  Synthetic
auuuugugaauggguauugaaguu

SEQ ID NO: 124610 - RNA, 21 nt, Artificial Sequence
  Synthetic
auuucuagguauucauaaguu

SEQ ID NO: 124611 - RNA, 22 nt, Artificial Sequence
  Synthetic
uauuucuagguauucauaaguu

SEQ ID NO: 124612 - RNA, 23 nt, Artificial Sequence
  Synthetic
cuauuucuagguauucauaaguu

SEQ ID NO: 124613 - RNA, 24 nt, Artificial Sequence
  Synthetic
acuauuucuagguauucauaaguu

SEQ ID NO: 124614 - RNA, 18 nt, Artificial Sequence
  Synthetic
uaacacaaguuauaaguu

SEQ ID NO: 124615 - RNA, 19 nt, Artificial Sequence
  Synthetic
auaacacaaguuauaaguu

SEQ ID NO: 124616 - RNA, 20 nt, Artificial Sequence
  Synthetic
cauaacacaaguuauaaguu

SEQ ID NO: 124617 - RNA, 21 nt, Artificial Sequence
  Synthetic
acauaacacaaguuauaaguu

SEQ ID NO: 124618 - RNA, 23 nt, Artificial Sequence
  Synthetic
agacauaacacaaguuauaaguu

SEQ ID NO: 124619 - RNA, 24 nt, Artificial Sequence
  Synthetic
cagacauaacacaaguuauaaguu

SEQ ID NO: 124620 - RNA, 18 nt, Artificial Sequence
  Synthetic
acuuuaggacacuaaguu

SEQ ID NO: 124621 - RNA, 19 nt, Artificial Sequence
  Synthetic
uacuuuaggacacuaaguu

SEQ ID NO: 124622 - RNA, 20 nt, Artificial Sequence
  Synthetic
cuacuuuaggacacuaaguu

SEQ ID NO: 124623 - RNA, 18 nt, Artificial Sequence
  Synthetic
uuacacccuuccuaaguu

SEQ ID NO: 124624 - RNA, 20 nt, Artificial Sequence
  Synthetic
uguuacacccuuccuaaguu

SEQ ID NO: 124625 - RNA, 21 nt, Artificial Sequence
  Synthetic
auguuacacccuuccuaaguu

SEQ ID NO: 124626 - RNA, 22 nt, Artificial Sequence
  Synthetic
aauguuacacccuuccuaaguu

SEQ ID NO: 124627 - RNA, 24 nt, Artificial Sequence
  Synthetic
agaauguuacacccuuccuaaguu

SEQ ID NO: 124628 - RNA, 18 nt, Artificial Sequence
  Synthetic
auaucacaauacacaguu

SEQ ID NO: 124629 - RNA, 19 nt, Artificial Sequence
  Synthetic
uauaucacaauacacaguu

SEQ ID NO: 124630 - RNA, 20 nt, Artificial Sequence
  Synthetic
uuauaucacaauacacaguu

SEQ ID NO: 124631 - RNA, 21 nt, Artificial Sequence
  Synthetic
cuuauaucacaauacacaguu

SEQ ID NO: 124632 - RNA, 22 nt, Artificial Sequence
  Synthetic
acuuauaucacaauacacaguu

SEQ ID NO: 124633 - RNA, 23 nt, Artificial Sequence
  Synthetic
aacuuauaucacaauacacaguu

SEQ ID NO: 124634 - RNA, 18 nt, Artificial Sequence
  Synthetic
aauaaguggcccacaguu

SEQ ID NO: 124635 - RNA, 19 nt, Artificial Sequence
  Synthetic
aaauaaguggcccacaguu

SEQ ID NO: 124636 - RNA, 20 nt, Artificial Sequence
  Synthetic
uaaauaaguggcccacaguu

SEQ ID NO: 124637 - RNA, 21 nt, Artificial Sequence
  Synthetic
uuaaauaaguggcccacaguu

SEQ ID NO: 124638 - RNA, 22 nt, Artificial Sequence
  Synthetic
uuuaaauaaguggcccacaguu

SEQ ID NO: 124639 - RNA, 23 nt, Artificial Sequence
  Synthetic
auuuaaauaaguggcccacaguu

SEQ ID NO: 124640 - RNA, 21 nt, Artificial Sequence
  Synthetic
caaaaaaauguaugcacaguu

SEQ ID NO: 124641 - RNA, 22 nt, Artificial Sequence
  Synthetic
ccaaaaaaauguaugcacaguu

SEQ ID NO: 124642 - RNA, 24 nt, Artificial Sequence
  Synthetic
ugccaaaaaaauguaugcacaguu

SEQ ID NO: 124643 - RNA, 19 nt, Artificial Sequence
  Synthetic
agugaggcuugguacaguu

SEQ ID NO: 124644 - RNA, 23 nt, Artificial Sequence
  Synthetic
ugggagugaggcuugguacaguu

SEQ ID NO: 124645 - RNA, 24 nt, Artificial Sequence
  Synthetic
augggagugaggcuugguacaguu

SEQ ID NO: 124646 - RNA, 18 nt, Artificial Sequence
  Synthetic
uaucaccauuuaucaguu

SEQ ID NO: 124647 - RNA, 19 nt, Artificial Sequence
  Synthetic
auaucaccauuuaucaguu

SEQ ID NO: 124648 - RNA, 21 nt, Artificial Sequence
  Synthetic
agauaucaccauuuaucaguu

SEQ ID NO: 124649 - RNA, 22 nt, Artificial Sequence
  Synthetic
cagauaucaccauuuaucaguu

SEQ ID NO: 124650 - RNA, 23 nt, Artificial Sequence
  Synthetic
ccagauaucaccauuuaucaguu

SEQ ID NO: 124651 - RNA, 24 nt, Artificial Sequence
  Synthetic
uccagauaucaccauuuaucaguu

SEQ ID NO: 124652 - RNA, 18 nt, Artificial Sequence
  Synthetic
uauuuagcaaucucaguu

SEQ ID NO: 124653 - RNA, 19 nt, Artificial Sequence
  Synthetic
auauuuagcaaucucaguu

SEQ ID NO: 124654 - RNA, 20 nt, Artificial Sequence
  Synthetic
aauauuuagcaaucucaguu

SEQ ID NO: 124655 - RNA, 21 nt, Artificial Sequence
  Synthetic
caauauuuagcaaucucaguu

SEQ ID NO: 124656 - RNA, 22 nt, Artificial Sequence
  Synthetic
ccaauauuuagcaaucucaguu

SEQ ID NO: 124657 - RNA, 23 nt, Artificial Sequence
  Synthetic
cccaauauuuagcaaucucaguu

SEQ ID NO: 124658 - RNA, 24 nt, Artificial Sequence
  Synthetic
ccccaauauuuagcaaucucaguu

SEQ ID NO: 124659 - RNA, 18 nt, Artificial Sequence
  Synthetic
aauaacaucuguucaguu

SEQ ID NO: 124660 - RNA, 19 nt, Artificial Sequence
  Synthetic
aaauaacaucuguucaguu

SEQ ID NO: 124661 - RNA, 20 nt, Artificial Sequence
  Synthetic
caaauaacaucuguucaguu

SEQ ID NO: 124662 - RNA, 21 nt, Artificial Sequence
  Synthetic
ccaaauaacaucuguucaguu

SEQ ID NO: 124663 - RNA, 22 nt, Artificial Sequence
  Synthetic
uccaaauaacaucuguucaguu

SEQ ID NO: 124664 - RNA, 24 nt, Artificial Sequence
  Synthetic
uguccaaauaacaucuguucaguu

SEQ ID NO: 124665 - RNA, 21 nt, Artificial Sequence
  Synthetic
auauguagaaaaugaagaguu

SEQ ID NO: 124666 - RNA, 22 nt, Artificial Sequence
  Synthetic
uauauguagaaaaugaagaguu

SEQ ID NO: 124667 - RNA, 23 nt, Artificial Sequence
  Synthetic
uuauauguagaaaaugaagaguu

SEQ ID NO: 124668 - RNA, 24 nt, Artificial Sequence
  Synthetic
uuuauauguagaaaaugaagaguu

SEQ ID NO: 124669 - RNA, 18 nt, Artificial Sequence
  Synthetic
ugaaauucaugaagaguu

SEQ ID NO: 124670 - RNA, 19 nt, Artificial Sequence
  Synthetic
uugaaauucaugaagaguu

SEQ ID NO: 124671 - RNA, 20 nt, Artificial Sequence
  Synthetic
cuugaaauucaugaagaguu

SEQ ID NO: 124672 - RNA, 21 nt, Artificial Sequence
  Synthetic
ccuugaaauucaugaagaguu

SEQ ID NO: 124673 - RNA, 22 nt, Artificial Sequence
  Synthetic
cccuugaaauucaugaagaguu

SEQ ID NO: 124674 - RNA, 23 nt, Artificial Sequence
  Synthetic
ucccuugaaauucaugaagaguu

SEQ ID NO: 124675 - RNA, 24 nt, Artificial Sequence
  Synthetic
aucccuugaaauucaugaagaguu

SEQ ID NO: 124676 - RNA, 21 nt, Artificial Sequence
  Synthetic
caggaauaguugcuaagaguu

SEQ ID NO: 124677 - RNA, 22 nt, Artificial Sequence
  Synthetic
ccaggaauaguugcuaagaguu

SEQ ID NO: 124678 - RNA, 23 nt, Artificial Sequence
  Synthetic
accaggaauaguugcuaagaguu

SEQ ID NO: 124679 - RNA, 24 nt, Artificial Sequence
  Synthetic
caccaggaauaguugcuaagaguu

SEQ ID NO: 124680 - RNA, 19 nt, Artificial Sequence
  Synthetic
aguacauuuuagcagaguu

SEQ ID NO: 124681 - RNA, 20 nt, Artificial Sequence
  Synthetic
aaguacauuuuagcagaguu

SEQ ID NO: 124682 - RNA, 21 nt, Artificial Sequence
  Synthetic
aaaguacauuuuagcagaguu

SEQ ID NO: 124683 - RNA, 22 nt, Artificial Sequence
  Synthetic
uaaaguacauuuuagcagaguu

SEQ ID NO: 124684 - RNA, 23 nt, Artificial Sequence
  Synthetic
uuaaaguacauuuuagcagaguu

SEQ ID NO: 124685 - RNA, 24 nt, Artificial Sequence
  Synthetic
cuuaaaguacauuuuagcagaguu

SEQ ID NO: 124686 - RNA, 18 nt, Artificial Sequence
  Synthetic
aauauagaaaucagaguu

SEQ ID NO: 124687 - RNA, 19 nt, Artificial Sequence
  Synthetic
aaauauagaaaucagaguu

SEQ ID NO: 124688 - RNA, 20 nt, Artificial Sequence
  Synthetic
caaauauagaaaucagaguu

SEQ ID NO: 124689 - RNA, 21 nt, Artificial Sequence
  Synthetic
acaaauauagaaaucagaguu

SEQ ID NO: 124690 - RNA, 22 nt, Artificial Sequence
  Synthetic
aacaaauauagaaaucagaguu

SEQ ID NO: 124691 - RNA, 23 nt, Artificial Sequence
  Synthetic
aaacaaauauagaaaucagaguu

SEQ ID NO: 124692 - RNA, 24 nt, Artificial Sequence
  Synthetic
aaaacaaauauagaaaucagaguu

SEQ ID NO: 124693 - RNA, 18 nt, Artificial Sequence
  Synthetic
aaugauagucauagaguu

SEQ ID NO: 124694 - RNA, 21 nt, Artificial Sequence
  Synthetic
aggaaugauagucauagaguu

SEQ ID NO: 124695 - RNA, 22 nt, Artificial Sequence
  Synthetic
uaggaaugauagucauagaguu

SEQ ID NO: 124696 - RNA, 24 nt, Artificial Sequence
  Synthetic
aguaggaaugauagucauagaguu

SEQ ID NO: 124697 - RNA, 19 nt, Artificial Sequence
  Synthetic
aggaauucacaaaggaguu

SEQ ID NO: 124698 - RNA, 21 nt, Artificial Sequence
  Synthetic
ugaggaauucacaaaggaguu

SEQ ID NO: 124699 - RNA, 22 nt, Artificial Sequence
  Synthetic
augaggaauucacaaaggaguu

SEQ ID NO: 124700 - RNA, 24 nt, Artificial Sequence
  Synthetic
agaugaggaauucacaaaggaguu

SEQ ID NO: 124701 - RNA, 18 nt, Artificial Sequence
  Synthetic
aaucaaggcauaggaguu

SEQ ID NO: 124702 - RNA, 19 nt, Artificial Sequence
  Synthetic
uaaucaaggcauaggaguu

SEQ ID NO: 124703 - RNA, 20 nt, Artificial Sequence
  Synthetic
auaaucaaggcauaggaguu

SEQ ID NO: 124704 - RNA, 21 nt, Artificial Sequence
  Synthetic
cauaaucaaggcauaggaguu

SEQ ID NO: 124705 - RNA, 22 nt, Artificial Sequence
  Synthetic
acauaaucaaggcauaggaguu

SEQ ID NO: 124706 - RNA, 23 nt, Artificial Sequence
  Synthetic
cacauaaucaaggcauaggaguu

SEQ ID NO: 124707 - RNA, 24 nt, Artificial Sequence
  Synthetic
ucacauaaucaaggcauaggaguu

SEQ ID NO: 124708 - RNA, 18 nt, Artificial Sequence
  Synthetic
caugguagccccggaguu

SEQ ID NO: 124709 - RNA, 20 nt, Artificial Sequence
  Synthetic
ugcaugguagccccggaguu

SEQ ID NO: 124710 - RNA, 21 nt, Artificial Sequence
  Synthetic
cugcaugguagccccggaguu

SEQ ID NO: 124711 - RNA, 23 nt, Artificial Sequence
  Synthetic
ugcugcaugguagccccggaguu

SEQ ID NO: 124712 - RNA, 24 nt, Artificial Sequence
  Synthetic
uugcugcaugguagccccggaguu

SEQ ID NO: 124713 - RNA, 18 nt, Artificial Sequence
  Synthetic
uaagagcguaugggaguu

SEQ ID NO: 124714 - RNA, 19 nt, Artificial Sequence
  Synthetic
auaagagcguaugggaguu

SEQ ID NO: 124715 - RNA, 20 nt, Artificial Sequence
  Synthetic
cauaagagcguaugggaguu

SEQ ID NO: 124716 - RNA, 21 nt, Artificial Sequence
  Synthetic
ucauaagagcguaugggaguu

SEQ ID NO: 124717 - RNA, 22 nt, Artificial Sequence
  Synthetic
aucauaagagcguaugggaguu

SEQ ID NO: 124718 - RNA, 23 nt, Artificial Sequence
  Synthetic
uaucauaagagcguaugggaguu

SEQ ID NO: 124719 - RNA, 24 nt, Artificial Sequence
  Synthetic
auaucauaagagcguaugggaguu

SEQ ID NO: 124720 - RNA, 18 nt, Artificial Sequence
  Synthetic
uucugcuuggugggaguu

SEQ ID NO: 124721 - RNA, 19 nt, Artificial Sequence
  Synthetic
cuucugcuuggugggaguu

SEQ ID NO: 124722 - RNA, 20 nt, Artificial Sequence
  Synthetic
ucuucugcuuggugggaguu

SEQ ID NO: 124723 - RNA, 21 nt, Artificial Sequence
  Synthetic
uucuucugcuuggugggaguu

SEQ ID NO: 124724 - RNA, 22 nt, Artificial Sequence
  Synthetic
uuucuucugcuuggugggaguu

SEQ ID NO: 124725 - RNA, 24 nt, Artificial Sequence
  Synthetic
aguuucuucugcuuggugggaguu

SEQ ID NO: 124726 - RNA, 18 nt, Artificial Sequence
  Synthetic
uucaguggguuuggaguu

SEQ ID NO: 124727 - RNA, 19 nt, Artificial Sequence
  Synthetic
cuucaguggguuuggaguu

SEQ ID NO: 124728 - RNA, 20 nt, Artificial Sequence
  Synthetic
ucuucaguggguuuggaguu

SEQ ID NO: 124729 - RNA, 21 nt, Artificial Sequence
  Synthetic
cucuucaguggguuuggaguu

SEQ ID NO: 124730 - RNA, 23 nt, Artificial Sequence
  Synthetic
agcucuucaguggguuuggaguu

SEQ ID NO: 124731 - RNA, 21 nt, Artificial Sequence
  Synthetic
ugggacauaaacucaugaguu

SEQ ID NO: 124732 - RNA, 22 nt, Artificial Sequence
  Synthetic
augggacauaaacucaugaguu

SEQ ID NO: 124733 - RNA, 23 nt, Artificial Sequence
  Synthetic
uaugggacauaaacucaugaguu

SEQ ID NO: 124734 - RNA, 24 nt, Artificial Sequence
  Synthetic
auaugggacauaaacucaugaguu

SEQ ID NO: 124735 - RNA, 21 nt, Artificial Sequence
  Synthetic
cagcaggugaaaauaugaguu

SEQ ID NO: 124736 - RNA, 22 nt, Artificial Sequence
  Synthetic
ucagcaggugaaaauaugaguu

SEQ ID NO: 124737 - RNA, 24 nt, Artificial Sequence
  Synthetic
ugucagcaggugaaaauaugaguu

SEQ ID NO: 124738 - RNA, 18 nt, Artificial Sequence
  Synthetic
uuacauugcaauugaguu

SEQ ID NO: 124739 - RNA, 19 nt, Artificial Sequence
  Synthetic
uuuacauugcaauugaguu

SEQ ID NO: 124740 - RNA, 20 nt, Artificial Sequence
  Synthetic
auuuacauugcaauugaguu

SEQ ID NO: 124741 - RNA, 21 nt, Artificial Sequence
  Synthetic
cauuuacauugcaauugaguu

SEQ ID NO: 124742 - RNA, 22 nt, Artificial Sequence
  Synthetic
ucauuuacauugcaauugaguu

SEQ ID NO: 124743 - RNA, 24 nt, Artificial Sequence
  Synthetic
agucauuuacauugcaauugaguu

SEQ ID NO: 124744 - RNA, 19 nt, Artificial Sequence
  Synthetic
agccuaugggaauugaguu

SEQ ID NO: 124745 - RNA, 21 nt, Artificial Sequence
  Synthetic
ugagccuaugggaauugaguu

SEQ ID NO: 124746 - RNA, 22 nt, Artificial Sequence
  Synthetic
uugagccuaugggaauugaguu

SEQ ID NO: 124747 - RNA, 23 nt, Artificial Sequence
  Synthetic
uuugagccuaugggaauugaguu

SEQ ID NO: 124748 - RNA, 24 nt, Artificial Sequence
  Synthetic
cuuugagccuaugggaauugaguu

SEQ ID NO: 124749 - RNA, 18 nt, Artificial Sequence
  Synthetic
aauauaacauguugaguu

SEQ ID NO: 124750 - RNA, 21 nt, Artificial Sequence
  Synthetic
aggaauauaacauguugaguu

SEQ ID NO: 124751 - RNA, 23 nt, Artificial Sequence
  Synthetic
agaggaauauaacauguugaguu

SEQ ID NO: 124752 - RNA, 18 nt, Artificial Sequence
  Synthetic
uaauaaugcucaauaguu

SEQ ID NO: 124753 - RNA, 19 nt, Artificial Sequence
  Synthetic
cuaauaaugcucaauaguu

SEQ ID NO: 124754 - RNA, 20 nt, Artificial Sequence
  Synthetic
acuaauaaugcucaauaguu

SEQ ID NO: 124755 - RNA, 22 nt, Artificial Sequence
  Synthetic
agacuaauaaugcucaauaguu

SEQ ID NO: 124756 - RNA, 18 nt, Artificial Sequence
  Synthetic
auggauggcuccauaguu

SEQ ID NO: 124757 - RNA, 19 nt, Artificial Sequence
  Synthetic
cauggauggcuccauaguu

SEQ ID NO: 124758 - RNA, 22 nt, Artificial Sequence
  Synthetic
aggcauggauggcuccauaguu

SEQ ID NO: 124759 - RNA, 23 nt, Artificial Sequence
  Synthetic
caggcauggauggcuccauaguu

SEQ ID NO: 124760 - RNA, 24 nt, Artificial Sequence
  Synthetic
ucaggcauggauggcuccauaguu

SEQ ID NO: 124761 - RNA, 18 nt, Artificial Sequence
  Synthetic
cuauacaugugcauaguu

SEQ ID NO: 124762 - RNA, 19 nt, Artificial Sequence
  Synthetic
acuauacaugugcauaguu

SEQ ID NO: 124763 - RNA, 20 nt, Artificial Sequence
  Synthetic
aacuauacaugugcauaguu

SEQ ID NO: 124764 - RNA, 21 nt, Artificial Sequence
  Synthetic
aaacuauacaugugcauaguu

SEQ ID NO: 124765 - RNA, 24 nt, Artificial Sequence
  Synthetic
uggaaacuauacaugugcauaguu

SEQ ID NO: 124766 - RNA, 18 nt, Artificial Sequence
  Synthetic
uuuuucuacauacuaguu

SEQ ID NO: 124767 - RNA, 19 nt, Artificial Sequence
  Synthetic
auuuuucuacauacuaguu

SEQ ID NO: 124768 - RNA, 20 nt, Artificial Sequence
  Synthetic
uauuuuucuacauacuaguu

SEQ ID NO: 124769 - RNA, 23 nt, Artificial Sequence
  Synthetic
ugguauuuuucuacauacuaguu

SEQ ID NO: 124770 - RNA, 24 nt, Artificial Sequence
  Synthetic
augguauuuuucuacauacuaguu

SEQ ID NO: 124771 - RNA, 18 nt, Artificial Sequence
  Synthetic
ucccguauaauccuaguu

SEQ ID NO: 124772 - RNA, 19 nt, Artificial Sequence
  Synthetic
aucccguauaauccuaguu

SEQ ID NO: 124773 - RNA, 20 nt, Artificial Sequence
  Synthetic
caucccguauaauccuaguu

SEQ ID NO: 124774 - RNA, 21 nt, Artificial Sequence
  Synthetic
acaucccguauaauccuaguu

SEQ ID NO: 124775 - RNA, 22 nt, Artificial Sequence
  Synthetic
uacaucccguauaauccuaguu

SEQ ID NO: 124776 - RNA, 23 nt, Artificial Sequence
  Synthetic
uuacaucccguauaauccuaguu

SEQ ID NO: 124777 - RNA, 24 nt, Artificial Sequence
  Synthetic
auuacaucccguauaauccuaguu

SEQ ID NO: 124778 - RNA, 18 nt, Artificial Sequence
  Synthetic
uugaucucacuccuaguu

SEQ ID NO: 124779 - RNA, 19 nt, Artificial Sequence
  Synthetic
uuugaucucacuccuaguu

SEQ ID NO: 124780 - RNA, 20 nt, Artificial Sequence
  Synthetic
auuugaucucacuccuaguu

SEQ ID NO: 124781 - RNA, 21 nt, Artificial Sequence
  Synthetic
cauuugaucucacuccuaguu

SEQ ID NO: 124782 - RNA, 22 nt, Artificial Sequence
  Synthetic
ucauuugaucucacuccuaguu

SEQ ID NO: 124783 - RNA, 23 nt, Artificial Sequence
  Synthetic
uucauuugaucucacuccuaguu

SEQ ID NO: 124784 - RNA, 24 nt, Artificial Sequence
  Synthetic
cuucauuugaucucacuccuaguu

SEQ ID NO: 124785 - RNA, 18 nt, Artificial Sequence
  Synthetic
uuguacauguuccuaguu

SEQ ID NO: 124786 - RNA, 19 nt, Artificial Sequence
  Synthetic
cuuguacauguuccuaguu

SEQ ID NO: 124787 - RNA, 20 nt, Artificial Sequence
  Synthetic
acuuguacauguuccuaguu

SEQ ID NO: 124788 - RNA, 21 nt, Artificial Sequence
  Synthetic
cacuuguacauguuccuaguu

SEQ ID NO: 124789 - RNA, 22 nt, Artificial Sequence
  Synthetic
ccacuuguacauguuccuaguu

SEQ ID NO: 124790 - RNA, 19 nt, Artificial Sequence
  Synthetic
aggauagcugauaguaguu

SEQ ID NO: 124791 - RNA, 21 nt, Artificial Sequence
  Synthetic
agaggauagcugauaguaguu

SEQ ID NO: 124792 - RNA, 22 nt, Artificial Sequence
  Synthetic
uagaggauagcugauaguaguu

SEQ ID NO: 124793 - RNA, 23 nt, Artificial Sequence
  Synthetic
cuagaggauagcugauaguaguu

SEQ ID NO: 124794 - RNA, 24 nt, Artificial Sequence
  Synthetic
ucuagaggauagcugauaguaguu

SEQ ID NO: 124795 - RNA, 18 nt, Artificial Sequence
  Synthetic
uuauuggacuauguaguu

SEQ ID NO: 124796 - RNA, 19 nt, Artificial Sequence
  Synthetic
auuauuggacuauguaguu

SEQ ID NO: 124797 - RNA, 20 nt, Artificial Sequence
  Synthetic
aauuauuggacuauguaguu

SEQ ID NO: 124798 - RNA, 21 nt, Artificial Sequence
  Synthetic
aaauuauuggacuauguaguu

SEQ ID NO: 124799 - RNA, 22 nt, Artificial Sequence
  Synthetic
aaaauuauuggacuauguaguu

SEQ ID NO: 124800 - RNA, 23 nt, Artificial Sequence
  Synthetic
caaaauuauuggacuauguaguu

SEQ ID NO: 124801 - RNA, 19 nt, Artificial Sequence
  Synthetic
ugccucaagaacuuuaguu

SEQ ID NO: 124802 - RNA, 20 nt, Artificial Sequence
  Synthetic
uugccucaagaacuuuaguu

SEQ ID NO: 124803 - RNA, 21 nt, Artificial Sequence
  Synthetic
uuugccucaagaacuuuaguu

SEQ ID NO: 124804 - RNA, 22 nt, Artificial Sequence
  Synthetic
cuuugccucaagaacuuuaguu

SEQ ID NO: 124805 - RNA, 18 nt, Artificial Sequence
  Synthetic
aacuugaguuuuaacguu

SEQ ID NO: 124806 - RNA, 19 nt, Artificial Sequence
  Synthetic
aaacuugaguuuuaacguu

SEQ ID NO: 124807 - RNA, 20 nt, Artificial Sequence
  Synthetic
uaaacuugaguuuuaacguu

SEQ ID NO: 124808 - RNA, 21 nt, Artificial Sequence
  Synthetic
cuaaacuugaguuuuaacguu

SEQ ID NO: 124809 - RNA, 22 nt, Artificial Sequence
  Synthetic
acuaaacuugaguuuuaacguu

SEQ ID NO: 124810 - RNA, 23 nt, Artificial Sequence
  Synthetic
aacuaaacuugaguuuuaacguu

SEQ ID NO: 124811 - RNA, 18 nt, Artificial Sequence
  Synthetic
cccacuuccaaacacguu

SEQ ID NO: 124812 - RNA, 19 nt, Artificial Sequence
  Synthetic
ccccacuuccaaacacguu

SEQ ID NO: 124813 - RNA, 22 nt, Artificial Sequence
  Synthetic
uggccccacuuccaaacacguu

SEQ ID NO: 124814 - RNA, 23 nt, Artificial Sequence
  Synthetic
uuggccccacuuccaaacacguu

SEQ ID NO: 124815 - RNA, 18 nt, Artificial Sequence
  Synthetic
aauauuugaggccacguu

SEQ ID NO: 124816 - RNA, 20 nt, Artificial Sequence
  Synthetic
agaauauuugaggccacguu

SEQ ID NO: 124817 - RNA, 21 nt, Artificial Sequence
  Synthetic
uagaauauuugaggccacguu

SEQ ID NO: 124818 - RNA, 22 nt, Artificial Sequence
  Synthetic
uuagaauauuugaggccacguu

SEQ ID NO: 124819 - RNA, 23 nt, Artificial Sequence
  Synthetic
auuagaauauuugaggccacguu

SEQ ID NO: 124820 - RNA, 24 nt, Artificial Sequence
  Synthetic
cauuagaauauuugaggccacguu

SEQ ID NO: 124821 - RNA, 18 nt, Artificial Sequence
  Synthetic
ucaggcuucaaauacguu

SEQ ID NO: 124822 - RNA, 19 nt, Artificial Sequence
  Synthetic
cucaggcuucaaauacguu

SEQ ID NO: 124823 - RNA, 20 nt, Artificial Sequence
  Synthetic
ucucaggcuucaaauacguu

SEQ ID NO: 124824 - RNA, 21 nt, Artificial Sequence
  Synthetic
uucucaggcuucaaauacguu

SEQ ID NO: 124825 - RNA, 23 nt, Artificial Sequence
  Synthetic
uguucucaggcuucaaauacguu

SEQ ID NO: 124826 - RNA, 24 nt, Artificial Sequence
  Synthetic
uuguucucaggcuucaaauacguu

SEQ ID NO: 124827 - RNA, 18 nt, Artificial Sequence
  Synthetic
agcuggcugggcuccguu

SEQ ID NO: 124828 - RNA, 19 nt, Artificial Sequence
  Synthetic
uagcuggcugggcuccguu

SEQ ID NO: 124829 - RNA, 20 nt, Artificial Sequence
  Synthetic
uuagcuggcugggcuccguu

SEQ ID NO: 124830 - RNA, 19 nt, Artificial Sequence
  Synthetic
agucaaaaaaggaagcguu

SEQ ID NO: 124831 - RNA, 20 nt, Artificial Sequence
  Synthetic
cagucaaaaaaggaagcguu

SEQ ID NO: 124832 - RNA, 21 nt, Artificial Sequence
  Synthetic
acagucaaaaaaggaagcguu

SEQ ID NO: 124833 - RNA, 22 nt, Artificial Sequence
  Synthetic
aacagucaaaaaaggaagcguu

SEQ ID NO: 124834 - RNA, 23 nt, Artificial Sequence
  Synthetic
uaacagucaaaaaaggaagcguu

SEQ ID NO: 124835 - RNA, 24 nt, Artificial Sequence
  Synthetic
auaacagucaaaaaaggaagcguu

SEQ ID NO: 124836 - RNA, 18 nt, Artificial Sequence
  Synthetic
uccuguggugugagcguu

SEQ ID NO: 124837 - RNA, 19 nt, Artificial Sequence
  Synthetic
auccuguggugugagcguu

SEQ ID NO: 124838 - RNA, 21 nt, Artificial Sequence
  Synthetic
agauccuguggugugagcguu

SEQ ID NO: 124839 - RNA, 23 nt, Artificial Sequence
  Synthetic
agagauccuguggugugagcguu

SEQ ID NO: 124840 - RNA, 19 nt, Artificial Sequence
  Synthetic
agagagaaauauuugcguu

SEQ ID NO: 124841 - RNA, 20 nt, Artificial Sequence
  Synthetic
cagagagaaauauuugcguu

SEQ ID NO: 124842 - RNA, 21 nt, Artificial Sequence
  Synthetic
ucagagagaaauauuugcguu

SEQ ID NO: 124843 - RNA, 23 nt, Artificial Sequence
  Synthetic
ugucagagagaaauauuugcguu

SEQ ID NO: 124844 - RNA, 19 nt, Artificial Sequence
  Synthetic
agguaaauaccuuugcguu

SEQ ID NO: 124845 - RNA, 20 nt, Artificial Sequence
  Synthetic
aagguaaauaccuuugcguu

SEQ ID NO: 124846 - RNA, 21 nt, Artificial Sequence
  Synthetic
uaagguaaauaccuuugcguu

SEQ ID NO: 124847 - RNA, 22 nt, Artificial Sequence
  Synthetic
auaagguaaauaccuuugcguu

SEQ ID NO: 124848 - RNA, 23 nt, Artificial Sequence
  Synthetic
cauaagguaaauaccuuugcguu

SEQ ID NO: 124849 - RNA, 24 nt, Artificial Sequence
  Synthetic
acauaagguaaauaccuuugcguu

SEQ ID NO: 124850 - RNA, 18 nt, Artificial Sequence
  Synthetic
aaagaauaagaauucguu

SEQ ID NO: 124851 - RNA, 20 nt, Artificial Sequence
  Synthetic
agaaagaauaagaauucguu

SEQ ID NO: 124852 - RNA, 21 nt, Artificial Sequence
  Synthetic
aagaaagaauaagaauucguu

SEQ ID NO: 124853 - RNA, 22 nt, Artificial Sequence
  Synthetic
aaagaaagaauaagaauucguu

SEQ ID NO: 124854 - RNA, 23 nt, Artificial Sequence
  Synthetic
uaaagaaagaauaagaauucguu

SEQ ID NO: 124855 - RNA, 24 nt, Artificial Sequence
  Synthetic
uuaaagaaagaauaagaauucguu

SEQ ID NO: 124856 - RNA, 18 nt, Artificial Sequence
  Synthetic
aagaaaauauguuucguu

SEQ ID NO: 124857 - RNA, 19 nt, Artificial Sequence
  Synthetic
caagaaaauauguuucguu

SEQ ID NO: 124858 - RNA, 20 nt, Artificial Sequence
  Synthetic
ccaagaaaauauguuucguu

SEQ ID NO: 124859 - RNA, 21 nt, Artificial Sequence
  Synthetic
cccaagaaaauauguuucguu

SEQ ID NO: 124860 - RNA, 24 nt, Artificial Sequence
  Synthetic
aggcccaagaaaauauguuucguu

SEQ ID NO: 124861 - RNA, 19 nt, Artificial Sequence
  Synthetic
ugugaauaucuaaaagguu

SEQ ID NO: 124862 - RNA, 20 nt, Artificial Sequence
  Synthetic
augugaauaucuaaaagguu

SEQ ID NO: 124863 - RNA, 21 nt, Artificial Sequence
  Synthetic
caugugaauaucuaaaagguu

SEQ ID NO: 124864 - RNA, 22 nt, Artificial Sequence
  Synthetic
ucaugugaauaucuaaaagguu

SEQ ID NO: 124865 - RNA, 23 nt, Artificial Sequence
  Synthetic
uucaugugaauaucuaaaagguu

SEQ ID NO: 124866 - RNA, 24 nt, Artificial Sequence
  Synthetic
auucaugugaauaucuaaaagguu

SEQ ID NO: 124867 - RNA, 21 nt, Artificial Sequence
  Synthetic
uggggcagaagggagaagguu

SEQ ID NO: 124868 - RNA, 22 nt, Artificial Sequence
  Synthetic
uuggggcagaagggagaagguu

SEQ ID NO: 124869 - RNA, 23 nt, Artificial Sequence
  Synthetic
auuggggcagaagggagaagguu

SEQ ID NO: 124870 - RNA, 18 nt, Artificial Sequence
  Synthetic
aaacaguugauccagguu

SEQ ID NO: 124871 - RNA, 19 nt, Artificial Sequence
  Synthetic
aaaacaguugauccagguu

SEQ ID NO: 124872 - RNA, 24 nt, Artificial Sequence
  Synthetic
uggggaaaacaguugauccagguu

SEQ ID NO: 124873 - RNA, 18 nt, Artificial Sequence
  Synthetic
auucuaaacaagcagguu

SEQ ID NO: 124874 - RNA, 19 nt, Artificial Sequence
  Synthetic
aauucuaaacaagcagguu

SEQ ID NO: 124875 - RNA, 20 nt, Artificial Sequence
  Synthetic
aaauucuaaacaagcagguu

SEQ ID NO: 124876 - RNA, 21 nt, Artificial Sequence
  Synthetic
aaaauucuaaacaagcagguu

SEQ ID NO: 124877 - RNA, 22 nt, Artificial Sequence
  Synthetic
uaaaauucuaaacaagcagguu

SEQ ID NO: 124878 - RNA, 23 nt, Artificial Sequence
  Synthetic
cuaaaauucuaaacaagcagguu

SEQ ID NO: 124879 - RNA, 24 nt, Artificial Sequence
  Synthetic
ucuaaaauucuaaacaagcagguu

SEQ ID NO: 124880 - RNA, 18 nt, Artificial Sequence
  Synthetic
caggugaacaagcagguu

SEQ ID NO: 124881 - RNA, 19 nt, Artificial Sequence
  Synthetic
ucaggugaacaagcagguu

SEQ ID NO: 124882 - RNA, 20 nt, Artificial Sequence
  Synthetic
cucaggugaacaagcagguu

SEQ ID NO: 124883 - RNA, 22 nt, Artificial Sequence
  Synthetic
ugcucaggugaacaagcagguu

SEQ ID NO: 124884 - RNA, 23 nt, Artificial Sequence
  Synthetic
augcucaggugaacaagcagguu

SEQ ID NO: 124885 - RNA, 24 nt, Artificial Sequence
  Synthetic
uaugcucaggugaacaagcagguu

SEQ ID NO: 124886 - RNA, 19 nt, Artificial Sequence
  Synthetic
agccauugaacugcagguu

SEQ ID NO: 124887 - RNA, 20 nt, Artificial Sequence
  Synthetic
uagccauugaacugcagguu

SEQ ID NO: 124888 - RNA, 21 nt, Artificial Sequence
  Synthetic
uuagccauugaacugcagguu

SEQ ID NO: 124889 - RNA, 22 nt, Artificial Sequence
  Synthetic
auuagccauugaacugcagguu

SEQ ID NO: 124890 - RNA, 23 nt, Artificial Sequence
  Synthetic
uauuagccauugaacugcagguu

SEQ ID NO: 124891 - RNA, 24 nt, Artificial Sequence
  Synthetic
auauuagccauugaacugcagguu

SEQ ID NO: 124892 - RNA, 18 nt, Artificial Sequence
  Synthetic
aguauagaaagggagguu

SEQ ID NO: 124893 - RNA, 20 nt, Artificial Sequence
  Synthetic
ugaguauagaaagggagguu

SEQ ID NO: 124894 - RNA, 21 nt, Artificial Sequence
  Synthetic
cugaguauagaaagggagguu

SEQ ID NO: 124895 - RNA, 23 nt, Artificial Sequence
  Synthetic
agcugaguauagaaagggagguu

SEQ ID NO: 124896 - RNA, 24 nt, Artificial Sequence
  Synthetic
uagcugaguauagaaagggagguu

SEQ ID NO: 124897 - RNA, 21 nt, Artificial Sequence
  Synthetic
uuauugggugauacugagguu

SEQ ID NO: 124898 - RNA, 22 nt, Artificial Sequence
  Synthetic
uuuauugggugauacugagguu

SEQ ID NO: 124899 - RNA, 23 nt, Artificial Sequence
  Synthetic
auuuauugggugauacugagguu

SEQ ID NO: 124900 - RNA, 24 nt, Artificial Sequence
  Synthetic
uauuuauugggugauacugagguu

SEQ ID NO: 124901 - RNA, 18 nt, Artificial Sequence
  Synthetic
acccagguaggugagguu

SEQ ID NO: 124902 - RNA, 21 nt, Artificial Sequence
  Synthetic
aggacccagguaggugagguu

SEQ ID NO: 124903 - RNA, 23 nt, Artificial Sequence
  Synthetic
ugaggacccagguaggugagguu

SEQ ID NO: 124904 - RNA, 24 nt, Artificial Sequence
  Synthetic
cugaggacccagguaggugagguu

SEQ ID NO: 124905 - RNA, 18 nt, Artificial Sequence
  Synthetic
aaaaaucaguuugagguu

SEQ ID NO: 124906 - RNA, 19 nt, Artificial Sequence
  Synthetic
uaaaaaucaguuugagguu

SEQ ID NO: 124907 - RNA, 20 nt, Artificial Sequence
  Synthetic
uuaaaaaucaguuugagguu

SEQ ID NO: 124908 - RNA, 21 nt, Artificial Sequence
  Synthetic
uuuaaaaaucaguuugagguu

SEQ ID NO: 124909 - RNA, 22 nt, Artificial Sequence
  Synthetic
uuuuaaaaaucaguuugagguu

SEQ ID NO: 124910 - RNA, 23 nt, Artificial Sequence
  Synthetic
uuuuuaaaaaucaguuugagguu

SEQ ID NO: 124911 - RNA, 24 nt, Artificial Sequence
  Synthetic
cuuuuuaaaaaucaguuugagguu

SEQ ID NO: 124912 - RNA, 18 nt, Artificial Sequence
  Synthetic
aauauccaucaauagguu

SEQ ID NO: 124913 - RNA, 19 nt, Artificial Sequence
  Synthetic
uaauauccaucaauagguu

SEQ ID NO: 124914 - RNA, 20 nt, Artificial Sequence
  Synthetic
cuaauauccaucaauagguu

SEQ ID NO: 124915 - RNA, 21 nt, Artificial Sequence
  Synthetic
acuaauauccaucaauagguu

SEQ ID NO: 124916 - RNA, 22 nt, Artificial Sequence
  Synthetic
uacuaauauccaucaauagguu

SEQ ID NO: 124917 - RNA, 23 nt, Artificial Sequence
  Synthetic
uuacuaauauccaucaauagguu

SEQ ID NO: 124918 - RNA, 19 nt, Artificial Sequence
  Synthetic
ugaauagagaaacuagguu

SEQ ID NO: 124919 - RNA, 20 nt, Artificial Sequence
  Synthetic
cugaauagagaaacuagguu

SEQ ID NO: 124920 - RNA, 21 nt, Artificial Sequence
  Synthetic
ccugaauagagaaacuagguu

SEQ ID NO: 124921 - RNA, 22 nt, Artificial Sequence
  Synthetic
uccugaauagagaaacuagguu

SEQ ID NO: 124922 - RNA, 23 nt, Artificial Sequence
  Synthetic
cuccugaauagagaaacuagguu

SEQ ID NO: 124923 - RNA, 24 nt, Artificial Sequence
  Synthetic
acuccugaauagagaaacuagguu

SEQ ID NO: 124924 - RNA, 18 nt, Artificial Sequence
  Synthetic
uuaagcaaaguaacgguu

SEQ ID NO: 124925 - RNA, 19 nt, Artificial Sequence
  Synthetic
auuaagcaaaguaacgguu

SEQ ID NO: 124926 - RNA, 20 nt, Artificial Sequence
  Synthetic
cauuaagcaaaguaacgguu

SEQ ID NO: 124927 - RNA, 22 nt, Artificial Sequence
  Synthetic
agcauuaagcaaaguaacgguu

SEQ ID NO: 124928 - RNA, 24 nt, Artificial Sequence
  Synthetic
agagcauuaagcaaaguaacgguu

SEQ ID NO: 124929 - RNA, 19 nt, Artificial Sequence
  Synthetic
aggugcaggagauccgguu

SEQ ID NO: 124930 - RNA, 20 nt, Artificial Sequence
  Synthetic
aaggugcaggagauccgguu

SEQ ID NO: 124931 - RNA, 22 nt, Artificial Sequence
  Synthetic
ugaaggugcaggagauccgguu

SEQ ID NO: 124932 - RNA, 23 nt, Artificial Sequence
  Synthetic
uugaaggugcaggagauccgguu

SEQ ID NO: 124933 - RNA, 24 nt, Artificial Sequence
  Synthetic
auugaaggugcaggagauccgguu

SEQ ID NO: 124934 - RNA, 19 nt, Artificial Sequence
  Synthetic
uguuauaauguccucgguu

SEQ ID NO: 124935 - RNA, 20 nt, Artificial Sequence
  Synthetic
auguuauaauguccucgguu

SEQ ID NO: 124936 - RNA, 21 nt, Artificial Sequence
  Synthetic
aauguuauaauguccucgguu

SEQ ID NO: 124937 - RNA, 22 nt, Artificial Sequence
  Synthetic
aaauguuauaauguccucgguu

SEQ ID NO: 124938 - RNA, 24 nt, Artificial Sequence
  Synthetic
ugaaauguuauaauguccucgguu

SEQ ID NO: 124939 - RNA, 20 nt, Artificial Sequence
  Synthetic
agggaggauuaugaaggguu

SEQ ID NO: 124940 - RNA, 21 nt, Artificial Sequence
  Synthetic
aagggaggauuaugaaggguu

SEQ ID NO: 124941 - RNA, 22 nt, Artificial Sequence
  Synthetic
aaagggaggauuaugaaggguu

SEQ ID NO: 124942 - RNA, 23 nt, Artificial Sequence
  Synthetic
caaagggaggauuaugaaggguu

SEQ ID NO: 124943 - RNA, 18 nt, Artificial Sequence
  Synthetic
cuauguuauguaaggguu

SEQ ID NO: 124944 - RNA, 19 nt, Artificial Sequence
  Synthetic
ucuauguuauguaaggguu

SEQ ID NO: 124945 - RNA, 20 nt, Artificial Sequence
  Synthetic
aucuauguuauguaaggguu

SEQ ID NO: 124946 - RNA, 21 nt, Artificial Sequence
  Synthetic
uaucuauguuauguaaggguu

SEQ ID NO: 124947 - RNA, 22 nt, Artificial Sequence
  Synthetic
uuaucuauguuauguaaggguu

SEQ ID NO: 124948 - RNA, 23 nt, Artificial Sequence
  Synthetic
uuuaucuauguuauguaaggguu

SEQ ID NO: 124949 - RNA, 24 nt, Artificial Sequence
  Synthetic
uuuuaucuauguuauguaaggguu

SEQ ID NO: 124950 - RNA, 18 nt, Artificial Sequence
  Synthetic
uuguaaguuggcaggguu

SEQ ID NO: 124951 - RNA, 19 nt, Artificial Sequence
  Synthetic
auuguaaguuggcaggguu

SEQ ID NO: 124952 - RNA, 20 nt, Artificial Sequence
  Synthetic
uauuguaaguuggcaggguu

SEQ ID NO: 124953 - RNA, 21 nt, Artificial Sequence
  Synthetic
auauuguaaguuggcaggguu

SEQ ID NO: 124954 - RNA, 22 nt, Artificial Sequence
  Synthetic
uauauuguaaguuggcaggguu

SEQ ID NO: 124955 - RNA, 23 nt, Artificial Sequence
  Synthetic
cuauauuguaaguuggcaggguu

SEQ ID NO: 124956 - RNA, 24 nt, Artificial Sequence
  Synthetic
ucuauauuguaaguuggcaggguu

SEQ ID NO: 124957 - RNA, 18 nt, Artificial Sequence
  Synthetic
caaauaugcugggggguu

SEQ ID NO: 124958 - RNA, 19 nt, Artificial Sequence
  Synthetic
ccaaauaugcugggggguu

SEQ ID NO: 124959 - RNA, 21 nt, Artificial Sequence
  Synthetic
ugccaaauaugcugggggguu

SEQ ID NO: 124960 - RNA, 22 nt, Artificial Sequence
  Synthetic
cugccaaauaugcugggggguu

SEQ ID NO: 124961 - RNA, 23 nt, Artificial Sequence
  Synthetic
acugccaaauaugcugggggguu

SEQ ID NO: 124962 - RNA, 24 nt, Artificial Sequence
  Synthetic
cacugccaaauaugcugggggguu

SEQ ID NO: 124963 - RNA, 18 nt, Artificial Sequence
  Synthetic
auuuugaauuuugggguu

SEQ ID NO: 124964 - RNA, 19 nt, Artificial Sequence
  Synthetic
aauuuugaauuuugggguu

SEQ ID NO: 124965 - RNA, 20 nt, Artificial Sequence
  Synthetic
caauuuugaauuuugggguu

SEQ ID NO: 124966 - RNA, 21 nt, Artificial Sequence
  Synthetic
ccaauuuugaauuuugggguu

SEQ ID NO: 124967 - RNA, 22 nt, Artificial Sequence
  Synthetic
uccaauuuugaauuuugggguu

SEQ ID NO: 124968 - RNA, 23 nt, Artificial Sequence
  Synthetic
uuccaauuuugaauuuugggguu

SEQ ID NO: 124969 - RNA, 24 nt, Artificial Sequence
  Synthetic
uuuccaauuuugaauuuugggguu

SEQ ID NO: 124970 - RNA, 19 nt, Artificial Sequence
  Synthetic
ugaagauugucucuggguu

SEQ ID NO: 124971 - RNA, 20 nt, Artificial Sequence
  Synthetic
augaagauugucucuggguu

SEQ ID NO: 124972 - RNA, 21 nt, Artificial Sequence
  Synthetic
caugaagauugucucuggguu

SEQ ID NO: 124973 - RNA, 23 nt, Artificial Sequence
  Synthetic
ugcaugaagauugucucuggguu

SEQ ID NO: 124974 - RNA, 24 nt, Artificial Sequence
  Synthetic
augcaugaagauugucucuggguu

SEQ ID NO: 124975 - RNA, 20 nt, Artificial Sequence
  Synthetic
ugggagcucuucaguggguu

SEQ ID NO: 124976 - RNA, 21 nt, Artificial Sequence
  Synthetic
augggagcucuucaguggguu

SEQ ID NO: 124977 - RNA, 22 nt, Artificial Sequence
  Synthetic
aaugggagcucuucaguggguu

SEQ ID NO: 124978 - RNA, 23 nt, Artificial Sequence
  Synthetic
caaugggagcucuucaguggguu

SEQ ID NO: 124979 - RNA, 19 nt, Artificial Sequence
  Synthetic
aggauaagauacaaugguu

SEQ ID NO: 124980 - RNA, 20 nt, Artificial Sequence
  Synthetic
caggauaagauacaaugguu

SEQ ID NO: 124981 - RNA, 21 nt, Artificial Sequence
  Synthetic
acaggauaagauacaaugguu

SEQ ID NO: 124982 - RNA, 22 nt, Artificial Sequence
  Synthetic
aacaggauaagauacaaugguu

SEQ ID NO: 124983 - RNA, 23 nt, Artificial Sequence
  Synthetic
caacaggauaagauacaaugguu

SEQ ID NO: 124984 - RNA, 18 nt, Artificial Sequence
  Synthetic
cuugauaaaauaaugguu

SEQ ID NO: 124985 - RNA, 21 nt, Artificial Sequence
  Synthetic
aggcuugauaaaauaaugguu

SEQ ID NO: 124986 - RNA, 22 nt, Artificial Sequence
  Synthetic
uaggcuugauaaaauaaugguu

SEQ ID NO: 124987 - RNA, 23 nt, Artificial Sequence
  Synthetic
cuaggcuugauaaaauaaugguu

SEQ ID NO: 124988 - RNA, 21 nt, Artificial Sequence
  Synthetic
aaggcucugauuuaacugguu

SEQ ID NO: 124989 - RNA, 22 nt, Artificial Sequence
  Synthetic
uaaggcucugauuuaacugguu

SEQ ID NO: 124990 - RNA, 23 nt, Artificial Sequence
  Synthetic
uuaaggcucugauuuaacugguu

SEQ ID NO: 124991 - RNA, 24 nt, Artificial Sequence
  Synthetic
auuaaggcucugauuuaacugguu

SEQ ID NO: 124992 - RNA, 18 nt, Artificial Sequence
  Synthetic
acugaaagcuuccugguu

SEQ ID NO: 124993 - RNA, 19 nt, Artificial Sequence
  Synthetic
cacugaaagcuuccugguu

SEQ ID NO: 124994 - RNA, 20 nt, Artificial Sequence
  Synthetic
ucacugaaagcuuccugguu

SEQ ID NO: 124995 - RNA, 21 nt, Artificial Sequence
  Synthetic
uucacugaaagcuuccugguu

SEQ ID NO: 124996 - RNA, 22 nt, Artificial Sequence
  Synthetic
uuucacugaaagcuuccugguu

SEQ ID NO: 124997 - RNA, 23 nt, Artificial Sequence
  Synthetic
uuuucacugaaagcuuccugguu

SEQ ID NO: 124998 - RNA, 18 nt, Artificial Sequence
  Synthetic
acagcccagccucugguu

SEQ ID NO: 124999 - RNA, 19 nt, Artificial Sequence
  Synthetic
cacagcccagccucugguu

SEQ ID NO: 125000 - RNA, 20 nt, Artificial Sequence
  Synthetic
ccacagcccagccucugguu

SEQ ID NO: 125001 - RNA, 21 nt, Artificial Sequence
  Synthetic
accacagcccagccucugguu

SEQ ID NO: 125002 - RNA, 22 nt, Artificial Sequence
  Synthetic
caccacagcccagccucugguu

SEQ ID NO: 125003 - RNA, 24 nt, Artificial Sequence
  Synthetic
agcaccacagcccagccucugguu

SEQ ID NO: 125004 - RNA, 18 nt, Artificial Sequence
  Synthetic
acaacacuugaggugguu

SEQ ID NO: 125005 - RNA, 20 nt, Artificial Sequence
  Synthetic
agacaacacuugaggugguu

SEQ ID NO: 125006 - RNA, 21 nt, Artificial Sequence
  Synthetic
cagacaacacuugaggugguu

SEQ ID NO: 125007 - RNA, 22 nt, Artificial Sequence
  Synthetic
acagacaacacuugaggugguu

SEQ ID NO: 125008 - RNA, 23 nt, Artificial Sequence
  Synthetic
cacagacaacacuugaggugguu

SEQ ID NO: 125009 - RNA, 24 nt, Artificial Sequence
  Synthetic
ucacagacaacacuugaggugguu

SEQ ID NO: 125010 - RNA, 18 nt, Artificial Sequence
  Synthetic
aaugaguaauucuugguu

SEQ ID NO: 125011 - RNA, 19 nt, Artificial Sequence
  Synthetic
aaaugaguaauucuugguu

SEQ ID NO: 125012 - RNA, 20 nt, Artificial Sequence
  Synthetic
ugguugaaagcuauuugguu

SEQ ID NO: 125013 - RNA, 21 nt, Artificial Sequence
  Synthetic
uugguugaaagcuauuugguu

SEQ ID NO: 125014 - RNA, 22 nt, Artificial Sequence
  Synthetic
uuugguugaaagcuauuugguu

SEQ ID NO: 125015 - RNA, 23 nt, Artificial Sequence
  Synthetic
auuugguugaaagcuauuugguu

SEQ ID NO: 125016 - RNA, 24 nt, Artificial Sequence
  Synthetic
uauuugguugaaagcuauuugguu

SEQ ID NO: 125017 - RNA, 21 nt, Artificial Sequence
  Synthetic
agggucaucugacuuuugguu

SEQ ID NO: 125018 - RNA, 22 nt, Artificial Sequence
  Synthetic
cagggucaucugacuuuugguu

SEQ ID NO: 125019 - RNA, 23 nt, Artificial Sequence
  Synthetic
ucagggucaucugacuuuugguu

SEQ ID NO: 125020 - RNA, 24 nt, Artificial Sequence
  Synthetic
aucagggucaucugacuuuugguu

SEQ ID NO: 125021 - RNA, 18 nt, Artificial Sequence
  Synthetic
cccaaagcagaaaauguu

SEQ ID NO: 125022 - RNA, 21 nt, Artificial Sequence
  Synthetic
aggcccaaagcagaaaauguu

SEQ ID NO: 125023 - RNA, 22 nt, Artificial Sequence
  Synthetic
uaggcccaaagcagaaaauguu

SEQ ID NO: 125024 - RNA, 23 nt, Artificial Sequence
  Synthetic
uuaggcccaaagcagaaaauguu

SEQ ID NO: 125025 - RNA, 24 nt, Artificial Sequence
  Synthetic
cuuaggcccaaagcagaaaauguu

SEQ ID NO: 125026 - RNA, 21 nt, Artificial Sequence
  Synthetic
auaugcaauuuagaaaauguu

SEQ ID NO: 125027 - RNA, 22 nt, Artificial Sequence
  Synthetic
aauaugcaauuuagaaaauguu

SEQ ID NO: 125028 - RNA, 23 nt, Artificial Sequence
  Synthetic
aaauaugcaauuuagaaaauguu

SEQ ID NO: 125029 - RNA, 24 nt, Artificial Sequence
  Synthetic
aaaauaugcaauuuagaaaauguu

SEQ ID NO: 125030 - RNA, 18 nt, Artificial Sequence
  Synthetic
cuuuagaaagcaaauguu

SEQ ID NO: 125031 - RNA, 20 nt, Artificial Sequence
  Synthetic
agcuuuagaaagcaaauguu

SEQ ID NO: 125032 - RNA, 21 nt, Artificial Sequence
  Synthetic
cagcuuuagaaagcaaauguu

SEQ ID NO: 125033 - RNA, 22 nt, Artificial Sequence
  Synthetic
ccagcuuuagaaagcaaauguu

SEQ ID NO: 125034 - RNA, 24 nt, Artificial Sequence
  Synthetic
ugccagcuuuagaaagcaaauguu

SEQ ID NO: 125035 - RNA, 22 nt, Artificial Sequence
  Synthetic
agcauuuauuuguucaaauguu

SEQ ID NO: 125036 - RNA, 24 nt, Artificial Sequence
  Synthetic
agagcauuuauuuguucaaauguu

SEQ ID NO: 125037 - RNA, 22 nt, Artificial Sequence
  Synthetic
agacacacaaaauagaaauguu

SEQ ID NO: 125038 - RNA, 23 nt, Artificial Sequence
  Synthetic
cagacacacaaaauagaaauguu

SEQ ID NO: 125039 - RNA, 24 nt, Artificial Sequence
  Synthetic
acagacacacaaaauagaaauguu

SEQ ID NO: 125040 - RNA, 18 nt, Artificial Sequence
  Synthetic
auagcuuugggaaauguu

SEQ ID NO: 125041 - RNA, 19 nt, Artificial Sequence
  Synthetic
aauagcuuugggaaauguu

SEQ ID NO: 125042 - RNA, 21 nt, Artificial Sequence
  Synthetic
agaauagcuuugggaaauguu

SEQ ID NO: 125043 - RNA, 22 nt, Artificial Sequence
  Synthetic
cagaauagcuuugggaaauguu

SEQ ID NO: 125044 - RNA, 24 nt, Artificial Sequence
  Synthetic
agcagaauagcuuugggaaauguu

SEQ ID NO: 125045 - RNA, 18 nt, Artificial Sequence
  Synthetic
agaaagaaaaacaauguu

SEQ ID NO: 125046 - RNA, 19 nt, Artificial Sequence
  Synthetic
cagaaagaaaaacaauguu

SEQ ID NO: 125047 - RNA, 21 nt, Artificial Sequence
  Synthetic
ugcagaaagaaaaacaauguu

SEQ ID NO: 125048 - RNA, 22 nt, Artificial Sequence
  Synthetic
augcagaaagaaaaacaauguu

SEQ ID NO: 125049 - RNA, 23 nt, Artificial Sequence
  Synthetic
aaugcagaaagaaaaacaauguu

SEQ ID NO: 125050 - RNA, 24 nt, Artificial Sequence
  Synthetic
aaaugcagaaagaaaaacaauguu

SEQ ID NO: 125051 - RNA, 19 nt, Artificial Sequence
  Synthetic
aggaauugcuaagaauguu

SEQ ID NO: 125052 - RNA, 20 nt, Artificial Sequence
  Synthetic
aaggaauugcuaagaauguu

SEQ ID NO: 125053 - RNA, 22 nt, Artificial Sequence
  Synthetic
agaaggaauugcuaagaauguu

SEQ ID NO: 125054 - RNA, 23 nt, Artificial Sequence
  Synthetic
uagaaggaauugcuaagaauguu

SEQ ID NO: 125055 - RNA, 24 nt, Artificial Sequence
  Synthetic
auagaaggaauugcuaagaauguu

SEQ ID NO: 125056 - RNA, 18 nt, Artificial Sequence
  Synthetic
agguugaaauauaauguu

SEQ ID NO: 125057 - RNA, 20 nt, Artificial Sequence
  Synthetic
agagguugaaauauaauguu

SEQ ID NO: 125058 - RNA, 23 nt, Artificial Sequence
  Synthetic
uggagagguugaaauauaauguu

SEQ ID NO: 125059 - RNA, 24 nt, Artificial Sequence
  Synthetic
uuggagagguugaaauauaauguu

SEQ ID NO: 125060 - RNA, 18 nt, Artificial Sequence
  Synthetic
ugggucaguaaacauguu

SEQ ID NO: 125061 - RNA, 19 nt, Artificial Sequence
  Synthetic
cugggucaguaaacauguu

SEQ ID NO: 125062 - RNA, 20 nt, Artificial Sequence
  Synthetic
ucugggucaguaaacauguu

SEQ ID NO: 125063 - RNA, 21 nt, Artificial Sequence
  Synthetic
uucugggucaguaaacauguu

SEQ ID NO: 125064 - RNA, 23 nt, Artificial Sequence
  Synthetic
cguucugggucaguaaacauguu

SEQ ID NO: 125065 - RNA, 24 nt, Artificial Sequence
  Synthetic
acguucugggucaguaaacauguu

SEQ ID NO: 125066 - RNA, 18 nt, Artificial Sequence
  Synthetic
uuuguugcagaacauguu

SEQ ID NO: 125067 - RNA, 19 nt, Artificial Sequence
  Synthetic
uuuuguugcagaacauguu

SEQ ID NO: 125068 - RNA, 20 nt, Artificial Sequence
  Synthetic
auuuuguugcagaacauguu

SEQ ID NO: 125069 - RNA, 21 nt, Artificial Sequence
  Synthetic
uauuuuguugcagaacauguu

SEQ ID NO: 125070 - RNA, 22 nt, Artificial Sequence
  Synthetic
auauuuuguugcagaacauguu

SEQ ID NO: 125071 - RNA, 23 nt, Artificial Sequence
  Synthetic
uauauuuuguugcagaacauguu

SEQ ID NO: 125072 - RNA, 24 nt, Artificial Sequence
  Synthetic
uuauauuuuguugcagaacauguu

SEQ ID NO: 125073 - RNA, 18 nt, Artificial Sequence
  Synthetic
ccucuugaaacacauguu

SEQ ID NO: 125074 - RNA, 19 nt, Artificial Sequence
  Synthetic
uccucuugaaacacauguu

SEQ ID NO: 125075 - RNA, 20 nt, Artificial Sequence
  Synthetic
uuccucuugaaacacauguu

SEQ ID NO: 125076 - RNA, 21 nt, Artificial Sequence
  Synthetic
cuuccucuugaaacacauguu

SEQ ID NO: 125077 - RNA, 22 nt, Artificial Sequence
  Synthetic
ucuuccucuugaaacacauguu

SEQ ID NO: 125078 - RNA, 23 nt, Artificial Sequence
  Synthetic
cucuuccucuugaaacacauguu

SEQ ID NO: 125079 - RNA, 18 nt, Artificial Sequence
  Synthetic
cucuuuaugucacauguu

SEQ ID NO: 125080 - RNA, 19 nt, Artificial Sequence
  Synthetic
ucucuuuaugucacauguu

SEQ ID NO: 125081 - RNA, 20 nt, Artificial Sequence
  Synthetic
aucucuuuaugucacauguu

SEQ ID NO: 125082 - RNA, 21 nt, Artificial Sequence
  Synthetic
caucucuuuaugucacauguu

SEQ ID NO: 125083 - RNA, 23 nt, Artificial Sequence
  Synthetic
ugcaucucuuuaugucacauguu

SEQ ID NO: 125084 - RNA, 24 nt, Artificial Sequence
  Synthetic
augcaucucuuuaugucacauguu

SEQ ID NO: 125085 - RNA, 18 nt, Artificial Sequence
  Synthetic
cuggcuuagagacauguu

SEQ ID NO: 125086 - RNA, 21 nt, Artificial Sequence
  Synthetic
aggcuggcuuagagacauguu

SEQ ID NO: 125087 - RNA, 22 nt, Artificial Sequence
  Synthetic
aaggcuggcuuagagacauguu

SEQ ID NO: 125088 - RNA, 23 nt, Artificial Sequence
  Synthetic
aaaggcuggcuuagagacauguu

SEQ ID NO: 125089 - RNA, 24 nt, Artificial Sequence
  Synthetic
aaaaggcuggcuuagagacauguu

SEQ ID NO: 125090 - RNA, 19 nt, Artificial Sequence
  Synthetic
ugaugcuaacggacauguu

SEQ ID NO: 125091 - RNA, 20 nt, Artificial Sequence
  Synthetic
uugaugcuaacggacauguu

SEQ ID NO: 125092 - RNA, 21 nt, Artificial Sequence
  Synthetic
auugaugcuaacggacauguu

SEQ ID NO: 125093 - RNA, 22 nt, Artificial Sequence
  Synthetic
uauugaugcuaacggacauguu

SEQ ID NO: 125094 - RNA, 23 nt, Artificial Sequence
  Synthetic
auauugaugcuaacggacauguu

SEQ ID NO: 125095 - RNA, 24 nt, Artificial Sequence
  Synthetic
uauauugaugcuaacggacauguu

SEQ ID NO: 125096 - RNA, 18 nt, Artificial Sequence
  Synthetic
ugggagagcuuacauguu

SEQ ID NO: 125097 - RNA, 19 nt, Artificial Sequence
  Synthetic
uugggagagcuuacauguu

SEQ ID NO: 125098 - RNA, 21 nt, Artificial Sequence
  Synthetic
aguugggagagcuuacauguu

SEQ ID NO: 125099 - RNA, 23 nt, Artificial Sequence
  Synthetic
agaguugggagagcuuacauguu

SEQ ID NO: 125100 - RNA, 24 nt, Artificial Sequence
  Synthetic
cagaguugggagagcuuacauguu

SEQ ID NO: 125101 - RNA, 18 nt, Artificial Sequence
  Synthetic
ccuacaagacaccauguu

SEQ ID NO: 125102 - RNA, 19 nt, Artificial Sequence
  Synthetic
uccuacaagacaccauguu

SEQ ID NO: 125103 - RNA, 20 nt, Artificial Sequence
  Synthetic
uuccuacaagacaccauguu

SEQ ID NO: 125104 - RNA, 21 nt, Artificial Sequence
  Synthetic
uuuccuacaagacaccauguu

SEQ ID NO: 125105 - RNA, 22 nt, Artificial Sequence
  Synthetic
auuuccuacaagacaccauguu

SEQ ID NO: 125106 - RNA, 23 nt, Artificial Sequence
  Synthetic
cauuuccuacaagacaccauguu

SEQ ID NO: 125107 - RNA, 24 nt, Artificial Sequence
  Synthetic
acauuuccuacaagacaccauguu

SEQ ID NO: 125108 - RNA, 18 nt, Artificial Sequence
  Synthetic
uucccaauccuucauguu

SEQ ID NO: 125109 - RNA, 19 nt, Artificial Sequence
  Synthetic
cuucccaauccuucauguu

SEQ ID NO: 125110 - RNA, 20 nt, Artificial Sequence
  Synthetic
ucuucccaauccuucauguu

SEQ ID NO: 125111 - RNA, 21 nt, Artificial Sequence
  Synthetic
cucuucccaauccuucauguu

SEQ ID NO: 125112 - RNA, 22 nt, Artificial Sequence
  Synthetic
acucuucccaauccuucauguu

SEQ ID NO: 125113 - RNA, 23 nt, Artificial Sequence
  Synthetic
aacucuucccaauccuucauguu

SEQ ID NO: 125114 - RNA, 24 nt, Artificial Sequence
  Synthetic
aaacucuucccaauccuucauguu

SEQ ID NO: 125115 - RNA, 18 nt, Artificial Sequence
  Synthetic
auugauaaaaacgauguu

SEQ ID NO: 125116 - RNA, 20 nt, Artificial Sequence
  Synthetic
agauugauaaaaacgauguu

SEQ ID NO: 125117 - RNA, 21 nt, Artificial Sequence
  Synthetic
uagauugauaaaaacgauguu

SEQ ID NO: 125118 - RNA, 22 nt, Artificial Sequence
  Synthetic
auagauugauaaaaacgauguu

SEQ ID NO: 125119 - RNA, 23 nt, Artificial Sequence
  Synthetic
aauagauugauaaaaacgauguu

SEQ ID NO: 125120 - RNA, 24 nt, Artificial Sequence
  Synthetic
caauagauugauaaaaacgauguu

SEQ ID NO: 125121 - RNA, 18 nt, Artificial Sequence
  Synthetic
auuuauccuugugauguu

SEQ ID NO: 125122 - RNA, 19 nt, Artificial Sequence
  Synthetic
aauuuauccuugugauguu

SEQ ID NO: 125123 - RNA, 20 nt, Artificial Sequence
  Synthetic
aaauuuauccuugugauguu

SEQ ID NO: 125124 - RNA, 21 nt, Artificial Sequence
  Synthetic
aaaauuuauccuugugauguu

SEQ ID NO: 125125 - RNA, 22 nt, Artificial Sequence
  Synthetic
uaaaauuuauccuugugauguu

SEQ ID NO: 125126 - RNA, 23 nt, Artificial Sequence
  Synthetic
auaaaauuuauccuugugauguu

SEQ ID NO: 125127 - RNA, 24 nt, Artificial Sequence
  Synthetic
aauaaaauuuauccuugugauguu

SEQ ID NO: 125128 - RNA, 21 nt, Artificial Sequence
  Synthetic
uuuuaggaauaaauugauguu

SEQ ID NO: 125129 - RNA, 22 nt, Artificial Sequence
  Synthetic
cuuuuaggaauaaauugauguu

SEQ ID NO: 125130 - RNA, 24 nt, Artificial Sequence
  Synthetic
ugcuuuuaggaauaaauugauguu

SEQ ID NO: 125131 - RNA, 19 nt, Artificial Sequence
  Synthetic
uguuaagguuuuugauguu

SEQ ID NO: 125132 - RNA, 20 nt, Artificial Sequence
  Synthetic
cuguuaagguuuuugauguu

SEQ ID NO: 125133 - RNA, 21 nt, Artificial Sequence
  Synthetic
acuguuaagguuuuugauguu

SEQ ID NO: 125134 - RNA, 22 nt, Artificial Sequence
  Synthetic
cacuguuaagguuuuugauguu

SEQ ID NO: 125135 - RNA, 23 nt, Artificial Sequence
  Synthetic
acacuguuaagguuuuugauguu

SEQ ID NO: 125136 - RNA, 24 nt, Artificial Sequence
  Synthetic
cacacuguuaagguuuuugauguu

SEQ ID NO: 125137 - RNA, 18 nt, Artificial Sequence
  Synthetic
aaugccacuaaauauguu

SEQ ID NO: 125138 - RNA, 19 nt, Artificial Sequence
  Synthetic
aaaugccacuaaauauguu

SEQ ID NO: 125139 - RNA, 20 nt, Artificial Sequence
  Synthetic
aaaaugccacuaaauauguu

SEQ ID NO: 125140 - RNA, 22 nt, Artificial Sequence
  Synthetic
agaaaaugccacuaaauauguu

SEQ ID NO: 125141 - RNA, 23 nt, Artificial Sequence
  Synthetic
aagaaaaugccacuaaauauguu

SEQ ID NO: 125142 - RNA, 24 nt, Artificial Sequence
  Synthetic
uaagaaaaugccacuaaauauguu

SEQ ID NO: 125143 - RNA, 19 nt, Artificial Sequence
  Synthetic
agacacuugcgccuauguu

SEQ ID NO: 125144 - RNA, 20 nt, Artificial Sequence
  Synthetic
cagacacuugcgccuauguu

SEQ ID NO: 125145 - RNA, 21 nt, Artificial Sequence
  Synthetic
ccagacacuugcgccuauguu

SEQ ID NO: 125146 - RNA, 23 nt, Artificial Sequence
  Synthetic
ugccagacacuugcgccuauguu

SEQ ID NO: 125147 - RNA, 24 nt, Artificial Sequence
  Synthetic
augccagacacuugcgccuauguu

SEQ ID NO: 125148 - RNA, 18 nt, Artificial Sequence
  Synthetic
aaguauuauuccuauguu

SEQ ID NO: 125149 - RNA, 21 nt, Artificial Sequence
  Synthetic
aggaaguauuauuccuauguu

SEQ ID NO: 125150 - RNA, 22 nt, Artificial Sequence
  Synthetic
caggaaguauuauuccuauguu

SEQ ID NO: 125151 - RNA, 23 nt, Artificial Sequence
  Synthetic
ucaggaaguauuauuccuauguu

SEQ ID NO: 125152 - RNA, 24 nt, Artificial Sequence
  Synthetic
uucaggaaguauuauuccuauguu

SEQ ID NO: 125153 - RNA, 20 nt, Artificial Sequence
  Synthetic
cggucuucucauuguauguu

SEQ ID NO: 125154 - RNA, 21 nt, Artificial Sequence
  Synthetic
ccggucuucucauuguauguu

SEQ ID NO: 125155 - RNA, 22 nt, Artificial Sequence
  Synthetic
accggucuucucauuguauguu

SEQ ID NO: 125156 - RNA, 23 nt, Artificial Sequence
  Synthetic
uaccggucuucucauuguauguu

SEQ ID NO: 125157 - RNA, 24 nt, Artificial Sequence
  Synthetic
uuaccggucuucucauuguauguu

SEQ ID NO: 125158 - RNA, 18 nt, Artificial Sequence
  Synthetic
ccaggacaaauaacuguu

SEQ ID NO: 125159 - RNA, 19 nt, Artificial Sequence
  Synthetic
uccaggacaaauaacuguu

SEQ ID NO: 125160 - RNA, 21 nt, Artificial Sequence
  Synthetic
uguccaggacaaauaacuguu

SEQ ID NO: 125161 - RNA, 22 nt, Artificial Sequence
  Synthetic
uuguccaggacaaauaacuguu

SEQ ID NO: 125162 - RNA, 24 nt, Artificial Sequence
  Synthetic
uguuguccaggacaaauaacuguu

SEQ ID NO: 125163 - RNA, 18 nt, Artificial Sequence
  Synthetic
auuuugucacuaacuguu

SEQ ID NO: 125164 - RNA, 19 nt, Artificial Sequence
  Synthetic
aauuuugucacuaacuguu

SEQ ID NO: 125165 - RNA, 20 nt, Artificial Sequence
  Synthetic
uaauuuugucacuaacuguu

SEQ ID NO: 125166 - RNA, 21 nt, Artificial Sequence
  Synthetic
cuaauuuugucacuaacuguu

SEQ ID NO: 125167 - RNA, 22 nt, Artificial Sequence
  Synthetic
ucuaauuuugucacuaacuguu

SEQ ID NO: 125168 - RNA, 23 nt, Artificial Sequence
  Synthetic
uucuaauuuugucacuaacuguu

SEQ ID NO: 125169 - RNA, 24 nt, Artificial Sequence
  Synthetic
cuucuaauuuugucacuaacuguu

SEQ ID NO: 125170 - RNA, 19 nt, Artificial Sequence
  Synthetic
uggauuugcauacacuguu

SEQ ID NO: 125171 - RNA, 20 nt, Artificial Sequence
  Synthetic
cuggauuugcauacacuguu

SEQ ID NO: 125172 - RNA, 21 nt, Artificial Sequence
  Synthetic
ucuggauuugcauacacuguu

SEQ ID NO: 125173 - RNA, 22 nt, Artificial Sequence
  Synthetic
cucuggauuugcauacacuguu

SEQ ID NO: 125174 - RNA, 23 nt, Artificial Sequence
  Synthetic
ucucuggauuugcauacacuguu

SEQ ID NO: 125175 - RNA, 24 nt, Artificial Sequence
  Synthetic
aucucuggauuugcauacacuguu

SEQ ID NO: 125176 - RNA, 21 nt, Artificial Sequence
  Synthetic
aguggugaaaagagcacuguu

SEQ ID NO: 125177 - RNA, 22 nt, Artificial Sequence
  Synthetic
aaguggugaaaagagcacuguu

SEQ ID NO: 125178 - RNA, 24 nt, Artificial Sequence
  Synthetic
ugaaguggugaaaagagcacuguu

SEQ ID NO: 125179 - RNA, 19 nt, Artificial Sequence
  Synthetic
uguguaccuagucacuguu

SEQ ID NO: 125180 - RNA, 20 nt, Artificial Sequence
  Synthetic
cuguguaccuagucacuguu

SEQ ID NO: 125181 - RNA, 21 nt, Artificial Sequence
  Synthetic
acuguguaccuagucacuguu

SEQ ID NO: 125182 - RNA, 22 nt, Artificial Sequence
  Synthetic
uacuguguaccuagucacuguu

SEQ ID NO: 125183 - RNA, 23 nt, Artificial Sequence
  Synthetic
auacuguguaccuagucacuguu

SEQ ID NO: 125184 - RNA, 24 nt, Artificial Sequence
  Synthetic
uauacuguguaccuagucacuguu

SEQ ID NO: 125185 - RNA, 18 nt, Artificial Sequence
  Synthetic
aucugcguugucacuguu

SEQ ID NO: 125186 - RNA, 19 nt, Artificial Sequence
  Synthetic
aaucugcguugucacuguu

SEQ ID NO: 125187 - RNA, 20 nt, Artificial Sequence
  Synthetic
uaaucugcguugucacuguu

SEQ ID NO: 125188 - RNA, 21 nt, Artificial Sequence
  Synthetic
uuaaucugcguugucacuguu

SEQ ID NO: 125189 - RNA, 22 nt, Artificial Sequence
  Synthetic
uuuaaucugcguugucacuguu

SEQ ID NO: 125190 - RNA, 23 nt, Artificial Sequence
  Synthetic
uuuuaaucugcguugucacuguu

SEQ ID NO: 125191 - RNA, 18 nt, Artificial Sequence
  Synthetic
auuuaaaguuuaccuguu

SEQ ID NO: 125192 - RNA, 19 nt, Artificial Sequence
  Synthetic
uauuuaaaguuuaccuguu

SEQ ID NO: 125193 - RNA, 20 nt, Artificial Sequence
  Synthetic
auauuuaaaguuuaccuguu

SEQ ID NO: 125194 - RNA, 21 nt, Artificial Sequence
  Synthetic
cauauuuaaaguuuaccuguu

SEQ ID NO: 125195 - RNA, 22 nt, Artificial Sequence
  Synthetic
acauauuuaaaguuuaccuguu

SEQ ID NO: 125196 - RNA, 23 nt, Artificial Sequence
  Synthetic
aacauauuuaaaguuuaccuguu

SEQ ID NO: 125197 - RNA, 24 nt, Artificial Sequence
  Synthetic
aaacauauuuaaaguuuaccuguu

SEQ ID NO: 125198 - RNA, 21 nt, Artificial Sequence
  Synthetic
ugcacagggcuuagagcuguu

SEQ ID NO: 125199 - RNA, 23 nt, Artificial Sequence
  Synthetic
ugugcacagggcuuagagcuguu

SEQ ID NO: 125200 - RNA, 24 nt, Artificial Sequence
  Synthetic
augugcacagggcuuagagcuguu

SEQ ID NO: 125201 - RNA, 19 nt, Artificial Sequence
  Synthetic
agacagauccaaggcuguu

SEQ ID NO: 125202 - RNA, 20 nt, Artificial Sequence
  Synthetic
aagacagauccaaggcuguu

SEQ ID NO: 125203 - RNA, 23 nt, Artificial Sequence
  Synthetic
aggaagacagauccaaggcuguu

SEQ ID NO: 125204 - RNA, 24 nt, Artificial Sequence
  Synthetic
aaggaagacagauccaaggcuguu

SEQ ID NO: 125205 - RNA, 18 nt, Artificial Sequence
  Synthetic
cuggggcucaaugcuguu

SEQ ID NO: 125206 - RNA, 19 nt, Artificial Sequence
  Synthetic
acuggggcucaaugcuguu

SEQ ID NO: 125207 - RNA, 20 nt, Artificial Sequence
  Synthetic
aacuggggcucaaugcuguu

SEQ ID NO: 125208 - RNA, 18 nt, Artificial Sequence
  Synthetic
uccguauuucucucuguu

SEQ ID NO: 125209 - RNA, 19 nt, Artificial Sequence
  Synthetic
cuccguauuucucucuguu

SEQ ID NO: 125210 - RNA, 20 nt, Artificial Sequence
  Synthetic
acuccguauuucucucuguu

SEQ ID NO: 125211 - RNA, 21 nt, Artificial Sequence
  Synthetic
cacuccguauuucucucuguu

SEQ ID NO: 125212 - RNA, 22 nt, Artificial Sequence
  Synthetic
acacuccguauuucucucuguu

SEQ ID NO: 125213 - RNA, 23 nt, Artificial Sequence
  Synthetic
uacacuccguauuucucucuguu

SEQ ID NO: 125214 - RNA, 24 nt, Artificial Sequence
  Synthetic
uuacacuccguauuucucucuguu

SEQ ID NO: 125215 - RNA, 18 nt, Artificial Sequence
  Synthetic
uauguacucuugucuguu

SEQ ID NO: 125216 - RNA, 19 nt, Artificial Sequence
  Synthetic
uuauguacucuugucuguu

SEQ ID NO: 125217 - RNA, 20 nt, Artificial Sequence
  Synthetic
auuauguacucuugucuguu

SEQ ID NO: 125218 - RNA, 21 nt, Artificial Sequence
  Synthetic
aauuauguacucuugucuguu

SEQ ID NO: 125219 - RNA, 22 nt, Artificial Sequence
  Synthetic
aaauuauguacucuugucuguu

SEQ ID NO: 125220 - RNA, 23 nt, Artificial Sequence
  Synthetic
aaaauuauguacucuugucuguu

SEQ ID NO: 125221 - RNA, 24 nt, Artificial Sequence
  Synthetic
uaaaauuauguacucuugucuguu

SEQ ID NO: 125222 - RNA, 18 nt, Artificial Sequence
  Synthetic
aaauguaauacuucuguu

SEQ ID NO: 125223 - RNA, 19 nt, Artificial Sequence
  Synthetic
aaaauguaauacuucuguu

SEQ ID NO: 125224 - RNA, 21 nt, Artificial Sequence
  Synthetic
agaaaauguaauacuucuguu

SEQ ID NO: 125225 - RNA, 22 nt, Artificial Sequence
  Synthetic
cagaaaauguaauacuucuguu

SEQ ID NO: 125226 - RNA, 23 nt, Artificial Sequence
  Synthetic
acagaaaauguaauacuucuguu

SEQ ID NO: 125227 - RNA, 18 nt, Artificial Sequence
  Synthetic
ugcaggaaauuuucuguu

SEQ ID NO: 125228 - RNA, 19 nt, Artificial Sequence
  Synthetic
uugcaggaaauuuucuguu

SEQ ID NO: 125229 - RNA, 20 nt, Artificial Sequence
  Synthetic
cuugcaggaaauuuucuguu

SEQ ID NO: 125230 - RNA, 22 nt, Artificial Sequence
  Synthetic
agcuugcaggaaauuuucuguu

SEQ ID NO: 125231 - RNA, 19 nt, Artificial Sequence
  Synthetic
agggggucaccaaaguguu

SEQ ID NO: 125232 - RNA, 20 nt, Artificial Sequence
  Synthetic
aagggggucaccaaaguguu

SEQ ID NO: 125233 - RNA, 21 nt, Artificial Sequence
  Synthetic
caagggggucaccaaaguguu

SEQ ID NO: 125234 - RNA, 22 nt, Artificial Sequence
  Synthetic
ucaagggggucaccaaaguguu

SEQ ID NO: 125235 - RNA, 24 nt, Artificial Sequence
  Synthetic
ugucaagggggucaccaaaguguu

SEQ ID NO: 125236 - RNA, 21 nt, Artificial Sequence
  Synthetic
acacuuguggucccaaguguu

SEQ ID NO: 125237 - RNA, 22 nt, Artificial Sequence
  Synthetic
aacacuuguggucccaaguguu

SEQ ID NO: 125238 - RNA, 23 nt, Artificial Sequence
  Synthetic
uaacacuuguggucccaaguguu

SEQ ID NO: 125239 - RNA, 24 nt, Artificial Sequence
  Synthetic
auaacacuuguggucccaaguguu

SEQ ID NO: 125240 - RNA, 18 nt, Artificial Sequence
  Synthetic
caaguuacucuaaguguu

SEQ ID NO: 125241 - RNA, 19 nt, Artificial Sequence
  Synthetic
acaaguuacucuaaguguu

SEQ ID NO: 125242 - RNA, 20 nt, Artificial Sequence
  Synthetic
uacaaguuacucuaaguguu

SEQ ID NO: 125243 - RNA, 21 nt, Artificial Sequence
  Synthetic
auacaaguuacucuaaguguu

SEQ ID NO: 125244 - RNA, 22 nt, Artificial Sequence
  Synthetic
cauacaaguuacucuaaguguu

SEQ ID NO: 125245 - RNA, 23 nt, Artificial Sequence
  Synthetic
ccauacaaguuacucuaaguguu

SEQ ID NO: 125246 - RNA, 24 nt, Artificial Sequence
  Synthetic
accauacaaguuacucuaaguguu

SEQ ID NO: 125247 - RNA, 21 nt, Artificial Sequence
  Synthetic
cagaugauuuugcacaguguu

SEQ ID NO: 125248 - RNA, 22 nt, Artificial Sequence
  Synthetic
ccagaugauuuugcacaguguu

SEQ ID NO: 125249 - RNA, 23 nt, Artificial Sequence
  Synthetic
uccagaugauuuugcacaguguu

SEQ ID NO: 125250 - RNA, 24 nt, Artificial Sequence
  Synthetic
cuccagaugauuuugcacaguguu

SEQ ID NO: 125251 - RNA, 18 nt, Artificial Sequence
  Synthetic
uugcucaggaaagguguu

SEQ ID NO: 125252 - RNA, 19 nt, Artificial Sequence
  Synthetic
auugcucaggaaagguguu

SEQ ID NO: 125253 - RNA, 21 nt, Artificial Sequence
  Synthetic
agauugcucaggaaagguguu

SEQ ID NO: 125254 - RNA, 22 nt, Artificial Sequence
  Synthetic
cagauugcucaggaaagguguu

SEQ ID NO: 125255 - RNA, 23 nt, Artificial Sequence
  Synthetic
ucagauugcucaggaaagguguu

SEQ ID NO: 125256 - RNA, 18 nt, Artificial Sequence
  Synthetic
aauuuauuucaugguguu

SEQ ID NO: 125257 - RNA, 19 nt, Artificial Sequence
  Synthetic
aaauuuauuucaugguguu

SEQ ID NO: 125258 - RNA, 20 nt, Artificial Sequence
  Synthetic
aaaauuuauuucaugguguu

SEQ ID NO: 125259 - RNA, 21 nt, Artificial Sequence
  Synthetic
aaaaauuuauuucaugguguu

SEQ ID NO: 125260 - RNA, 22 nt, Artificial Sequence
  Synthetic
aaaaaauuuauuucaugguguu

SEQ ID NO: 125261 - RNA, 24 nt, Artificial Sequence
  Synthetic
agaaaaaauuuauuucaugguguu

SEQ ID NO: 125262 - RNA, 18 nt, Artificial Sequence
  Synthetic
uauugggaggaugguguu

SEQ ID NO: 125263 - RNA, 19 nt, Artificial Sequence
  Synthetic
uuauugggaggaugguguu

SEQ ID NO: 125264 - RNA, 20 nt, Artificial Sequence
  Synthetic
auuauugggaggaugguguu

SEQ ID NO: 125265 - RNA, 22 nt, Artificial Sequence
  Synthetic
ugauuauugggaggaugguguu

SEQ ID NO: 125266 - RNA, 23 nt, Artificial Sequence
  Synthetic
augauuauugggaggaugguguu

SEQ ID NO: 125267 - RNA, 24 nt, Artificial Sequence
  Synthetic
aaugauuauugggaggaugguguu

SEQ ID NO: 125268 - RNA, 18 nt, Artificial Sequence
  Synthetic
uguaugaaaaacuguguu

SEQ ID NO: 125269 - RNA, 20 nt, Artificial Sequence
  Synthetic
aguguaugaaaaacuguguu

SEQ ID NO: 125270 - RNA, 21 nt, Artificial Sequence
  Synthetic
caguguaugaaaaacuguguu

SEQ ID NO: 125271 - RNA, 22 nt, Artificial Sequence
  Synthetic
acaguguaugaaaaacuguguu

SEQ ID NO: 125272 - RNA, 23 nt, Artificial Sequence
  Synthetic
uacaguguaugaaaaacuguguu

SEQ ID NO: 125273 - RNA, 24 nt, Artificial Sequence
  Synthetic
uuacaguguaugaaaaacuguguu

SEQ ID NO: 125274 - RNA, 18 nt, Artificial Sequence
  Synthetic
aucuaauggaauuguguu

SEQ ID NO: 125275 - RNA, 19 nt, Artificial Sequence
  Synthetic
aaucuaauggaauuguguu

SEQ ID NO: 125276 - RNA, 20 nt, Artificial Sequence
  Synthetic
caaucuaauggaauuguguu

SEQ ID NO: 125277 - RNA, 21 nt, Artificial Sequence
  Synthetic
ccaaucuaauggaauuguguu

SEQ ID NO: 125278 - RNA, 22 nt, Artificial Sequence
  Synthetic
accaaucuaauggaauuguguu

SEQ ID NO: 125279 - RNA, 23 nt, Artificial Sequence
  Synthetic
uaccaaucuaauggaauuguguu

SEQ ID NO: 125280 - RNA, 18 nt, Artificial Sequence
  Synthetic
accaacaucuauuguguu

SEQ ID NO: 125281 - RNA, 19 nt, Artificial Sequence
  Synthetic
caccaacaucuauuguguu

SEQ ID NO: 125282 - RNA, 20 nt, Artificial Sequence
  Synthetic
ucaccaacaucuauuguguu

SEQ ID NO: 125283 - RNA, 18 nt, Artificial Sequence
  Synthetic
caucuaacauuaauuguu

SEQ ID NO: 125284 - RNA, 21 nt, Artificial Sequence
  Synthetic
uggcaucuaacauuaauuguu

SEQ ID NO: 125285 - RNA, 23 nt, Artificial Sequence
  Synthetic
uguggcaucuaacauuaauuguu

SEQ ID NO: 125286 - RNA, 24 nt, Artificial Sequence
  Synthetic
uuguggcaucuaacauuaauuguu

SEQ ID NO: 125287 - RNA, 19 nt, Artificial Sequence
  Synthetic
aguagaaagugggauuguu

SEQ ID NO: 125288 - RNA, 20 nt, Artificial Sequence
  Synthetic
aaguagaaagugggauuguu

SEQ ID NO: 125289 - RNA, 21 nt, Artificial Sequence
  Synthetic
caaguagaaagugggauuguu

SEQ ID NO: 125290 - RNA, 22 nt, Artificial Sequence
  Synthetic
acaaguagaaagugggauuguu

SEQ ID NO: 125291 - RNA, 23 nt, Artificial Sequence
  Synthetic
aacaaguagaaagugggauuguu

SEQ ID NO: 125292 - RNA, 24 nt, Artificial Sequence
  Synthetic
aaacaaguagaaagugggauuguu

SEQ ID NO: 125293 - RNA, 18 nt, Artificial Sequence
  Synthetic
aguuuaacaauuauuguu

SEQ ID NO: 125294 - RNA, 19 nt, Artificial Sequence
  Synthetic
aaguuuaacaauuauuguu

SEQ ID NO: 125295 - RNA, 20 nt, Artificial Sequence
  Synthetic
uaaguuuaacaauuauuguu

SEQ ID NO: 125296 - RNA, 21 nt, Artificial Sequence
  Synthetic
cuaaguuuaacaauuauuguu

SEQ ID NO: 125297 - RNA, 22 nt, Artificial Sequence
  Synthetic
acuaaguuuaacaauuauuguu

SEQ ID NO: 125298 - RNA, 18 nt, Artificial Sequence
  Synthetic
aagguaacgaaacuuguu

SEQ ID NO: 125299 - RNA, 19 nt, Artificial Sequence
  Synthetic
caagguaacgaaacuuguu

SEQ ID NO: 125300 - RNA, 20 nt, Artificial Sequence
  Synthetic
ccaagguaacgaaacuuguu

SEQ ID NO: 125301 - RNA, 21 nt, Artificial Sequence
  Synthetic
accaagguaacgaaacuuguu

SEQ ID NO: 125302 - RNA, 22 nt, Artificial Sequence
  Synthetic
uaccaagguaacgaaacuuguu

SEQ ID NO: 125303 - RNA, 23 nt, Artificial Sequence
  Synthetic
uuaccaagguaacgaaacuuguu

SEQ ID NO: 125304 - RNA, 24 nt, Artificial Sequence
  Synthetic
uuuaccaagguaacgaaacuuguu

SEQ ID NO: 125305 - RNA, 18 nt, Artificial Sequence
  Synthetic
ugccuugucacccuuguu

SEQ ID NO: 125306 - RNA, 20 nt, Artificial Sequence
  Synthetic
agugccuugucacccuuguu

SEQ ID NO: 125307 - RNA, 21 nt, Artificial Sequence
  Synthetic
uagugccuugucacccuuguu

SEQ ID NO: 125308 - RNA, 22 nt, Artificial Sequence
  Synthetic
auagugccuugucacccuuguu

SEQ ID NO: 125309 - RNA, 24 nt, Artificial Sequence
  Synthetic
agauagugccuugucacccuuguu

SEQ ID NO: 125310 - RNA, 19 nt, Artificial Sequence
  Synthetic
agucucaucuacucuuguu

SEQ ID NO: 125311 - RNA, 21 nt, Artificial Sequence
  Synthetic
ugagucucaucuacucuuguu

SEQ ID NO: 125312 - RNA, 22 nt, Artificial Sequence
  Synthetic
cugagucucaucuacucuuguu

SEQ ID NO: 125313 - RNA, 23 nt, Artificial Sequence
  Synthetic
ucugagucucaucuacucuuguu

SEQ ID NO: 125314 - RNA, 24 nt, Artificial Sequence
  Synthetic
aucugagucucaucuacucuuguu

SEQ ID NO: 125315 - RNA, 18 nt, Artificial Sequence
  Synthetic
auuagggagcuaguuguu

SEQ ID NO: 125316 - RNA, 20 nt, Artificial Sequence
  Synthetic
cgauuagggagcuaguuguu

SEQ ID NO: 125317 - RNA, 22 nt, Artificial Sequence
  Synthetic
agcgauuagggagcuaguuguu

SEQ ID NO: 125318 - RNA, 24 nt, Artificial Sequence
  Synthetic
agagcgauuagggagcuaguuguu

SEQ ID NO: 125319 - RNA, 18 nt, Artificial Sequence
  Synthetic
caagcaaguucauuuguu

SEQ ID NO: 125320 - RNA, 19 nt, Artificial Sequence
  Synthetic
acaagcaaguucauuuguu

SEQ ID NO: 125321 - RNA, 21 nt, Artificial Sequence
  Synthetic
ugacaagcaaguucauuuguu

SEQ ID NO: 125322 - RNA, 22 nt, Artificial Sequence
  Synthetic
augacaagcaaguucauuuguu

SEQ ID NO: 125323 - RNA, 23 nt, Artificial Sequence
  Synthetic
aaugacaagcaaguucauuuguu

SEQ ID NO: 125324 - RNA, 24 nt, Artificial Sequence
  Synthetic
uaaugacaagcaaguucauuuguu

SEQ ID NO: 125325 - RNA, 18 nt, Artificial Sequence
  Synthetic
cacguggauugauuuguu

SEQ ID NO: 125326 - RNA, 19 nt, Artificial Sequence
  Synthetic
ccacguggauugauuuguu

SEQ ID NO: 125327 - RNA, 20 nt, Artificial Sequence
  Synthetic
cccacguggauugauuuguu

SEQ ID NO: 125328 - RNA, 21 nt, Artificial Sequence
  Synthetic
acccacguggauugauuuguu

SEQ ID NO: 125329 - RNA, 22 nt, Artificial Sequence
  Synthetic
uacccacguggauugauuuguu

SEQ ID NO: 125330 - RNA, 23 nt, Artificial Sequence
  Synthetic
uuacccacguggauugauuuguu

SEQ ID NO: 125331 - RNA, 24 nt, Artificial Sequence
  Synthetic
uuuacccacguggauugauuuguu

SEQ ID NO: 125332 - RNA, 18 nt, Artificial Sequence
  Synthetic
uaagugguauucuuuguu

SEQ ID NO: 125333 - RNA, 20 nt, Artificial Sequence
  Synthetic
aguaagugguauucuuuguu

SEQ ID NO: 125334 - RNA, 21 nt, Artificial Sequence
  Synthetic
aaguaagugguauucuuuguu

SEQ ID NO: 125335 - RNA, 22 nt, Artificial Sequence
  Synthetic
uaaguaagugguauucuuuguu

SEQ ID NO: 125336 - RNA, 23 nt, Artificial Sequence
  Synthetic
cuaaguaagugguauucuuuguu

SEQ ID NO: 125337 - RNA, 21 nt, Artificial Sequence
  Synthetic
caaguaaaauaaauguuuguu

SEQ ID NO: 125338 - RNA, 22 nt, Artificial Sequence
  Synthetic
acaaguaaaauaaauguuuguu

SEQ ID NO: 125339 - RNA, 23 nt, Artificial Sequence
  Synthetic
uacaaguaaaauaaauguuuguu

SEQ ID NO: 125340 - RNA, 24 nt, Artificial Sequence
  Synthetic
cuacaaguaaaauaaauguuuguu

SEQ ID NO: 125341 - RNA, 18 nt, Artificial Sequence
  Synthetic
uuugcaaaucuguuuguu

SEQ ID NO: 125342 - RNA, 19 nt, Artificial Sequence
  Synthetic
uuuugcaaaucuguuuguu

SEQ ID NO: 125343 - RNA, 20 nt, Artificial Sequence
  Synthetic
auuuugcaaaucuguuuguu

SEQ ID NO: 125344 - RNA, 21 nt, Artificial Sequence
  Synthetic
aauuuugcaaaucuguuuguu

SEQ ID NO: 125345 - RNA, 22 nt, Artificial Sequence
  Synthetic
uaauuuugcaaaucuguuuguu

SEQ ID NO: 125346 - RNA, 23 nt, Artificial Sequence
  Synthetic
auaauuuugcaaaucuguuuguu

SEQ ID NO: 125347 - RNA, 24 nt, Artificial Sequence
  Synthetic
cauaauuuugcaaaucuguuuguu

SEQ ID NO: 125348 - RNA, 18 nt, Artificial Sequence
  Synthetic
uuucacaguguuuuuguu

SEQ ID NO: 125349 - RNA, 19 nt, Artificial Sequence
  Synthetic
uuuucacaguguuuuuguu

SEQ ID NO: 125350 - RNA, 20 nt, Artificial Sequence
  Synthetic
cuuuucacaguguuuuuguu

SEQ ID NO: 125351 - RNA, 21 nt, Artificial Sequence
  Synthetic
ucuuuucacaguguuuuuguu

SEQ ID NO: 125352 - RNA, 22 nt, Artificial Sequence
  Synthetic
cucuuuucacaguguuuuuguu

SEQ ID NO: 125353 - RNA, 23 nt, Artificial Sequence
  Synthetic
ucucuuuucacaguguuuuuguu

SEQ ID NO: 125354 - RNA, 24 nt, Artificial Sequence
  Synthetic
aucucuuuucacaguguuuuuguu

SEQ ID NO: 125355 - RNA, 19 nt, Artificial Sequence
  Synthetic
agcucaucaguuuuuuguu

SEQ ID NO: 125356 - RNA, 20 nt, Artificial Sequence
  Synthetic
uagcucaucaguuuuuuguu

SEQ ID NO: 125357 - RNA, 21 nt, Artificial Sequence
  Synthetic
auagcucaucaguuuuuuguu

SEQ ID NO: 125358 - RNA, 22 nt, Artificial Sequence
  Synthetic
uauagcucaucaguuuuuuguu

SEQ ID NO: 125359 - RNA, 23 nt, Artificial Sequence
  Synthetic
uuauagcucaucaguuuuuuguu

SEQ ID NO: 125360 - RNA, 24 nt, Artificial Sequence
  Synthetic
uuuauagcucaucaguuuuuuguu

SEQ ID NO: 125361 - RNA, 18 nt, Artificial Sequence
  Synthetic
uggauacauaaaaaauuu

SEQ ID NO: 125362 - RNA, 19 nt, Artificial Sequence
  Synthetic
auggauacauaaaaaauuu

SEQ ID NO: 125363 - RNA, 20 nt, Artificial Sequence
  Synthetic
aauggauacauaaaaaauuu

SEQ ID NO: 125364 - RNA, 21 nt, Artificial Sequence
  Synthetic
aaauggauacauaaaaaauuu

SEQ ID NO: 125365 - RNA, 24 nt, Artificial Sequence
  Synthetic
aggaaauggauacauaaaaaauuu

SEQ ID NO: 125366 - RNA, 21 nt, Artificial Sequence
  Synthetic
uuuuuacuuucagaaaaauuu

SEQ ID NO: 125367 - RNA, 23 nt, Artificial Sequence
  Synthetic
uguuuuuacuuucagaaaaauuu

SEQ ID NO: 125368 - RNA, 24 nt, Artificial Sequence
  Synthetic
uuguuuuuacuuucagaaaaauuu

SEQ ID NO: 125369 - RNA, 18 nt, Artificial Sequence
  Synthetic
agggguuuguaaaaauuu

SEQ ID NO: 125370 - RNA, 19 nt, Artificial Sequence
  Synthetic
cagggguuuguaaaaauuu

SEQ ID NO: 125371 - RNA, 20 nt, Artificial Sequence
  Synthetic
ccagggguuuguaaaaauuu

SEQ ID NO: 125372 - RNA, 21 nt, Artificial Sequence
  Synthetic
uccagggguuuguaaaaauuu

SEQ ID NO: 125373 - RNA, 22 nt, Artificial Sequence
  Synthetic
uuccagggguuuguaaaaauuu

SEQ ID NO: 125374 - RNA, 23 nt, Artificial Sequence
  Synthetic
uuuccagggguuuguaaaaauuu

SEQ ID NO: 125375 - RNA, 24 nt, Artificial Sequence
  Synthetic
uuuuccagggguuuguaaaaauuu

SEQ ID NO: 125376 - RNA, 18 nt, Artificial Sequence
  Synthetic
aaaauaaggucaaaauuu

SEQ ID NO: 125377 - RNA, 19 nt, Artificial Sequence
  Synthetic
aaaaauaaggucaaaauuu

SEQ ID NO: 125378 - RNA, 21 nt, Artificial Sequence
  Synthetic
agaaaaauaaggucaaaauuu

SEQ ID NO: 125379 - RNA, 22 nt, Artificial Sequence
  Synthetic
aagaaaaauaaggucaaaauuu

SEQ ID NO: 125380 - RNA, 23 nt, Artificial Sequence
  Synthetic
uaagaaaaauaaggucaaaauuu

SEQ ID NO: 125381 - RNA, 24 nt, Artificial Sequence
  Synthetic
cuaagaaaaauaaggucaaaauuu

SEQ ID NO: 125382 - RNA, 18 nt, Artificial Sequence
  Synthetic
uggaguuagauaaaauuu

SEQ ID NO: 125383 - RNA, 20 nt, Artificial Sequence
  Synthetic
uguggaguuagauaaaauuu

SEQ ID NO: 125384 - RNA, 21 nt, Artificial Sequence
  Synthetic
cuguggaguuagauaaaauuu

SEQ ID NO: 125385 - RNA, 23 nt, Artificial Sequence
  Synthetic
agcuguggaguuagauaaaauuu

SEQ ID NO: 125386 - RNA, 24 nt, Artificial Sequence
  Synthetic
aagcuguggaguuagauaaaauuu

SEQ ID NO: 125387 - RNA, 19 nt, Artificial Sequence
  Synthetic
uguugaagucuuaaaauuu

SEQ ID NO: 125388 - RNA, 20 nt, Artificial Sequence
  Synthetic
cuguugaagucuuaaaauuu

SEQ ID NO: 125389 - RNA, 21 nt, Artificial Sequence
  Synthetic
acuguugaagucuuaaaauuu

SEQ ID NO: 125390 - RNA, 23 nt, Artificial Sequence
  Synthetic
ugacuguugaagucuuaaaauuu

SEQ ID NO: 125391 - RNA, 24 nt, Artificial Sequence
  Synthetic
augacuguugaagucuuaaaauuu

SEQ ID NO: 125392 - RNA, 20 nt, Artificial Sequence
  Synthetic
ugguggcacugaccaaauuu

SEQ ID NO: 125393 - RNA, 21 nt, Artificial Sequence
  Synthetic
uugguggcacugaccaaauuu

SEQ ID NO: 125394 - RNA, 22 nt, Artificial Sequence
  Synthetic
cuugguggcacugaccaaauuu

SEQ ID NO: 125395 - RNA, 23 nt, Artificial Sequence
  Synthetic
ccuugguggcacugaccaaauuu

SEQ ID NO: 125396 - RNA, 24 nt, Artificial Sequence
  Synthetic
uccuugguggcacugaccaaauuu

SEQ ID NO: 125397 - RNA, 22 nt, Artificial Sequence
  Synthetic
aggauaauuuucauagaaauuu

SEQ ID NO: 125398 - RNA, 23 nt, Artificial Sequence
  Synthetic
aaggauaauuuucauagaaauuu

SEQ ID NO: 125399 - RNA, 24 nt, Artificial Sequence
  Synthetic
aaaggauaauuuucauagaaauuu

SEQ ID NO: 125400 - RNA, 19 nt, Artificial Sequence
  Synthetic
agcauauggugcuaaauuu

SEQ ID NO: 125401 - RNA, 20 nt, Artificial Sequence
  Synthetic
uagcauauggugcuaaauuu

SEQ ID NO: 125402 - RNA, 21 nt, Artificial Sequence
  Synthetic
auagcauauggugcuaaauuu

SEQ ID NO: 125403 - RNA, 22 nt, Artificial Sequence
  Synthetic
uauagcauauggugcuaaauuu

SEQ ID NO: 125404 - RNA, 23 nt, Artificial Sequence
  Synthetic
uuauagcauauggugcuaaauuu

SEQ ID NO: 125405 - RNA, 24 nt, Artificial Sequence
  Synthetic
auuauagcauauggugcuaaauuu

SEQ ID NO: 125406 - RNA, 20 nt, Artificial Sequence
  Synthetic
ugguuuggcaaauuaaauuu

SEQ ID NO: 125407 - RNA, 22 nt, Artificial Sequence
  Synthetic
ugugguuuggcaaauuaaauuu

SEQ ID NO: 125408 - RNA, 23 nt, Artificial Sequence
  Synthetic
cugugguuuggcaaauuaaauuu

SEQ ID NO: 125409 - RNA, 24 nt, Artificial Sequence
  Synthetic
ccugugguuuggcaaauuaaauuu

SEQ ID NO: 125410 - RNA, 19 nt, Artificial Sequence
  Synthetic
uguucauaauaaacaauuu

SEQ ID NO: 125411 - RNA, 21 nt, Artificial Sequence
  Synthetic
uguguucauaauaaacaauuu

SEQ ID NO: 125412 - RNA, 22 nt, Artificial Sequence
  Synthetic
auguguucauaauaaacaauuu

SEQ ID NO: 125413 - RNA, 23 nt, Artificial Sequence
  Synthetic
uauguguucauaauaaacaauuu

SEQ ID NO: 125414 - RNA, 24 nt, Artificial Sequence
  Synthetic
cuauguguucauaauaaacaauuu

SEQ ID NO: 125415 - RNA, 18 nt, Artificial Sequence
  Synthetic
auagcaacgauacaauuu

SEQ ID NO: 125416 - RNA, 19 nt, Artificial Sequence
  Synthetic
cauagcaacgauacaauuu

SEQ ID NO: 125417 - RNA, 21 nt, Artificial Sequence
  Synthetic
agcauagcaacgauacaauuu

SEQ ID NO: 125418 - RNA, 23 nt, Artificial Sequence
  Synthetic
ugagcauagcaacgauacaauuu

SEQ ID NO: 125419 - RNA, 24 nt, Artificial Sequence
  Synthetic
uugagcauagcaacgauacaauuu

SEQ ID NO: 125420 - RNA, 18 nt, Artificial Sequence
  Synthetic
agaugacauaaccaauuu

SEQ ID NO: 125421 - RNA, 19 nt, Artificial Sequence
  Synthetic
uagaugacauaaccaauuu

SEQ ID NO: 125422 - RNA, 20 nt, Artificial Sequence
  Synthetic
uuagaugacauaaccaauuu

SEQ ID NO: 125423 - RNA, 21 nt, Artificial Sequence
  Synthetic
cuuagaugacauaaccaauuu

SEQ ID NO: 125424 - RNA, 22 nt, Artificial Sequence
  Synthetic
ucuuagaugacauaaccaauuu

SEQ ID NO: 125425 - RNA, 23 nt, Artificial Sequence
  Synthetic
uucuuagaugacauaaccaauuu

SEQ ID NO: 125426 - RNA, 24 nt, Artificial Sequence
  Synthetic
cuucuuagaugacauaaccaauuu

SEQ ID NO: 125427 - RNA, 21 nt, Artificial Sequence
  Synthetic
ucagaguuaagaaugcaauuu

SEQ ID NO: 125428 - RNA, 22 nt, Artificial Sequence
  Synthetic
aucagaguuaagaaugcaauuu

SEQ ID NO: 125429 - RNA, 23 nt, Artificial Sequence
  Synthetic
aaucagaguuaagaaugcaauuu

SEQ ID NO: 125430 - RNA, 24 nt, Artificial Sequence
  Synthetic
aaaucagaguuaagaaugcaauuu

SEQ ID NO: 125431 - RNA, 18 nt, Artificial Sequence
  Synthetic
uacagucucuugcaauuu

SEQ ID NO: 125432 - RNA, 20 nt, Artificial Sequence
  Synthetic
aguacagucucuugcaauuu

SEQ ID NO: 125433 - RNA, 21 nt, Artificial Sequence
  Synthetic
caguacagucucuugcaauuu

SEQ ID NO: 125434 - RNA, 22 nt, Artificial Sequence
  Synthetic
ccaguacagucucuugcaauuu

SEQ ID NO: 125435 - RNA, 23 nt, Artificial Sequence
  Synthetic
cccaguacagucucuugcaauuu

SEQ ID NO: 125436 - RNA, 18 nt, Artificial Sequence
  Synthetic
ucagagguuccucaauuu

SEQ ID NO: 125437 - RNA, 19 nt, Artificial Sequence
  Synthetic
uucagagguuccucaauuu

SEQ ID NO: 125438 - RNA, 20 nt, Artificial Sequence
  Synthetic
auucagagguuccucaauuu

SEQ ID NO: 125439 - RNA, 22 nt, Artificial Sequence
  Synthetic
ugauucagagguuccucaauuu

SEQ ID NO: 125440 - RNA, 23 nt, Artificial Sequence
  Synthetic
augauucagagguuccucaauuu

SEQ ID NO: 125441 - RNA, 24 nt, Artificial Sequence
  Synthetic
uaugauucagagguuccucaauuu

SEQ ID NO: 125442 - RNA, 18 nt, Artificial Sequence
  Synthetic
ugcacagugacagaauuu

SEQ ID NO: 125443 - RNA, 19 nt, Artificial Sequence
  Synthetic
uugcacagugacagaauuu

SEQ ID NO: 125444 - RNA, 20 nt, Artificial Sequence
  Synthetic
cuugcacagugacagaauuu

SEQ ID NO: 125445 - RNA, 21 nt, Artificial Sequence
  Synthetic
acuugcacagugacagaauuu

SEQ ID NO: 125446 - RNA, 22 nt, Artificial Sequence
  Synthetic
uacuugcacagugacagaauuu

SEQ ID NO: 125447 - RNA, 23 nt, Artificial Sequence
  Synthetic
uuacuugcacagugacagaauuu

SEQ ID NO: 125448 - RNA, 24 nt, Artificial Sequence
  Synthetic
auuacuugcacagugacagaauuu

SEQ ID NO: 125449 - RNA, 18 nt, Artificial Sequence
  Synthetic
acauugccaugagaauuu

SEQ ID NO: 125450 - RNA, 19 nt, Artificial Sequence
  Synthetic
aacauugccaugagaauuu

SEQ ID NO: 125451 - RNA, 20 nt, Artificial Sequence
  Synthetic
uaacauugccaugagaauuu

SEQ ID NO: 125452 - RNA, 21 nt, Artificial Sequence
  Synthetic
uuaacauugccaugagaauuu

SEQ ID NO: 125453 - RNA, 22 nt, Artificial Sequence
  Synthetic
auuaacauugccaugagaauuu

SEQ ID NO: 125454 - RNA, 23 nt, Artificial Sequence
  Synthetic
cauuaacauugccaugagaauuu

SEQ ID NO: 125455 - RNA, 18 nt, Artificial Sequence
  Synthetic
auuguggauauggaauuu

SEQ ID NO: 125456 - RNA, 21 nt, Artificial Sequence
  Synthetic
aggauuguggauauggaauuu

SEQ ID NO: 125457 - RNA, 22 nt, Artificial Sequence
  Synthetic
aaggauuguggauauggaauuu

SEQ ID NO: 125458 - RNA, 23 nt, Artificial Sequence
  Synthetic
caaggauuguggauauggaauuu

SEQ ID NO: 125459 - RNA, 18 nt, Artificial Sequence
  Synthetic
auuuuuugguuggaauuu

SEQ ID NO: 125460 - RNA, 19 nt, Artificial Sequence
  Synthetic
cauuuuuugguuggaauuu

SEQ ID NO: 125461 - RNA, 21 nt, Artificial Sequence
  Synthetic
agcauuuuuugguuggaauuu

SEQ ID NO: 125462 - RNA, 22 nt, Artificial Sequence
  Synthetic
uagcauuuuuugguuggaauuu

SEQ ID NO: 125463 - RNA, 24 nt, Artificial Sequence
  Synthetic
uguagcauuuuuugguuggaauuu

SEQ ID NO: 125464 - RNA, 18 nt, Artificial Sequence
  Synthetic
uugaccuuuauugaauuu

SEQ ID NO: 125465 - RNA, 21 nt, Artificial Sequence
  Synthetic
ugguugaccuuuauugaauuu

SEQ ID NO: 125466 - RNA, 22 nt, Artificial Sequence
  Synthetic
uugguugaccuuuauugaauuu

SEQ ID NO: 125467 - RNA, 24 nt, Artificial Sequence
  Synthetic
cguugguugaccuuuauugaauuu

SEQ ID NO: 125468 - RNA, 22 nt, Artificial Sequence
  Synthetic
ugucucuguuuuaaaauaauuu

SEQ ID NO: 125469 - RNA, 23 nt, Artificial Sequence
  Synthetic
cugucucuguuuuaaaauaauuu

SEQ ID NO: 125470 - RNA, 24 nt, Artificial Sequence
  Synthetic
acugucucuguuuuaaaauaauuu

SEQ ID NO: 125471 - RNA, 18 nt, Artificial Sequence
  Synthetic
ucuacaaaagaauaauuu

SEQ ID NO: 125472 - RNA, 21 nt, Artificial Sequence
  Synthetic
aggucuacaaaagaauaauuu

SEQ ID NO: 125473 - RNA, 22 nt, Artificial Sequence
  Synthetic
aaggucuacaaaagaauaauuu

SEQ ID NO: 125474 - RNA, 23 nt, Artificial Sequence
  Synthetic
aaaggucuacaaaagaauaauuu

SEQ ID NO: 125475 - RNA, 24 nt, Artificial Sequence
  Synthetic
aaaaggucuacaaaagaauaauuu

SEQ ID NO: 125476 - RNA, 18 nt, Artificial Sequence
  Synthetic
ucuguuuugaauuaauuu

SEQ ID NO: 125477 - RNA, 19 nt, Artificial Sequence
  Synthetic
uucuguuuugaauuaauuu

SEQ ID NO: 125478 - RNA, 20 nt, Artificial Sequence
  Synthetic
cuucuguuuugaauuaauuu

SEQ ID NO: 125479 - RNA, 21 nt, Artificial Sequence
  Synthetic
acuucuguuuugaauuaauuu

SEQ ID NO: 125480 - RNA, 22 nt, Artificial Sequence
  Synthetic
uacuucuguuuugaauuaauuu

SEQ ID NO: 125481 - RNA, 23 nt, Artificial Sequence
  Synthetic
auacuucuguuuugaauuaauuu

SEQ ID NO: 125482 - RNA, 24 nt, Artificial Sequence
  Synthetic
aauacuucuguuuugaauuaauuu

SEQ ID NO: 125483 - RNA, 21 nt, Artificial Sequence
  Synthetic
cacuauaaaaauaauuaauuu

SEQ ID NO: 125484 - RNA, 22 nt, Artificial Sequence
  Synthetic
ucacuauaaaaauaauuaauuu

SEQ ID NO: 125485 - RNA, 24 nt, Artificial Sequence
  Synthetic
ugucacuauaaaaauaauuaauuu

SEQ ID NO: 125486 - RNA, 21 nt, Artificial Sequence
  Synthetic
cauaauuucauauauuaauuu

SEQ ID NO: 125487 - RNA, 22 nt, Artificial Sequence
  Synthetic
acauaauuucauauauuaauuu

SEQ ID NO: 125488 - RNA, 23 nt, Artificial Sequence
  Synthetic
aacauaauuucauauauuaauuu

SEQ ID NO: 125489 - RNA, 24 nt, Artificial Sequence
  Synthetic
caacauaauuucauauauuaauuu

SEQ ID NO: 125490 - RNA, 22 nt, Artificial Sequence
  Synthetic
agcucccacacccaguuaauuu

SEQ ID NO: 125491 - RNA, 24 nt, Artificial Sequence
  Synthetic
ugagcucccacacccaguuaauuu

SEQ ID NO: 125492 - RNA, 19 nt, Artificial Sequence
  Synthetic
agucaaugaaaaaacauuu

SEQ ID NO: 125493 - RNA, 20 nt, Artificial Sequence
  Synthetic
uagucaaugaaaaaacauuu

SEQ ID NO: 125494 - RNA, 21 nt, Artificial Sequence
  Synthetic
auagucaaugaaaaaacauuu

SEQ ID NO: 125495 - RNA, 22 nt, Artificial Sequence
  Synthetic
uauagucaaugaaaaaacauuu

SEQ ID NO: 125496 - RNA, 23 nt, Artificial Sequence
  Synthetic
uuauagucaaugaaaaaacauuu

SEQ ID NO: 125497 - RNA, 24 nt, Artificial Sequence
  Synthetic
auuauagucaaugaaaaaacauuu

SEQ ID NO: 125498 - RNA, 18 nt, Artificial Sequence
  Synthetic
cuggaggaagaaacauuu

SEQ ID NO: 125499 - RNA, 19 nt, Artificial Sequence
  Synthetic
acuggaggaagaaacauuu

SEQ ID NO: 125500 - RNA, 21 nt, Artificial Sequence
  Synthetic
agacuggaggaagaaacauuu

SEQ ID NO: 125501 - RNA, 23 nt, Artificial Sequence
  Synthetic
agagacuggaggaagaaacauuu

SEQ ID NO: 125502 - RNA, 24 nt, Artificial Sequence
  Synthetic
aagagacuggaggaagaaacauuu

SEQ ID NO: 125503 - RNA, 21 nt, Artificial Sequence
  Synthetic
aaauuagaacaauaaacauuu

SEQ ID NO: 125504 - RNA, 22 nt, Artificial Sequence
  Synthetic
aaaauuagaacaauaaacauuu

SEQ ID NO: 125505 - RNA, 23 nt, Artificial Sequence
  Synthetic
uaaaauuagaacaauaaacauuu

SEQ ID NO: 125506 - RNA, 24 nt, Artificial Sequence
  Synthetic
uuaaaauuagaacaauaaacauuu

SEQ ID NO: 125507 - RNA, 19 nt, Artificial Sequence
  Synthetic
ugagcaauuaucaacauuu

SEQ ID NO: 125508 - RNA, 20 nt, Artificial Sequence
  Synthetic
uugagcaauuaucaacauuu

SEQ ID NO: 125509 - RNA, 21 nt, Artificial Sequence
  Synthetic
cuugagcaauuaucaacauuu

SEQ ID NO: 125510 - RNA, 22 nt, Artificial Sequence
  Synthetic
ccuugagcaauuaucaacauuu

SEQ ID NO: 125511 - RNA, 23 nt, Artificial Sequence
  Synthetic
accuugagcaauuaucaacauuu

SEQ ID NO: 125512 - RNA, 24 nt, Artificial Sequence
  Synthetic
caccuugagcaauuaucaacauuu

SEQ ID NO: 125513 - RNA, 18 nt, Artificial Sequence
  Synthetic
acuguggcucacacauuu

SEQ ID NO: 125514 - RNA, 20 nt, Artificial Sequence
  Synthetic
ugacuguggcucacacauuu

SEQ ID NO: 125515 - RNA, 21 nt, Artificial Sequence
  Synthetic
augacuguggcucacacauuu

SEQ ID NO: 125516 - RNA, 23 nt, Artificial Sequence
  Synthetic
agaugacuguggcucacacauuu

SEQ ID NO: 125517 - RNA, 24 nt, Artificial Sequence
  Synthetic
cagaugacuguggcucacacauuu

SEQ ID NO: 125518 - RNA, 18 nt, Artificial Sequence
  Synthetic
aauuacaauaucacauuu

SEQ ID NO: 125519 - RNA, 19 nt, Artificial Sequence
  Synthetic
uaauuacaauaucacauuu

SEQ ID NO: 125520 - RNA, 21 nt, Artificial Sequence
  Synthetic
aguaauuacaauaucacauuu

SEQ ID NO: 125521 - RNA, 22 nt, Artificial Sequence
  Synthetic
uaguaauuacaauaucacauuu

SEQ ID NO: 125522 - RNA, 18 nt, Artificial Sequence
  Synthetic
ugaaauccuaagacauuu

SEQ ID NO: 125523 - RNA, 19 nt, Artificial Sequence
  Synthetic
augaaauccuaagacauuu

SEQ ID NO: 125524 - RNA, 20 nt, Artificial Sequence
  Synthetic
aaugaaauccuaagacauuu

SEQ ID NO: 125525 - RNA, 21 nt, Artificial Sequence
  Synthetic
caaugaaauccuaagacauuu

SEQ ID NO: 125526 - RNA, 22 nt, Artificial Sequence
  Synthetic
ucaaugaaauccuaagacauuu

SEQ ID NO: 125527 - RNA, 23 nt, Artificial Sequence
  Synthetic
aucaaugaaauccuaagacauuu

SEQ ID NO: 125528 - RNA, 24 nt, Artificial Sequence
  Synthetic
aaucaaugaaauccuaagacauuu

SEQ ID NO: 125529 - RNA, 18 nt, Artificial Sequence
  Synthetic
aaacuccuugugacauuu

SEQ ID NO: 125530 - RNA, 19 nt, Artificial Sequence
  Synthetic
caaacuccuugugacauuu

SEQ ID NO: 125531 - RNA, 20 nt, Artificial Sequence
  Synthetic
ucaaacuccuugugacauuu

SEQ ID NO: 125532 - RNA, 21 nt, Artificial Sequence
  Synthetic
aucaaacuccuugugacauuu

SEQ ID NO: 125533 - RNA, 22 nt, Artificial Sequence
  Synthetic
aaucaaacuccuugugacauuu

SEQ ID NO: 125534 - RNA, 23 nt, Artificial Sequence
  Synthetic
caaucaaacuccuugugacauuu

SEQ ID NO: 125535 - RNA, 19 nt, Artificial Sequence
  Synthetic
aguacaguuacauacauuu

SEQ ID NO: 125536 - RNA, 20 nt, Artificial Sequence
  Synthetic
uaguacaguuacauacauuu

SEQ ID NO: 125537 - RNA, 21 nt, Artificial Sequence
  Synthetic
auaguacaguuacauacauuu

SEQ ID NO: 125538 - RNA, 22 nt, Artificial Sequence
  Synthetic
uauaguacaguuacauacauuu

SEQ ID NO: 125539 - RNA, 23 nt, Artificial Sequence
  Synthetic
uuauaguacaguuacauacauuu

SEQ ID NO: 125540 - RNA, 24 nt, Artificial Sequence
  Synthetic
cuuauaguacaguuacauacauuu

SEQ ID NO: 125541 - RNA, 19 nt, Artificial Sequence
  Synthetic
agaucuuucccauacauuu

SEQ ID NO: 125542 - RNA, 20 nt, Artificial Sequence
  Synthetic
aagaucuuucccauacauuu

SEQ ID NO: 125543 - RNA, 21 nt, Artificial Sequence
  Synthetic
caagaucuuucccauacauuu

SEQ ID NO: 125544 - RNA, 22 nt, Artificial Sequence
  Synthetic
ucaagaucuuucccauacauuu

SEQ ID NO: 125545 - RNA, 23 nt, Artificial Sequence
  Synthetic
uucaagaucuuucccauacauuu

SEQ ID NO: 125546 - RNA, 24 nt, Artificial Sequence
  Synthetic
auucaagaucuuucccauacauuu

SEQ ID NO: 125547 - RNA, 18 nt, Artificial Sequence
  Synthetic
acucuguagacuacauuu

SEQ ID NO: 125548 - RNA, 19 nt, Artificial Sequence
  Synthetic
aacucuguagacuacauuu

SEQ ID NO: 125549 - RNA, 20 nt, Artificial Sequence
  Synthetic
aaacucuguagacuacauuu

SEQ ID NO: 125550 - RNA, 21 nt, Artificial Sequence
  Synthetic
uaaacucuguagacuacauuu

SEQ ID NO: 125551 - RNA, 22 nt, Artificial Sequence
  Synthetic
uuaaacucuguagacuacauuu

SEQ ID NO: 125552 - RNA, 23 nt, Artificial Sequence
  Synthetic
uuuaaacucuguagacuacauuu

SEQ ID NO: 125553 - RNA, 24 nt, Artificial Sequence
  Synthetic
auuuaaacucuguagacuacauuu

SEQ ID NO: 125554 - RNA, 18 nt, Artificial Sequence
  Synthetic
cuuccuuuaaguacauuu

SEQ ID NO: 125555 - RNA, 19 nt, Artificial Sequence
  Synthetic
ucuuccuuuaaguacauuu

SEQ ID NO: 125556 - RNA, 20 nt, Artificial Sequence
  Synthetic
uucuuccuuuaaguacauuu

SEQ ID NO: 125557 - RNA, 21 nt, Artificial Sequence
  Synthetic
uuucuuccuuuaaguacauuu

SEQ ID NO: 125558 - RNA, 22 nt, Artificial Sequence
  Synthetic
auuucuuccuuuaaguacauuu

SEQ ID NO: 125559 - RNA, 23 nt, Artificial Sequence
  Synthetic
aauuucuuccuuuaaguacauuu

SEQ ID NO: 125560 - RNA, 24 nt, Artificial Sequence
  Synthetic
uaauuucuuccuuuaaguacauuu

SEQ ID NO: 125561 - RNA, 18 nt, Artificial Sequence
  Synthetic
ucuuucacucuuacauuu

SEQ ID NO: 125562 - RNA, 19 nt, Artificial Sequence
  Synthetic
uucuuucacucuuacauuu

SEQ ID NO: 125563 - RNA, 20 nt, Artificial Sequence
  Synthetic
auucuuucacucuuacauuu

SEQ ID NO: 125564 - RNA, 21 nt, Artificial Sequence
  Synthetic
uauucuuucacucuuacauuu

SEQ ID NO: 125565 - RNA, 22 nt, Artificial Sequence
  Synthetic
cuauucuuucacucuuacauuu

SEQ ID NO: 125566 - RNA, 23 nt, Artificial Sequence
  Synthetic
ccuauucuuucacucuuacauuu

SEQ ID NO: 125567 - RNA, 24 nt, Artificial Sequence
  Synthetic
cccuauucuuucacucuuacauuu

SEQ ID NO: 125568 - RNA, 19 nt, Artificial Sequence
  Synthetic
ugagguuacuggcccauuu

SEQ ID NO: 125569 - RNA, 20 nt, Artificial Sequence
  Synthetic
uugagguuacuggcccauuu

SEQ ID NO: 125570 - RNA, 21 nt, Artificial Sequence
  Synthetic
auugagguuacuggcccauuu

SEQ ID NO: 125571 - RNA, 22 nt, Artificial Sequence
  Synthetic
cauugagguuacuggcccauuu

SEQ ID NO: 125572 - RNA, 24 nt, Artificial Sequence
  Synthetic
ugcauugagguuacuggcccauuu

SEQ ID NO: 125573 - RNA, 18 nt, Artificial Sequence
  Synthetic
auuugcuacugcccauuu

SEQ ID NO: 125574 - RNA, 20 nt, Artificial Sequence
  Synthetic
ugauuugcuacugcccauuu

SEQ ID NO: 125575 - RNA, 21 nt, Artificial Sequence
  Synthetic
augauuugcuacugcccauuu

SEQ ID NO: 125576 - RNA, 23 nt, Artificial Sequence
  Synthetic
agaugauuugcuacugcccauuu

SEQ ID NO: 125577 - RNA, 24 nt, Artificial Sequence
  Synthetic
aagaugauuugcuacugcccauuu

SEQ ID NO: 125578 - RNA, 18 nt, Artificial Sequence
  Synthetic
uuugagcuaaagccauuu

SEQ ID NO: 125579 - RNA, 19 nt, Artificial Sequence
  Synthetic
uuuugagcuaaagccauuu

SEQ ID NO: 125580 - RNA, 18 nt, Artificial Sequence
  Synthetic
aauccuuagaagccauuu

SEQ ID NO: 125581 - RNA, 19 nt, Artificial Sequence
  Synthetic
uaauccuuagaagccauuu

SEQ ID NO: 125582 - RNA, 20 nt, Artificial Sequence
  Synthetic
uuaauccuuagaagccauuu

SEQ ID NO: 125583 - RNA, 22 nt, Artificial Sequence
  Synthetic
cguuaauccuuagaagccauuu

SEQ ID NO: 125584 - RNA, 23 nt, Artificial Sequence
  Synthetic
acguuaauccuuagaagccauuu

SEQ ID NO: 125585 - RNA, 24 nt, Artificial Sequence
  Synthetic
cacguuaauccuuagaagccauuu

SEQ ID NO: 125586 - RNA, 18 nt, Artificial Sequence
  Synthetic
agggaacugaaagcauuu

SEQ ID NO: 125587 - RNA, 19 nt, Artificial Sequence
  Synthetic
aagggaacugaaagcauuu

SEQ ID NO: 125588 - RNA, 20 nt, Artificial Sequence
  Synthetic
uaagggaacugaaagcauuu

SEQ ID NO: 125589 - RNA, 23 nt, Artificial Sequence
  Synthetic
agguaagggaacugaaagcauuu

SEQ ID NO: 125590 - RNA, 24 nt, Artificial Sequence
  Synthetic
aagguaagggaacugaaagcauuu

SEQ ID NO: 125591 - RNA, 18 nt, Artificial Sequence
  Synthetic
uaaauccauucagcauuu

SEQ ID NO: 125592 - RNA, 19 nt, Artificial Sequence
  Synthetic
auaaauccauucagcauuu

SEQ ID NO: 125593 - RNA, 20 nt, Artificial Sequence
  Synthetic
aauaaauccauucagcauuu

SEQ ID NO: 125594 - RNA, 21 nt, Artificial Sequence
  Synthetic
uaauaaauccauucagcauuu

SEQ ID NO: 125595 - RNA, 22 nt, Artificial Sequence
  Synthetic
uuaauaaauccauucagcauuu

SEQ ID NO: 125596 - RNA, 23 nt, Artificial Sequence
  Synthetic
cuuaauaaauccauucagcauuu

SEQ ID NO: 125597 - RNA, 24 nt, Artificial Sequence
  Synthetic
ucuuaauaaauccauucagcauuu

SEQ ID NO: 125598 - RNA, 18 nt, Artificial Sequence
  Synthetic
uccugcuaaagagcauuu

SEQ ID NO: 125599 - RNA, 19 nt, Artificial Sequence
  Synthetic
uuccugcuaaagagcauuu

SEQ ID NO: 125600 - RNA, 20 nt, Artificial Sequence
  Synthetic
auuccugcuaaagagcauuu

SEQ ID NO: 125601 - RNA, 21 nt, Artificial Sequence
  Synthetic
aauuccugcuaaagagcauuu

SEQ ID NO: 125602 - RNA, 22 nt, Artificial Sequence
  Synthetic
caauuccugcuaaagagcauuu

SEQ ID NO: 125603 - RNA, 23 nt, Artificial Sequence
  Synthetic
ucaauuccugcuaaagagcauuu

SEQ ID NO: 125604 - RNA, 24 nt, Artificial Sequence
  Synthetic
aucaauuccugcuaaagagcauuu

SEQ ID NO: 125605 - RNA, 18 nt, Artificial Sequence
  Synthetic
ccuaucgagauggcauuu

SEQ ID NO: 125606 - RNA, 19 nt, Artificial Sequence
  Synthetic
cccuaucgagauggcauuu

SEQ ID NO: 125607 - RNA, 20 nt, Artificial Sequence
  Synthetic
acccuaucgagauggcauuu

SEQ ID NO: 125608 - RNA, 21 nt, Artificial Sequence
  Synthetic
uacccuaucgagauggcauuu

SEQ ID NO: 125609 - RNA, 22 nt, Artificial Sequence
  Synthetic
cuacccuaucgagauggcauuu

SEQ ID NO: 125610 - RNA, 23 nt, Artificial Sequence
  Synthetic
ucuacccuaucgagauggcauuu

SEQ ID NO: 125611 - RNA, 24 nt, Artificial Sequence
  Synthetic
aucuacccuaucgagauggcauuu

SEQ ID NO: 125612 - RNA, 22 nt, Artificial Sequence
  Synthetic
ugaaauacuaaaaaaugcauuu

SEQ ID NO: 125613 - RNA, 23 nt, Artificial Sequence
  Synthetic
uugaaauacuaaaaaaugcauuu

SEQ ID NO: 125614 - RNA, 22 nt, Artificial Sequence
  Synthetic
agaaugcuuaucaaaugcauuu

SEQ ID NO: 125615 - RNA, 23 nt, Artificial Sequence
  Synthetic
uagaaugcuuaucaaaugcauuu

SEQ ID NO: 125616 - RNA, 24 nt, Artificial Sequence
  Synthetic
uuagaaugcuuaucaaaugcauuu

SEQ ID NO: 125617 - RNA, 18 nt, Artificial Sequence
  Synthetic
aaacaagggugugcauuu

SEQ ID NO: 125618 - RNA, 19 nt, Artificial Sequence
  Synthetic
uaaacaagggugugcauuu

SEQ ID NO: 125619 - RNA, 20 nt, Artificial Sequence
  Synthetic
auaaacaagggugugcauuu

SEQ ID NO: 125620 - RNA, 21 nt, Artificial Sequence
  Synthetic
aauaaacaagggugugcauuu

SEQ ID NO: 125621 - RNA, 22 nt, Artificial Sequence
  Synthetic
aaauaaacaagggugugcauuu

SEQ ID NO: 125622 - RNA, 23 nt, Artificial Sequence
  Synthetic
aaaauaaacaagggugugcauuu

SEQ ID NO: 125623 - RNA, 18 nt, Artificial Sequence
  Synthetic
aauuaguagaaaucauuu

SEQ ID NO: 125624 - RNA, 19 nt, Artificial Sequence
  Synthetic
uaauuaguagaaaucauuu

SEQ ID NO: 125625 - RNA, 20 nt, Artificial Sequence
  Synthetic
auaauuaguagaaaucauuu

SEQ ID NO: 125626 - RNA, 21 nt, Artificial Sequence
  Synthetic
uauaauuaguagaaaucauuu

SEQ ID NO: 125627 - RNA, 22 nt, Artificial Sequence
  Synthetic
cuauaauuaguagaaaucauuu

SEQ ID NO: 125628 - RNA, 23 nt, Artificial Sequence
  Synthetic
acuauaauuaguagaaaucauuu

SEQ ID NO: 125629 - RNA, 24 nt, Artificial Sequence
  Synthetic
aacuauaauuaguagaaaucauuu

SEQ ID NO: 125630 - RNA, 18 nt, Artificial Sequence
  Synthetic
ccuugaauaacaucauuu

SEQ ID NO: 125631 - RNA, 19 nt, Artificial Sequence
  Synthetic
accuugaauaacaucauuu

SEQ ID NO: 125632 - RNA, 20 nt, Artificial Sequence
  Synthetic
uaccuugaauaacaucauuu

SEQ ID NO: 125633 - RNA, 21 nt, Artificial Sequence
  Synthetic
cuaccuugaauaacaucauuu

SEQ ID NO: 125634 - RNA, 22 nt, Artificial Sequence
  Synthetic
ucuaccuugaauaacaucauuu

SEQ ID NO: 125635 - RNA, 23 nt, Artificial Sequence
  Synthetic
uucuaccuugaauaacaucauuu

SEQ ID NO: 125636 - RNA, 18 nt, Artificial Sequence
  Synthetic
acacaacuguauucauuu

SEQ ID NO: 125637 - RNA, 20 nt, Artificial Sequence
  Synthetic
agacacaacuguauucauuu

SEQ ID NO: 125638 - RNA, 21 nt, Artificial Sequence
  Synthetic
cagacacaacuguauucauuu

SEQ ID NO: 125639 - RNA, 22 nt, Artificial Sequence
  Synthetic
ucagacacaacuguauucauuu

SEQ ID NO: 125640 - RNA, 23 nt, Artificial Sequence
  Synthetic
aucagacacaacuguauucauuu

SEQ ID NO: 125641 - RNA, 24 nt, Artificial Sequence
  Synthetic
caucagacacaacuguauucauuu

SEQ ID NO: 125642 - RNA, 18 nt, Artificial Sequence
  Synthetic
aaugcccauucuucauuu

SEQ ID NO: 125643 - RNA, 19 nt, Artificial Sequence
  Synthetic
aaaugcccauucuucauuu

SEQ ID NO: 125644 - RNA, 20 nt, Artificial Sequence
  Synthetic
uaaaugcccauucuucauuu

SEQ ID NO: 125645 - RNA, 21 nt, Artificial Sequence
  Synthetic
auaaaugcccauucuucauuu

SEQ ID NO: 125646 - RNA, 22 nt, Artificial Sequence
  Synthetic
uauaaaugcccauucuucauuu

SEQ ID NO: 125647 - RNA, 23 nt, Artificial Sequence
  Synthetic
cuauaaaugcccauucuucauuu

SEQ ID NO: 125648 - RNA, 21 nt, Artificial Sequence
  Synthetic
uuuuugugcauuucuucauuu

SEQ ID NO: 125649 - RNA, 22 nt, Artificial Sequence
  Synthetic
auuuuugugcauuucuucauuu

SEQ ID NO: 125650 - RNA, 23 nt, Artificial Sequence
  Synthetic
cauuuuugugcauuucuucauuu

SEQ ID NO: 125651 - RNA, 24 nt, Artificial Sequence
  Synthetic
ucauuuuugugcauuucuucauuu

SEQ ID NO: 125652 - RNA, 21 nt, Artificial Sequence
  Synthetic
ccuuuuuguaaauuuucauuu

SEQ ID NO: 125653 - RNA, 22 nt, Artificial Sequence
  Synthetic
accuuuuuguaaauuuucauuu

SEQ ID NO: 125654 - RNA, 23 nt, Artificial Sequence
  Synthetic
uaccuuuuuguaaauuuucauuu

SEQ ID NO: 125655 - RNA, 24 nt, Artificial Sequence
  Synthetic
auaccuuuuuguaaauuuucauuu

SEQ ID NO: 125656 - RNA, 18 nt, Artificial Sequence
  Synthetic
uggaauaccuuaagauuu

SEQ ID NO: 125657 - RNA, 19 nt, Artificial Sequence
  Synthetic
auggaauaccuuaagauuu

SEQ ID NO: 125658 - RNA, 20 nt, Artificial Sequence
  Synthetic
aauggaauaccuuaagauuu

SEQ ID NO: 125659 - RNA, 21 nt, Artificial Sequence
  Synthetic
aaauggaauaccuuaagauuu

SEQ ID NO: 125660 - RNA, 22 nt, Artificial Sequence
  Synthetic
caaauggaauaccuuaagauuu

SEQ ID NO: 125661 - RNA, 23 nt, Artificial Sequence
  Synthetic
ucaaauggaauaccuuaagauuu

SEQ ID NO: 125662 - RNA, 24 nt, Artificial Sequence
  Synthetic
uucaaauggaauaccuuaagauuu

SEQ ID NO: 125663 - RNA, 19 nt, Artificial Sequence
  Synthetic
agcaguaacucagagauuu

SEQ ID NO: 125664 - RNA, 20 nt, Artificial Sequence
  Synthetic
cagcaguaacucagagauuu

SEQ ID NO: 125665 - RNA, 21 nt, Artificial Sequence
  Synthetic
ucagcaguaacucagagauuu

SEQ ID NO: 125666 - RNA, 22 nt, Artificial Sequence
  Synthetic
uucagcaguaacucagagauuu

SEQ ID NO: 125667 - RNA, 23 nt, Artificial Sequence
  Synthetic
cuucagcaguaacucagagauuu

SEQ ID NO: 125668 - RNA, 24 nt, Artificial Sequence
  Synthetic
ucuucagcaguaacucagagauuu

SEQ ID NO: 125669 - RNA, 21 nt, Artificial Sequence
  Synthetic
auguuuuuaaaauagagauuu

SEQ ID NO: 125670 - RNA, 22 nt, Artificial Sequence
  Synthetic
aauguuuuuaaaauagagauuu

SEQ ID NO: 125671 - RNA, 24 nt, Artificial Sequence
  Synthetic
ugaauguuuuuaaaauagagauuu

SEQ ID NO: 125672 - RNA, 19 nt, Artificial Sequence
  Synthetic
agauaucauggugagauuu

SEQ ID NO: 125673 - RNA, 19 nt, Artificial Sequence
  Synthetic
ugacuuuucuuauagauuu

SEQ ID NO: 125674 - RNA, 21 nt, Artificial Sequence
  Synthetic
ugugacuuuucuuauagauuu

SEQ ID NO: 125675 - RNA, 22 nt, Artificial Sequence
  Synthetic
cugugacuuuucuuauagauuu

SEQ ID NO: 125676 - RNA, 23 nt, Artificial Sequence
  Synthetic
ccugugacuuuucuuauagauuu

SEQ ID NO: 125677 - RNA, 18 nt, Artificial Sequence
  Synthetic
ugacgauuguuacgauuu

SEQ ID NO: 125678 - RNA, 19 nt, Artificial Sequence
  Synthetic
uugacgauuguuacgauuu

SEQ ID NO: 125679 - RNA, 21 nt, Artificial Sequence
  Synthetic
uguugacgauuguuacgauuu

SEQ ID NO: 125680 - RNA, 23 nt, Artificial Sequence
  Synthetic
uguguugacgauuguuacgauuu

SEQ ID NO: 125681 - RNA, 24 nt, Artificial Sequence
  Synthetic
cuguguugacgauuguuacgauuu

SEQ ID NO: 125682 - RNA, 18 nt, Artificial Sequence
  Synthetic
uauaaguaaaaaggauuu

SEQ ID NO: 125683 - RNA, 20 nt, Artificial Sequence
  Synthetic
aguauaaguaaaaaggauuu

SEQ ID NO: 125684 - RNA, 21 nt, Artificial Sequence
  Synthetic
aaguauaaguaaaaaggauuu

SEQ ID NO: 125685 - RNA, 22 nt, Artificial Sequence
  Synthetic
aaaguauaaguaaaaaggauuu

SEQ ID NO: 125686 - RNA, 23 nt, Artificial Sequence
  Synthetic
aaaaguauaaguaaaaaggauuu

SEQ ID NO: 125687 - RNA, 24 nt, Artificial Sequence
  Synthetic
aaaaaguauaaguaaaaaggauuu

SEQ ID NO: 125688 - RNA, 19 nt, Artificial Sequence
  Synthetic
aggcaggcuucugggauuu

SEQ ID NO: 125689 - RNA, 20 nt, Artificial Sequence
  Synthetic
caggcaggcuucugggauuu

SEQ ID NO: 125690 - RNA, 22 nt, Artificial Sequence
  Synthetic
agcaggcaggcuucugggauuu

SEQ ID NO: 125691 - RNA, 23 nt, Artificial Sequence
  Synthetic
aagcaggcaggcuucugggauuu

SEQ ID NO: 125692 - RNA, 18 nt, Artificial Sequence
  Synthetic
acgagcagcuauggauuu

SEQ ID NO: 125693 - RNA, 19 nt, Artificial Sequence
  Synthetic
aacgagcagcuauggauuu

SEQ ID NO: 125694 - RNA, 20 nt, Artificial Sequence
  Synthetic
aaacgagcagcuauggauuu

SEQ ID NO: 125695 - RNA, 21 nt, Artificial Sequence
  Synthetic
uaaacgagcagcuauggauuu

SEQ ID NO: 125696 - RNA, 22 nt, Artificial Sequence
  Synthetic
uuaaacgagcagcuauggauuu

SEQ ID NO: 125697 - RNA, 23 nt, Artificial Sequence
  Synthetic
cuuaaacgagcagcuauggauuu

SEQ ID NO: 125698 - RNA, 24 nt, Artificial Sequence
  Synthetic
ucuuaaacgagcagcuauggauuu

SEQ ID NO: 125699 - RNA, 18 nt, Artificial Sequence
  Synthetic
ugaggugguuguggauuu

SEQ ID NO: 125700 - RNA, 19 nt, Artificial Sequence
  Synthetic
uugaggugguuguggauuu

SEQ ID NO: 125701 - RNA, 20 nt, Artificial Sequence
  Synthetic
cuugaggugguuguggauuu

SEQ ID NO: 125702 - RNA, 21 nt, Artificial Sequence
  Synthetic
acuugaggugguuguggauuu

SEQ ID NO: 125703 - RNA, 22 nt, Artificial Sequence
  Synthetic
cacuugaggugguuguggauuu

SEQ ID NO: 125704 - RNA, 23 nt, Artificial Sequence
  Synthetic
acacuugaggugguuguggauuu

SEQ ID NO: 125705 - RNA, 24 nt, Artificial Sequence
  Synthetic
aacacuugaggugguuguggauuu

SEQ ID NO: 125706 - RNA, 18 nt, Artificial Sequence
  Synthetic
ugcuuucugcuuggauuu

SEQ ID NO: 125707 - RNA, 19 nt, Artificial Sequence
  Synthetic
uugcuuucugcuuggauuu

SEQ ID NO: 125708 - RNA, 20 nt, Artificial Sequence
  Synthetic
cuugcuuucugcuuggauuu

SEQ ID NO: 125709 - RNA, 21 nt, Artificial Sequence
  Synthetic
acuugcuuucugcuuggauuu

SEQ ID NO: 125710 - RNA, 22 nt, Artificial Sequence
  Synthetic
uacuugcuuucugcuuggauuu

SEQ ID NO: 125711 - RNA, 23 nt, Artificial Sequence
  Synthetic
uuacuugcuuucugcuuggauuu

SEQ ID NO: 125712 - RNA, 24 nt, Artificial Sequence
  Synthetic
uuuacuugcuuucugcuuggauuu

SEQ ID NO: 125713 - RNA, 18 nt, Artificial Sequence
  Synthetic
agcuugaguuaaugauuu

SEQ ID NO: 125714 - RNA, 19 nt, Artificial Sequence
  Synthetic
aagcuugaguuaaugauuu

SEQ ID NO: 125715 - RNA, 20 nt, Artificial Sequence
  Synthetic
aaagcuugaguuaaugauuu

SEQ ID NO: 125716 - RNA, 22 nt, Artificial Sequence
  Synthetic
cgaaagcuugaguuaaugauuu

SEQ ID NO: 125717 - RNA, 18 nt, Artificial Sequence
  Synthetic
uaaucuacaacaugauuu

SEQ ID NO: 125718 - RNA, 19 nt, Artificial Sequence
  Synthetic
auaaucuacaacaugauuu

SEQ ID NO: 125719 - RNA, 20 nt, Artificial Sequence
  Synthetic
uauaaucuacaacaugauuu

SEQ ID NO: 125720 - RNA, 22 nt, Artificial Sequence
  Synthetic
uguauaaucuacaacaugauuu

SEQ ID NO: 125721 - RNA, 23 nt, Artificial Sequence
  Synthetic
auguauaaucuacaacaugauuu

SEQ ID NO: 125722 - RNA, 24 nt, Artificial Sequence
  Synthetic
aauguauaaucuacaacaugauuu

SEQ ID NO: 125723 - RNA, 18 nt, Artificial Sequence
  Synthetic
ccucuugcccacugauuu

SEQ ID NO: 125724 - RNA, 19 nt, Artificial Sequence
  Synthetic
uccucuugcccacugauuu

SEQ ID NO: 125725 - RNA, 20 nt, Artificial Sequence
  Synthetic
uuccucuugcccacugauuu

SEQ ID NO: 125726 - RNA, 21 nt, Artificial Sequence
  Synthetic
cuuccucuugcccacugauuu

SEQ ID NO: 125727 - RNA, 22 nt, Artificial Sequence
  Synthetic
acuuccucuugcccacugauuu

SEQ ID NO: 125728 - RNA, 23 nt, Artificial Sequence
  Synthetic
aacuuccucuugcccacugauuu

SEQ ID NO: 125729 - RNA, 24 nt, Artificial Sequence
  Synthetic
caacuuccucuugcccacugauuu

SEQ ID NO: 125730 - RNA, 21 nt, Artificial Sequence
  Synthetic
agugauuuaauuuccugauuu

SEQ ID NO: 125731 - RNA, 22 nt, Artificial Sequence
  Synthetic
aagugauuuaauuuccugauuu

SEQ ID NO: 125732 - RNA, 23 nt, Artificial Sequence
  Synthetic
caagugauuuaauuuccugauuu

SEQ ID NO: 125733 - RNA, 18 nt, Artificial Sequence
  Synthetic
uacaagaaaaagugauuu

SEQ ID NO: 125734 - RNA, 19 nt, Artificial Sequence
  Synthetic
uuacaagaaaaagugauuu

SEQ ID NO: 125735 - RNA, 21 nt, Artificial Sequence
  Synthetic
aguuacaagaaaaagugauuu

SEQ ID NO: 125736 - RNA, 22 nt, Artificial Sequence
  Synthetic
uaguuacaagaaaaagugauuu

SEQ ID NO: 125737 - RNA, 23 nt, Artificial Sequence
  Synthetic
uuaguuacaagaaaaagugauuu

SEQ ID NO: 125738 - RNA, 24 nt, Artificial Sequence
  Synthetic
auuaguuacaagaaaaagugauuu

SEQ ID NO: 125739 - RNA, 18 nt, Artificial Sequence
  Synthetic
uaauaaaucaagugauuu

SEQ ID NO: 125740 - RNA, 19 nt, Artificial Sequence
  Synthetic
auaauaaaucaagugauuu

SEQ ID NO: 125741 - RNA, 22 nt, Artificial Sequence
  Synthetic
aggauaauaaaucaagugauuu

SEQ ID NO: 125742 - RNA, 23 nt, Artificial Sequence
  Synthetic
aaggauaauaaaucaagugauuu

SEQ ID NO: 125743 - RNA, 24 nt, Artificial Sequence
  Synthetic
uaaggauaauaaaucaagugauuu

SEQ ID NO: 125744 - RNA, 18 nt, Artificial Sequence
  Synthetic
auuaggccacuuugauuu

SEQ ID NO: 125745 - RNA, 19 nt, Artificial Sequence
  Synthetic
cauuaggccacuuugauuu

SEQ ID NO: 125746 - RNA, 20 nt, Artificial Sequence
  Synthetic
ucauuaggccacuuugauuu

SEQ ID NO: 125747 - RNA, 21 nt, Artificial Sequence
  Synthetic
uucauuaggccacuuugauuu

SEQ ID NO: 125748 - RNA, 22 nt, Artificial Sequence
  Synthetic
auucauuaggccacuuugauuu

SEQ ID NO: 125749 - RNA, 23 nt, Artificial Sequence
  Synthetic
cauucauuaggccacuuugauuu

SEQ ID NO: 125750 - RNA, 18 nt, Artificial Sequence
  Synthetic
cucacugaccuuugauuu

SEQ ID NO: 125751 - RNA, 19 nt, Artificial Sequence
  Synthetic
ucucacugaccuuugauuu

SEQ ID NO: 125752 - RNA, 20 nt, Artificial Sequence
  Synthetic
uucucacugaccuuugauuu

SEQ ID NO: 125753 - RNA, 21 nt, Artificial Sequence
  Synthetic
cuucucacugaccuuugauuu

SEQ ID NO: 125754 - RNA, 22 nt, Artificial Sequence
  Synthetic
ccuucucacugaccuuugauuu

SEQ ID NO: 125755 - RNA, 23 nt, Artificial Sequence
  Synthetic
uccuucucacugaccuuugauuu

SEQ ID NO: 125756 - RNA, 24 nt, Artificial Sequence
  Synthetic
cuccuucucacugaccuuugauuu

SEQ ID NO: 125757 - RNA, 18 nt, Artificial Sequence
  Synthetic
ugacauagccaaauauuu

SEQ ID NO: 125758 - RNA, 19 nt, Artificial Sequence
  Synthetic
augacauagccaaauauuu

SEQ ID NO: 125759 - RNA, 21 nt, Artificial Sequence
  Synthetic
ugaugacauagccaaauauuu

SEQ ID NO: 125760 - RNA, 22 nt, Artificial Sequence
  Synthetic
augaugacauagccaaauauuu

SEQ ID NO: 125761 - RNA, 23 nt, Artificial Sequence
  Synthetic
uaugaugacauagccaaauauuu

SEQ ID NO: 125762 - RNA, 24 nt, Artificial Sequence
  Synthetic
auaugaugacauagccaaauauuu

SEQ ID NO: 125763 - RNA, 18 nt, Artificial Sequence
  Synthetic
cauuaucugcaaauauuu

SEQ ID NO: 125764 - RNA, 20 nt, Artificial Sequence
  Synthetic
agcauuaucugcaaauauuu

SEQ ID NO: 125765 - RNA, 21 nt, Artificial Sequence
  Synthetic
cagcauuaucugcaaauauuu

SEQ ID NO: 125766 - RNA, 23 nt, Artificial Sequence
  Synthetic
agcagcauuaucugcaaauauuu

SEQ ID NO: 125767 - RNA, 24 nt, Artificial Sequence
  Synthetic
cagcagcauuaucugcaaauauuu

SEQ ID NO: 125768 - RNA, 20 nt, Artificial Sequence
  Synthetic
agguauuaaaucaaauauuu

SEQ ID NO: 125769 - RNA, 21 nt, Artificial Sequence
  Synthetic
cagguauuaaaucaaauauuu

SEQ ID NO: 125770 - RNA, 22 nt, Artificial Sequence
  Synthetic
ucagguauuaaaucaaauauuu

SEQ ID NO: 125771 - RNA, 23 nt, Artificial Sequence
  Synthetic
cucagguauuaaaucaaauauuu

SEQ ID NO: 125772 - RNA, 24 nt, Artificial Sequence
  Synthetic
acucagguauuaaaucaaauauuu

SEQ ID NO: 125773 - RNA, 18 nt, Artificial Sequence
  Synthetic
aaggagaccuaaauauuu

SEQ ID NO: 125774 - RNA, 19 nt, Artificial Sequence
  Synthetic
caaggagaccuaaauauuu

SEQ ID NO: 125775 - RNA, 20 nt, Artificial Sequence
  Synthetic
ucaaggagaccuaaauauuu

SEQ ID NO: 125776 - RNA, 21 nt, Artificial Sequence
  Synthetic
cucaaggagaccuaaauauuu

SEQ ID NO: 125777 - RNA, 22 nt, Artificial Sequence
  Synthetic
acucaaggagaccuaaauauuu

SEQ ID NO: 125778 - RNA, 23 nt, Artificial Sequence
  Synthetic
cacucaaggagaccuaaauauuu

SEQ ID NO: 125779 - RNA, 24 nt, Artificial Sequence
  Synthetic
acacucaaggagaccuaaauauuu

SEQ ID NO: 125780 - RNA, 18 nt, Artificial Sequence
  Synthetic
uucuagccacuaauauuu

SEQ ID NO: 125781 - RNA, 19 nt, Artificial Sequence
  Synthetic
uuucuagccacuaauauuu

SEQ ID NO: 125782 - RNA, 21 nt, Artificial Sequence
  Synthetic
uguuucuagccacuaauauuu

SEQ ID NO: 125783 - RNA, 23 nt, Artificial Sequence
  Synthetic
uguguuucuagccacuaauauuu

SEQ ID NO: 125784 - RNA, 24 nt, Artificial Sequence
  Synthetic
uuguguuucuagccacuaauauuu

SEQ ID NO: 125785 - RNA, 21 nt, Artificial Sequence
  Synthetic
auuuacuauggaaacauauuu

SEQ ID NO: 125786 - RNA, 22 nt, Artificial Sequence
  Synthetic
uauuuacuauggaaacauauuu

SEQ ID NO: 125787 - RNA, 23 nt, Artificial Sequence
  Synthetic
auauuuacuauggaaacauauuu

SEQ ID NO: 125788 - RNA, 24 nt, Artificial Sequence
  Synthetic
cauauuuacuauggaaacauauuu

SEQ ID NO: 125789 - RNA, 20 nt, Artificial Sequence
  Synthetic
aggauuuugaguacauauuu

SEQ ID NO: 125790 - RNA, 21 nt, Artificial Sequence
  Synthetic
caggauuuugaguacauauuu

SEQ ID NO: 125791 - RNA, 22 nt, Artificial Sequence
  Synthetic
ucaggauuuugaguacauauuu

SEQ ID NO: 125792 - RNA, 23 nt, Artificial Sequence
  Synthetic
aucaggauuuugaguacauauuu

SEQ ID NO: 125793 - RNA, 24 nt, Artificial Sequence
  Synthetic
caucaggauuuugaguacauauuu

SEQ ID NO: 125794 - RNA, 18 nt, Artificial Sequence
  Synthetic
auacgcauguacauauuu

SEQ ID NO: 125795 - RNA, 20 nt, Artificial Sequence
  Synthetic
agauacgcauguacauauuu

SEQ ID NO: 125796 - RNA, 22 nt, Artificial Sequence
  Synthetic
cgagauacgcauguacauauuu

SEQ ID NO: 125797 - RNA, 23 nt, Artificial Sequence
  Synthetic
acgagauacgcauguacauauuu

SEQ ID NO: 125798 - RNA, 24 nt, Artificial Sequence
  Synthetic
aacgagauacgcauguacauauuu

SEQ ID NO: 125799 - RNA, 21 nt, Artificial Sequence
  Synthetic
uacacauagauuuucauauuu

SEQ ID NO: 125800 - RNA, 22 nt, Artificial Sequence
  Synthetic
uuacacauagauuuucauauuu

SEQ ID NO: 125801 - RNA, 23 nt, Artificial Sequence
  Synthetic
uuuacacauagauuuucauauuu

SEQ ID NO: 125802 - RNA, 24 nt, Artificial Sequence
  Synthetic
auuuacacauagauuuucauauuu

SEQ ID NO: 125803 - RNA, 18 nt, Artificial Sequence
  Synthetic
agugguugcaauauauuu

SEQ ID NO: 125804 - RNA, 21 nt, Artificial Sequence
  Synthetic
uggagugguugcaauauauuu

SEQ ID NO: 125805 - RNA, 22 nt, Artificial Sequence
  Synthetic
uuggagugguugcaauauauuu

SEQ ID NO: 125806 - RNA, 23 nt, Artificial Sequence
  Synthetic
uuuggagugguugcaauauauuu

SEQ ID NO: 125807 - RNA, 24 nt, Artificial Sequence
  Synthetic
uuuuggagugguugcaauauauuu

SEQ ID NO: 125808 - RNA, 18 nt, Artificial Sequence
  Synthetic
ugacauuuagauauauuu

SEQ ID NO: 125809 - RNA, 21 nt, Artificial Sequence
  Synthetic
uggugacauuuagauauauuu

SEQ ID NO: 125810 - RNA, 22 nt, Artificial Sequence
  Synthetic
uuggugacauuuagauauauuu

SEQ ID NO: 125811 - RNA, 23 nt, Artificial Sequence
  Synthetic
uuuggugacauuuagauauauuu

SEQ ID NO: 125812 - RNA, 24 nt, Artificial Sequence
  Synthetic
uuuuggugacauuuagauauauuu

SEQ ID NO: 125813 - RNA, 21 nt, Artificial Sequence
  Synthetic
aaaaaauuagucccuauauuu

SEQ ID NO: 125814 - RNA, 22 nt, Artificial Sequence
  Synthetic
caaaaaauuagucccuauauuu

SEQ ID NO: 125815 - RNA, 23 nt, Artificial Sequence
  Synthetic
ucaaaaaauuagucccuauauuu

SEQ ID NO: 125816 - RNA, 18 nt, Artificial Sequence
  Synthetic
uucuacuuagguauauuu

SEQ ID NO: 125817 - RNA, 19 nt, Artificial Sequence
  Synthetic
cuucuacuuagguauauuu

SEQ ID NO: 125818 - RNA, 20 nt, Artificial Sequence
  Synthetic
acuucuacuuagguauauuu

SEQ ID NO: 125819 - RNA, 21 nt, Artificial Sequence
  Synthetic
uacuucuacuuagguauauuu

SEQ ID NO: 125820 - RNA, 22 nt, Artificial Sequence
  Synthetic
uuacuucuacuuagguauauuu

SEQ ID NO: 125821 - RNA, 23 nt, Artificial Sequence
  Synthetic
auuacuucuacuuagguauauuu

SEQ ID NO: 125822 - RNA, 24 nt, Artificial Sequence
  Synthetic
uauuacuucuacuuagguauauuu

SEQ ID NO: 125823 - RNA, 21 nt, Artificial Sequence
  Synthetic
uuacauuuauaauuuauauuu

SEQ ID NO: 125824 - RNA, 22 nt, Artificial Sequence
  Synthetic
uuuacauuuauaauuuauauuu

SEQ ID NO: 125825 - RNA, 23 nt, Artificial Sequence
  Synthetic
auuuacauuuauaauuuauauuu

SEQ ID NO: 125826 - RNA, 18 nt, Artificial Sequence
  Synthetic
cuggugaaaucacuauuu

SEQ ID NO: 125827 - RNA, 19 nt, Artificial Sequence
  Synthetic
acuggugaaaucacuauuu

SEQ ID NO: 125828 - RNA, 21 nt, Artificial Sequence
  Synthetic
agacuggugaaaucacuauuu

SEQ ID NO: 125829 - RNA, 23 nt, Artificial Sequence
  Synthetic
agagacuggugaaaucacuauuu

SEQ ID NO: 125830 - RNA, 24 nt, Artificial Sequence
  Synthetic
aagagacuggugaaaucacuauuu

SEQ ID NO: 125831 - RNA, 18 nt, Artificial Sequence
  Synthetic
uggauaacaucccuauuu

SEQ ID NO: 125832 - RNA, 19 nt, Artificial Sequence
  Synthetic
cuggauaacaucccuauuu

SEQ ID NO: 125833 - RNA, 20 nt, Artificial Sequence
  Synthetic
ucuggauaacaucccuauuu

SEQ ID NO: 125834 - RNA, 21 nt, Artificial Sequence
  Synthetic
cucuggauaacaucccuauuu

SEQ ID NO: 125835 - RNA, 23 nt, Artificial Sequence
  Synthetic
ugcucuggauaacaucccuauuu

SEQ ID NO: 125836 - RNA, 24 nt, Artificial Sequence
  Synthetic
augcucuggauaacaucccuauuu

SEQ ID NO: 125837 - RNA, 18 nt, Artificial Sequence
  Synthetic
caaaguucaucccuauuu

SEQ ID NO: 125838 - RNA, 19 nt, Artificial Sequence
  Synthetic
ccaaaguucaucccuauuu

SEQ ID NO: 125839 - RNA, 20 nt, Artificial Sequence
  Synthetic
uccaaaguucaucccuauuu

SEQ ID NO: 125840 - RNA, 21 nt, Artificial Sequence
  Synthetic
cuccaaaguucaucccuauuu

SEQ ID NO: 125841 - RNA, 22 nt, Artificial Sequence
  Synthetic
ucuccaaaguucaucccuauuu

SEQ ID NO: 125842 - RNA, 23 nt, Artificial Sequence
  Synthetic
aucuccaaaguucaucccuauuu

SEQ ID NO: 125843 - RNA, 24 nt, Artificial Sequence
  Synthetic
uaucuccaaaguucaucccuauuu

SEQ ID NO: 125844 - RNA, 19 nt, Artificial Sequence
  Synthetic
ugcguuaaaauagcuauuu

SEQ ID NO: 125845 - RNA, 20 nt, Artificial Sequence
  Synthetic
augcguuaaaauagcuauuu

SEQ ID NO: 125846 - RNA, 21 nt, Artificial Sequence
  Synthetic
caugcguuaaaauagcuauuu

SEQ ID NO: 125847 - RNA, 22 nt, Artificial Sequence
  Synthetic
acaugcguuaaaauagcuauuu

SEQ ID NO: 125848 - RNA, 23 nt, Artificial Sequence
  Synthetic
uacaugcguuaaaauagcuauuu

SEQ ID NO: 125849 - RNA, 24 nt, Artificial Sequence
  Synthetic
uuacaugcguuaaaauagcuauuu

SEQ ID NO: 125850 - RNA, 22 nt, Artificial Sequence
  Synthetic
agauaaaaauucuuagcuauuu

SEQ ID NO: 125851 - RNA, 24 nt, Artificial Sequence
  Synthetic
agagauaaaaauucuuagcuauuu

SEQ ID NO: 125852 - RNA, 18 nt, Artificial Sequence
  Synthetic
cuguaaaaucaucuauuu

SEQ ID NO: 125853 - RNA, 19 nt, Artificial Sequence
  Synthetic
acuguaaaaucaucuauuu

SEQ ID NO: 125854 - RNA, 20 nt, Artificial Sequence
  Synthetic
aacuguaaaaucaucuauuu

SEQ ID NO: 125855 - RNA, 21 nt, Artificial Sequence
  Synthetic
uaacuguaaaaucaucuauuu

SEQ ID NO: 125856 - RNA, 22 nt, Artificial Sequence
  Synthetic
auaacuguaaaaucaucuauuu

SEQ ID NO: 125857 - RNA, 23 nt, Artificial Sequence
  Synthetic
uauaacuguaaaaucaucuauuu

SEQ ID NO: 125858 - RNA, 24 nt, Artificial Sequence
  Synthetic
uuauaacuguaaaaucaucuauuu

SEQ ID NO: 125859 - RNA, 18 nt, Artificial Sequence
  Synthetic
aaacagcccuuucuauuu

SEQ ID NO: 125860 - RNA, 19 nt, Artificial Sequence
  Synthetic
aaaacagcccuuucuauuu

SEQ ID NO: 125861 - RNA, 20 nt, Artificial Sequence
  Synthetic
caaaacagcccuuucuauuu

SEQ ID NO: 125862 - RNA, 22 nt, Artificial Sequence
  Synthetic
ugcaaaacagcccuuucuauuu

SEQ ID NO: 125863 - RNA, 23 nt, Artificial Sequence
  Synthetic
augcaaaacagcccuuucuauuu

SEQ ID NO: 125864 - RNA, 24 nt, Artificial Sequence
  Synthetic
aaugcaaaacagcccuuucuauuu

SEQ ID NO: 125865 - RNA, 18 nt, Artificial Sequence
  Synthetic
ucccacucuuuucuauuu

SEQ ID NO: 125866 - RNA, 19 nt, Artificial Sequence
  Synthetic
uucccacucuuuucuauuu

SEQ ID NO: 125867 - RNA, 20 nt, Artificial Sequence
  Synthetic
auucccacucuuuucuauuu

SEQ ID NO: 125868 - RNA, 22 nt, Artificial Sequence
  Synthetic
ugauucccacucuuuucuauuu

SEQ ID NO: 125869 - RNA, 23 nt, Artificial Sequence
  Synthetic
augauucccacucuuuucuauuu

SEQ ID NO: 125870 - RNA, 24 nt, Artificial Sequence
  Synthetic
aaugauucccacucuuuucuauuu

SEQ ID NO: 125871 - RNA, 21 nt, Artificial Sequence
  Synthetic
agggaaauacugaaaguauuu

SEQ ID NO: 125872 - RNA, 22 nt, Artificial Sequence
  Synthetic
aagggaaauacugaaaguauuu

SEQ ID NO: 125873 - RNA, 24 nt, Artificial Sequence
  Synthetic
agaagggaaauacugaaaguauuu

SEQ ID NO: 125874 - RNA, 18 nt, Artificial Sequence
  Synthetic
acacacaccaugguauuu

SEQ ID NO: 125875 - RNA, 19 nt, Artificial Sequence
  Synthetic
cacacacaccaugguauuu

SEQ ID NO: 125876 - RNA, 20 nt, Artificial Sequence
  Synthetic
acacacacaccaugguauuu

SEQ ID NO: 125877 - RNA, 21 nt, Artificial Sequence
  Synthetic
cacacacacaccaugguauuu

SEQ ID NO: 125878 - RNA, 22 nt, Artificial Sequence
  Synthetic
acacacacacaccaugguauuu

SEQ ID NO: 125879 - RNA, 23 nt, Artificial Sequence
  Synthetic
cacacacacacaccaugguauuu

SEQ ID NO: 125880 - RNA, 24 nt, Artificial Sequence
  Synthetic
ccacacacacacaccaugguauuu

SEQ ID NO: 125881 - RNA, 18 nt, Artificial Sequence
  Synthetic
cugaaugucuauguauuu

SEQ ID NO: 125882 - RNA, 19 nt, Artificial Sequence
  Synthetic
ucugaaugucuauguauuu

SEQ ID NO: 125883 - RNA, 20 nt, Artificial Sequence
  Synthetic
aucugaaugucuauguauuu

SEQ ID NO: 125884 - RNA, 21 nt, Artificial Sequence
  Synthetic
uaucugaaugucuauguauuu

SEQ ID NO: 125885 - RNA, 23 nt, Artificial Sequence
  Synthetic
aguaucugaaugucuauguauuu

SEQ ID NO: 125886 - RNA, 19 nt, Artificial Sequence
  Synthetic
ugggccuuuugcuguauuu

SEQ ID NO: 125887 - RNA, 21 nt, Artificial Sequence
  Synthetic
ugugggccuuuugcuguauuu

SEQ ID NO: 125888 - RNA, 22 nt, Artificial Sequence
  Synthetic
cugugggccuuuugcuguauuu

SEQ ID NO: 125889 - RNA, 23 nt, Artificial Sequence
  Synthetic
acugugggccuuuugcuguauuu

SEQ ID NO: 125890 - RNA, 24 nt, Artificial Sequence
  Synthetic
uacugugggccuuuugcuguauuu

SEQ ID NO: 125891 - RNA, 18 nt, Artificial Sequence
  Synthetic
uguguugaucuuguauuu

SEQ ID NO: 125892 - RNA, 21 nt, Artificial Sequence
  Synthetic
ugguguguugaucuuguauuu

SEQ ID NO: 125893 - RNA, 22 nt, Artificial Sequence
  Synthetic
uugguguguugaucuuguauuu

SEQ ID NO: 125894 - RNA, 23 nt, Artificial Sequence
  Synthetic
uuugguguguugaucuuguauuu

SEQ ID NO: 125895 - RNA, 24 nt, Artificial Sequence
  Synthetic
cuuugguguguugaucuuguauuu

SEQ ID NO: 125896 - RNA, 18 nt, Artificial Sequence
  Synthetic
ugauaaccauuuguauuu

SEQ ID NO: 125897 - RNA, 19 nt, Artificial Sequence
  Synthetic
augauaaccauuuguauuu

SEQ ID NO: 125898 - RNA, 20 nt, Artificial Sequence
  Synthetic
caugauaaccauuuguauuu

SEQ ID NO: 125899 - RNA, 21 nt, Artificial Sequence
  Synthetic
ucaugauaaccauuuguauuu

SEQ ID NO: 125900 - RNA, 22 nt, Artificial Sequence
  Synthetic
uucaugauaaccauuuguauuu

SEQ ID NO: 125901 - RNA, 23 nt, Artificial Sequence
  Synthetic
auucaugauaaccauuuguauuu

SEQ ID NO: 125902 - RNA, 18 nt, Artificial Sequence
  Synthetic
auucaagcaaaauuauuu

SEQ ID NO: 125903 - RNA, 19 nt, Artificial Sequence
  Synthetic
cauucaagcaaaauuauuu

SEQ ID NO: 125904 - RNA, 20 nt, Artificial Sequence
  Synthetic
acauucaagcaaaauuauuu

SEQ ID NO: 125905 - RNA, 21 nt, Artificial Sequence
  Synthetic
uacauucaagcaaaauuauuu

SEQ ID NO: 125906 - RNA, 22 nt, Artificial Sequence
  Synthetic
cuacauucaagcaaaauuauuu

SEQ ID NO: 125907 - RNA, 23 nt, Artificial Sequence
  Synthetic
ucuacauucaagcaaaauuauuu

SEQ ID NO: 125908 - RNA, 24 nt, Artificial Sequence
  Synthetic
uucuacauucaagcaaaauuauuu

SEQ ID NO: 125909 - RNA, 18 nt, Artificial Sequence
  Synthetic
acacaugcugaauuauuu

SEQ ID NO: 125910 - RNA, 20 nt, Artificial Sequence
  Synthetic
cgacacaugcugaauuauuu

SEQ ID NO: 125911 - RNA, 22 nt, Artificial Sequence
  Synthetic
agcgacacaugcugaauuauuu

SEQ ID NO: 125912 - RNA, 23 nt, Artificial Sequence
  Synthetic
aagcgacacaugcugaauuauuu

SEQ ID NO: 125913 - RNA, 24 nt, Artificial Sequence
  Synthetic
aaagcgacacaugcugaauuauuu

SEQ ID NO: 125914 - RNA, 19 nt, Artificial Sequence
  Synthetic
uguuauucagucauuauuu

SEQ ID NO: 125915 - RNA, 20 nt, Artificial Sequence
  Synthetic
cuguuauucagucauuauuu

SEQ ID NO: 125916 - RNA, 22 nt, Artificial Sequence
  Synthetic
agcuguuauucagucauuauuu

SEQ ID NO: 125917 - RNA, 23 nt, Artificial Sequence
  Synthetic
aagcuguuauucagucauuauuu

SEQ ID NO: 125918 - RNA, 24 nt, Artificial Sequence
  Synthetic
aaagcuguuauucagucauuauuu

SEQ ID NO: 125919 - RNA, 18 nt, Artificial Sequence
  Synthetic
aaagauaacuuauuauuu

SEQ ID NO: 125920 - RNA, 19 nt, Artificial Sequence
  Synthetic
aaaagauaacuuauuauuu

SEQ ID NO: 125921 - RNA, 18 nt, Artificial Sequence
  Synthetic
aaucauagagacuuauuu

SEQ ID NO: 125922 - RNA, 21 nt, Artificial Sequence
  Synthetic
uggaaucauagagacuuauuu

SEQ ID NO: 125923 - RNA, 22 nt, Artificial Sequence
  Synthetic
cuggaaucauagagacuuauuu

SEQ ID NO: 125924 - RNA, 23 nt, Artificial Sequence
  Synthetic
ucuggaaucauagagacuuauuu

SEQ ID NO: 125925 - RNA, 24 nt, Artificial Sequence
  Synthetic
cucuggaaucauagagacuuauuu

SEQ ID NO: 125926 - RNA, 18 nt, Artificial Sequence
  Synthetic
aaugacucaguguuauuu

SEQ ID NO: 125927 - RNA, 19 nt, Artificial Sequence
  Synthetic
caaugacucaguguuauuu

SEQ ID NO: 125928 - RNA, 20 nt, Artificial Sequence
  Synthetic
acaaugacucaguguuauuu

SEQ ID NO: 125929 - RNA, 22 nt, Artificial Sequence
  Synthetic
agacaaugacucaguguuauuu

SEQ ID NO: 125930 - RNA, 23 nt, Artificial Sequence
  Synthetic
uagacaaugacucaguguuauuu

SEQ ID NO: 125931 - RNA, 24 nt, Artificial Sequence
  Synthetic
cuagacaaugacucaguguuauuu

SEQ ID NO: 125932 - RNA, 20 nt, Artificial Sequence
  Synthetic
aggucccaucauuguuauuu

SEQ ID NO: 125933 - RNA, 21 nt, Artificial Sequence
  Synthetic
aaggucccaucauuguuauuu

SEQ ID NO: 125934 - RNA, 24 nt, Artificial Sequence
  Synthetic
uggaaggucccaucauuguuauuu

SEQ ID NO: 125935 - RNA, 19 nt, Artificial Sequence
  Synthetic
ugcauauuaaacuuuauuu

SEQ ID NO: 125936 - RNA, 20 nt, Artificial Sequence
  Synthetic
cugcauauuaaacuuuauuu

SEQ ID NO: 125937 - RNA, 21 nt, Artificial Sequence
  Synthetic
ucugcauauuaaacuuuauuu

SEQ ID NO: 125938 - RNA, 22 nt, Artificial Sequence
  Synthetic
uucugcauauuaaacuuuauuu

SEQ ID NO: 125939 - RNA, 23 nt, Artificial Sequence
  Synthetic
auucugcauauuaaacuuuauuu

SEQ ID NO: 125940 - RNA, 24 nt, Artificial Sequence
  Synthetic
uauucugcauauuaaacuuuauuu

SEQ ID NO: 125941 - RNA, 21 nt, Artificial Sequence
  Synthetic
caaaaaaaaaaaaguuuauuu

SEQ ID NO: 125942 - RNA, 22 nt, Artificial Sequence
  Synthetic
ccaaaaaaaaaaaaguuuauuu

SEQ ID NO: 125943 - RNA, 24 nt, Artificial Sequence
  Synthetic
ugccaaaaaaaaaaaaguuuauuu

SEQ ID NO: 125944 - RNA, 18 nt, Artificial Sequence
  Synthetic
cucuuuugauguuuauuu

SEQ ID NO: 125945 - RNA, 19 nt, Artificial Sequence
  Synthetic
ucucuuuugauguuuauuu

SEQ ID NO: 125946 - RNA, 20 nt, Artificial Sequence
  Synthetic
aucucuuuugauguuuauuu

SEQ ID NO: 125947 - RNA, 21 nt, Artificial Sequence
  Synthetic
aaucucuuuugauguuuauuu

SEQ ID NO: 125948 - RNA, 22 nt, Artificial Sequence
  Synthetic
uaaucucuuuugauguuuauuu

SEQ ID NO: 125949 - RNA, 23 nt, Artificial Sequence
  Synthetic
cuaaucucuuuugauguuuauuu

SEQ ID NO: 125950 - RNA, 18 nt, Artificial Sequence
  Synthetic
aaccccuacuguuuauuu

SEQ ID NO: 125951 - RNA, 19 nt, Artificial Sequence
  Synthetic
aaaccccuacuguuuauuu

SEQ ID NO: 125952 - RNA, 20 nt, Artificial Sequence
  Synthetic
aaaaccccuacuguuuauuu

SEQ ID NO: 125953 - RNA, 21 nt, Artificial Sequence
  Synthetic
uaaaaccccuacuguuuauuu

SEQ ID NO: 125954 - RNA, 22 nt, Artificial Sequence
  Synthetic
uuaaaaccccuacuguuuauuu

SEQ ID NO: 125955 - RNA, 18 nt, Artificial Sequence
  Synthetic
acuguucugagaaacuuu

SEQ ID NO: 125956 - RNA, 20 nt, Artificial Sequence
  Synthetic
ugacuguucugagaaacuuu

SEQ ID NO: 125957 - RNA, 21 nt, Artificial Sequence
  Synthetic
cugacuguucugagaaacuuu

SEQ ID NO: 125958 - RNA, 22 nt, Artificial Sequence
  Synthetic
acugacuguucugagaaacuuu

SEQ ID NO: 125959 - RNA, 23 nt, Artificial Sequence
  Synthetic
cacugacuguucugagaaacuuu

SEQ ID NO: 125960 - RNA, 18 nt, Artificial Sequence
  Synthetic
ccaaaauggauaaacuuu

SEQ ID NO: 125961 - RNA, 19 nt, Artificial Sequence
  Synthetic
accaaaauggauaaacuuu

SEQ ID NO: 125962 - RNA, 20 nt, Artificial Sequence
  Synthetic
uaccaaaauggauaaacuuu

SEQ ID NO: 125963 - RNA, 21 nt, Artificial Sequence
  Synthetic
cuaccaaaauggauaaacuuu

SEQ ID NO: 125964 - RNA, 22 nt, Artificial Sequence
  Synthetic
ucuaccaaaauggauaaacuuu

SEQ ID NO: 125965 - RNA, 23 nt, Artificial Sequence
  Synthetic
uucuaccaaaauggauaaacuuu

SEQ ID NO: 125966 - RNA, 18 nt, Artificial Sequence
  Synthetic
acuaugagggucaacuuu

SEQ ID NO: 125967 - RNA, 20 nt, Artificial Sequence
  Synthetic
ugacuaugagggucaacuuu

SEQ ID NO: 125968 - RNA, 21 nt, Artificial Sequence
  Synthetic
augacuaugagggucaacuuu

SEQ ID NO: 125969 - RNA, 22 nt, Artificial Sequence
  Synthetic
aaugacuaugagggucaacuuu

SEQ ID NO: 125970 - RNA, 23 nt, Artificial Sequence
  Synthetic
caaugacuaugagggucaacuuu

SEQ ID NO: 125971 - RNA, 24 nt, Artificial Sequence
  Synthetic
ccaaugacuaugagggucaacuuu

SEQ ID NO: 125972 - RNA, 19 nt, Artificial Sequence
  Synthetic
uguaugcuuugagaacuuu

SEQ ID NO: 125973 - RNA, 20 nt, Artificial Sequence
  Synthetic
uuguaugcuuugagaacuuu

SEQ ID NO: 125974 - RNA, 21 nt, Artificial Sequence
  Synthetic
uuuguaugcuuugagaacuuu

SEQ ID NO: 125975 - RNA, 23 nt, Artificial Sequence
  Synthetic
uguuuguaugcuuugagaacuuu

SEQ ID NO: 125976 - RNA, 24 nt, Artificial Sequence
  Synthetic
cuguuuguaugcuuugagaacuuu

SEQ ID NO: 125977 - RNA, 21 nt, Artificial Sequence
  Synthetic
uuauuuuaagccaguaacuuu

SEQ ID NO: 125978 - RNA, 22 nt, Artificial Sequence
  Synthetic
cuuauuuuaagccaguaacuuu

SEQ ID NO: 125979 - RNA, 23 nt, Artificial Sequence
  Synthetic
ucuuauuuuaagccaguaacuuu

SEQ ID NO: 125980 - RNA, 24 nt, Artificial Sequence
  Synthetic
aucuuauuuuaagccaguaacuuu

SEQ ID NO: 125981 - RNA, 18 nt, Artificial Sequence
  Synthetic
uuggagcugaaacacuuu

SEQ ID NO: 125982 - RNA, 19 nt, Artificial Sequence
  Synthetic
uuuggagcugaaacacuuu

SEQ ID NO: 125983 - RNA, 22 nt, Artificial Sequence
  Synthetic
agguuuggagcugaaacacuuu

SEQ ID NO: 125984 - RNA, 23 nt, Artificial Sequence
  Synthetic
cagguuuggagcugaaacacuuu

SEQ ID NO: 125985 - RNA, 24 nt, Artificial Sequence
  Synthetic
ucagguuuggagcugaaacacuuu

SEQ ID NO: 125986 - RNA, 18 nt, Artificial Sequence
  Synthetic
ccccucaauuuacacuuu

SEQ ID NO: 125987 - RNA, 19 nt, Artificial Sequence
  Synthetic
uccccucaauuuacacuuu

SEQ ID NO: 125988 - RNA, 20 nt, Artificial Sequence
  Synthetic
auccccucaauuuacacuuu

SEQ ID NO: 125989 - RNA, 21 nt, Artificial Sequence
  Synthetic
uauccccucaauuuacacuuu

SEQ ID NO: 125990 - RNA, 22 nt, Artificial Sequence
  Synthetic
uuauccccucaauuuacacuuu

SEQ ID NO: 125991 - RNA, 23 nt, Artificial Sequence
  Synthetic
uuuauccccucaauuuacacuuu

SEQ ID NO: 125992 - RNA, 24 nt, Artificial Sequence
  Synthetic
uuuuauccccucaauuuacacuuu

SEQ ID NO: 125993 - RNA, 19 nt, Artificial Sequence
  Synthetic
agucgauuuaauccacuuu

SEQ ID NO: 125994 - RNA, 20 nt, Artificial Sequence
  Synthetic
cagucgauuuaauccacuuu

SEQ ID NO: 125995 - RNA, 21 nt, Artificial Sequence
  Synthetic
ccagucgauuuaauccacuuu

SEQ ID NO: 125996 - RNA, 22 nt, Artificial Sequence
  Synthetic
uccagucgauuuaauccacuuu

SEQ ID NO: 125997 - RNA, 23 nt, Artificial Sequence
  Synthetic
uuccagucgauuuaauccacuuu

SEQ ID NO: 125998 - RNA, 24 nt, Artificial Sequence
  Synthetic
cuuccagucgauuuaauccacuuu

SEQ ID NO: 125999 - RNA, 18 nt, Artificial Sequence
  Synthetic
agggaaaccacucacuuu

SEQ ID NO: 126000 - RNA, 20 nt, Artificial Sequence
  Synthetic
ugagggaaaccacucacuuu

SEQ ID NO: 126001 - RNA, 22 nt, Artificial Sequence
  Synthetic
agugagggaaaccacucacuuu

SEQ ID NO: 126002 - RNA, 23 nt, Artificial Sequence
  Synthetic
aagugagggaaaccacucacuuu

SEQ ID NO: 126003 - RNA, 24 nt, Artificial Sequence
  Synthetic
aaagugagggaaaccacucacuuu

SEQ ID NO: 126004 - RNA, 18 nt, Artificial Sequence
  Synthetic
aauauuacagaagacuuu

SEQ ID NO: 126005 - RNA, 19 nt, Artificial Sequence
  Synthetic
aaauauuacagaagacuuu

SEQ ID NO: 126006 - RNA, 20 nt, Artificial Sequence
  Synthetic
uaaauauuacagaagacuuu

SEQ ID NO: 126007 - RNA, 21 nt, Artificial Sequence
  Synthetic
uuaaauauuacagaagacuuu

SEQ ID NO: 126008 - RNA, 23 nt, Artificial Sequence
  Synthetic
aguuaaauauuacagaagacuuu

SEQ ID NO: 126009 - RNA, 24 nt, Artificial Sequence
  Synthetic
aaguuaaauauuacagaagacuuu

SEQ ID NO: 126010 - RNA, 18 nt, Artificial Sequence
  Synthetic
aggauaaacagagacuuu

SEQ ID NO: 126011 - RNA, 19 nt, Artificial Sequence
  Synthetic
aaggauaaacagagacuuu

SEQ ID NO: 126012 - RNA, 20 nt, Artificial Sequence
  Synthetic
aaaggauaaacagagacuuu

SEQ ID NO: 126013 - RNA, 21 nt, Artificial Sequence
  Synthetic
uaaaggauaaacagagacuuu

SEQ ID NO: 126014 - RNA, 22 nt, Artificial Sequence
  Synthetic
cuaaaggauaaacagagacuuu

SEQ ID NO: 126015 - RNA, 23 nt, Artificial Sequence
  Synthetic
ucuaaaggauaaacagagacuuu

SEQ ID NO: 126016 - RNA, 24 nt, Artificial Sequence
  Synthetic
cucuaaaggauaaacagagacuuu

SEQ ID NO: 126017 - RNA, 19 nt, Artificial Sequence
  Synthetic
uguauuaagauuagacuuu

SEQ ID NO: 126018 - RNA, 20 nt, Artificial Sequence
  Synthetic
cuguauuaagauuagacuuu

SEQ ID NO: 126019 - RNA, 22 nt, Artificial Sequence
  Synthetic
ugcuguauuaagauuagacuuu

SEQ ID NO: 126020 - RNA, 23 nt, Artificial Sequence
  Synthetic
cugcuguauuaagauuagacuuu

SEQ ID NO: 126021 - RNA, 18 nt, Artificial Sequence
  Synthetic
uuuaaaugauacgacuuu

SEQ ID NO: 126022 - RNA, 19 nt, Artificial Sequence
  Synthetic
cuuuaaaugauacgacuuu

SEQ ID NO: 126023 - RNA, 20 nt, Artificial Sequence
  Synthetic
ucuuuaaaugauacgacuuu

SEQ ID NO: 126024 - RNA, 21 nt, Artificial Sequence
  Synthetic
aucuuuaaaugauacgacuuu

SEQ ID NO: 126025 - RNA, 22 nt, Artificial Sequence
  Synthetic
uaucuuuaaaugauacgacuuu

SEQ ID NO: 126026 - RNA, 23 nt, Artificial Sequence
  Synthetic
uuaucuuuaaaugauacgacuuu

SEQ ID NO: 126027 - RNA, 24 nt, Artificial Sequence
  Synthetic
cuuaucuuuaaaugauacgacuuu

SEQ ID NO: 126028 - RNA, 21 nt, Artificial Sequence
  Synthetic
uaauguaauacauuggacuuu

SEQ ID NO: 126029 - RNA, 23 nt, Artificial Sequence
  Synthetic
aguaauguaauacauuggacuuu

SEQ ID NO: 126030 - RNA, 24 nt, Artificial Sequence
  Synthetic
caguaauguaauacauuggacuuu

SEQ ID NO: 126031 - RNA, 18 nt, Artificial Sequence
  Synthetic
aauuucauccuugacuuu

SEQ ID NO: 126032 - RNA, 19 nt, Artificial Sequence
  Synthetic
aaauuucauccuugacuuu

SEQ ID NO: 126033 - RNA, 20 nt, Artificial Sequence
  Synthetic
aaaauuucauccuugacuuu

SEQ ID NO: 126034 - RNA, 21 nt, Artificial Sequence
  Synthetic
uaaaauuucauccuugacuuu

SEQ ID NO: 126035 - RNA, 22 nt, Artificial Sequence
  Synthetic
uuaaaauuucauccuugacuuu

SEQ ID NO: 126036 - RNA, 23 nt, Artificial Sequence
  Synthetic
uuuaaaauuucauccuugacuuu

SEQ ID NO: 126037 - RNA, 24 nt, Artificial Sequence
  Synthetic
uuuuaaaauuucauccuugacuuu

SEQ ID NO: 126038 - RNA, 19 nt, Artificial Sequence
  Synthetic
ugaaggaucaaaauacuuu

SEQ ID NO: 126039 - RNA, 20 nt, Artificial Sequence
  Synthetic
uugaaggaucaaaauacuuu

SEQ ID NO: 126040 - RNA, 21 nt, Artificial Sequence
  Synthetic
uuugaaggaucaaaauacuuu

SEQ ID NO: 126041 - RNA, 22 nt, Artificial Sequence
  Synthetic
uuuugaaggaucaaaauacuuu

SEQ ID NO: 126042 - RNA, 23 nt, Artificial Sequence
  Synthetic
uuuuugaaggaucaaaauacuuu

SEQ ID NO: 126043 - RNA, 24 nt, Artificial Sequence
  Synthetic
uuuuuugaaggaucaaaauacuuu

SEQ ID NO: 126044 - RNA, 19 nt, Artificial Sequence
  Synthetic
cgaaaaaaauaaauacuuu

SEQ ID NO: 126045 - RNA, 20 nt, Artificial Sequence
  Synthetic
acgaaaaaaauaaauacuuu

SEQ ID NO: 126046 - RNA, 21 nt, Artificial Sequence
  Synthetic
uacgaaaaaaauaaauacuuu

SEQ ID NO: 126047 - RNA, 22 nt, Artificial Sequence
  Synthetic
cuacgaaaaaaauaaauacuuu

SEQ ID NO: 126048 - RNA, 24 nt, Artificial Sequence
  Synthetic
ugcuacgaaaaaaauaaauacuuu

SEQ ID NO: 126049 - RNA, 19 nt, Artificial Sequence
  Synthetic
aguaaaucaucacuacuuu

SEQ ID NO: 126050 - RNA, 20 nt, Artificial Sequence
  Synthetic
aaguaaaucaucacuacuuu

SEQ ID NO: 126051 - RNA, 22 nt, Artificial Sequence
  Synthetic
ugaaguaaaucaucacuacuuu

SEQ ID NO: 126052 - RNA, 23 nt, Artificial Sequence
  Synthetic
augaaguaaaucaucacuacuuu

SEQ ID NO: 126053 - RNA, 24 nt, Artificial Sequence
  Synthetic
uaugaaguaaaucaucacuacuuu

SEQ ID NO: 126054 - RNA, 18 nt, Artificial Sequence
  Synthetic
uuaaacuucaucuacuuu

SEQ ID NO: 126055 - RNA, 19 nt, Artificial Sequence
  Synthetic
uuuaaacuucaucuacuuu

SEQ ID NO: 126056 - RNA, 20 nt, Artificial Sequence
  Synthetic
uuuuaaacuucaucuacuuu

SEQ ID NO: 126057 - RNA, 21 nt, Artificial Sequence
  Synthetic
uuuuuaaacuucaucuacuuu

SEQ ID NO: 126058 - RNA, 22 nt, Artificial Sequence
  Synthetic
auuuuuaaacuucaucuacuuu

SEQ ID NO: 126059 - RNA, 23 nt, Artificial Sequence
  Synthetic
cauuuuuaaacuucaucuacuuu

SEQ ID NO: 126060 - RNA, 24 nt, Artificial Sequence
  Synthetic
ucauuuuuaaacuucaucuacuuu

SEQ ID NO: 126061 - RNA, 18 nt, Artificial Sequence
  Synthetic
augaauuguaucuacuuu

SEQ ID NO: 126062 - RNA, 19 nt, Artificial Sequence
  Synthetic
uaugaauuguaucuacuuu

SEQ ID NO: 126063 - RNA, 20 nt, Artificial Sequence
  Synthetic
auaugaauuguaucuacuuu

SEQ ID NO: 126064 - RNA, 21 nt, Artificial Sequence
  Synthetic
aauaugaauuguaucuacuuu

SEQ ID NO: 126065 - RNA, 22 nt, Artificial Sequence
  Synthetic
aaauaugaauuguaucuacuuu

SEQ ID NO: 126066 - RNA, 23 nt, Artificial Sequence
  Synthetic
aaaauaugaauuguaucuacuuu

SEQ ID NO: 126067 - RNA, 24 nt, Artificial Sequence
  Synthetic
caaaauaugaauuguaucuacuuu

SEQ ID NO: 126068 - RNA, 18 nt, Artificial Sequence
  Synthetic
agaaauggcuucuacuuu

SEQ ID NO: 126069 - RNA, 19 nt, Artificial Sequence
  Synthetic
cagaaauggcuucuacuuu

SEQ ID NO: 126070 - RNA, 20 nt, Artificial Sequence
  Synthetic
ccagaaauggcuucuacuuu

SEQ ID NO: 126071 - RNA, 21 nt, Artificial Sequence
  Synthetic
uccagaaauggcuucuacuuu

SEQ ID NO: 126072 - RNA, 22 nt, Artificial Sequence
  Synthetic
auccagaaauggcuucuacuuu

SEQ ID NO: 126073 - RNA, 23 nt, Artificial Sequence
  Synthetic
aauccagaaauggcuucuacuuu

SEQ ID NO: 126074 - RNA, 24 nt, Artificial Sequence
  Synthetic
uaauccagaaauggcuucuacuuu

SEQ ID NO: 126075 - RNA, 18 nt, Artificial Sequence
  Synthetic
cagauagggaaguacuuu

SEQ ID NO: 126076 - RNA, 19 nt, Artificial Sequence
  Synthetic
acagauagggaaguacuuu

SEQ ID NO: 126077 - RNA, 20 nt, Artificial Sequence
  Synthetic
uacagauagggaaguacuuu

SEQ ID NO: 126078 - RNA, 21 nt, Artificial Sequence
  Synthetic
cuacagauagggaaguacuuu

SEQ ID NO: 126079 - RNA, 22 nt, Artificial Sequence
  Synthetic
ccuacagauagggaaguacuuu

SEQ ID NO: 126080 - RNA, 24 nt, Artificial Sequence
  Synthetic
agccuacagauagggaaguacuuu

SEQ ID NO: 126081 - RNA, 18 nt, Artificial Sequence
  Synthetic
aucaauauauuuuacuuu

SEQ ID NO: 126082 - RNA, 20 nt, Artificial Sequence
  Synthetic
ugaucaauauauuuuacuuu

SEQ ID NO: 126083 - RNA, 21 nt, Artificial Sequence
  Synthetic
augaucaauauauuuuacuuu

SEQ ID NO: 126084 - RNA, 22 nt, Artificial Sequence
  Synthetic
uaugaucaauauauuuuacuuu

SEQ ID NO: 126085 - RNA, 24 nt, Artificial Sequence
  Synthetic
uguaugaucaauauauuuuacuuu

SEQ ID NO: 126086 - RNA, 21 nt, Artificial Sequence
  Synthetic
caaaauuugguuuuuuacuuu

SEQ ID NO: 126087 - RNA, 24 nt, Artificial Sequence
  Synthetic
uggcaaaauuugguuuuuuacuuu

SEQ ID NO: 126088 - RNA, 18 nt, Artificial Sequence
  Synthetic
uuuccacagagaaccuuu

SEQ ID NO: 126089 - RNA, 20 nt, Artificial Sequence
  Synthetic
uguuuccacagagaaccuuu

SEQ ID NO: 126090 - RNA, 21 nt, Artificial Sequence
  Synthetic
auguuuccacagagaaccuuu

SEQ ID NO: 126091 - RNA, 22 nt, Artificial Sequence
  Synthetic
uauguuuccacagagaaccuuu

SEQ ID NO: 126092 - RNA, 23 nt, Artificial Sequence
  Synthetic
uuauguuuccacagagaaccuuu

SEQ ID NO: 126093 - RNA, 18 nt, Artificial Sequence
  Synthetic
caguuuauaaagcccuuu

SEQ ID NO: 126094 - RNA, 19 nt, Artificial Sequence
  Synthetic
ucaguuuauaaagcccuuu

SEQ ID NO: 126095 - RNA, 20 nt, Artificial Sequence
  Synthetic
uucaguuuauaaagcccuuu

SEQ ID NO: 126096 - RNA, 21 nt, Artificial Sequence
  Synthetic
uuucaguuuauaaagcccuuu

SEQ ID NO: 126097 - RNA, 22 nt, Artificial Sequence
  Synthetic
uuuucaguuuauaaagcccuuu

SEQ ID NO: 126098 - RNA, 23 nt, Artificial Sequence
  Synthetic
uuuuucaguuuauaaagcccuuu

SEQ ID NO: 126099 - RNA, 24 nt, Artificial Sequence
  Synthetic
uuuuuucaguuuauaaagcccuuu

SEQ ID NO: 126100 - RNA, 21 nt, Artificial Sequence
  Synthetic
augccuccuguguugcccuuu

SEQ ID NO: 126101 - RNA, 24 nt, Artificial Sequence
  Synthetic
aggaugccuccuguguugcccuuu

SEQ ID NO: 126102 - RNA, 18 nt, Artificial Sequence
  Synthetic
ucacagcuuggucccuuu

SEQ ID NO: 126103 - RNA, 19 nt, Artificial Sequence
  Synthetic
uucacagcuuggucccuuu

SEQ ID NO: 126104 - RNA, 20 nt, Artificial Sequence
  Synthetic
auucacagcuuggucccuuu

SEQ ID NO: 126105 - RNA, 21 nt, Artificial Sequence
  Synthetic
aauucacagcuuggucccuuu

SEQ ID NO: 126106 - RNA, 24 nt, Artificial Sequence
  Synthetic
uggaauucacagcuuggucccuuu

SEQ ID NO: 126107 - RNA, 18 nt, Artificial Sequence
  Synthetic
uccuguuuacaauccuuu

SEQ ID NO: 126108 - RNA, 19 nt, Artificial Sequence
  Synthetic
uuccuguuuacaauccuuu

SEQ ID NO: 126109 - RNA, 20 nt, Artificial Sequence
  Synthetic
uuuccuguuuacaauccuuu

SEQ ID NO: 126110 - RNA, 21 nt, Artificial Sequence
  Synthetic
uuuuccuguuuacaauccuuu

SEQ ID NO: 126111 - RNA, 22 nt, Artificial Sequence
  Synthetic
auuuuccuguuuacaauccuuu

SEQ ID NO: 126112 - RNA, 23 nt, Artificial Sequence
  Synthetic
uauuuuccuguuuacaauccuuu

SEQ ID NO: 126113 - RNA, 24 nt, Artificial Sequence
  Synthetic
uuauuuuccuguuuacaauccuuu

SEQ ID NO: 126114 - RNA, 18 nt, Artificial Sequence
  Synthetic
cuuuuaaaucucuccuuu

SEQ ID NO: 126115 - RNA, 19 nt, Artificial Sequence
  Synthetic
ucuuuuaaaucucuccuuu

SEQ ID NO: 126116 - RNA, 22 nt, Artificial Sequence
  Synthetic
cggucuuuuaaaucucuccuuu

SEQ ID NO: 126117 - RNA, 23 nt, Artificial Sequence
  Synthetic
ucggucuuuuaaaucucuccuuu

SEQ ID NO: 126118 - RNA, 18 nt, Artificial Sequence
  Synthetic
ccagcuccagaguccuuu

SEQ ID NO: 126119 - RNA, 19 nt, Artificial Sequence
  Synthetic
uccagcuccagaguccuuu

SEQ ID NO: 126120 - RNA, 20 nt, Artificial Sequence
  Synthetic
uuccagcuccagaguccuuu

SEQ ID NO: 126121 - RNA, 21 nt, Artificial Sequence
  Synthetic
uuuccagcuccagaguccuuu

SEQ ID NO: 126122 - RNA, 22 nt, Artificial Sequence
  Synthetic
auuuccagcuccagaguccuuu

SEQ ID NO: 126123 - RNA, 23 nt, Artificial Sequence
  Synthetic
aauuuccagcuccagaguccuuu

SEQ ID NO: 126124 - RNA, 18 nt, Artificial Sequence
  Synthetic
ucuguaagccguuccuuu

SEQ ID NO: 126125 - RNA, 19 nt, Artificial Sequence
  Synthetic
uucuguaagccguuccuuu

SEQ ID NO: 126126 - RNA, 20 nt, Artificial Sequence
  Synthetic
uuucuguaagccguuccuuu

SEQ ID NO: 126127 - RNA, 21 nt, Artificial Sequence
  Synthetic
auuucuguaagccguuccuuu

SEQ ID NO: 126128 - RNA, 23 nt, Artificial Sequence
  Synthetic
agauuucuguaagccguuccuuu

SEQ ID NO: 126129 - RNA, 24 nt, Artificial Sequence
  Synthetic
aagauuucuguaagccguuccuuu

SEQ ID NO: 126130 - RNA, 18 nt, Artificial Sequence
  Synthetic
caucugugguuuuccuuu

SEQ ID NO: 126131 - RNA, 19 nt, Artificial Sequence
  Synthetic
ccaucugugguuuuccuuu

SEQ ID NO: 126132 - RNA, 20 nt, Artificial Sequence
  Synthetic
accaucugugguuuuccuuu

SEQ ID NO: 126133 - RNA, 21 nt, Artificial Sequence
  Synthetic
caccaucugugguuuuccuuu

SEQ ID NO: 126134 - RNA, 22 nt, Artificial Sequence
  Synthetic
ccaccaucugugguuuuccuuu

SEQ ID NO: 126135 - RNA, 23 nt, Artificial Sequence
  Synthetic
accaccaucugugguuuuccuuu

SEQ ID NO: 126136 - RNA, 24 nt, Artificial Sequence
  Synthetic
uaccaccaucugugguuuuccuuu

SEQ ID NO: 126137 - RNA, 18 nt, Artificial Sequence
  Synthetic
augaguauggaaagcuuu

SEQ ID NO: 126138 - RNA, 19 nt, Artificial Sequence
  Synthetic
aaugaguauggaaagcuuu

SEQ ID NO: 126139 - RNA, 20 nt, Artificial Sequence
  Synthetic
aaaugaguauggaaagcuuu

SEQ ID NO: 126140 - RNA, 23 nt, Artificial Sequence
  Synthetic
uggaaaugaguauggaaagcuuu

SEQ ID NO: 126141 - RNA, 24 nt, Artificial Sequence
  Synthetic
uuggaaaugaguauggaaagcuuu

SEQ ID NO: 126142 - RNA, 18 nt, Artificial Sequence
  Synthetic
uuagauauuuauagcuuu

SEQ ID NO: 126143 - RNA, 19 nt, Artificial Sequence
  Synthetic
uuuagauauuuauagcuuu

SEQ ID NO: 126144 - RNA, 20 nt, Artificial Sequence
  Synthetic
auuuagauauuuauagcuuu

SEQ ID NO: 126145 - RNA, 21 nt, Artificial Sequence
  Synthetic
aauuuagauauuuauagcuuu

SEQ ID NO: 126146 - RNA, 22 nt, Artificial Sequence
  Synthetic
caauuuagauauuuauagcuuu

SEQ ID NO: 126147 - RNA, 23 nt, Artificial Sequence
  Synthetic
acaauuuagauauuuauagcuuu

SEQ ID NO: 126148 - RNA, 24 nt, Artificial Sequence
  Synthetic
cacaauuuagauauuuauagcuuu

SEQ ID NO: 126149 - RNA, 21 nt, Artificial Sequence
  Synthetic
aacauuuaauuaucuagcuuu

SEQ ID NO: 126150 - RNA, 22 nt, Artificial Sequence
  Synthetic
aaacauuuaauuaucuagcuuu

SEQ ID NO: 126151 - RNA, 23 nt, Artificial Sequence
  Synthetic
uaaacauuuaauuaucuagcuuu

SEQ ID NO: 126152 - RNA, 18 nt, Artificial Sequence
  Synthetic
cugacccacuaccgcuuu

SEQ ID NO: 126153 - RNA, 19 nt, Artificial Sequence
  Synthetic
ccugacccacuaccgcuuu

SEQ ID NO: 126154 - RNA, 18 nt, Artificial Sequence
  Synthetic
ucucaaaggacaggcuuu

SEQ ID NO: 126155 - RNA, 20 nt, Artificial Sequence
  Synthetic
ugucucaaaggacaggcuuu

SEQ ID NO: 126156 - RNA, 22 nt, Artificial Sequence
  Synthetic
ugugucucaaaggacaggcuuu

SEQ ID NO: 126157 - RNA, 23 nt, Artificial Sequence
  Synthetic
augugucucaaaggacaggcuuu

SEQ ID NO: 126158 - RNA, 24 nt, Artificial Sequence
  Synthetic
aaugugucucaaaggacaggcuuu

SEQ ID NO: 126159 - RNA, 18 nt, Artificial Sequence
  Synthetic
ucuuggccagagggcuuu

SEQ ID NO: 126160 - RNA, 19 nt, Artificial Sequence
  Synthetic
aucuuggccagagggcuuu

SEQ ID NO: 126161 - RNA, 20 nt, Artificial Sequence
  Synthetic
aaucuuggccagagggcuuu

SEQ ID NO: 126162 - RNA, 21 nt, Artificial Sequence
  Synthetic
uaaucuuggccagagggcuuu

SEQ ID NO: 126163 - RNA, 23 nt, Artificial Sequence
  Synthetic
uguaaucuuggccagagggcuuu

SEQ ID NO: 126164 - RNA, 24 nt, Artificial Sequence
  Synthetic
uuguaaucuuggccagagggcuuu

SEQ ID NO: 126165 - RNA, 18 nt, Artificial Sequence
  Synthetic
uaagauuuuuggggcuuu

SEQ ID NO: 126166 - RNA, 19 nt, Artificial Sequence
  Synthetic
auaagauuuuuggggcuuu

SEQ ID NO: 126167 - RNA, 20 nt, Artificial Sequence
  Synthetic
aauaagauuuuuggggcuuu

SEQ ID NO: 126168 - RNA, 21 nt, Artificial Sequence
  Synthetic
aaauaagauuuuuggggcuuu

SEQ ID NO: 126169 - RNA, 23 nt, Artificial Sequence
  Synthetic
ugaaauaagauuuuuggggcuuu

SEQ ID NO: 126170 - RNA, 24 nt, Artificial Sequence
  Synthetic
cugaaauaagauuuuuggggcuuu

SEQ ID NO: 126171 - RNA, 19 nt, Artificial Sequence
  Synthetic
uguccagcccaugggcuuu

SEQ ID NO: 126172 - RNA, 20 nt, Artificial Sequence
  Synthetic
uuguccagcccaugggcuuu

SEQ ID NO: 126173 - RNA, 21 nt, Artificial Sequence
  Synthetic
uuuguccagcccaugggcuuu

SEQ ID NO: 126174 - RNA, 22 nt, Artificial Sequence
  Synthetic
uuuuguccagcccaugggcuuu

SEQ ID NO: 126175 - RNA, 23 nt, Artificial Sequence
  Synthetic
auuuuguccagcccaugggcuuu

SEQ ID NO: 126176 - RNA, 24 nt, Artificial Sequence
  Synthetic
aauuuuguccagcccaugggcuuu

SEQ ID NO: 126177 - RNA, 18 nt, Artificial Sequence
  Synthetic
aacaauuugugaugcuuu

SEQ ID NO: 126178 - RNA, 19 nt, Artificial Sequence
  Synthetic
uaacaauuugugaugcuuu

SEQ ID NO: 126179 - RNA, 20 nt, Artificial Sequence
  Synthetic
auaacaauuugugaugcuuu

SEQ ID NO: 126180 - RNA, 21 nt, Artificial Sequence
  Synthetic
uauaacaauuugugaugcuuu

SEQ ID NO: 126181 - RNA, 22 nt, Artificial Sequence
  Synthetic
auauaacaauuugugaugcuuu

SEQ ID NO: 126182 - RNA, 24 nt, Artificial Sequence
  Synthetic
ugauauaacaauuugugaugcuuu

SEQ ID NO: 126183 - RNA, 18 nt, Artificial Sequence
  Synthetic
aaguuuccuugaugcuuu

SEQ ID NO: 126184 - RNA, 19 nt, Artificial Sequence
  Synthetic
caaguuuccuugaugcuuu

SEQ ID NO: 126185 - RNA, 20 nt, Artificial Sequence
  Synthetic
ccaaguuuccuugaugcuuu

SEQ ID NO: 126186 - RNA, 21 nt, Artificial Sequence
  Synthetic
uccaaguuuccuugaugcuuu

SEQ ID NO: 126187 - RNA, 22 nt, Artificial Sequence
  Synthetic
cuccaaguuuccuugaugcuuu

SEQ ID NO: 126188 - RNA, 23 nt, Artificial Sequence
  Synthetic
acuccaaguuuccuugaugcuuu

SEQ ID NO: 126189 - RNA, 24 nt, Artificial Sequence
  Synthetic
cacuccaaguuuccuugaugcuuu

SEQ ID NO: 126190 - RNA, 18 nt, Artificial Sequence
  Synthetic
auaggcagcauaugcuuu

SEQ ID NO: 126191 - RNA, 19 nt, Artificial Sequence
  Synthetic
cauaggcagcauaugcuuu

SEQ ID NO: 126192 - RNA, 20 nt, Artificial Sequence
  Synthetic
acauaggcagcauaugcuuu

SEQ ID NO: 126193 - RNA, 21 nt, Artificial Sequence
  Synthetic
uacauaggcagcauaugcuuu

SEQ ID NO: 126194 - RNA, 18 nt, Artificial Sequence
  Synthetic
cccaccccacacugcuuu

SEQ ID NO: 126195 - RNA, 19 nt, Artificial Sequence
  Synthetic
ucccaccccacacugcuuu

SEQ ID NO: 126196 - RNA, 20 nt, Artificial Sequence
  Synthetic
cucccaccccacacugcuuu

SEQ ID NO: 126197 - RNA, 21 nt, Artificial Sequence
  Synthetic
ccucccaccccacacugcuuu

SEQ ID NO: 126198 - RNA, 23 nt, Artificial Sequence
  Synthetic
ugccucccaccccacacugcuuu

SEQ ID NO: 126199 - RNA, 24 nt, Artificial Sequence
  Synthetic
augccucccaccccacacugcuuu

SEQ ID NO: 126200 - RNA, 18 nt, Artificial Sequence
  Synthetic
cugcucaccuacugcuuu

SEQ ID NO: 126201 - RNA, 20 nt, Artificial Sequence
  Synthetic
ugcugcucaccuacugcuuu

SEQ ID NO: 126202 - RNA, 21 nt, Artificial Sequence
  Synthetic
cugcugcucaccuacugcuuu

SEQ ID NO: 126203 - RNA, 23 nt, Artificial Sequence
  Synthetic
cgcugcugcucaccuacugcuuu

SEQ ID NO: 126204 - RNA, 24 nt, Artificial Sequence
  Synthetic
ccgcugcugcucaccuacugcuuu

SEQ ID NO: 126205 - RNA, 18 nt, Artificial Sequence
  Synthetic
uuaaaaaccuucugcuuu

SEQ ID NO: 126206 - RNA, 19 nt, Artificial Sequence
  Synthetic
cuuaaaaaccuucugcuuu

SEQ ID NO: 126207 - RNA, 20 nt, Artificial Sequence
  Synthetic
ucuuaaaaaccuucugcuuu

SEQ ID NO: 126208 - RNA, 21 nt, Artificial Sequence
  Synthetic
uucuuaaaaaccuucugcuuu

SEQ ID NO: 126209 - RNA, 22 nt, Artificial Sequence
  Synthetic
auucuuaaaaaccuucugcuuu

SEQ ID NO: 126210 - RNA, 23 nt, Artificial Sequence
  Synthetic
aauucuuaaaaaccuucugcuuu

SEQ ID NO: 126211 - RNA, 24 nt, Artificial Sequence
  Synthetic
aaauucuuaaaaaccuucugcuuu

SEQ ID NO: 126212 - RNA, 19 nt, Artificial Sequence
  Synthetic
aguggaucauuucugcuuu

SEQ ID NO: 126213 - RNA, 20 nt, Artificial Sequence
  Synthetic
aaguggaucauuucugcuuu

SEQ ID NO: 126214 - RNA, 21 nt, Artificial Sequence
  Synthetic
uaaguggaucauuucugcuuu

SEQ ID NO: 126215 - RNA, 22 nt, Artificial Sequence
  Synthetic
uuaaguggaucauuucugcuuu

SEQ ID NO: 126216 - RNA, 23 nt, Artificial Sequence
  Synthetic
uuuaaguggaucauuucugcuuu

SEQ ID NO: 126217 - RNA, 24 nt, Artificial Sequence
  Synthetic
uuuuaaguggaucauuucugcuuu

SEQ ID NO: 126218 - RNA, 18 nt, Artificial Sequence
  Synthetic
auuuugccccaaaucuuu

SEQ ID NO: 126219 - RNA, 21 nt, Artificial Sequence
  Synthetic
uggauuuugccccaaaucuuu

SEQ ID NO: 126220 - RNA, 23 nt, Artificial Sequence
  Synthetic
aguggauuuugccccaaaucuuu

SEQ ID NO: 126221 - RNA, 24 nt, Artificial Sequence
  Synthetic
aaguggauuuugccccaaaucuuu

SEQ ID NO: 126222 - RNA, 21 nt, Artificial Sequence
  Synthetic
ugggauuugaauccaaucuuu

SEQ ID NO: 126223 - RNA, 22 nt, Artificial Sequence
  Synthetic
cugggauuugaauccaaucuuu

SEQ ID NO: 126224 - RNA, 23 nt, Artificial Sequence
  Synthetic
ccugggauuugaauccaaucuuu

SEQ ID NO: 126225 - RNA, 24 nt, Artificial Sequence
  Synthetic
accugggauuugaauccaaucuuu

SEQ ID NO: 126226 - RNA, 18 nt, Artificial Sequence
  Synthetic
ucuaaugugugaaucuuu

SEQ ID NO: 126227 - RNA, 19 nt, Artificial Sequence
  Synthetic
uucuaaugugugaaucuuu

SEQ ID NO: 126228 - RNA, 20 nt, Artificial Sequence
  Synthetic
uuucuaaugugugaaucuuu

SEQ ID NO: 126229 - RNA, 21 nt, Artificial Sequence
  Synthetic
auuucuaaugugugaaucuuu

SEQ ID NO: 126230 - RNA, 22 nt, Artificial Sequence
  Synthetic
cauuucuaaugugugaaucuuu

SEQ ID NO: 126231 - RNA, 23 nt, Artificial Sequence
  Synthetic
acauuucuaaugugugaaucuuu

SEQ ID NO: 126232 - RNA, 24 nt, Artificial Sequence
  Synthetic
uacauuucuaaugugugaaucuuu

SEQ ID NO: 126233 - RNA, 18 nt, Artificial Sequence
  Synthetic
ugggaaauaugcaucuuu

SEQ ID NO: 126234 - RNA, 19 nt, Artificial Sequence
  Synthetic
uugggaaauaugcaucuuu

SEQ ID NO: 126235 - RNA, 20 nt, Artificial Sequence
  Synthetic
uuugggaaauaugcaucuuu

SEQ ID NO: 126236 - RNA, 21 nt, Artificial Sequence
  Synthetic
auuugggaaauaugcaucuuu

SEQ ID NO: 126237 - RNA, 23 nt, Artificial Sequence
  Synthetic
ugauuugggaaauaugcaucuuu

SEQ ID NO: 126238 - RNA, 24 nt, Artificial Sequence
  Synthetic
augauuugggaaauaugcaucuuu

SEQ ID NO: 126239 - RNA, 18 nt, Artificial Sequence
  Synthetic
uuugcauaaaguaucuuu

SEQ ID NO: 126240 - RNA, 19 nt, Artificial Sequence
  Synthetic
uuuugcauaaaguaucuuu

SEQ ID NO: 126241 - RNA, 20 nt, Artificial Sequence
  Synthetic
auuuugcauaaaguaucuuu

SEQ ID NO: 126242 - RNA, 23 nt, Artificial Sequence
  Synthetic
aggauuuugcauaaaguaucuuu

SEQ ID NO: 126243 - RNA, 24 nt, Artificial Sequence
  Synthetic
uaggauuuugcauaaaguaucuuu

SEQ ID NO: 126244 - RNA, 21 nt, Artificial Sequence
  Synthetic
uaauauuucuuucuuaucuuu

SEQ ID NO: 126245 - RNA, 22 nt, Artificial Sequence
  Synthetic
uuaauauuucuuucuuaucuuu

SEQ ID NO: 126246 - RNA, 23 nt, Artificial Sequence
  Synthetic
cuuaauauuucuuucuuaucuuu

SEQ ID NO: 126247 - RNA, 24 nt, Artificial Sequence
  Synthetic
ccuuaauauuucuuucuuaucuuu

SEQ ID NO: 126248 - RNA, 18 nt, Artificial Sequence
  Synthetic
ugcaugugaaaacucuuu

SEQ ID NO: 126249 - RNA, 19 nt, Artificial Sequence
  Synthetic
augcaugugaaaacucuuu

SEQ ID NO: 126250 - RNA, 21 nt, Artificial Sequence
  Synthetic
agaugcaugugaaaacucuuu

SEQ ID NO: 126251 - RNA, 22 nt, Artificial Sequence
  Synthetic
uagaugcaugugaaaacucuuu

SEQ ID NO: 126252 - RNA, 23 nt, Artificial Sequence
  Synthetic
cuagaugcaugugaaaacucuuu

SEQ ID NO: 126253 - RNA, 24 nt, Artificial Sequence
  Synthetic
acuagaugcaugugaaaacucuuu

SEQ ID NO: 126254 - RNA, 19 nt, Artificial Sequence
  Synthetic
cgaccuauaaaaccucuuu

SEQ ID NO: 126255 - RNA, 20 nt, Artificial Sequence
  Synthetic
acgaccuauaaaaccucuuu

SEQ ID NO: 126256 - RNA, 21 nt, Artificial Sequence
  Synthetic
aacgaccuauaaaaccucuuu

SEQ ID NO: 126257 - RNA, 22 nt, Artificial Sequence
  Synthetic
aaacgaccuauaaaaccucuuu

SEQ ID NO: 126258 - RNA, 23 nt, Artificial Sequence
  Synthetic
aaaacgaccuauaaaaccucuuu

SEQ ID NO: 126259 - RNA, 24 nt, Artificial Sequence
  Synthetic
uaaaacgaccuauaaaaccucuuu

SEQ ID NO: 126260 - RNA, 18 nt, Artificial Sequence
  Synthetic
auccauugugaccucuuu

SEQ ID NO: 126261 - RNA, 19 nt, Artificial Sequence
  Synthetic
cauccauugugaccucuuu

SEQ ID NO: 126262 - RNA, 20 nt, Artificial Sequence
  Synthetic
ucauccauugugaccucuuu

SEQ ID NO: 126263 - RNA, 21 nt, Artificial Sequence
  Synthetic
aucauccauugugaccucuuu

SEQ ID NO: 126264 - RNA, 22 nt, Artificial Sequence
  Synthetic
caucauccauugugaccucuuu

SEQ ID NO: 126265 - RNA, 23 nt, Artificial Sequence
  Synthetic
acaucauccauugugaccucuuu

SEQ ID NO: 126266 - RNA, 24 nt, Artificial Sequence
  Synthetic
uacaucauccauugugaccucuuu

SEQ ID NO: 126267 - RNA, 21 nt, Artificial Sequence
  Synthetic
caccacuauuaauuccucuuu

SEQ ID NO: 126268 - RNA, 22 nt, Artificial Sequence
  Synthetic
ccaccacuauuaauuccucuuu

SEQ ID NO: 126269 - RNA, 23 nt, Artificial Sequence
  Synthetic
cccaccacuauuaauuccucuuu

SEQ ID NO: 126270 - RNA, 24 nt, Artificial Sequence
  Synthetic
ccccaccacuauuaauuccucuuu

SEQ ID NO: 126271 - RNA, 18 nt, Artificial Sequence
  Synthetic
acacacccuuuucucuuu

SEQ ID NO: 126272 - RNA, 19 nt, Artificial Sequence
  Synthetic
cacacacccuuuucucuuu

SEQ ID NO: 126273 - RNA, 20 nt, Artificial Sequence
  Synthetic
acacacacccuuuucucuuu

SEQ ID NO: 126274 - RNA, 21 nt, Artificial Sequence
  Synthetic
cacacacacccuuuucucuuu

SEQ ID NO: 126275 - RNA, 22 nt, Artificial Sequence
  Synthetic
ucacacacacccuuuucucuuu

SEQ ID NO: 126276 - RNA, 23 nt, Artificial Sequence
  Synthetic
uucacacacacccuuuucucuuu

SEQ ID NO: 126277 - RNA, 24 nt, Artificial Sequence
  Synthetic
cuucacacacacccuuuucucuuu

SEQ ID NO: 126278 - RNA, 18 nt, Artificial Sequence
  Synthetic
auaaggcauaaagucuuu

SEQ ID NO: 126279 - RNA, 19 nt, Artificial Sequence
  Synthetic
cauaaggcauaaagucuuu

SEQ ID NO: 126280 - RNA, 20 nt, Artificial Sequence
  Synthetic
ccauaaggcauaaagucuuu

SEQ ID NO: 126281 - RNA, 21 nt, Artificial Sequence
  Synthetic
accauaaggcauaaagucuuu

SEQ ID NO: 126282 - RNA, 22 nt, Artificial Sequence
  Synthetic
caccauaaggcauaaagucuuu

SEQ ID NO: 126283 - RNA, 23 nt, Artificial Sequence
  Synthetic
acaccauaaggcauaaagucuuu

SEQ ID NO: 126284 - RNA, 24 nt, Artificial Sequence
  Synthetic
uacaccauaaggcauaaagucuuu

SEQ ID NO: 126285 - RNA, 19 nt, Artificial Sequence
  Synthetic
agaauucauacuagucuuu

SEQ ID NO: 126286 - RNA, 20 nt, Artificial Sequence
  Synthetic
aagaauucauacuagucuuu

SEQ ID NO: 126287 - RNA, 22 nt, Artificial Sequence
  Synthetic
ugaagaauucauacuagucuuu

SEQ ID NO: 126288 - RNA, 23 nt, Artificial Sequence
  Synthetic
augaagaauucauacuagucuuu

SEQ ID NO: 126289 - RNA, 24 nt, Artificial Sequence
  Synthetic
uaugaagaauucauacuagucuuu

SEQ ID NO: 126290 - RNA, 22 nt, Artificial Sequence
  Synthetic
uggcccacauccucaggucuuu

SEQ ID NO: 126291 - RNA, 23 nt, Artificial Sequence
  Synthetic
auggcccacauccucaggucuuu

SEQ ID NO: 126292 - RNA, 24 nt, Artificial Sequence
  Synthetic
uauggcccacauccucaggucuuu

SEQ ID NO: 126293 - RNA, 18 nt, Artificial Sequence
  Synthetic
agaacugacaaugucuuu

SEQ ID NO: 126294 - RNA, 19 nt, Artificial Sequence
  Synthetic
aagaacugacaaugucuuu

SEQ ID NO: 126295 - RNA, 20 nt, Artificial Sequence
  Synthetic
caagaacugacaaugucuuu

SEQ ID NO: 126296 - RNA, 21 nt, Artificial Sequence
  Synthetic
ccaagaacugacaaugucuuu

SEQ ID NO: 126297 - RNA, 23 nt, Artificial Sequence
  Synthetic
agccaagaacugacaaugucuuu

SEQ ID NO: 126298 - RNA, 24 nt, Artificial Sequence
  Synthetic
aagccaagaacugacaaugucuuu

SEQ ID NO: 126299 - RNA, 18 nt, Artificial Sequence
  Synthetic
aagacaagggaugucuuu

SEQ ID NO: 126300 - RNA, 20 nt, Artificial Sequence
  Synthetic
cgaagacaagggaugucuuu

SEQ ID NO: 126301 - RNA, 21 nt, Artificial Sequence
  Synthetic
ucgaagacaagggaugucuuu

SEQ ID NO: 126302 - RNA, 22 nt, Artificial Sequence
  Synthetic
uucgaagacaagggaugucuuu

SEQ ID NO: 126303 - RNA, 23 nt, Artificial Sequence
  Synthetic
auucgaagacaagggaugucuuu

SEQ ID NO: 126304 - RNA, 21 nt, Artificial Sequence
  Synthetic
agggucccuauaacugucuuu

SEQ ID NO: 126305 - RNA, 23 nt, Artificial Sequence
  Synthetic
agagggucccuauaacugucuuu

SEQ ID NO: 126306 - RNA, 24 nt, Artificial Sequence
  Synthetic
aagagggucccuauaacugucuuu

SEQ ID NO: 126307 - RNA, 18 nt, Artificial Sequence
  Synthetic
uaauagggcccugucuuu

SEQ ID NO: 126308 - RNA, 19 nt, Artificial Sequence
  Synthetic
auaauagggcccugucuuu

SEQ ID NO: 126309 - RNA, 20 nt, Artificial Sequence
  Synthetic
aauaauagggcccugucuuu

SEQ ID NO: 126310 - RNA, 21 nt, Artificial Sequence
  Synthetic
aaauaauagggcccugucuuu

SEQ ID NO: 126311 - RNA, 22 nt, Artificial Sequence
  Synthetic
caaauaauagggcccugucuuu

SEQ ID NO: 126312 - RNA, 23 nt, Artificial Sequence
  Synthetic
ucaaauaauagggcccugucuuu

SEQ ID NO: 126313 - RNA, 24 nt, Artificial Sequence
  Synthetic
aucaaauaauagggcccugucuuu

SEQ ID NO: 126314 - RNA, 18 nt, Artificial Sequence
  Synthetic
aucucuauuuccuucuuu

SEQ ID NO: 126315 - RNA, 19 nt, Artificial Sequence
  Synthetic
aaucucuauuuccuucuuu

SEQ ID NO: 126316 - RNA, 20 nt, Artificial Sequence
  Synthetic
aaaucucuauuuccuucuuu

SEQ ID NO: 126317 - RNA, 21 nt, Artificial Sequence
  Synthetic
caaaucucuauuuccuucuuu

SEQ ID NO: 126318 - RNA, 22 nt, Artificial Sequence
  Synthetic
ccaaaucucuauuuccuucuuu

SEQ ID NO: 126319 - RNA, 23 nt, Artificial Sequence
  Synthetic
accaaaucucuauuuccuucuuu

SEQ ID NO: 126320 - RNA, 24 nt, Artificial Sequence
  Synthetic
caccaaaucucuauuuccuucuuu

SEQ ID NO: 126321 - RNA, 19 nt, Artificial Sequence
  Synthetic
ugcgaacuguuucuucuuu

SEQ ID NO: 126322 - RNA, 20 nt, Artificial Sequence
  Synthetic
augcgaacuguuucuucuuu

SEQ ID NO: 126323 - RNA, 21 nt, Artificial Sequence
  Synthetic
uaugcgaacuguuucuucuuu

SEQ ID NO: 126324 - RNA, 22 nt, Artificial Sequence
  Synthetic
uuaugcgaacuguuucuucuuu

SEQ ID NO: 126325 - RNA, 23 nt, Artificial Sequence
  Synthetic
uuuaugcgaacuguuucuucuuu

SEQ ID NO: 126326 - RNA, 24 nt, Artificial Sequence
  Synthetic
cuuuaugcgaacuguuucuucuuu

SEQ ID NO: 126327 - RNA, 18 nt, Artificial Sequence
  Synthetic
uuuuaaacuugguucuuu

SEQ ID NO: 126328 - RNA, 19 nt, Artificial Sequence
  Synthetic
uuuuuaaacuugguucuuu

SEQ ID NO: 126329 - RNA, 20 nt, Artificial Sequence
  Synthetic
cuuuuuaaacuugguucuuu

SEQ ID NO: 126330 - RNA, 21 nt, Artificial Sequence
  Synthetic
acuuuuuaaacuugguucuuu

SEQ ID NO: 126331 - RNA, 22 nt, Artificial Sequence
  Synthetic
aacuuuuuaaacuugguucuuu

SEQ ID NO: 126332 - RNA, 23 nt, Artificial Sequence
  Synthetic
aaacuuuuuaaacuugguucuuu

SEQ ID NO: 126333 - RNA, 24 nt, Artificial Sequence
  Synthetic
aaaacuuuuuaaacuugguucuuu

SEQ ID NO: 126334 - RNA, 18 nt, Artificial Sequence
  Synthetic
aagugcuuauuguucuuu

SEQ ID NO: 126335 - RNA, 19 nt, Artificial Sequence
  Synthetic
uaagugcuuauuguucuuu

SEQ ID NO: 126336 - RNA, 20 nt, Artificial Sequence
  Synthetic
auaagugcuuauuguucuuu

SEQ ID NO: 126337 - RNA, 23 nt, Artificial Sequence
  Synthetic
aggauaagugcuuauuguucuuu

SEQ ID NO: 126338 - RNA, 19 nt, Artificial Sequence
  Synthetic
uguauucauacauuucuuu

SEQ ID NO: 126339 - RNA, 21 nt, Artificial Sequence
  Synthetic
uguguauucauacauuucuuu

SEQ ID NO: 126340 - RNA, 22 nt, Artificial Sequence
  Synthetic
uuguguauucauacauuucuuu

SEQ ID NO: 126341 - RNA, 23 nt, Artificial Sequence
  Synthetic
auuguguauucauacauuucuuu

SEQ ID NO: 126342 - RNA, 24 nt, Artificial Sequence
  Synthetic
uauuguguauucauacauuucuuu

SEQ ID NO: 126343 - RNA, 18 nt, Artificial Sequence
  Synthetic
uacacaagggcuuucuuu

SEQ ID NO: 126344 - RNA, 19 nt, Artificial Sequence
  Synthetic
auacacaagggcuuucuuu

SEQ ID NO: 126345 - RNA, 20 nt, Artificial Sequence
  Synthetic
cauacacaagggcuuucuuu

SEQ ID NO: 126346 - RNA, 21 nt, Artificial Sequence
  Synthetic
ccauacacaagggcuuucuuu

SEQ ID NO: 126347 - RNA, 22 nt, Artificial Sequence
  Synthetic
cccauacacaagggcuuucuuu

SEQ ID NO: 126348 - RNA, 23 nt, Artificial Sequence
  Synthetic
ccccauacacaagggcuuucuuu

SEQ ID NO: 126349 - RNA, 24 nt, Artificial Sequence
  Synthetic
accccauacacaagggcuuucuuu

SEQ ID NO: 126350 - RNA, 18 nt, Artificial Sequence
  Synthetic
acaucaaaugcuuucuuu

SEQ ID NO: 126351 - RNA, 19 nt, Artificial Sequence
  Synthetic
aacaucaaaugcuuucuuu

SEQ ID NO: 126352 - RNA, 20 nt, Artificial Sequence
  Synthetic
aaacaucaaaugcuuucuuu

SEQ ID NO: 126353 - RNA, 21 nt, Artificial Sequence
  Synthetic
uaaacaucaaaugcuuucuuu

SEQ ID NO: 126354 - RNA, 22 nt, Artificial Sequence
  Synthetic
uuaaacaucaaaugcuuucuuu

SEQ ID NO: 126355 - RNA, 23 nt, Artificial Sequence
  Synthetic
cuuaaacaucaaaugcuuucuuu

SEQ ID NO: 126356 - RNA, 24 nt, Artificial Sequence
  Synthetic
ccuuaaacaucaaaugcuuucuuu

SEQ ID NO: 126357 - RNA, 18 nt, Artificial Sequence
  Synthetic
uuggagaauauuuucuuu

SEQ ID NO: 126358 - RNA, 19 nt, Artificial Sequence
  Synthetic
auuggagaauauuuucuuu

SEQ ID NO: 126359 - RNA, 20 nt, Artificial Sequence
  Synthetic
cauuggagaauauuuucuuu

SEQ ID NO: 126360 - RNA, 21 nt, Artificial Sequence
  Synthetic
acauuggagaauauuuucuuu

SEQ ID NO: 126361 - RNA, 22 nt, Artificial Sequence
  Synthetic
aacauuggagaauauuuucuuu

SEQ ID NO: 126362 - RNA, 23 nt, Artificial Sequence
  Synthetic
caacauuggagaauauuuucuuu

SEQ ID NO: 126363 - RNA, 18 nt, Artificial Sequence
  Synthetic
agggacguuguuuucuuu

SEQ ID NO: 126364 - RNA, 19 nt, Artificial Sequence
  Synthetic
aagggacguuguuuucuuu

SEQ ID NO: 126365 - RNA, 20 nt, Artificial Sequence
  Synthetic
aaagggacguuguuuucuuu

SEQ ID NO: 126366 - RNA, 21 nt, Artificial Sequence
  Synthetic
caaagggacguuguuuucuuu

SEQ ID NO: 126367 - RNA, 22 nt, Artificial Sequence
  Synthetic
acaaagggacguuguuuucuuu

SEQ ID NO: 126368 - RNA, 23 nt, Artificial Sequence
  Synthetic
aacaaagggacguuguuuucuuu

SEQ ID NO: 126369 - RNA, 24 nt, Artificial Sequence
  Synthetic
caacaaagggacguuguuuucuuu

SEQ ID NO: 126370 - RNA, 21 nt, Artificial Sequence
  Synthetic
uacuucuauuaaaaaaaguuu

SEQ ID NO: 126371 - RNA, 22 nt, Artificial Sequence
  Synthetic
auacuucuauuaaaaaaaguuu

SEQ ID NO: 126372 - RNA, 23 nt, Artificial Sequence
  Synthetic
aauacuucuauuaaaaaaaguuu

SEQ ID NO: 126373 - RNA, 24 nt, Artificial Sequence
  Synthetic
uaauacuucuauuaaaaaaaguuu

SEQ ID NO: 126374 - RNA, 18 nt, Artificial Sequence
  Synthetic
aacacgaucgaaaaguuu

SEQ ID NO: 126375 - RNA, 20 nt, Artificial Sequence
  Synthetic
ugaacacgaucgaaaaguuu

SEQ ID NO: 126376 - RNA, 21 nt, Artificial Sequence
  Synthetic
uugaacacgaucgaaaaguuu

SEQ ID NO: 126377 - RNA, 22 nt, Artificial Sequence
  Synthetic
uuugaacacgaucgaaaaguuu

SEQ ID NO: 126378 - RNA, 23 nt, Artificial Sequence
  Synthetic
uuuugaacacgaucgaaaaguuu

SEQ ID NO: 126379 - RNA, 24 nt, Artificial Sequence
  Synthetic
auuuugaacacgaucgaaaaguuu

SEQ ID NO: 126380 - RNA, 18 nt, Artificial Sequence
  Synthetic
ucaugaauaucaaaguuu

SEQ ID NO: 126381 - RNA, 19 nt, Artificial Sequence
  Synthetic
uucaugaauaucaaaguuu

SEQ ID NO: 126382 - RNA, 22 nt, Artificial Sequence
  Synthetic
agguucaugaauaucaaaguuu

SEQ ID NO: 126383 - RNA, 23 nt, Artificial Sequence
  Synthetic
aagguucaugaauaucaaaguuu

SEQ ID NO: 126384 - RNA, 18 nt, Artificial Sequence
  Synthetic
auuccaaauaacaaguuu

SEQ ID NO: 126385 - RNA, 19 nt, Artificial Sequence
  Synthetic
aauuccaaauaacaaguuu

SEQ ID NO: 126386 - RNA, 20 nt, Artificial Sequence
  Synthetic
uaauuccaaauaacaaguuu

SEQ ID NO: 126387 - RNA, 21 nt, Artificial Sequence
  Synthetic
cuaauuccaaauaacaaguuu

SEQ ID NO: 126388 - RNA, 22 nt, Artificial Sequence
  Synthetic
ccuaauuccaaauaacaaguuu

SEQ ID NO: 126389 - RNA, 23 nt, Artificial Sequence
  Synthetic
accuaauuccaaauaacaaguuu

SEQ ID NO: 126390 - RNA, 18 nt, Artificial Sequence
  Synthetic
ugaagaacgacgaaguuu

SEQ ID NO: 126391 - RNA, 19 nt, Artificial Sequence
  Synthetic
uugaagaacgacgaaguuu

SEQ ID NO: 126392 - RNA, 20 nt, Artificial Sequence
  Synthetic
uuugaagaacgacgaaguuu

SEQ ID NO: 126393 - RNA, 21 nt, Artificial Sequence
  Synthetic
cuuugaagaacgacgaaguuu

SEQ ID NO: 126394 - RNA, 22 nt, Artificial Sequence
  Synthetic
acuuugaagaacgacgaaguuu

SEQ ID NO: 126395 - RNA, 23 nt, Artificial Sequence
  Synthetic
aacuuugaagaacgacgaaguuu

SEQ ID NO: 126396 - RNA, 24 nt, Artificial Sequence
  Synthetic
caacuuugaagaacgacgaaguuu

SEQ ID NO: 126397 - RNA, 18 nt, Artificial Sequence
  Synthetic
acugaaguaaauaaguuu

SEQ ID NO: 126398 - RNA, 19 nt, Artificial Sequence
  Synthetic
aacugaaguaaauaaguuu

SEQ ID NO: 126399 - RNA, 20 nt, Artificial Sequence
  Synthetic
uaacugaaguaaauaaguuu

SEQ ID NO: 126400 - RNA, 18 nt, Artificial Sequence
  Synthetic
uuuugaacuguuaaguuu

SEQ ID NO: 126401 - RNA, 20 nt, Artificial Sequence
  Synthetic
cguuuugaacuguuaaguuu

SEQ ID NO: 126402 - RNA, 21 nt, Artificial Sequence
  Synthetic
ucguuuugaacuguuaaguuu

SEQ ID NO: 126403 - RNA, 22 nt, Artificial Sequence
  Synthetic
cucguuuugaacuguuaaguuu

SEQ ID NO: 126404 - RNA, 23 nt, Artificial Sequence
  Synthetic
acucguuuugaacuguuaaguuu

SEQ ID NO: 126405 - RNA, 24 nt, Artificial Sequence
  Synthetic
cacucguuuugaacuguuaaguuu

SEQ ID NO: 126406 - RNA, 19 nt, Artificial Sequence
  Synthetic
ugaaauauaagagcaguuu

SEQ ID NO: 126407 - RNA, 20 nt, Artificial Sequence
  Synthetic
uugaaauauaagagcaguuu

SEQ ID NO: 126408 - RNA, 21 nt, Artificial Sequence
  Synthetic
uuugaaauauaagagcaguuu

SEQ ID NO: 126409 - RNA, 22 nt, Artificial Sequence
  Synthetic
uuuugaaauauaagagcaguuu

SEQ ID NO: 126410 - RNA, 23 nt, Artificial Sequence
  Synthetic
uuuuugaaauauaagagcaguuu

SEQ ID NO: 126411 - RNA, 24 nt, Artificial Sequence
  Synthetic
uuuuuugaaauauaagagcaguuu

SEQ ID NO: 126412 - RNA, 19 nt, Artificial Sequence
  Synthetic
ugcucuaugguggcaguuu

SEQ ID NO: 126413 - RNA, 20 nt, Artificial Sequence
  Synthetic
cugcucuaugguggcaguuu

SEQ ID NO: 126414 - RNA, 21 nt, Artificial Sequence
  Synthetic
ccugcucuaugguggcaguuu

SEQ ID NO: 126415 - RNA, 24 nt, Artificial Sequence
  Synthetic
aggccugcucuaugguggcaguuu

SEQ ID NO: 126416 - RNA, 21 nt, Artificial Sequence
  Synthetic
ucuuuuuaaaaacaucaguuu

SEQ ID NO: 126417 - RNA, 22 nt, Artificial Sequence
  Synthetic
cucuuuuuaaaaacaucaguuu

SEQ ID NO: 126418 - RNA, 23 nt, Artificial Sequence
  Synthetic
acucuuuuuaaaaacaucaguuu

SEQ ID NO: 126419 - RNA, 24 nt, Artificial Sequence
  Synthetic
uacucuuuuuaaaaacaucaguuu

SEQ ID NO: 126420 - RNA, 18 nt, Artificial Sequence
  Synthetic
ccacaucgaauucaguuu

SEQ ID NO: 126421 - RNA, 19 nt, Artificial Sequence
  Synthetic
cccacaucgaauucaguuu

SEQ ID NO: 126422 - RNA, 20 nt, Artificial Sequence
  Synthetic
ucccacaucgaauucaguuu

SEQ ID NO: 126423 - RNA, 21 nt, Artificial Sequence
  Synthetic
aucccacaucgaauucaguuu

SEQ ID NO: 126424 - RNA, 22 nt, Artificial Sequence
  Synthetic
uaucccacaucgaauucaguuu

SEQ ID NO: 126425 - RNA, 23 nt, Artificial Sequence
  Synthetic
cuaucccacaucgaauucaguuu

SEQ ID NO: 126426 - RNA, 24 nt, Artificial Sequence
  Synthetic
ccuaucccacaucgaauucaguuu

SEQ ID NO: 126427 - RNA, 18 nt, Artificial Sequence
  Synthetic
augggggaaguucaguuu

SEQ ID NO: 126428 - RNA, 20 nt, Artificial Sequence
  Synthetic
ugaugggggaaguucaguuu

SEQ ID NO: 126429 - RNA, 21 nt, Artificial Sequence
  Synthetic
cugaugggggaaguucaguuu

SEQ ID NO: 126430 - RNA, 22 nt, Artificial Sequence
  Synthetic
ucugaugggggaaguucaguuu

SEQ ID NO: 126431 - RNA, 23 nt, Artificial Sequence
  Synthetic
aucugaugggggaaguucaguuu

SEQ ID NO: 126432 - RNA, 24 nt, Artificial Sequence
  Synthetic
aaucugaugggggaaguucaguuu

SEQ ID NO: 126433 - RNA, 18 nt, Artificial Sequence
  Synthetic
uauaaaaucaaagaguuu

SEQ ID NO: 126434 - RNA, 19 nt, Artificial Sequence
  Synthetic
auauaaaaucaaagaguuu

SEQ ID NO: 126435 - RNA, 20 nt, Artificial Sequence
  Synthetic
uauauaaaaucaaagaguuu

SEQ ID NO: 126436 - RNA, 21 nt, Artificial Sequence
  Synthetic
auauauaaaaucaaagaguuu

SEQ ID NO: 126437 - RNA, 22 nt, Artificial Sequence
  Synthetic
uauauauaaaaucaaagaguuu

SEQ ID NO: 126438 - RNA, 23 nt, Artificial Sequence
  Synthetic
auauauauaaaaucaaagaguuu

SEQ ID NO: 126439 - RNA, 24 nt, Artificial Sequence
  Synthetic
uauauauauaaaaucaaagaguuu

SEQ ID NO: 126440 - RNA, 18 nt, Artificial Sequence
  Synthetic
aaaaauugccaagaguuu

SEQ ID NO: 126441 - RNA, 20 nt, Artificial Sequence
  Synthetic
agaaaaauugccaagaguuu

SEQ ID NO: 126442 - RNA, 21 nt, Artificial Sequence
  Synthetic
aagaaaaauugccaagaguuu

SEQ ID NO: 126443 - RNA, 22 nt, Artificial Sequence
  Synthetic
uaagaaaaauugccaagaguuu

SEQ ID NO: 126444 - RNA, 24 nt, Artificial Sequence
  Synthetic
uguaagaaaaauugccaagaguuu

SEQ ID NO: 126445 - RNA, 18 nt, Artificial Sequence
  Synthetic
aauauuuagcuagaguuu

SEQ ID NO: 126446 - RNA, 21 nt, Artificial Sequence
  Synthetic
cggaauauuuagcuagaguuu

SEQ ID NO: 126447 - RNA, 22 nt, Artificial Sequence
  Synthetic
ucggaauauuuagcuagaguuu

SEQ ID NO: 126448 - RNA, 23 nt, Artificial Sequence
  Synthetic
cucggaauauuuagcuagaguuu

SEQ ID NO: 126449 - RNA, 24 nt, Artificial Sequence
  Synthetic
ucucggaauauuuagcuagaguuu

SEQ ID NO: 126450 - RNA, 18 nt, Artificial Sequence
  Synthetic
aggagcgacuaauaguuu

SEQ ID NO: 126451 - RNA, 19 nt, Artificial Sequence
  Synthetic
uaggagcgacuaauaguuu

SEQ ID NO: 126452 - RNA, 20 nt, Artificial Sequence
  Synthetic
uuaggagcgacuaauaguuu

SEQ ID NO: 126453 - RNA, 22 nt, Artificial Sequence
  Synthetic
uguuaggagcgacuaauaguuu

SEQ ID NO: 126454 - RNA, 23 nt, Artificial Sequence
  Synthetic
auguuaggagcgacuaauaguuu

SEQ ID NO: 126455 - RNA, 21 nt, Artificial Sequence
  Synthetic
cguuuuugugagcuauaguuu

SEQ ID NO: 126456 - RNA, 23 nt, Artificial Sequence
  Synthetic
ugcguuuuugugagcuauaguuu

SEQ ID NO: 126457 - RNA, 24 nt, Artificial Sequence
  Synthetic
augcguuuuugugagcuauaguuu

SEQ ID NO: 126458 - RNA, 18 nt, Artificial Sequence
  Synthetic
uuugagcucaaguaguuu

SEQ ID NO: 126459 - RNA, 19 nt, Artificial Sequence
  Synthetic
auuugagcucaaguaguuu

SEQ ID NO: 126460 - RNA, 20 nt, Artificial Sequence
  Synthetic
aauuugagcucaaguaguuu

SEQ ID NO: 126461 - RNA, 21 nt, Artificial Sequence
  Synthetic
aaauuugagcucaaguaguuu

SEQ ID NO: 126462 - RNA, 22 nt, Artificial Sequence
  Synthetic
aaaauuugagcucaaguaguuu

SEQ ID NO: 126463 - RNA, 23 nt, Artificial Sequence
  Synthetic
aaaaauuugagcucaaguaguuu

SEQ ID NO: 126464 - RNA, 24 nt, Artificial Sequence
  Synthetic
uaaaaauuugagcucaaguaguuu

SEQ ID NO: 126465 - RNA, 21 nt, Artificial Sequence
  Synthetic
caaaaugaaaguuaguaguuu

SEQ ID NO: 126466 - RNA, 22 nt, Artificial Sequence
  Synthetic
acaaaaugaaaguuaguaguuu

SEQ ID NO: 126467 - RNA, 23 nt, Artificial Sequence
  Synthetic
cacaaaaugaaaguuaguaguuu

SEQ ID NO: 126468 - RNA, 24 nt, Artificial Sequence
  Synthetic
ucacaaaaugaaaguuaguaguuu

SEQ ID NO: 126469 - RNA, 18 nt, Artificial Sequence
  Synthetic
auuuaugcaugguaguuu

SEQ ID NO: 126470 - RNA, 20 nt, Artificial Sequence
  Synthetic
ugauuuaugcaugguaguuu

SEQ ID NO: 126471 - RNA, 21 nt, Artificial Sequence
  Synthetic
cugauuuaugcaugguaguuu

SEQ ID NO: 126472 - RNA, 22 nt, Artificial Sequence
  Synthetic
acugauuuaugcaugguaguuu

SEQ ID NO: 126473 - RNA, 23 nt, Artificial Sequence
  Synthetic
aacugauuuaugcaugguaguuu

SEQ ID NO: 126474 - RNA, 24 nt, Artificial Sequence
  Synthetic
aaacugauuuaugcaugguaguuu

SEQ ID NO: 126475 - RNA, 19 nt, Artificial Sequence
  Synthetic
agcacagcuucaaccguuu

SEQ ID NO: 126476 - RNA, 20 nt, Artificial Sequence
  Synthetic
aagcacagcuucaaccguuu

SEQ ID NO: 126477 - RNA, 22 nt, Artificial Sequence
  Synthetic
cgaagcacagcuucaaccguuu

SEQ ID NO: 126478 - RNA, 23 nt, Artificial Sequence
  Synthetic
ucgaagcacagcuucaaccguuu

SEQ ID NO: 126479 - RNA, 21 nt, Artificial Sequence
  Synthetic
ugauauuuaaaagaaucguuu

SEQ ID NO: 126480 - RNA, 22 nt, Artificial Sequence
  Synthetic
uugauauuuaaaagaaucguuu

SEQ ID NO: 126481 - RNA, 23 nt, Artificial Sequence
  Synthetic
cuugauauuuaaaagaaucguuu

SEQ ID NO: 126482 - RNA, 24 nt, Artificial Sequence
  Synthetic
ucuugauauuuaaaagaaucguuu

SEQ ID NO: 126483 - RNA, 19 nt, Artificial Sequence
  Synthetic
agugguucugaagucguuu

SEQ ID NO: 126484 - RNA, 20 nt, Artificial Sequence
  Synthetic
aagugguucugaagucguuu

SEQ ID NO: 126485 - RNA, 21 nt, Artificial Sequence
  Synthetic
aaagugguucugaagucguuu

SEQ ID NO: 126486 - RNA, 22 nt, Artificial Sequence
  Synthetic
aaaagugguucugaagucguuu

SEQ ID NO: 126487 - RNA, 24 nt, Artificial Sequence
  Synthetic
ugaaaagugguucugaagucguuu

SEQ ID NO: 126488 - RNA, 21 nt, Artificial Sequence
  Synthetic
aguauuucaaauuucagguuu

SEQ ID NO: 126489 - RNA, 22 nt, Artificial Sequence
  Synthetic
aaguauuucaaauuucagguuu

SEQ ID NO: 126490 - RNA, 23 nt, Artificial Sequence
  Synthetic
aaaguauuucaaauuucagguuu

SEQ ID NO: 126491 - RNA, 18 nt, Artificial Sequence
  Synthetic
uguuccagaacgagguuu

SEQ ID NO: 126492 - RNA, 20 nt, Artificial Sequence
  Synthetic
uguguuccagaacgagguuu

SEQ ID NO: 126493 - RNA, 21 nt, Artificial Sequence
  Synthetic
cuguguuccagaacgagguuu

SEQ ID NO: 126494 - RNA, 22 nt, Artificial Sequence
  Synthetic
acuguguuccagaacgagguuu

SEQ ID NO: 126495 - RNA, 23 nt, Artificial Sequence
  Synthetic
aacuguguuccagaacgagguuu

SEQ ID NO: 126496 - RNA, 24 nt, Artificial Sequence
  Synthetic
uaacuguguuccagaacgagguuu

SEQ ID NO: 126497 - RNA, 19 nt, Artificial Sequence
  Synthetic
ugaaaaugcagaaggguuu

SEQ ID NO: 126498 - RNA, 21 nt, Artificial Sequence
  Synthetic
agugaaaaugcagaaggguuu

SEQ ID NO: 126499 - RNA, 22 nt, Artificial Sequence
  Synthetic
cagugaaaaugcagaaggguuu

SEQ ID NO: 126500 - RNA, 23 nt, Artificial Sequence
  Synthetic
ucagugaaaaugcagaaggguuu

SEQ ID NO: 126501 - RNA, 24 nt, Artificial Sequence
  Synthetic
aucagugaaaaugcagaaggguuu

SEQ ID NO: 126502 - RNA, 18 nt, Artificial Sequence
  Synthetic
uaaaaacuuauaggguuu

SEQ ID NO: 126503 - RNA, 19 nt, Artificial Sequence
  Synthetic
auaaaaacuuauaggguuu

SEQ ID NO: 126504 - RNA, 20 nt, Artificial Sequence
  Synthetic
aauaaaaacuuauaggguuu

SEQ ID NO: 126505 - RNA, 22 nt, Artificial Sequence
  Synthetic
ugaauaaaaacuuauaggguuu

SEQ ID NO: 126506 - RNA, 23 nt, Artificial Sequence
  Synthetic
augaauaaaaacuuauaggguuu

SEQ ID NO: 126507 - RNA, 18 nt, Artificial Sequence
  Synthetic
auuauaagcuggggguuu

SEQ ID NO: 126508 - RNA, 19 nt, Artificial Sequence
  Synthetic
aauuauaagcuggggguuu

SEQ ID NO: 126509 - RNA, 20 nt, Artificial Sequence
  Synthetic
uaauuauaagcuggggguuu

SEQ ID NO: 126510 - RNA, 21 nt, Artificial Sequence
  Synthetic
cuaauuauaagcuggggguuu

SEQ ID NO: 126511 - RNA, 22 nt, Artificial Sequence
  Synthetic
ccuaauuauaagcuggggguuu

SEQ ID NO: 126512 - RNA, 23 nt, Artificial Sequence
  Synthetic
uccuaauuauaagcuggggguuu

SEQ ID NO: 126513 - RNA, 24 nt, Artificial Sequence
  Synthetic
uuccuaauuauaagcuggggguuu

SEQ ID NO: 126514 - RNA, 18 nt, Artificial Sequence
  Synthetic
uauagacucucaugguuu

SEQ ID NO: 126515 - RNA, 19 nt, Artificial Sequence
  Synthetic
auauagacucucaugguuu

SEQ ID NO: 126516 - RNA, 21 nt, Artificial Sequence
  Synthetic
agauauagacucucaugguuu

SEQ ID NO: 126517 - RNA, 22 nt, Artificial Sequence
  Synthetic
aagauauagacucucaugguuu

SEQ ID NO: 126518 - RNA, 24 nt, Artificial Sequence
  Synthetic
ugaagauauagacucucaugguuu

SEQ ID NO: 126519 - RNA, 18 nt, Artificial Sequence
  Synthetic
cgugggaggcgaugguuu

SEQ ID NO: 126520 - RNA, 20 nt, Artificial Sequence
  Synthetic
ugcgugggaggcgaugguuu

SEQ ID NO: 126521 - RNA, 23 nt, Artificial Sequence
  Synthetic
aggugcgugggaggcgaugguuu

SEQ ID NO: 126522 - RNA, 19 nt, Artificial Sequence
  Synthetic
aggugagauuggaugguuu

SEQ ID NO: 126523 - RNA, 20 nt, Artificial Sequence
  Synthetic
uaggugagauuggaugguuu

SEQ ID NO: 126524 - RNA, 23 nt, Artificial Sequence
  Synthetic
agguaggugagauuggaugguuu

SEQ ID NO: 126525 - RNA, 18 nt, Artificial Sequence
  Synthetic
aacaaaugaacuugguuu

SEQ ID NO: 126526 - RNA, 20 nt, Artificial Sequence
  Synthetic
agaacaaaugaacuugguuu

SEQ ID NO: 126527 - RNA, 23 nt, Artificial Sequence
  Synthetic
aggagaacaaaugaacuugguuu

SEQ ID NO: 126528 - RNA, 24 nt, Artificial Sequence
  Synthetic
caggagaacaaaugaacuugguuu

SEQ ID NO: 126529 - RNA, 18 nt, Artificial Sequence
  Synthetic
acuaguacauuuugguuu

SEQ ID NO: 126530 - RNA, 19 nt, Artificial Sequence
  Synthetic
uacuaguacauuuugguuu

SEQ ID NO: 126531 - RNA, 20 nt, Artificial Sequence
  Synthetic
auacuaguacauuuugguuu

SEQ ID NO: 126532 - RNA, 21 nt, Artificial Sequence
  Synthetic
uauacuaguacauuuugguuu

SEQ ID NO: 126533 - RNA, 22 nt, Artificial Sequence
  Synthetic
auauacuaguacauuuugguuu

SEQ ID NO: 126534 - RNA, 23 nt, Artificial Sequence
  Synthetic
uauauacuaguacauuuugguuu

SEQ ID NO: 126535 - RNA, 24 nt, Artificial Sequence
  Synthetic
uuauauacuaguacauuuugguuu

SEQ ID NO: 126536 - RNA, 18 nt, Artificial Sequence
  Synthetic
auuccucucuaaauguuu

SEQ ID NO: 126537 - RNA, 19 nt, Artificial Sequence
  Synthetic
cauuccucucuaaauguuu

SEQ ID NO: 126538 - RNA, 20 nt, Artificial Sequence
  Synthetic
acauuccucucuaaauguuu

SEQ ID NO: 126539 - RNA, 21 nt, Artificial Sequence
  Synthetic
cacauuccucucuaaauguuu

SEQ ID NO: 126540 - RNA, 22 nt, Artificial Sequence
  Synthetic
acacauuccucucuaaauguuu

SEQ ID NO: 126541 - RNA, 24 nt, Artificial Sequence
  Synthetic
ugacacauuccucucuaaauguuu

SEQ ID NO: 126542 - RNA, 18 nt, Artificial Sequence
  Synthetic
acccugagugcaauguuu

SEQ ID NO: 126543 - RNA, 19 nt, Artificial Sequence
  Synthetic
aacccugagugcaauguuu

SEQ ID NO: 126544 - RNA, 20 nt, Artificial Sequence
  Synthetic
aaacccugagugcaauguuu

SEQ ID NO: 126545 - RNA, 22 nt, Artificial Sequence
  Synthetic
agaaacccugagugcaauguuu

SEQ ID NO: 126546 - RNA, 23 nt, Artificial Sequence
  Synthetic
uagaaacccugagugcaauguuu

SEQ ID NO: 126547 - RNA, 24 nt, Artificial Sequence
  Synthetic
auagaaacccugagugcaauguuu

SEQ ID NO: 126548 - RNA, 18 nt, Artificial Sequence
  Synthetic
aaugucuacuacauguuu

SEQ ID NO: 126549 - RNA, 19 nt, Artificial Sequence
  Synthetic
aaaugucuacuacauguuu

SEQ ID NO: 126550 - RNA, 20 nt, Artificial Sequence
  Synthetic
aaaaugucuacuacauguuu

SEQ ID NO: 126551 - RNA, 21 nt, Artificial Sequence
  Synthetic
aaaaaugucuacuacauguuu

SEQ ID NO: 126552 - RNA, 22 nt, Artificial Sequence
  Synthetic
aaaaaaugucuacuacauguuu

SEQ ID NO: 126553 - RNA, 23 nt, Artificial Sequence
  Synthetic
uaaaaaaugucuacuacauguuu

SEQ ID NO: 126554 - RNA, 24 nt, Artificial Sequence
  Synthetic
uuaaaaaaugucuacuacauguuu

SEQ ID NO: 126555 - RNA, 18 nt, Artificial Sequence
  Synthetic
cuaauaucauugauguuu

SEQ ID NO: 126556 - RNA, 19 nt, Artificial Sequence
  Synthetic
acuaauaucauugauguuu

SEQ ID NO: 126557 - RNA, 20 nt, Artificial Sequence
  Synthetic
aacuaauaucauugauguuu

SEQ ID NO: 126558 - RNA, 22 nt, Artificial Sequence
  Synthetic
agaacuaauaucauugauguuu

SEQ ID NO: 126559 - RNA, 23 nt, Artificial Sequence
  Synthetic
cagaacuaauaucauugauguuu

SEQ ID NO: 126560 - RNA, 24 nt, Artificial Sequence
  Synthetic
ucagaacuaauaucauugauguuu

SEQ ID NO: 126561 - RNA, 18 nt, Artificial Sequence
  Synthetic
aguuugacucuuauguuu

SEQ ID NO: 126562 - RNA, 19 nt, Artificial Sequence
  Synthetic
uaguuugacucuuauguuu

SEQ ID NO: 126563 - RNA, 20 nt, Artificial Sequence
  Synthetic
auaguuugacucuuauguuu

SEQ ID NO: 126564 - RNA, 21 nt, Artificial Sequence
  Synthetic
aauaguuugacucuuauguuu

SEQ ID NO: 126565 - RNA, 22 nt, Artificial Sequence
  Synthetic
caauaguuugacucuuauguuu

SEQ ID NO: 126566 - RNA, 23 nt, Artificial Sequence
  Synthetic
ucaauaguuugacucuuauguuu

SEQ ID NO: 126567 - RNA, 24 nt, Artificial Sequence
  Synthetic
uucaauaguuugacucuuauguuu

SEQ ID NO: 126568 - RNA, 18 nt, Artificial Sequence
  Synthetic
cgaacccucacacuguuu

SEQ ID NO: 126569 - RNA, 19 nt, Artificial Sequence
  Synthetic
ccgaacccucacacuguuu

SEQ ID NO: 126570 - RNA, 20 nt, Artificial Sequence
  Synthetic
cccgaacccucacacuguuu

SEQ ID NO: 126571 - RNA, 19 nt, Artificial Sequence
  Synthetic
cgacaacaaaaaccuguuu

SEQ ID NO: 126572 - RNA, 20 nt, Artificial Sequence
  Synthetic
acgacaacaaaaaccuguuu

SEQ ID NO: 126573 - RNA, 21 nt, Artificial Sequence
  Synthetic
aacgacaacaaaaaccuguuu

SEQ ID NO: 126574 - RNA, 22 nt, Artificial Sequence
  Synthetic
aaacgacaacaaaaaccuguuu

SEQ ID NO: 126575 - RNA, 23 nt, Artificial Sequence
  Synthetic
aaaacgacaacaaaaaccuguuu

SEQ ID NO: 126576 - RNA, 24 nt, Artificial Sequence
  Synthetic
uaaaacgacaacaaaaaccuguuu

SEQ ID NO: 126577 - RNA, 18 nt, Artificial Sequence
  Synthetic
uagucucgucagcuguuu

SEQ ID NO: 126578 - RNA, 19 nt, Artificial Sequence
  Synthetic
uuagucucgucagcuguuu

SEQ ID NO: 126579 - RNA, 20 nt, Artificial Sequence
  Synthetic
auuagucucgucagcuguuu

SEQ ID NO: 126580 - RNA, 21 nt, Artificial Sequence
  Synthetic
uauuagucucgucagcuguuu

SEQ ID NO: 126581 - RNA, 22 nt, Artificial Sequence
  Synthetic
uuauuagucucgucagcuguuu

SEQ ID NO: 126582 - RNA, 24 nt, Artificial Sequence
  Synthetic
uguuauuagucucgucagcuguuu

SEQ ID NO: 126583 - RNA, 18 nt, Artificial Sequence
  Synthetic
agacccaaaucucuguuu

SEQ ID NO: 126584 - RNA, 19 nt, Artificial Sequence
  Synthetic
cagacccaaaucucuguuu

SEQ ID NO: 126585 - RNA, 20 nt, Artificial Sequence
  Synthetic
ccagacccaaaucucuguuu

SEQ ID NO: 126586 - RNA, 21 nt, Artificial Sequence
  Synthetic
cccagacccaaaucucuguuu

SEQ ID NO: 126587 - RNA, 22 nt, Artificial Sequence
  Synthetic
ucccagacccaaaucucuguuu

SEQ ID NO: 126588 - RNA, 23 nt, Artificial Sequence
  Synthetic
cucccagacccaaaucucuguuu

SEQ ID NO: 126589 - RNA, 24 nt, Artificial Sequence
  Synthetic
ccucccagacccaaaucucuguuu

SEQ ID NO: 126590 - RNA, 21 nt, Artificial Sequence
  Synthetic
ccacuuaguagcuggguguuu

SEQ ID NO: 126591 - RNA, 22 nt, Artificial Sequence
  Synthetic
cccacuuaguagcuggguguuu

SEQ ID NO: 126592 - RNA, 24 nt, Artificial Sequence
  Synthetic
ugcccacuuaguagcuggguguuu

SEQ ID NO: 126593 - RNA, 18 nt, Artificial Sequence
  Synthetic
ucccaaaacccuguguuu

SEQ ID NO: 126594 - RNA, 19 nt, Artificial Sequence
  Synthetic
uucccaaaacccuguguuu

SEQ ID NO: 126595 - RNA, 20 nt, Artificial Sequence
  Synthetic
uuucccaaaacccuguguuu

SEQ ID NO: 126596 - RNA, 21 nt, Artificial Sequence
  Synthetic
cuuucccaaaacccuguguuu

SEQ ID NO: 126597 - RNA, 23 nt, Artificial Sequence
  Synthetic
agcuuucccaaaacccuguguuu

SEQ ID NO: 126598 - RNA, 24 nt, Artificial Sequence
  Synthetic
uagcuuucccaaaacccuguguuu

SEQ ID NO: 126599 - RNA, 18 nt, Artificial Sequence
  Synthetic
ugagaaucaccauuguuu

SEQ ID NO: 126600 - RNA, 19 nt, Artificial Sequence
  Synthetic
augagaaucaccauuguuu

SEQ ID NO: 126601 - RNA, 20 nt, Artificial Sequence
  Synthetic
caugagaaucaccauuguuu

SEQ ID NO: 126602 - RNA, 21 nt, Artificial Sequence
  Synthetic
acaugagaaucaccauuguuu

SEQ ID NO: 126603 - RNA, 22 nt, Artificial Sequence
  Synthetic
uacaugagaaucaccauuguuu

SEQ ID NO: 126604 - RNA, 23 nt, Artificial Sequence
  Synthetic
uuacaugagaaucaccauuguuu

SEQ ID NO: 126605 - RNA, 24 nt, Artificial Sequence
  Synthetic
auuacaugagaaucaccauuguuu

SEQ ID NO: 126606 - RNA, 18 nt, Artificial Sequence
  Synthetic
uacccaccaggauuguuu

SEQ ID NO: 126607 - RNA, 19 nt, Artificial Sequence
  Synthetic
cuacccaccaggauuguuu

SEQ ID NO: 126608 - RNA, 20 nt, Artificial Sequence
  Synthetic
acuacccaccaggauuguuu

SEQ ID NO: 126609 - RNA, 22 nt, Artificial Sequence
  Synthetic
agacuacccaccaggauuguuu

SEQ ID NO: 126610 - RNA, 24 nt, Artificial Sequence
  Synthetic
ugagacuacccaccaggauuguuu

SEQ ID NO: 126611 - RNA, 18 nt, Artificial Sequence
  Synthetic
agaucuaagcaguuguuu

SEQ ID NO: 126612 - RNA, 19 nt, Artificial Sequence
  Synthetic
cagaucuaagcaguuguuu

SEQ ID NO: 126613 - RNA, 20 nt, Artificial Sequence
  Synthetic
ucagaucuaagcaguuguuu

SEQ ID NO: 126614 - RNA, 21 nt, Artificial Sequence
  Synthetic
uucagaucuaagcaguuguuu

SEQ ID NO: 126615 - RNA, 22 nt, Artificial Sequence
  Synthetic
cuucagaucuaagcaguuguuu

SEQ ID NO: 126616 - RNA, 23 nt, Artificial Sequence
  Synthetic
ucuucagaucuaagcaguuguuu

SEQ ID NO: 126617 - RNA, 24 nt, Artificial Sequence
  Synthetic
uucuucagaucuaagcaguuguuu

SEQ ID NO: 126618 - RNA, 18 nt, Artificial Sequence
  Synthetic
uaaucaagggaguuguuu

SEQ ID NO: 126619 - RNA, 19 nt, Artificial Sequence
  Synthetic
uuaaucaagggaguuguuu

SEQ ID NO: 126620 - RNA, 20 nt, Artificial Sequence
  Synthetic
uuuaaucaagggaguuguuu

SEQ ID NO: 126621 - RNA, 22 nt, Artificial Sequence
  Synthetic
uguuuaaucaagggaguuguuu

SEQ ID NO: 126622 - RNA, 23 nt, Artificial Sequence
  Synthetic
uuguuuaaucaagggaguuguuu

SEQ ID NO: 126623 - RNA, 18 nt, Artificial Sequence
  Synthetic
uuuucuaucccuuuguuu

SEQ ID NO: 126624 - RNA, 21 nt, Artificial Sequence
  Synthetic
ugguuuucuaucccuuuguuu

SEQ ID NO: 126625 - RNA, 22 nt, Artificial Sequence
  Synthetic
cugguuuucuaucccuuuguuu

SEQ ID NO: 126626 - RNA, 24 nt, Artificial Sequence
  Synthetic
agcugguuuucuaucccuuuguuu

SEQ ID NO: 126627 - RNA, 18 nt, Artificial Sequence
  Synthetic
auugcuggcaguuuguuu

SEQ ID NO: 126628 - RNA, 20 nt, Artificial Sequence
  Synthetic
cgauugcuggcaguuuguuu

SEQ ID NO: 126629 - RNA, 21 nt, Artificial Sequence
  Synthetic
ucgauugcuggcaguuuguuu

SEQ ID NO: 126630 - RNA, 22 nt, Artificial Sequence
  Synthetic
cucgauugcuggcaguuuguuu

SEQ ID NO: 126631 - RNA, 23 nt, Artificial Sequence
  Synthetic
ucucgauugcuggcaguuuguuu

SEQ ID NO: 126632 - RNA, 22 nt, Artificial Sequence
  Synthetic
ugauggggaaaaagaaaauuuu

SEQ ID NO: 126633 - RNA, 23 nt, Artificial Sequence
  Synthetic
uugauggggaaaaagaaaauuuu

SEQ ID NO: 126634 - RNA, 24 nt, Artificial Sequence
  Synthetic
cuugauggggaaaaagaaaauuuu

SEQ ID NO: 126635 - RNA, 20 nt, Artificial Sequence
  Synthetic
uggugacuggcucaaauuuu

SEQ ID NO: 126636 - RNA, 21 nt, Artificial Sequence
  Synthetic
auggugacuggcucaaauuuu

SEQ ID NO: 126637 - RNA, 22 nt, Artificial Sequence
  Synthetic
uauggugacuggcucaaauuuu

SEQ ID NO: 126638 - RNA, 21 nt, Artificial Sequence
  Synthetic
uuuuuuccugaaugaaauuuu

SEQ ID NO: 126639 - RNA, 22 nt, Artificial Sequence
  Synthetic
cuuuuuuccugaaugaaauuuu

SEQ ID NO: 126640 - RNA, 23 nt, Artificial Sequence
  Synthetic
acuuuuuuccugaaugaaauuuu

SEQ ID NO: 126641 - RNA, 24 nt, Artificial Sequence
  Synthetic
uacuuuuuuccugaaugaaauuuu

SEQ ID NO: 126642 - RNA, 18 nt, Artificial Sequence
  Synthetic
uucccauauguaaauuuu

SEQ ID NO: 126643 - RNA, 19 nt, Artificial Sequence
  Synthetic
uuucccauauguaaauuuu

SEQ ID NO: 126644 - RNA, 20 nt, Artificial Sequence
  Synthetic
uuuucccauauguaaauuuu

SEQ ID NO: 126645 - RNA, 22 nt, Artificial Sequence
  Synthetic
uguuuucccauauguaaauuuu

SEQ ID NO: 126646 - RNA, 23 nt, Artificial Sequence
  Synthetic
auguuuucccauauguaaauuuu

SEQ ID NO: 126647 - RNA, 22 nt, Artificial Sequence
  Synthetic
ugaaccuuaaaaaaucaauuuu

SEQ ID NO: 126648 - RNA, 23 nt, Artificial Sequence
  Synthetic
augaaccuuaaaaaaucaauuuu

SEQ ID NO: 126649 - RNA, 24 nt, Artificial Sequence
  Synthetic
caugaaccuuaaaaaaucaauuuu

SEQ ID NO: 126650 - RNA, 20 nt, Artificial Sequence
  Synthetic
uggaaggaucagagaauuuu

SEQ ID NO: 126651 - RNA, 22 nt, Artificial Sequence
  Synthetic
uguggaaggaucagagaauuuu

SEQ ID NO: 126652 - RNA, 23 nt, Artificial Sequence
  Synthetic
cuguggaaggaucagagaauuuu

SEQ ID NO: 126653 - RNA, 18 nt, Artificial Sequence
  Synthetic
acauaccugcugaauuuu

SEQ ID NO: 126654 - RNA, 19 nt, Artificial Sequence
  Synthetic
uacauaccugcugaauuuu

SEQ ID NO: 126655 - RNA, 20 nt, Artificial Sequence
  Synthetic
auacauaccugcugaauuuu

SEQ ID NO: 126656 - RNA, 21 nt, Artificial Sequence
  Synthetic
aauacauaccugcugaauuuu

SEQ ID NO: 126657 - RNA, 22 nt, Artificial Sequence
  Synthetic
uaauacauaccugcugaauuuu

SEQ ID NO: 126658 - RNA, 23 nt, Artificial Sequence
  Synthetic
auaauacauaccugcugaauuuu

SEQ ID NO: 126659 - RNA, 24 nt, Artificial Sequence
  Synthetic
aauaauacauaccugcugaauuuu

SEQ ID NO: 126660 - RNA, 21 nt, Artificial Sequence
  Synthetic
uucuuuuaguauuugaauuuu

SEQ ID NO: 126661 - RNA, 22 nt, Artificial Sequence
  Synthetic
cuucuuuuaguauuugaauuuu

SEQ ID NO: 126662 - RNA, 23 nt, Artificial Sequence
  Synthetic
ucuucuuuuaguauuugaauuuu

SEQ ID NO: 126663 - RNA, 18 nt, Artificial Sequence
  Synthetic
cucugcaaagcuaauuuu

SEQ ID NO: 126664 - RNA, 19 nt, Artificial Sequence
  Synthetic
ccucugcaaagcuaauuuu

SEQ ID NO: 126665 - RNA, 20 nt, Artificial Sequence
  Synthetic
accucugcaaagcuaauuuu

SEQ ID NO: 126666 - RNA, 21 nt, Artificial Sequence
  Synthetic
aaccucugcaaagcuaauuuu

SEQ ID NO: 126667 - RNA, 22 nt, Artificial Sequence
  Synthetic
uaaccucugcaaagcuaauuuu

SEQ ID NO: 126668 - RNA, 23 nt, Artificial Sequence
  Synthetic
uuaaccucugcaaagcuaauuuu

SEQ ID NO: 126669 - RNA, 24 nt, Artificial Sequence
  Synthetic
auuaaccucugcaaagcuaauuuu

SEQ ID NO: 126670 - RNA, 18 nt, Artificial Sequence
  Synthetic
acaugcccauguaauuuu

SEQ ID NO: 126671 - RNA, 19 nt, Artificial Sequence
  Synthetic
aacaugcccauguaauuuu

SEQ ID NO: 126672 - RNA, 20 nt, Artificial Sequence
  Synthetic
aaacaugcccauguaauuuu

SEQ ID NO: 126673 - RNA, 21 nt, Artificial Sequence
  Synthetic
aaaacaugcccauguaauuuu

SEQ ID NO: 126674 - RNA, 23 nt, Artificial Sequence
  Synthetic
agaaaacaugcccauguaauuuu

SEQ ID NO: 126675 - RNA, 24 nt, Artificial Sequence
  Synthetic
aagaaaacaugcccauguaauuuu

SEQ ID NO: 126676 - RNA, 18 nt, Artificial Sequence
  Synthetic
aacuaaugcuaacauuuu

SEQ ID NO: 126677 - RNA, 19 nt, Artificial Sequence
  Synthetic
aaacuaaugcuaacauuuu

SEQ ID NO: 126678 - RNA, 20 nt, Artificial Sequence
  Synthetic
caaacuaaugcuaacauuuu

SEQ ID NO: 126679 - RNA, 21 nt, Artificial Sequence
  Synthetic
acaaacuaaugcuaacauuuu

SEQ ID NO: 126680 - RNA, 22 nt, Artificial Sequence
  Synthetic
cacaaacuaaugcuaacauuuu

SEQ ID NO: 126681 - RNA, 24 nt, Artificial Sequence
  Synthetic
cgcacaaacuaaugcuaacauuuu

SEQ ID NO: 126682 - RNA, 19 nt, Artificial Sequence
  Synthetic
uguuaugaugucacauuuu

SEQ ID NO: 126683 - RNA, 20 nt, Artificial Sequence
  Synthetic
auguuaugaugucacauuuu

SEQ ID NO: 126684 - RNA, 21 nt, Artificial Sequence
  Synthetic
uauguuaugaugucacauuuu

SEQ ID NO: 126685 - RNA, 22 nt, Artificial Sequence
  Synthetic
auauguuaugaugucacauuuu

SEQ ID NO: 126686 - RNA, 23 nt, Artificial Sequence
  Synthetic
cauauguuaugaugucacauuuu

SEQ ID NO: 126687 - RNA, 24 nt, Artificial Sequence
  Synthetic
acauauguuaugaugucacauuuu

SEQ ID NO: 126688 - RNA, 23 nt, Artificial Sequence
  Synthetic
agguuacaaaacaaauacauuuu

SEQ ID NO: 126689 - RNA, 24 nt, Artificial Sequence
  Synthetic
cagguuacaaaacaaauacauuuu

SEQ ID NO: 126690 - RNA, 21 nt, Artificial Sequence
  Synthetic
aauugaaaaguuuuacauuuu

SEQ ID NO: 126691 - RNA, 22 nt, Artificial Sequence
  Synthetic
aaauugaaaaguuuuacauuuu

SEQ ID NO: 126692 - RNA, 23 nt, Artificial Sequence
  Synthetic
aaaauugaaaaguuuuacauuuu

SEQ ID NO: 126693 - RNA, 24 nt, Artificial Sequence
  Synthetic
caaaauugaaaaguuuuacauuuu

SEQ ID NO: 126694 - RNA, 21 nt, Artificial Sequence
  Synthetic
uucuuuaaccuggaccauuuu

SEQ ID NO: 126695 - RNA, 23 nt, Artificial Sequence
  Synthetic
uguucuuuaaccuggaccauuuu

SEQ ID NO: 126696 - RNA, 24 nt, Artificial Sequence
  Synthetic
uuguucuuuaaccuggaccauuuu

SEQ ID NO: 126697 - RNA, 18 nt, Artificial Sequence
  Synthetic
ucacauacuaagcauuuu

SEQ ID NO: 126698 - RNA, 19 nt, Artificial Sequence
  Synthetic
cucacauacuaagcauuuu

SEQ ID NO: 126699 - RNA, 20 nt, Artificial Sequence
  Synthetic
ucucacauacuaagcauuuu

SEQ ID NO: 126700 - RNA, 21 nt, Artificial Sequence
  Synthetic
cucucacauacuaagcauuuu

SEQ ID NO: 126701 - RNA, 23 nt, Artificial Sequence
  Synthetic
agcucucacauacuaagcauuuu

SEQ ID NO: 126702 - RNA, 24 nt, Artificial Sequence
  Synthetic
cagcucucacauacuaagcauuuu

SEQ ID NO: 126703 - RNA, 18 nt, Artificial Sequence
  Synthetic
uuuuaucaucagcauuuu

SEQ ID NO: 126704 - RNA, 20 nt, Artificial Sequence
  Synthetic
aguuuuaucaucagcauuuu

SEQ ID NO: 126705 - RNA, 21 nt, Artificial Sequence
  Synthetic
caguuuuaucaucagcauuuu

SEQ ID NO: 126706 - RNA, 22 nt, Artificial Sequence
  Synthetic
acaguuuuaucaucagcauuuu

SEQ ID NO: 126707 - RNA, 23 nt, Artificial Sequence
  Synthetic
cacaguuuuaucaucagcauuuu

SEQ ID NO: 126708 - RNA, 24 nt, Artificial Sequence
  Synthetic
ucacaguuuuaucaucagcauuuu

SEQ ID NO: 126709 - RNA, 18 nt, Artificial Sequence
  Synthetic
uagauauauaaucauuuu

SEQ ID NO: 126710 - RNA, 19 nt, Artificial Sequence
  Synthetic
auagauauauaaucauuuu

SEQ ID NO: 126711 - RNA, 20 nt, Artificial Sequence
  Synthetic
cauagauauauaaucauuuu

SEQ ID NO: 126712 - RNA, 23 nt, Artificial Sequence
  Synthetic
uggcauagauauauaaucauuuu

SEQ ID NO: 126713 - RNA, 24 nt, Artificial Sequence
  Synthetic
uuggcauagauauauaaucauuuu

SEQ ID NO: 126714 - RNA, 18 nt, Artificial Sequence
  Synthetic
aaauaaggaagucauuuu

SEQ ID NO: 126715 - RNA, 19 nt, Artificial Sequence
  Synthetic
uaaauaaggaagucauuuu

SEQ ID NO: 126716 - RNA, 20 nt, Artificial Sequence
  Synthetic
auaaauaaggaagucauuuu

SEQ ID NO: 126717 - RNA, 22 nt, Artificial Sequence
  Synthetic
agauaaauaaggaagucauuuu

SEQ ID NO: 126718 - RNA, 23 nt, Artificial Sequence
  Synthetic
aagauaaauaaggaagucauuuu

SEQ ID NO: 126719 - RNA, 21 nt, Artificial Sequence
  Synthetic
uccauuucacauuuucauuuu

SEQ ID NO: 126720 - RNA, 22 nt, Artificial Sequence
  Synthetic
cuccauuucacauuuucauuuu

SEQ ID NO: 126721 - RNA, 23 nt, Artificial Sequence
  Synthetic
ucuccauuucacauuuucauuuu

SEQ ID NO: 126722 - RNA, 19 nt, Artificial Sequence
  Synthetic
agauuggaggcaagauuuu

SEQ ID NO: 126723 - RNA, 20 nt, Artificial Sequence
  Synthetic
cagauuggaggcaagauuuu

SEQ ID NO: 126724 - RNA, 23 nt, Artificial Sequence
  Synthetic
cggcagauuggaggcaagauuuu

SEQ ID NO: 126725 - RNA, 18 nt, Artificial Sequence
  Synthetic
accagcuucuaagauuuu

SEQ ID NO: 126726 - RNA, 19 nt, Artificial Sequence
  Synthetic
aaccagcuucuaagauuuu

SEQ ID NO: 126727 - RNA, 20 nt, Artificial Sequence
  Synthetic
aaaccagcuucuaagauuuu

SEQ ID NO: 126728 - RNA, 21 nt, Artificial Sequence
  Synthetic
aaaaccagcuucuaagauuuu

SEQ ID NO: 126729 - RNA, 23 nt, Artificial Sequence
  Synthetic
agaaaaccagcuucuaagauuuu

SEQ ID NO: 126730 - RNA, 24 nt, Artificial Sequence
  Synthetic
aagaaaaccagcuucuaagauuuu

SEQ ID NO: 126731 - RNA, 18 nt, Artificial Sequence
  Synthetic
ccuucauuuggagauuuu

SEQ ID NO: 126732 - RNA, 19 nt, Artificial Sequence
  Synthetic
cccuucauuuggagauuuu

SEQ ID NO: 126733 - RNA, 20 nt, Artificial Sequence
  Synthetic
acccuucauuuggagauuuu

SEQ ID NO: 126734 - RNA, 21 nt, Artificial Sequence
  Synthetic
cacccuucauuuggagauuuu

SEQ ID NO: 126735 - RNA, 22 nt, Artificial Sequence
  Synthetic
acacccuucauuuggagauuuu

SEQ ID NO: 126736 - RNA, 23 nt, Artificial Sequence
  Synthetic
aacacccuucauuuggagauuuu

SEQ ID NO: 126737 - RNA, 24 nt, Artificial Sequence
  Synthetic
aaacacccuucauuuggagauuuu

SEQ ID NO: 126738 - RNA, 18 nt, Artificial Sequence
  Synthetic
uccuugggucuagauuuu

SEQ ID NO: 126739 - RNA, 19 nt, Artificial Sequence
  Synthetic
uuccuugggucuagauuuu

SEQ ID NO: 126740 - RNA, 20 nt, Artificial Sequence
  Synthetic
auuccuugggucuagauuuu

SEQ ID NO: 126741 - RNA, 21 nt, Artificial Sequence
  Synthetic
aauuccuugggucuagauuuu

SEQ ID NO: 126742 - RNA, 22 nt, Artificial Sequence
  Synthetic
uaauuccuugggucuagauuuu

SEQ ID NO: 126743 - RNA, 23 nt, Artificial Sequence
  Synthetic
uuaauuccuugggucuagauuuu

SEQ ID NO: 126744 - RNA, 24 nt, Artificial Sequence
  Synthetic
uuuaauuccuugggucuagauuuu

SEQ ID NO: 126745 - RNA, 21 nt, Artificial Sequence
  Synthetic
caaacuacuuuucuagauuuu

SEQ ID NO: 126746 - RNA, 22 nt, Artificial Sequence
  Synthetic
acaaacuacuuuucuagauuuu

SEQ ID NO: 126747 - RNA, 23 nt, Artificial Sequence
  Synthetic
uacaaacuacuuuucuagauuuu

SEQ ID NO: 126748 - RNA, 24 nt, Artificial Sequence
  Synthetic
auacaaacuacuuuucuagauuuu

SEQ ID NO: 126749 - RNA, 21 nt, Artificial Sequence
  Synthetic
ugggaguuuuaucuggauuuu

SEQ ID NO: 126750 - RNA, 22 nt, Artificial Sequence
  Synthetic
augggaguuuuaucuggauuuu

SEQ ID NO: 126751 - RNA, 23 nt, Artificial Sequence
  Synthetic
uaugggaguuuuaucuggauuuu

SEQ ID NO: 126752 - RNA, 24 nt, Artificial Sequence
  Synthetic
cuaugggaguuuuaucuggauuuu

SEQ ID NO: 126753 - RNA, 18 nt, Artificial Sequence
  Synthetic
cauguuuugaaugauuuu

SEQ ID NO: 126754 - RNA, 19 nt, Artificial Sequence
  Synthetic
acauguuuugaaugauuuu

SEQ ID NO: 126755 - RNA, 20 nt, Artificial Sequence
  Synthetic
uacauguuuugaaugauuuu

SEQ ID NO: 126756 - RNA, 21 nt, Artificial Sequence
  Synthetic
uuacauguuuugaaugauuuu

SEQ ID NO: 126757 - RNA, 22 nt, Artificial Sequence
  Synthetic
cuuacauguuuugaaugauuuu

SEQ ID NO: 126758 - RNA, 24 nt, Artificial Sequence
  Synthetic
agcuuacauguuuugaaugauuuu

SEQ ID NO: 126759 - RNA, 18 nt, Artificial Sequence
  Synthetic
caucuugcauaugauuuu

SEQ ID NO: 126760 - RNA, 20 nt, Artificial Sequence
  Synthetic
agcaucuugcauaugauuuu

SEQ ID NO: 126761 - RNA, 21 nt, Artificial Sequence
  Synthetic
cagcaucuugcauaugauuuu

SEQ ID NO: 126762 - RNA, 22 nt, Artificial Sequence
  Synthetic
acagcaucuugcauaugauuuu

SEQ ID NO: 126763 - RNA, 24 nt, Artificial Sequence
  Synthetic
agacagcaucuugcauaugauuuu

SEQ ID NO: 126764 - RNA, 18 nt, Artificial Sequence
  Synthetic
cuuuagggaggugauuuu

SEQ ID NO: 126765 - RNA, 19 nt, Artificial Sequence
  Synthetic
ccuuuagggaggugauuuu

SEQ ID NO: 126766 - RNA, 24 nt, Artificial Sequence
  Synthetic
uggggccuuuagggaggugauuuu

SEQ ID NO: 126767 - RNA, 18 nt, Artificial Sequence
  Synthetic
caaugugugcaauauuuu

SEQ ID NO: 126768 - RNA, 19 nt, Artificial Sequence
  Synthetic
acaaugugugcaauauuuu

SEQ ID NO: 126769 - RNA, 20 nt, Artificial Sequence
  Synthetic
cacaaugugugcaauauuuu

SEQ ID NO: 126770 - RNA, 21 nt, Artificial Sequence
  Synthetic
ccacaaugugugcaauauuuu

SEQ ID NO: 126771 - RNA, 22 nt, Artificial Sequence
  Synthetic
cccacaaugugugcaauauuuu

SEQ ID NO: 126772 - RNA, 23 nt, Artificial Sequence
  Synthetic
ccccacaaugugugcaauauuuu

SEQ ID NO: 126773 - RNA, 24 nt, Artificial Sequence
  Synthetic
uccccacaaugugugcaauauuuu

SEQ ID NO: 126774 - RNA, 18 nt, Artificial Sequence
  Synthetic
caagagcuucaauauuuu

SEQ ID NO: 126775 - RNA, 19 nt, Artificial Sequence
  Synthetic
acaagagcuucaauauuuu

SEQ ID NO: 126776 - RNA, 20 nt, Artificial Sequence
  Synthetic
cacaagagcuucaauauuuu

SEQ ID NO: 126777 - RNA, 21 nt, Artificial Sequence
  Synthetic
ucacaagagcuucaauauuuu

SEQ ID NO: 126778 - RNA, 22 nt, Artificial Sequence
  Synthetic
cucacaagagcuucaauauuuu

SEQ ID NO: 126779 - RNA, 23 nt, Artificial Sequence
  Synthetic
ccucacaagagcuucaauauuuu

SEQ ID NO: 126780 - RNA, 24 nt, Artificial Sequence
  Synthetic
cccucacaagagcuucaauauuuu

SEQ ID NO: 126781 - RNA, 18 nt, Artificial Sequence
  Synthetic
caguuuuccuaauauuuu

SEQ ID NO: 126782 - RNA, 19 nt, Artificial Sequence
  Synthetic
acaguuuuccuaauauuuu

SEQ ID NO: 126783 - RNA, 20 nt, Artificial Sequence
  Synthetic
aacaguuuuccuaauauuuu

SEQ ID NO: 126784 - RNA, 21 nt, Artificial Sequence
  Synthetic
aaacaguuuuccuaauauuuu

SEQ ID NO: 126785 - RNA, 22 nt, Artificial Sequence
  Synthetic
aaaacaguuuuccuaauauuuu

SEQ ID NO: 126786 - RNA, 23 nt, Artificial Sequence
  Synthetic
aaaaacaguuuuccuaauauuuu

SEQ ID NO: 126787 - RNA, 24 nt, Artificial Sequence
  Synthetic
aaaaaacaguuuuccuaauauuuu

SEQ ID NO: 126788 - RNA, 18 nt, Artificial Sequence
  Synthetic
auaauccaaacauauuuu

SEQ ID NO: 126789 - RNA, 19 nt, Artificial Sequence
  Synthetic
cauaauccaaacauauuuu

SEQ ID NO: 126790 - RNA, 20 nt, Artificial Sequence
  Synthetic
ucauaauccaaacauauuuu

SEQ ID NO: 126791 - RNA, 21 nt, Artificial Sequence
  Synthetic
aucauaauccaaacauauuuu

SEQ ID NO: 126792 - RNA, 22 nt, Artificial Sequence
  Synthetic
aaucauaauccaaacauauuuu

SEQ ID NO: 126793 - RNA, 23 nt, Artificial Sequence
  Synthetic
caaucauaauccaaacauauuuu

SEQ ID NO: 126794 - RNA, 20 nt, Artificial Sequence
  Synthetic
aggaaagcaauacauauuuu

SEQ ID NO: 126795 - RNA, 21 nt, Artificial Sequence
  Synthetic
caggaaagcaauacauauuuu

SEQ ID NO: 126796 - RNA, 22 nt, Artificial Sequence
  Synthetic
ucaggaaagcaauacauauuuu

SEQ ID NO: 126797 - RNA, 23 nt, Artificial Sequence
  Synthetic
cucaggaaagcaauacauauuuu

SEQ ID NO: 126798 - RNA, 24 nt, Artificial Sequence
  Synthetic
ucucaggaaagcaauacauauuuu

SEQ ID NO: 126799 - RNA, 21 nt, Artificial Sequence
  Synthetic
ugcuuucuugccucauauuuu

SEQ ID NO: 126800 - RNA, 22 nt, Artificial Sequence
  Synthetic
cugcuuucuugccucauauuuu

SEQ ID NO: 126801 - RNA, 19 nt, Artificial Sequence
  Synthetic
agagcuuaauaacuauuuu

SEQ ID NO: 126802 - RNA, 20 nt, Artificial Sequence
  Synthetic
aagagcuuaauaacuauuuu

SEQ ID NO: 126803 - RNA, 21 nt, Artificial Sequence
  Synthetic
uaagagcuuaauaacuauuuu

SEQ ID NO: 126804 - RNA, 22 nt, Artificial Sequence
  Synthetic
cuaagagcuuaauaacuauuuu

SEQ ID NO: 126805 - RNA, 23 nt, Artificial Sequence
  Synthetic
acuaagagcuuaauaacuauuuu

SEQ ID NO: 126806 - RNA, 24 nt, Artificial Sequence
  Synthetic
uacuaagagcuuaauaacuauuuu

SEQ ID NO: 126807 - RNA, 18 nt, Artificial Sequence
  Synthetic
ccaucuaacaccuauuuu

SEQ ID NO: 126808 - RNA, 19 nt, Artificial Sequence
  Synthetic
cccaucuaacaccuauuuu

SEQ ID NO: 126809 - RNA, 20 nt, Artificial Sequence
  Synthetic
acccaucuaacaccuauuuu

SEQ ID NO: 126810 - RNA, 21 nt, Artificial Sequence
  Synthetic
uacccaucuaacaccuauuuu

SEQ ID NO: 126811 - RNA, 22 nt, Artificial Sequence
  Synthetic
auacccaucuaacaccuauuuu

SEQ ID NO: 126812 - RNA, 23 nt, Artificial Sequence
  Synthetic
aauacccaucuaacaccuauuuu

SEQ ID NO: 126813 - RNA, 18 nt, Artificial Sequence
  Synthetic
uuucauguuugcuauuuu

SEQ ID NO: 126814 - RNA, 19 nt, Artificial Sequence
  Synthetic
auuucauguuugcuauuuu

SEQ ID NO: 126815 - RNA, 20 nt, Artificial Sequence
  Synthetic
cauuucauguuugcuauuuu

SEQ ID NO: 126816 - RNA, 21 nt, Artificial Sequence
  Synthetic
acauuucauguuugcuauuuu

SEQ ID NO: 126817 - RNA, 22 nt, Artificial Sequence
  Synthetic
aacauuucauguuugcuauuuu

SEQ ID NO: 126818 - RNA, 23 nt, Artificial Sequence
  Synthetic
uaacauuucauguuugcuauuuu

SEQ ID NO: 126819 - RNA, 24 nt, Artificial Sequence
  Synthetic
uuaacauuucauguuugcuauuuu

SEQ ID NO: 126820 - RNA, 19 nt, Artificial Sequence
  Synthetic
agcuuugcagaauuauuuu

SEQ ID NO: 126821 - RNA, 20 nt, Artificial Sequence
  Synthetic
cagcuuugcagaauuauuuu

SEQ ID NO: 126822 - RNA, 21 nt, Artificial Sequence
  Synthetic
acagcuuugcagaauuauuuu

SEQ ID NO: 126823 - RNA, 22 nt, Artificial Sequence
  Synthetic
uacagcuuugcagaauuauuuu

SEQ ID NO: 126824 - RNA, 23 nt, Artificial Sequence
  Synthetic
cuacagcuuugcagaauuauuuu

SEQ ID NO: 126825 - RNA, 24 nt, Artificial Sequence
  Synthetic
ccuacagcuuugcagaauuauuuu

SEQ ID NO: 126826 - RNA, 21 nt, Artificial Sequence
  Synthetic
uauugauuaauuacuuauuuu

SEQ ID NO: 126827 - RNA, 22 nt, Artificial Sequence
  Synthetic
uuauugauuaauuacuuauuuu

SEQ ID NO: 126828 - RNA, 23 nt, Artificial Sequence
  Synthetic
auuauugauuaauuacuuauuuu

SEQ ID NO: 126829 - RNA, 24 nt, Artificial Sequence
  Synthetic
cauuauugauuaauuacuuauuuu

SEQ ID NO: 126830 - RNA, 18 nt, Artificial Sequence
  Synthetic
agaucuagcaguuauuuu

SEQ ID NO: 126831 - RNA, 19 nt, Artificial Sequence
  Synthetic
cagaucuagcaguuauuuu

SEQ ID NO: 126832 - RNA, 20 nt, Artificial Sequence
  Synthetic
ucagaucuagcaguuauuuu

SEQ ID NO: 126833 - RNA, 21 nt, Artificial Sequence
  Synthetic
aucagaucuagcaguuauuuu

SEQ ID NO: 126834 - RNA, 22 nt, Artificial Sequence
  Synthetic
uaucagaucuagcaguuauuuu

SEQ ID NO: 126835 - RNA, 23 nt, Artificial Sequence
  Synthetic
uuaucagaucuagcaguuauuuu

SEQ ID NO: 126836 - RNA, 24 nt, Artificial Sequence
  Synthetic
cuuaucagaucuagcaguuauuuu

SEQ ID NO: 126837 - RNA, 21 nt, Artificial Sequence
  Synthetic
uauguucuuugcaguuauuuu

SEQ ID NO: 126838 - RNA, 22 nt, Artificial Sequence
  Synthetic
auauguucuuugcaguuauuuu

SEQ ID NO: 126839 - RNA, 23 nt, Artificial Sequence
  Synthetic
uauauguucuuugcaguuauuuu

SEQ ID NO: 126840 - RNA, 24 nt, Artificial Sequence
  Synthetic
cuauauguucuuugcaguuauuuu

SEQ ID NO: 126841 - RNA, 21 nt, Artificial Sequence
  Synthetic
uuuucacuucucaaaacuuuu

SEQ ID NO: 126842 - RNA, 22 nt, Artificial Sequence
  Synthetic
uuuuucacuucucaaaacuuuu

SEQ ID NO: 126843 - RNA, 23 nt, Artificial Sequence
  Synthetic
uuuuuucacuucucaaaacuuuu

SEQ ID NO: 126844 - RNA, 24 nt, Artificial Sequence
  Synthetic
uuuuuuucacuucucaaaacuuuu

SEQ ID NO: 126845 - RNA, 18 nt, Artificial Sequence
  Synthetic
acucuucuagcaacuuuu

SEQ ID NO: 126846 - RNA, 20 nt, Artificial Sequence
  Synthetic
ugacucuucuagcaacuuuu

SEQ ID NO: 126847 - RNA, 21 nt, Artificial Sequence
  Synthetic
augacucuucuagcaacuuuu

SEQ ID NO: 126848 - RNA, 22 nt, Artificial Sequence
  Synthetic
caugacucuucuagcaacuuuu

SEQ ID NO: 126849 - RNA, 23 nt, Artificial Sequence
  Synthetic
ucaugacucuucuagcaacuuuu

SEQ ID NO: 126850 - RNA, 24 nt, Artificial Sequence
  Synthetic
aucaugacucuucuagcaacuuuu

SEQ ID NO: 126851 - RNA, 21 nt, Artificial Sequence
  Synthetic
augcuuuauaauauuacuuuu

SEQ ID NO: 126852 - RNA, 22 nt, Artificial Sequence
  Synthetic
uaugcuuuauaauauuacuuuu

SEQ ID NO: 126853 - RNA, 23 nt, Artificial Sequence
  Synthetic
uuaugcuuuauaauauuacuuuu

SEQ ID NO: 126854 - RNA, 24 nt, Artificial Sequence
  Synthetic
uuuaugcuuuauaauauuacuuuu

SEQ ID NO: 126855 - RNA, 18 nt, Artificial Sequence
  Synthetic
aagaaacuaauaccuuuu

SEQ ID NO: 126856 - RNA, 19 nt, Artificial Sequence
  Synthetic
aaagaaacuaauaccuuuu

SEQ ID NO: 126857 - RNA, 20 nt, Artificial Sequence
  Synthetic
uaaagaaacuaauaccuuuu

SEQ ID NO: 126858 - RNA, 21 nt, Artificial Sequence
  Synthetic
uuaaagaaacuaauaccuuuu

SEQ ID NO: 126859 - RNA, 22 nt, Artificial Sequence
  Synthetic
uuuaaagaaacuaauaccuuuu

SEQ ID NO: 126860 - RNA, 23 nt, Artificial Sequence
  Synthetic
cuuuaaagaaacuaauaccuuuu

SEQ ID NO: 126861 - RNA, 18 nt, Artificial Sequence
  Synthetic
auguaauucauaccuuuu

SEQ ID NO: 126862 - RNA, 19 nt, Artificial Sequence
  Synthetic
aauguaauucauaccuuuu

SEQ ID NO: 126863 - RNA, 20 nt, Artificial Sequence
  Synthetic
uaauguaauucauaccuuuu

SEQ ID NO: 126864 - RNA, 21 nt, Artificial Sequence
  Synthetic
auaauguaauucauaccuuuu

SEQ ID NO: 126865 - RNA, 22 nt, Artificial Sequence
  Synthetic
aauaauguaauucauaccuuuu

SEQ ID NO: 126866 - RNA, 23 nt, Artificial Sequence
  Synthetic
aaauaauguaauucauaccuuuu

SEQ ID NO: 126867 - RNA, 18 nt, Artificial Sequence
  Synthetic
ccauuuuucguaccuuuu

SEQ ID NO: 126868 - RNA, 20 nt, Artificial Sequence
  Synthetic
ugccauuuuucguaccuuuu

SEQ ID NO: 126869 - RNA, 22 nt, Artificial Sequence
  Synthetic
ugugccauuuuucguaccuuuu

SEQ ID NO: 126870 - RNA, 23 nt, Artificial Sequence
  Synthetic
augugccauuuuucguaccuuuu

SEQ ID NO: 126871 - RNA, 24 nt, Artificial Sequence
  Synthetic
caugugccauuuuucguaccuuuu

SEQ ID NO: 126872 - RNA, 19 nt, Artificial Sequence
  Synthetic
uguaagucacuacccuuuu

SEQ ID NO: 126873 - RNA, 21 nt, Artificial Sequence
  Synthetic
uguguaagucacuacccuuuu

SEQ ID NO: 126874 - RNA, 22 nt, Artificial Sequence
  Synthetic
auguguaagucacuacccuuuu

SEQ ID NO: 126875 - RNA, 23 nt, Artificial Sequence
  Synthetic
cauguguaagucacuacccuuuu

SEQ ID NO: 126876 - RNA, 24 nt, Artificial Sequence
  Synthetic
acauguguaagucacuacccuuuu

SEQ ID NO: 126877 - RNA, 18 nt, Artificial Sequence
  Synthetic
auaaaacuuggcccuuuu

SEQ ID NO: 126878 - RNA, 19 nt, Artificial Sequence
  Synthetic
uauaaaacuuggcccuuuu

SEQ ID NO: 126879 - RNA, 20 nt, Artificial Sequence
  Synthetic
auauaaaacuuggcccuuuu

SEQ ID NO: 126880 - RNA, 22 nt, Artificial Sequence
  Synthetic
ugauauaaaacuuggcccuuuu

SEQ ID NO: 126881 - RNA, 19 nt, Artificial Sequence
  Synthetic
ugguuuuugugcuccuuuu

SEQ ID NO: 126882 - RNA, 20 nt, Artificial Sequence
  Synthetic
augguuuuugugcuccuuuu

SEQ ID NO: 126883 - RNA, 22 nt, Artificial Sequence
  Synthetic
cgaugguuuuugugcuccuuuu

SEQ ID NO: 126884 - RNA, 23 nt, Artificial Sequence
  Synthetic
ucgaugguuuuugugcuccuuuu

SEQ ID NO: 126885 - RNA, 24 nt, Artificial Sequence
  Synthetic
cucgaugguuuuugugcuccuuuu

SEQ ID NO: 126886 - RNA, 21 nt, Artificial Sequence
  Synthetic
uuuuucauuugguuuccuuuu

SEQ ID NO: 126887 - RNA, 22 nt, Artificial Sequence
  Synthetic
auuuuucauuugguuuccuuuu

SEQ ID NO: 126888 - RNA, 23 nt, Artificial Sequence
  Synthetic
uauuuuucauuugguuuccuuuu

SEQ ID NO: 126889 - RNA, 24 nt, Artificial Sequence
  Synthetic
uuauuuuucauuugguuuccuuuu

SEQ ID NO: 126890 - RNA, 18 nt, Artificial Sequence
  Synthetic
auguggcagguggcuuuu

SEQ ID NO: 126891 - RNA, 19 nt, Artificial Sequence
  Synthetic
cauguggcagguggcuuuu

SEQ ID NO: 126892 - RNA, 21 nt, Artificial Sequence
  Synthetic
agcauguggcagguggcuuuu

SEQ ID NO: 126893 - RNA, 22 nt, Artificial Sequence
  Synthetic
cagcauguggcagguggcuuuu

SEQ ID NO: 126894 - RNA, 24 nt, Artificial Sequence
  Synthetic
agcagcauguggcagguggcuuuu

SEQ ID NO: 126895 - RNA, 18 nt, Artificial Sequence
  Synthetic
ucuagacuauuggcuuuu

SEQ ID NO: 126896 - RNA, 19 nt, Artificial Sequence
  Synthetic
cucuagacuauuggcuuuu

SEQ ID NO: 126897 - RNA, 20 nt, Artificial Sequence
  Synthetic
ccucuagacuauuggcuuuu

SEQ ID NO: 126898 - RNA, 21 nt, Artificial Sequence
  Synthetic
cccucuagacuauuggcuuuu

SEQ ID NO: 126899 - RNA, 22 nt, Artificial Sequence
  Synthetic
acccucuagacuauuggcuuuu

SEQ ID NO: 126900 - RNA, 24 nt, Artificial Sequence
  Synthetic
ugacccucuagacuauuggcuuuu

SEQ ID NO: 126901 - RNA, 18 nt, Artificial Sequence
  Synthetic
aaaugugauacugcuuuu

SEQ ID NO: 126902 - RNA, 19 nt, Artificial Sequence
  Synthetic
caaaugugauacugcuuuu

SEQ ID NO: 126903 - RNA, 20 nt, Artificial Sequence
  Synthetic
ucaaaugugauacugcuuuu

SEQ ID NO: 126904 - RNA, 22 nt, Artificial Sequence
  Synthetic
agucaaaugugauacugcuuuu

SEQ ID NO: 126905 - RNA, 23 nt, Artificial Sequence
  Synthetic
aagucaaaugugauacugcuuuu

SEQ ID NO: 126906 - RNA, 24 nt, Artificial Sequence
  Synthetic
aaagucaaaugugauacugcuuuu

SEQ ID NO: 126907 - RNA, 19 nt, Artificial Sequence
  Synthetic
cgcauuccaaagugcuuuu

SEQ ID NO: 126908 - RNA, 20 nt, Artificial Sequence
  Synthetic
ucgcauuccaaagugcuuuu

SEQ ID NO: 126909 - RNA, 21 nt, Artificial Sequence
  Synthetic
cucgcauuccaaagugcuuuu

SEQ ID NO: 126910 - RNA, 22 nt, Artificial Sequence
  Synthetic
ucucgcauuccaaagugcuuuu

SEQ ID NO: 126911 - RNA, 23 nt, Artificial Sequence
  Synthetic
cucucgcauuccaaagugcuuuu

SEQ ID NO: 126912 - RNA, 24 nt, Artificial Sequence
  Synthetic
acucucgcauuccaaagugcuuuu

SEQ ID NO: 126913 - RNA, 18 nt, Artificial Sequence
  Synthetic
ccuaugaacauugcuuuu

SEQ ID NO: 126914 - RNA, 19 nt, Artificial Sequence
  Synthetic
cccuaugaacauugcuuuu

SEQ ID NO: 126915 - RNA, 21 nt, Artificial Sequence
  Synthetic
ugcccuaugaacauugcuuuu

SEQ ID NO: 126916 - RNA, 23 nt, Artificial Sequence
  Synthetic
ugugcccuaugaacauugcuuuu

SEQ ID NO: 126917 - RNA, 18 nt, Artificial Sequence
  Synthetic
uugagaugcacaucuuuu

SEQ ID NO: 126918 - RNA, 19 nt, Artificial Sequence
  Synthetic
cuugagaugcacaucuuuu

SEQ ID NO: 126919 - RNA, 20 nt, Artificial Sequence
  Synthetic
ucuugagaugcacaucuuuu

SEQ ID NO: 126920 - RNA, 21 nt, Artificial Sequence
  Synthetic
aucuugagaugcacaucuuuu

SEQ ID NO: 126921 - RNA, 22 nt, Artificial Sequence
  Synthetic
aaucuugagaugcacaucuuuu

SEQ ID NO: 126922 - RNA, 23 nt, Artificial Sequence
  Synthetic
aaaucuugagaugcacaucuuuu

SEQ ID NO: 126923 - RNA, 24 nt, Artificial Sequence
  Synthetic
uaaaucuugagaugcacaucuuuu

SEQ ID NO: 126924 - RNA, 18 nt, Artificial Sequence
  Synthetic
ugugcaugcagaucuuuu

SEQ ID NO: 126925 - RNA, 19 nt, Artificial Sequence
  Synthetic
uugugcaugcagaucuuuu

SEQ ID NO: 126926 - RNA, 20 nt, Artificial Sequence
  Synthetic
cuugugcaugcagaucuuuu

SEQ ID NO: 126927 - RNA, 23 nt, Artificial Sequence
  Synthetic
aggcuugugcaugcagaucuuuu

SEQ ID NO: 126928 - RNA, 24 nt, Artificial Sequence
  Synthetic
aaggcuugugcaugcagaucuuuu

SEQ ID NO: 126929 - RNA, 18 nt, Artificial Sequence
  Synthetic
uggagcugagccucuuuu

SEQ ID NO: 126930 - RNA, 19 nt, Artificial Sequence
  Synthetic
uuggagcugagccucuuuu

SEQ ID NO: 126931 - RNA, 20 nt, Artificial Sequence
  Synthetic
cuuggagcugagccucuuuu

SEQ ID NO: 126932 - RNA, 21 nt, Artificial Sequence
  Synthetic
ucuuggagcugagccucuuuu

SEQ ID NO: 126933 - RNA, 22 nt, Artificial Sequence
  Synthetic
uucuuggagcugagccucuuuu

SEQ ID NO: 126934 - RNA, 24 nt, Artificial Sequence
  Synthetic
aguucuuggagcugagccucuuuu

SEQ ID NO: 126935 - RNA, 18 nt, Artificial Sequence
  Synthetic
ccaaaggggagcucuuuu

SEQ ID NO: 126936 - RNA, 19 nt, Artificial Sequence
  Synthetic
cccaaaggggagcucuuuu

SEQ ID NO: 126937 - RNA, 20 nt, Artificial Sequence
  Synthetic
ccccaaaggggagcucuuuu

SEQ ID NO: 126938 - RNA, 21 nt, Artificial Sequence
  Synthetic
accccaaaggggagcucuuuu

SEQ ID NO: 126939 - RNA, 23 nt, Artificial Sequence
  Synthetic
agaccccaaaggggagcucuuuu

SEQ ID NO: 126940 - RNA, 24 nt, Artificial Sequence
  Synthetic
uagaccccaaaggggagcucuuuu

SEQ ID NO: 126941 - RNA, 21 nt, Artificial Sequence
  Synthetic
aaacauaaugacuucucuuuu

SEQ ID NO: 126942 - RNA, 22 nt, Artificial Sequence
  Synthetic
aaaacauaaugacuucucuuuu

SEQ ID NO: 126943 - RNA, 23 nt, Artificial Sequence
  Synthetic
aaaaacauaaugacuucucuuuu

SEQ ID NO: 126944 - RNA, 24 nt, Artificial Sequence
  Synthetic
uaaaaacauaaugacuucucuuuu

SEQ ID NO: 126945 - RNA, 21 nt, Artificial Sequence
  Synthetic
ucaaccuucccuacuucuuuu

SEQ ID NO: 126946 - RNA, 24 nt, Artificial Sequence
  Synthetic
uggucaaccuucccuacuucuuuu

SEQ ID NO: 126947 - RNA, 21 nt, Artificial Sequence
  Synthetic
agcuccaaaaguaaaaguuuu

SEQ ID NO: 126948 - RNA, 22 nt, Artificial Sequence
  Synthetic
cagcuccaaaaguaaaaguuuu

SEQ ID NO: 126949 - RNA, 24 nt, Artificial Sequence
  Synthetic
agcagcuccaaaaguaaaaguuuu

SEQ ID NO: 126950 - RNA, 19 nt, Artificial Sequence
  Synthetic
aguauauuacuuaaguuuu

SEQ ID NO: 126951 - RNA, 21 nt, Artificial Sequence
  Synthetic
agaguauauuacuuaaguuuu

SEQ ID NO: 126952 - RNA, 23 nt, Artificial Sequence
  Synthetic
ugagaguauauuacuuaaguuuu

SEQ ID NO: 126953 - RNA, 24 nt, Artificial Sequence
  Synthetic
cugagaguauauuacuuaaguuuu

SEQ ID NO: 126954 - RNA, 18 nt, Artificial Sequence
  Synthetic
uauuauuuaagcaguuuu

SEQ ID NO: 126955 - RNA, 20 nt, Artificial Sequence
  Synthetic
uguauuauuuaagcaguuuu

SEQ ID NO: 126956 - RNA, 22 nt, Artificial Sequence
  Synthetic
aguguauuauuuaagcaguuuu

SEQ ID NO: 126957 - RNA, 23 nt, Artificial Sequence
  Synthetic
caguguauuauuuaagcaguuuu

SEQ ID NO: 126958 - RNA, 18 nt, Artificial Sequence
  Synthetic
ucacaguauagcaguuuu

SEQ ID NO: 126959 - RNA, 19 nt, Artificial Sequence
  Synthetic
uucacaguauagcaguuuu

SEQ ID NO: 126960 - RNA, 21 nt, Artificial Sequence
  Synthetic
uguucacaguauagcaguuuu

SEQ ID NO: 126961 - RNA, 22 nt, Artificial Sequence
  Synthetic
auguucacaguauagcaguuuu

SEQ ID NO: 126962 - RNA, 23 nt, Artificial Sequence
  Synthetic
uauguucacaguauagcaguuuu

SEQ ID NO: 126963 - RNA, 24 nt, Artificial Sequence
  Synthetic
auauguucacaguauagcaguuuu

SEQ ID NO: 126964 - RNA, 19 nt, Artificial Sequence
  Synthetic
uguuuuaccuugcaguuuu

SEQ ID NO: 126965 - RNA, 20 nt, Artificial Sequence
  Synthetic
uuguuuuaccuugcaguuuu

SEQ ID NO: 126966 - RNA, 21 nt, Artificial Sequence
  Synthetic
cuuguuuuaccuugcaguuuu

SEQ ID NO: 126967 - RNA, 22 nt, Artificial Sequence
  Synthetic
ucuuguuuuaccuugcaguuuu

SEQ ID NO: 126968 - RNA, 23 nt, Artificial Sequence
  Synthetic
uucuuguuuuaccuugcaguuuu

SEQ ID NO: 126969 - RNA, 24 nt, Artificial Sequence
  Synthetic
uuucuuguuuuaccuugcaguuuu

SEQ ID NO: 126970 - RNA, 22 nt, Artificial Sequence
  Synthetic
uguguuucuucugcucaguuuu

SEQ ID NO: 126971 - RNA, 23 nt, Artificial Sequence
  Synthetic
cuguguuucuucugcucaguuuu

SEQ ID NO: 126972 - RNA, 24 nt, Artificial Sequence
  Synthetic
acuguguuucuucugcucaguuuu

SEQ ID NO: 126973 - RNA, 18 nt, Artificial Sequence
  Synthetic
ccuucagcucucaguuuu

SEQ ID NO: 126974 - RNA, 20 nt, Artificial Sequence
  Synthetic
agccuucagcucucaguuuu

SEQ ID NO: 126975 - RNA, 21 nt, Artificial Sequence
  Synthetic
cagccuucagcucucaguuuu

SEQ ID NO: 126976 - RNA, 22 nt, Artificial Sequence
  Synthetic
acagccuucagcucucaguuuu

SEQ ID NO: 126977 - RNA, 24 nt, Artificial Sequence
  Synthetic
agacagccuucagcucucaguuuu

SEQ ID NO: 126978 - RNA, 18 nt, Artificial Sequence
  Synthetic
uugugauaauucaguuuu

SEQ ID NO: 126979 - RNA, 19 nt, Artificial Sequence
  Synthetic
uuugugauaauucaguuuu

SEQ ID NO: 126980 - RNA, 20 nt, Artificial Sequence
  Synthetic
auuugugauaauucaguuuu

SEQ ID NO: 126981 - RNA, 21 nt, Artificial Sequence
  Synthetic
cauuugugauaauucaguuuu

SEQ ID NO: 126982 - RNA, 22 nt, Artificial Sequence
  Synthetic
acauuugugauaauucaguuuu

SEQ ID NO: 126983 - RNA, 18 nt, Artificial Sequence
  Synthetic
cguaagcuaaguaguuuu

SEQ ID NO: 126984 - RNA, 20 nt, Artificial Sequence
  Synthetic
ugcguaagcuaaguaguuuu

SEQ ID NO: 126985 - RNA, 21 nt, Artificial Sequence
  Synthetic
uugcguaagcuaaguaguuuu

SEQ ID NO: 126986 - RNA, 22 nt, Artificial Sequence
  Synthetic
cuugcguaagcuaaguaguuuu

SEQ ID NO: 126987 - RNA, 23 nt, Artificial Sequence
  Synthetic
ccuugcguaagcuaaguaguuuu

SEQ ID NO: 126988 - RNA, 24 nt, Artificial Sequence
  Synthetic
uccuugcguaagcuaaguaguuuu

SEQ ID NO: 126989 - RNA, 18 nt, Artificial Sequence
  Synthetic
ccauucuuucuucguuuu

SEQ ID NO: 126990 - RNA, 19 nt, Artificial Sequence
  Synthetic
uccauucuuucuucguuuu

SEQ ID NO: 126991 - RNA, 21 nt, Artificial Sequence
  Synthetic
aguccauucuuucuucguuuu

SEQ ID NO: 126992 - RNA, 23 nt, Artificial Sequence
  Synthetic
ugaguccauucuuucuucguuuu

SEQ ID NO: 126993 - RNA, 24 nt, Artificial Sequence
  Synthetic
cugaguccauucuuucuucguuuu

SEQ ID NO: 126994 - RNA, 22 nt, Artificial Sequence
  Synthetic
aggggugaggugggaagguuuu

SEQ ID NO: 126995 - RNA, 23 nt, Artificial Sequence
  Synthetic
caggggugaggugggaagguuuu

SEQ ID NO: 126996 - RNA, 18 nt, Artificial Sequence
  Synthetic
aaaaccaauacagguuuu

SEQ ID NO: 126997 - RNA, 20 nt, Artificial Sequence
  Synthetic
ugaaaaccaauacagguuuu

SEQ ID NO: 126998 - RNA, 21 nt, Artificial Sequence
  Synthetic
cugaaaaccaauacagguuuu

SEQ ID NO: 126999 - RNA, 22 nt, Artificial Sequence
  Synthetic
ccugaaaaccaauacagguuuu

SEQ ID NO: 127000 - RNA, 23 nt, Artificial Sequence
  Synthetic
uccugaaaaccaauacagguuuu

SEQ ID NO: 127001 - RNA, 24 nt, Artificial Sequence
  Synthetic
uuccugaaaaccaauacagguuuu

SEQ ID NO: 127002 - RNA, 18 nt, Artificial Sequence
  Synthetic
ucguuuugaaaggguuuu

SEQ ID NO: 127003 - RNA, 20 nt, Artificial Sequence
  Synthetic
ugucguuuugaaaggguuuu

SEQ ID NO: 127004 - RNA, 21 nt, Artificial Sequence
  Synthetic
augucguuuugaaaggguuuu

SEQ ID NO: 127005 - RNA, 22 nt, Artificial Sequence
  Synthetic
aaugucguuuugaaaggguuuu

SEQ ID NO: 127006 - RNA, 23 nt, Artificial Sequence
  Synthetic
aaaugucguuuugaaaggguuuu

SEQ ID NO: 127007 - RNA, 18 nt, Artificial Sequence
  Synthetic
ugcuacaaaaaugguuuu

SEQ ID NO: 127008 - RNA, 19 nt, Artificial Sequence
  Synthetic
cugcuacaaaaaugguuuu

SEQ ID NO: 127009 - RNA, 20 nt, Artificial Sequence
  Synthetic
ucugcuacaaaaaugguuuu

SEQ ID NO: 127010 - RNA, 22 nt, Artificial Sequence
  Synthetic
ugucugcuacaaaaaugguuuu

SEQ ID NO: 127011 - RNA, 23 nt, Artificial Sequence
  Synthetic
cugucugcuacaaaaaugguuuu

SEQ ID NO: 127012 - RNA, 18 nt, Artificial Sequence
  Synthetic
caacucagcaaugguuuu

SEQ ID NO: 127013 - RNA, 19 nt, Artificial Sequence
  Synthetic
ucaacucagcaaugguuuu

SEQ ID NO: 127014 - RNA, 20 nt, Artificial Sequence
  Synthetic
uucaacucagcaaugguuuu

SEQ ID NO: 127015 - RNA, 21 nt, Artificial Sequence
  Synthetic
cuucaacucagcaaugguuuu

SEQ ID NO: 127016 - RNA, 22 nt, Artificial Sequence
  Synthetic
acuucaacucagcaaugguuuu

SEQ ID NO: 127017 - RNA, 23 nt, Artificial Sequence
  Synthetic
uacuucaacucagcaaugguuuu

SEQ ID NO: 127018 - RNA, 24 nt, Artificial Sequence
  Synthetic
cuacuucaacucagcaaugguuuu

SEQ ID NO: 127019 - RNA, 19 nt, Artificial Sequence
  Synthetic
ugagggugcaucugguuuu

SEQ ID NO: 127020 - RNA, 20 nt, Artificial Sequence
  Synthetic
cugagggugcaucugguuuu

SEQ ID NO: 127021 - RNA, 21 nt, Artificial Sequence
  Synthetic
ucugagggugcaucugguuuu

SEQ ID NO: 127022 - RNA, 22 nt, Artificial Sequence
  Synthetic
aucugagggugcaucugguuuu

SEQ ID NO: 127023 - RNA, 23 nt, Artificial Sequence
  Synthetic
aaucugagggugcaucugguuuu

SEQ ID NO: 127024 - RNA, 18 nt, Artificial Sequence
  Synthetic
cacccuuugcuugguuuu

SEQ ID NO: 127025 - RNA, 19 nt, Artificial Sequence
  Synthetic
ccacccuuugcuugguuuu

SEQ ID NO: 127026 - RNA, 20 nt, Artificial Sequence
  Synthetic
uccacccuuugcuugguuuu

SEQ ID NO: 127027 - RNA, 21 nt, Artificial Sequence
  Synthetic
cuccacccuuugcuugguuuu

SEQ ID NO: 127028 - RNA, 22 nt, Artificial Sequence
  Synthetic
acuccacccuuugcuugguuuu

SEQ ID NO: 127029 - RNA, 23 nt, Artificial Sequence
  Synthetic
aacuccacccuuugcuugguuuu

SEQ ID NO: 127030 - RNA, 18 nt, Artificial Sequence
  Synthetic
aauggguuacaauguuuu

SEQ ID NO: 127031 - RNA, 19 nt, Artificial Sequence
  Synthetic
aaauggguuacaauguuuu

SEQ ID NO: 127032 - RNA, 20 nt, Artificial Sequence
  Synthetic
aaaauggguuacaauguuuu

SEQ ID NO: 127033 - RNA, 21 nt, Artificial Sequence
  Synthetic
caaaauggguuacaauguuuu

SEQ ID NO: 127034 - RNA, 22 nt, Artificial Sequence
  Synthetic
ucaaaauggguuacaauguuuu

SEQ ID NO: 127035 - RNA, 23 nt, Artificial Sequence
  Synthetic
cucaaaauggguuacaauguuuu

SEQ ID NO: 127036 - RNA, 24 nt, Artificial Sequence
  Synthetic
ucucaaaauggguuacaauguuuu

SEQ ID NO: 127037 - RNA, 18 nt, Artificial Sequence
  Synthetic
uuucaccaaauauguuuu

SEQ ID NO: 127038 - RNA, 19 nt, Artificial Sequence
  Synthetic
uuuucaccaaauauguuuu

SEQ ID NO: 127039 - RNA, 20 nt, Artificial Sequence
  Synthetic
cuuuucaccaaauauguuuu

SEQ ID NO: 127040 - RNA, 22 nt, Artificial Sequence
  Synthetic
agcuuuucaccaaauauguuuu

SEQ ID NO: 127041 - RNA, 23 nt, Artificial Sequence
  Synthetic
aagcuuuucaccaaauauguuuu

SEQ ID NO: 127042 - RNA, 24 nt, Artificial Sequence
  Synthetic
uaagcuuuucaccaaauauguuuu

SEQ ID NO: 127043 - RNA, 18 nt, Artificial Sequence
  Synthetic
uacaugcuaaacuguuuu

SEQ ID NO: 127044 - RNA, 19 nt, Artificial Sequence
  Synthetic
uuacaugcuaaacuguuuu

SEQ ID NO: 127045 - RNA, 20 nt, Artificial Sequence
  Synthetic
auuacaugcuaaacuguuuu

SEQ ID NO: 127046 - RNA, 21 nt, Artificial Sequence
  Synthetic
uauuacaugcuaaacuguuuu

SEQ ID NO: 127047 - RNA, 22 nt, Artificial Sequence
  Synthetic
uuauuacaugcuaaacuguuuu

SEQ ID NO: 127048 - RNA, 23 nt, Artificial Sequence
  Synthetic
auuauuacaugcuaaacuguuuu

SEQ ID NO: 127049 - RNA, 24 nt, Artificial Sequence
  Synthetic
aauuauuacaugcuaaacuguuuu

SEQ ID NO: 127050 - RNA, 18 nt, Artificial Sequence
  Synthetic
cguuggguucucuguuuu

SEQ ID NO: 127051 - RNA, 19 nt, Artificial Sequence
  Synthetic
acguuggguucucuguuuu

SEQ ID NO: 127052 - RNA, 20 nt, Artificial Sequence
  Synthetic
cacguuggguucucuguuuu

SEQ ID NO: 127053 - RNA, 21 nt, Artificial Sequence
  Synthetic
ccacguuggguucucuguuuu

SEQ ID NO: 127054 - RNA, 22 nt, Artificial Sequence
  Synthetic
cccacguuggguucucuguuuu

SEQ ID NO: 127055 - RNA, 23 nt, Artificial Sequence
  Synthetic
ucccacguuggguucucuguuuu

SEQ ID NO: 127056 - RNA, 24 nt, Artificial Sequence
  Synthetic
cucccacguuggguucucuguuuu

SEQ ID NO: 127057 - RNA, 19 nt, Artificial Sequence
  Synthetic
ugaugcugaaagguguuuu

SEQ ID NO: 127058 - RNA, 20 nt, Artificial Sequence
  Synthetic
augaugcugaaagguguuuu

SEQ ID NO: 127059 - RNA, 22 nt, Artificial Sequence
  Synthetic
agaugaugcugaaagguguuuu

SEQ ID NO: 127060 - RNA, 23 nt, Artificial Sequence
  Synthetic
cagaugaugcugaaagguguuuu

SEQ ID NO: 127061 - RNA, 24 nt, Artificial Sequence
  Synthetic
ccagaugaugcugaaagguguuuu

SEQ ID NO: 127062 - RNA, 20 nt, Artificial Sequence
  Synthetic
aggcuacaucaagguguuuu

SEQ ID NO: 127063 - RNA, 21 nt, Artificial Sequence
  Synthetic
aaggcuacaucaagguguuuu

SEQ ID NO: 127064 - RNA, 22 nt, Artificial Sequence
  Synthetic
uaaggcuacaucaagguguuuu

SEQ ID NO: 127065 - RNA, 23 nt, Artificial Sequence
  Synthetic
uuaaggcuacaucaagguguuuu

SEQ ID NO: 127066 - RNA, 24 nt, Artificial Sequence
  Synthetic
cuuaaggcuacaucaagguguuuu

SEQ ID NO: 127067 - RNA, 21 nt, Artificial Sequence
  Synthetic
ucuuugcuugauuuguguuuu

SEQ ID NO: 127068 - RNA, 22 nt, Artificial Sequence
  Synthetic
cucuuugcuugauuuguguuuu

SEQ ID NO: 127069 - RNA, 23 nt, Artificial Sequence
  Synthetic
ucucuuugcuugauuuguguuuu

SEQ ID NO: 127070 - RNA, 24 nt, Artificial Sequence
  Synthetic
uucucuuugcuugauuuguguuuu

SEQ ID NO: 127071 - RNA, 21 nt, Artificial Sequence
  Synthetic
auuauuugcaaaauaauuuuu

SEQ ID NO: 127072 - RNA, 22 nt, Artificial Sequence
  Synthetic
aauuauuugcaaaauaauuuuu

SEQ ID NO: 127073 - RNA, 23 nt, Artificial Sequence
  Synthetic
aaauuauuugcaaaauaauuuuu

SEQ ID NO: 127074 - RNA, 24 nt, Artificial Sequence
  Synthetic
caaauuauuugcaaaauaauuuuu

SEQ ID NO: 127075 - RNA, 21 nt, Artificial Sequence
  Synthetic
uauuaagagaacauaauuuuu

SEQ ID NO: 127076 - RNA, 22 nt, Artificial Sequence
  Synthetic
auauuaagagaacauaauuuuu

SEQ ID NO: 127077 - RNA, 23 nt, Artificial Sequence
  Synthetic
cauauuaagagaacauaauuuuu

SEQ ID NO: 127078 - RNA, 24 nt, Artificial Sequence
  Synthetic
acauauuaagagaacauaauuuuu

SEQ ID NO: 127079 - RNA, 18 nt, Artificial Sequence
  Synthetic
uaacgcaugguaauuuuu

SEQ ID NO: 127080 - RNA, 19 nt, Artificial Sequence
  Synthetic
cuaacgcaugguaauuuuu

SEQ ID NO: 127081 - RNA, 20 nt, Artificial Sequence
  Synthetic
ucuaacgcaugguaauuuuu

SEQ ID NO: 127082 - RNA, 21 nt, Artificial Sequence
  Synthetic
uucuaacgcaugguaauuuuu

SEQ ID NO: 127083 - RNA, 24 nt, Artificial Sequence
  Synthetic
ugguucuaacgcaugguaauuuuu

SEQ ID NO: 127084 - RNA, 21 nt, Artificial Sequence
  Synthetic
ucauaacuaaauaacauuuuu

SEQ ID NO: 127085 - RNA, 22 nt, Artificial Sequence
  Synthetic
cucauaacuaaauaacauuuuu

SEQ ID NO: 127086 - RNA, 23 nt, Artificial Sequence
  Synthetic
acucauaacuaaauaacauuuuu

SEQ ID NO: 127087 - RNA, 24 nt, Artificial Sequence
  Synthetic
uacucauaacuaaauaacauuuuu

SEQ ID NO: 127088 - RNA, 22 nt, Artificial Sequence
  Synthetic
aggagauuuaaaagagauuuuu

SEQ ID NO: 127089 - RNA, 23 nt, Artificial Sequence
  Synthetic
aaggagauuuaaaagagauuuuu

SEQ ID NO: 127090 - RNA, 24 nt, Artificial Sequence
  Synthetic
uaaggagauuuaaaagagauuuuu

SEQ ID NO: 127091 - RNA, 18 nt, Artificial Sequence
  Synthetic
caacuugaguagauuuuu

SEQ ID NO: 127092 - RNA, 19 nt, Artificial Sequence
  Synthetic
ucaacuugaguagauuuuu

SEQ ID NO: 127093 - RNA, 21 nt, Artificial Sequence
  Synthetic
ugucaacuugaguagauuuuu

SEQ ID NO: 127094 - RNA, 22 nt, Artificial Sequence
  Synthetic
cugucaacuugaguagauuuuu

SEQ ID NO: 127095 - RNA, 23 nt, Artificial Sequence
  Synthetic
ucugucaacuugaguagauuuuu

SEQ ID NO: 127096 - RNA, 24 nt, Artificial Sequence
  Synthetic
aucugucaacuugaguagauuuuu

SEQ ID NO: 127097 - RNA, 18 nt, Artificial Sequence
  Synthetic
uaugcuagcaauauuuuu

SEQ ID NO: 127098 - RNA, 19 nt, Artificial Sequence
  Synthetic
cuaugcuagcaauauuuuu

SEQ ID NO: 127099 - RNA, 20 nt, Artificial Sequence
  Synthetic
acuaugcuagcaauauuuuu

SEQ ID NO: 127100 - RNA, 21 nt, Artificial Sequence
  Synthetic
uacuaugcuagcaauauuuuu

SEQ ID NO: 127101 - RNA, 22 nt, Artificial Sequence
  Synthetic
uuacuaugcuagcaauauuuuu

SEQ ID NO: 127102 - RNA, 23 nt, Artificial Sequence
  Synthetic
uuuacuaugcuagcaauauuuuu

SEQ ID NO: 127103 - RNA, 24 nt, Artificial Sequence
  Synthetic
uuuuacuaugcuagcaauauuuuu

SEQ ID NO: 127104 - RNA, 18 nt, Artificial Sequence
  Synthetic
cuguaguaugauauuuuu

SEQ ID NO: 127105 - RNA, 19 nt, Artificial Sequence
  Synthetic
acuguaguaugauauuuuu

SEQ ID NO: 127106 - RNA, 20 nt, Artificial Sequence
  Synthetic
cacuguaguaugauauuuuu

SEQ ID NO: 127107 - RNA, 23 nt, Artificial Sequence
  Synthetic
aggcacuguaguaugauauuuuu

SEQ ID NO: 127108 - RNA, 24 nt, Artificial Sequence
  Synthetic
aaggcacuguaguaugauauuuuu

SEQ ID NO: 127109 - RNA, 18 nt, Artificial Sequence
  Synthetic
acacuaucaaguauuuuu

SEQ ID NO: 127110 - RNA, 19 nt, Artificial Sequence
  Synthetic
cacacuaucaaguauuuuu

SEQ ID NO: 127111 - RNA, 20 nt, Artificial Sequence
  Synthetic
ccacacuaucaaguauuuuu

SEQ ID NO: 127112 - RNA, 21 nt, Artificial Sequence
  Synthetic
accacacuaucaaguauuuuu

SEQ ID NO: 127113 - RNA, 22 nt, Artificial Sequence
  Synthetic
aaccacacuaucaaguauuuuu

SEQ ID NO: 127114 - RNA, 23 nt, Artificial Sequence
  Synthetic
caaccacacuaucaaguauuuuu

SEQ ID NO: 127115 - RNA, 24 nt, Artificial Sequence
  Synthetic
ccaaccacacuaucaaguauuuuu

SEQ ID NO: 127116 - RNA, 18 nt, Artificial Sequence
  Synthetic
aggcccuuaugacuuuuu

SEQ ID NO: 127117 - RNA, 19 nt, Artificial Sequence
  Synthetic
aaggcccuuaugacuuuuu

SEQ ID NO: 127118 - RNA, 20 nt, Artificial Sequence
  Synthetic
uaaggcccuuaugacuuuuu

SEQ ID NO: 127119 - RNA, 21 nt, Artificial Sequence
  Synthetic
cuaaggcccuuaugacuuuuu

SEQ ID NO: 127120 - RNA, 22 nt, Artificial Sequence
  Synthetic
ccuaaggcccuuaugacuuuuu

SEQ ID NO: 127121 - RNA, 23 nt, Artificial Sequence
  Synthetic
uccuaaggcccuuaugacuuuuu

SEQ ID NO: 127122 - RNA, 24 nt, Artificial Sequence
  Synthetic
cuccuaaggcccuuaugacuuuuu

SEQ ID NO: 127123 - RNA, 18 nt, Artificial Sequence
  Synthetic
uuacgccaguuacuuuuu

SEQ ID NO: 127124 - RNA, 19 nt, Artificial Sequence
  Synthetic
auuacgccaguuacuuuuu

SEQ ID NO: 127125 - RNA, 20 nt, Artificial Sequence
  Synthetic
uauuacgccaguuacuuuuu

SEQ ID NO: 127126 - RNA, 21 nt, Artificial Sequence
  Synthetic
auauuacgccaguuacuuuuu

SEQ ID NO: 127127 - RNA, 22 nt, Artificial Sequence
  Synthetic
aauauuacgccaguuacuuuuu

SEQ ID NO: 127128 - RNA, 23 nt, Artificial Sequence
  Synthetic
caauauuacgccaguuacuuuuu

SEQ ID NO: 127129 - RNA, 19 nt, Artificial Sequence
  Synthetic
cgggaagcauaaccuuuuu

SEQ ID NO: 127130 - RNA, 20 nt, Artificial Sequence
  Synthetic
acgggaagcauaaccuuuuu

SEQ ID NO: 127131 - RNA, 22 nt, Artificial Sequence
  Synthetic
agacgggaagcauaaccuuuuu

SEQ ID NO: 127132 - RNA, 24 nt, Artificial Sequence
  Synthetic
agagacgggaagcauaaccuuuuu

SEQ ID NO: 127133 - RNA, 18 nt, Artificial Sequence
  Synthetic
accaucuacucccuuuuu

SEQ ID NO: 127134 - RNA, 20 nt, Artificial Sequence
  Synthetic
ugaccaucuacucccuuuuu

SEQ ID NO: 127135 - RNA, 21 nt, Artificial Sequence
  Synthetic
augaccaucuacucccuuuuu

SEQ ID NO: 127136 - RNA, 22 nt, Artificial Sequence
  Synthetic
caugaccaucuacucccuuuuu

SEQ ID NO: 127137 - RNA, 23 nt, Artificial Sequence
  Synthetic
ucaugaccaucuacucccuuuuu

SEQ ID NO: 127138 - RNA, 24 nt, Artificial Sequence
  Synthetic
cucaugaccaucuacucccuuuuu

SEQ ID NO: 127139 - RNA, 19 nt, Artificial Sequence
  Synthetic
ugaaauaaauggccuuuuu

SEQ ID NO: 127140 - RNA, 20 nt, Artificial Sequence
  Synthetic
cugaaauaaauggccuuuuu

SEQ ID NO: 127141 - RNA, 23 nt, Artificial Sequence
  Synthetic
uggcugaaauaaauggccuuuuu

SEQ ID NO: 127142 - RNA, 24 nt, Artificial Sequence
  Synthetic
auggcugaaauaaauggccuuuuu

SEQ ID NO: 127143 - RNA, 18 nt, Artificial Sequence
  Synthetic
aagaagcugugccuuuuu

SEQ ID NO: 127144 - RNA, 20 nt, Artificial Sequence
  Synthetic
ugaagaagcugugccuuuuu

SEQ ID NO: 127145 - RNA, 21 nt, Artificial Sequence
  Synthetic
cugaagaagcugugccuuuuu

SEQ ID NO: 127146 - RNA, 23 nt, Artificial Sequence
  Synthetic
agcugaagaagcugugccuuuuu

SEQ ID NO: 127147 - RNA, 24 nt, Artificial Sequence
  Synthetic
uagcugaagaagcugugccuuuuu

SEQ ID NO: 127148 - RNA, 22 nt, Artificial Sequence
  Synthetic
ugaggauaguguauuccuuuuu

SEQ ID NO: 127149 - RNA, 23 nt, Artificial Sequence
  Synthetic
cugaggauaguguauuccuuuuu

SEQ ID NO: 127150 - RNA, 24 nt, Artificial Sequence
  Synthetic
ccugaggauaguguauuccuuuuu

SEQ ID NO: 127151 - RNA, 18 nt, Artificial Sequence
  Synthetic
auuacuucuuugcuuuuu

SEQ ID NO: 127152 - RNA, 19 nt, Artificial Sequence
  Synthetic
aauuacuucuuugcuuuuu

SEQ ID NO: 127153 - RNA, 21 nt, Artificial Sequence
  Synthetic
agaauuacuucuuugcuuuuu

SEQ ID NO: 127154 - RNA, 24 nt, Artificial Sequence
  Synthetic
uggagaauuacuucuuugcuuuuu

SEQ ID NO: 127155 - RNA, 18 nt, Artificial Sequence
  Synthetic
accauuagguaaguuuuu

SEQ ID NO: 127156 - RNA, 19 nt, Artificial Sequence
  Synthetic
uaccauuagguaaguuuuu

SEQ ID NO: 127157 - RNA, 20 nt, Artificial Sequence
  Synthetic
uuaccauuagguaaguuuuu

SEQ ID NO: 127158 - RNA, 21 nt, Artificial Sequence
  Synthetic
uuuaccauuagguaaguuuuu

SEQ ID NO: 127159 - RNA, 22 nt, Artificial Sequence
  Synthetic
auuuaccauuagguaaguuuuu

SEQ ID NO: 127160 - RNA, 23 nt, Artificial Sequence
  Synthetic
cauuuaccauuagguaaguuuuu

SEQ ID NO: 127161 - RNA, 24 nt, Artificial Sequence
  Synthetic
ucauuuaccauuagguaaguuuuu

SEQ ID NO: 127162 - RNA, 19 nt, Artificial Sequence
  Synthetic
uguccagcauugaguuuuu

SEQ ID NO: 127163 - RNA, 20 nt, Artificial Sequence
  Synthetic
uuguccagcauugaguuuuu

SEQ ID NO: 127164 - RNA, 21 nt, Artificial Sequence
  Synthetic
uuuguccagcauugaguuuuu

SEQ ID NO: 127165 - RNA, 24 nt, Artificial Sequence
  Synthetic
ugguuuguccagcauugaguuuuu

SEQ ID NO: 127166 - RNA, 18 nt, Artificial Sequence
  Synthetic
ugguaaauuuguguuuuu

SEQ ID NO: 127167 - RNA, 19 nt, Artificial Sequence
  Synthetic
augguaaauuuguguuuuu

SEQ ID NO: 127168 - RNA, 20 nt, Artificial Sequence
  Synthetic
aaugguaaauuuguguuuuu

SEQ ID NO: 127169 - RNA, 21 nt, Artificial Sequence
  Synthetic
aaaugguaaauuuguguuuuu

SEQ ID NO: 127170 - RNA, 23 nt, Artificial Sequence
  Synthetic
ugaaaugguaaauuuguguuuuu

SEQ ID NO: 127171 - RNA, 24 nt, Artificial Sequence
  Synthetic
uugaaaugguaaauuuguguuuuu

SEQ ID NO: 127172 - RNA, 18 nt, Artificial Sequence
  Synthetic
uaggcauucauuguuuuu

SEQ ID NO: 127173 - RNA, 21 nt, Artificial Sequence
  Synthetic
agguaggcauucauuguuuuu

SEQ ID NO: 127174 - RNA, 23 nt, Artificial Sequence
  Synthetic
agagguaggcauucauuguuuuu

SEQ ID NO: 127175 - RNA, 24 nt, Artificial Sequence
  Synthetic
cagagguaggcauucauuguuuuu

SEQ ID NO: 127176 - RNA, 18 nt, Artificial Sequence
  Synthetic
ucuucacaauaauuuuuu

SEQ ID NO: 127177 - RNA, 18 nt, Artificial Sequence
  Synthetic
cauuaaugaacauuuuuu

SEQ ID NO: 127178 - RNA, 19 nt, Artificial Sequence
  Synthetic
ccauuaaugaacauuuuuu

SEQ ID NO: 127179 - RNA, 20 nt, Artificial Sequence
  Synthetic
cccauuaaugaacauuuuuu

SEQ ID NO: 127180 - RNA, 21 nt, Artificial Sequence
  Synthetic
ccccauuaaugaacauuuuuu

SEQ ID NO: 127181 - RNA, 22 nt, Artificial Sequence
  Synthetic
cccccauuaaugaacauuuuuu

SEQ ID NO: 127182 - RNA, 23 nt, Artificial Sequence
  Synthetic
acccccauuaaugaacauuuuuu

SEQ ID NO: 127183 - RNA, 24 nt, Artificial Sequence
  Synthetic
aacccccauuaaugaacauuuuuu

SEQ ID NO: 127184 - RNA, 18 nt, Artificial Sequence
  Synthetic
aaaauaccuccauuuuuu

SEQ ID NO: 127185 - RNA, 19 nt, Artificial Sequence
  Synthetic
caaaauaccuccauuuuuu

SEQ ID NO: 127186 - RNA, 21 nt, Artificial Sequence
  Synthetic
ugcaaaauaccuccauuuuuu

SEQ ID NO: 127187 - RNA, 22 nt, Artificial Sequence
  Synthetic
augcaaaauaccuccauuuuuu

SEQ ID NO: 127188 - RNA, 23 nt, Artificial Sequence
  Synthetic
aaugcaaaauaccuccauuuuuu

SEQ ID NO: 127189 - RNA, 24 nt, Artificial Sequence
  Synthetic
caaugcaaaauaccuccauuuuuu

SEQ ID NO: 127190 - RNA, 21 nt, Artificial Sequence
  Synthetic
uuguuaaaaaaaaccuuuuuu

SEQ ID NO: 127191 - RNA, 22 nt, Artificial Sequence
  Synthetic
auuguuaaaaaaaaccuuuuuu

SEQ ID NO: 127192 - RNA, 23 nt, Artificial Sequence
  Synthetic
aauuguuaaaaaaaaccuuuuuu

SEQ ID NO: 127193 - RNA, 24 nt, Artificial Sequence
  Synthetic
caauuguuaaaaaaaaccuuuuuu

SEQ ID NO: 127194 - RNA, 18 nt, Artificial Sequence
  Synthetic
aaaacaagguauuuuuuu

SEQ ID NO: 127195 - RNA, 19 nt, Artificial Sequence
  Synthetic
caaaacaagguauuuuuuu

SEQ ID NO: 127196 - RNA, 20 nt, Artificial Sequence
  Synthetic
ccaaaacaagguauuuuuuu

SEQ ID NO: 127197 - RNA, 21 nt, Artificial Sequence
  Synthetic
accaaaacaagguauuuuuuu

SEQ ID NO: 127198 - RNA, 22 nt, Artificial Sequence
  Synthetic
uaccaaaacaagguauuuuuuu

SEQ ID NO: 127199 - RNA, 23 nt, Artificial Sequence
  Synthetic
uuaccaaaacaagguauuuuuuu

SEQ ID NO: 127200 - RNA, 24 nt, Artificial Sequence
  Synthetic
cuuaccaaaacaagguauuuuuuu

SEQ ID NO: 127201 - RNA, 21 nt, Artificial Sequence
  Synthetic
uuuagccuuuaaauuuuuuuu

SEQ ID NO: 127202 - RNA, 22 nt, Artificial Sequence
  Synthetic
auuuagccuuuaaauuuuuuuu

SEQ ID NO: 127203 - RNA, 23 nt, Artificial Sequence
  Synthetic
cauuuagccuuuaaauuuuuuuu

SEQ ID NO: 127204 - RNA, 24 nt, Artificial Sequence
  Synthetic
ccauuuagccuuuaaauuuuuuuu

SEQ ID NO: 127205 - RNA, 21 nt, Artificial Sequence
  Synthetic
cgaaaguuaacaauuuuuuuu

SEQ ID NO: 127206 - RNA, 22 nt, Artificial Sequence
  Synthetic
acgaaaguuaacaauuuuuuuu

SEQ ID NO: 127207 - RNA, 23 nt, Artificial Sequence
  Synthetic
cacgaaaguuaacaauuuuuuuu

SEQ ID NO: 127208 - RNA, 24 nt, Artificial Sequence
  Synthetic
ccacgaaaguuaacaauuuuuuuu

SEQ ID NO: 127209 - RNA, 19 nt, Artificial Sequence
  Synthetic
uggggucuuaguuuuuuuu

SEQ ID NO: 127210 - RNA, 20 nt, Artificial Sequence
  Synthetic
cuggggucuuaguuuuuuuu

SEQ ID NO: 127211 - RNA, 21 nt, Artificial Sequence
  Synthetic
ucuggggucuuaguuuuuuuu

SEQ ID NO: 127212 - RNA, 23 nt, Artificial Sequence
  Synthetic
ugucuggggucuuaguuuuuuuu

SEQ ID NO: 127213 - RNA, 24 nt, Artificial Sequence
  Synthetic
augucuggggucuuaguuuuuuuu

SEQ ID NO: 127214 - RNA, 20 nt, Artificial Sequence
  Synthetic
gaaaaaaaaaaaaaaaaaaa

SEQ ID NO: 127215 - RNA, 23 nt, Artificial Sequence
  Synthetic
gaagaaaaaaaaaaaaaaaaaaa

SEQ ID NO: 127216 - RNA, 22 nt, Artificial Sequence
  Synthetic
guucagucaugaaaaaaaaaaa

SEQ ID NO: 127217 - RNA, 18 nt, Artificial Sequence
  Synthetic
ggaaugagaaaaaaaaaa

SEQ ID NO: 127218 - RNA, 20 nt, Artificial Sequence
  Synthetic
gaggaaugagaaaaaaaaaa

SEQ ID NO: 127219 - RNA, 20 nt, Artificial Sequence
  Synthetic
gcuagacugaccaaaaaaaa

SEQ ID NO: 127220 - RNA, 23 nt, Artificial Sequence
  Synthetic
guuacaagaguuccagaaaaaaa

SEQ ID NO: 127221 - RNA, 18 nt, Artificial Sequence
  Synthetic
gcccagaggggaaaaaaa

SEQ ID NO: 127222 - RNA, 21 nt, Artificial Sequence
  Synthetic
gaaaugagaaaauuaaaaaaa

SEQ ID NO: 127223 - RNA, 20 nt, Artificial Sequence
  Synthetic
gcagagacacaaccaaaaaa

SEQ ID NO: 127224 - RNA, 18 nt, Artificial Sequence
  Synthetic
gaaaaacacuccaaaaaa

SEQ ID NO: 127225 - RNA, 23 nt, Artificial Sequence
  Synthetic
gucacucacugauucaccaaaaa

SEQ ID NO: 127226 - RNA, 22 nt, Artificial Sequence
  Synthetic
gaaaugacaaaacaaagaaaaa

SEQ ID NO: 127227 - RNA, 24 nt, Artificial Sequence
  Synthetic
gagaaaugacaaaacaaagaaaaa

SEQ ID NO: 127228 - RNA, 20 nt, Artificial Sequence
  Synthetic
gaccagaaguuaaugaaaaa

SEQ ID NO: 127229 - RNA, 22 nt, Artificial Sequence
  Synthetic
gaauacuaugcagccauaaaaa

SEQ ID NO: 127230 - RNA, 23 nt, Artificial Sequence
  Synthetic
ggaauacuaugcagccauaaaaa

SEQ ID NO: 127231 - RNA, 21 nt, Artificial Sequence
  Synthetic
gaaagugaaaguuuguaaaaa

SEQ ID NO: 127232 - RNA, 18 nt, Artificial Sequence
  Synthetic
gggucuaggaggacaaaa

SEQ ID NO: 127233 - RNA, 23 nt, Artificial Sequence
  Synthetic
gcuuccaaauacaugaagcaaaa

SEQ ID NO: 127234 - RNA, 19 nt, Artificial Sequence
  Synthetic
gacccuccccugagcaaaa

SEQ ID NO: 127235 - RNA, 22 nt, Artificial Sequence
  Synthetic
guucuuggcaccuuugucaaaa

SEQ ID NO: 127236 - RNA, 18 nt, Artificial Sequence
  Synthetic
gcaccauuuguuucaaaa

SEQ ID NO: 127237 - RNA, 18 nt, Artificial Sequence
  Synthetic
gugaggcuucagagaaaa

SEQ ID NO: 127238 - RNA, 19 nt, Artificial Sequence
  Synthetic
ggugaggcuucagagaaaa

SEQ ID NO: 127239 - RNA, 22 nt, Artificial Sequence
  Synthetic
gauggugaggcuucagagaaaa

SEQ ID NO: 127240 - RNA, 24 nt, Artificial Sequence
  Synthetic
gaaaauaauuaaaaguuuagaaaa

SEQ ID NO: 127241 - RNA, 20 nt, Artificial Sequence
  Synthetic
gcuccucaaaaaacugaaaa

SEQ ID NO: 127242 - RNA, 23 nt, Artificial Sequence
  Synthetic
guagcuccucaaaaaacugaaaa

SEQ ID NO: 127243 - RNA, 24 nt, Artificial Sequence
  Synthetic
gguagcuccucaaaaaacugaaaa

SEQ ID NO: 127244 - RNA, 20 nt, Artificial Sequence
  Synthetic
gaagagaagauuacugaaaa

SEQ ID NO: 127245 - RNA, 24 nt, Artificial Sequence
  Synthetic
gcaugaagagaagauuacugaaaa

SEQ ID NO: 127246 - RNA, 21 nt, Artificial Sequence
  Synthetic
guucuugccacagagugaaaa

SEQ ID NO: 127247 - RNA, 24 nt, Artificial Sequence
  Synthetic
gcuguucuugccacagagugaaaa

SEQ ID NO: 127248 - RNA, 18 nt, Artificial Sequence
  Synthetic
gaguggcaguuuugaaaa

SEQ ID NO: 127249 - RNA, 19 nt, Artificial Sequence
  Synthetic
gaaaaaauagaaaauaaaa

SEQ ID NO: 127250 - RNA, 24 nt, Artificial Sequence
  Synthetic
gcaaugaaaaaauagaaaauaaaa

SEQ ID NO: 127251 - RNA, 22 nt, Artificial Sequence
  Synthetic
gcaauacuauucagcaauaaaa

SEQ ID NO: 127252 - RNA, 23 nt, Artificial Sequence
  Synthetic
ggcaauacuauucagcaauaaaa

SEQ ID NO: 127253 - RNA, 21 nt, Artificial Sequence
  Synthetic
guacaagacuuuucaauaaaa

SEQ ID NO: 127254 - RNA, 23 nt, Artificial Sequence
  Synthetic
gaguacaagacuuuucaauaaaa

SEQ ID NO: 127255 - RNA, 20 nt, Artificial Sequence
  Synthetic
gaagaaaugacauaauaaaa

SEQ ID NO: 127256 - RNA, 22 nt, Artificial Sequence
  Synthetic
gcaauacuaugcagccauaaaa

SEQ ID NO: 127257 - RNA, 21 nt, Artificial Sequence
  Synthetic
gaauacuaugcagccauaaaa

SEQ ID NO: 127258 - RNA, 22 nt, Artificial Sequence
  Synthetic
ggaauacuaugcagccauaaaa

SEQ ID NO: 127259 - RNA, 21 nt, Artificial Sequence
  Synthetic
gaauacugugcagccauaaaa

SEQ ID NO: 127260 - RNA, 22 nt, Artificial Sequence
  Synthetic
ggaauacugugcagccauaaaa

SEQ ID NO: 127261 - RNA, 19 nt, Artificial Sequence
  Synthetic
gagggcuagaaauauaaaa

SEQ ID NO: 127262 - RNA, 18 nt, Artificial Sequence
  Synthetic
gaaaagggauuuauaaaa

SEQ ID NO: 127263 - RNA, 19 nt, Artificial Sequence
  Synthetic
ggaaaagggauuuauaaaa

SEQ ID NO: 127264 - RNA, 19 nt, Artificial Sequence
  Synthetic
gaaauaaaaagaaguaaaa

SEQ ID NO: 127265 - RNA, 19 nt, Artificial Sequence
  Synthetic
guaagcacaucauguaaaa

SEQ ID NO: 127266 - RNA, 22 nt, Artificial Sequence
  Synthetic
guaguaagcacaucauguaaaa

SEQ ID NO: 127267 - RNA, 24 nt, Artificial Sequence
  Synthetic
guguaguaagcacaucauguaaaa

SEQ ID NO: 127268 - RNA, 18 nt, Artificial Sequence
  Synthetic
guauaaaugaauuuaaaa

SEQ ID NO: 127269 - RNA, 18 nt, Artificial Sequence
  Synthetic
gugcauguaucuuuaaaa

SEQ ID NO: 127270 - RNA, 20 nt, Artificial Sequence
  Synthetic
gugugcauguaucuuuaaaa

SEQ ID NO: 127271 - RNA, 21 nt, Artificial Sequence
  Synthetic
guuuuauucuuuuuaaacaaa

SEQ ID NO: 127272 - RNA, 23 nt, Artificial Sequence
  Synthetic
gaguuuuauucuuuuuaaacaaa

SEQ ID NO: 127273 - RNA, 20 nt, Artificial Sequence
  Synthetic
gaauuuuuauuuugaacaaa

SEQ ID NO: 127274 - RNA, 21 nt, Artificial Sequence
  Synthetic
gcaauagugaaauaccacaaa

SEQ ID NO: 127275 - RNA, 21 nt, Artificial Sequence
  Synthetic
gaucauauguuaggccacaaa

SEQ ID NO: 127276 - RNA, 24 nt, Artificial Sequence
  Synthetic
guagaucauauguuaggccacaaa

SEQ ID NO: 127277 - RNA, 24 nt, Artificial Sequence
  Synthetic
gcaacaaaagccagaauugacaaa

SEQ ID NO: 127278 - RNA, 19 nt, Artificial Sequence
  Synthetic
gcaauaugaaagauacaaa

SEQ ID NO: 127279 - RNA, 20 nt, Artificial Sequence
  Synthetic
ggcaauaugaaagauacaaa

SEQ ID NO: 127280 - RNA, 21 nt, Artificial Sequence
  Synthetic
gauacaagaucaauauacaaa

SEQ ID NO: 127281 - RNA, 22 nt, Artificial Sequence
  Synthetic
ggauacaagaucaauauacaaa

SEQ ID NO: 127282 - RNA, 19 nt, Artificial Sequence
  Synthetic
gugggaaaggaaagccaaa

SEQ ID NO: 127283 - RNA, 20 nt, Artificial Sequence
  Synthetic
guaaugacccuaucuccaaa

SEQ ID NO: 127284 - RNA, 20 nt, Artificial Sequence
  Synthetic
gucaaaagaaaaacagcaaa

SEQ ID NO: 127285 - RNA, 20 nt, Artificial Sequence
  Synthetic
gcuggugauacucaggcaaa

SEQ ID NO: 127286 - RNA, 23 nt, Artificial Sequence
  Synthetic
gccucaguguccucaucugcaaa

SEQ ID NO: 127287 - RNA, 23 nt, Artificial Sequence
  Synthetic
gucucaguuuucucauuugcaaa

SEQ ID NO: 127288 - RNA, 19 nt, Artificial Sequence
  Synthetic
gaaaagauaugugaucaaa

SEQ ID NO: 127289 - RNA, 20 nt, Artificial Sequence
  Synthetic
ggaaaagauaugugaucaaa

SEQ ID NO: 127290 - RNA, 23 nt, Artificial Sequence
  Synthetic
gaaggaaaagauaugugaucaaa

SEQ ID NO: 127291 - RNA, 24 nt, Artificial Sequence
  Synthetic
ggaaggaaaagauaugugaucaaa

SEQ ID NO: 127292 - RNA, 18 nt, Artificial Sequence
  Synthetic
ggggagauguugaucaaa

SEQ ID NO: 127293 - RNA, 24 nt, Artificial Sequence
  Synthetic
gaaaauggggagauguugaucaaa

SEQ ID NO: 127294 - RNA, 20 nt, Artificial Sequence
  Synthetic
gucuugugccaguuuucaaa

SEQ ID NO: 127295 - RNA, 18 nt, Artificial Sequence
  Synthetic
gauuaccucuaaaagaaa

SEQ ID NO: 127296 - RNA, 20 nt, Artificial Sequence
  Synthetic
gugauuaccucuaaaagaaa

SEQ ID NO: 127297 - RNA, 18 nt, Artificial Sequence
  Synthetic
ggguaauuuacaaagaaa

SEQ ID NO: 127298 - RNA, 24 nt, Artificial Sequence
  Synthetic
gaaaauggguaauuuacaaagaaa

SEQ ID NO: 127299 - RNA, 19 nt, Artificial Sequence
  Synthetic
guuccagaaaccaaagaaa

SEQ ID NO: 127300 - RNA, 20 nt, Artificial Sequence
  Synthetic
guauucauaauauaaagaaa

SEQ ID NO: 127301 - RNA, 22 nt, Artificial Sequence
  Synthetic
guaaaaugaaaauuuaaagaaa

SEQ ID NO: 127302 - RNA, 23 nt, Artificial Sequence
  Synthetic
gguaaaaugaaaauuuaaagaaa

SEQ ID NO: 127303 - RNA, 20 nt, Artificial Sequence
  Synthetic
gauagaccuauaacaagaaa

SEQ ID NO: 127304 - RNA, 21 nt, Artificial Sequence
  Synthetic
ggauagaccuauaacaagaaa

SEQ ID NO: 127305 - RNA, 18 nt, Artificial Sequence
  Synthetic
gcuuugggcugcaagaaa

SEQ ID NO: 127306 - RNA, 21 nt, Artificial Sequence
  Synthetic
gaugcuuugggcugcaagaaa

SEQ ID NO: 127307 - RNA, 18 nt, Artificial Sequence
  Synthetic
gaggaaguaaggaagaaa

SEQ ID NO: 127308 - RNA, 19 nt, Artificial Sequence
  Synthetic
ggaggaaguaaggaagaaa

SEQ ID NO: 127309 - RNA, 20 nt, Artificial Sequence
  Synthetic
gggaggaaguaaggaagaaa

SEQ ID NO: 127310 - RNA, 23 nt, Artificial Sequence
  Synthetic
gaagggaggaaguaaggaagaaa

SEQ ID NO: 127311 - RNA, 24 nt, Artificial Sequence
  Synthetic
ggaagggaggaaguaaggaagaaa

SEQ ID NO: 127312 - RNA, 18 nt, Artificial Sequence
  Synthetic
gacuaaaccaggaagaaa

SEQ ID NO: 127313 - RNA, 19 nt, Artificial Sequence
  Synthetic
guaguaauauauuaagaaa

SEQ ID NO: 127314 - RNA, 22 nt, Artificial Sequence
  Synthetic
gcagagaagcucuaggcagaaa

SEQ ID NO: 127315 - RNA, 23 nt, Artificial Sequence
  Synthetic
ggcagagaagcucuaggcagaaa

SEQ ID NO: 127316 - RNA, 21 nt, Artificial Sequence
  Synthetic
gauugaauuucuccucagaaa

SEQ ID NO: 127317 - RNA, 22 nt, Artificial Sequence
  Synthetic
gaggaaaagaguugcagagaaa

SEQ ID NO: 127318 - RNA, 24 nt, Artificial Sequence
  Synthetic
gagaggaaaagaguugcagagaaa

SEQ ID NO: 127319 - RNA, 19 nt, Artificial Sequence
  Synthetic
gucuucagaggaggagaaa

SEQ ID NO: 127320 - RNA, 20 nt, Artificial Sequence
  Synthetic
gaagaugggauugggagaaa

SEQ ID NO: 127321 - RNA, 21 nt, Artificial Sequence
  Synthetic
gcuagcaaggauguggagaaa

SEQ ID NO: 127322 - RNA, 24 nt, Artificial Sequence
  Synthetic
gaugcuagcaaggauguggagaaa

SEQ ID NO: 127323 - RNA, 23 nt, Artificial Sequence
  Synthetic
gcaaaugugaccuuauguagaaa

SEQ ID NO: 127324 - RNA, 24 nt, Artificial Sequence
  Synthetic
gaaacacauuuuuucaaaaggaaa

SEQ ID NO: 127325 - RNA, 19 nt, Artificial Sequence
  Synthetic
gugaagaaugccaaggaaa

SEQ ID NO: 127326 - RNA, 18 nt, Artificial Sequence
  Synthetic
ggucauuuauacaggaaa

SEQ ID NO: 127327 - RNA, 19 nt, Artificial Sequence
  Synthetic
gggucauuuauacaggaaa

SEQ ID NO: 127328 - RNA, 23 nt, Artificial Sequence
  Synthetic
gacugggucauuuauacaggaaa

SEQ ID NO: 127329 - RNA, 20 nt, Artificial Sequence
  Synthetic
gucagggagauagcaggaaa

SEQ ID NO: 127330 - RNA, 18 nt, Artificial Sequence
  Synthetic
guggaaaaagaagggaaa

SEQ ID NO: 127331 - RNA, 19 nt, Artificial Sequence
  Synthetic
gguggaaaaagaagggaaa

SEQ ID NO: 127332 - RNA, 23 nt, Artificial Sequence
  Synthetic
guaccaagagaauucaauggaaa

SEQ ID NO: 127333 - RNA, 24 nt, Artificial Sequence
  Synthetic
gguaccaagagaauucaauggaaa

SEQ ID NO: 127334 - RNA, 20 nt, Artificial Sequence
  Synthetic
gaagaaaagaggucuggaaa

SEQ ID NO: 127335 - RNA, 21 nt, Artificial Sequence
  Synthetic
ggaagaaaagaggucuggaaa

SEQ ID NO: 127336 - RNA, 24 nt, Artificial Sequence
  Synthetic
gaccuuaauuuucucuucuggaaa

SEQ ID NO: 127337 - RNA, 24 nt, Artificial Sequence
  Synthetic
gaacuggaauacguggcuuggaaa

SEQ ID NO: 127338 - RNA, 20 nt, Artificial Sequence
  Synthetic
gacucauagaccaaaugaaa

SEQ ID NO: 127339 - RNA, 19 nt, Artificial Sequence
  Synthetic
gacauauagaucaaugaaa

SEQ ID NO: 127340 - RNA, 24 nt, Artificial Sequence
  Synthetic
gaauagacauauagaucaaugaaa

SEQ ID NO: 127341 - RNA, 21 nt, Artificial Sequence
  Synthetic
gaauacuauguggccaugaaa

SEQ ID NO: 127342 - RNA, 22 nt, Artificial Sequence
  Synthetic
ggaauacuauguggccaugaaa

SEQ ID NO: 127343 - RNA, 20 nt, Artificial Sequence
  Synthetic
gaagauaucaaaagaugaaa

SEQ ID NO: 127344 - RNA, 18 nt, Artificial Sequence
  Synthetic
guaacagaauaccugaaa

SEQ ID NO: 127345 - RNA, 22 nt, Artificial Sequence
  Synthetic
gcuuguaacagaauaccugaaa

SEQ ID NO: 127346 - RNA, 21 nt, Artificial Sequence
  Synthetic
gccauauguagaaagcugaaa

SEQ ID NO: 127347 - RNA, 18 nt, Artificial Sequence
  Synthetic
ggcuuugauagggugaaa

SEQ ID NO: 127348 - RNA, 22 nt, Artificial Sequence
  Synthetic
gcuuuuugagauuacugugaaa

SEQ ID NO: 127349 - RNA, 23 nt, Artificial Sequence
  Synthetic
ggcuuuuugagauuacugugaaa

SEQ ID NO: 127350 - RNA, 23 nt, Artificial Sequence
  Synthetic
gaaaauaaacacaaagaaauaaa

SEQ ID NO: 127351 - RNA, 19 nt, Artificial Sequence
  Synthetic
gacauuaguaaggaauaaa

SEQ ID NO: 127352 - RNA, 21 nt, Artificial Sequence
  Synthetic
guuccagaccaccauaauaaa

SEQ ID NO: 127353 - RNA, 20 nt, Artificial Sequence
  Synthetic
gaauacuaugcagccauaaa

SEQ ID NO: 127354 - RNA, 21 nt, Artificial Sequence
  Synthetic
ggaauacuaugcagccauaaa

SEQ ID NO: 127355 - RNA, 22 nt, Artificial Sequence
  Synthetic
gcuauaauagaaaugccauaaa

SEQ ID NO: 127356 - RNA, 20 nt, Artificial Sequence
  Synthetic
gaugaugcuggccucauaaa

SEQ ID NO: 127357 - RNA, 20 nt, Artificial Sequence
  Synthetic
gaugcugcuggccucauaaa

SEQ ID NO: 127358 - RNA, 21 nt, Artificial Sequence
  Synthetic
ggaugcugcuggccucauaaa

SEQ ID NO: 127359 - RNA, 20 nt, Artificial Sequence
  Synthetic
gaagaaaaaugugggauaaa

SEQ ID NO: 127360 - RNA, 21 nt, Artificial Sequence
  Synthetic
gacacaagaaaaaaugauaaa

SEQ ID NO: 127361 - RNA, 18 nt, Artificial Sequence
  Synthetic
gucccauaaaaauauaaa

SEQ ID NO: 127362 - RNA, 20 nt, Artificial Sequence
  Synthetic
gagucccauaaaaauauaaa

SEQ ID NO: 127363 - RNA, 18 nt, Artificial Sequence
  Synthetic
guguuaggugcauauaaa

SEQ ID NO: 127364 - RNA, 24 nt, Artificial Sequence
  Synthetic
gcaccaguguuaggugcauauaaa

SEQ ID NO: 127365 - RNA, 21 nt, Artificial Sequence
  Synthetic
guuuuuauuaaucuuucuaaa

SEQ ID NO: 127366 - RNA, 22 nt, Artificial Sequence
  Synthetic
gguuuuuauuaaucuuucuaaa

SEQ ID NO: 127367 - RNA, 21 nt, Artificial Sequence
  Synthetic
gcaaacuugaaaauagguaaa

SEQ ID NO: 127368 - RNA, 20 nt, Artificial Sequence
  Synthetic
gaccugucuagugcuguaaa

SEQ ID NO: 127369 - RNA, 22 nt, Artificial Sequence
  Synthetic
gugaccugucuagugcuguaaa

SEQ ID NO: 127370 - RNA, 23 nt, Artificial Sequence
  Synthetic
gcuuggcagggcauuguuguaaa

SEQ ID NO: 127371 - RNA, 21 nt, Artificial Sequence
  Synthetic
gcuuuguaauuuaaaauuaaa

SEQ ID NO: 127372 - RNA, 22 nt, Artificial Sequence
  Synthetic
ggcuuuguaauuuaaaauuaaa

SEQ ID NO: 127373 - RNA, 18 nt, Artificial Sequence
  Synthetic
gaaaaauucuacauuaaa

SEQ ID NO: 127374 - RNA, 22 nt, Artificial Sequence
  Synthetic
gaaauacuacacaaccauuaaa

SEQ ID NO: 127375 - RNA, 20 nt, Artificial Sequence
  Synthetic
gcugaaaaauauuuauuaaa

SEQ ID NO: 127376 - RNA, 20 nt, Artificial Sequence
  Synthetic
gaagaaaaauuauuguuaaa

SEQ ID NO: 127377 - RNA, 18 nt, Artificial Sequence
  Synthetic
gcaaauaagacauuuaaa

SEQ ID NO: 127378 - RNA, 19 nt, Artificial Sequence
  Synthetic
ggcaaauaagacauuuaaa

SEQ ID NO: 127379 - RNA, 18 nt, Artificial Sequence
  Synthetic
ggauucuaguauuuuaaa

SEQ ID NO: 127380 - RNA, 19 nt, Artificial Sequence
  Synthetic
gugaaaagauuauuuuaaa

SEQ ID NO: 127381 - RNA, 18 nt, Artificial Sequence
  Synthetic
gugcaauucauuuuuaaa

SEQ ID NO: 127382 - RNA, 20 nt, Artificial Sequence
  Synthetic
gucuugugccaguuuuuaaa

SEQ ID NO: 127383 - RNA, 19 nt, Artificial Sequence
  Synthetic
gccagaaauaaagaaacaa

SEQ ID NO: 127384 - RNA, 18 nt, Artificial Sequence
  Synthetic
gaugacugccagcaacaa

SEQ ID NO: 127385 - RNA, 18 nt, Artificial Sequence
  Synthetic
gaaaaaggcgagacacaa

SEQ ID NO: 127386 - RNA, 22 nt, Artificial Sequence
  Synthetic
gaaugaaaaaggcgagacacaa

SEQ ID NO: 127387 - RNA, 23 nt, Artificial Sequence
  Synthetic
gaaaaugugguacauauacacaa

SEQ ID NO: 127388 - RNA, 24 nt, Artificial Sequence
  Synthetic
gcaccccuguugcgaguuccacaa

SEQ ID NO: 127389 - RNA, 22 nt, Artificial Sequence
  Synthetic
gauacuucucaaaagaagacaa

SEQ ID NO: 127390 - RNA, 18 nt, Artificial Sequence
  Synthetic
gcaaggccgcagagacaa

SEQ ID NO: 127391 - RNA, 19 nt, Artificial Sequence
  Synthetic
ggcaaggccgcagagacaa

SEQ ID NO: 127392 - RNA, 22 nt, Artificial Sequence
  Synthetic
gcuggcaaggccgcagagacaa

SEQ ID NO: 127393 - RNA, 18 nt, Artificial Sequence
  Synthetic
gauuuugggcugagacaa

SEQ ID NO: 127394 - RNA, 20 nt, Artificial Sequence
  Synthetic
gagauuuugggcugagacaa

SEQ ID NO: 127395 - RNA, 21 nt, Artificial Sequence
  Synthetic
ggagauuuugggcugagacaa

SEQ ID NO: 127396 - RNA, 18 nt, Artificial Sequence
  Synthetic
guguguguugaaugacaa

SEQ ID NO: 127397 - RNA, 20 nt, Artificial Sequence
  Synthetic
guguguguguugaaugacaa

SEQ ID NO: 127398 - RNA, 22 nt, Artificial Sequence
  Synthetic
guguguguguguugaaugacaa

SEQ ID NO: 127399 - RNA, 24 nt, Artificial Sequence
  Synthetic
guguguguguguguugaaugacaa

SEQ ID NO: 127400 - RNA, 18 nt, Artificial Sequence
  Synthetic
gccuguaugaauauacaa

SEQ ID NO: 127401 - RNA, 21 nt, Artificial Sequence
  Synthetic
gauuucucaaauaacuuacaa

SEQ ID NO: 127402 - RNA, 23 nt, Artificial Sequence
  Synthetic
gugauuucucaaauaacuuacaa

SEQ ID NO: 127403 - RNA, 24 nt, Artificial Sequence
  Synthetic
ggugauuucucaaauaacuuacaa

SEQ ID NO: 127404 - RNA, 19 nt, Artificial Sequence
  Synthetic
gaacaacaccaucaaccaa

SEQ ID NO: 127405 - RNA, 24 nt, Artificial Sequence
  Synthetic
gaacugaacaacaccaucaaccaa

SEQ ID NO: 127406 - RNA, 23 nt, Artificial Sequence
  Synthetic
gaacuaauuuacauucccaccaa

SEQ ID NO: 127407 - RNA, 18 nt, Artificial Sequence
  Synthetic
gugacuaguugugaccaa

SEQ ID NO: 127408 - RNA, 21 nt, Artificial Sequence
  Synthetic
gauuuuugacaaggguaccaa

SEQ ID NO: 127409 - RNA, 18 nt, Artificial Sequence
  Synthetic
gccuccccuuccucccaa

SEQ ID NO: 127410 - RNA, 22 nt, Artificial Sequence
  Synthetic
gcuuucugggaucagcucccaa

SEQ ID NO: 127411 - RNA, 23 nt, Artificial Sequence
  Synthetic
ggcuuucugggaucagcucccaa

SEQ ID NO: 127412 - RNA, 18 nt, Artificial Sequence
  Synthetic
gccaccaugccuggccaa

SEQ ID NO: 127413 - RNA, 20 nt, Artificial Sequence
  Synthetic
gagccaccaugccuggccaa

SEQ ID NO: 127414 - RNA, 22 nt, Artificial Sequence
  Synthetic
gugagccaccaugccuggccaa

SEQ ID NO: 127415 - RNA, 19 nt, Artificial Sequence
  Synthetic
guaauucaauuaccuccaa

SEQ ID NO: 127416 - RNA, 22 nt, Artificial Sequence
  Synthetic
guuuuugaaaaaaaaaaagcaa

SEQ ID NO: 127417 - RNA, 20 nt, Artificial Sequence
  Synthetic
gcuuugggaggccaaggcaa

SEQ ID NO: 127418 - RNA, 22 nt, Artificial Sequence
  Synthetic
gugcuuugggaggccaaggcaa

SEQ ID NO: 127419 - RNA, 22 nt, Artificial Sequence
  Synthetic
gcuacucaggaggcuaaggcaa

SEQ ID NO: 127420 - RNA, 22 nt, Artificial Sequence
  Synthetic
gcacuuugcgaggccgaggcaa

SEQ ID NO: 127421 - RNA, 18 nt, Artificial Sequence
  Synthetic
gagaccagguggaggcaa

SEQ ID NO: 127422 - RNA, 20 nt, Artificial Sequence
  Synthetic
gagagaccagguggaggcaa

SEQ ID NO: 127423 - RNA, 21 nt, Artificial Sequence
  Synthetic
ggagagaccagguggaggcaa

SEQ ID NO: 127424 - RNA, 22 nt, Artificial Sequence
  Synthetic
gggagagaccagguggaggcaa

SEQ ID NO: 127425 - RNA, 22 nt, Artificial Sequence
  Synthetic
gcuacuugggaagcugaggcaa

SEQ ID NO: 127426 - RNA, 18 nt, Artificial Sequence
  Synthetic
gggaggaggcugaggcaa

SEQ ID NO: 127427 - RNA, 21 nt, Artificial Sequence
  Synthetic
guucaagagcaaccugggcaa

SEQ ID NO: 127428 - RNA, 24 nt, Artificial Sequence
  Synthetic
gaaguucaagagcaaccugggcaa

SEQ ID NO: 127429 - RNA, 18 nt, Artificial Sequence
  Synthetic
gcacuccagccugggcaa

SEQ ID NO: 127430 - RNA, 21 nt, Artificial Sequence
  Synthetic
gcugcacuccagccugggcaa

SEQ ID NO: 127431 - RNA, 18 nt, Artificial Sequence
  Synthetic
gcauuccagccugggcaa

SEQ ID NO: 127432 - RNA, 24 nt, Artificial Sequence
  Synthetic
gccacugcauuccagccugggcaa

SEQ ID NO: 127433 - RNA, 19 nt, Artificial Sequence
  Synthetic
gacaacacauucuuggcaa

SEQ ID NO: 127434 - RNA, 20 nt, Artificial Sequence
  Synthetic
ggacaacacauucuuggcaa

SEQ ID NO: 127435 - RNA, 19 nt, Artificial Sequence
  Synthetic
guuuuugaauuuuaugcaa

SEQ ID NO: 127436 - RNA, 23 nt, Artificial Sequence
  Synthetic
gccaguuuuugaauuuuaugcaa

SEQ ID NO: 127437 - RNA, 18 nt, Artificial Sequence
  Synthetic
gcacagggaccacugcaa

SEQ ID NO: 127438 - RNA, 19 nt, Artificial Sequence
  Synthetic
ggcacagggaccacugcaa

SEQ ID NO: 127439 - RNA, 21 nt, Artificial Sequence
  Synthetic
gaacuccccaccccaaaucaa

SEQ ID NO: 127440 - RNA, 20 nt, Artificial Sequence
  Synthetic
guugccaaaucugacaucaa

SEQ ID NO: 127441 - RNA, 18 nt, Artificial Sequence
  Synthetic
ggcaaaauaaaugaucaa

SEQ ID NO: 127442 - RNA, 22 nt, Artificial Sequence
  Synthetic
gcauggcaaaauaaaugaucaa

SEQ ID NO: 127443 - RNA, 24 nt, Artificial Sequence
  Synthetic
gcaaccuccaccuccugugaucaa

SEQ ID NO: 127444 - RNA, 24 nt, Artificial Sequence
  Synthetic
gaaacucagugaugaguaacucaa

SEQ ID NO: 127445 - RNA, 20 nt, Artificial Sequence
  Synthetic
gauccagaaaauagccucaa

SEQ ID NO: 127446 - RNA, 18 nt, Artificial Sequence
  Synthetic
gguagguguauaugucaa

SEQ ID NO: 127447 - RNA, 24 nt, Artificial Sequence
  Synthetic
guacaugguagguguauaugucaa

SEQ ID NO: 127448 - RNA, 22 nt, Artificial Sequence
  Synthetic
gccaucucuuuuguuauuucaa

SEQ ID NO: 127449 - RNA, 20 nt, Artificial Sequence
  Synthetic
guucuguguuugccuuucaa

SEQ ID NO: 127450 - RNA, 18 nt, Artificial Sequence
  Synthetic
gagcagggaaagaaagaa

SEQ ID NO: 127451 - RNA, 20 nt, Artificial Sequence
  Synthetic
gaaagaaaaaaagacaagaa

SEQ ID NO: 127452 - RNA, 21 nt, Artificial Sequence
  Synthetic
ggaaagaaaaaaagacaagaa

SEQ ID NO: 127453 - RNA, 19 nt, Artificial Sequence
  Synthetic
guaggggaaaaaagaagaa

SEQ ID NO: 127454 - RNA, 19 nt, Artificial Sequence
  Synthetic
gaaacccuacaagccagaa

SEQ ID NO: 127455 - RNA, 22 nt, Artificial Sequence
  Synthetic
gcagaaacccuacaagccagaa

SEQ ID NO: 127456 - RNA, 23 nt, Artificial Sequence
  Synthetic
ggcagaaacccuacaagccagaa

SEQ ID NO: 127457 - RNA, 22 nt, Artificial Sequence
  Synthetic
guagcagauugggggcagagaa

SEQ ID NO: 127458 - RNA, 23 nt, Artificial Sequence
  Synthetic
gguagcagauugggggcagagaa

SEQ ID NO: 127459 - RNA, 24 nt, Artificial Sequence
  Synthetic
ggguagcagauugggggcagagaa

SEQ ID NO: 127460 - RNA, 20 nt, Artificial Sequence
  Synthetic
guacacauagaccaauagaa

SEQ ID NO: 127461 - RNA, 18 nt, Artificial Sequence
  Synthetic
guucauaaaauaauagaa

SEQ ID NO: 127462 - RNA, 19 nt, Artificial Sequence
  Synthetic
gaaacccuacaagcuagaa

SEQ ID NO: 127463 - RNA, 22 nt, Artificial Sequence
  Synthetic
gcagaaacccuacaagcuagaa

SEQ ID NO: 127464 - RNA, 18 nt, Artificial Sequence
  Synthetic
gauucaguagacuuagaa

SEQ ID NO: 127465 - RNA, 22 nt, Artificial Sequence
  Synthetic
guuuuaaauaccuauuuuagaa

SEQ ID NO: 127466 - RNA, 18 nt, Artificial Sequence
  Synthetic
gcacuuugagaggccgaa

SEQ ID NO: 127467 - RNA, 21 nt, Artificial Sequence
  Synthetic
guccucuuuccaaauaaggaa

SEQ ID NO: 127468 - RNA, 22 nt, Artificial Sequence
  Synthetic
gaaaaagaaauuguaccaggaa

SEQ ID NO: 127469 - RNA, 18 nt, Artificial Sequence
  Synthetic
gagacagagagagaggaa

SEQ ID NO: 127470 - RNA, 20 nt, Artificial Sequence
  Synthetic
gagagacagagagagaggaa

SEQ ID NO: 127471 - RNA, 22 nt, Artificial Sequence
  Synthetic
gagagagacagagagagaggaa

SEQ ID NO: 127472 - RNA, 24 nt, Artificial Sequence
  Synthetic
gagagagagacagagagagaggaa

SEQ ID NO: 127473 - RNA, 18 nt, Artificial Sequence
  Synthetic
gaggguggaaugagggaa

SEQ ID NO: 127474 - RNA, 20 nt, Artificial Sequence
  Synthetic
gagaggguggaaugagggaa

SEQ ID NO: 127475 - RNA, 18 nt, Artificial Sequence
  Synthetic
gaaaaaauauauagggaa

SEQ ID NO: 127476 - RNA, 20 nt, Artificial Sequence
  Synthetic
gaagcugaggguugggggaa

SEQ ID NO: 127477 - RNA, 20 nt, Artificial Sequence
  Synthetic
gaaaagaaagguauggggaa

SEQ ID NO: 127478 - RNA, 18 nt, Artificial Sequence
  Synthetic
gcuggaaaaggcauggaa

SEQ ID NO: 127479 - RNA, 18 nt, Artificial Sequence
  Synthetic
gauaauugaaucauggaa

SEQ ID NO: 127480 - RNA, 20 nt, Artificial Sequence
  Synthetic
gaaacagccuucuauuggaa

SEQ ID NO: 127481 - RNA, 23 nt, Artificial Sequence
  Synthetic
gacgaaacagccuucuauuggaa

SEQ ID NO: 127482 - RNA, 23 nt, Artificial Sequence
  Synthetic
gaaaauguggaagugacuuggaa

SEQ ID NO: 127483 - RNA, 19 nt, Artificial Sequence
  Synthetic
gaaauacaaaucaaaugaa

SEQ ID NO: 127484 - RNA, 20 nt, Artificial Sequence
  Synthetic
guuaaugaaauucaaaugaa

SEQ ID NO: 127485 - RNA, 22 nt, Artificial Sequence
  Synthetic
gaguuaaugaaauucaaaugaa

SEQ ID NO: 127486 - RNA, 18 nt, Artificial Sequence
  Synthetic
gguuguuauuagaaugaa

SEQ ID NO: 127487 - RNA, 19 nt, Artificial Sequence
  Synthetic
ggguuguuauuagaaugaa

SEQ ID NO: 127488 - RNA, 21 nt, Artificial Sequence
  Synthetic
guuaaaacuucaacauaugaa

SEQ ID NO: 127489 - RNA, 22 nt, Artificial Sequence
  Synthetic
gguuaaaacuucaacauaugaa

SEQ ID NO: 127490 - RNA, 23 nt, Artificial Sequence
  Synthetic
ggguuaaaacuucaacauaugaa

SEQ ID NO: 127491 - RNA, 24 nt, Artificial Sequence
  Synthetic
gggguuaaaacuucaacauaugaa

SEQ ID NO: 127492 - RNA, 19 nt, Artificial Sequence
  Synthetic
guuuucuugucauacugaa

SEQ ID NO: 127493 - RNA, 22 nt, Artificial Sequence
  Synthetic
gaaguagcauuuuggaguugaa

SEQ ID NO: 127494 - RNA, 24 nt, Artificial Sequence
  Synthetic
guuuucccagcaccauugguugaa

SEQ ID NO: 127495 - RNA, 20 nt, Artificial Sequence
  Synthetic
gucaguaaauaguuguugaa

SEQ ID NO: 127496 - RNA, 24 nt, Artificial Sequence
  Synthetic
gcccacauggugaagcauuuugaa

SEQ ID NO: 127497 - RNA, 21 nt, Artificial Sequence
  Synthetic
gaaauuauaaaauauuuugaa

SEQ ID NO: 127498 - RNA, 22 nt, Artificial Sequence
  Synthetic
ggaaauuauaaaauauuuugaa

SEQ ID NO: 127499 - RNA, 22 nt, Artificial Sequence
  Synthetic
gacacacauaggcucaaaauaa

SEQ ID NO: 127500 - RNA, 24 nt, Artificial Sequence
  Synthetic
gagacacacauaggcucaaaauaa

SEQ ID NO: 127501 - RNA, 18 nt, Artificial Sequence
  Synthetic
guugaguuuuuuuaauaa

SEQ ID NO: 127502 - RNA, 20 nt, Artificial Sequence
  Synthetic
gcuaagaguuuuucucauaa

SEQ ID NO: 127503 - RNA, 18 nt, Artificial Sequence
  Synthetic
ggagccaggugcagauaa

SEQ ID NO: 127504 - RNA, 20 nt, Artificial Sequence
  Synthetic
guggagccaggugcagauaa

SEQ ID NO: 127505 - RNA, 21 nt, Artificial Sequence
  Synthetic
gguggagccaggugcagauaa

SEQ ID NO: 127506 - RNA, 22 nt, Artificial Sequence
  Synthetic
ggguggagccaggugcagauaa

SEQ ID NO: 127507 - RNA, 22 nt, Artificial Sequence
  Synthetic
guguguguguuguggaggauaa

SEQ ID NO: 127508 - RNA, 24 nt, Artificial Sequence
  Synthetic
guguguguguguuguggaggauaa

SEQ ID NO: 127509 - RNA, 18 nt, Artificial Sequence
  Synthetic
gucauuaaauaaugauaa

SEQ ID NO: 127510 - RNA, 19 nt, Artificial Sequence
  Synthetic
ggucauuaaauaaugauaa

SEQ ID NO: 127511 - RNA, 22 nt, Artificial Sequence
  Synthetic
gaaggucauuaaauaaugauaa

SEQ ID NO: 127512 - RNA, 20 nt, Artificial Sequence
  Synthetic
guauucaagauuuuugauaa

SEQ ID NO: 127513 - RNA, 20 nt, Artificial Sequence
  Synthetic
guucauguauguugcuauaa

SEQ ID NO: 127514 - RNA, 22 nt, Artificial Sequence
  Synthetic
gcuucauuuuccuugucuauaa

SEQ ID NO: 127515 - RNA, 24 nt, Artificial Sequence
  Synthetic
gugcuucauuuuccuugucuauaa

SEQ ID NO: 127516 - RNA, 20 nt, Artificial Sequence
  Synthetic
guacauuuaaaaauaacuaa

SEQ ID NO: 127517 - RNA, 20 nt, Artificial Sequence
  Synthetic
gcuggaggucauuauccuaa

SEQ ID NO: 127518 - RNA, 23 nt, Artificial Sequence
  Synthetic
gcagcuggaggucauuauccuaa

SEQ ID NO: 127519 - RNA, 18 nt, Artificial Sequence
  Synthetic
gacuuccucuucuccuaa

SEQ ID NO: 127520 - RNA, 22 nt, Artificial Sequence
  Synthetic
gacucuugaaauuauuuccuaa

SEQ ID NO: 127521 - RNA, 23 nt, Artificial Sequence
  Synthetic
ggacucuugaaauuauuuccuaa

SEQ ID NO: 127522 - RNA, 18 nt, Artificial Sequence
  Synthetic
gacuuccucuuuuccuaa

SEQ ID NO: 127523 - RNA, 24 nt, Artificial Sequence
  Synthetic
guuuuauauuuaaaacuuugcuaa

SEQ ID NO: 127524 - RNA, 24 nt, Artificial Sequence
  Synthetic
gcacuaugcacaauagcaaaguaa

SEQ ID NO: 127525 - RNA, 21 nt, Artificial Sequence
  Synthetic
gcaaguuuauuaagaaaguaa

SEQ ID NO: 127526 - RNA, 18 nt, Artificial Sequence
  Synthetic
ggacccagggggaaguaa

SEQ ID NO: 127527 - RNA, 19 nt, Artificial Sequence
  Synthetic
gggacccagggggaaguaa

SEQ ID NO: 127528 - RNA, 21 nt, Artificial Sequence
  Synthetic
gagggacccagggggaaguaa

SEQ ID NO: 127529 - RNA, 22 nt, Artificial Sequence
  Synthetic
ggagggacccagggggaaguaa

SEQ ID NO: 127530 - RNA, 23 nt, Artificial Sequence
  Synthetic
gggagggacccagggggaaguaa

SEQ ID NO: 127531 - RNA, 18 nt, Artificial Sequence
  Synthetic
gcauuaaugaauaaguaa

SEQ ID NO: 127532 - RNA, 22 nt, Artificial Sequence
  Synthetic
gaaagcauuaaugaauaaguaa

SEQ ID NO: 127533 - RNA, 18 nt, Artificial Sequence
  Synthetic
gggcuauaugcccaguaa

SEQ ID NO: 127534 - RNA, 21 nt, Artificial Sequence
  Synthetic
gaacucuuguacagagaguaa

SEQ ID NO: 127535 - RNA, 23 nt, Artificial Sequence
  Synthetic
gcaacuggaggccauuaucguaa

SEQ ID NO: 127536 - RNA, 21 nt, Artificial Sequence
  Synthetic
gcaaagauuggaagaagguaa

SEQ ID NO: 127537 - RNA, 23 nt, Artificial Sequence
  Synthetic
gagcaaagauuggaagaagguaa

SEQ ID NO: 127538 - RNA, 18 nt, Artificial Sequence
  Synthetic
ggacccagugagagguaa

SEQ ID NO: 127539 - RNA, 19 nt, Artificial Sequence
  Synthetic
gggacccagugagagguaa

SEQ ID NO: 127540 - RNA, 21 nt, Artificial Sequence
  Synthetic
gagggacccagugagagguaa

SEQ ID NO: 127541 - RNA, 22 nt, Artificial Sequence
  Synthetic
ggagggacccagugagagguaa

SEQ ID NO: 127542 - RNA, 23 nt, Artificial Sequence
  Synthetic
gggagggacccagugagagguaa

SEQ ID NO: 127543 - RNA, 18 nt, Artificial Sequence
  Synthetic
gagaccagguggagguaa

SEQ ID NO: 127544 - RNA, 20 nt, Artificial Sequence
  Synthetic
gagagaccagguggagguaa

SEQ ID NO: 127545 - RNA, 22 nt, Artificial Sequence
  Synthetic
gagagagaccagguggagguaa

SEQ ID NO: 127546 - RNA, 23 nt, Artificial Sequence
  Synthetic
ggagagagaccagguggagguaa

SEQ ID NO: 127547 - RNA, 24 nt, Artificial Sequence
  Synthetic
gggagagagaccagguggagguaa

SEQ ID NO: 127548 - RNA, 24 nt, Artificial Sequence
  Synthetic
gacuacuuuagauaccucauguaa

SEQ ID NO: 127549 - RNA, 21 nt, Artificial Sequence
  Synthetic
gcaaccauagacaauauguaa

SEQ ID NO: 127550 - RNA, 21 nt, Artificial Sequence
  Synthetic
guaaccauagacaauauguaa

SEQ ID NO: 127551 - RNA, 22 nt, Artificial Sequence
  Synthetic
guccauuugcuguugcuuguaa

SEQ ID NO: 127552 - RNA, 22 nt, Artificial Sequence
  Synthetic
gcaacuucucguguaguuguaa

SEQ ID NO: 127553 - RNA, 23 nt, Artificial Sequence
  Synthetic
ggcaacuucucguguaguuguaa

SEQ ID NO: 127554 - RNA, 19 nt, Artificial Sequence
  Synthetic
guucaaaaauaaaaauuaa

SEQ ID NO: 127555 - RNA, 20 nt, Artificial Sequence
  Synthetic
guauuucauuuuuaaauuaa

SEQ ID NO: 127556 - RNA, 18 nt, Artificial Sequence
  Synthetic
guaacuuacauggauuaa

SEQ ID NO: 127557 - RNA, 24 nt, Artificial Sequence
  Synthetic
guacuaugcuuacuaccugguuaa

SEQ ID NO: 127558 - RNA, 19 nt, Artificial Sequence
  Synthetic
guagaaaauuuaaauuuaa

SEQ ID NO: 127559 - RNA, 21 nt, Artificial Sequence
  Synthetic
gaaucacaaucugcauuuuaa

SEQ ID NO: 127560 - RNA, 20 nt, Artificial Sequence
  Synthetic
guaauucuuguauauuuuaa

SEQ ID NO: 127561 - RNA, 23 nt, Artificial Sequence
  Synthetic
gcaugaucucaaucauguuuuaa

SEQ ID NO: 127562 - RNA, 24 nt, Artificial Sequence
  Synthetic
ggcaugaucucaaucauguuuuaa

SEQ ID NO: 127563 - RNA, 24 nt, Artificial Sequence
  Synthetic
gcaucaaaaauauucagaaaaaca

SEQ ID NO: 127564 - RNA, 20 nt, Artificial Sequence
  Synthetic
guuuucaaucuaagaaaaca

SEQ ID NO: 127565 - RNA, 24 nt, Artificial Sequence
  Synthetic
guaaguuuucaaucuaagaaaaca

SEQ ID NO: 127566 - RNA, 24 nt, Artificial Sequence
  Synthetic
gacauucucagauuaaggaaaaca

SEQ ID NO: 127567 - RNA, 22 nt, Artificial Sequence
  Synthetic
gacucugucucaaaaacaaaca

SEQ ID NO: 127568 - RNA, 23 nt, Artificial Sequence
  Synthetic
gcacaagacagccccccacaaca

SEQ ID NO: 127569 - RNA, 22 nt, Artificial Sequence
  Synthetic
gaacauuguugaaaugacaaca

SEQ ID NO: 127570 - RNA, 24 nt, Artificial Sequence
  Synthetic
gugaacauuguugaaaugacaaca

SEQ ID NO: 127571 - RNA, 18 nt, Artificial Sequence
  Synthetic
gaaaaauaaaucucaaca

SEQ ID NO: 127572 - RNA, 23 nt, Artificial Sequence
  Synthetic
gcucccacuuauaaaugagaaca

SEQ ID NO: 127573 - RNA, 19 nt, Artificial Sequence
  Synthetic
gacauugaacacucgaaca

SEQ ID NO: 127574 - RNA, 20 nt, Artificial Sequence
  Synthetic
ggacauugaacacucgaaca

SEQ ID NO: 127575 - RNA, 22 nt, Artificial Sequence
  Synthetic
gaggacauugaacacucgaaca

SEQ ID NO: 127576 - RNA, 19 nt, Artificial Sequence
  Synthetic
gauggaagagacuggaaca

SEQ ID NO: 127577 - RNA, 20 nt, Artificial Sequence
  Synthetic
gaaagcccaucagacuaaca

SEQ ID NO: 127578 - RNA, 19 nt, Artificial Sequence
  Synthetic
gaagcccaucagacuaaca

SEQ ID NO: 127579 - RNA, 20 nt, Artificial Sequence
  Synthetic
ggaagcccaucagacuaaca

SEQ ID NO: 127580 - RNA, 21 nt, Artificial Sequence
  Synthetic
gggaagcccaucagacuaaca

SEQ ID NO: 127581 - RNA, 20 nt, Artificial Sequence
  Synthetic
guaaauuaauuuaaaacaca

SEQ ID NO: 127582 - RNA, 18 nt, Artificial Sequence
  Synthetic
gggagccuccaucacaca

SEQ ID NO: 127583 - RNA, 19 nt, Artificial Sequence
  Synthetic
guggggucggagcuccaca

SEQ ID NO: 127584 - RNA, 19 nt, Artificial Sequence
  Synthetic
gccucaccccggaagcaca

SEQ ID NO: 127585 - RNA, 22 nt, Artificial Sequence
  Synthetic
gucgccucaccccggaagcaca

SEQ ID NO: 127586 - RNA, 20 nt, Artificial Sequence
  Synthetic
gaaaaggauacugaggcaca

SEQ ID NO: 127587 - RNA, 22 nt, Artificial Sequence
  Synthetic
gagaaaaggauacugaggcaca

SEQ ID NO: 127588 - RNA, 18 nt, Artificial Sequence
  Synthetic
ggcaagggcaagaucaca

SEQ ID NO: 127589 - RNA, 18 nt, Artificial Sequence
  Synthetic
gcauucuaaaaugucaca

SEQ ID NO: 127590 - RNA, 20 nt, Artificial Sequence
  Synthetic
gugcauucuaaaaugucaca

SEQ ID NO: 127591 - RNA, 18 nt, Artificial Sequence
  Synthetic
guuacuuuuauuuucaca

SEQ ID NO: 127592 - RNA, 20 nt, Artificial Sequence
  Synthetic
guguuacuuuuauuuucaca

SEQ ID NO: 127593 - RNA, 20 nt, Artificial Sequence
  Synthetic
gaaagaaaccaagaaagaca

SEQ ID NO: 127594 - RNA, 23 nt, Artificial Sequence
  Synthetic
gauuuucauauuuuaagaagaca

SEQ ID NO: 127595 - RNA, 18 nt, Artificial Sequence
  Synthetic
gugggcccucaccagaca

SEQ ID NO: 127596 - RNA, 20 nt, Artificial Sequence
  Synthetic
gagugggcccucaccagaca

SEQ ID NO: 127597 - RNA, 21 nt, Artificial Sequence
  Synthetic
ggagugggcccucaccagaca

SEQ ID NO: 127598 - RNA, 21 nt, Artificial Sequence
  Synthetic
gacauuuucuuucuggagaca

SEQ ID NO: 127599 - RNA, 20 nt, Artificial Sequence
  Synthetic
gccuccagaagucugagaca

SEQ ID NO: 127600 - RNA, 20 nt, Artificial Sequence
  Synthetic
gcaaugagaacacuuggaca

SEQ ID NO: 127601 - RNA, 22 nt, Artificial Sequence
  Synthetic
gagcaaugagaacacuuggaca

SEQ ID NO: 127602 - RNA, 19 nt, Artificial Sequence
  Synthetic
gcagaaaaaaaaagugaca

SEQ ID NO: 127603 - RNA, 20 nt, Artificial Sequence
  Synthetic
ggcagaaaaaaaaagugaca

SEQ ID NO: 127604 - RNA, 23 nt, Artificial Sequence
  Synthetic
gaacaacugugaaaugguugaca

SEQ ID NO: 127605 - RNA, 19 nt, Artificial Sequence
  Synthetic
gacuuuucugguuuugaca

SEQ ID NO: 127606 - RNA, 20 nt, Artificial Sequence
  Synthetic
ggacuuuucugguuuugaca

SEQ ID NO: 127607 - RNA, 21 nt, Artificial Sequence
  Synthetic
gaaucagauuuuuuuaauaca

SEQ ID NO: 127608 - RNA, 22 nt, Artificial Sequence
  Synthetic
ggaaucagauuuuuuuaauaca

SEQ ID NO: 127609 - RNA, 22 nt, Artificial Sequence
  Synthetic
gaaaaugugguguauucauaca

SEQ ID NO: 127610 - RNA, 18 nt, Artificial Sequence
  Synthetic
gaaauaaagaaauauaca

SEQ ID NO: 127611 - RNA, 20 nt, Artificial Sequence
  Synthetic
gagaaauaaagaaauauaca

SEQ ID NO: 127612 - RNA, 20 nt, Artificial Sequence
  Synthetic
gcuucauccaugucccuaca

SEQ ID NO: 127613 - RNA, 22 nt, Artificial Sequence
  Synthetic
gucacugacaguaucugcuaca

SEQ ID NO: 127614 - RNA, 23 nt, Artificial Sequence
  Synthetic
ggucacugacaguaucugcuaca

SEQ ID NO: 127615 - RNA, 19 nt, Artificial Sequence
  Synthetic
gcaaggccccaucucuaca

SEQ ID NO: 127616 - RNA, 20 nt, Artificial Sequence
  Synthetic
ggcaaggccccaucucuaca

SEQ ID NO: 127617 - RNA, 20 nt, Artificial Sequence
  Synthetic
gcaaaacacccugcaguaca

SEQ ID NO: 127618 - RNA, 23 nt, Artificial Sequence
  Synthetic
gcugcaaaacacccugcaguaca

SEQ ID NO: 127619 - RNA, 24 nt, Artificial Sequence
  Synthetic
gcucucuuuuuguucucauguaca

SEQ ID NO: 127620 - RNA, 19 nt, Artificial Sequence
  Synthetic
gaaaaaaaaaauguguaca

SEQ ID NO: 127621 - RNA, 21 nt, Artificial Sequence
  Synthetic
gaaaagccccuuauaaaacca

SEQ ID NO: 127622 - RNA, 22 nt, Artificial Sequence
  Synthetic
ggaaaagccccuuauaaaacca

SEQ ID NO: 127623 - RNA, 23 nt, Artificial Sequence
  Synthetic
gggaaaagccccuuauaaaacca

SEQ ID NO: 127624 - RNA, 24 nt, Artificial Sequence
  Synthetic
ggggaaaagccccuuauaaaacca

SEQ ID NO: 127625 - RNA, 18 nt, Artificial Sequence
  Synthetic
gucaaacucguagaacca

SEQ ID NO: 127626 - RNA, 18 nt, Artificial Sequence
  Synthetic
ggagaaucacuugaacca

SEQ ID NO: 127627 - RNA, 21 nt, Artificial Sequence
  Synthetic
gcaggagaaucacuugaacca

SEQ ID NO: 127628 - RNA, 22 nt, Artificial Sequence
  Synthetic
ggcaggagaaucacuugaacca

SEQ ID NO: 127629 - RNA, 24 nt, Artificial Sequence
  Synthetic
gaggcaggagaaucacuugaacca

SEQ ID NO: 127630 - RNA, 18 nt, Artificial Sequence
  Synthetic
gguggcacauacacacca

SEQ ID NO: 127631 - RNA, 23 nt, Artificial Sequence
  Synthetic
gaaaagguggcacauacacacca

SEQ ID NO: 127632 - RNA, 23 nt, Artificial Sequence
  Synthetic
gaaaacguggcacagauacacca

SEQ ID NO: 127633 - RNA, 23 nt, Artificial Sequence
  Synthetic
gaaaauguggcacauauccacca

SEQ ID NO: 127634 - RNA, 19 nt, Artificial Sequence
  Synthetic
gauaagaggauaaucacca

SEQ ID NO: 127635 - RNA, 21 nt, Artificial Sequence
  Synthetic
gagauaagaggauaaucacca

SEQ ID NO: 127636 - RNA, 18 nt, Artificial Sequence
  Synthetic
ggccaaggcgggugacca

SEQ ID NO: 127637 - RNA, 20 nt, Artificial Sequence
  Synthetic
gaggccaaggcgggugacca

SEQ ID NO: 127638 - RNA, 21 nt, Artificial Sequence
  Synthetic
ggaggccaaggcgggugacca

SEQ ID NO: 127639 - RNA, 22 nt, Artificial Sequence
  Synthetic
gggaggccaaggcgggugacca

SEQ ID NO: 127640 - RNA, 18 nt, Artificial Sequence
  Synthetic
gaguaaaaaugaaaccca

SEQ ID NO: 127641 - RNA, 20 nt, Artificial Sequence
  Synthetic
gagaguaaaaaugaaaccca

SEQ ID NO: 127642 - RNA, 22 nt, Artificial Sequence
  Synthetic
gagagaguaaaaaugaaaccca

SEQ ID NO: 127643 - RNA, 18 nt, Artificial Sequence
  Synthetic
gccuucagaaaugaccca

SEQ ID NO: 127644 - RNA, 20 nt, Artificial Sequence
  Synthetic
gagccuucagaaaugaccca

SEQ ID NO: 127645 - RNA, 23 nt, Artificial Sequence
  Synthetic
gcccuauccaaauccuugaccca

SEQ ID NO: 127646 - RNA, 20 nt, Artificial Sequence
  Synthetic
gcagcucagaugagccccca

SEQ ID NO: 127647 - RNA, 19 nt, Artificial Sequence
  Synthetic
gcagcucugcugacgccca

SEQ ID NO: 127648 - RNA, 20 nt, Artificial Sequence
  Synthetic
ggcagcucugcugacgccca

SEQ ID NO: 127649 - RNA, 19 nt, Artificial Sequence
  Synthetic
gcuguuuuuuuuucuccca

SEQ ID NO: 127650 - RNA, 20 nt, Artificial Sequence
  Synthetic
gcauuucuaucaaauuccca

SEQ ID NO: 127651 - RNA, 24 nt, Artificial Sequence
  Synthetic
gcacuauucacaauagaaaagcca

SEQ ID NO: 127652 - RNA, 19 nt, Artificial Sequence
  Synthetic
gaguucagcagugcagcca

SEQ ID NO: 127653 - RNA, 22 nt, Artificial Sequence
  Synthetic
guagaguucagcagugcagcca

SEQ ID NO: 127654 - RNA, 23 nt, Artificial Sequence
  Synthetic
gguagaguucagcagugcagcca

SEQ ID NO: 127655 - RNA, 18 nt, Artificial Sequence
  Synthetic
ggagaaccgcuugagcca

SEQ ID NO: 127656 - RNA, 21 nt, Artificial Sequence
  Synthetic
gcaggagaaccgcuugagcca

SEQ ID NO: 127657 - RNA, 22 nt, Artificial Sequence
  Synthetic
ggcaggagaaccgcuugagcca

SEQ ID NO: 127658 - RNA, 24 nt, Artificial Sequence
  Synthetic
gaggcaggagaaccgcuugagcca

SEQ ID NO: 127659 - RNA, 19 nt, Artificial Sequence
  Synthetic
gugagcuaugauagcgcca

SEQ ID NO: 127660 - RNA, 22 nt, Artificial Sequence
  Synthetic
gcagugagcuaugauagcgcca

SEQ ID NO: 127661 - RNA, 21 nt, Artificial Sequence
  Synthetic
ggaagaguugccccugcgcca

SEQ ID NO: 127662 - RNA, 23 nt, Artificial Sequence
  Synthetic
guggaagaguugccccugcgcca

SEQ ID NO: 127663 - RNA, 24 nt, Artificial Sequence
  Synthetic
gguggaagaguugccccugcgcca

SEQ ID NO: 127664 - RNA, 18 nt, Artificial Sequence
  Synthetic
gaaagaagcauuuggcca

SEQ ID NO: 127665 - RNA, 20 nt, Artificial Sequence
  Synthetic
gagaaagaagcauuuggcca

SEQ ID NO: 127666 - RNA, 20 nt, Artificial Sequence
  Synthetic
gauuauagcuguucuugcca

SEQ ID NO: 127667 - RNA, 18 nt, Artificial Sequence
  Synthetic
gggcugcauaauauucca

SEQ ID NO: 127668 - RNA, 20 nt, Artificial Sequence
  Synthetic
gauucugaauuuauuuucca

SEQ ID NO: 127669 - RNA, 23 nt, Artificial Sequence
  Synthetic
gaaauaaaaaagaaaauaaagca

SEQ ID NO: 127670 - RNA, 20 nt, Artificial Sequence
  Synthetic
guauuaguuucuuuaaagca

SEQ ID NO: 127671 - RNA, 20 nt, Artificial Sequence
  Synthetic
gacuaaaguuuagucaagca

SEQ ID NO: 127672 - RNA, 24 nt, Artificial Sequence
  Synthetic
gccugacuaaaguuuagucaagca

SEQ ID NO: 127673 - RNA, 18 nt, Artificial Sequence
  Synthetic
gucaaacucauagaagca

SEQ ID NO: 127674 - RNA, 18 nt, Artificial Sequence
  Synthetic
ggaguuugagaggaagca

SEQ ID NO: 127675 - RNA, 20 nt, Artificial Sequence
  Synthetic
guggaguuugagaggaagca

SEQ ID NO: 127676 - RNA, 23 nt, Artificial Sequence
  Synthetic
gaacccaggaacuggaggaagca

SEQ ID NO: 127677 - RNA, 19 nt, Artificial Sequence
  Synthetic
gacacgcugaauugaagca

SEQ ID NO: 127678 - RNA, 21 nt, Artificial Sequence
  Synthetic
gauucuuccuuuccauaagca

SEQ ID NO: 127679 - RNA, 19 nt, Artificial Sequence
  Synthetic
gcuguugcugcuuuaagca

SEQ ID NO: 127680 - RNA, 19 nt, Artificial Sequence
  Synthetic
gacaaaggagaaaacagca

SEQ ID NO: 127681 - RNA, 24 nt, Artificial Sequence
  Synthetic
gcaaauuccagcagaccugcagca

SEQ ID NO: 127682 - RNA, 18 nt, Artificial Sequence
  Synthetic
guuguaaaaauaucagca

SEQ ID NO: 127683 - RNA, 20 nt, Artificial Sequence
  Synthetic
gaguuguaaaaauaucagca

SEQ ID NO: 127684 - RNA, 21 nt, Artificial Sequence
  Synthetic
gauucuuccuauccaugagca

SEQ ID NO: 127685 - RNA, 20 nt, Artificial Sequence
  Synthetic
guagccuguuggggauagca

SEQ ID NO: 127686 - RNA, 21 nt, Artificial Sequence
  Synthetic
gguagccuguuggggauagca

SEQ ID NO: 127687 - RNA, 23 nt, Artificial Sequence
  Synthetic
gugguagccuguuggggauagca

SEQ ID NO: 127688 - RNA, 20 nt, Artificial Sequence
  Synthetic
gcugcuuucacaggcuagca

SEQ ID NO: 127689 - RNA, 21 nt, Artificial Sequence
  Synthetic
ggcugcuuucacaggcuagca

SEQ ID NO: 127690 - RNA, 20 nt, Artificial Sequence
  Synthetic
guagcuugaugggaguagca

SEQ ID NO: 127691 - RNA, 21 nt, Artificial Sequence
  Synthetic
gguagcuugaugggaguagca

SEQ ID NO: 127692 - RNA, 21 nt, Artificial Sequence
  Synthetic
gauaaaauggaagcacaggca

SEQ ID NO: 127693 - RNA, 18 nt, Artificial Sequence
  Synthetic
gcugaagaaaaccaggca

SEQ ID NO: 127694 - RNA, 22 nt, Artificial Sequence
  Synthetic
gucagcugaagaaaaccaggca

SEQ ID NO: 127695 - RNA, 18 nt, Artificial Sequence
  Synthetic
gcuugaacguaggaggca

SEQ ID NO: 127696 - RNA, 23 nt, Artificial Sequence
  Synthetic
gaaucgcuugaacguaggaggca

SEQ ID NO: 127697 - RNA, 21 nt, Artificial Sequence
  Synthetic
gaggaaacaagggcaagggca

SEQ ID NO: 127698 - RNA, 24 nt, Artificial Sequence
  Synthetic
gcagaggaaacaagggcaagggca

SEQ ID NO: 127699 - RNA, 20 nt, Artificial Sequence
  Synthetic
guagcuugauggggauggca

SEQ ID NO: 127700 - RNA, 20 nt, Artificial Sequence
  Synthetic
gcugcuuuuacaggcuggca

SEQ ID NO: 127701 - RNA, 21 nt, Artificial Sequence
  Synthetic
ggcugcuuuuacaggcuggca

SEQ ID NO: 127702 - RNA, 19 nt, Artificial Sequence
  Synthetic
guuuggguuuccauuggca

SEQ ID NO: 127703 - RNA, 24 nt, Artificial Sequence
  Synthetic
gcuauguuuggguuuccauuggca

SEQ ID NO: 127704 - RNA, 20 nt, Artificial Sequence
  Synthetic
gcuaaauacccuacaaugca

SEQ ID NO: 127705 - RNA, 22 nt, Artificial Sequence
  Synthetic
guauaaaauauccuacaaugca

SEQ ID NO: 127706 - RNA, 23 nt, Artificial Sequence
  Synthetic
gguauaaaauauccuacaaugca

SEQ ID NO: 127707 - RNA, 18 nt, Artificial Sequence
  Synthetic
gcaaauaauuauaaugca

SEQ ID NO: 127708 - RNA, 20 nt, Artificial Sequence
  Synthetic
guaauauuuugcuacaugca

SEQ ID NO: 127709 - RNA, 20 nt, Artificial Sequence
  Synthetic
gacacagaugaagagaugca

SEQ ID NO: 127710 - RNA, 21 nt, Artificial Sequence
  Synthetic
ggacacagaugaagagaugca

SEQ ID NO: 127711 - RNA, 21 nt, Artificial Sequence
  Synthetic
gcaauuuugauugagauugca

SEQ ID NO: 127712 - RNA, 24 nt, Artificial Sequence
  Synthetic
gcugcaauuuugauugagauugca

SEQ ID NO: 127713 - RNA, 19 nt, Artificial Sequence
  Synthetic
gaacagauuggugauugca

SEQ ID NO: 127714 - RNA, 22 nt, Artificial Sequence
  Synthetic
gaagaacagauuggugauugca

SEQ ID NO: 127715 - RNA, 20 nt, Artificial Sequence
  Synthetic
gcuuuugguucccauuugca

SEQ ID NO: 127716 - RNA, 24 nt, Artificial Sequence
  Synthetic
gcuugcuuuugguucccauuugca

SEQ ID NO: 127717 - RNA, 18 nt, Artificial Sequence
  Synthetic
gaaaaaggagaaaaauca

SEQ ID NO: 127718 - RNA, 19 nt, Artificial Sequence
  Synthetic
ggaaaaaggagaaaaauca

SEQ ID NO: 127719 - RNA, 19 nt, Artificial Sequence
  Synthetic
guaaaagaaaaagaaauca

SEQ ID NO: 127720 - RNA, 21 nt, Artificial Sequence
  Synthetic
gauuuuguuguuguauaauca

SEQ ID NO: 127721 - RNA, 23 nt, Artificial Sequence
  Synthetic
gugauuuuguuguuguauaauca

SEQ ID NO: 127722 - RNA, 24 nt, Artificial Sequence
  Synthetic
ggugauuuuguuguuguauaauca

SEQ ID NO: 127723 - RNA, 19 nt, Artificial Sequence
  Synthetic
gaaauacaaacuaccauca

SEQ ID NO: 127724 - RNA, 22 nt, Artificial Sequence
  Synthetic
gaaucaaccuaaacguccauca

SEQ ID NO: 127725 - RNA, 23 nt, Artificial Sequence
  Synthetic
ggaaucaaccuaaacguccauca

SEQ ID NO: 127726 - RNA, 22 nt, Artificial Sequence
  Synthetic
gaaucaaccuaaguuuccauca

SEQ ID NO: 127727 - RNA, 23 nt, Artificial Sequence
  Synthetic
ggaaucaaccuaaguuuccauca

SEQ ID NO: 127728 - RNA, 20 nt, Artificial Sequence
  Synthetic
gacacagccaaaccauauca

SEQ ID NO: 127729 - RNA, 23 nt, Artificial Sequence
  Synthetic
gaaaauguggcacauauauauca

SEQ ID NO: 127730 - RNA, 20 nt, Artificial Sequence
  Synthetic
gauaaauauacauuguauca

SEQ ID NO: 127731 - RNA, 23 nt, Artificial Sequence
  Synthetic
gaugauaaauauacauuguauca

SEQ ID NO: 127732 - RNA, 20 nt, Artificial Sequence
  Synthetic
gaauguguauucuacacuca

SEQ ID NO: 127733 - RNA, 23 nt, Artificial Sequence
  Synthetic
gaagaauguguauucuacacuca

SEQ ID NO: 127734 - RNA, 22 nt, Artificial Sequence
  Synthetic
gauucuggcuaaaccaaccuca

SEQ ID NO: 127735 - RNA, 23 nt, Artificial Sequence
  Synthetic
ggauucuggcuaaaccaaccuca

SEQ ID NO: 127736 - RNA, 24 nt, Artificial Sequence
  Synthetic
gggauucuggcuaaaccaaccuca

SEQ ID NO: 127737 - RNA, 21 nt, Artificial Sequence
  Synthetic
gcaauauuaguacccaccuca

SEQ ID NO: 127738 - RNA, 22 nt, Artificial Sequence
  Synthetic
ggcaauauuaguacccaccuca

SEQ ID NO: 127739 - RNA, 23 nt, Artificial Sequence
  Synthetic
gggcaauauuaguacccaccuca

SEQ ID NO: 127740 - RNA, 24 nt, Artificial Sequence
  Synthetic
ggggcaauauuaguacccaccuca

SEQ ID NO: 127741 - RNA, 19 nt, Artificial Sequence
  Synthetic
gacacaauaucugaccuca

SEQ ID NO: 127742 - RNA, 18 nt, Artificial Sequence
  Synthetic
gcuccuggggaggccuca

SEQ ID NO: 127743 - RNA, 19 nt, Artificial Sequence
  Synthetic
ggcuccuggggaggccuca

SEQ ID NO: 127744 - RNA, 23 nt, Artificial Sequence
  Synthetic
gcuuggcuccuggggaggccuca

SEQ ID NO: 127745 - RNA, 18 nt, Artificial Sequence
  Synthetic
gccaaguggucuagcuca

SEQ ID NO: 127746 - RNA, 20 nt, Artificial Sequence
  Synthetic
gagccaaguggucuagcuca

SEQ ID NO: 127747 - RNA, 21 nt, Artificial Sequence
  Synthetic
ggagccaaguggucuagcuca

SEQ ID NO: 127748 - RNA, 22 nt, Artificial Sequence
  Synthetic
gggagccaaguggucuagcuca

SEQ ID NO: 127749 - RNA, 21 nt, Artificial Sequence
  Synthetic
gacauuugagcaaagaucuca

SEQ ID NO: 127750 - RNA, 23 nt, Artificial Sequence
  Synthetic
gugacauuugagcaaagaucuca

SEQ ID NO: 127751 - RNA, 24 nt, Artificial Sequence
  Synthetic
ggugacauuugagcaaagaucuca

SEQ ID NO: 127752 - RNA, 20 nt, Artificial Sequence
  Synthetic
gcagcgguauuagauucuca

SEQ ID NO: 127753 - RNA, 20 nt, Artificial Sequence
  Synthetic
gcaucucuaacaaguucuca

SEQ ID NO: 127754 - RNA, 19 nt, Artificial Sequence
  Synthetic
guggccaagcccaaaguca

SEQ ID NO: 127755 - RNA, 24 nt, Artificial Sequence
  Synthetic
gucuuguggccaagcccaaaguca

SEQ ID NO: 127756 - RNA, 18 nt, Artificial Sequence
  Synthetic
gcuaccagugugacguca

SEQ ID NO: 127757 - RNA, 19 nt, Artificial Sequence
  Synthetic
gaaauacaaacuaccguca

SEQ ID NO: 127758 - RNA, 21 nt, Artificial Sequence
  Synthetic
gaaauggggcaauguagguca

SEQ ID NO: 127759 - RNA, 22 nt, Artificial Sequence
  Synthetic
ggaaauggggcaauguagguca

SEQ ID NO: 127760 - RNA, 24 nt, Artificial Sequence
  Synthetic
gaggaaauggggcaauguagguca

SEQ ID NO: 127761 - RNA, 22 nt, Artificial Sequence
  Synthetic
guuugaccacagaaaaauguca

SEQ ID NO: 127762 - RNA, 20 nt, Artificial Sequence
  Synthetic
gaauggggagaggauuguca

SEQ ID NO: 127763 - RNA, 22 nt, Artificial Sequence
  Synthetic
gagaauggggagaggauuguca

SEQ ID NO: 127764 - RNA, 24 nt, Artificial Sequence
  Synthetic
gcgagaauggggagaggauuguca

SEQ ID NO: 127765 - RNA, 21 nt, Artificial Sequence
  Synthetic
gcaaccucugccuagaauuca

SEQ ID NO: 127766 - RNA, 22 nt, Artificial Sequence
  Synthetic
guaaucucaagguaaaacuuca

SEQ ID NO: 127767 - RNA, 23 nt, Artificial Sequence
  Synthetic
guauuagggugauacugacuuca

SEQ ID NO: 127768 - RNA, 24 nt, Artificial Sequence
  Synthetic
gguauuagggugauacugacuuca

SEQ ID NO: 127769 - RNA, 19 nt, Artificial Sequence
  Synthetic
gaaaauguuauguacuuca

SEQ ID NO: 127770 - RNA, 19 nt, Artificial Sequence
  Synthetic
gcagucaucugagccuuca

SEQ ID NO: 127771 - RNA, 23 nt, Artificial Sequence
  Synthetic
gcuagcagucaucugagccuuca

SEQ ID NO: 127772 - RNA, 18 nt, Artificial Sequence
  Synthetic
gcucaggcuguugcuuca

SEQ ID NO: 127773 - RNA, 23 nt, Artificial Sequence
  Synthetic
guacagcucaggcuguugcuuca

SEQ ID NO: 127774 - RNA, 20 nt, Artificial Sequence
  Synthetic
gcuaccaaugccuuucuuca

SEQ ID NO: 127775 - RNA, 20 nt, Artificial Sequence
  Synthetic
gccuccgccuccuggguuca

SEQ ID NO: 127776 - RNA, 23 nt, Artificial Sequence
  Synthetic
gcagccuccgccuccuggguuca

SEQ ID NO: 127777 - RNA, 23 nt, Artificial Sequence
  Synthetic
gcaaccucugacucccugguuca

SEQ ID NO: 127778 - RNA, 18 nt, Artificial Sequence
  Synthetic
gaaugcaauaaauguuca

SEQ ID NO: 127779 - RNA, 19 nt, Artificial Sequence
  Synthetic
ggaaugcaauaaauguuca

SEQ ID NO: 127780 - RNA, 20 nt, Artificial Sequence
  Synthetic
gaacugggaguugcuguuca

SEQ ID NO: 127781 - RNA, 21 nt, Artificial Sequence
  Synthetic
ggaacugggaguugcuguuca

SEQ ID NO: 127782 - RNA, 22 nt, Artificial Sequence
  Synthetic
gggaacugggaguugcuguuca

SEQ ID NO: 127783 - RNA, 23 nt, Artificial Sequence
  Synthetic
ggggaacugggaguugcuguuca

SEQ ID NO: 127784 - RNA, 24 nt, Artificial Sequence
  Synthetic
gggggaacugggaguugcuguuca

SEQ ID NO: 127785 - RNA, 18 nt, Artificial Sequence
  Synthetic
gaauugguauuucuuuca

SEQ ID NO: 127786 - RNA, 18 nt, Artificial Sequence
  Synthetic
gguagauugcauguuuca

SEQ ID NO: 127787 - RNA, 18 nt, Artificial Sequence
  Synthetic
ggaaaacauuuaaaaaga

SEQ ID NO: 127788 - RNA, 19 nt, Artificial Sequence
  Synthetic
gcccagggaagccaaaaga

SEQ ID NO: 127789 - RNA, 20 nt, Artificial Sequence
  Synthetic
ggcccagggaagccaaaaga

SEQ ID NO: 127790 - RNA, 22 nt, Artificial Sequence
  Synthetic
guggcccagggaagccaaaaga

SEQ ID NO: 127791 - RNA, 24 nt, Artificial Sequence
  Synthetic
guguggcccagggaagccaaaaga

SEQ ID NO: 127792 - RNA, 22 nt, Artificial Sequence
  Synthetic
gccaaaucgaccaagcaaaaga

SEQ ID NO: 127793 - RNA, 24 nt, Artificial Sequence
  Synthetic
gcucaauaaauguuuaucaaaaga

SEQ ID NO: 127794 - RNA, 19 nt, Artificial Sequence
  Synthetic
gaagguugcuuggaaaaga

SEQ ID NO: 127795 - RNA, 20 nt, Artificial Sequence
  Synthetic
gcaggagagagagagaaaga

SEQ ID NO: 127796 - RNA, 23 nt, Artificial Sequence
  Synthetic
gcagcaggagagagagagaaaga

SEQ ID NO: 127797 - RNA, 24 nt, Artificial Sequence
  Synthetic
ggcagcaggagagagagagaaaga

SEQ ID NO: 127798 - RNA, 18 nt, Artificial Sequence
  Synthetic
gggaagcauggagaaaga

SEQ ID NO: 127799 - RNA, 20 nt, Artificial Sequence
  Synthetic
gagggaagcauggagaaaga

SEQ ID NO: 127800 - RNA, 21 nt, Artificial Sequence
  Synthetic
ggagggaagcauggagaaaga

SEQ ID NO: 127801 - RNA, 22 nt, Artificial Sequence
  Synthetic
gggagggaagcauggagaaaga

SEQ ID NO: 127802 - RNA, 24 nt, Artificial Sequence
  Synthetic
gagggagggaagcauggagaaaga

SEQ ID NO: 127803 - RNA, 23 nt, Artificial Sequence
  Synthetic
gauuaaauucaccagucuaaaga

SEQ ID NO: 127804 - RNA, 24 nt, Artificial Sequence
  Synthetic
ggauuaaauucaccagucuaaaga

SEQ ID NO: 127805 - RNA, 20 nt, Artificial Sequence
  Synthetic
gacacaaaaguuuuuaaaga

SEQ ID NO: 127806 - RNA, 21 nt, Artificial Sequence
  Synthetic
ggacacaaaaguuuuuaaaga

SEQ ID NO: 127807 - RNA, 21 nt, Artificial Sequence
  Synthetic
gcucuaaagaacugcccaaga

SEQ ID NO: 127808 - RNA, 24 nt, Artificial Sequence
  Synthetic
gcugcucuaaagaacugcccaaga

SEQ ID NO: 127809 - RNA, 18 nt, Artificial Sequence
  Synthetic
gcagaauaaaauccaaga

SEQ ID NO: 127810 - RNA, 19 nt, Artificial Sequence
  Synthetic
ggcagaauaaaauccaaga

SEQ ID NO: 127811 - RNA, 18 nt, Artificial Sequence
  Synthetic
gguauccaagaugcaaga

SEQ ID NO: 127812 - RNA, 21 nt, Artificial Sequence
  Synthetic
gcugguauccaagaugcaaga

SEQ ID NO: 127813 - RNA, 18 nt, Artificial Sequence
  Synthetic
gaagguaauuucucaaga

SEQ ID NO: 127814 - RNA, 18 nt, Artificial Sequence
  Synthetic
gggaacugcaauucaaga

SEQ ID NO: 127815 - RNA, 24 nt, Artificial Sequence
  Synthetic
gauuaugggaacugcaauucaaga

SEQ ID NO: 127816 - RNA, 19 nt, Artificial Sequence
  Synthetic
gcuagccauaugcagaaga

SEQ ID NO: 127817 - RNA, 20 nt, Artificial Sequence
  Synthetic
ggcuagccauaugcagaaga

SEQ ID NO: 127818 - RNA, 22 nt, Artificial Sequence
  Synthetic
guaucucaaaacggcuagaaga

SEQ ID NO: 127819 - RNA, 24 nt, Artificial Sequence
  Synthetic
gcguaucucaaaacggcuagaaga

SEQ ID NO: 127820 - RNA, 18 nt, Artificial Sequence
  Synthetic
gaaaacauccaaauaaga

SEQ ID NO: 127821 - RNA, 19 nt, Artificial Sequence
  Synthetic
ggaaaacauccaaauaaga

SEQ ID NO: 127822 - RNA, 21 nt, Artificial Sequence
  Synthetic
gaauacuaugcagccauaaga

SEQ ID NO: 127823 - RNA, 22 nt, Artificial Sequence
  Synthetic
ggaauacuaugcagccauaaga

SEQ ID NO: 127824 - RNA, 20 nt, Artificial Sequence
  Synthetic
gucuacuuuucucaaacaga

SEQ ID NO: 127825 - RNA, 19 nt, Artificial Sequence
  Synthetic
gcacacagauacacacaga

SEQ ID NO: 127826 - RNA, 18 nt, Artificial Sequence
  Synthetic
guaacaaaauaccacaga

SEQ ID NO: 127827 - RNA, 24 nt, Artificial Sequence
  Synthetic
gcuuccguaacaaaauaccacaga

SEQ ID NO: 127828 - RNA, 22 nt, Artificial Sequence
  Synthetic
gcacucaaacuugcaugacaga

SEQ ID NO: 127829 - RNA, 18 nt, Artificial Sequence
  Synthetic
gagcuagucagugacaga

SEQ ID NO: 127830 - RNA, 18 nt, Artificial Sequence
  Synthetic
gugccacugcacuccaga

SEQ ID NO: 127831 - RNA, 22 nt, Artificial Sequence
  Synthetic
gaucgugccacugcacuccaga

SEQ ID NO: 127832 - RNA, 24 nt, Artificial Sequence
  Synthetic
gagaucgugccacugcacuccaga

SEQ ID NO: 127833 - RNA, 22 nt, Artificial Sequence
  Synthetic
gaucacaccauugcacuccaga

SEQ ID NO: 127834 - RNA, 24 nt, Artificial Sequence
  Synthetic
gagaucacaccauugcacuccaga

SEQ ID NO: 127835 - RNA, 19 nt, Artificial Sequence
  Synthetic
guagguacacaaaggcaga

SEQ ID NO: 127836 - RNA, 22 nt, Artificial Sequence
  Synthetic
gcuguagguacacaaaggcaga

SEQ ID NO: 127837 - RNA, 18 nt, Artificial Sequence
  Synthetic
gaaaagacaauccucaga

SEQ ID NO: 127838 - RNA, 19 nt, Artificial Sequence
  Synthetic
ggaaaagacaauccucaga

SEQ ID NO: 127839 - RNA, 20 nt, Artificial Sequence
  Synthetic
gggaaaagacaauccucaga

SEQ ID NO: 127840 - RNA, 24 nt, Artificial Sequence
  Synthetic
gaaagggaaaagacaauccucaga

SEQ ID NO: 127841 - RNA, 19 nt, Artificial Sequence
  Synthetic
gcaaauuucuguagucaga

SEQ ID NO: 127842 - RNA, 18 nt, Artificial Sequence
  Synthetic
gcacauacuuuugucaga

SEQ ID NO: 127843 - RNA, 18 nt, Artificial Sequence
  Synthetic
gauuggaauaguuucaga

SEQ ID NO: 127844 - RNA, 23 nt, Artificial Sequence
  Synthetic
gaaacccuacaagcuagaagaga

SEQ ID NO: 127845 - RNA, 20 nt, Artificial Sequence
  Synthetic
gacuaauaaugaauaagaga

SEQ ID NO: 127846 - RNA, 18 nt, Artificial Sequence
  Synthetic
gggggaaagagacagaga

SEQ ID NO: 127847 - RNA, 19 nt, Artificial Sequence
  Synthetic
ggggggaaagagacagaga

SEQ ID NO: 127848 - RNA, 21 nt, Artificial Sequence
  Synthetic
gaggggggaaagagacagaga

SEQ ID NO: 127849 - RNA, 22 nt, Artificial Sequence
  Synthetic
ggaggggggaaagagacagaga

SEQ ID NO: 127850 - RNA, 23 nt, Artificial Sequence
  Synthetic
gggaggggggaaagagacagaga

SEQ ID NO: 127851 - RNA, 24 nt, Artificial Sequence
  Synthetic
ggggaggggggaaagagacagaga

SEQ ID NO: 127852 - RNA, 18 nt, Artificial Sequence
  Synthetic
gcuagcuagagacagaga

SEQ ID NO: 127853 - RNA, 22 nt, Artificial Sequence
  Synthetic
gcuagcuagcuagagacagaga

SEQ ID NO: 127854 - RNA, 18 nt, Artificial Sequence
  Synthetic
gagcaggagcaagagaga

SEQ ID NO: 127855 - RNA, 22 nt, Artificial Sequence
  Synthetic
gcuagagcaggagcaagagaga

SEQ ID NO: 127856 - RNA, 23 nt, Artificial Sequence
  Synthetic
ggcuagagcaggagcaagagaga

SEQ ID NO: 127857 - RNA, 19 nt, Artificial Sequence
  Synthetic
gcagcaggagagagagaga

SEQ ID NO: 127858 - RNA, 20 nt, Artificial Sequence
  Synthetic
ggcagcaggagagagagaga

SEQ ID NO: 127859 - RNA, 18 nt, Artificial Sequence
  Synthetic
gauggauaaggggagaga

SEQ ID NO: 127860 - RNA, 19 nt, Artificial Sequence
  Synthetic
ggauggauaaggggagaga

SEQ ID NO: 127861 - RNA, 22 nt, Artificial Sequence
  Synthetic
gaauaaauuuaggugugagaga

SEQ ID NO: 127862 - RNA, 23 nt, Artificial Sequence
  Synthetic
ggaauaaauuuaggugugagaga

SEQ ID NO: 127863 - RNA, 20 nt, Artificial Sequence
  Synthetic
guuuucuuuucuuauagaga

SEQ ID NO: 127864 - RNA, 23 nt, Artificial Sequence
  Synthetic
gauuuuuguaauuuuaguagaga

SEQ ID NO: 127865 - RNA, 18 nt, Artificial Sequence
  Synthetic
gugcauuuuuaguagaga

SEQ ID NO: 127866 - RNA, 21 nt, Artificial Sequence
  Synthetic
guuuugcauuuuuaguagaga

SEQ ID NO: 127867 - RNA, 20 nt, Artificial Sequence
  Synthetic
guuuguauuuuuaguagaga

SEQ ID NO: 127868 - RNA, 24 nt, Artificial Sequence
  Synthetic
gaauguuuguauuuuuaguagaga

SEQ ID NO: 127869 - RNA, 21 nt, Artificial Sequence
  Synthetic
guuuuguauuuuuaguagaga

SEQ ID NO: 127870 - RNA, 23 nt, Artificial Sequence
  Synthetic
gauuuuuguauuuuuaguagaga

SEQ ID NO: 127871 - RNA, 18 nt, Artificial Sequence
  Synthetic
guauuuuuuuaguagaga

SEQ ID NO: 127872 - RNA, 21 nt, Artificial Sequence
  Synthetic
guauauuuauuuucuuagaga

SEQ ID NO: 127873 - RNA, 18 nt, Artificial Sequence
  Synthetic
gauuuucuuauuuagaga

SEQ ID NO: 127874 - RNA, 22 nt, Artificial Sequence
  Synthetic
guuuuguuuuguuuuuuagaga

SEQ ID NO: 127875 - RNA, 21 nt, Artificial Sequence
  Synthetic
gcuaugaagaaauacccgaga

SEQ ID NO: 127876 - RNA, 21 nt, Artificial Sequence
  Synthetic
gcuagaaagaacugcccgaga

SEQ ID NO: 127877 - RNA, 21 nt, Artificial Sequence
  Synthetic
gcuauaaagaacugcccgaga

SEQ ID NO: 127878 - RNA, 18 nt, Artificial Sequence
  Synthetic
gcuugcggugagccgaga

SEQ ID NO: 127879 - RNA, 20 nt, Artificial Sequence
  Synthetic
gagcuugcggugagccgaga

SEQ ID NO: 127880 - RNA, 21 nt, Artificial Sequence
  Synthetic
ggagcuugcggugagccgaga

SEQ ID NO: 127881 - RNA, 23 nt, Artificial Sequence
  Synthetic
guggagcuugcggugagccgaga

SEQ ID NO: 127882 - RNA, 24 nt, Artificial Sequence
  Synthetic
gguggagcuugcggugagccgaga

SEQ ID NO: 127883 - RNA, 21 nt, Artificial Sequence
  Synthetic
gcuaugaagaaauagccgaga

SEQ ID NO: 127884 - RNA, 21 nt, Artificial Sequence
  Synthetic
gauaaauauagauaaucgaga

SEQ ID NO: 127885 - RNA, 23 nt, Artificial Sequence
  Synthetic
guuagaauaacuaaagugggaga

SEQ ID NO: 127886 - RNA, 21 nt, Artificial Sequence
  Synthetic
gacaaaaacaagcaauggaga

SEQ ID NO: 127887 - RNA, 21 nt, Artificial Sequence
  Synthetic
gaaauagucacaucauggaga

SEQ ID NO: 127888 - RNA, 19 nt, Artificial Sequence
  Synthetic
gaacaaaacuggauggaga

SEQ ID NO: 127889 - RNA, 20 nt, Artificial Sequence
  Synthetic
ggaacaaaacuggauggaga

SEQ ID NO: 127890 - RNA, 21 nt, Artificial Sequence
  Synthetic
gggaacaaaacuggauggaga

SEQ ID NO: 127891 - RNA, 21 nt, Artificial Sequence
  Synthetic
gcaaauuuggcuuccuggaga

SEQ ID NO: 127892 - RNA, 24 nt, Artificial Sequence
  Synthetic
gcugcaaauuuggcuuccuggaga

SEQ ID NO: 127893 - RNA, 18 nt, Artificial Sequence
  Synthetic
gaaaaagagaaguggaga

SEQ ID NO: 127894 - RNA, 20 nt, Artificial Sequence
  Synthetic
gugaaaaagagaaguggaga

SEQ ID NO: 127895 - RNA, 22 nt, Artificial Sequence
  Synthetic
gagugaaaaagagaaguggaga

SEQ ID NO: 127896 - RNA, 23 nt, Artificial Sequence
  Synthetic
ggagugaaaaagagaaguggaga

SEQ ID NO: 127897 - RNA, 24 nt, Artificial Sequence
  Synthetic
gggagugaaaaagagaaguggaga

SEQ ID NO: 127898 - RNA, 18 nt, Artificial Sequence
  Synthetic
gaggaaaaaauaaugaga

SEQ ID NO: 127899 - RNA, 19 nt, Artificial Sequence
  Synthetic
gauaaagacauacaugaga

SEQ ID NO: 127900 - RNA, 22 nt, Artificial Sequence
  Synthetic
gcugauaaagacauacaugaga

SEQ ID NO: 127901 - RNA, 21 nt, Artificial Sequence
  Synthetic
gcuauaaagaaauaccugaga

SEQ ID NO: 127902 - RNA, 22 nt, Artificial Sequence
  Synthetic
gcuaauaaagacauaccugaga

SEQ ID NO: 127903 - RNA, 21 nt, Artificial Sequence
  Synthetic
gcuauaaagaacuaccugaga

SEQ ID NO: 127904 - RNA, 24 nt, Artificial Sequence
  Synthetic
gcugcuauaaagaacuaccugaga

SEQ ID NO: 127905 - RNA, 19 nt, Artificial Sequence
  Synthetic
guuuaauuguuuauugaga

SEQ ID NO: 127906 - RNA, 23 nt, Artificial Sequence
  Synthetic
guuuguuuaauuguuuauugaga

SEQ ID NO: 127907 - RNA, 22 nt, Artificial Sequence
  Synthetic
guuuuguuuuguuuuguugaga

SEQ ID NO: 127908 - RNA, 18 nt, Artificial Sequence
  Synthetic
guauguauguauuugaga

SEQ ID NO: 127909 - RNA, 22 nt, Artificial Sequence
  Synthetic
guauguauguauguauuugaga

SEQ ID NO: 127910 - RNA, 23 nt, Artificial Sequence
  Synthetic
guuuuuuguucuuguuuuugaga

SEQ ID NO: 127911 - RNA, 18 nt, Artificial Sequence
  Synthetic
guuuguuuguuuuugaga

SEQ ID NO: 127912 - RNA, 21 nt, Artificial Sequence
  Synthetic
guuguuuguuuguuuuugaga

SEQ ID NO: 127913 - RNA, 22 nt, Artificial Sequence
  Synthetic
gguuguuuguuuguuuuugaga

SEQ ID NO: 127914 - RNA, 18 nt, Artificial Sequence
  Synthetic
gaacuuucuuuuuugaga

SEQ ID NO: 127915 - RNA, 23 nt, Artificial Sequence
  Synthetic
guuuuuguuuuguuuuuuugaga

SEQ ID NO: 127916 - RNA, 23 nt, Artificial Sequence
  Synthetic
gaauaauaauuuuuuuuuugaga

SEQ ID NO: 127917 - RNA, 21 nt, Artificial Sequence
  Synthetic
gauacuuuuuuuuuuuugaga

SEQ ID NO: 127918 - RNA, 22 nt, Artificial Sequence
  Synthetic
ggauacuuuuuuuuuuuugaga

SEQ ID NO: 127919 - RNA, 22 nt, Artificial Sequence
  Synthetic
gaauuuuuuuuuuuuuuugaga

SEQ ID NO: 127920 - RNA, 24 nt, Artificial Sequence
  Synthetic
gagaauuuuuuuuuuuuuuugaga

SEQ ID NO: 127921 - RNA, 21 nt, Artificial Sequence
  Synthetic
guuuuuuuuuuuuuuuugaga

SEQ ID NO: 127922 - RNA, 24 nt, Artificial Sequence
  Synthetic
guuuuuuuuuuuuuuuuuuugaga

SEQ ID NO: 127923 - RNA, 21 nt, Artificial Sequence
  Synthetic
gcuauaacaaaauaccauaga

SEQ ID NO: 127924 - RNA, 21 nt, Artificial Sequence
  Synthetic
gcuauaaaauaaugccauaga

SEQ ID NO: 127925 - RNA, 24 nt, Artificial Sequence
  Synthetic
gcugcuauaaaauaaugccauaga

SEQ ID NO: 127926 - RNA, 18 nt, Artificial Sequence
  Synthetic
gaagauaaaauauauaga

SEQ ID NO: 127927 - RNA, 20 nt, Artificial Sequence
  Synthetic
gaaauaauaaagacuauaga

SEQ ID NO: 127928 - RNA, 23 nt, Artificial Sequence
  Synthetic
guuucuuguaaacagccuauaga

SEQ ID NO: 127929 - RNA, 19 nt, Artificial Sequence
  Synthetic
gaggaaaugaaagccuaga

SEQ ID NO: 127930 - RNA, 19 nt, Artificial Sequence
  Synthetic
gaacauauacaaaaguaga

SEQ ID NO: 127931 - RNA, 22 nt, Artificial Sequence
  Synthetic
gauuaacauuuaaauugguaga

SEQ ID NO: 127932 - RNA, 24 nt, Artificial Sequence
  Synthetic
gagauuaacauuuaaauugguaga

SEQ ID NO: 127933 - RNA, 19 nt, Artificial Sequence
  Synthetic
guaaagugucugguguaga

SEQ ID NO: 127934 - RNA, 18 nt, Artificial Sequence
  Synthetic
gauuggaauaguuuuaga

SEQ ID NO: 127935 - RNA, 18 nt, Artificial Sequence
  Synthetic
gcuuggaauaguuuuaga

SEQ ID NO: 127936 - RNA, 23 nt, Artificial Sequence
  Synthetic
guauugcuuggaauaguuuuaga

SEQ ID NO: 127937 - RNA, 23 nt, Artificial Sequence
  Synthetic
gcuaaacauuugauuuuuuuaga

SEQ ID NO: 127938 - RNA, 24 nt, Artificial Sequence
  Synthetic
ggcuaaacauuugauuuuuuuaga

SEQ ID NO: 127939 - RNA, 18 nt, Artificial Sequence
  Synthetic
gauuuugggcugagacga

SEQ ID NO: 127940 - RNA, 20 nt, Artificial Sequence
  Synthetic
gagauuuugggcugagacga

SEQ ID NO: 127941 - RNA, 21 nt, Artificial Sequence
  Synthetic
ggagauuuugggcugagacga

SEQ ID NO: 127942 - RNA, 18 nt, Artificial Sequence
  Synthetic
guuuuugggcugagacga

SEQ ID NO: 127943 - RNA, 20 nt, Artificial Sequence
  Synthetic
gaguuuuugggcugagacga

SEQ ID NO: 127944 - RNA, 19 nt, Artificial Sequence
  Synthetic
guuccacucccacuuacga

SEQ ID NO: 127945 - RNA, 23 nt, Artificial Sequence
  Synthetic
gccacugcacuccagccuggcga

SEQ ID NO: 127946 - RNA, 18 nt, Artificial Sequence
  Synthetic
ggucacaccuaacugcga

SEQ ID NO: 127947 - RNA, 18 nt, Artificial Sequence
  Synthetic
gguaggacaagagaagga

SEQ ID NO: 127948 - RNA, 18 nt, Artificial Sequence
  Synthetic
ggagggaagagggaagga

SEQ ID NO: 127949 - RNA, 19 nt, Artificial Sequence
  Synthetic
gggagggaagagggaagga

SEQ ID NO: 127950 - RNA, 23 nt, Artificial Sequence
  Synthetic
gauuuuuguauaagggguaagga

SEQ ID NO: 127951 - RNA, 18 nt, Artificial Sequence
  Synthetic
gagaacagcugugcagga

SEQ ID NO: 127952 - RNA, 24 nt, Artificial Sequence
  Synthetic
gcucaagagaacagcugugcagga

SEQ ID NO: 127953 - RNA, 19 nt, Artificial Sequence
  Synthetic
gugagucugaaauucagga

SEQ ID NO: 127954 - RNA, 21 nt, Artificial Sequence
  Synthetic
gugugagucugaaauucagga

SEQ ID NO: 127955 - RNA, 24 nt, Artificial Sequence
  Synthetic
gcugugugagucugaaauucagga

SEQ ID NO: 127956 - RNA, 18 nt, Artificial Sequence
  Synthetic
ggcaccaggcaaggagga

SEQ ID NO: 127957 - RNA, 18 nt, Artificial Sequence
  Synthetic
ggaaaugagaaaauagga

SEQ ID NO: 127958 - RNA, 24 nt, Artificial Sequence
  Synthetic
guacacccauguuguagcauagga

SEQ ID NO: 127959 - RNA, 20 nt, Artificial Sequence
  Synthetic
gcugaugaauccugauagga

SEQ ID NO: 127960 - RNA, 23 nt, Artificial Sequence
  Synthetic
guagcugaugaauccugauagga

SEQ ID NO: 127961 - RNA, 19 nt, Artificial Sequence
  Synthetic
gaugcuccucaccuuagga

SEQ ID NO: 127962 - RNA, 18 nt, Artificial Sequence
  Synthetic
gucugagcaaguuuagga

SEQ ID NO: 127963 - RNA, 22 nt, Artificial Sequence
  Synthetic
gcaagucugagcaaguuuagga

SEQ ID NO: 127964 - RNA, 23 nt, Artificial Sequence
  Synthetic
ggcaagucugagcaaguuuagga

SEQ ID NO: 127965 - RNA, 18 nt, Artificial Sequence
  Synthetic
ggauaauaaaagaaggga

SEQ ID NO: 127966 - RNA, 19 nt, Artificial Sequence
  Synthetic
gggauaauaaaagaaggga

SEQ ID NO: 127967 - RNA, 18 nt, Artificial Sequence
  Synthetic
gagagaugggaagaggga

SEQ ID NO: 127968 - RNA, 19 nt, Artificial Sequence
  Synthetic
ggagagaugggaagaggga

SEQ ID NO: 127969 - RNA, 20 nt, Artificial Sequence
  Synthetic
gggagagaugggaagaggga

SEQ ID NO: 127970 - RNA, 24 nt, Artificial Sequence
  Synthetic
gaaaaaguagcauuuucuuaggga

SEQ ID NO: 127971 - RNA, 18 nt, Artificial Sequence
  Synthetic
ggaaacgaagaaagggga

SEQ ID NO: 127972 - RNA, 19 nt, Artificial Sequence
  Synthetic
gaaaaacaagcaaugggga

SEQ ID NO: 127973 - RNA, 21 nt, Artificial Sequence
  Synthetic
gagaaaaacaagcaaugggga

SEQ ID NO: 127974 - RNA, 18 nt, Artificial Sequence
  Synthetic
gaaaacaagcaaugggga

SEQ ID NO: 127975 - RNA, 19 nt, Artificial Sequence
  Synthetic
ggaaaacaagcaaugggga

SEQ ID NO: 127976 - RNA, 21 nt, Artificial Sequence
  Synthetic
gaggaaaacaagcaaugggga

SEQ ID NO: 127977 - RNA, 19 nt, Artificial Sequence
  Synthetic
gagauagcaggaaauggga

SEQ ID NO: 127978 - RNA, 20 nt, Artificial Sequence
  Synthetic
ggagauagcaggaaauggga

SEQ ID NO: 127979 - RNA, 18 nt, Artificial Sequence
  Synthetic
guuuuuaaagacauggga

SEQ ID NO: 127980 - RNA, 19 nt, Artificial Sequence
  Synthetic
gguuuuuaaagacauggga

SEQ ID NO: 127981 - RNA, 22 nt, Artificial Sequence
  Synthetic
gaugguuuuuaaagacauggga

SEQ ID NO: 127982 - RNA, 20 nt, Artificial Sequence
  Synthetic
gacagagagagaggaaugga

SEQ ID NO: 127983 - RNA, 22 nt, Artificial Sequence
  Synthetic
gagacagagagagaggaaugga

SEQ ID NO: 127984 - RNA, 24 nt, Artificial Sequence
  Synthetic
gagagacagagagagaggaaugga

SEQ ID NO: 127985 - RNA, 19 nt, Artificial Sequence
  Synthetic
gaauaaguaagugaaugga

SEQ ID NO: 127986 - RNA, 22 nt, Artificial Sequence
  Synthetic
gaagaaugucauugcuacugga

SEQ ID NO: 127987 - RNA, 24 nt, Artificial Sequence
  Synthetic
gugaagaaugucauugcuacugga

SEQ ID NO: 127988 - RNA, 20 nt, Artificial Sequence
  Synthetic
gcugggucacccaggcugga

SEQ ID NO: 127989 - RNA, 18 nt, Artificial Sequence
  Synthetic
gaaacaacagaugcugga

SEQ ID NO: 127990 - RNA, 19 nt, Artificial Sequence
  Synthetic
ggaaacaacagaugcugga

SEQ ID NO: 127991 - RNA, 18 nt, Artificial Sequence
  Synthetic
gaaacaacaggugcugga

SEQ ID NO: 127992 - RNA, 19 nt, Artificial Sequence
  Synthetic
ggaaacaacaggugcugga

SEQ ID NO: 127993 - RNA, 19 nt, Artificial Sequence
  Synthetic
gaugaccaucaauggugga

SEQ ID NO: 127994 - RNA, 18 nt, Artificial Sequence
  Synthetic
gugcccaccaguggugga

SEQ ID NO: 127995 - RNA, 19 nt, Artificial Sequence
  Synthetic
ggugcccaccaguggugga

SEQ ID NO: 127996 - RNA, 22 nt, Artificial Sequence
  Synthetic
guauuuaaugaaaauaugugga

SEQ ID NO: 127997 - RNA, 23 nt, Artificial Sequence
  Synthetic
gguauuuaaugaaaauaugugga

SEQ ID NO: 127998 - RNA, 18 nt, Artificial Sequence
  Synthetic
guguccgucaacguugga

SEQ ID NO: 127999 - RNA, 19 nt, Artificial Sequence
  Synthetic
gguguccgucaacguugga

SEQ ID NO: 128000 - RNA, 21 nt, Artificial Sequence
  Synthetic
gacuuuuggguuaauguugga

SEQ ID NO: 128001 - RNA, 22 nt, Artificial Sequence
  Synthetic
ggacuuuuggguuaauguugga

SEQ ID NO: 128002 - RNA, 19 nt, Artificial Sequence
  Synthetic
gaggagagaguaauuugga

SEQ ID NO: 128003 - RNA, 21 nt, Artificial Sequence
  Synthetic
gucuuagugcaaggguuugga

SEQ ID NO: 128004 - RNA, 19 nt, Artificial Sequence
  Synthetic
gugaaaggaaagaaaauga

SEQ ID NO: 128005 - RNA, 19 nt, Artificial Sequence
  Synthetic
guucuuuuuuaacaaauga

SEQ ID NO: 128006 - RNA, 24 nt, Artificial Sequence
  Synthetic
guucauccauguugucauaaauga

SEQ ID NO: 128007 - RNA, 18 nt, Artificial Sequence
  Synthetic
ggcuuggaaaaugaauga

SEQ ID NO: 128008 - RNA, 20 nt, Artificial Sequence
  Synthetic
guggcuuggaaaaugaauga

SEQ ID NO: 128009 - RNA, 21 nt, Artificial Sequence
  Synthetic
gaaaauauguggaaugaauga

SEQ ID NO: 128010 - RNA, 18 nt, Artificial Sequence
  Synthetic
gaaugaaugauugaauga

SEQ ID NO: 128011 - RNA, 19 nt, Artificial Sequence
  Synthetic
ggaaugaaugauugaauga

SEQ ID NO: 128012 - RNA, 21 nt, Artificial Sequence
  Synthetic
guggaaugaaugauugaauga

SEQ ID NO: 128013 - RNA, 23 nt, Artificial Sequence
  Synthetic
guaaccagcuagcaucauaauga

SEQ ID NO: 128014 - RNA, 18 nt, Artificial Sequence
  Synthetic
gugaaaccaaaguaauga

SEQ ID NO: 128015 - RNA, 24 nt, Artificial Sequence
  Synthetic
guuuauugaguguuuuuaacauga

SEQ ID NO: 128016 - RNA, 18 nt, Artificial Sequence
  Synthetic
gcacuccagcccacauga

SEQ ID NO: 128017 - RNA, 24 nt, Artificial Sequence
  Synthetic
gccacugcacuccagcccacauga

SEQ ID NO: 128018 - RNA, 19 nt, Artificial Sequence
  Synthetic
gauaaauuuauuuacauga

SEQ ID NO: 128019 - RNA, 18 nt, Artificial Sequence
  Synthetic
gcacucaaacuugcauga

SEQ ID NO: 128020 - RNA, 18 nt, Artificial Sequence
  Synthetic
gagagugccaaaucauga

SEQ ID NO: 128021 - RNA, 24 nt, Artificial Sequence
  Synthetic
gacaaagagagugccaaaucauga

SEQ ID NO: 128022 - RNA, 19 nt, Artificial Sequence
  Synthetic
gaauauuuuuccaucauga

SEQ ID NO: 128023 - RNA, 21 nt, Artificial Sequence
  Synthetic
guugccuguugacucucauga

SEQ ID NO: 128024 - RNA, 22 nt, Artificial Sequence
  Synthetic
gguugccuguugacucucauga

SEQ ID NO: 128025 - RNA, 19 nt, Artificial Sequence
  Synthetic
gcuaugggaccaaagauga

SEQ ID NO: 128026 - RNA, 21 nt, Artificial Sequence
  Synthetic
gugcuaugggaccaaagauga

SEQ ID NO: 128027 - RNA, 18 nt, Artificial Sequence
  Synthetic
gcacuccagccuggauga

SEQ ID NO: 128028 - RNA, 22 nt, Artificial Sequence
  Synthetic
gaaacauaagaucucuggauga

SEQ ID NO: 128029 - RNA, 23 nt, Artificial Sequence
  Synthetic
ggaaacauaagaucucuggauga

SEQ ID NO: 128030 - RNA, 18 nt, Artificial Sequence
  Synthetic
guuuccaucaguggauga

SEQ ID NO: 128031 - RNA, 20 nt, Artificial Sequence
  Synthetic
gucuaagauuaaggugauga

SEQ ID NO: 128032 - RNA, 19 nt, Artificial Sequence
  Synthetic
guuuuuguguauuauauga

SEQ ID NO: 128033 - RNA, 18 nt, Artificial Sequence
  Synthetic
gauuaugacuuucuauga

SEQ ID NO: 128034 - RNA, 19 nt, Artificial Sequence
  Synthetic
ggauuaugacuuucuauga

SEQ ID NO: 128035 - RNA, 20 nt, Artificial Sequence
  Synthetic
gggauuaugacuuucuauga

SEQ ID NO: 128036 - RNA, 18 nt, Artificial Sequence
  Synthetic
gguaauaaagcauuauga

SEQ ID NO: 128037 - RNA, 19 nt, Artificial Sequence
  Synthetic
ggguaauaaagcauuauga

SEQ ID NO: 128038 - RNA, 21 nt, Artificial Sequence
  Synthetic
gaacuucauuccuuuuuauga

SEQ ID NO: 128039 - RNA, 21 nt, Artificial Sequence
  Synthetic
guuuuauuuuuuuuccccuga

SEQ ID NO: 128040 - RNA, 18 nt, Artificial Sequence
  Synthetic
gcuuacaagagcuccuga

SEQ ID NO: 128041 - RNA, 19 nt, Artificial Sequence
  Synthetic
ggcuuacaagagcuccuga

SEQ ID NO: 128042 - RNA, 23 nt, Artificial Sequence
  Synthetic
gccuggcuuacaagagcuccuga

SEQ ID NO: 128043 - RNA, 24 nt, Artificial Sequence
  Synthetic
ggccuggcuuacaagagcuccuga

SEQ ID NO: 128044 - RNA, 24 nt, Artificial Sequence
  Synthetic
gauacauuuuaaagacaaagcuga

SEQ ID NO: 128045 - RNA, 18 nt, Artificial Sequence
  Synthetic
gaauaauauugaaaguga

SEQ ID NO: 128046 - RNA, 20 nt, Artificial Sequence
  Synthetic
guaaaguaaaagacaaguga

SEQ ID NO: 128047 - RNA, 24 nt, Artificial Sequence
  Synthetic
gaaccucaaaaauaugcuaaguga

SEQ ID NO: 128048 - RNA, 20 nt, Artificial Sequence
  Synthetic
guuacagagcuagucaguga

SEQ ID NO: 128049 - RNA, 21 nt, Artificial Sequence
  Synthetic
gguuacagagcuagucaguga

SEQ ID NO: 128050 - RNA, 18 nt, Artificial Sequence
  Synthetic
gcacuccagacugaguga

SEQ ID NO: 128051 - RNA, 19 nt, Artificial Sequence
  Synthetic
gcuguucuccugauaguga

SEQ ID NO: 128052 - RNA, 19 nt, Artificial Sequence
  Synthetic
gcuguugucgugauaguga

SEQ ID NO: 128053 - RNA, 18 nt, Artificial Sequence
  Synthetic
guacuccagucuagguga

SEQ ID NO: 128054 - RNA, 24 nt, Artificial Sequence
  Synthetic
gcuacuguacuccagucuagguga

SEQ ID NO: 128055 - RNA, 19 nt, Artificial Sequence
  Synthetic
gcucugggugagucgguga

SEQ ID NO: 128056 - RNA, 22 nt, Artificial Sequence
  Synthetic
guugcucugggugagucgguga

SEQ ID NO: 128057 - RNA, 19 nt, Artificial Sequence
  Synthetic
gaucaagaaauggggguga

SEQ ID NO: 128058 - RNA, 20 nt, Artificial Sequence
  Synthetic
ggaucaagaaauggggguga

SEQ ID NO: 128059 - RNA, 18 nt, Artificial Sequence
  Synthetic
gcacuccgaccuggguga

SEQ ID NO: 128060 - RNA, 18 nt, Artificial Sequence
  Synthetic
gcacuccagccuggguga

SEQ ID NO: 128061 - RNA, 24 nt, Artificial Sequence
  Synthetic
gccacugcacuccagccuggguga

SEQ ID NO: 128062 - RNA, 24 nt, Artificial Sequence
  Synthetic
gccauugcacuccagccuggguga

SEQ ID NO: 128063 - RNA, 18 nt, Artificial Sequence
  Synthetic
gcauuccagccuggguga

SEQ ID NO: 128064 - RNA, 24 nt, Artificial Sequence
  Synthetic
gccacugcauuccagccuggguga

SEQ ID NO: 128065 - RNA, 18 nt, Artificial Sequence
  Synthetic
gcucucccgccuggguga

SEQ ID NO: 128066 - RNA, 24 nt, Artificial Sequence
  Synthetic
gccacugcucucccgccuggguga

SEQ ID NO: 128067 - RNA, 24 nt, Artificial Sequence
  Synthetic
guacuauguucacuaucuggguga

SEQ ID NO: 128068 - RNA, 21 nt, Artificial Sequence
  Synthetic
gcccaggcuggagugcuguga

SEQ ID NO: 128069 - RNA, 24 nt, Artificial Sequence
  Synthetic
guugcccaggcuggagugcuguga

SEQ ID NO: 128070 - RNA, 19 nt, Artificial Sequence
  Synthetic
guggagucagaagguguga

SEQ ID NO: 128071 - RNA, 22 nt, Artificial Sequence
  Synthetic
gaaguggagucagaagguguga

SEQ ID NO: 128072 - RNA, 24 nt, Artificial Sequence
  Synthetic
gagaaguggagucagaagguguga

SEQ ID NO: 128073 - RNA, 18 nt, Artificial Sequence
  Synthetic
gcaauaaauguucauuga

SEQ ID NO: 128074 - RNA, 22 nt, Artificial Sequence
  Synthetic
gaaugcaauaaauguucauuga

SEQ ID NO: 128075 - RNA, 23 nt, Artificial Sequence
  Synthetic
ggaaugcaauaaauguucauuga

SEQ ID NO: 128076 - RNA, 20 nt, Artificial Sequence
  Synthetic
gauggucuuuguuucauuga

SEQ ID NO: 128077 - RNA, 18 nt, Artificial Sequence
  Synthetic
gauugauugauugauuga

SEQ ID NO: 128078 - RNA, 22 nt, Artificial Sequence
  Synthetic
gauugauugauugauugauuga

SEQ ID NO: 128079 - RNA, 24 nt, Artificial Sequence
  Synthetic
guaacacaaaggagaaaugcuuga

SEQ ID NO: 128080 - RNA, 18 nt, Artificial Sequence
  Synthetic
guucucaauauuuguuga

SEQ ID NO: 128081 - RNA, 19 nt, Artificial Sequence
  Synthetic
gguucucaauauuuguuga

SEQ ID NO: 128082 - RNA, 22 nt, Artificial Sequence
  Synthetic
guagguucucaauauuuguuga

SEQ ID NO: 128083 - RNA, 19 nt, Artificial Sequence
  Synthetic
gaauuguuuuauaauuuga

SEQ ID NO: 128084 - RNA, 20 nt, Artificial Sequence
  Synthetic
guccuucacccacuuuuuga

SEQ ID NO: 128085 - RNA, 22 nt, Artificial Sequence
  Synthetic
gucuuuugcccauuuuuuuuga

SEQ ID NO: 128086 - RNA, 18 nt, Artificial Sequence
  Synthetic
gagagagggagaaaaaua

SEQ ID NO: 128087 - RNA, 19 nt, Artificial Sequence
  Synthetic
ggagagagggagaaaaaua

SEQ ID NO: 128088 - RNA, 20 nt, Artificial Sequence
  Synthetic
gggagagagggagaaaaaua

SEQ ID NO: 128089 - RNA, 22 nt, Artificial Sequence
  Synthetic
gagggagagagggagaaaaaua

SEQ ID NO: 128090 - RNA, 23 nt, Artificial Sequence
  Synthetic
ggagggagagagggagaaaaaua

SEQ ID NO: 128091 - RNA, 24 nt, Artificial Sequence
  Synthetic
gggagggagagagggagaaaaaua

SEQ ID NO: 128092 - RNA, 20 nt, Artificial Sequence
  Synthetic
gcagauuacuuugaaaaaua

SEQ ID NO: 128093 - RNA, 19 nt, Artificial Sequence
  Synthetic
gauuaauaaauacaaaaua

SEQ ID NO: 128094 - RNA, 20 nt, Artificial Sequence
  Synthetic
ggauuaauaaauacaaaaua

SEQ ID NO: 128095 - RNA, 18 nt, Artificial Sequence
  Synthetic
gacuugcaugggaaaaua

SEQ ID NO: 128096 - RNA, 21 nt, Artificial Sequence
  Synthetic
guaucuuuuuguuuuaaaaua

SEQ ID NO: 128097 - RNA, 18 nt, Artificial Sequence
  Synthetic
gcaauugaaaagcaaaua

SEQ ID NO: 128098 - RNA, 18 nt, Artificial Sequence
  Synthetic
gucaccaaagggcaaaua

SEQ ID NO: 128099 - RNA, 22 nt, Artificial Sequence
  Synthetic
gccagucaccaaagggcaaaua

SEQ ID NO: 128100 - RNA, 20 nt, Artificial Sequence
  Synthetic
gaagaaaagaagugcaaaua

SEQ ID NO: 128101 - RNA, 21 nt, Artificial Sequence
  Synthetic
guuaaaugucacuuucaaaua

SEQ ID NO: 128102 - RNA, 20 nt, Artificial Sequence
  Synthetic
gcauuuaagauaaagaaaua

SEQ ID NO: 128103 - RNA, 19 nt, Artificial Sequence
  Synthetic
guaaaauagaauagaaaua

SEQ ID NO: 128104 - RNA, 20 nt, Artificial Sequence
  Synthetic
gaaguagggagguggaaaua

SEQ ID NO: 128105 - RNA, 22 nt, Artificial Sequence
  Synthetic
gagaaguagggagguggaaaua

SEQ ID NO: 128106 - RNA, 18 nt, Artificial Sequence
  Synthetic
gguguggauguggaaaua

SEQ ID NO: 128107 - RNA, 20 nt, Artificial Sequence
  Synthetic
gagguguggauguggaaaua

SEQ ID NO: 128108 - RNA, 20 nt, Artificial Sequence
  Synthetic
gaauaggcacucaauaaaua

SEQ ID NO: 128109 - RNA, 22 nt, Artificial Sequence
  Synthetic
gccaccgcgcccagccuaaaua

SEQ ID NO: 128110 - RNA, 24 nt, Artificial Sequence
  Synthetic
gagccaccgcgcccagccuaaaua

SEQ ID NO: 128111 - RNA, 18 nt, Artificial Sequence
  Synthetic
gacaccauuuauuaaaua

SEQ ID NO: 128112 - RNA, 20 nt, Artificial Sequence
  Synthetic
guauuauucagccuuaaaua

SEQ ID NO: 128113 - RNA, 22 nt, Artificial Sequence
  Synthetic
gaguauuauucagccuuaaaua

SEQ ID NO: 128114 - RNA, 23 nt, Artificial Sequence
  Synthetic
ggaguauuauucagccuuaaaua

SEQ ID NO: 128115 - RNA, 21 nt, Artificial Sequence
  Synthetic
gaaucccugaauagaccaaua

SEQ ID NO: 128116 - RNA, 19 nt, Artificial Sequence
  Synthetic
gacugaaauggaagcaaua

SEQ ID NO: 128117 - RNA, 24 nt, Artificial Sequence
  Synthetic
gucacccuguugugcuaucgaaua

SEQ ID NO: 128118 - RNA, 24 nt, Artificial Sequence
  Synthetic
guuuauuaagaaaguaaaggaaua

SEQ ID NO: 128119 - RNA, 19 nt, Artificial Sequence
  Synthetic
gagguggagugagggaaua

SEQ ID NO: 128120 - RNA, 20 nt, Artificial Sequence
  Synthetic
ggagguggagugagggaaua

SEQ ID NO: 128121 - RNA, 18 nt, Artificial Sequence
  Synthetic
ggcuuaagcaugauaaua

SEQ ID NO: 128122 - RNA, 21 nt, Artificial Sequence
  Synthetic
guacauaaaaugcaauuaaua

SEQ ID NO: 128123 - RNA, 22 nt, Artificial Sequence
  Synthetic
gguacauaaaaugcaauuaaua

SEQ ID NO: 128124 - RNA, 21 nt, Artificial Sequence
  Synthetic
gauaacuuccacaucuuaaua

SEQ ID NO: 128125 - RNA, 22 nt, Artificial Sequence
  Synthetic
ggauaacuuccacaucuuaaua

SEQ ID NO: 128126 - RNA, 24 nt, Artificial Sequence
  Synthetic
gaggauaacuuccacaucuuaaua

SEQ ID NO: 128127 - RNA, 20 nt, Artificial Sequence
  Synthetic
gaagccauacugauaacaua

SEQ ID NO: 128128 - RNA, 19 nt, Artificial Sequence
  Synthetic
gaguucuaccccagacaua

SEQ ID NO: 128129 - RNA, 22 nt, Artificial Sequence
  Synthetic
guuucucccauuuuagaccaua

SEQ ID NO: 128130 - RNA, 23 nt, Artificial Sequence
  Synthetic
gguuucucccauuuuagaccaua

SEQ ID NO: 128131 - RNA, 24 nt, Artificial Sequence
  Synthetic
ggguuucucccauuuuagaccaua

SEQ ID NO: 128132 - RNA, 19 nt, Artificial Sequence
  Synthetic
guagcuaaugacuaccaua

SEQ ID NO: 128133 - RNA, 21 nt, Artificial Sequence
  Synthetic
guguagcuaaugacuaccaua

SEQ ID NO: 128134 - RNA, 18 nt, Artificial Sequence
  Synthetic
guauuaguuugagccaua

SEQ ID NO: 128135 - RNA, 23 nt, Artificial Sequence
  Synthetic
gaaccuccauaccguccuccaua

SEQ ID NO: 128136 - RNA, 24 nt, Artificial Sequence
  Synthetic
ggaaccuccauaccguccuccaua

SEQ ID NO: 128137 - RNA, 18 nt, Artificial Sequence
  Synthetic
gagaaugagguguccaua

SEQ ID NO: 128138 - RNA, 19 nt, Artificial Sequence
  Synthetic
ggagaaugagguguccaua

SEQ ID NO: 128139 - RNA, 18 nt, Artificial Sequence
  Synthetic
gccagcuaugugagcaua

SEQ ID NO: 128140 - RNA, 24 nt, Artificial Sequence
  Synthetic
gacaaacccacagccauuaucaua

SEQ ID NO: 128141 - RNA, 19 nt, Artificial Sequence
  Synthetic
guuaagaauuuuuaucaua

SEQ ID NO: 128142 - RNA, 19 nt, Artificial Sequence
  Synthetic
gauuuuuuuuuucaagaua

SEQ ID NO: 128143 - RNA, 23 nt, Artificial Sequence
  Synthetic
guuagauuuuuuuuuucaagaua

SEQ ID NO: 128144 - RNA, 18 nt, Artificial Sequence
  Synthetic
gucaaauauauacagaua

SEQ ID NO: 128145 - RNA, 19 nt, Artificial Sequence
  Synthetic
ggucaaauauauacagaua

SEQ ID NO: 128146 - RNA, 20 nt, Artificial Sequence
  Synthetic
gaauguauccccuacagaua

SEQ ID NO: 128147 - RNA, 21 nt, Artificial Sequence
  Synthetic
ggaauguauccccuacagaua

SEQ ID NO: 128148 - RNA, 19 nt, Artificial Sequence
  Synthetic
gauauaaauaauucagaua

SEQ ID NO: 128149 - RNA, 21 nt, Artificial Sequence
  Synthetic
ggugaucagguaccaaggaua

SEQ ID NO: 128150 - RNA, 22 nt, Artificial Sequence
  Synthetic
gggugaucagguaccaaggaua

SEQ ID NO: 128151 - RNA, 24 nt, Artificial Sequence
  Synthetic
gagggugaucagguaccaaggaua

SEQ ID NO: 128152 - RNA, 18 nt, Artificial Sequence
  Synthetic
gucuuaguggucuggaua

SEQ ID NO: 128153 - RNA, 22 nt, Artificial Sequence
  Synthetic
gaaugucuuaguggucuggaua

SEQ ID NO: 128154 - RNA, 24 nt, Artificial Sequence
  Synthetic
gagaaugucuuaguggucuggaua

SEQ ID NO: 128155 - RNA, 23 nt, Artificial Sequence
  Synthetic
gacacagacuggcaaauuggaua

SEQ ID NO: 128156 - RNA, 18 nt, Artificial Sequence
  Synthetic
gucacaaaagccaugaua

SEQ ID NO: 128157 - RNA, 24 nt, Artificial Sequence
  Synthetic
gcauuagucacaaaagccaugaua

SEQ ID NO: 128158 - RNA, 24 nt, Artificial Sequence
  Synthetic
gcacuuuucauacuagccaugaua

SEQ ID NO: 128159 - RNA, 21 nt, Artificial Sequence
  Synthetic
gcccaugcuguucuccugaua

SEQ ID NO: 128160 - RNA, 20 nt, Artificial Sequence
  Synthetic
guuauuuucugugaaauaua

SEQ ID NO: 128161 - RNA, 18 nt, Artificial Sequence
  Synthetic
gggguacauauauauaua

SEQ ID NO: 128162 - RNA, 20 nt, Artificial Sequence
  Synthetic
gugggguacauauauauaua

SEQ ID NO: 128163 - RNA, 24 nt, Artificial Sequence
  Synthetic
gccauauauauauauauauauaua

SEQ ID NO: 128164 - RNA, 18 nt, Artificial Sequence
  Synthetic
gacauuuuuaauuauaua

SEQ ID NO: 128165 - RNA, 19 nt, Artificial Sequence
  Synthetic
guaugaucucacuuauaua

SEQ ID NO: 128166 - RNA, 19 nt, Artificial Sequence
  Synthetic
guguuuuauuuuuuauaua

SEQ ID NO: 128167 - RNA, 20 nt, Artificial Sequence
  Synthetic
gguguuuuauuuuuuauaua

SEQ ID NO: 128168 - RNA, 24 nt, Artificial Sequence
  Synthetic
gcaucuugaguugauuuuuguaua

SEQ ID NO: 128169 - RNA, 18 nt, Artificial Sequence
  Synthetic
gagacugggcaauuuaua

SEQ ID NO: 128170 - RNA, 22 nt, Artificial Sequence
  Synthetic
gccagagacugggcaauuuaua

SEQ ID NO: 128171 - RNA, 19 nt, Artificial Sequence
  Synthetic
gaaccagaaaaaauaacua

SEQ ID NO: 128172 - RNA, 21 nt, Artificial Sequence
  Synthetic
gagaaccagaaaaaauaacua

SEQ ID NO: 128173 - RNA, 23 nt, Artificial Sequence
  Synthetic
gagagaaccagaaaaaauaacua

SEQ ID NO: 128174 - RNA, 24 nt, Artificial Sequence
  Synthetic
ggagagaaccagaaaaaauaacua

SEQ ID NO: 128175 - RNA, 18 nt, Artificial Sequence
  Synthetic
ggcaaaaucagaacacua

SEQ ID NO: 128176 - RNA, 19 nt, Artificial Sequence
  Synthetic
gggcaaaaucagaacacua

SEQ ID NO: 128177 - RNA, 19 nt, Artificial Sequence
  Synthetic
gcccuucaucccaaaccua

SEQ ID NO: 128178 - RNA, 18 nt, Artificial Sequence
  Synthetic
gagugaacaagcaaccua

SEQ ID NO: 128179 - RNA, 18 nt, Artificial Sequence
  Synthetic
ggguugaaaaacuaccua

SEQ ID NO: 128180 - RNA, 22 nt, Artificial Sequence
  Synthetic
gcaaggguugaaaaacuaccua

SEQ ID NO: 128181 - RNA, 23 nt, Artificial Sequence
  Synthetic
ggcaaggguugaaaaacuaccua

SEQ ID NO: 128182 - RNA, 24 nt, Artificial Sequence
  Synthetic
gggcaaggguugaaaaacuaccua

SEQ ID NO: 128183 - RNA, 22 nt, Artificial Sequence
  Synthetic
gucauuaacuauagucacccua

SEQ ID NO: 128184 - RNA, 24 nt, Artificial Sequence
  Synthetic
guucaaaguguaaugacugcccua

SEQ ID NO: 128185 - RNA, 20 nt, Artificial Sequence
  Synthetic
gauucuccugccucagccua

SEQ ID NO: 128186 - RNA, 22 nt, Artificial Sequence
  Synthetic
gcuauucucuugccucagccua

SEQ ID NO: 128187 - RNA, 22 nt, Artificial Sequence
  Synthetic
gcaauccuccuccuucagccua

SEQ ID NO: 128188 - RNA, 21 nt, Artificial Sequence
  Synthetic
guuugagucuagccuggccua

SEQ ID NO: 128189 - RNA, 24 nt, Artificial Sequence
  Synthetic
gaaguuugagucuagccuggccua

SEQ ID NO: 128190 - RNA, 19 nt, Artificial Sequence
  Synthetic
gaagauguacaaauagcua

SEQ ID NO: 128191 - RNA, 21 nt, Artificial Sequence
  Synthetic
gauaugcuuuuuaaugugcua

SEQ ID NO: 128192 - RNA, 22 nt, Artificial Sequence
  Synthetic
ggauaugcuuuuuaaugugcua

SEQ ID NO: 128193 - RNA, 21 nt, Artificial Sequence
  Synthetic
gauagucacccuguugugcua

SEQ ID NO: 128194 - RNA, 24 nt, Artificial Sequence
  Synthetic
gacgauagucacccuguugugcua

SEQ ID NO: 128195 - RNA, 19 nt, Artificial Sequence
  Synthetic
gugauuuguuuucuugcua

SEQ ID NO: 128196 - RNA, 20 nt, Artificial Sequence
  Synthetic
ggugauuuguuuucuugcua

SEQ ID NO: 128197 - RNA, 24 nt, Artificial Sequence
  Synthetic
gucaggugauuuguuuucuugcua

SEQ ID NO: 128198 - RNA, 19 nt, Artificial Sequence
  Synthetic
gcagaguuuuuguauucua

SEQ ID NO: 128199 - RNA, 18 nt, Artificial Sequence
  Synthetic
gcucauuucuguuuucua

SEQ ID NO: 128200 - RNA, 22 nt, Artificial Sequence
  Synthetic
gauauacaaaagguaaaaagua

SEQ ID NO: 128201 - RNA, 18 nt, Artificial Sequence
  Synthetic
gucaaacucauugaagua

SEQ ID NO: 128202 - RNA, 18 nt, Artificial Sequence
  Synthetic
gucagaaaagagccagua

SEQ ID NO: 128203 - RNA, 20 nt, Artificial Sequence
  Synthetic
gagucagaaaagagccagua

SEQ ID NO: 128204 - RNA, 20 nt, Artificial Sequence
  Synthetic
gucuuuccaugaaggcagua

SEQ ID NO: 128205 - RNA, 19 nt, Artificial Sequence
  Synthetic
guacuuuuaaauacuagua

SEQ ID NO: 128206 - RNA, 23 nt, Artificial Sequence
  Synthetic
gcauaaagguguucauaguagua

SEQ ID NO: 128207 - RNA, 21 nt, Artificial Sequence
  Synthetic
gcauggauacagggagaggua

SEQ ID NO: 128208 - RNA, 22 nt, Artificial Sequence
  Synthetic
ggcauggauacagggagaggua

SEQ ID NO: 128209 - RNA, 23 nt, Artificial Sequence
  Synthetic
gggcauggauacagggagaggua

SEQ ID NO: 128210 - RNA, 18 nt, Artificial Sequence
  Synthetic
gggauucagaaagcggua

SEQ ID NO: 128211 - RNA, 21 nt, Artificial Sequence
  Synthetic
gccgggauucagaaagcggua

SEQ ID NO: 128212 - RNA, 20 nt, Artificial Sequence
  Synthetic
gaaauaccugagacugggua

SEQ ID NO: 128213 - RNA, 20 nt, Artificial Sequence
  Synthetic
gauuuauuuuuaccuuggua

SEQ ID NO: 128214 - RNA, 19 nt, Artificial Sequence
  Synthetic
gauguucaauaaaaaugua

SEQ ID NO: 128215 - RNA, 20 nt, Artificial Sequence
  Synthetic
ggauguucaauaaaaaugua

SEQ ID NO: 128216 - RNA, 23 nt, Artificial Sequence
  Synthetic
gcuggguugcaguuugcuaugua

SEQ ID NO: 128217 - RNA, 18 nt, Artificial Sequence
  Synthetic
guacagcaugugacugua

SEQ ID NO: 128218 - RNA, 19 nt, Artificial Sequence
  Synthetic
gaaucugggugcuccugua

SEQ ID NO: 128219 - RNA, 19 nt, Artificial Sequence
  Synthetic
guuuccuaauaaaaaauua

SEQ ID NO: 128220 - RNA, 20 nt, Artificial Sequence
  Synthetic
gucuugaagugacagaauua

SEQ ID NO: 128221 - RNA, 18 nt, Artificial Sequence
  Synthetic
ggaugcauggaugaauua

SEQ ID NO: 128222 - RNA, 18 nt, Artificial Sequence
  Synthetic
gaucaggaaaaauaauua

SEQ ID NO: 128223 - RNA, 21 nt, Artificial Sequence
  Synthetic
gaagaucaggaaaaauaauua

SEQ ID NO: 128224 - RNA, 23 nt, Artificial Sequence
  Synthetic
gagaagaucaggaaaaauaauua

SEQ ID NO: 128225 - RNA, 24 nt, Artificial Sequence
  Synthetic
ggagaagaucaggaaaaauaauua

SEQ ID NO: 128226 - RNA, 22 nt, Artificial Sequence
  Synthetic
gucucaaauaaauaaauaauua

SEQ ID NO: 128227 - RNA, 19 nt, Artificial Sequence
  Synthetic
gaugaaaaugaaguaauua

SEQ ID NO: 128228 - RNA, 18 nt, Artificial Sequence
  Synthetic
gacccaucaaucccauua

SEQ ID NO: 128229 - RNA, 18 nt, Artificial Sequence
  Synthetic
gacccagccaucccauua

SEQ ID NO: 128230 - RNA, 18 nt, Artificial Sequence
  Synthetic
gagaauacaaaaauauua

SEQ ID NO: 128231 - RNA, 19 nt, Artificial Sequence
  Synthetic
ggagaauacaaaaauauua

SEQ ID NO: 128232 - RNA, 18 nt, Artificial Sequence
  Synthetic
gauaagaaagaaauauua

SEQ ID NO: 128233 - RNA, 20 nt, Artificial Sequence
  Synthetic
guuuuaaaauuuuuauauua

SEQ ID NO: 128234 - RNA, 19 nt, Artificial Sequence
  Synthetic
gauguucaacaaauuauua

SEQ ID NO: 128235 - RNA, 21 nt, Artificial Sequence
  Synthetic
gagauguucaacaaauuauua

SEQ ID NO: 128236 - RNA, 22 nt, Artificial Sequence
  Synthetic
ggagauguucaacaaauuauua

SEQ ID NO: 128237 - RNA, 20 nt, Artificial Sequence
  Synthetic
gcuuaugaggcacccacuua

SEQ ID NO: 128238 - RNA, 23 nt, Artificial Sequence
  Synthetic
guauuuugaauacugaccccuua

SEQ ID NO: 128239 - RNA, 21 nt, Artificial Sequence
  Synthetic
gaaguauguucaugagccuua

SEQ ID NO: 128240 - RNA, 24 nt, Artificial Sequence
  Synthetic
gcagaaguauguucaugagccuua

SEQ ID NO: 128241 - RNA, 21 nt, Artificial Sequence
  Synthetic
ggucuuagaugagccagcuua

SEQ ID NO: 128242 - RNA, 23 nt, Artificial Sequence
  Synthetic
gaggucuuagaugagccagcuua

SEQ ID NO: 128243 - RNA, 19 nt, Artificial Sequence
  Synthetic
gacacauagagggugcuua

SEQ ID NO: 128244 - RNA, 20 nt, Artificial Sequence
  Synthetic
gcuuuuguugccugugcuua

SEQ ID NO: 128245 - RNA, 18 nt, Artificial Sequence
  Synthetic
guuuccuaggcuuucuua

SEQ ID NO: 128246 - RNA, 20 nt, Artificial Sequence
  Synthetic
guguuuccuaggcuuucuua

SEQ ID NO: 128247 - RNA, 21 nt, Artificial Sequence
  Synthetic
gguguuuccuaggcuuucuua

SEQ ID NO: 128248 - RNA, 23 nt, Artificial Sequence
  Synthetic
gugguguuuccuaggcuuucuua

SEQ ID NO: 128249 - RNA, 18 nt, Artificial Sequence
  Synthetic
gaugagaaguaacaguua

SEQ ID NO: 128250 - RNA, 19 nt, Artificial Sequence
  Synthetic
gaaauuauugaauauguua

SEQ ID NO: 128251 - RNA, 20 nt, Artificial Sequence
  Synthetic
ggaaauuauugaauauguua

SEQ ID NO: 128252 - RNA, 19 nt, Artificial Sequence
  Synthetic
gacuauuuuguguauguua

SEQ ID NO: 128253 - RNA, 19 nt, Artificial Sequence
  Synthetic
guuuauuucauugguguua

SEQ ID NO: 128254 - RNA, 18 nt, Artificial Sequence
  Synthetic
gauauuauuucauuguua

SEQ ID NO: 128255 - RNA, 22 nt, Artificial Sequence
  Synthetic
gcuugauauuauuucauuguua

SEQ ID NO: 128256 - RNA, 19 nt, Artificial Sequence
  Synthetic
guuauuuguuuucuuguua

SEQ ID NO: 128257 - RNA, 20 nt, Artificial Sequence
  Synthetic
gguuauuuguuuucuuguua

SEQ ID NO: 128258 - RNA, 21 nt, Artificial Sequence
  Synthetic
ggguuauuuguuuucuuguua

SEQ ID NO: 128259 - RNA, 18 nt, Artificial Sequence
  Synthetic
gcaacuucagcaaauuua

SEQ ID NO: 128260 - RNA, 18 nt, Artificial Sequence
  Synthetic
gaggccucaagaaauuua

SEQ ID NO: 128261 - RNA, 19 nt, Artificial Sequence
  Synthetic
gauuuuacuuugaaauuua

SEQ ID NO: 128262 - RNA, 19 nt, Artificial Sequence
  Synthetic
gaauaucucauucaauuua

SEQ ID NO: 128263 - RNA, 22 nt, Artificial Sequence
  Synthetic
guugaauaucucauucaauuua

SEQ ID NO: 128264 - RNA, 24 nt, Artificial Sequence
  Synthetic
guguugaauaucucauucaauuua

SEQ ID NO: 128265 - RNA, 19 nt, Artificial Sequence
  Synthetic
gaguuaugaaauccauuua

SEQ ID NO: 128266 - RNA, 20 nt, Artificial Sequence
  Synthetic
guucauucaacaaauauuua

SEQ ID NO: 128267 - RNA, 24 nt, Artificial Sequence
  Synthetic
guacacaguagguauauauauuua

SEQ ID NO: 128268 - RNA, 24 nt, Artificial Sequence
  Synthetic
guacauaguagguauauauauuua

SEQ ID NO: 128269 - RNA, 20 nt, Artificial Sequence
  Synthetic
gaucauuugacaaguauuua

SEQ ID NO: 128270 - RNA, 20 nt, Artificial Sequence
  Synthetic
guaauaacuauauguauuua

SEQ ID NO: 128271 - RNA, 24 nt, Artificial Sequence
  Synthetic
guacauaguagguguauguauuua

SEQ ID NO: 128272 - RNA, 18 nt, Artificial Sequence
  Synthetic
guacugcaugugacuuua

SEQ ID NO: 128273 - RNA, 21 nt, Artificial Sequence
  Synthetic
gcaaauauuuuuacaucuuua

SEQ ID NO: 128274 - RNA, 19 nt, Artificial Sequence
  Synthetic
gcuuuaccaacuaaguuua

SEQ ID NO: 128275 - RNA, 22 nt, Artificial Sequence
  Synthetic
gcugcuuuaccaacuaaguuua

SEQ ID NO: 128276 - RNA, 21 nt, Artificial Sequence
  Synthetic
gucccaucaauaacuaguuua

SEQ ID NO: 128277 - RNA, 19 nt, Artificial Sequence
  Synthetic
guuggacagcacagguuua

SEQ ID NO: 128278 - RNA, 21 nt, Artificial Sequence
  Synthetic
guguuggacagcacagguuua

SEQ ID NO: 128279 - RNA, 18 nt, Artificial Sequence
  Synthetic
guuaugcaguauuguuua

SEQ ID NO: 128280 - RNA, 21 nt, Artificial Sequence
  Synthetic
guuguuaugcaguauuguuua

SEQ ID NO: 128281 - RNA, 20 nt, Artificial Sequence
  Synthetic
gaaugagggcuuauuguuua

SEQ ID NO: 128282 - RNA, 22 nt, Artificial Sequence
  Synthetic
gagaaugagggcuuauuguuua

SEQ ID NO: 128283 - RNA, 18 nt, Artificial Sequence
  Synthetic
gaauaaauguaaauuuua

SEQ ID NO: 128284 - RNA, 19 nt, Artificial Sequence
  Synthetic
ggaauaaauguaaauuuua

SEQ ID NO: 128285 - RNA, 21 nt, Artificial Sequence
  Synthetic
guucaguuugcuaguauuuua

SEQ ID NO: 128286 - RNA, 23 nt, Artificial Sequence
  Synthetic
gaguucaguuugcuaguauuuua

SEQ ID NO: 128287 - RNA, 20 nt, Artificial Sequence
  Synthetic
gucucucucucucucuuuua

SEQ ID NO: 128288 - RNA, 22 nt, Artificial Sequence
  Synthetic
gugucucucucucucucuuuua

SEQ ID NO: 128289 - RNA, 18 nt, Artificial Sequence
  Synthetic
gauuucuauuuucuuuua

SEQ ID NO: 128290 - RNA, 19 nt, Artificial Sequence
  Synthetic
gcuacuuuggguauuuuua

SEQ ID NO: 128291 - RNA, 22 nt, Artificial Sequence
  Synthetic
gccuuacaaaauguacuuuuua

SEQ ID NO: 128292 - RNA, 18 nt, Artificial Sequence
  Synthetic
guuuuguuuuguuuuuua

SEQ ID NO: 128293 - RNA, 23 nt, Artificial Sequence
  Synthetic
guuuuguuuuguuuuguuuuuua

SEQ ID NO: 128294 - RNA, 24 nt, Artificial Sequence
  Synthetic
guauuuugggaaaaaaaaaaaaac

SEQ ID NO: 128295 - RNA, 20 nt, Artificial Sequence
  Synthetic
gauguaaacaagacaaaaac

SEQ ID NO: 128296 - RNA, 21 nt, Artificial Sequence
  Synthetic
ggauguaaacaagacaaaaac

SEQ ID NO: 128297 - RNA, 24 nt, Artificial Sequence
  Synthetic
guaggauguaaacaagacaaaaac

SEQ ID NO: 128298 - RNA, 20 nt, Artificial Sequence
  Synthetic
gaaacgaaaggagagaaaac

SEQ ID NO: 128299 - RNA, 24 nt, Artificial Sequence
  Synthetic
gaaagaaacgaaaggagagaaaac

SEQ ID NO: 128300 - RNA, 19 nt, Artificial Sequence
  Synthetic
guuuguucaacuguaaaac

SEQ ID NO: 128301 - RNA, 23 nt, Artificial Sequence
  Synthetic
guuaauuuucucaucuguaaaac

SEQ ID NO: 128302 - RNA, 24 nt, Artificial Sequence
  Synthetic
guauauaucccaaagaauuaaaac

SEQ ID NO: 128303 - RNA, 22 nt, Artificial Sequence
  Synthetic
gaacaaaacaaaacaaacaaac

SEQ ID NO: 128304 - RNA, 19 nt, Artificial Sequence
  Synthetic
gaagaacugauggacaaac

SEQ ID NO: 128305 - RNA, 19 nt, Artificial Sequence
  Synthetic
gugaggcuugccaagaaac

SEQ ID NO: 128306 - RNA, 20 nt, Artificial Sequence
  Synthetic
ggugaggcuugccaagaaac

SEQ ID NO: 128307 - RNA, 21 nt, Artificial Sequence
  Synthetic
gcaacaacaaaaaaaggaaac

SEQ ID NO: 128308 - RNA, 23 nt, Artificial Sequence
  Synthetic
gacaaaggggaaugguaauaaac

SEQ ID NO: 128309 - RNA, 24 nt, Artificial Sequence
  Synthetic
ggacaaaggggaaugguaauaaac

SEQ ID NO: 128310 - RNA, 22 nt, Artificial Sequence
  Synthetic
gacucccaguacuaaguuaaac

SEQ ID NO: 128311 - RNA, 23 nt, Artificial Sequence
  Synthetic
ggacucccaguacuaaguuaaac

SEQ ID NO: 128312 - RNA, 19 nt, Artificial Sequence
  Synthetic
gcacucuaaccugggcaac

SEQ ID NO: 128313 - RNA, 19 nt, Artificial Sequence
  Synthetic
gcgcuccagccugggcaac

SEQ ID NO: 128314 - RNA, 19 nt, Artificial Sequence
  Synthetic
guagaaauagcaugagaac

SEQ ID NO: 128315 - RNA, 20 nt, Artificial Sequence
  Synthetic
gguagaaauagcaugagaac

SEQ ID NO: 128316 - RNA, 22 nt, Artificial Sequence
  Synthetic
gugguagaaauagcaugagaac

SEQ ID NO: 128317 - RNA, 21 nt, Artificial Sequence
  Synthetic
gauuccucaggcaucuagaac

SEQ ID NO: 128318 - RNA, 23 nt, Artificial Sequence
  Synthetic
gcgauuccucaggcaucuagaac

SEQ ID NO: 128319 - RNA, 24 nt, Artificial Sequence
  Synthetic
ggcgauuccucaggcaucuagaac

SEQ ID NO: 128320 - RNA, 22 nt, Artificial Sequence
  Synthetic
gaaaugacauuugaaaaggaac

SEQ ID NO: 128321 - RNA, 23 nt, Artificial Sequence
  Synthetic
ggaaaugacauuugaaaaggaac

SEQ ID NO: 128322 - RNA, 19 nt, Artificial Sequence
  Synthetic
guagaaauaacacaggaac

SEQ ID NO: 128323 - RNA, 20 nt, Artificial Sequence
  Synthetic
gguagaaauaacacaggaac

SEQ ID NO: 128324 - RNA, 18 nt, Artificial Sequence
  Synthetic
guguuaugagccaggaac

SEQ ID NO: 128325 - RNA, 19 nt, Artificial Sequence
  Synthetic
gguguuaugagccaggaac

SEQ ID NO: 128326 - RNA, 20 nt, Artificial Sequence
  Synthetic
ggguguuaugagccaggaac

SEQ ID NO: 128327 - RNA, 19 nt, Artificial Sequence
  Synthetic
guauguauguuaaaugaac

SEQ ID NO: 128328 - RNA, 18 nt, Artificial Sequence
  Synthetic
ggguaauuuauaaugaac

SEQ ID NO: 128329 - RNA, 22 nt, Artificial Sequence
  Synthetic
gacuggguaauuuauaaugaac

SEQ ID NO: 128330 - RNA, 24 nt, Artificial Sequence
  Synthetic
gcuucuuuacaauccauuuugaac

SEQ ID NO: 128331 - RNA, 19 nt, Artificial Sequence
  Synthetic
gcauaaggaaggaaauaac

SEQ ID NO: 128332 - RNA, 18 nt, Artificial Sequence
  Synthetic
guuagaggaauugcuaac

SEQ ID NO: 128333 - RNA, 19 nt, Artificial Sequence
  Synthetic
gguuagaggaauugcuaac

SEQ ID NO: 128334 - RNA, 18 nt, Artificial Sequence
  Synthetic
gauaauagccauucuaac

SEQ ID NO: 128335 - RNA, 19 nt, Artificial Sequence
  Synthetic
gauuucaaaaugcaguaac

SEQ ID NO: 128336 - RNA, 20 nt, Artificial Sequence
  Synthetic
ggauuucaaaaugcaguaac

SEQ ID NO: 128337 - RNA, 20 nt, Artificial Sequence
  Synthetic
gccucagccucccgaguaac

SEQ ID NO: 128338 - RNA, 18 nt, Artificial Sequence
  Synthetic
guuuucucauuuaguaac

SEQ ID NO: 128339 - RNA, 23 nt, Artificial Sequence
  Synthetic
gaaauacugauaugcacuguaac

SEQ ID NO: 128340 - RNA, 23 nt, Artificial Sequence
  Synthetic
gaucaacgaaacagaaaauuaac

SEQ ID NO: 128341 - RNA, 24 nt, Artificial Sequence
  Synthetic
ggaucaacgaaacagaaaauuaac

SEQ ID NO: 128342 - RNA, 18 nt, Artificial Sequence
  Synthetic
gauauaagccauuuuaac

SEQ ID NO: 128343 - RNA, 19 nt, Artificial Sequence
  Synthetic
ggauauaagccauuuuaac

SEQ ID NO: 128344 - RNA, 19 nt, Artificial Sequence
  Synthetic
gcuuauguacuauuuuaac

SEQ ID NO: 128345 - RNA, 20 nt, Artificial Sequence
  Synthetic
ggcuuauguacuauuuuaac

SEQ ID NO: 128346 - RNA, 21 nt, Artificial Sequence
  Synthetic
gggcuuauguacuauuuuaac

SEQ ID NO: 128347 - RNA, 22 nt, Artificial Sequence
  Synthetic
ggggcuuauguacuauuuuaac

SEQ ID NO: 128348 - RNA, 19 nt, Artificial Sequence
  Synthetic
gugcuacucuguugaacac

SEQ ID NO: 128349 - RNA, 18 nt, Artificial Sequence
  Synthetic
gcaaaacaaaauguacac

SEQ ID NO: 128350 - RNA, 19 nt, Artificial Sequence
  Synthetic
gaugcucauugauuuacac

SEQ ID NO: 128351 - RNA, 19 nt, Artificial Sequence
  Synthetic
guugaaugucagaaaccac

SEQ ID NO: 128352 - RNA, 20 nt, Artificial Sequence
  Synthetic
gcuuuuaguauauccaccac

SEQ ID NO: 128353 - RNA, 22 nt, Artificial Sequence
  Synthetic
gagcuuuuaguauauccaccac

SEQ ID NO: 128354 - RNA, 18 nt, Artificial Sequence
  Synthetic
gguaaaguuucugaccac

SEQ ID NO: 128355 - RNA, 21 nt, Artificial Sequence
  Synthetic
gagauaguacuuuuuacccac

SEQ ID NO: 128356 - RNA, 22 nt, Artificial Sequence
  Synthetic
ggagauaguacuuuuuacccac

SEQ ID NO: 128357 - RNA, 19 nt, Artificial Sequence
  Synthetic
gccuccugcaaagagccac

SEQ ID NO: 128358 - RNA, 20 nt, Artificial Sequence
  Synthetic
ggccuccugcaaagagccac

SEQ ID NO: 128359 - RNA, 21 nt, Artificial Sequence
  Synthetic
guucucaaacuuuagcuccac

SEQ ID NO: 128360 - RNA, 22 nt, Artificial Sequence
  Synthetic
gguucucaaacuuuagcuccac

SEQ ID NO: 128361 - RNA, 24 nt, Artificial Sequence
  Synthetic
gugguucucaaacuuuagcuccac

SEQ ID NO: 128362 - RNA, 19 nt, Artificial Sequence
  Synthetic
gcacccaauauaggagcac

SEQ ID NO: 128363 - RNA, 22 nt, Artificial Sequence
  Synthetic
gcuacucaggagccugaggcac

SEQ ID NO: 128364 - RNA, 21 nt, Artificial Sequence
  Synthetic
guucauguccuuuguaggcac

SEQ ID NO: 128365 - RNA, 23 nt, Artificial Sequence
  Synthetic
gaguucauguccuuuguaggcac

SEQ ID NO: 128366 - RNA, 19 nt, Artificial Sequence
  Synthetic
guaaugaaauuauuggcac

SEQ ID NO: 128367 - RNA, 18 nt, Artificial Sequence
  Synthetic
gcaauaacuguaaugcac

SEQ ID NO: 128368 - RNA, 20 nt, Artificial Sequence
  Synthetic
gugcaauaacuguaaugcac

SEQ ID NO: 128369 - RNA, 22 nt, Artificial Sequence
  Synthetic
gugugcaauaacuguaaugcac

SEQ ID NO: 128370 - RNA, 19 nt, Artificial Sequence
  Synthetic
gacuguacauugaaaucac

SEQ ID NO: 128371 - RNA, 19 nt, Artificial Sequence
  Synthetic
gugcgcccaauguaaucac

SEQ ID NO: 128372 - RNA, 20 nt, Artificial Sequence
  Synthetic
gauccuggugcacccaucac

SEQ ID NO: 128373 - RNA, 22 nt, Artificial Sequence
  Synthetic
gagauccuggugcacccaucac

SEQ ID NO: 128374 - RNA, 24 nt, Artificial Sequence
  Synthetic
gugagauccuggugcacccaucac

SEQ ID NO: 128375 - RNA, 22 nt, Artificial Sequence
  Synthetic
gugggucccagaucagcaucac

SEQ ID NO: 128376 - RNA, 24 nt, Artificial Sequence
  Synthetic
gugugggucccagaucagcaucac

SEQ ID NO: 128377 - RNA, 19 nt, Artificial Sequence
  Synthetic
gcugaggcaggcagaucac

SEQ ID NO: 128378 - RNA, 22 nt, Artificial Sequence
  Synthetic
gaagcugaggcaggcagaucac

SEQ ID NO: 128379 - RNA, 23 nt, Artificial Sequence
  Synthetic
ggaagcugaggcaggcagaucac

SEQ ID NO: 128380 - RNA, 24 nt, Artificial Sequence
  Synthetic
gggaagcugaggcaggcagaucac

SEQ ID NO: 128381 - RNA, 19 nt, Artificial Sequence
  Synthetic
gcugggaugggcagaucac

SEQ ID NO: 128382 - RNA, 20 nt, Artificial Sequence
  Synthetic
ggcugggaugggcagaucac

SEQ ID NO: 128383 - RNA, 22 nt, Artificial Sequence
  Synthetic
gaggcugggaugggcagaucac

SEQ ID NO: 128384 - RNA, 23 nt, Artificial Sequence
  Synthetic
ggaggcugggaugggcagaucac

SEQ ID NO: 128385 - RNA, 24 nt, Artificial Sequence
  Synthetic
gggaggcugggaugggcagaucac

SEQ ID NO: 128386 - RNA, 18 nt, Artificial Sequence
  Synthetic
gaucacuggcagguucac

SEQ ID NO: 128387 - RNA, 20 nt, Artificial Sequence
  Synthetic
gagaucacuggcagguucac

SEQ ID NO: 128388 - RNA, 24 nt, Artificial Sequence
  Synthetic
gucagagaucacuggcagguucac

SEQ ID NO: 128389 - RNA, 20 nt, Artificial Sequence
  Synthetic
gaaacaggaacaaaaaagac

SEQ ID NO: 128390 - RNA, 22 nt, Artificial Sequence
  Synthetic
gagaaacaggaacaaaaaagac

SEQ ID NO: 128391 - RNA, 23 nt, Artificial Sequence
  Synthetic
ggagaaacaggaacaaaaaagac

SEQ ID NO: 128392 - RNA, 20 nt, Artificial Sequence
  Synthetic
guaaaaagugggcaaaagac

SEQ ID NO: 128393 - RNA, 20 nt, Artificial Sequence
  Synthetic
gacuuaggagucagaaagac

SEQ ID NO: 128394 - RNA, 20 nt, Artificial Sequence
  Synthetic
gaauuuuauuuuugaaagac

SEQ ID NO: 128395 - RNA, 18 nt, Artificial Sequence
  Synthetic
gaagaacaugaacaagac

SEQ ID NO: 128396 - RNA, 20 nt, Artificial Sequence
  Synthetic
gcugaguccagcucucagac

SEQ ID NO: 128397 - RNA, 18 nt, Artificial Sequence
  Synthetic
gucuguuuuaucagagac

SEQ ID NO: 128398 - RNA, 18 nt, Artificial Sequence
  Synthetic
gaaaggaaagggggagac

SEQ ID NO: 128399 - RNA, 19 nt, Artificial Sequence
  Synthetic
ggaaaggaaagggggagac

SEQ ID NO: 128400 - RNA, 20 nt, Artificial Sequence
  Synthetic
gggaaaggaaagggggagac

SEQ ID NO: 128401 - RNA, 21 nt, Artificial Sequence
  Synthetic
ggggaaaggaaagggggagac

SEQ ID NO: 128402 - RNA, 24 nt, Artificial Sequence
  Synthetic
gaaggggaaaggaaagggggagac

SEQ ID NO: 128403 - RNA, 18 nt, Artificial Sequence
  Synthetic
gaugaugcugacugagac

SEQ ID NO: 128404 - RNA, 23 nt, Artificial Sequence
  Synthetic
gcuauaaagaacuucccugagac

SEQ ID NO: 128405 - RNA, 18 nt, Artificial Sequence
  Synthetic
gcaccacugcacuccgac

SEQ ID NO: 128406 - RNA, 22 nt, Artificial Sequence
  Synthetic
gauagcaccacugcacuccgac

SEQ ID NO: 128407 - RNA, 24 nt, Artificial Sequence
  Synthetic
gagauagcaccacugcacuccgac

SEQ ID NO: 128408 - RNA, 21 nt, Artificial Sequence
  Synthetic
gaucauguccuuugcagcgac

SEQ ID NO: 128409 - RNA, 23 nt, Artificial Sequence
  Synthetic
gagaucauguccuuugcagcgac

SEQ ID NO: 128410 - RNA, 21 nt, Artificial Sequence
  Synthetic
guucguguccuuuguaaggac

SEQ ID NO: 128411 - RNA, 23 nt, Artificial Sequence
  Synthetic
gcguucguguccuuuguaaggac

SEQ ID NO: 128412 - RNA, 22 nt, Artificial Sequence
  Synthetic
gaucaaagacaaugaacaggac

SEQ ID NO: 128413 - RNA, 19 nt, Artificial Sequence
  Synthetic
gaauaaauacacaacggac

SEQ ID NO: 128414 - RNA, 21 nt, Artificial Sequence
  Synthetic
gagaauaaauacacaacggac

SEQ ID NO: 128415 - RNA, 21 nt, Artificial Sequence
  Synthetic
guucauguccuuugaagggac

SEQ ID NO: 128416 - RNA, 23 nt, Artificial Sequence
  Synthetic
gaguucauguccuuugaagggac

SEQ ID NO: 128417 - RNA, 21 nt, Artificial Sequence
  Synthetic
guucauguccuuggcagggac

SEQ ID NO: 128418 - RNA, 23 nt, Artificial Sequence
  Synthetic
gaguucauguccuuggcagggac

SEQ ID NO: 128419 - RNA, 21 nt, Artificial Sequence
  Synthetic
guucauguccguuguagggac

SEQ ID NO: 128420 - RNA, 23 nt, Artificial Sequence
  Synthetic
gaguucauguccguuguagggac

SEQ ID NO: 128421 - RNA, 21 nt, Artificial Sequence
  Synthetic
guucaaguccuuuguagggac

SEQ ID NO: 128422 - RNA, 23 nt, Artificial Sequence
  Synthetic
gaguucaaguccuuuguagggac

SEQ ID NO: 128423 - RNA, 21 nt, Artificial Sequence
  Synthetic
guucacguccuuuguagggac

SEQ ID NO: 128424 - RNA, 23 nt, Artificial Sequence
  Synthetic
gaguucacguccuuuguagggac

SEQ ID NO: 128425 - RNA, 21 nt, Artificial Sequence
  Synthetic
guucauguccuuuguagggac

SEQ ID NO: 128426 - RNA, 23 nt, Artificial Sequence
  Synthetic
gaguucauguccuuuguagggac

SEQ ID NO: 128427 - RNA, 18 nt, Artificial Sequence
  Synthetic
ggaaaugauuacuuggac

SEQ ID NO: 128428 - RNA, 22 nt, Artificial Sequence
  Synthetic
gauccugaaacagaaaaaugac

SEQ ID NO: 128429 - RNA, 23 nt, Artificial Sequence
  Synthetic
ggauccugaaacagaaaaaugac

SEQ ID NO: 128430 - RNA, 18 nt, Artificial Sequence
  Synthetic
ggcgugguggcacaugac

SEQ ID NO: 128431 - RNA, 19 nt, Artificial Sequence
  Synthetic
gggcgugguggcacaugac

SEQ ID NO: 128432 - RNA, 22 nt, Artificial Sequence
  Synthetic
gcugggcgugguggcacaugac

SEQ ID NO: 128433 - RNA, 24 nt, Artificial Sequence
  Synthetic
gcccaccucuugcaucagcaugac

SEQ ID NO: 128434 - RNA, 23 nt, Artificial Sequence
  Synthetic
gaacaucaccuuuuauucaugac

SEQ ID NO: 128435 - RNA, 23 nt, Artificial Sequence
  Synthetic
gacaacuucucaucucuggugac

SEQ ID NO: 128436 - RNA, 20 nt, Artificial Sequence
  Synthetic
gauccauuucugguugugac

SEQ ID NO: 128437 - RNA, 19 nt, Artificial Sequence
  Synthetic
gcuuuggaauuagauugac

SEQ ID NO: 128438 - RNA, 20 nt, Artificial Sequence
  Synthetic
ggcuuuggaauuagauugac

SEQ ID NO: 128439 - RNA, 20 nt, Artificial Sequence
  Synthetic
gcaauauucuguaucuugac

SEQ ID NO: 128440 - RNA, 21 nt, Artificial Sequence
  Synthetic
ggcaauauucuguaucuugac

SEQ ID NO: 128441 - RNA, 24 nt, Artificial Sequence
  Synthetic
gcuggcaauauucuguaucuugac

SEQ ID NO: 128442 - RNA, 18 nt, Artificial Sequence
  Synthetic
ggucaacugauuuuugac

SEQ ID NO: 128443 - RNA, 19 nt, Artificial Sequence
  Synthetic
gagaauacauauaaaauac

SEQ ID NO: 128444 - RNA, 23 nt, Artificial Sequence
  Synthetic
gcucauagaccaaauuaaaauac

SEQ ID NO: 128445 - RNA, 24 nt, Artificial Sequence
  Synthetic
ggcucauagaccaaauuaaaauac

SEQ ID NO: 128446 - RNA, 22 nt, Artificial Sequence
  Synthetic
guuuauaugcauauuguaauac

SEQ ID NO: 128447 - RNA, 18 nt, Artificial Sequence
  Synthetic
guguguguguacacauac

SEQ ID NO: 128448 - RNA, 20 nt, Artificial Sequence
  Synthetic
guguguguguguacacauac

SEQ ID NO: 128449 - RNA, 22 nt, Artificial Sequence
  Synthetic
guguguguguguguacacauac

SEQ ID NO: 128450 - RNA, 24 nt, Artificial Sequence
  Synthetic
guguguguguguguguacacauac

SEQ ID NO: 128451 - RNA, 18 nt, Artificial Sequence
  Synthetic
gccagguacuugggauac

SEQ ID NO: 128452 - RNA, 18 nt, Artificial Sequence
  Synthetic
ggguguaauguacacuac

SEQ ID NO: 128453 - RNA, 19 nt, Artificial Sequence
  Synthetic
gggguguaauguacacuac

SEQ ID NO: 128454 - RNA, 18 nt, Artificial Sequence
  Synthetic
gcacuuugggaggccuac

SEQ ID NO: 128455 - RNA, 20 nt, Artificial Sequence
  Synthetic
gcacaugagccuaggccuac

SEQ ID NO: 128456 - RNA, 18 nt, Artificial Sequence
  Synthetic
gaugaaacauuuuccuac

SEQ ID NO: 128457 - RNA, 22 nt, Artificial Sequence
  Synthetic
gcuacccaggaggcugagguac

SEQ ID NO: 128458 - RNA, 23 nt, Artificial Sequence
  Synthetic
gaaaaaaaugacuccucauguac

SEQ ID NO: 128459 - RNA, 18 nt, Artificial Sequence
  Synthetic
guaacugcugcauuguac

SEQ ID NO: 128460 - RNA, 21 nt, Artificial Sequence
  Synthetic
gacguaacugcugcauuguac

SEQ ID NO: 128461 - RNA, 19 nt, Artificial Sequence
  Synthetic
gcagugaacauccuuguac

SEQ ID NO: 128462 - RNA, 23 nt, Artificial Sequence
  Synthetic
gaaauacaaaauacaaaaauuac

SEQ ID NO: 128463 - RNA, 23 nt, Artificial Sequence
  Synthetic
gucaauaaaaauaaacaacuuac

SEQ ID NO: 128464 - RNA, 18 nt, Artificial Sequence
  Synthetic
gagcaagucacaucuuac

SEQ ID NO: 128465 - RNA, 19 nt, Artificial Sequence
  Synthetic
ggagcaagucacaucuuac

SEQ ID NO: 128466 - RNA, 21 nt, Artificial Sequence
  Synthetic
gaggagcaagucacaucuuac

SEQ ID NO: 128467 - RNA, 22 nt, Artificial Sequence
  Synthetic
ggaggagcaagucacaucuuac

SEQ ID NO: 128468 - RNA, 18 nt, Artificial Sequence
  Synthetic
gaacgagucacaucuuac

SEQ ID NO: 128469 - RNA, 19 nt, Artificial Sequence
  Synthetic
ggaacgagucacaucuuac

SEQ ID NO: 128470 - RNA, 21 nt, Artificial Sequence
  Synthetic
gaggaacgagucacaucuuac

SEQ ID NO: 128471 - RNA, 22 nt, Artificial Sequence
  Synthetic
ggaggaacgagucacaucuuac

SEQ ID NO: 128472 - RNA, 18 nt, Artificial Sequence
  Synthetic
gaauuaaacagugguuac

SEQ ID NO: 128473 - RNA, 20 nt, Artificial Sequence
  Synthetic
gugaauuaaacagugguuac

SEQ ID NO: 128474 - RNA, 24 nt, Artificial Sequence
  Synthetic
gauagugaauuaaacagugguuac

SEQ ID NO: 128475 - RNA, 21 nt, Artificial Sequence
  Synthetic
guacaggugguauuugguuac

SEQ ID NO: 128476 - RNA, 22 nt, Artificial Sequence
  Synthetic
gguacaggugguauuugguuac

SEQ ID NO: 128477 - RNA, 23 nt, Artificial Sequence
  Synthetic
ggguacaggugguauuugguuac

SEQ ID NO: 128478 - RNA, 24 nt, Artificial Sequence
  Synthetic
gggguacaggugguauuugguuac

SEQ ID NO: 128479 - RNA, 21 nt, Artificial Sequence
  Synthetic
guauaggugguuuuugguuac

SEQ ID NO: 128480 - RNA, 22 nt, Artificial Sequence
  Synthetic
gguauaggugguuuuugguuac

SEQ ID NO: 128481 - RNA, 23 nt, Artificial Sequence
  Synthetic
ggguauaggugguuuuugguuac

SEQ ID NO: 128482 - RNA, 24 nt, Artificial Sequence
  Synthetic
gggguauaggugguuuuugguuac

SEQ ID NO: 128483 - RNA, 18 nt, Artificial Sequence
  Synthetic
ggcucagcuauuuguuac

SEQ ID NO: 128484 - RNA, 20 nt, Artificial Sequence
  Synthetic
gaggcucagcuauuuguuac

SEQ ID NO: 128485 - RNA, 23 nt, Artificial Sequence
  Synthetic
gcugaggcucagcuauuuguuac

SEQ ID NO: 128486 - RNA, 24 nt, Artificial Sequence
  Synthetic
ggcugaggcucagcuauuuguuac

SEQ ID NO: 128487 - RNA, 21 nt, Artificial Sequence
  Synthetic
gcacaugugcagguuuguuac

SEQ ID NO: 128488 - RNA, 22 nt, Artificial Sequence
  Synthetic
ggcacaugugcagguuuguuac

SEQ ID NO: 128489 - RNA, 23 nt, Artificial Sequence
  Synthetic
gggcacaugugcagguuuguuac

SEQ ID NO: 128490 - RNA, 24 nt, Artificial Sequence
  Synthetic
ggggcacaugugcagguuuguuac

SEQ ID NO: 128491 - RNA, 23 nt, Artificial Sequence
  Synthetic
gaauacaugugcagguuuguuac

SEQ ID NO: 128492 - RNA, 24 nt, Artificial Sequence
  Synthetic
ggaauacaugugcagguuuguuac

SEQ ID NO: 128493 - RNA, 23 nt, Artificial Sequence
  Synthetic
guauacaaguacauuuuuguuac

SEQ ID NO: 128494 - RNA, 24 nt, Artificial Sequence
  Synthetic
gguauacaaguacauuuuuguuac

SEQ ID NO: 128495 - RNA, 18 nt, Artificial Sequence
  Synthetic
ggcaaaaugauaauuuac

SEQ ID NO: 128496 - RNA, 18 nt, Artificial Sequence
  Synthetic
guaaaaauacauauuuac

SEQ ID NO: 128497 - RNA, 19 nt, Artificial Sequence
  Synthetic
gcaugcacgguguauuuac

SEQ ID NO: 128498 - RNA, 21 nt, Artificial Sequence
  Synthetic
gagcaugcacgguguauuuac

SEQ ID NO: 128499 - RNA, 22 nt, Artificial Sequence
  Synthetic
ggagcaugcacgguguauuuac

SEQ ID NO: 128500 - RNA, 23 nt, Artificial Sequence
  Synthetic
gggagcaugcacgguguauuuac

SEQ ID NO: 128501 - RNA, 24 nt, Artificial Sequence
  Synthetic
ggggagcaugcacgguguauuuac

SEQ ID NO: 128502 - RNA, 23 nt, Artificial Sequence
  Synthetic
gauaauaauuauuauuauuuuac

SEQ ID NO: 128503 - RNA, 18 nt, Artificial Sequence
  Synthetic
gaggacagugaggcaacc

SEQ ID NO: 128504 - RNA, 20 nt, Artificial Sequence
  Synthetic
guccccacccaaaucucacc

SEQ ID NO: 128505 - RNA, 22 nt, Artificial Sequence
  Synthetic
guguccccacccaaaucucacc

SEQ ID NO: 128506 - RNA, 18 nt, Artificial Sequence
  Synthetic
guuuacagcgucuucacc

SEQ ID NO: 128507 - RNA, 19 nt, Artificial Sequence
  Synthetic
guuccuauguuauuucacc

SEQ ID NO: 128508 - RNA, 20 nt, Artificial Sequence
  Synthetic
gcuuuggccucccagagacc

SEQ ID NO: 128509 - RNA, 19 nt, Artificial Sequence
  Synthetic
gaaauugcaguuugggacc

SEQ ID NO: 128510 - RNA, 22 nt, Artificial Sequence
  Synthetic
gcacagcagucugaaguggacc

SEQ ID NO: 128511 - RNA, 18 nt, Artificial Sequence
  Synthetic
ggucucaaacuccugacc

SEQ ID NO: 128512 - RNA, 21 nt, Artificial Sequence
  Synthetic
gcuggucucaaacuccugacc

SEQ ID NO: 128513 - RNA, 22 nt, Artificial Sequence
  Synthetic
ggcuggucucaaacuccugacc

SEQ ID NO: 128514 - RNA, 19 nt, Artificial Sequence
  Synthetic
gcucccaagcugugugacc

SEQ ID NO: 128515 - RNA, 20 nt, Artificial Sequence
  Synthetic
ggcucccaagcugugugacc

SEQ ID NO: 128516 - RNA, 20 nt, Artificial Sequence
  Synthetic
gccucagccuccgaaguacc

SEQ ID NO: 128517 - RNA, 18 nt, Artificial Sequence
  Synthetic
gucacauucugagguacc

SEQ ID NO: 128518 - RNA, 19 nt, Artificial Sequence
  Synthetic
ggucacauucugagguacc

SEQ ID NO: 128519 - RNA, 20 nt, Artificial Sequence
  Synthetic
gggucacauucugagguacc

SEQ ID NO: 128520 - RNA, 20 nt, Artificial Sequence
  Synthetic
gaccaccaucauccaaaccc

SEQ ID NO: 128521 - RNA, 21 nt, Artificial Sequence
  Synthetic
ggaccaccaucauccaaaccc

SEQ ID NO: 128522 - RNA, 23 nt, Artificial Sequence
  Synthetic
gaggaccaccaucauccaaaccc

SEQ ID NO: 128523 - RNA, 19 nt, Artificial Sequence
  Synthetic
gauuacugggcuucaaccc

SEQ ID NO: 128524 - RNA, 24 nt, Artificial Sequence
  Synthetic
guuaaauccacaaauguggaaccc

SEQ ID NO: 128525 - RNA, 23 nt, Artificial Sequence
  Synthetic
guaacaaaccaacacauguaccc

SEQ ID NO: 128526 - RNA, 20 nt, Artificial Sequence
  Synthetic
gauccuggaaccaauccccc

SEQ ID NO: 128527 - RNA, 21 nt, Artificial Sequence
  Synthetic
ggauccuggaaccaauccccc

SEQ ID NO: 128528 - RNA, 22 nt, Artificial Sequence
  Synthetic
gggauccuggaaccaauccccc

SEQ ID NO: 128529 - RNA, 23 nt, Artificial Sequence
  Synthetic
ggggauccuggaaccaauccccc

SEQ ID NO: 128530 - RNA, 20 nt, Artificial Sequence
  Synthetic
gcuucucaugccucagcccc

SEQ ID NO: 128531 - RNA, 22 nt, Artificial Sequence
  Synthetic
gcgcuucucaugccucagcccc

SEQ ID NO: 128532 - RNA, 21 nt, Artificial Sequence
  Synthetic
gaauuaauucaacuuagcccc

SEQ ID NO: 128533 - RNA, 20 nt, Artificial Sequence
  Synthetic
gacaucagcauuccuucccc

SEQ ID NO: 128534 - RNA, 19 nt, Artificial Sequence
  Synthetic
guugucugguaccaagccc

SEQ ID NO: 128535 - RNA, 20 nt, Artificial Sequence
  Synthetic
gguugucugguaccaagccc

SEQ ID NO: 128536 - RNA, 19 nt, Artificial Sequence
  Synthetic
gagccaccgcgcccagccc

SEQ ID NO: 128537 - RNA, 21 nt, Artificial Sequence
  Synthetic
gugagccaccgcgcccagccc

SEQ ID NO: 128538 - RNA, 24 nt, Artificial Sequence
  Synthetic
gacgugagccaccgcgcccagccc

SEQ ID NO: 128539 - RNA, 19 nt, Artificial Sequence
  Synthetic
gagccauggcgcccagccc

SEQ ID NO: 128540 - RNA, 21 nt, Artificial Sequence
  Synthetic
gugagccauggcgcccagccc

SEQ ID NO: 128541 - RNA, 23 nt, Artificial Sequence
  Synthetic
gugugagccauggcgcccagccc

SEQ ID NO: 128542 - RNA, 24 nt, Artificial Sequence
  Synthetic
ggugugagccauggcgcccagccc

SEQ ID NO: 128543 - RNA, 20 nt, Artificial Sequence
  Synthetic
guuggucuggaauggagccc

SEQ ID NO: 128544 - RNA, 18 nt, Artificial Sequence
  Synthetic
ggauuaucgauugagccc

SEQ ID NO: 128545 - RNA, 19 nt, Artificial Sequence
  Synthetic
gggauuaucgauugagccc

SEQ ID NO: 128546 - RNA, 21 nt, Artificial Sequence
  Synthetic
gugggauuaucgauugagccc

SEQ ID NO: 128547 - RNA, 22 nt, Artificial Sequence
  Synthetic
ggugggauuaucgauugagccc

SEQ ID NO: 128548 - RNA, 18 nt, Artificial Sequence
  Synthetic
ggaggaucacuugagccc

SEQ ID NO: 128549 - RNA, 19 nt, Artificial Sequence
  Synthetic
gggaggaucacuugagccc

SEQ ID NO: 128550 - RNA, 21 nt, Artificial Sequence
  Synthetic
gugggaggaucacuugagccc

SEQ ID NO: 128551 - RNA, 24 nt, Artificial Sequence
  Synthetic
gaagugggaggaucacuugagccc

SEQ ID NO: 128552 - RNA, 18 nt, Artificial Sequence
  Synthetic
ggagggucacuugagccc

SEQ ID NO: 128553 - RNA, 21 nt, Artificial Sequence
  Synthetic
gcaggagggucacuugagccc

SEQ ID NO: 128554 - RNA, 22 nt, Artificial Sequence
  Synthetic
ggcaggagggucacuugagccc

SEQ ID NO: 128555 - RNA, 24 nt, Artificial Sequence
  Synthetic
gaggcaggagggucacuugagccc

SEQ ID NO: 128556 - RNA, 18 nt, Artificial Sequence
  Synthetic
ggagaauuacuugagccc

SEQ ID NO: 128557 - RNA, 22 nt, Artificial Sequence
  Synthetic
gauaggagaauuacuugagccc

SEQ ID NO: 128558 - RNA, 23 nt, Artificial Sequence
  Synthetic
ggauaggagaauuacuugagccc

SEQ ID NO: 128559 - RNA, 18 nt, Artificial Sequence
  Synthetic
ggagaaucgcuugagccc

SEQ ID NO: 128560 - RNA, 21 nt, Artificial Sequence
  Synthetic
gcaggagaaucgcuugagccc

SEQ ID NO: 128561 - RNA, 22 nt, Artificial Sequence
  Synthetic
ggcaggagaaucgcuugagccc

SEQ ID NO: 128562 - RNA, 18 nt, Artificial Sequence
  Synthetic
ggaggaucgcuugagccc

SEQ ID NO: 128563 - RNA, 21 nt, Artificial Sequence
  Synthetic
gcaggaggaucgcuugagccc

SEQ ID NO: 128564 - RNA, 24 nt, Artificial Sequence
  Synthetic
gaagcaggaggaucgcuugagccc

SEQ ID NO: 128565 - RNA, 18 nt, Artificial Sequence
  Synthetic
ggagaauuucuugagccc

SEQ ID NO: 128566 - RNA, 19 nt, Artificial Sequence
  Synthetic
gggagaauuucuugagccc

SEQ ID NO: 128567 - RNA, 22 nt, Artificial Sequence
  Synthetic
guugggagaauuucuugagccc

SEQ ID NO: 128568 - RNA, 24 nt, Artificial Sequence
  Synthetic
gaguugggagaauuucuugagccc

SEQ ID NO: 128569 - RNA, 18 nt, Artificial Sequence
  Synthetic
gauacucagggaaggccc

SEQ ID NO: 128570 - RNA, 19 nt, Artificial Sequence
  Synthetic
ggauacucagggaaggccc

SEQ ID NO: 128571 - RNA, 24 nt, Artificial Sequence
  Synthetic
guucucaggggauguugccggccc

SEQ ID NO: 128572 - RNA, 18 nt, Artificial Sequence
  Synthetic
gcauaaucuuaagggccc

SEQ ID NO: 128573 - RNA, 19 nt, Artificial Sequence
  Synthetic
gacaugaucucuugggccc

SEQ ID NO: 128574 - RNA, 21 nt, Artificial Sequence
  Synthetic
gugacaugaucucuugggccc

SEQ ID NO: 128575 - RNA, 22 nt, Artificial Sequence
  Synthetic
ggugacaugaucucuugggccc

SEQ ID NO: 128576 - RNA, 24 nt, Artificial Sequence
  Synthetic
gaggugacaugaucucuugggccc

SEQ ID NO: 128577 - RNA, 18 nt, Artificial Sequence
  Synthetic
gcucaugccuguaauccc

SEQ ID NO: 128578 - RNA, 19 nt, Artificial Sequence
  Synthetic
ggcucaugccuguaauccc

SEQ ID NO: 128579 - RNA, 22 nt, Artificial Sequence
  Synthetic
gauggcucaugccuguaauccc

SEQ ID NO: 128580 - RNA, 24 nt, Artificial Sequence
  Synthetic
gcgauggcucaugccuguaauccc

SEQ ID NO: 128581 - RNA, 19 nt, Artificial Sequence
  Synthetic
gcuggcugggccccauccc

SEQ ID NO: 128582 - RNA, 18 nt, Artificial Sequence
  Synthetic
gaaccagccuugcauccc

SEQ ID NO: 128583 - RNA, 21 nt, Artificial Sequence
  Synthetic
guugaaccagccuugcauccc

SEQ ID NO: 128584 - RNA, 18 nt, Artificial Sequence
  Synthetic
gaaccagcuuugcauccc

SEQ ID NO: 128585 - RNA, 21 nt, Artificial Sequence
  Synthetic
guugaaccagcuuugcauccc

SEQ ID NO: 128586 - RNA, 20 nt, Artificial Sequence
  Synthetic
gaucaaguuggcuucauccc

SEQ ID NO: 128587 - RNA, 24 nt, Artificial Sequence
  Synthetic
gcaugaucaaguuggcuucauccc

SEQ ID NO: 128588 - RNA, 18 nt, Artificial Sequence
  Synthetic
gaaacaaccuucuauccc

SEQ ID NO: 128589 - RNA, 19 nt, Artificial Sequence
  Synthetic
gaccuaucuugcagcuccc

SEQ ID NO: 128590 - RNA, 18 nt, Artificial Sequence
  Synthetic
gcagaccaggagauuccc

SEQ ID NO: 128591 - RNA, 18 nt, Artificial Sequence
  Synthetic
guaaaauaaauaaaagcc

SEQ ID NO: 128592 - RNA, 18 nt, Artificial Sequence
  Synthetic
gaaaauaaguuaaaagcc

SEQ ID NO: 128593 - RNA, 21 nt, Artificial Sequence
  Synthetic
gcaaggugggcucccacagcc

SEQ ID NO: 128594 - RNA, 24 nt, Artificial Sequence
  Synthetic
gaugcaaggugggcucccacagcc

SEQ ID NO: 128595 - RNA, 23 nt, Artificial Sequence
  Synthetic
gucuaauacagugguucucagcc

SEQ ID NO: 128596 - RNA, 18 nt, Artificial Sequence
  Synthetic
gaaagaaagagaagagcc

SEQ ID NO: 128597 - RNA, 19 nt, Artificial Sequence
  Synthetic
ggaaagaaagagaagagcc

SEQ ID NO: 128598 - RNA, 20 nt, Artificial Sequence
  Synthetic
gggaaagaaagagaagagcc

SEQ ID NO: 128599 - RNA, 22 nt, Artificial Sequence
  Synthetic
gugggaaagaaagagaagagcc

SEQ ID NO: 128600 - RNA, 23 nt, Artificial Sequence
  Synthetic
ggugggaaagaaagagaagagcc

SEQ ID NO: 128601 - RNA, 24 nt, Artificial Sequence
  Synthetic
gggugggaaagaaagagaagagcc

SEQ ID NO: 128602 - RNA, 21 nt, Artificial Sequence
  Synthetic
gucaucaagugggcagaggcc

SEQ ID NO: 128603 - RNA, 24 nt, Artificial Sequence
  Synthetic
gcugucaucaagugggcagaggcc

SEQ ID NO: 128604 - RNA, 18 nt, Artificial Sequence
  Synthetic
ggaggaucacuagaggcc

SEQ ID NO: 128605 - RNA, 19 nt, Artificial Sequence
  Synthetic
gggaggaucacuagaggcc

SEQ ID NO: 128606 - RNA, 21 nt, Artificial Sequence
  Synthetic
gugggaggaucacuagaggcc

SEQ ID NO: 128607 - RNA, 22 nt, Artificial Sequence
  Synthetic
ggugggaggaucacuagaggcc

SEQ ID NO: 128608 - RNA, 23 nt, Artificial Sequence
  Synthetic
gggugggaggaucacuagaggcc

SEQ ID NO: 128609 - RNA, 24 nt, Artificial Sequence
  Synthetic
ggggugggaggaucacuagaggcc

SEQ ID NO: 128610 - RNA, 18 nt, Artificial Sequence
  Synthetic
ggcggaucaccugaggcc

SEQ ID NO: 128611 - RNA, 21 nt, Artificial Sequence
  Synthetic
gcaggcggaucaccugaggcc

SEQ ID NO: 128612 - RNA, 22 nt, Artificial Sequence
  Synthetic
ggcaggcggaucaccugaggcc

SEQ ID NO: 128613 - RNA, 18 nt, Artificial Sequence
  Synthetic
ggcagaucacuugaggcc

SEQ ID NO: 128614 - RNA, 19 nt, Artificial Sequence
  Synthetic
gggcagaucacuugaggcc

SEQ ID NO: 128615 - RNA, 21 nt, Artificial Sequence
  Synthetic
gugggcagaucacuugaggcc

SEQ ID NO: 128616 - RNA, 22 nt, Artificial Sequence
  Synthetic
ggugggcagaucacuugaggcc

SEQ ID NO: 128617 - RNA, 24 nt, Artificial Sequence
  Synthetic
gaggugggcagaucacuugaggcc

SEQ ID NO: 128618 - RNA, 18 nt, Artificial Sequence
  Synthetic
gguggaucacuugaggcc

SEQ ID NO: 128619 - RNA, 19 nt, Artificial Sequence
  Synthetic
ggguggaucacuugaggcc

SEQ ID NO: 128620 - RNA, 24 nt, Artificial Sequence
  Synthetic
gaaauggguggaucacuugaggcc

SEQ ID NO: 128621 - RNA, 21 nt, Artificial Sequence
  Synthetic
gcaagaggauugcuugaggcc

SEQ ID NO: 128622 - RNA, 22 nt, Artificial Sequence
  Synthetic
ggcaagaggauugcuugaggcc

SEQ ID NO: 128623 - RNA, 18 nt, Artificial Sequence
  Synthetic
ggaggauuguuugaggcc

SEQ ID NO: 128624 - RNA, 19 nt, Artificial Sequence
  Synthetic
gggaggauuguuugaggcc

SEQ ID NO: 128625 - RNA, 21 nt, Artificial Sequence
  Synthetic
gugggaggauuguuugaggcc

SEQ ID NO: 128626 - RNA, 22 nt, Artificial Sequence
  Synthetic
ggugggaggauuguuugaggcc

SEQ ID NO: 128627 - RNA, 18 nt, Artificial Sequence
  Synthetic
gagccaccgcgcccggcc

SEQ ID NO: 128628 - RNA, 20 nt, Artificial Sequence
  Synthetic
gugagccaccgcgcccggcc

SEQ ID NO: 128629 - RNA, 22 nt, Artificial Sequence
  Synthetic
gcgugagccaccgcgcccggcc

SEQ ID NO: 128630 - RNA, 23 nt, Artificial Sequence
  Synthetic
ggcgugagccaccgcgcccggcc

SEQ ID NO: 128631 - RNA, 18 nt, Artificial Sequence
  Synthetic
gccuacgccaccagggcc

SEQ ID NO: 128632 - RNA, 20 nt, Artificial Sequence
  Synthetic
gugccuacgccaccagggcc

SEQ ID NO: 128633 - RNA, 21 nt, Artificial Sequence
  Synthetic
ggugccuacgccaccagggcc

SEQ ID NO: 128634 - RNA, 22 nt, Artificial Sequence
  Synthetic
gggugccuacgccaccagggcc

SEQ ID NO: 128635 - RNA, 20 nt, Artificial Sequence
  Synthetic
gcuauccaggaacuagggcc

SEQ ID NO: 128636 - RNA, 21 nt, Artificial Sequence
  Synthetic
gcuuacaugugguguugggcc

SEQ ID NO: 128637 - RNA, 22 nt, Artificial Sequence
  Synthetic
ggcuuacaugugguguugggcc

SEQ ID NO: 128638 - RNA, 24 nt, Artificial Sequence
  Synthetic
guggcuuacaugugguguugggcc

SEQ ID NO: 128639 - RNA, 18 nt, Artificial Sequence
  Synthetic
gagccaccgcaccuggcc

SEQ ID NO: 128640 - RNA, 20 nt, Artificial Sequence
  Synthetic
gugagccaccgcaccuggcc

SEQ ID NO: 128641 - RNA, 22 nt, Artificial Sequence
  Synthetic
gcgugagccaccgcaccuggcc

SEQ ID NO: 128642 - RNA, 23 nt, Artificial Sequence
  Synthetic
ggcgugagccaccgcaccuggcc

SEQ ID NO: 128643 - RNA, 18 nt, Artificial Sequence
  Synthetic
gagccacugcgccuggcc

SEQ ID NO: 128644 - RNA, 22 nt, Artificial Sequence
  Synthetic
gcaugagccacugcgccuggcc

SEQ ID NO: 128645 - RNA, 23 nt, Artificial Sequence
  Synthetic
ggcaugagccacugcgccuggcc

SEQ ID NO: 128646 - RNA, 18 nt, Artificial Sequence
  Synthetic
gcagauucccuuuuggcc

SEQ ID NO: 128647 - RNA, 21 nt, Artificial Sequence
  Synthetic
guagcagauucccuuuuggcc

SEQ ID NO: 128648 - RNA, 22 nt, Artificial Sequence
  Synthetic
gguagcagauucccuuuuggcc

SEQ ID NO: 128649 - RNA, 19 nt, Artificial Sequence
  Synthetic
gcugauuccaauacaugcc

SEQ ID NO: 128650 - RNA, 23 nt, Artificial Sequence
  Synthetic
gcuagcugauuccaauacaugcc

SEQ ID NO: 128651 - RNA, 18 nt, Artificial Sequence
  Synthetic
ggcgugguggugcaugcc

SEQ ID NO: 128652 - RNA, 22 nt, Artificial Sequence
  Synthetic
gccaggcgugguggugcaugcc

SEQ ID NO: 128653 - RNA, 19 nt, Artificial Sequence
  Synthetic
gagguuugcaaccucugcc

SEQ ID NO: 128654 - RNA, 18 nt, Artificial Sequence
  Synthetic
gagucuuucucuguugcc

SEQ ID NO: 128655 - RNA, 19 nt, Artificial Sequence
  Synthetic
ggagucuuucucuguugcc

SEQ ID NO: 128656 - RNA, 22 nt, Artificial Sequence
  Synthetic
gauggagucuuucucuguugcc

SEQ ID NO: 128657 - RNA, 24 nt, Artificial Sequence
  Synthetic
gagauggagucuuucucuguugcc

SEQ ID NO: 128658 - RNA, 21 nt, Artificial Sequence
  Synthetic
gacuucaagcuauaagaaucc

SEQ ID NO: 128659 - RNA, 19 nt, Artificial Sequence
  Synthetic
gacuucugccuggacaucc

SEQ ID NO: 128660 - RNA, 22 nt, Artificial Sequence
  Synthetic
gcagacuucugccuggacaucc

SEQ ID NO: 128661 - RNA, 21 nt, Artificial Sequence
  Synthetic
gcccacaguggugagccaucc

SEQ ID NO: 128662 - RNA, 23 nt, Artificial Sequence
  Synthetic
gagcccacaguggugagccaucc

SEQ ID NO: 128663 - RNA, 20 nt, Artificial Sequence
  Synthetic
guauuuuuuuuuuaagaucc

SEQ ID NO: 128664 - RNA, 18 nt, Artificial Sequence
  Synthetic
gggcuggucucaaacucc

SEQ ID NO: 128665 - RNA, 19 nt, Artificial Sequence
  Synthetic
ggggcuggucucaaacucc

SEQ ID NO: 128666 - RNA, 22 nt, Artificial Sequence
  Synthetic
gcuggggcuggucucaaacucc

SEQ ID NO: 128667 - RNA, 22 nt, Artificial Sequence
  Synthetic
gcccaggcuggucuugaacucc

SEQ ID NO: 128668 - RNA, 22 nt, Artificial Sequence
  Synthetic
gaaaaauguaauaauauacucc

SEQ ID NO: 128669 - RNA, 22 nt, Artificial Sequence
  Synthetic
gccaagucccacaguguacucc

SEQ ID NO: 128670 - RNA, 23 nt, Artificial Sequence
  Synthetic
ggccaagucccacaguguacucc

SEQ ID NO: 128671 - RNA, 18 nt, Artificial Sequence
  Synthetic
ggagcuuccaugcccucc

SEQ ID NO: 128672 - RNA, 22 nt, Artificial Sequence
  Synthetic
gcauggagcuuccaugcccucc

SEQ ID NO: 128673 - RNA, 23 nt, Artificial Sequence
  Synthetic
ggcauggagcuuccaugcccucc

SEQ ID NO: 128674 - RNA, 24 nt, Artificial Sequence
  Synthetic
gggcauggagcuuccaugcccucc

SEQ ID NO: 128675 - RNA, 21 nt, Artificial Sequence
  Synthetic
gaucugcccgccucggccucc

SEQ ID NO: 128676 - RNA, 20 nt, Artificial Sequence
  Synthetic
gaauagcuaacagcuucucc

SEQ ID NO: 128677 - RNA, 24 nt, Artificial Sequence
  Synthetic
gcccaccuuggacucccaaagucc

SEQ ID NO: 128678 - RNA, 20 nt, Artificial Sequence
  Synthetic
gccucggccucccaaagucc

SEQ ID NO: 128679 - RNA, 23 nt, Artificial Sequence
  Synthetic
gcugccucggccucccaaagucc

SEQ ID NO: 128680 - RNA, 24 nt, Artificial Sequence
  Synthetic
ggcugccucggccucccaaagucc

SEQ ID NO: 128681 - RNA, 20 nt, Artificial Sequence
  Synthetic
gccuuggccucccaaagucc

SEQ ID NO: 128682 - RNA, 24 nt, Artificial Sequence
  Synthetic
gcccgccuuggccucccaaagucc

SEQ ID NO: 128683 - RNA, 18 nt, Artificial Sequence
  Synthetic
ggcagaucacuggagucc

SEQ ID NO: 128684 - RNA, 19 nt, Artificial Sequence
  Synthetic
gggcagaucacuggagucc

SEQ ID NO: 128685 - RNA, 22 nt, Artificial Sequence
  Synthetic
gaugggcagaucacuggagucc

SEQ ID NO: 128686 - RNA, 23 nt, Artificial Sequence
  Synthetic
ggaugggcagaucacuggagucc

SEQ ID NO: 128687 - RNA, 24 nt, Artificial Sequence
  Synthetic
gggaugggcagaucacuggagucc

SEQ ID NO: 128688 - RNA, 18 nt, Artificial Sequence
  Synthetic
ggcagaucacuugagucc

SEQ ID NO: 128689 - RNA, 21 nt, Artificial Sequence
  Synthetic
gcaggcagaucacuugagucc

SEQ ID NO: 128690 - RNA, 22 nt, Artificial Sequence
  Synthetic
ggcaggcagaucacuugagucc

SEQ ID NO: 128691 - RNA, 24 nt, Artificial Sequence
  Synthetic
gaggcaggcagaucacuugagucc

SEQ ID NO: 128692 - RNA, 21 nt, Artificial Sequence
  Synthetic
gccugugagccacaugcgucc

SEQ ID NO: 128693 - RNA, 22 nt, Artificial Sequence
  Synthetic
ggccugugagccacaugcgucc

SEQ ID NO: 128694 - RNA, 18 nt, Artificial Sequence
  Synthetic
guggcuuuaccaaggucc

SEQ ID NO: 128695 - RNA, 22 nt, Artificial Sequence
  Synthetic
gaaaagaauggcuuucaggucc

SEQ ID NO: 128696 - RNA, 18 nt, Artificial Sequence
  Synthetic
guucucaaagggaggucc

SEQ ID NO: 128697 - RNA, 21 nt, Artificial Sequence
  Synthetic
guaguucucaaagggaggucc

SEQ ID NO: 128698 - RNA, 24 nt, Artificial Sequence
  Synthetic
guaguaguucucaaagggaggucc

SEQ ID NO: 128699 - RNA, 19 nt, Artificial Sequence
  Synthetic
guuaacgccuaagcugucc

SEQ ID NO: 128700 - RNA, 22 nt, Artificial Sequence
  Synthetic
gcuguuaacgccuaagcugucc

SEQ ID NO: 128701 - RNA, 24 nt, Artificial Sequence
  Synthetic
gagcuguuaacgccuaagcugucc

SEQ ID NO: 128702 - RNA, 18 nt, Artificial Sequence
  Synthetic
gggaggguguaugugucc

SEQ ID NO: 128703 - RNA, 23 nt, Artificial Sequence
  Synthetic
gucuugggaggguguaugugucc

SEQ ID NO: 128704 - RNA, 18 nt, Artificial Sequence
  Synthetic
gaaccauuuuugcauucc

SEQ ID NO: 128705 - RNA, 20 nt, Artificial Sequence
  Synthetic
gcuuugcaaacauuuauucc

SEQ ID NO: 128706 - RNA, 22 nt, Artificial Sequence
  Synthetic
gcucacugcaaccuccgcuucc

SEQ ID NO: 128707 - RNA, 23 nt, Artificial Sequence
  Synthetic
ggcucacugcaaccuccgcuucc

SEQ ID NO: 128708 - RNA, 18 nt, Artificial Sequence
  Synthetic
ggaggguuguguguuucc

SEQ ID NO: 128709 - RNA, 18 nt, Artificial Sequence
  Synthetic
gguucucuagucuuuucc

SEQ ID NO: 128710 - RNA, 19 nt, Artificial Sequence
  Synthetic
ggguucucuagucuuuucc

SEQ ID NO: 128711 - RNA, 23 nt, Artificial Sequence
  Synthetic
gcaaauggaaagaaaaaaaaagc

SEQ ID NO: 128712 - RNA, 22 nt, Artificial Sequence
  Synthetic
gauuuuauaaauauguaaaagc

SEQ ID NO: 128713 - RNA, 23 nt, Artificial Sequence
  Synthetic
ggauuuuauaaauauguaaaagc

SEQ ID NO: 128714 - RNA, 20 nt, Artificial Sequence
  Synthetic
gaagagaaaauaaacaaagc

SEQ ID NO: 128715 - RNA, 19 nt, Artificial Sequence
  Synthetic
gucuugcuauugcccaagc

SEQ ID NO: 128716 - RNA, 20 nt, Artificial Sequence
  Synthetic
ggucuugcuauugcccaagc

SEQ ID NO: 128717 - RNA, 21 nt, Artificial Sequence
  Synthetic
gggucuugcuauugcccaagc

SEQ ID NO: 128718 - RNA, 18 nt, Artificial Sequence
  Synthetic
gcuagaaagcaagcaagc

SEQ ID NO: 128719 - RNA, 20 nt, Artificial Sequence
  Synthetic
gcaccugccauuacugaagc

SEQ ID NO: 128720 - RNA, 21 nt, Artificial Sequence
  Synthetic
ggcaccugccauuacugaagc

SEQ ID NO: 128721 - RNA, 22 nt, Artificial Sequence
  Synthetic
gggcaccugccauuacugaagc

SEQ ID NO: 128722 - RNA, 23 nt, Artificial Sequence
  Synthetic
ggggcaccugccauuacugaagc

SEQ ID NO: 128723 - RNA, 18 nt, Artificial Sequence
  Synthetic
gugccacuguacuacagc

SEQ ID NO: 128724 - RNA, 22 nt, Artificial Sequence
  Synthetic
gauugugccacuguacuacagc

SEQ ID NO: 128725 - RNA, 18 nt, Artificial Sequence
  Synthetic
gauaguaagugguacagc

SEQ ID NO: 128726 - RNA, 21 nt, Artificial Sequence
  Synthetic
gcccaggaguccaagaccagc

SEQ ID NO: 128727 - RNA, 23 nt, Artificial Sequence
  Synthetic
gagcccaggaguccaagaccagc

SEQ ID NO: 128728 - RNA, 20 nt, Artificial Sequence
  Synthetic
gcuagcaguucaagaccagc

SEQ ID NO: 128729 - RNA, 21 nt, Artificial Sequence
  Synthetic
ggcuagcaguucaagaccagc

SEQ ID NO: 128730 - RNA, 23 nt, Artificial Sequence
  Synthetic
gaggcuagcaguucaagaccagc

SEQ ID NO: 128731 - RNA, 18 nt, Artificial Sequence
  Synthetic
gcgccacugcaccccagc

SEQ ID NO: 128732 - RNA, 22 nt, Artificial Sequence
  Synthetic
gaucgcgccacugcaccccagc

SEQ ID NO: 128733 - RNA, 21 nt, Artificial Sequence
  Synthetic
gacugggagacaccucccagc

SEQ ID NO: 128734 - RNA, 22 nt, Artificial Sequence
  Synthetic
gaucacgacacuccacuccagc

SEQ ID NO: 128735 - RNA, 24 nt, Artificial Sequence
  Synthetic
gagaucacgacacuccacuccagc

SEQ ID NO: 128736 - RNA, 18 nt, Artificial Sequence
  Synthetic
gcacaacugcacuccagc

SEQ ID NO: 128737 - RNA, 19 nt, Artificial Sequence
  Synthetic
ggcacaacugcacuccagc

SEQ ID NO: 128738 - RNA, 20 nt, Artificial Sequence
  Synthetic
gcgcaccacugcacuccagc

SEQ ID NO: 128739 - RNA, 24 nt, Artificial Sequence
  Synthetic
gaucgcgcaccacugcacuccagc

SEQ ID NO: 128740 - RNA, 22 nt, Artificial Sequence
  Synthetic
gaucagaccacugcacuccagc

SEQ ID NO: 128741 - RNA, 22 nt, Artificial Sequence
  Synthetic
gaucacgccacugcacuccagc

SEQ ID NO: 128742 - RNA, 24 nt, Artificial Sequence
  Synthetic
gagaucacgccacugcacuccagc

SEQ ID NO: 128743 - RNA, 18 nt, Artificial Sequence
  Synthetic
gcgccacugcacuccagc

SEQ ID NO: 128744 - RNA, 22 nt, Artificial Sequence
  Synthetic
gaucgcgccacugcacuccagc

SEQ ID NO: 128745 - RNA, 24 nt, Artificial Sequence
  Synthetic
gagaucgcgccacugcacuccagc

SEQ ID NO: 128746 - RNA, 19 nt, Artificial Sequence
  Synthetic
ggcgccacugcacuccagc

SEQ ID NO: 128747 - RNA, 21 nt, Artificial Sequence
  Synthetic
guggcgccacugcacuccagc

SEQ ID NO: 128748 - RNA, 22 nt, Artificial Sequence
  Synthetic
gguggcgccacugcacuccagc

SEQ ID NO: 128749 - RNA, 24 nt, Artificial Sequence
  Synthetic
gagguggcgccacugcacuccagc

SEQ ID NO: 128750 - RNA, 18 nt, Artificial Sequence
  Synthetic
gcaccauugcacuccagc

SEQ ID NO: 128751 - RNA, 22 nt, Artificial Sequence
  Synthetic
gauugcaccauugcacuccagc

SEQ ID NO: 128752 - RNA, 24 nt, Artificial Sequence
  Synthetic
gagauugcaccauugcacuccagc

SEQ ID NO: 128753 - RNA, 22 nt, Artificial Sequence
  Synthetic
gaucaugccauugcacuccagc

SEQ ID NO: 128754 - RNA, 22 nt, Artificial Sequence
  Synthetic
gaucgugccauugcacuccagc

SEQ ID NO: 128755 - RNA, 24 nt, Artificial Sequence
  Synthetic
gagaucgugccauugcacuccagc

SEQ ID NO: 128756 - RNA, 22 nt, Artificial Sequence
  Synthetic
gaucaugccaguguacuccagc

SEQ ID NO: 128757 - RNA, 22 nt, Artificial Sequence
  Synthetic
guucacuccagugcccuccagc

SEQ ID NO: 128758 - RNA, 18 nt, Artificial Sequence
  Synthetic
gcgccacugugcuccagc

SEQ ID NO: 128759 - RNA, 22 nt, Artificial Sequence
  Synthetic
gaucgcgccacugugcuccagc

SEQ ID NO: 128760 - RNA, 18 nt, Artificial Sequence
  Synthetic
gcgccacugcauuccagc

SEQ ID NO: 128761 - RNA, 22 nt, Artificial Sequence
  Synthetic
gauugcgccacugcauuccagc

SEQ ID NO: 128762 - RNA, 24 nt, Artificial Sequence
  Synthetic
gagauugcgccacugcauuccagc

SEQ ID NO: 128763 - RNA, 20 nt, Artificial Sequence
  Synthetic
gccucggccucccaagcagc

SEQ ID NO: 128764 - RNA, 22 nt, Artificial Sequence
  Synthetic
gugccucggccucccaagcagc

SEQ ID NO: 128765 - RNA, 21 nt, Artificial Sequence
  Synthetic
gccaguagcacuaccagcagc

SEQ ID NO: 128766 - RNA, 18 nt, Artificial Sequence
  Synthetic
ggguauauacccagcagc

SEQ ID NO: 128767 - RNA, 20 nt, Artificial Sequence
  Synthetic
gucagcaguccacaggcagc

SEQ ID NO: 128768 - RNA, 19 nt, Artificial Sequence
  Synthetic
guacuccagccugggcagc

SEQ ID NO: 128769 - RNA, 19 nt, Artificial Sequence
  Synthetic
gacagagguuacagucagc

SEQ ID NO: 128770 - RNA, 21 nt, Artificial Sequence
  Synthetic
gagacagagguuacagucagc

SEQ ID NO: 128771 - RNA, 22 nt, Artificial Sequence
  Synthetic
ggagacagagguuacagucagc

SEQ ID NO: 128772 - RNA, 23 nt, Artificial Sequence
  Synthetic
gggagacagagguuacagucagc

SEQ ID NO: 128773 - RNA, 18 nt, Artificial Sequence
  Synthetic
gugccacugcacuucagc

SEQ ID NO: 128774 - RNA, 19 nt, Artificial Sequence
  Synthetic
ggugccacugcacuucagc

SEQ ID NO: 128775 - RNA, 22 nt, Artificial Sequence
  Synthetic
gauggugccacugcacuucagc

SEQ ID NO: 128776 - RNA, 20 nt, Artificial Sequence
  Synthetic
gccuuguucccccaaagagc

SEQ ID NO: 128777 - RNA, 24 nt, Artificial Sequence
  Synthetic
gucugccuuguucccccaaagagc

SEQ ID NO: 128778 - RNA, 18 nt, Artificial Sequence
  Synthetic
gcucuggagucaaagagc

SEQ ID NO: 128779 - RNA, 19 nt, Artificial Sequence
  Synthetic
ggcucuggagucaaagagc

SEQ ID NO: 128780 - RNA, 20 nt, Artificial Sequence
  Synthetic
gggcucuggagucaaagagc

SEQ ID NO: 128781 - RNA, 19 nt, Artificial Sequence
  Synthetic
gugcagugacgcccagagc

SEQ ID NO: 128782 - RNA, 21 nt, Artificial Sequence
  Synthetic
gacugaggcaaguguuagagc

SEQ ID NO: 128783 - RNA, 23 nt, Artificial Sequence
  Synthetic
gagacugaggcaaguguuagagc

SEQ ID NO: 128784 - RNA, 19 nt, Artificial Sequence
  Synthetic
guaagccacaacaccgagc

SEQ ID NO: 128785 - RNA, 21 nt, Artificial Sequence
  Synthetic
gcguaagccacaacaccgagc

SEQ ID NO: 128786 - RNA, 22 nt, Artificial Sequence
  Synthetic
ggcguaagccacaacaccgagc

SEQ ID NO: 128787 - RNA, 19 nt, Artificial Sequence
  Synthetic
gugaggccauggcuggagc

SEQ ID NO: 128788 - RNA, 18 nt, Artificial Sequence
  Synthetic
gcagagguugcagugagc

SEQ ID NO: 128789 - RNA, 19 nt, Artificial Sequence
  Synthetic
ggcagagguugcagugagc

SEQ ID NO: 128790 - RNA, 20 nt, Artificial Sequence
  Synthetic
gccucagccuccugaauagc

SEQ ID NO: 128791 - RNA, 23 nt, Artificial Sequence
  Synthetic
gccaccgcacccagccgcauagc

SEQ ID NO: 128792 - RNA, 18 nt, Artificial Sequence
  Synthetic
gcaccacugcacucuagc

SEQ ID NO: 128793 - RNA, 22 nt, Artificial Sequence
  Synthetic
gauugcaccacugcacucuagc

SEQ ID NO: 128794 - RNA, 24 nt, Artificial Sequence
  Synthetic
gagauugcaccacugcacucuagc

SEQ ID NO: 128795 - RNA, 18 nt, Artificial Sequence
  Synthetic
gugccacugcacucuagc

SEQ ID NO: 128796 - RNA, 22 nt, Artificial Sequence
  Synthetic
gauugugccacugcacucuagc

SEQ ID NO: 128797 - RNA, 20 nt, Artificial Sequence
  Synthetic
gccacagccucccaaguagc

SEQ ID NO: 128798 - RNA, 20 nt, Artificial Sequence
  Synthetic
gccucagccucccaaguagc

SEQ ID NO: 128799 - RNA, 20 nt, Artificial Sequence
  Synthetic
gccucagacugccaaguagc

SEQ ID NO: 128800 - RNA, 20 nt, Artificial Sequence
  Synthetic
gccucagccuuccaaguagc

SEQ ID NO: 128801 - RNA, 19 nt, Artificial Sequence
  Synthetic
gccucugucuuccaguagc

SEQ ID NO: 128802 - RNA, 20 nt, Artificial Sequence
  Synthetic
gccucagccuaccgaguagc

SEQ ID NO: 128803 - RNA, 20 nt, Artificial Sequence
  Synthetic
gccucagccucccgaguagc

SEQ ID NO: 128804 - RNA, 20 nt, Artificial Sequence
  Synthetic
gccuuagccucccgaguagc

SEQ ID NO: 128805 - RNA, 20 nt, Artificial Sequence
  Synthetic
gccucagcuucccgaguagc

SEQ ID NO: 128806 - RNA, 20 nt, Artificial Sequence
  Synthetic
gcuucagccuccugaguagc

SEQ ID NO: 128807 - RNA, 20 nt, Artificial Sequence
  Synthetic
gccucagccaucugaguagc

SEQ ID NO: 128808 - RNA, 21 nt, Artificial Sequence
  Synthetic
guuuucuuguuauugaguagc

SEQ ID NO: 128809 - RNA, 20 nt, Artificial Sequence
  Synthetic
gccucagccucccuaguagc

SEQ ID NO: 128810 - RNA, 21 nt, Artificial Sequence
  Synthetic
gcgggguuucaccauguuagc

SEQ ID NO: 128811 - RNA, 22 nt, Artificial Sequence
  Synthetic
ggcgggguuucaccauguuagc

SEQ ID NO: 128812 - RNA, 24 nt, Artificial Sequence
  Synthetic
gaggcgggguuucaccauguuagc

SEQ ID NO: 128813 - RNA, 18 nt, Artificial Sequence
  Synthetic
ggguuucaccguguuagc

SEQ ID NO: 128814 - RNA, 19 nt, Artificial Sequence
  Synthetic
gggguuucaccguguuagc

SEQ ID NO: 128815 - RNA, 22 nt, Artificial Sequence
  Synthetic
gaugggguuucaccguguuagc

SEQ ID NO: 128816 - RNA, 24 nt, Artificial Sequence
  Synthetic
gagaugggguuucaccguguuagc

SEQ ID NO: 128817 - RNA, 18 nt, Artificial Sequence
  Synthetic
ggguuucacuguguuagc

SEQ ID NO: 128818 - RNA, 19 nt, Artificial Sequence
  Synthetic
gggguuucacuguguuagc

SEQ ID NO: 128819 - RNA, 18 nt, Artificial Sequence
  Synthetic
ggguuucuccuuguuagc

SEQ ID NO: 128820 - RNA, 19 nt, Artificial Sequence
  Synthetic
gggguuucuccuuguuagc

SEQ ID NO: 128821 - RNA, 22 nt, Artificial Sequence
  Synthetic
gaugggguuucuccuuguuagc

SEQ ID NO: 128822 - RNA, 24 nt, Artificial Sequence
  Synthetic
gagaugggguuucuccuuguuagc

SEQ ID NO: 128823 - RNA, 21 nt, Artificial Sequence
  Synthetic
gaacucgaauaagaaaaacgc

SEQ ID NO: 128824 - RNA, 22 nt, Artificial Sequence
  Synthetic
gaucuugccacugcucucccgc

SEQ ID NO: 128825 - RNA, 24 nt, Artificial Sequence
  Synthetic
gagaucuugccacugcucucccgc

SEQ ID NO: 128826 - RNA, 21 nt, Artificial Sequence
  Synthetic
gcucacugcaaccucugccgc

SEQ ID NO: 128827 - RNA, 22 nt, Artificial Sequence
  Synthetic
ggcucacugcaaccucugccgc

SEQ ID NO: 128828 - RNA, 24 nt, Artificial Sequence
  Synthetic
gcccacaucggccucccuaagcgc

SEQ ID NO: 128829 - RNA, 24 nt, Artificial Sequence
  Synthetic
gcaacaugcuguuuuaaugagcgc

SEQ ID NO: 128830 - RNA, 19 nt, Artificial Sequence
  Synthetic
gaagggacuacacaaaggc

SEQ ID NO: 128831 - RNA, 20 nt, Artificial Sequence
  Synthetic
gucucacucugucaccaggc

SEQ ID NO: 128832 - RNA, 22 nt, Artificial Sequence
  Synthetic
gagucucacucugucaccaggc

SEQ ID NO: 128833 - RNA, 20 nt, Artificial Sequence
  Synthetic
gucuugcucugucaccaggc

SEQ ID NO: 128834 - RNA, 21 nt, Artificial Sequence
  Synthetic
ggucuugcucugucaccaggc

SEQ ID NO: 128835 - RNA, 22 nt, Artificial Sequence
  Synthetic
gggucuugcucugucaccaggc

SEQ ID NO: 128836 - RNA, 21 nt, Artificial Sequence
  Synthetic
gucucacccuguaacccaggc

SEQ ID NO: 128837 - RNA, 23 nt, Artificial Sequence
  Synthetic
gagucucacccuguaacccaggc

SEQ ID NO: 128838 - RNA, 24 nt, Artificial Sequence
  Synthetic
ggagucucacccuguaacccaggc

SEQ ID NO: 128839 - RNA, 21 nt, Artificial Sequence
  Synthetic
gucuugcuccaucacccaggc

SEQ ID NO: 128840 - RNA, 23 nt, Artificial Sequence
  Synthetic
gagucuugcuccaucacccaggc

SEQ ID NO: 128841 - RNA, 24 nt, Artificial Sequence
  Synthetic
ggagucuugcuccaucacccaggc

SEQ ID NO: 128842 - RNA, 21 nt, Artificial Sequence
  Synthetic
gucuugcugggucacccaggc

SEQ ID NO: 128843 - RNA, 23 nt, Artificial Sequence
  Synthetic
gagucuugcugggucacccaggc

SEQ ID NO: 128844 - RNA, 23 nt, Artificial Sequence
  Synthetic
gauucucacccugucacccaggc

SEQ ID NO: 128845 - RNA, 21 nt, Artificial Sequence
  Synthetic
gucauacccugucacccaggc

SEQ ID NO: 128846 - RNA, 22 nt, Artificial Sequence
  Synthetic
ggucauacccugucacccaggc

SEQ ID NO: 128847 - RNA, 23 nt, Artificial Sequence
  Synthetic
gggucauacccugucacccaggc

SEQ ID NO: 128848 - RNA, 21 nt, Artificial Sequence
  Synthetic
gucucacucugucacccaggc

SEQ ID NO: 128849 - RNA, 23 nt, Artificial Sequence
  Synthetic
gagucucacucugucacccaggc

SEQ ID NO: 128850 - RNA, 24 nt, Artificial Sequence
  Synthetic
ggagucucacucugucacccaggc

SEQ ID NO: 128851 - RNA, 21 nt, Artificial Sequence
  Synthetic
guuuugcucugucacccaggc

SEQ ID NO: 128852 - RNA, 23 nt, Artificial Sequence
  Synthetic
gaguuuugcucugucacccaggc

SEQ ID NO: 128853 - RNA, 24 nt, Artificial Sequence
  Synthetic
ggaguuuugcucugucacccaggc

SEQ ID NO: 128854 - RNA, 21 nt, Artificial Sequence
  Synthetic
gucucguucugucacccaggc

SEQ ID NO: 128855 - RNA, 23 nt, Artificial Sequence
  Synthetic
gagucucguucugucacccaggc

SEQ ID NO: 128856 - RNA, 24 nt, Artificial Sequence
  Synthetic
gaauuuugcuuuugucacccaggc

SEQ ID NO: 128857 - RNA, 21 nt, Artificial Sequence
  Synthetic
gucucacucuguuacccaggc

SEQ ID NO: 128858 - RNA, 23 nt, Artificial Sequence
  Synthetic
gagucucacucuguuacccaggc

SEQ ID NO: 128859 - RNA, 22 nt, Artificial Sequence
  Synthetic
gucucgcucugucaccccaggc

SEQ ID NO: 128860 - RNA, 24 nt, Artificial Sequence
  Synthetic
gagucucgcucugucaccccaggc

SEQ ID NO: 128861 - RNA, 22 nt, Artificial Sequence
  Synthetic
gucucgcucuugucccccaggc

SEQ ID NO: 128862 - RNA, 20 nt, Artificial Sequence
  Synthetic
gucucgccugcagcccaggc

SEQ ID NO: 128863 - RNA, 22 nt, Artificial Sequence
  Synthetic
gagucucgccugcagcccaggc

SEQ ID NO: 128864 - RNA, 23 nt, Artificial Sequence
  Synthetic
ggagucucgccugcagcccaggc

SEQ ID NO: 128865 - RNA, 21 nt, Artificial Sequence
  Synthetic
gucuugcucagucgcccaggc

SEQ ID NO: 128866 - RNA, 23 nt, Artificial Sequence
  Synthetic
gagucuugcucagucgcccaggc

SEQ ID NO: 128867 - RNA, 24 nt, Artificial Sequence
  Synthetic
ggagucuugcucagucgcccaggc

SEQ ID NO: 128868 - RNA, 21 nt, Artificial Sequence
  Synthetic
gucucacucugucgcccaggc

SEQ ID NO: 128869 - RNA, 23 nt, Artificial Sequence
  Synthetic
gagucucacucugucgcccaggc

SEQ ID NO: 128870 - RNA, 24 nt, Artificial Sequence
  Synthetic
ggagucucacucugucgcccaggc

SEQ ID NO: 128871 - RNA, 23 nt, Artificial Sequence
  Synthetic
gagucucgcucugucgcccaggc

SEQ ID NO: 128872 - RNA, 24 nt, Artificial Sequence
  Synthetic
ggagucucgcucugucgcccaggc

SEQ ID NO: 128873 - RNA, 21 nt, Artificial Sequence
  Synthetic
guuucgcucugucgcccaggc

SEQ ID NO: 128874 - RNA, 23 nt, Artificial Sequence
  Synthetic
gaguuucgcucugucgcccaggc

SEQ ID NO: 128875 - RNA, 24 nt, Artificial Sequence
  Synthetic
ggaguuucgcucugucgcccaggc

SEQ ID NO: 128876 - RNA, 21 nt, Artificial Sequence
  Synthetic
guuuugcucugucgcccaggc

SEQ ID NO: 128877 - RNA, 23 nt, Artificial Sequence
  Synthetic
gaguuuugcucugucgcccaggc

SEQ ID NO: 128878 - RNA, 21 nt, Artificial Sequence
  Synthetic
guuucgcucuuucgcccaggc

SEQ ID NO: 128879 - RNA, 23 nt, Artificial Sequence
  Synthetic
gaguuucgcucuuucgcccaggc

SEQ ID NO: 128880 - RNA, 24 nt, Artificial Sequence
  Synthetic
ggaguuucgcucuuucgcccaggc

SEQ ID NO: 128881 - RNA, 21 nt, Artificial Sequence
  Synthetic
gucuugcucugcugcccaggc

SEQ ID NO: 128882 - RNA, 21 nt, Artificial Sequence
  Synthetic
guccugcuccauugcccaggc

SEQ ID NO: 128883 - RNA, 23 nt, Artificial Sequence
  Synthetic
gaguccugcuccauugcccaggc

SEQ ID NO: 128884 - RNA, 23 nt, Artificial Sequence
  Synthetic
gcaucucacucuguugcccaggc

SEQ ID NO: 128885 - RNA, 23 nt, Artificial Sequence
  Synthetic
gagucucacucuguugcccaggc

SEQ ID NO: 128886 - RNA, 24 nt, Artificial Sequence
  Synthetic
ggagucucacucuguugcccaggc

SEQ ID NO: 128887 - RNA, 23 nt, Artificial Sequence
  Synthetic
gaaucuugcucuguugcccaggc

SEQ ID NO: 128888 - RNA, 22 nt, Artificial Sequence
  Synthetic
guuucacucuuguugcccaggc

SEQ ID NO: 128889 - RNA, 24 nt, Artificial Sequence
  Synthetic
gaguuucacucuuguugcccaggc

SEQ ID NO: 128890 - RNA, 24 nt, Artificial Sequence
  Synthetic
guguuucacucuuguugcccaggc

SEQ ID NO: 128891 - RNA, 22 nt, Artificial Sequence
  Synthetic
guuucgcucuuguugcccaggc

SEQ ID NO: 128892 - RNA, 24 nt, Artificial Sequence
  Synthetic
gaguuucgcucuuguugcccaggc

SEQ ID NO: 128893 - RNA, 24 nt, Artificial Sequence
  Synthetic
gaguuuugcucuuguugcccaggc

SEQ ID NO: 128894 - RNA, 23 nt, Artificial Sequence
  Synthetic
gauucuugcuuugucucccaggc

SEQ ID NO: 128895 - RNA, 20 nt, Artificial Sequence
  Synthetic
gucucgcucugucgccaggc

SEQ ID NO: 128896 - RNA, 23 nt, Artificial Sequence
  Synthetic
gaagucucgcucugucgccaggc

SEQ ID NO: 128897 - RNA, 18 nt, Artificial Sequence
  Synthetic
gagucucugucgccaggc

SEQ ID NO: 128898 - RNA, 19 nt, Artificial Sequence
  Synthetic
ggagucucugucgccaggc

SEQ ID NO: 128899 - RNA, 22 nt, Artificial Sequence
  Synthetic
gauggagucucugucgccaggc

SEQ ID NO: 128900 - RNA, 24 nt, Artificial Sequence
  Synthetic
gagauggagucucugucgccaggc

SEQ ID NO: 128901 - RNA, 22 nt, Artificial Sequence
  Synthetic
guucuggcucugucacucaggc

SEQ ID NO: 128902 - RNA, 23 nt, Artificial Sequence
  Synthetic
gguucuggcucugucacucaggc

SEQ ID NO: 128903 - RNA, 24 nt, Artificial Sequence
  Synthetic
ggguucuggcucugucacucaggc

SEQ ID NO: 128904 - RNA, 21 nt, Artificial Sequence
  Synthetic
gucucgcugugucgcucaggc

SEQ ID NO: 128905 - RNA, 23 nt, Artificial Sequence
  Synthetic
gagucucgcugugucgcucaggc

SEQ ID NO: 128906 - RNA, 23 nt, Artificial Sequence
  Synthetic
guaauuccagcgcuuugggaggc

SEQ ID NO: 128907 - RNA, 19 nt, Artificial Sequence
  Synthetic
gauguaagguccaugaggc

SEQ ID NO: 128908 - RNA, 20 nt, Artificial Sequence
  Synthetic
ggauguaagguccaugaggc

SEQ ID NO: 128909 - RNA, 20 nt, Artificial Sequence
  Synthetic
gauucuugcugaagauaggc

SEQ ID NO: 128910 - RNA, 21 nt, Artificial Sequence
  Synthetic
ggauucuugcugaagauaggc

SEQ ID NO: 128911 - RNA, 21 nt, Artificial Sequence
  Synthetic
gucucacuauguugccuaggc

SEQ ID NO: 128912 - RNA, 23 nt, Artificial Sequence
  Synthetic
gagucucacuauguugccuaggc

SEQ ID NO: 128913 - RNA, 21 nt, Artificial Sequence
  Synthetic
gucucacucuguugccuaggc

SEQ ID NO: 128914 - RNA, 22 nt, Artificial Sequence
  Synthetic
ggucucacucuguugccuaggc

SEQ ID NO: 128915 - RNA, 23 nt, Artificial Sequence
  Synthetic
gggucucacucuguugccuaggc

SEQ ID NO: 128916 - RNA, 19 nt, Artificial Sequence
  Synthetic
gugagccaccgcgcccggc

SEQ ID NO: 128917 - RNA, 21 nt, Artificial Sequence
  Synthetic
gcgugagccaccgcgcccggc

SEQ ID NO: 128918 - RNA, 22 nt, Artificial Sequence
  Synthetic
ggcgugagccaccgcgcccggc

SEQ ID NO: 128919 - RNA, 22 nt, Artificial Sequence
  Synthetic
gaaaaucuucaggcucuagggc

SEQ ID NO: 128920 - RNA, 24 nt, Artificial Sequence
  Synthetic
gagaaaaucuucaggcucuagggc

SEQ ID NO: 128921 - RNA, 21 nt, Artificial Sequence
  Synthetic
gucucgcacuguugcccgggc

SEQ ID NO: 128922 - RNA, 23 nt, Artificial Sequence
  Synthetic
gagucucgcacuguugcccgggc

SEQ ID NO: 128923 - RNA, 24 nt, Artificial Sequence
  Synthetic
ggagucucgcacuguugcccgggc

SEQ ID NO: 128924 - RNA, 20 nt, Artificial Sequence
  Synthetic
gaaguccaagaucaaggggc

SEQ ID NO: 128925 - RNA, 22 nt, Artificial Sequence
  Synthetic
gcgaaguccaagaucaaggggc

SEQ ID NO: 128926 - RNA, 19 nt, Artificial Sequence
  Synthetic
gaagagauaaggaaggggc

SEQ ID NO: 128927 - RNA, 20 nt, Artificial Sequence
  Synthetic
ggaagagauaaggaaggggc

SEQ ID NO: 128928 - RNA, 18 nt, Artificial Sequence
  Synthetic
gggaggaaggagaggggc

SEQ ID NO: 128929 - RNA, 19 nt, Artificial Sequence
  Synthetic
ggggaggaaggagaggggc

SEQ ID NO: 128930 - RNA, 20 nt, Artificial Sequence
  Synthetic
gggggaggaaggagaggggc

SEQ ID NO: 128931 - RNA, 23 nt, Artificial Sequence
  Synthetic
gaagggggaggaaggagaggggc

SEQ ID NO: 128932 - RNA, 20 nt, Artificial Sequence
  Synthetic
gcacuuugggaagcuggggc

SEQ ID NO: 128933 - RNA, 20 nt, Artificial Sequence
  Synthetic
gcaaccuccaccuccugggc

SEQ ID NO: 128934 - RNA, 18 nt, Artificial Sequence
  Synthetic
gaaaagguauguuugggc

SEQ ID NO: 128935 - RNA, 18 nt, Artificial Sequence
  Synthetic
gcuccuuuuagccauggc

SEQ ID NO: 128936 - RNA, 19 nt, Artificial Sequence
  Synthetic
ggcuccuuuuagccauggc

SEQ ID NO: 128937 - RNA, 18 nt, Artificial Sequence
  Synthetic
gccccuuuuauccauggc

SEQ ID NO: 128938 - RNA, 19 nt, Artificial Sequence
  Synthetic
ggccccuuuuauccauggc

SEQ ID NO: 128939 - RNA, 18 nt, Artificial Sequence
  Synthetic
gagagagagagagauggc

SEQ ID NO: 128940 - RNA, 20 nt, Artificial Sequence
  Synthetic
gagagagagagagagauggc

SEQ ID NO: 128941 - RNA, 22 nt, Artificial Sequence
  Synthetic
gagagagagagagagagauggc

SEQ ID NO: 128942 - RNA, 24 nt, Artificial Sequence
  Synthetic
gagagagagagagagagagauggc

SEQ ID NO: 128943 - RNA, 19 nt, Artificial Sequence
  Synthetic
gcugaggcaggaggauggc

SEQ ID NO: 128944 - RNA, 20 nt, Artificial Sequence
  Synthetic
ggcugaggcaggaggauggc

SEQ ID NO: 128945 - RNA, 22 nt, Artificial Sequence
  Synthetic
gaggcugaggcaggaggauggc

SEQ ID NO: 128946 - RNA, 23 nt, Artificial Sequence
  Synthetic
ggaggcugaggcaggaggauggc

SEQ ID NO: 128947 - RNA, 20 nt, Artificial Sequence
  Synthetic
gucucacucugcacccuggc

SEQ ID NO: 128948 - RNA, 22 nt, Artificial Sequence
  Synthetic
gagucucacucugcacccuggc

SEQ ID NO: 128949 - RNA, 23 nt, Artificial Sequence
  Synthetic
ggagucucacucugcacccuggc

SEQ ID NO: 128950 - RNA, 19 nt, Artificial Sequence
  Synthetic
gcagguugccgcugcuggc

SEQ ID NO: 128951 - RNA, 20 nt, Artificial Sequence
  Synthetic
gccucagccuccagaguggc

SEQ ID NO: 128952 - RNA, 20 nt, Artificial Sequence
  Synthetic
gucucagccucccgaguggc

SEQ ID NO: 128953 - RNA, 21 nt, Artificial Sequence
  Synthetic
gacauuccugguugggguggc

SEQ ID NO: 128954 - RNA, 21 nt, Artificial Sequence
  Synthetic
gcaugagccaaugugauuggc

SEQ ID NO: 128955 - RNA, 22 nt, Artificial Sequence
  Synthetic
ggcaugagccaaugugauuggc

SEQ ID NO: 128956 - RNA, 18 nt, Artificial Sequence
  Synthetic
ggguuucaccauguuggc

SEQ ID NO: 128957 - RNA, 19 nt, Artificial Sequence
  Synthetic
gggguuucaccauguuggc

SEQ ID NO: 128958 - RNA, 20 nt, Artificial Sequence
  Synthetic
gacuuuugugcauuuuuggc

SEQ ID NO: 128959 - RNA, 18 nt, Artificial Sequence
  Synthetic
gaauuauuuuaaaaaugc

SEQ ID NO: 128960 - RNA, 18 nt, Artificial Sequence
  Synthetic
gacaacuaaaagcaaugc

SEQ ID NO: 128961 - RNA, 23 nt, Artificial Sequence
  Synthetic
gauacgacaacuaaaagcaaugc

SEQ ID NO: 128962 - RNA, 24 nt, Artificial Sequence
  Synthetic
gcauagcugugcauggaagaaugc

SEQ ID NO: 128963 - RNA, 19 nt, Artificial Sequence
  Synthetic
gaaaaaaauauauacaugc

SEQ ID NO: 128964 - RNA, 20 nt, Artificial Sequence
  Synthetic
guuuagguauguuuagaugc

SEQ ID NO: 128965 - RNA, 23 nt, Artificial Sequence
  Synthetic
guauuccugucauuaagugaugc

SEQ ID NO: 128966 - RNA, 21 nt, Artificial Sequence
  Synthetic
gcucacugcaagcuccacugc

SEQ ID NO: 128967 - RNA, 22 nt, Artificial Sequence
  Synthetic
ggcucacugcaagcuccacugc

SEQ ID NO: 128968 - RNA, 20 nt, Artificial Sequence
  Synthetic
gaacuuugaagcccgacugc

SEQ ID NO: 128969 - RNA, 22 nt, Artificial Sequence
  Synthetic
gugaacuuugaagcccgacugc

SEQ ID NO: 128970 - RNA, 24 nt, Artificial Sequence
  Synthetic
gugugaacuuugaagcccgacugc

SEQ ID NO: 128971 - RNA, 20 nt, Artificial Sequence
  Synthetic
gaaacuugaguucugacugc

SEQ ID NO: 128972 - RNA, 21 nt, Artificial Sequence
  Synthetic
gauuagcugaaacuugacugc

SEQ ID NO: 128973 - RNA, 23 nt, Artificial Sequence
  Synthetic
gugauuagcugaaacuugacugc

SEQ ID NO: 128974 - RNA, 24 nt, Artificial Sequence
  Synthetic
gaacuuauaucccaguuuuccugc

SEQ ID NO: 128975 - RNA, 21 nt, Artificial Sequence
  Synthetic
gccucggccuccccaaagugc

SEQ ID NO: 128976 - RNA, 24 nt, Artificial Sequence
  Synthetic
gcccaccucagccucccaaagugc

SEQ ID NO: 128977 - RNA, 20 nt, Artificial Sequence
  Synthetic
gccucagccucccaaagugc

SEQ ID NO: 128978 - RNA, 20 nt, Artificial Sequence
  Synthetic
gucucagccucccaaagugc

SEQ ID NO: 128979 - RNA, 24 nt, Artificial Sequence
  Synthetic
gccugucucagccucccaaagugc

SEQ ID NO: 128980 - RNA, 24 nt, Artificial Sequence
  Synthetic
gcccacuucagccucccaaagugc

SEQ ID NO: 128981 - RNA, 24 nt, Artificial Sequence
  Synthetic
gcccuccacggccucccaaagugc

SEQ ID NO: 128982 - RNA, 24 nt, Artificial Sequence
  Synthetic
guucaccucggccucccaaagugc

SEQ ID NO: 128983 - RNA, 20 nt, Artificial Sequence
  Synthetic
gccucggccucccaaagugc

SEQ ID NO: 128984 - RNA, 20 nt, Artificial Sequence
  Synthetic
gucucggccucccaaagugc

SEQ ID NO: 128985 - RNA, 24 nt, Artificial Sequence
  Synthetic
gcccgucucggccucccaaagugc

SEQ ID NO: 128986 - RNA, 24 nt, Artificial Sequence
  Synthetic
gcccaccuuggccucccaaagugc

SEQ ID NO: 128987 - RNA, 24 nt, Artificial Sequence
  Synthetic
guucaccuuggccucccaaagugc

SEQ ID NO: 128988 - RNA, 20 nt, Artificial Sequence
  Synthetic
gccuuggccucccaaagugc

SEQ ID NO: 128989 - RNA, 20 nt, Artificial Sequence
  Synthetic
gucuuggccucccaaagugc

SEQ ID NO: 128990 - RNA, 24 nt, Artificial Sequence
  Synthetic
gccugucuuggccucccaaagugc

SEQ ID NO: 128991 - RNA, 20 nt, Artificial Sequence
  Synthetic
gccucggccuuccaaagugc

SEQ ID NO: 128992 - RNA, 24 nt, Artificial Sequence
  Synthetic
gcccgccucggccuuccaaagugc

SEQ ID NO: 128993 - RNA, 20 nt, Artificial Sequence
  Synthetic
gccucagccucucaaagugc

SEQ ID NO: 128994 - RNA, 24 nt, Artificial Sequence
  Synthetic
gccugccucagccucucaaagugc

SEQ ID NO: 128995 - RNA, 20 nt, Artificial Sequence
  Synthetic
gccucagcauccgaaagugc

SEQ ID NO: 128996 - RNA, 24 nt, Artificial Sequence
  Synthetic
gucagccucagcauccgaaagugc

SEQ ID NO: 128997 - RNA, 24 nt, Artificial Sequence
  Synthetic
gcucaccucagccuccgaaagugc

SEQ ID NO: 128998 - RNA, 20 nt, Artificial Sequence
  Synthetic
gccuuggccucccuaagugc

SEQ ID NO: 128999 - RNA, 20 nt, Artificial Sequence
  Synthetic
gccuuggccucccacagugc

SEQ ID NO: 129000 - RNA, 24 nt, Artificial Sequence
  Synthetic
gcccgccuuggccucccacagugc

SEQ ID NO: 129001 - RNA, 23 nt, Artificial Sequence
  Synthetic
gcucacacuuguaauaucagugc

SEQ ID NO: 129002 - RNA, 24 nt, Artificial Sequence
  Synthetic
ggcucacacuuguaauaucagugc

SEQ ID NO: 129003 - RNA, 20 nt, Artificial Sequence
  Synthetic
gccucggccucccagagugc

SEQ ID NO: 129004 - RNA, 24 nt, Artificial Sequence
  Synthetic
gcccgccucggccucccagagugc

SEQ ID NO: 129005 - RNA, 20 nt, Artificial Sequence
  Synthetic
gccucagccucccauagugc

SEQ ID NO: 129006 - RNA, 24 nt, Artificial Sequence
  Synthetic
gacucccuacucaauaaacggugc

SEQ ID NO: 129007 - RNA, 24 nt, Artificial Sequence
  Synthetic
gaauagucuuucacaaccuggugc

SEQ ID NO: 129008 - RNA, 18 nt, Artificial Sequence
  Synthetic
gggaagguguaugugugc

SEQ ID NO: 129009 - RNA, 23 nt, Artificial Sequence
  Synthetic
gucuugggaagguguaugugugc

SEQ ID NO: 129010 - RNA, 24 nt, Artificial Sequence
  Synthetic
gacauuuuugguugugacaauugc

SEQ ID NO: 129011 - RNA, 20 nt, Artificial Sequence
  Synthetic
gccucaaccuccagaguugc

SEQ ID NO: 129012 - RNA, 18 nt, Artificial Sequence
  Synthetic
ggaguuucgcucuguugc

SEQ ID NO: 129013 - RNA, 21 nt, Artificial Sequence
  Synthetic
gauggaguuucgcucuguugc

SEQ ID NO: 129014 - RNA, 23 nt, Artificial Sequence
  Synthetic
gagauggaguuucgcucuguugc

SEQ ID NO: 129015 - RNA, 22 nt, Artificial Sequence
  Synthetic
gauuauuuguauaaaguguugc

SEQ ID NO: 129016 - RNA, 19 nt, Artificial Sequence
  Synthetic
gaaaauaaaucaguuuugc

SEQ ID NO: 129017 - RNA, 20 nt, Artificial Sequence
  Synthetic
ggaaaauaaaucaguuuugc

SEQ ID NO: 129018 - RNA, 20 nt, Artificial Sequence
  Synthetic
gacaaacagagagccaaauc

SEQ ID NO: 129019 - RNA, 21 nt, Artificial Sequence
  Synthetic
guucaagcugagagccaaauc

SEQ ID NO: 129020 - RNA, 23 nt, Artificial Sequence
  Synthetic
guguucaagcugagagccaaauc

SEQ ID NO: 129021 - RNA, 20 nt, Artificial Sequence
  Synthetic
gacaaagagagugccaaauc

SEQ ID NO: 129022 - RNA, 20 nt, Artificial Sequence
  Synthetic
gaagaguugauguugcaauc

SEQ ID NO: 129023 - RNA, 21 nt, Artificial Sequence
  Synthetic
ggaagaguugauguugcaauc

SEQ ID NO: 129024 - RNA, 22 nt, Artificial Sequence
  Synthetic
gggaagaguugauguugcaauc

SEQ ID NO: 129025 - RNA, 18 nt, Artificial Sequence
  Synthetic
gagggagagagaagaauc

SEQ ID NO: 129026 - RNA, 20 nt, Artificial Sequence
  Synthetic
gugagggagagagaagaauc

SEQ ID NO: 129027 - RNA, 22 nt, Artificial Sequence
  Synthetic
gagugagggagagagaagaauc

SEQ ID NO: 129028 - RNA, 23 nt, Artificial Sequence
  Synthetic
ggagugagggagagagaagaauc

SEQ ID NO: 129029 - RNA, 24 nt, Artificial Sequence
  Synthetic
gggagugagggagagagaagaauc

SEQ ID NO: 129030 - RNA, 19 nt, Artificial Sequence
  Synthetic
gagagagagagagagaauc

SEQ ID NO: 129031 - RNA, 21 nt, Artificial Sequence
  Synthetic
gagagagagagagagagaauc

SEQ ID NO: 129032 - RNA, 23 nt, Artificial Sequence
  Synthetic
gagagagagagagagagagaauc

SEQ ID NO: 129033 - RNA, 18 nt, Artificial Sequence
  Synthetic
gggggaaguaauugaauc

SEQ ID NO: 129034 - RNA, 24 nt, Artificial Sequence
  Synthetic
gacccagggggaaguaauugaauc

SEQ ID NO: 129035 - RNA, 22 nt, Artificial Sequence
  Synthetic
gcuuugagugagauucuuaauc

SEQ ID NO: 129036 - RNA, 23 nt, Artificial Sequence
  Synthetic
ggcuuugagugagauucuuaauc

SEQ ID NO: 129037 - RNA, 23 nt, Artificial Sequence
  Synthetic
gaaaauuauuaagaggaaacauc

SEQ ID NO: 129038 - RNA, 24 nt, Artificial Sequence
  Synthetic
ggaaaauuauuaagaggaaacauc

SEQ ID NO: 129039 - RNA, 20 nt, Artificial Sequence
  Synthetic
guuuaaaucuuuaauccauc

SEQ ID NO: 129040 - RNA, 18 nt, Artificial Sequence
  Synthetic
guaagucuuuaauccauc

SEQ ID NO: 129041 - RNA, 21 nt, Artificial Sequence
  Synthetic
gguuuaagucuuuaauccauc

SEQ ID NO: 129042 - RNA, 20 nt, Artificial Sequence
  Synthetic
guuuaaaccuuuauuccauc

SEQ ID NO: 129043 - RNA, 20 nt, Artificial Sequence
  Synthetic
guuuaagucuuuaaugcauc

SEQ ID NO: 129044 - RNA, 21 nt, Artificial Sequence
  Synthetic
gguuuaagucuuuaaugcauc

SEQ ID NO: 129045 - RNA, 20 nt, Artificial Sequence
  Synthetic
guccccacccaaaucucauc

SEQ ID NO: 129046 - RNA, 22 nt, Artificial Sequence
  Synthetic
guguccccacccaaaucucauc

SEQ ID NO: 129047 - RNA, 18 nt, Artificial Sequence
  Synthetic
gggucucagucugucauc

SEQ ID NO: 129048 - RNA, 20 nt, Artificial Sequence
  Synthetic
guuuugcaucaauguucauc

SEQ ID NO: 129049 - RNA, 22 nt, Artificial Sequence
  Synthetic
gaguuuugcaucaauguucauc

SEQ ID NO: 129050 - RNA, 23 nt, Artificial Sequence
  Synthetic
ggaguuuugcaucaauguucauc

SEQ ID NO: 129051 - RNA, 22 nt, Artificial Sequence
  Synthetic
gauuuuugcaucgauguucauc

SEQ ID NO: 129052 - RNA, 23 nt, Artificial Sequence
  Synthetic
ggauuuuugcaucgauguucauc

SEQ ID NO: 129053 - RNA, 23 nt, Artificial Sequence
  Synthetic
gacuuccuccacugccagagauc

SEQ ID NO: 129054 - RNA, 19 nt, Artificial Sequence
  Synthetic
gcaggcagaucacgagauc

SEQ ID NO: 129055 - RNA, 20 nt, Artificial Sequence
  Synthetic
ggcaggcagaucacgagauc

SEQ ID NO: 129056 - RNA, 22 nt, Artificial Sequence
  Synthetic
gaggcaggcagaucacgagauc

SEQ ID NO: 129057 - RNA, 19 nt, Artificial Sequence
  Synthetic
gcuucugauucaguagauc

SEQ ID NO: 129058 - RNA, 21 nt, Artificial Sequence
  Synthetic
gagcuucugauucaguagauc

SEQ ID NO: 129059 - RNA, 23 nt, Artificial Sequence
  Synthetic
guuaauucuugucuugcuugauc

SEQ ID NO: 129060 - RNA, 20 nt, Artificial Sequence
  Synthetic
gaaagagagaaugaaauauc

SEQ ID NO: 129061 - RNA, 19 nt, Artificial Sequence
  Synthetic
guaaaugagaugauauauc

SEQ ID NO: 129062 - RNA, 21 nt, Artificial Sequence
  Synthetic
gaguaaaugagaugauauauc

SEQ ID NO: 129063 - RNA, 22 nt, Artificial Sequence
  Synthetic
ggaguaaaugagaugauauauc

SEQ ID NO: 129064 - RNA, 24 nt, Artificial Sequence
  Synthetic
gaggaguaaaugagaugauauauc

SEQ ID NO: 129065 - RNA, 20 nt, Artificial Sequence
  Synthetic
gccucaaacucccaaguauc

SEQ ID NO: 129066 - RNA, 21 nt, Artificial Sequence
  Synthetic
gucuuugcccaugccuguauc

SEQ ID NO: 129067 - RNA, 24 nt, Artificial Sequence
  Synthetic
gaagucuuugcccaugccuguauc

SEQ ID NO: 129068 - RNA, 20 nt, Artificial Sequence
  Synthetic
gucaaaauaucaacauuauc

SEQ ID NO: 129069 - RNA, 21 nt, Artificial Sequence
  Synthetic
ggucaaaauaucaacauuauc

SEQ ID NO: 129070 - RNA, 23 nt, Artificial Sequence
  Synthetic
gaggucaaaauaucaacauuauc

SEQ ID NO: 129071 - RNA, 24 nt, Artificial Sequence
  Synthetic
ggaggucaaaauaucaacauuauc

SEQ ID NO: 129072 - RNA, 23 nt, Artificial Sequence
  Synthetic
gucccaucaauaccuaauuuauc

SEQ ID NO: 129073 - RNA, 19 nt, Artificial Sequence
  Synthetic
gagaucuguugguuuuauc

SEQ ID NO: 129074 - RNA, 20 nt, Artificial Sequence
  Synthetic
gucaggcugguccugaacuc

SEQ ID NO: 129075 - RNA, 21 nt, Artificial Sequence
  Synthetic
ggucaggcugguccugaacuc

SEQ ID NO: 129076 - RNA, 24 nt, Artificial Sequence
  Synthetic
guuggucaggcugguccugaacuc

SEQ ID NO: 129077 - RNA, 18 nt, Artificial Sequence
  Synthetic
gauccagcaaccucacuc

SEQ ID NO: 129078 - RNA, 22 nt, Artificial Sequence
  Synthetic
guucugaucauuguagucacuc

SEQ ID NO: 129079 - RNA, 23 nt, Artificial Sequence
  Synthetic
gguucugaucauuguagucacuc

SEQ ID NO: 129080 - RNA, 24 nt, Artificial Sequence
  Synthetic
ggguucugaucauuguagucacuc

SEQ ID NO: 129081 - RNA, 23 nt, Artificial Sequence
  Synthetic
gacuggcucuguuuuguucacuc

SEQ ID NO: 129082 - RNA, 24 nt, Artificial Sequence
  Synthetic
ggacuggcucuguuuuguucacuc

SEQ ID NO: 129083 - RNA, 19 nt, Artificial Sequence
  Synthetic
gaaagagucaagaagacuc

SEQ ID NO: 129084 - RNA, 20 nt, Artificial Sequence
  Synthetic
gauucuccugccucaaccuc

SEQ ID NO: 129085 - RNA, 22 nt, Artificial Sequence
  Synthetic
gugauucuccugccucaaccuc

SEQ ID NO: 129086 - RNA, 21 nt, Artificial Sequence
  Synthetic
gcucacugcaaccuccaccuc

SEQ ID NO: 129087 - RNA, 22 nt, Artificial Sequence
  Synthetic
ggcucacugcaaccuccaccuc

SEQ ID NO: 129088 - RNA, 21 nt, Artificial Sequence
  Synthetic
gcucaccgcaagcuccaccuc

SEQ ID NO: 129089 - RNA, 22 nt, Artificial Sequence
  Synthetic
ggcucaccgcaagcuccaccuc

SEQ ID NO: 129090 - RNA, 20 nt, Artificial Sequence
  Synthetic
gcaucuggcaggugccccuc

SEQ ID NO: 129091 - RNA, 21 nt, Artificial Sequence
  Synthetic
ggcaucuggcaggugccccuc

SEQ ID NO: 129092 - RNA, 24 nt, Artificial Sequence
  Synthetic
gcuggcaucuggcaggugccccuc

SEQ ID NO: 129093 - RNA, 21 nt, Artificial Sequence
  Synthetic
gcucacugcaaccucucccuc

SEQ ID NO: 129094 - RNA, 22 nt, Artificial Sequence
  Synthetic
ggcucacugcaaccucucccuc

SEQ ID NO: 129095 - RNA, 20 nt, Artificial Sequence
  Synthetic
gauccuccaaccucagccuc

SEQ ID NO: 129096 - RNA, 22 nt, Artificial Sequence
  Synthetic
gcgauccuccaaccucagccuc

SEQ ID NO: 129097 - RNA, 20 nt, Artificial Sequence
  Synthetic
gauccucccaccucagccuc

SEQ ID NO: 129098 - RNA, 22 nt, Artificial Sequence
  Synthetic
gugauccucccaccucagccuc

SEQ ID NO: 129099 - RNA, 23 nt, Artificial Sequence
  Synthetic
ggugauccucccaccucagccuc

SEQ ID NO: 129100 - RNA, 20 nt, Artificial Sequence
  Synthetic
gauucuccuaccucagccuc

SEQ ID NO: 129101 - RNA, 22 nt, Artificial Sequence
  Synthetic
gcaauucucccgccucagccuc

SEQ ID NO: 129102 - RNA, 22 nt, Artificial Sequence
  Synthetic
gugauucuccugccucagccuc

SEQ ID NO: 129103 - RNA, 24 nt, Artificial Sequence
  Synthetic
gagugauucuccugccucagccuc

SEQ ID NO: 129104 - RNA, 19 nt, Artificial Sequence
  Synthetic
guucuccugccucagccuc

SEQ ID NO: 129105 - RNA, 20 nt, Artificial Sequence
  Synthetic
gguucuccugccucagccuc

SEQ ID NO: 129106 - RNA, 22 nt, Artificial Sequence
  Synthetic
gcgguucuccugccucagccuc

SEQ ID NO: 129107 - RNA, 20 nt, Artificial Sequence
  Synthetic
gauucuucugccucagccuc

SEQ ID NO: 129108 - RNA, 22 nt, Artificial Sequence
  Synthetic
gugauucuucugccucagccuc

SEQ ID NO: 129109 - RNA, 21 nt, Artificial Sequence
  Synthetic
gcaauucucugucucagccuc

SEQ ID NO: 129110 - RNA, 20 nt, Artificial Sequence
  Synthetic
gauucuccugcuucagccuc

SEQ ID NO: 129111 - RNA, 22 nt, Artificial Sequence
  Synthetic
gcgauucuccugcuucagccuc

SEQ ID NO: 129112 - RNA, 22 nt, Artificial Sequence
  Synthetic
gcaauucuccugccuuagccuc

SEQ ID NO: 129113 - RNA, 21 nt, Artificial Sequence
  Synthetic
gcucacagcaaccuccgccuc

SEQ ID NO: 129114 - RNA, 22 nt, Artificial Sequence
  Synthetic
ggcucacagcaaccuccgccuc

SEQ ID NO: 129115 - RNA, 21 nt, Artificial Sequence
  Synthetic
guucgcugcaaccuccgccuc

SEQ ID NO: 129116 - RNA, 21 nt, Artificial Sequence
  Synthetic
gcucacugcagccuccgccuc

SEQ ID NO: 129117 - RNA, 22 nt, Artificial Sequence
  Synthetic
gacucacugcaagcuccgccuc

SEQ ID NO: 129118 - RNA, 21 nt, Artificial Sequence
  Synthetic
gcucacugcaagcuccgccuc

SEQ ID NO: 129119 - RNA, 21 nt, Artificial Sequence
  Synthetic
gcucacugcaaccacugccuc

SEQ ID NO: 129120 - RNA, 22 nt, Artificial Sequence
  Synthetic
ggcucacugcaaccacugccuc

SEQ ID NO: 129121 - RNA, 21 nt, Artificial Sequence
  Synthetic
gcucacagcaaccucugccuc

SEQ ID NO: 129122 - RNA, 22 nt, Artificial Sequence
  Synthetic
ggcucacagcaaccucugccuc

SEQ ID NO: 129123 - RNA, 21 nt, Artificial Sequence
  Synthetic
gcucacugcaaccucugccuc

SEQ ID NO: 129124 - RNA, 22 nt, Artificial Sequence
  Synthetic
ggcucacugcaaccucugccuc

SEQ ID NO: 129125 - RNA, 21 nt, Artificial Sequence
  Synthetic
gcucacugcaagcucugccuc

SEQ ID NO: 129126 - RNA, 22 nt, Artificial Sequence
  Synthetic
ggcucacugcaagcucugccuc

SEQ ID NO: 129127 - RNA, 24 nt, Artificial Sequence
  Synthetic
gaauauuuaguacccaggugccuc

SEQ ID NO: 129128 - RNA, 19 nt, Artificial Sequence
  Synthetic
gacaguguggcaauuccuc

SEQ ID NO: 129129 - RNA, 22 nt, Artificial Sequence
  Synthetic
gaagacaguguggcaauuccuc

SEQ ID NO: 129130 - RNA, 23 nt, Artificial Sequence
  Synthetic
ggaagacaguguggcaauuccuc

SEQ ID NO: 129131 - RNA, 19 nt, Artificial Sequence
  Synthetic
gucaguguggcgauuccuc

SEQ ID NO: 129132 - RNA, 22 nt, Artificial Sequence
  Synthetic
gaagucaguguggcgauuccuc

SEQ ID NO: 129133 - RNA, 23 nt, Artificial Sequence
  Synthetic
ggaagucaguguggcgauuccuc

SEQ ID NO: 129134 - RNA, 19 nt, Artificial Sequence
  Synthetic
gaccguguggcgauuccuc

SEQ ID NO: 129135 - RNA, 22 nt, Artificial Sequence
  Synthetic
gaagaccguguggcgauuccuc

SEQ ID NO: 129136 - RNA, 23 nt, Artificial Sequence
  Synthetic
ggaagaccguguggcgauuccuc

SEQ ID NO: 129137 - RNA, 19 nt, Artificial Sequence
  Synthetic
gucgguguggcgauuccuc

SEQ ID NO: 129138 - RNA, 22 nt, Artificial Sequence
  Synthetic
gaagucgguguggcgauuccuc

SEQ ID NO: 129139 - RNA, 23 nt, Artificial Sequence
  Synthetic
ggaagucgguguggcgauuccuc

SEQ ID NO: 129140 - RNA, 20 nt, Artificial Sequence
  Synthetic
gacuuuuaaaaaauuuccuc

SEQ ID NO: 129141 - RNA, 22 nt, Artificial Sequence
  Synthetic
gauccuuucaaaaaaccagcuc

SEQ ID NO: 129142 - RNA, 18 nt, Artificial Sequence
  Synthetic
ggaggaucaccagagcuc

SEQ ID NO: 129143 - RNA, 20 nt, Artificial Sequence
  Synthetic
guggaggaucaccagagcuc

SEQ ID NO: 129144 - RNA, 21 nt, Artificial Sequence
  Synthetic
gguggaggaucaccagagcuc

SEQ ID NO: 129145 - RNA, 23 nt, Artificial Sequence
  Synthetic
gagguggaggaucaccagagcuc

SEQ ID NO: 129146 - RNA, 18 nt, Artificial Sequence
  Synthetic
gguggguugcaugagcuc

SEQ ID NO: 129147 - RNA, 19 nt, Artificial Sequence
  Synthetic
ggguggguugcaugagcuc

SEQ ID NO: 129148 - RNA, 21 nt, Artificial Sequence
  Synthetic
guggguggguugcaugagcuc

SEQ ID NO: 129149 - RNA, 22 nt, Artificial Sequence
  Synthetic
gguggguggguugcaugagcuc

SEQ ID NO: 129150 - RNA, 24 nt, Artificial Sequence
  Synthetic
gagguggguggguugcaugagcuc

SEQ ID NO: 129151 - RNA, 18 nt, Artificial Sequence
  Synthetic
ggaggaucacuugagcuc

SEQ ID NO: 129152 - RNA, 21 nt, Artificial Sequence
  Synthetic
gcaggaggaucacuugagcuc

SEQ ID NO: 129153 - RNA, 19 nt, Artificial Sequence
  Synthetic
guuucugauuuacuagcuc

SEQ ID NO: 129154 - RNA, 21 nt, Artificial Sequence
  Synthetic
gaguuucugauuuacuagcuc

SEQ ID NO: 129155 - RNA, 19 nt, Artificial Sequence
  Synthetic
gauuuugauucauuagcuc

SEQ ID NO: 129156 - RNA, 22 nt, Artificial Sequence
  Synthetic
gcagauuuugauucauuagcuc

SEQ ID NO: 129157 - RNA, 22 nt, Artificial Sequence
  Synthetic
gaucuuuucaaaaaacuggcuc

SEQ ID NO: 129158 - RNA, 19 nt, Artificial Sequence
  Synthetic
gaaacugagcaaccugcuc

SEQ ID NO: 129159 - RNA, 20 nt, Artificial Sequence
  Synthetic
ggaaacugagcaaccugcuc

SEQ ID NO: 129160 - RNA, 18 nt, Artificial Sequence
  Synthetic
gacccaaccccacaucuc

SEQ ID NO: 129161 - RNA, 19 nt, Artificial Sequence
  Synthetic
ggacccaaccccacaucuc

SEQ ID NO: 129162 - RNA, 21 nt, Artificial Sequence
  Synthetic
gcucacugcaacuuccaucuc

SEQ ID NO: 129163 - RNA, 22 nt, Artificial Sequence
  Synthetic
ggcucacugcaacuuccaucuc

SEQ ID NO: 129164 - RNA, 20 nt, Artificial Sequence
  Synthetic
gaacuacacuaucagcucuc

SEQ ID NO: 129165 - RNA, 21 nt, Artificial Sequence
  Synthetic
ggaacuacacuaucagcucuc

SEQ ID NO: 129166 - RNA, 19 nt, Artificial Sequence
  Synthetic
gauuacaguuccugcucuc

SEQ ID NO: 129167 - RNA, 19 nt, Artificial Sequence
  Synthetic
gugcacaugaaauuuucuc

SEQ ID NO: 129168 - RNA, 18 nt, Artificial Sequence
  Synthetic
gaaggaaaugggaaaguc

SEQ ID NO: 129169 - RNA, 19 nt, Artificial Sequence
  Synthetic
ggaaggaaaugggaaaguc

SEQ ID NO: 129170 - RNA, 21 nt, Artificial Sequence
  Synthetic
gccugggguuggacagaaguc

SEQ ID NO: 129171 - RNA, 22 nt, Artificial Sequence
  Synthetic
ggccugggguuggacagaaguc

SEQ ID NO: 129172 - RNA, 23 nt, Artificial Sequence
  Synthetic
gggccugggguuggacagaaguc

SEQ ID NO: 129173 - RNA, 18 nt, Artificial Sequence
  Synthetic
gguggaucaccugaaguc

SEQ ID NO: 129174 - RNA, 19 nt, Artificial Sequence
  Synthetic
ggguggaucaccugaaguc

SEQ ID NO: 129175 - RNA, 21 nt, Artificial Sequence
  Synthetic
guggguggaucaccugaaguc

SEQ ID NO: 129176 - RNA, 22 nt, Artificial Sequence
  Synthetic
gguggguggaucaccugaaguc

SEQ ID NO: 129177 - RNA, 24 nt, Artificial Sequence
  Synthetic
gagguggguggaucaccugaaguc

SEQ ID NO: 129178 - RNA, 24 nt, Artificial Sequence
  Synthetic
guuuucuucauaaauuacccaguc

SEQ ID NO: 129179 - RNA, 21 nt, Artificial Sequence
  Synthetic
gauauaaccccauccucaguc

SEQ ID NO: 129180 - RNA, 18 nt, Artificial Sequence
  Synthetic
ggcagaucccuggacguc

SEQ ID NO: 129181 - RNA, 24 nt, Artificial Sequence
  Synthetic
gaaacaggcagaucccuggacguc

SEQ ID NO: 129182 - RNA, 21 nt, Artificial Sequence
  Synthetic
guccuugcccaugccuacguc

SEQ ID NO: 129183 - RNA, 24 nt, Artificial Sequence
  Synthetic
gaaguccuugcccaugccuacguc

SEQ ID NO: 129184 - RNA, 24 nt, Artificial Sequence
  Synthetic
gcaauaaucaaacucccacagguc

SEQ ID NO: 129185 - RNA, 19 nt, Artificial Sequence
  Synthetic
gcgggcagaucacgagguc

SEQ ID NO: 129186 - RNA, 20 nt, Artificial Sequence
  Synthetic
ggcgggcagaucacgagguc

SEQ ID NO: 129187 - RNA, 22 nt, Artificial Sequence
  Synthetic
gaggcgggcagaucacgagguc

SEQ ID NO: 129188 - RNA, 19 nt, Artificial Sequence
  Synthetic
gugggcagaucacgagguc

SEQ ID NO: 129189 - RNA, 20 nt, Artificial Sequence
  Synthetic
ggugggcagaucacgagguc

SEQ ID NO: 129190 - RNA, 22 nt, Artificial Sequence
  Synthetic
gaggcagguggaucacgagguc

SEQ ID NO: 129191 - RNA, 20 nt, Artificial Sequence
  Synthetic
gacgggcagauuaugagguc

SEQ ID NO: 129192 - RNA, 22 nt, Artificial Sequence
  Synthetic
gagacgggcagauuaugagguc

SEQ ID NO: 129193 - RNA, 18 nt, Artificial Sequence
  Synthetic
ggcagaucaccugagguc

SEQ ID NO: 129194 - RNA, 19 nt, Artificial Sequence
  Synthetic
gggcagaucaccugagguc

SEQ ID NO: 129195 - RNA, 21 nt, Artificial Sequence
  Synthetic
gugggcagaucaccugagguc

SEQ ID NO: 129196 - RNA, 22 nt, Artificial Sequence
  Synthetic
ggugggcagaucaccugagguc

SEQ ID NO: 129197 - RNA, 24 nt, Artificial Sequence
  Synthetic
gaggugggcagaucaccugagguc

SEQ ID NO: 129198 - RNA, 21 nt, Artificial Sequence
  Synthetic
gcaaacggaucaccugagguc

SEQ ID NO: 129199 - RNA, 22 nt, Artificial Sequence
  Synthetic
ggcaaacggaucaccugagguc

SEQ ID NO: 129200 - RNA, 24 nt, Artificial Sequence
  Synthetic
gaggcaaacggaucaccugagguc

SEQ ID NO: 129201 - RNA, 18 nt, Artificial Sequence
  Synthetic
ggcggaucaccugagguc

SEQ ID NO: 129202 - RNA, 21 nt, Artificial Sequence
  Synthetic
gcaggcggaucaccugagguc

SEQ ID NO: 129203 - RNA, 22 nt, Artificial Sequence
  Synthetic
ggcaggcggaucaccugagguc

SEQ ID NO: 129204 - RNA, 24 nt, Artificial Sequence
  Synthetic
gaggcaggcggaucaccugagguc

SEQ ID NO: 129205 - RNA, 18 nt, Artificial Sequence
  Synthetic
gauggaucaccugagguc

SEQ ID NO: 129206 - RNA, 20 nt, Artificial Sequence
  Synthetic
gcgauggaucaccugagguc

SEQ ID NO: 129207 - RNA, 23 nt, Artificial Sequence
  Synthetic
gaagcgauggaucaccugagguc

SEQ ID NO: 129208 - RNA, 21 nt, Artificial Sequence
  Synthetic
guggguggaucaccugagguc

SEQ ID NO: 129209 - RNA, 22 nt, Artificial Sequence
  Synthetic
gguggguggaucaccugagguc

SEQ ID NO: 129210 - RNA, 24 nt, Artificial Sequence
  Synthetic
gagguggguggaucaccugagguc

SEQ ID NO: 129211 - RNA, 18 nt, Artificial Sequence
  Synthetic
gguguaucaccugagguc

SEQ ID NO: 129212 - RNA, 19 nt, Artificial Sequence
  Synthetic
ggguguaucaccugagguc

SEQ ID NO: 129213 - RNA, 21 nt, Artificial Sequence
  Synthetic
gcggguguaucaccugagguc

SEQ ID NO: 129214 - RNA, 22 nt, Artificial Sequence
  Synthetic
ggcggguguaucaccugagguc

SEQ ID NO: 129215 - RNA, 24 nt, Artificial Sequence
  Synthetic
gaggcggguguaucaccugagguc

SEQ ID NO: 129216 - RNA, 18 nt, Artificial Sequence
  Synthetic
ggcagaucaucugagguc

SEQ ID NO: 129217 - RNA, 19 nt, Artificial Sequence
  Synthetic
gggcagaucaucugagguc

SEQ ID NO: 129218 - RNA, 22 nt, Artificial Sequence
  Synthetic
gaugggcagaucaucugagguc

SEQ ID NO: 129219 - RNA, 18 nt, Artificial Sequence
  Synthetic
gguggaacacuugagguc

SEQ ID NO: 129220 - RNA, 19 nt, Artificial Sequence
  Synthetic
ggguggaacacuugagguc

SEQ ID NO: 129221 - RNA, 21 nt, Artificial Sequence
  Synthetic
guggguggaacacuugagguc

SEQ ID NO: 129222 - RNA, 22 nt, Artificial Sequence
  Synthetic
gguggguggaacacuugagguc

SEQ ID NO: 129223 - RNA, 24 nt, Artificial Sequence
  Synthetic
gagguggguggaacacuugagguc

SEQ ID NO: 129224 - RNA, 18 nt, Artificial Sequence
  Synthetic
ggcagaucacuugagguc

SEQ ID NO: 129225 - RNA, 19 nt, Artificial Sequence
  Synthetic
gggcagaucacuugagguc

SEQ ID NO: 129226 - RNA, 21 nt, Artificial Sequence
  Synthetic
gagggcagaucacuugagguc

SEQ ID NO: 129227 - RNA, 22 nt, Artificial Sequence
  Synthetic
ggagggcagaucacuugagguc

SEQ ID NO: 129228 - RNA, 24 nt, Artificial Sequence
  Synthetic
gaggagggcagaucacuugagguc

SEQ ID NO: 129229 - RNA, 18 nt, Artificial Sequence
  Synthetic
gguggaucacuugagguc

SEQ ID NO: 129230 - RNA, 21 nt, Artificial Sequence
  Synthetic
gcagguggaucacuugagguc

SEQ ID NO: 129231 - RNA, 22 nt, Artificial Sequence
  Synthetic
ggcagguggaucacuugagguc

SEQ ID NO: 129232 - RNA, 24 nt, Artificial Sequence
  Synthetic
gaggcagguggaucacuugagguc

SEQ ID NO: 129233 - RNA, 18 nt, Artificial Sequence
  Synthetic
ggcacaucauuugagguc

SEQ ID NO: 129234 - RNA, 19 nt, Artificial Sequence
  Synthetic
gggcacaucauuugagguc

SEQ ID NO: 129235 - RNA, 21 nt, Artificial Sequence
  Synthetic
gcgggcacaucauuugagguc

SEQ ID NO: 129236 - RNA, 22 nt, Artificial Sequence
  Synthetic
ggcgggcacaucauuugagguc

SEQ ID NO: 129237 - RNA, 19 nt, Artificial Sequence
  Synthetic
gaugcugauucaguagguc

SEQ ID NO: 129238 - RNA, 21 nt, Artificial Sequence
  Synthetic
gauacucaggcaaacaggguc

SEQ ID NO: 129239 - RNA, 23 nt, Artificial Sequence
  Synthetic
gugauacucaggcaaacaggguc

SEQ ID NO: 129240 - RNA, 24 nt, Artificial Sequence
  Synthetic
ggugauacucaggcaaacaggguc

SEQ ID NO: 129241 - RNA, 18 nt, Artificial Sequence
  Synthetic
gcgggugaccacaggguc

SEQ ID NO: 129242 - RNA, 19 nt, Artificial Sequence
  Synthetic
ggcgggugaccacaggguc

SEQ ID NO: 129243 - RNA, 24 nt, Artificial Sequence
  Synthetic
gccaaggcgggugaccacaggguc

SEQ ID NO: 129244 - RNA, 21 nt, Artificial Sequence
  Synthetic
gaggcugaauuugaccugguc

SEQ ID NO: 129245 - RNA, 22 nt, Artificial Sequence
  Synthetic
ggaggcugaauuugaccugguc

SEQ ID NO: 129246 - RNA, 24 nt, Artificial Sequence
  Synthetic
gaggaggcugaauuugaccugguc

SEQ ID NO: 129247 - RNA, 21 nt, Artificial Sequence
  Synthetic
gaaauacugauuaaguugguc

SEQ ID NO: 129248 - RNA, 19 nt, Artificial Sequence
  Synthetic
guuucugugucaguugguc

SEQ ID NO: 129249 - RNA, 21 nt, Artificial Sequence
  Synthetic
gaguuucugugucaguugguc

SEQ ID NO: 129250 - RNA, 23 nt, Artificial Sequence
  Synthetic
gauaaccaaaaagaaagaauguc

SEQ ID NO: 129251 - RNA, 24 nt, Artificial Sequence
  Synthetic
gaauuaugguaauccccacauguc

SEQ ID NO: 129252 - RNA, 18 nt, Artificial Sequence
  Synthetic
gguggaucaucugauguc

SEQ ID NO: 129253 - RNA, 19 nt, Artificial Sequence
  Synthetic
ggguggaucaucugauguc

SEQ ID NO: 129254 - RNA, 21 nt, Artificial Sequence
  Synthetic
gcggguggaucaucugauguc

SEQ ID NO: 129255 - RNA, 22 nt, Artificial Sequence
  Synthetic
ggcggguggaucaucugauguc

SEQ ID NO: 129256 - RNA, 24 nt, Artificial Sequence
  Synthetic
gaggcggguggaucaucugauguc

SEQ ID NO: 129257 - RNA, 18 nt, Artificial Sequence
  Synthetic
gguggaccacuugauguc

SEQ ID NO: 129258 - RNA, 19 nt, Artificial Sequence
  Synthetic
ggguggaccacuugauguc

SEQ ID NO: 129259 - RNA, 21 nt, Artificial Sequence
  Synthetic
guggguggaccacuugauguc

SEQ ID NO: 129260 - RNA, 22 nt, Artificial Sequence
  Synthetic
gguggguggaccacuugauguc

SEQ ID NO: 129261 - RNA, 24 nt, Artificial Sequence
  Synthetic
gagguggguggaccacuugauguc

SEQ ID NO: 129262 - RNA, 21 nt, Artificial Sequence
  Synthetic
guccuugcccacgccuauguc

SEQ ID NO: 129263 - RNA, 24 nt, Artificial Sequence
  Synthetic
gaaguccuugcccacgccuauguc

SEQ ID NO: 129264 - RNA, 21 nt, Artificial Sequence
  Synthetic
ggcuggcugugcagagcuguc

SEQ ID NO: 129265 - RNA, 22 nt, Artificial Sequence
  Synthetic
gggcuggcugugcagagcuguc

SEQ ID NO: 129266 - RNA, 23 nt, Artificial Sequence
  Synthetic
gaaauaacuuacauacauguguc

SEQ ID NO: 129267 - RNA, 18 nt, Artificial Sequence
  Synthetic
gaggcuaagugaguuguc

SEQ ID NO: 129268 - RNA, 20 nt, Artificial Sequence
  Synthetic
gagaggcuaagugaguuguc

SEQ ID NO: 129269 - RNA, 21 nt, Artificial Sequence
  Synthetic
guccuugcccaugccuuuguc

SEQ ID NO: 129270 - RNA, 24 nt, Artificial Sequence
  Synthetic
gaaguccuugcccaugccuuuguc

SEQ ID NO: 129271 - RNA, 23 nt, Artificial Sequence
  Synthetic
gaacuucuaagaaaugcaaauuc

SEQ ID NO: 129272 - RNA, 24 nt, Artificial Sequence
  Synthetic
ggaacuucuaagaaaugcaaauuc

SEQ ID NO: 129273 - RNA, 24 nt, Artificial Sequence
  Synthetic
guuuauuugagcaaaaaacaauuc

SEQ ID NO: 129274 - RNA, 18 nt, Artificial Sequence
  Synthetic
guucccaaacuucaauuc

SEQ ID NO: 129275 - RNA, 19 nt, Artificial Sequence
  Synthetic
gguucccaaacuucaauuc

SEQ ID NO: 129276 - RNA, 21 nt, Artificial Sequence
  Synthetic
gagguucccaaacuucaauuc

SEQ ID NO: 129277 - RNA, 24 nt, Artificial Sequence
  Synthetic
gcagagguucccaaacuucaauuc

SEQ ID NO: 129278 - RNA, 19 nt, Artificial Sequence
  Synthetic
gcagagcugaguucaauuc

SEQ ID NO: 129279 - RNA, 21 nt, Artificial Sequence
  Synthetic
gugcagagcugaguucaauuc

SEQ ID NO: 129280 - RNA, 22 nt, Artificial Sequence
  Synthetic
ggugcagagcugaguucaauuc

SEQ ID NO: 129281 - RNA, 19 nt, Artificial Sequence
  Synthetic
gcuguuugguuuuccauuc

SEQ ID NO: 129282 - RNA, 18 nt, Artificial Sequence
  Synthetic
ggagacaugagaauauuc

SEQ ID NO: 129283 - RNA, 19 nt, Artificial Sequence
  Synthetic
gggagacaugagaauauuc

SEQ ID NO: 129284 - RNA, 19 nt, Artificial Sequence
  Synthetic
gccuguuauuggucuauuc

SEQ ID NO: 129285 - RNA, 21 nt, Artificial Sequence
  Synthetic
gagccuguuauuggucuauuc

SEQ ID NO: 129286 - RNA, 21 nt, Artificial Sequence
  Synthetic
gaacuuguuauuggucuauuc

SEQ ID NO: 129287 - RNA, 20 nt, Artificial Sequence
  Synthetic
gaauuuuuaaaaaaguauuc

SEQ ID NO: 129288 - RNA, 23 nt, Artificial Sequence
  Synthetic
gcuaaacaagggguggauuauuc

SEQ ID NO: 129289 - RNA, 21 nt, Artificial Sequence
  Synthetic
gaucauguggguggauccuuc

SEQ ID NO: 129290 - RNA, 22 nt, Artificial Sequence
  Synthetic
ggaucauguggguggauccuuc

SEQ ID NO: 129291 - RNA, 20 nt, Artificial Sequence
  Synthetic
gauucuccugccucagcuuc

SEQ ID NO: 129292 - RNA, 22 nt, Artificial Sequence
  Synthetic
gcgauucuccugccucagcuuc

SEQ ID NO: 129293 - RNA, 22 nt, Artificial Sequence
  Synthetic
guaacacacccucuggggcuuc

SEQ ID NO: 129294 - RNA, 20 nt, Artificial Sequence
  Synthetic
guaaugccuagguuaucuuc

SEQ ID NO: 129295 - RNA, 21 nt, Artificial Sequence
  Synthetic
gaauugaaaccuugggucuuc

SEQ ID NO: 129296 - RNA, 18 nt, Artificial Sequence
  Synthetic
gcacuuuuaauuuucuuc

SEQ ID NO: 129297 - RNA, 19 nt, Artificial Sequence
  Synthetic
ggcacuuuuaauuuucuuc

SEQ ID NO: 129298 - RNA, 23 nt, Artificial Sequence
  Synthetic
gacuggcacuuuuaauuuucuuc

SEQ ID NO: 129299 - RNA, 20 nt, Artificial Sequence
  Synthetic
guaaugccuagguuuucuuc

SEQ ID NO: 129300 - RNA, 23 nt, Artificial Sequence
  Synthetic
guauauauauauacuugaaguuc

SEQ ID NO: 129301 - RNA, 24 nt, Artificial Sequence
  Synthetic
guuuuuuaauuuuacuuuaaguuc

SEQ ID NO: 129302 - RNA, 18 nt, Artificial Sequence
  Synthetic
gaccacauuacucaguuc

SEQ ID NO: 129303 - RNA, 18 nt, Artificial Sequence
  Synthetic
guauuuaguuuuccguuc

SEQ ID NO: 129304 - RNA, 19 nt, Artificial Sequence
  Synthetic
gguauuuaguuuuccguuc

SEQ ID NO: 129305 - RNA, 20 nt, Artificial Sequence
  Synthetic
gaacucaggcaguuugguuc

SEQ ID NO: 129306 - RNA, 22 nt, Artificial Sequence
  Synthetic
gugaacucaggcaguuugguuc

SEQ ID NO: 129307 - RNA, 18 nt, Artificial Sequence
  Synthetic
ggaccauauuccauguuc

SEQ ID NO: 129308 - RNA, 19 nt, Artificial Sequence
  Synthetic
gggaccauauuccauguuc

SEQ ID NO: 129309 - RNA, 18 nt, Artificial Sequence
  Synthetic
gguugagaaacacuguuc

SEQ ID NO: 129310 - RNA, 23 nt, Artificial Sequence
  Synthetic
gcuaagguugagaaacacuguuc

SEQ ID NO: 129311 - RNA, 24 nt, Artificial Sequence
  Synthetic
gauuucauuuccuuauuucuguuc

SEQ ID NO: 129312 - RNA, 20 nt, Artificial Sequence
  Synthetic
guuuuuucaacaaauauuuc

SEQ ID NO: 129313 - RNA, 20 nt, Artificial Sequence
  Synthetic
guaaaugaaauacauauuuc

SEQ ID NO: 129314 - RNA, 19 nt, Artificial Sequence
  Synthetic
guggcguucucuguauuuc

SEQ ID NO: 129315 - RNA, 20 nt, Artificial Sequence
  Synthetic
gaacuacaucauuggcuuuc

SEQ ID NO: 129316 - RNA, 21 nt, Artificial Sequence
  Synthetic
ggaacuacaucauuggcuuuc

SEQ ID NO: 129317 - RNA, 22 nt, Artificial Sequence
  Synthetic
gacagucuaggcaauaucuuuc

SEQ ID NO: 129318 - RNA, 21 nt, Artificial Sequence
  Synthetic
gauaaacuugagaacaguuuc

SEQ ID NO: 129319 - RNA, 22 nt, Artificial Sequence
  Synthetic
ggauaaacuugagaacaguuuc

SEQ ID NO: 129320 - RNA, 18 nt, Artificial Sequence
  Synthetic
gccaagguuuucaguuuc

SEQ ID NO: 129321 - RNA, 18 nt, Artificial Sequence
  Synthetic
gcacgugagauggguuuc

SEQ ID NO: 129322 - RNA, 24 nt, Artificial Sequence
  Synthetic
gucucugcacgugagauggguuuc

SEQ ID NO: 129323 - RNA, 20 nt, Artificial Sequence
  Synthetic
gaaauacuuguuaaauuuuc

SEQ ID NO: 129324 - RNA, 20 nt, Artificial Sequence
  Synthetic
gaaaagauauguuuauuuuc

SEQ ID NO: 129325 - RNA, 19 nt, Artificial Sequence
  Synthetic
guuacaaaaacuucuuuuc

SEQ ID NO: 129326 - RNA, 19 nt, Artificial Sequence
  Synthetic
guuuugccuuuguuuuuuc

SEQ ID NO: 129327 - RNA, 19 nt, Artificial Sequence
  Synthetic
gacaauauucaaacaaaag

SEQ ID NO: 129328 - RNA, 19 nt, Artificial Sequence
  Synthetic
gagaaaaacacuggaaaag

SEQ ID NO: 129329 - RNA, 22 nt, Artificial Sequence
  Synthetic
guuuuauagaauuuuauaaaag

SEQ ID NO: 129330 - RNA, 24 nt, Artificial Sequence
  Synthetic
gcguuuuauagaauuuuauaaaag

SEQ ID NO: 129331 - RNA, 19 nt, Artificial Sequence
  Synthetic
gcaacagaagcauuaaaag

SEQ ID NO: 129332 - RNA, 21 nt, Artificial Sequence
  Synthetic
guaccauagaaauuuuaaaag

SEQ ID NO: 129333 - RNA, 18 nt, Artificial Sequence
  Synthetic
gaggcacagagagcaaag

SEQ ID NO: 129334 - RNA, 19 nt, Artificial Sequence
  Synthetic
ggaggcacagagagcaaag

SEQ ID NO: 129335 - RNA, 18 nt, Artificial Sequence
  Synthetic
gaaaugcuggaaagaaag

SEQ ID NO: 129336 - RNA, 19 nt, Artificial Sequence
  Synthetic
ggaaaugcuggaaagaaag

SEQ ID NO: 129337 - RNA, 18 nt, Artificial Sequence
  Synthetic
gagagaaaauagagaaag

SEQ ID NO: 129338 - RNA, 20 nt, Artificial Sequence
  Synthetic
gugagagaaaauagagaaag

SEQ ID NO: 129339 - RNA, 21 nt, Artificial Sequence
  Synthetic
gaaaauucuagaauuggaaag

SEQ ID NO: 129340 - RNA, 23 nt, Artificial Sequence
  Synthetic
gcaaaaacugacugaacugaaag

SEQ ID NO: 129341 - RNA, 20 nt, Artificial Sequence
  Synthetic
gaucugcccaauguugaaag

SEQ ID NO: 129342 - RNA, 22 nt, Artificial Sequence
  Synthetic
gagaucugcccaauguugaaag

SEQ ID NO: 129343 - RNA, 23 nt, Artificial Sequence
  Synthetic
ggagaucugcccaauguugaaag

SEQ ID NO: 129344 - RNA, 24 nt, Artificial Sequence
  Synthetic
gggagaucugcccaauguugaaag

SEQ ID NO: 129345 - RNA, 20 nt, Artificial Sequence
  Synthetic
gucucccauuuuuacuaaag

SEQ ID NO: 129346 - RNA, 24 nt, Artificial Sequence
  Synthetic
guaacaaaaccaaaaauuaacaag

SEQ ID NO: 129347 - RNA, 18 nt, Artificial Sequence
  Synthetic
guaacaaauuaccacaag

SEQ ID NO: 129348 - RNA, 22 nt, Artificial Sequence
  Synthetic
gacaaaguuauagaacaccaag

SEQ ID NO: 129349 - RNA, 18 nt, Artificial Sequence
  Synthetic
gcacuucgggaggccaag

SEQ ID NO: 129350 - RNA, 18 nt, Artificial Sequence
  Synthetic
gcccaggaugaguccaag

SEQ ID NO: 129351 - RNA, 20 nt, Artificial Sequence
  Synthetic
gagcccaggaugaguccaag

SEQ ID NO: 129352 - RNA, 19 nt, Artificial Sequence
  Synthetic
gacagacugccuucucaag

SEQ ID NO: 129353 - RNA, 20 nt, Artificial Sequence
  Synthetic
ggacagacugccuucucaag

SEQ ID NO: 129354 - RNA, 21 nt, Artificial Sequence
  Synthetic
gggacagacugccuucucaag

SEQ ID NO: 129355 - RNA, 18 nt, Artificial Sequence
  Synthetic
ggcauuaagccauucaag

SEQ ID NO: 129356 - RNA, 19 nt, Artificial Sequence
  Synthetic
gggcauuaagccauucaag

SEQ ID NO: 129357 - RNA, 22 nt, Artificial Sequence
  Synthetic
gaagggcauuaagccauucaag

SEQ ID NO: 129358 - RNA, 23 nt, Artificial Sequence
  Synthetic
ggaagggcauuaagccauucaag

SEQ ID NO: 129359 - RNA, 18 nt, Artificial Sequence
  Synthetic
gcugugaaaaaaaagaag

SEQ ID NO: 129360 - RNA, 20 nt, Artificial Sequence
  Synthetic
gugcugugaaaaaaaagaag

SEQ ID NO: 129361 - RNA, 18 nt, Artificial Sequence
  Synthetic
gacuaaaccaggaagaag

SEQ ID NO: 129362 - RNA, 18 nt, Artificial Sequence
  Synthetic
gugagaucaacacagaag

SEQ ID NO: 129363 - RNA, 18 nt, Artificial Sequence
  Synthetic
ggaaguaggcuucagaag

SEQ ID NO: 129364 - RNA, 21 nt, Artificial Sequence
  Synthetic
gacggaaguaggcuucagaag

SEQ ID NO: 129365 - RNA, 19 nt, Artificial Sequence
  Synthetic
gccaagacagagagagaag

SEQ ID NO: 129366 - RNA, 18 nt, Artificial Sequence
  Synthetic
gagaaccagaaugagaag

SEQ ID NO: 129367 - RNA, 22 nt, Artificial Sequence
  Synthetic
gcaugagaaccagaaugagaag

SEQ ID NO: 129368 - RNA, 24 nt, Artificial Sequence
  Synthetic
gauaauaaucugugugcugagaag

SEQ ID NO: 129369 - RNA, 20 nt, Artificial Sequence
  Synthetic
gaucacauggacacaggaag

SEQ ID NO: 129370 - RNA, 22 nt, Artificial Sequence
  Synthetic
gagaucacauggacacaggaag

SEQ ID NO: 129371 - RNA, 22 nt, Artificial Sequence
  Synthetic
guuccuucugagggcucggaag

SEQ ID NO: 129372 - RNA, 23 nt, Artificial Sequence
  Synthetic
gguuccuucugagggcucggaag

SEQ ID NO: 129373 - RNA, 21 nt, Artificial Sequence
  Synthetic
gccaaagggagagaugggaag

SEQ ID NO: 129374 - RNA, 22 nt, Artificial Sequence
  Synthetic
ggccaaagggagagaugggaag

SEQ ID NO: 129375 - RNA, 24 nt, Artificial Sequence
  Synthetic
gaggccaaagggagagaugggaag

SEQ ID NO: 129376 - RNA, 19 nt, Artificial Sequence
  Synthetic
gaagcaaggcagugggaag

SEQ ID NO: 129377 - RNA, 20 nt, Artificial Sequence
  Synthetic
ggaagcaaggcagugggaag

SEQ ID NO: 129378 - RNA, 18 nt, Artificial Sequence
  Synthetic
gaaaggaggaaauggaag

SEQ ID NO: 129379 - RNA, 19 nt, Artificial Sequence
  Synthetic
ggaaaggaggaaauggaag

SEQ ID NO: 129380 - RNA, 18 nt, Artificial Sequence
  Synthetic
gagagagggagguggaag

SEQ ID NO: 129381 - RNA, 20 nt, Artificial Sequence
  Synthetic
gagagagagggagguggaag

SEQ ID NO: 129382 - RNA, 22 nt, Artificial Sequence
  Synthetic
gagagagagagggagguggaag

SEQ ID NO: 129383 - RNA, 23 nt, Artificial Sequence
  Synthetic
ggagagagagagggagguggaag

SEQ ID NO: 129384 - RNA, 19 nt, Artificial Sequence
  Synthetic
gcugaguucugauuggaag

SEQ ID NO: 129385 - RNA, 22 nt, Artificial Sequence
  Synthetic
gucucaaaaauacauaaauaag

SEQ ID NO: 129386 - RNA, 19 nt, Artificial Sequence
  Synthetic
gcagguucacaggaauaag

SEQ ID NO: 129387 - RNA, 20 nt, Artificial Sequence
  Synthetic
ggcagguucacaggaauaag

SEQ ID NO: 129388 - RNA, 18 nt, Artificial Sequence
  Synthetic
ggaaacaucagggguaag

SEQ ID NO: 129389 - RNA, 20 nt, Artificial Sequence
  Synthetic
gaggaaacaucagggguaag

SEQ ID NO: 129390 - RNA, 21 nt, Artificial Sequence
  Synthetic
guccuucacaucccuuguaag

SEQ ID NO: 129391 - RNA, 22 nt, Artificial Sequence
  Synthetic
gguccuucacaucccuuguaag

SEQ ID NO: 129392 - RNA, 24 nt, Artificial Sequence
  Synthetic
gagguccuucacaucccuuguaag

SEQ ID NO: 129393 - RNA, 21 nt, Artificial Sequence
  Synthetic
guccuucacaucgcuuguaag

SEQ ID NO: 129394 - RNA, 22 nt, Artificial Sequence
  Synthetic
gguccuucacaucgcuuguaag

SEQ ID NO: 129395 - RNA, 24 nt, Artificial Sequence
  Synthetic
gagguccuucacaucgcuuguaag

SEQ ID NO: 129396 - RNA, 19 nt, Artificial Sequence
  Synthetic
guauuuuucaauuauuaag

SEQ ID NO: 129397 - RNA, 19 nt, Artificial Sequence
  Synthetic
gcaugggaggcugacacag

SEQ ID NO: 129398 - RNA, 22 nt, Artificial Sequence
  Synthetic
gcugcaugggaggcugacacag

SEQ ID NO: 129399 - RNA, 20 nt, Artificial Sequence
  Synthetic
gcaauuuuacuucugcacag

SEQ ID NO: 129400 - RNA, 23 nt, Artificial Sequence
  Synthetic
guacauguacaggcuugucacag

SEQ ID NO: 129401 - RNA, 24 nt, Artificial Sequence
  Synthetic
gguacauguacaggcuugucacag

SEQ ID NO: 129402 - RNA, 18 nt, Artificial Sequence
  Synthetic
gaacagauggauucacag

SEQ ID NO: 129403 - RNA, 19 nt, Artificial Sequence
  Synthetic
ggaacagauggauucacag

SEQ ID NO: 129404 - RNA, 24 nt, Artificial Sequence
  Synthetic
gcccaggaacagauggauucacag

SEQ ID NO: 129405 - RNA, 18 nt, Artificial Sequence
  Synthetic
gaccagauggauucacag

SEQ ID NO: 129406 - RNA, 19 nt, Artificial Sequence
  Synthetic
ggaccagauggauucacag

SEQ ID NO: 129407 - RNA, 24 nt, Artificial Sequence
  Synthetic
guccaggaccagauggauucacag

SEQ ID NO: 129408 - RNA, 19 nt, Artificial Sequence
  Synthetic
gacaaaauguguaagacag

SEQ ID NO: 129409 - RNA, 20 nt, Artificial Sequence
  Synthetic
ggacaaaauguguaagacag

SEQ ID NO: 129410 - RNA, 22 nt, Artificial Sequence
  Synthetic
gcuacucgggaggcugagacag

SEQ ID NO: 129411 - RNA, 20 nt, Artificial Sequence
  Synthetic
guagguagauagauagacag

SEQ ID NO: 129412 - RNA, 21 nt, Artificial Sequence
  Synthetic
gguagguagauagauagacag

SEQ ID NO: 129413 - RNA, 24 nt, Artificial Sequence
  Synthetic
guugguagguagauagauagacag

SEQ ID NO: 129414 - RNA, 24 nt, Artificial Sequence
  Synthetic
gacagacaaaaaauuuugggacag

SEQ ID NO: 129415 - RNA, 20 nt, Artificial Sequence
  Synthetic
gaucugucuaauguugacag

SEQ ID NO: 129416 - RNA, 23 nt, Artificial Sequence
  Synthetic
guugaucugucuaauguugacag

SEQ ID NO: 129417 - RNA, 21 nt, Artificial Sequence
  Synthetic
guuauuuuuuucauuugacag

SEQ ID NO: 129418 - RNA, 23 nt, Artificial Sequence
  Synthetic
guguuauuuuuuucauuugacag

SEQ ID NO: 129419 - RNA, 24 nt, Artificial Sequence
  Synthetic
gguguuauuuuuuucauuugacag

SEQ ID NO: 129420 - RNA, 21 nt, Artificial Sequence
  Synthetic
gcauuuuaauagaauccccag

SEQ ID NO: 129421 - RNA, 19 nt, Artificial Sequence
  Synthetic
gcuggcuaaccguauccag

SEQ ID NO: 129422 - RNA, 23 nt, Artificial Sequence
  Synthetic
gauagcuggcuaaccguauccag

SEQ ID NO: 129423 - RNA, 24 nt, Artificial Sequence
  Synthetic
ggauagcuggcuaaccguauccag

SEQ ID NO: 129424 - RNA, 21 nt, Artificial Sequence
  Synthetic
gacuuugggaggccaaagcag

SEQ ID NO: 129425 - RNA, 22 nt, Artificial Sequence
  Synthetic
ggacuuugggaggccaaagcag

SEQ ID NO: 129426 - RNA, 22 nt, Artificial Sequence
  Synthetic
gaacugugggaggcuaaagcag

SEQ ID NO: 129427 - RNA, 22 nt, Artificial Sequence
  Synthetic
gcuacucgggaggcugaagcag

SEQ ID NO: 129428 - RNA, 23 nt, Artificial Sequence
  Synthetic
gcuaacuugggaggcugaagcag

SEQ ID NO: 129429 - RNA, 24 nt, Artificial Sequence
  Synthetic
ggcuaacuugggaggcugaagcag

SEQ ID NO: 129430 - RNA, 22 nt, Artificial Sequence
  Synthetic
gcuacuugggaggcugaagcag

SEQ ID NO: 129431 - RNA, 22 nt, Artificial Sequence
  Synthetic
gcacuuugggaggcugaagcag

SEQ ID NO: 129432 - RNA, 22 nt, Artificial Sequence
  Synthetic
gcuacuugggagguugaagcag

SEQ ID NO: 129433 - RNA, 21 nt, Artificial Sequence
  Synthetic
guacaucucaucuaacagcag

SEQ ID NO: 129434 - RNA, 19 nt, Artificial Sequence
  Synthetic
gcauguaucuuuacagcag

SEQ ID NO: 129435 - RNA, 21 nt, Artificial Sequence
  Synthetic
gugcauguaucuuuacagcag

SEQ ID NO: 129436 - RNA, 18 nt, Artificial Sequence
  Synthetic
gggauauauacccagcag

SEQ ID NO: 129437 - RNA, 19 nt, Artificial Sequence
  Synthetic
gaguucaagacuucagcag

SEQ ID NO: 129438 - RNA, 20 nt, Artificial Sequence
  Synthetic
ggaguucaagacuucagcag

SEQ ID NO: 129439 - RNA, 22 nt, Artificial Sequence
  Synthetic
gcaauuugggaggcuaaggcag

SEQ ID NO: 129440 - RNA, 22 nt, Artificial Sequence
  Synthetic
gcuacucgggagguuaaggcag

SEQ ID NO: 129441 - RNA, 22 nt, Artificial Sequence
  Synthetic
gcacuuugcgaggccgaggcag

SEQ ID NO: 129442 - RNA, 22 nt, Artificial Sequence
  Synthetic
gcacuuugggaagcugaggcag

SEQ ID NO: 129443 - RNA, 22 nt, Artificial Sequence
  Synthetic
gcuacucaggacgcugaggcag

SEQ ID NO: 129444 - RNA, 22 nt, Artificial Sequence
  Synthetic
gcuacuuagcaggcugaggcag

SEQ ID NO: 129445 - RNA, 22 nt, Artificial Sequence
  Synthetic
gauacucaggaggcugaggcag

SEQ ID NO: 129446 - RNA, 21 nt, Artificial Sequence
  Synthetic
gcuacucggaggcugaggcag

SEQ ID NO: 129447 - RNA, 22 nt, Artificial Sequence
  Synthetic
gcuacuagggaggcugaggcag

SEQ ID NO: 129448 - RNA, 21 nt, Artificial Sequence
  Synthetic
gcuaccgggaggcugaggcag

SEQ ID NO: 129449 - RNA, 22 nt, Artificial Sequence
  Synthetic
gcuacucgggaggcugaggcag

SEQ ID NO: 129450 - RNA, 21 nt, Artificial Sequence
  Synthetic
guacuugggaggcugaggcag

SEQ ID NO: 129451 - RNA, 22 nt, Artificial Sequence
  Synthetic
gguacuugggaggcugaggcag

SEQ ID NO: 129452 - RNA, 22 nt, Artificial Sequence
  Synthetic
gcuauuugggaggcugaggcag

SEQ ID NO: 129453 - RNA, 22 nt, Artificial Sequence
  Synthetic
gcgcuuugggaggcugaggcag

SEQ ID NO: 129454 - RNA, 22 nt, Artificial Sequence
  Synthetic
gugcuuugggaggcugaggcag

SEQ ID NO: 129455 - RNA, 22 nt, Artificial Sequence
  Synthetic
gacacacuggaggcugaggcag

SEQ ID NO: 129456 - RNA, 19 nt, Artificial Sequence
  Synthetic
gcucuggaggcugaggcag

SEQ ID NO: 129457 - RNA, 22 nt, Artificial Sequence
  Synthetic
gcugcucuggaggcugaggcag

SEQ ID NO: 129458 - RNA, 22 nt, Artificial Sequence
  Synthetic
gcuacuccugaggcugaggcag

SEQ ID NO: 129459 - RNA, 22 nt, Artificial Sequence
  Synthetic
gcacuuugggaugcugaggcag

SEQ ID NO: 129460 - RNA, 18 nt, Artificial Sequence
  Synthetic
gcacuccagcuugggcag

SEQ ID NO: 129461 - RNA, 20 nt, Artificial Sequence
  Synthetic
gcuccucuccaaaauggcag

SEQ ID NO: 129462 - RNA, 22 nt, Artificial Sequence
  Synthetic
gccacuugggaggcugaugcag

SEQ ID NO: 129463 - RNA, 21 nt, Artificial Sequence
  Synthetic
gaacuggcuagccauaugcag

SEQ ID NO: 129464 - RNA, 23 nt, Artificial Sequence
  Synthetic
gagaacuggcuagccauaugcag

SEQ ID NO: 129465 - RNA, 24 nt, Artificial Sequence
  Synthetic
ggagaacuggcuagccauaugcag

SEQ ID NO: 129466 - RNA, 18 nt, Artificial Sequence
  Synthetic
gaaaauacaaaaaaucag

SEQ ID NO: 129467 - RNA, 18 nt, Artificial Sequence
  Synthetic
gaaagaauucagaaucag

SEQ ID NO: 129468 - RNA, 19 nt, Artificial Sequence
  Synthetic
guuuacccagauccaucag

SEQ ID NO: 129469 - RNA, 19 nt, Artificial Sequence
  Synthetic
gagaaauggagaaagucag

SEQ ID NO: 129470 - RNA, 23 nt, Artificial Sequence
  Synthetic
guuagagaaauggagaaagucag

SEQ ID NO: 129471 - RNA, 20 nt, Artificial Sequence
  Synthetic
gucugagaucaaggugucag

SEQ ID NO: 129472 - RNA, 23 nt, Artificial Sequence
  Synthetic
gaagucugagaucaaggugucag

SEQ ID NO: 129473 - RNA, 19 nt, Artificial Sequence
  Synthetic
gauaauagcccuuugucag

SEQ ID NO: 129474 - RNA, 20 nt, Artificial Sequence
  Synthetic
ggauaauagcccuuugucag

SEQ ID NO: 129475 - RNA, 19 nt, Artificial Sequence
  Synthetic
gauauuagcccuuugucag

SEQ ID NO: 129476 - RNA, 20 nt, Artificial Sequence
  Synthetic
ggauauuagcccuuugucag

SEQ ID NO: 129477 - RNA, 19 nt, Artificial Sequence
  Synthetic
gaaaaggagaaaaauucag

SEQ ID NO: 129478 - RNA, 24 nt, Artificial Sequence
  Synthetic
gaaaagaaaaggagaaaaauucag

SEQ ID NO: 129479 - RNA, 19 nt, Artificial Sequence
  Synthetic
gaauucuaacaguuuucag

SEQ ID NO: 129480 - RNA, 21 nt, Artificial Sequence
  Synthetic
gaauggcuguuauaaaaagag

SEQ ID NO: 129481 - RNA, 20 nt, Artificial Sequence
  Synthetic
gaacauauggacacaaagag

SEQ ID NO: 129482 - RNA, 22 nt, Artificial Sequence
  Synthetic
gagaacauauggacacaaagag

SEQ ID NO: 129483 - RNA, 18 nt, Artificial Sequence
  Synthetic
guaagaaaaaagaaagag

SEQ ID NO: 129484 - RNA, 19 nt, Artificial Sequence
  Synthetic
gguaagaaaaaagaaagag

SEQ ID NO: 129485 - RNA, 22 nt, Artificial Sequence
  Synthetic
gaagguaagaaaaaagaaagag

SEQ ID NO: 129486 - RNA, 18 nt, Artificial Sequence
  Synthetic
gaagagggaaggaaagag

SEQ ID NO: 129487 - RNA, 19 nt, Artificial Sequence
  Synthetic
ggaagagggaaggaaagag

SEQ ID NO: 129488 - RNA, 20 nt, Artificial Sequence
  Synthetic
gggaagagggaaggaaagag

SEQ ID NO: 129489 - RNA, 22 nt, Artificial Sequence
  Synthetic
gagggaagagggaaggaaagag

SEQ ID NO: 129490 - RNA, 23 nt, Artificial Sequence
  Synthetic
ggagggaagagggaaggaaagag

SEQ ID NO: 129491 - RNA, 24 nt, Artificial Sequence
  Synthetic
gggagggaagagggaaggaaagag

SEQ ID NO: 129492 - RNA, 18 nt, Artificial Sequence
  Synthetic
guaacacugaugcaagag

SEQ ID NO: 129493 - RNA, 19 nt, Artificial Sequence
  Synthetic
gguaacacugaugcaagag

SEQ ID NO: 129494 - RNA, 20 nt, Artificial Sequence
  Synthetic
gaaggcaguggggagaagag

SEQ ID NO: 129495 - RNA, 21 nt, Artificial Sequence
  Synthetic
guaaaaaugaaacccacagag

SEQ ID NO: 129496 - RNA, 23 nt, Artificial Sequence
  Synthetic
gaguaaaaaugaaacccacagag

SEQ ID NO: 129497 - RNA, 18 nt, Artificial Sequence
  Synthetic
ggucuccuuggugcagag

SEQ ID NO: 129498 - RNA, 19 nt, Artificial Sequence
  Synthetic
gaauucaucaagaucagag

SEQ ID NO: 129499 - RNA, 20 nt, Artificial Sequence
  Synthetic
gaaaagaacauauuucagag

SEQ ID NO: 129500 - RNA, 23 nt, Artificial Sequence
  Synthetic
gucaaacucguagaaccagagag

SEQ ID NO: 129501 - RNA, 21 nt, Artificial Sequence
  Synthetic
guaaauugguacugcagagag

SEQ ID NO: 129502 - RNA, 18 nt, Artificial Sequence
  Synthetic
gauaaaaaugucagagag

SEQ ID NO: 129503 - RNA, 19 nt, Artificial Sequence
  Synthetic
gagagagagacagagagag

SEQ ID NO: 129504 - RNA, 21 nt, Artificial Sequence
  Synthetic
gagagagagagacagagagag

SEQ ID NO: 129505 - RNA, 22 nt, Artificial Sequence
  Synthetic
ggagagagagagacagagagag

SEQ ID NO: 129506 - RNA, 23 nt, Artificial Sequence
  Synthetic
gggagagagagagacagagagag

SEQ ID NO: 129507 - RNA, 18 nt, Artificial Sequence
  Synthetic
ggaaagagagagagagag

SEQ ID NO: 129508 - RNA, 19 nt, Artificial Sequence
  Synthetic
gggaaagagagagagagag

SEQ ID NO: 129509 - RNA, 20 nt, Artificial Sequence
  Synthetic
ggggaaagagagagagagag

SEQ ID NO: 129510 - RNA, 19 nt, Artificial Sequence
  Synthetic
gagagagagagagagagag

SEQ ID NO: 129511 - RNA, 21 nt, Artificial Sequence
  Synthetic
gagagagagagagagagagag

SEQ ID NO: 129512 - RNA, 22 nt, Artificial Sequence
  Synthetic
ggagagagagagagagagagag

SEQ ID NO: 129513 - RNA, 23 nt, Artificial Sequence
  Synthetic
gggagagagagagagagagagag

SEQ ID NO: 129514 - RNA, 18 nt, Artificial Sequence
  Synthetic
gcaggauugaggagagag

SEQ ID NO: 129515 - RNA, 23 nt, Artificial Sequence
  Synthetic
gucaaacucauugaaguagagag

SEQ ID NO: 129516 - RNA, 21 nt, Artificial Sequence
  Synthetic
gaaaugaggcaauagcuagag

SEQ ID NO: 129517 - RNA, 23 nt, Artificial Sequence
  Synthetic
gagaaaugaggcaauagcuagag

SEQ ID NO: 129518 - RNA, 18 nt, Artificial Sequence
  Synthetic
gaugaaaacauucuagag

SEQ ID NO: 129519 - RNA, 21 nt, Artificial Sequence
  Synthetic
gaugaugaaaacauucuagag

SEQ ID NO: 129520 - RNA, 22 nt, Artificial Sequence
  Synthetic
ggaugaugaaaacauucuagag

SEQ ID NO: 129521 - RNA, 23 nt, Artificial Sequence
  Synthetic
gggaugaugaaaacauucuagag

SEQ ID NO: 129522 - RNA, 20 nt, Artificial Sequence
  Synthetic
gaauucauagagauguagag

SEQ ID NO: 129523 - RNA, 18 nt, Artificial Sequence
  Synthetic
gauggcauaacuuuagag

SEQ ID NO: 129524 - RNA, 19 nt, Artificial Sequence
  Synthetic
gagaaccuuaauuuuagag

SEQ ID NO: 129525 - RNA, 21 nt, Artificial Sequence
  Synthetic
gaacucugguuacuuuuagag

SEQ ID NO: 129526 - RNA, 22 nt, Artificial Sequence
  Synthetic
ggaacucugguuacuuuuagag

SEQ ID NO: 129527 - RNA, 20 nt, Artificial Sequence
  Synthetic
gauuugggaggggccaggag

SEQ ID NO: 129528 - RNA, 22 nt, Artificial Sequence
  Synthetic
gagauuugggaggggccaggag

SEQ ID NO: 129529 - RNA, 19 nt, Artificial Sequence
  Synthetic
gcagaagaagaaagaggag

SEQ ID NO: 129530 - RNA, 18 nt, Artificial Sequence
  Synthetic
gaauugaagacagaggag

SEQ ID NO: 129531 - RNA, 19 nt, Artificial Sequence
  Synthetic
gauugaggagagagaggag

SEQ ID NO: 129532 - RNA, 20 nt, Artificial Sequence
  Synthetic
ggauugaggagagagaggag

SEQ ID NO: 129533 - RNA, 19 nt, Artificial Sequence
  Synthetic
guuguggguggaggaggag

SEQ ID NO: 129534 - RNA, 18 nt, Artificial Sequence
  Synthetic
ggaggaaaggaaagggag

SEQ ID NO: 129535 - RNA, 20 nt, Artificial Sequence
  Synthetic
gcggaggaaaggaaagggag

SEQ ID NO: 129536 - RNA, 18 nt, Artificial Sequence
  Synthetic
gagacagaacgaagggag

SEQ ID NO: 129537 - RNA, 18 nt, Artificial Sequence
  Synthetic
guguguguguggcgggag

SEQ ID NO: 129538 - RNA, 20 nt, Artificial Sequence
  Synthetic
guguguguguguggcgggag

SEQ ID NO: 129539 - RNA, 21 nt, Artificial Sequence
  Synthetic
gguguguguguguggcgggag

SEQ ID NO: 129540 - RNA, 19 nt, Artificial Sequence
  Synthetic
gcuugugcuuuguggggag

SEQ ID NO: 129541 - RNA, 20 nt, Artificial Sequence
  Synthetic
guuggauauacaccugggag

SEQ ID NO: 129542 - RNA, 18 nt, Artificial Sequence
  Synthetic
gcagcaacuuugauggag

SEQ ID NO: 129543 - RNA, 21 nt, Artificial Sequence
  Synthetic
gcucugucacccaggcuggag

SEQ ID NO: 129544 - RNA, 18 nt, Artificial Sequence
  Synthetic
gagagggaguauguggag

SEQ ID NO: 129545 - RNA, 20 nt, Artificial Sequence
  Synthetic
gagagagggaguauguggag

SEQ ID NO: 129546 - RNA, 18 nt, Artificial Sequence
  Synthetic
guuucugccuuuuuggag

SEQ ID NO: 129547 - RNA, 18 nt, Artificial Sequence
  Synthetic
gcacuuugggagucugag

SEQ ID NO: 129548 - RNA, 19 nt, Artificial Sequence
  Synthetic
gugugucucugcacgugag

SEQ ID NO: 129549 - RNA, 19 nt, Artificial Sequence
  Synthetic
guuauuaaucccuugugag

SEQ ID NO: 129550 - RNA, 20 nt, Artificial Sequence
  Synthetic
gguuauuaaucccuugugag

SEQ ID NO: 129551 - RNA, 23 nt, Artificial Sequence
  Synthetic
gaaguauugauuaauauauugag

SEQ ID NO: 129552 - RNA, 18 nt, Artificial Sequence
  Synthetic
guuacauguguacuugag

SEQ ID NO: 129553 - RNA, 22 nt, Artificial Sequence
  Synthetic
gaauguuacauguguacuugag

SEQ ID NO: 129554 - RNA, 24 nt, Artificial Sequence
  Synthetic
gagaauguuacauguguacuugag

SEQ ID NO: 129555 - RNA, 18 nt, Artificial Sequence
  Synthetic
gaaaugaaagcauuugag

SEQ ID NO: 129556 - RNA, 19 nt, Artificial Sequence
  Synthetic
ggaaaugaaagcauuugag

SEQ ID NO: 129557 - RNA, 18 nt, Artificial Sequence
  Synthetic
guuucuuuuauuaaauag

SEQ ID NO: 129558 - RNA, 18 nt, Artificial Sequence
  Synthetic
ggauuuucaggcucauag

SEQ ID NO: 129559 - RNA, 23 nt, Artificial Sequence
  Synthetic
guuuuggauuuucaggcucauag

SEQ ID NO: 129560 - RNA, 22 nt, Artificial Sequence
  Synthetic
gcacuuugggaggccaggauag

SEQ ID NO: 129561 - RNA, 23 nt, Artificial Sequence
  Synthetic
guauauacccaguaaugggauag

SEQ ID NO: 129562 - RNA, 24 nt, Artificial Sequence
  Synthetic
gguauauacccaguaaugggauag

SEQ ID NO: 129563 - RNA, 18 nt, Artificial Sequence
  Synthetic
ggugugggauguugauag

SEQ ID NO: 129564 - RNA, 20 nt, Artificial Sequence
  Synthetic
gaaaaauagcaacaauauag

SEQ ID NO: 129565 - RNA, 24 nt, Artificial Sequence
  Synthetic
gacagaaaaauagcaacaauauag

SEQ ID NO: 129566 - RNA, 19 nt, Artificial Sequence
  Synthetic
gauguuuuaaaguauauag

SEQ ID NO: 129567 - RNA, 21 nt, Artificial Sequence
  Synthetic
gagauguuuuaaaguauauag

SEQ ID NO: 129568 - RNA, 21 nt, Artificial Sequence
  Synthetic
guaauuaucuccacuuuauag

SEQ ID NO: 129569 - RNA, 23 nt, Artificial Sequence
  Synthetic
guauaaaaguggcaagaggcuag

SEQ ID NO: 129570 - RNA, 24 nt, Artificial Sequence
  Synthetic
gguauaaaaguggcaagaggcuag

SEQ ID NO: 129571 - RNA, 21 nt, Artificial Sequence
  Synthetic
gcaacucacaaaaguugcuag

SEQ ID NO: 129572 - RNA, 21 nt, Artificial Sequence
  Synthetic
gaucccaggaaguaccaguag

SEQ ID NO: 129573 - RNA, 23 nt, Artificial Sequence
  Synthetic
gugaucccaggaaguaccaguag

SEQ ID NO: 129574 - RNA, 18 nt, Artificial Sequence
  Synthetic
ggagaggaagagagguag

SEQ ID NO: 129575 - RNA, 24 nt, Artificial Sequence
  Synthetic
gcccaaggagaggaagagagguag

SEQ ID NO: 129576 - RNA, 22 nt, Artificial Sequence
  Synthetic
gcuacucgggagccugagguag

SEQ ID NO: 129577 - RNA, 22 nt, Artificial Sequence
  Synthetic
gaacccuuaauccuaaggguag

SEQ ID NO: 129578 - RNA, 23 nt, Artificial Sequence
  Synthetic
ggaacccuuaauccuaaggguag

SEQ ID NO: 129579 - RNA, 24 nt, Artificial Sequence
  Synthetic
gggaacccuuaauccuaaggguag

SEQ ID NO: 129580 - RNA, 18 nt, Artificial Sequence
  Synthetic
gaauugagaaaaugguag

SEQ ID NO: 129581 - RNA, 18 nt, Artificial Sequence
  Synthetic
gaaauaaaagcagauuag

SEQ ID NO: 129582 - RNA, 18 nt, Artificial Sequence
  Synthetic
gauuaggcuuuggcuuag

SEQ ID NO: 129583 - RNA, 19 nt, Artificial Sequence
  Synthetic
ggauuaggcuuuggcuuag

SEQ ID NO: 129584 - RNA, 24 nt, Artificial Sequence
  Synthetic
gcucuggauuaggcuuuggcuuag

SEQ ID NO: 129585 - RNA, 18 nt, Artificial Sequence
  Synthetic
ggguagguggauaguuag

SEQ ID NO: 129586 - RNA, 20 nt, Artificial Sequence
  Synthetic
guggguagguggauaguuag

SEQ ID NO: 129587 - RNA, 21 nt, Artificial Sequence
  Synthetic
gucccaaacugugcacguuag

SEQ ID NO: 129588 - RNA, 21 nt, Artificial Sequence
  Synthetic
gaaccuuaaaaaaaagguuag

SEQ ID NO: 129589 - RNA, 18 nt, Artificial Sequence
  Synthetic
gcaguuaacacauuuuag

SEQ ID NO: 129590 - RNA, 20 nt, Artificial Sequence
  Synthetic
gcuaauuuuuguauuuuuag

SEQ ID NO: 129591 - RNA, 21 nt, Artificial Sequence
  Synthetic
ggcuaauuuuuguauuuuuag

SEQ ID NO: 129592 - RNA, 23 nt, Artificial Sequence
  Synthetic
guggcuaauuuuuguauuuuuag

SEQ ID NO: 129593 - RNA, 18 nt, Artificial Sequence
  Synthetic
ggcuguuccaugcacacg

SEQ ID NO: 129594 - RNA, 20 nt, Artificial Sequence
  Synthetic
guggcuguuccaugcacacg

SEQ ID NO: 129595 - RNA, 24 nt, Artificial Sequence
  Synthetic
gucuguggcuguuccaugcacacg

SEQ ID NO: 129596 - RNA, 18 nt, Artificial Sequence
  Synthetic
ggucagaaaagauacacg

SEQ ID NO: 129597 - RNA, 20 nt, Artificial Sequence
  Synthetic
guggucagaaaagauacacg

SEQ ID NO: 129598 - RNA, 21 nt, Artificial Sequence
  Synthetic
guccagaguugguucccgccg

SEQ ID NO: 129599 - RNA, 23 nt, Artificial Sequence
  Synthetic
guguccagaguugguucccgccg

SEQ ID NO: 129600 - RNA, 18 nt, Artificial Sequence
  Synthetic
gucaacuuggcugggccg

SEQ ID NO: 129601 - RNA, 20 nt, Artificial Sequence
  Synthetic
gugucaacuuggcugggccg

SEQ ID NO: 129602 - RNA, 21 nt, Artificial Sequence
  Synthetic
gcacuuugggaggcugaagcg

SEQ ID NO: 129603 - RNA, 19 nt, Artificial Sequence
  Synthetic
gcucaaaauaaagggaucg

SEQ ID NO: 129604 - RNA, 20 nt, Artificial Sequence
  Synthetic
ggcucaaaauaaagggaucg

SEQ ID NO: 129605 - RNA, 21 nt, Artificial Sequence
  Synthetic
gucuuggaguugcucuucucg

SEQ ID NO: 129606 - RNA, 23 nt, Artificial Sequence
  Synthetic
gugucuuggaguugcucuucucg

SEQ ID NO: 129607 - RNA, 18 nt, Artificial Sequence
  Synthetic
guugcucugggugagucg

SEQ ID NO: 129608 - RNA, 18 nt, Artificial Sequence
  Synthetic
gggagaguguaugugucg

SEQ ID NO: 129609 - RNA, 23 nt, Artificial Sequence
  Synthetic
gucuugggagaguguaugugucg

SEQ ID NO: 129610 - RNA, 18 nt, Artificial Sequence
  Synthetic
gugcagccauaaaaaagg

SEQ ID NO: 129611 - RNA, 20 nt, Artificial Sequence
  Synthetic
gaauagaagaaagaaaaagg

SEQ ID NO: 129612 - RNA, 23 nt, Artificial Sequence
  Synthetic
gaagaauagaagaaagaaaaagg

SEQ ID NO: 129613 - RNA, 18 nt, Artificial Sequence
  Synthetic
guguguggggauaaaagg

SEQ ID NO: 129614 - RNA, 20 nt, Artificial Sequence
  Synthetic
ggggcagccagagagaaagg

SEQ ID NO: 129615 - RNA, 24 nt, Artificial Sequence
  Synthetic
guuaggggcagccagagagaaagg

SEQ ID NO: 129616 - RNA, 18 nt, Artificial Sequence
  Synthetic
gaaugggccugagaaagg

SEQ ID NO: 129617 - RNA, 19 nt, Artificial Sequence
  Synthetic
ggaaugggccugagaaagg

SEQ ID NO: 129618 - RNA, 23 nt, Artificial Sequence
  Synthetic
guacaaagucacgauuagaaagg

SEQ ID NO: 129619 - RNA, 24 nt, Artificial Sequence
  Synthetic
gguacaaagucacgauuagaaagg

SEQ ID NO: 129620 - RNA, 19 nt, Artificial Sequence
  Synthetic
gaauuuccuuuuauaaagg

SEQ ID NO: 129621 - RNA, 22 nt, Artificial Sequence
  Synthetic
gcagaauuuccuuuuauaaagg

SEQ ID NO: 129622 - RNA, 19 nt, Artificial Sequence
  Synthetic
gcauuuuuggaggccaagg

SEQ ID NO: 129623 - RNA, 18 nt, Artificial Sequence
  Synthetic
guagucaaaggaagaagg

SEQ ID NO: 129624 - RNA, 19 nt, Artificial Sequence
  Synthetic
gaucucugaagucugaagg

SEQ ID NO: 129625 - RNA, 20 nt, Artificial Sequence
  Synthetic
ggaucucugaagucugaagg

SEQ ID NO: 129626 - RNA, 20 nt, Artificial Sequence
  Synthetic
gauuucuuucuuuccuaagg

SEQ ID NO: 129627 - RNA, 21 nt, Artificial Sequence
  Synthetic
ggauuucuuucuuuccuaagg

SEQ ID NO: 129628 - RNA, 18 nt, Artificial Sequence
  Synthetic
gaagagaaggagguaagg

SEQ ID NO: 129629 - RNA, 20 nt, Artificial Sequence
  Synthetic
gcuuuaagaaauuauacagg

SEQ ID NO: 129630 - RNA, 18 nt, Artificial Sequence
  Synthetic
gaaagagaagagcccagg

SEQ ID NO: 129631 - RNA, 22 nt, Artificial Sequence
  Synthetic
guucacuccacuguacuccagg

SEQ ID NO: 129632 - RNA, 19 nt, Artificial Sequence
  Synthetic
gaggacacagaggagcagg

SEQ ID NO: 129633 - RNA, 19 nt, Artificial Sequence
  Synthetic
gcugugguaagguugcagg

SEQ ID NO: 129634 - RNA, 20 nt, Artificial Sequence
  Synthetic
ggcugugguaagguugcagg

SEQ ID NO: 129635 - RNA, 24 nt, Artificial Sequence
  Synthetic
gaauacuaugcagccauaaagagg

SEQ ID NO: 129636 - RNA, 18 nt, Artificial Sequence
  Synthetic
gaacaggaaggacagagg

SEQ ID NO: 129637 - RNA, 20 nt, Artificial Sequence
  Synthetic
gagaacaggaaggacagagg

SEQ ID NO: 129638 - RNA, 18 nt, Artificial Sequence
  Synthetic
gcaucugauagucagagg

SEQ ID NO: 129639 - RNA, 19 nt, Artificial Sequence
  Synthetic
gaagugugaaggagagagg

SEQ ID NO: 129640 - RNA, 19 nt, Artificial Sequence
  Synthetic
gaggagguggagggagagg

SEQ ID NO: 129641 - RNA, 22 nt, Artificial Sequence
  Synthetic
gcugaggagguggagggagagg

SEQ ID NO: 129642 - RNA, 23 nt, Artificial Sequence
  Synthetic
ggcugaggagguggagggagagg

SEQ ID NO: 129643 - RNA, 19 nt, Artificial Sequence
  Synthetic
guugagagaaaacuagagg

SEQ ID NO: 129644 - RNA, 20 nt, Artificial Sequence
  Synthetic
gacuuauuugggagaggagg

SEQ ID NO: 129645 - RNA, 19 nt, Artificial Sequence
  Synthetic
gaaugcuuccaggaggagg

SEQ ID NO: 129646 - RNA, 20 nt, Artificial Sequence
  Synthetic
ggaaugcuuccaggaggagg

SEQ ID NO: 129647 - RNA, 18 nt, Artificial Sequence
  Synthetic
gugagggaaggagggagg

SEQ ID NO: 129648 - RNA, 20 nt, Artificial Sequence
  Synthetic
gagugagggaaggagggagg

SEQ ID NO: 129649 - RNA, 22 nt, Artificial Sequence
  Synthetic
gagagugagggaaggagggagg

SEQ ID NO: 129650 - RNA, 21 nt, Artificial Sequence
  Synthetic
gaaucacuugaacccgggagg

SEQ ID NO: 129651 - RNA, 23 nt, Artificial Sequence
  Synthetic
gagaaucacuugaacccgggagg

SEQ ID NO: 129652 - RNA, 24 nt, Artificial Sequence
  Synthetic
ggagaaucacuugaacccgggagg

SEQ ID NO: 129653 - RNA, 19 nt, Artificial Sequence
  Synthetic
guccuagaugcucgggagg

SEQ ID NO: 129654 - RNA, 22 nt, Artificial Sequence
  Synthetic
guaguccuagaugcucgggagg

SEQ ID NO: 129655 - RNA, 20 nt, Artificial Sequence
  Synthetic
guuaacagaggcuugggagg

SEQ ID NO: 129656 - RNA, 21 nt, Artificial Sequence
  Synthetic
gaauggcgcgaacccuggagg

SEQ ID NO: 129657 - RNA, 23 nt, Artificial Sequence
  Synthetic
gagaauggcgcgaacccuggagg

SEQ ID NO: 129658 - RNA, 24 nt, Artificial Sequence
  Synthetic
ggagaauggcgcgaacccuggagg

SEQ ID NO: 129659 - RNA, 20 nt, Artificial Sequence
  Synthetic
guaugugugugagguggagg

SEQ ID NO: 129660 - RNA, 19 nt, Artificial Sequence
  Synthetic
gaggaagaaauugaugagg

SEQ ID NO: 129661 - RNA, 18 nt, Artificial Sequence
  Synthetic
gaaaagaaaugagugagg

SEQ ID NO: 129662 - RNA, 19 nt, Artificial Sequence
  Synthetic
ggaaaagaaaugagugagg

SEQ ID NO: 129663 - RNA, 19 nt, Artificial Sequence
  Synthetic
gugggcggaucacuugagg

SEQ ID NO: 129664 - RNA, 20 nt, Artificial Sequence
  Synthetic
ggugggcggaucacuugagg

SEQ ID NO: 129665 - RNA, 22 nt, Artificial Sequence
  Synthetic
gaggugggcggaucacuugagg

SEQ ID NO: 129666 - RNA, 21 nt, Artificial Sequence
  Synthetic
guucccuuuauagagcauagg

SEQ ID NO: 129667 - RNA, 24 nt, Artificial Sequence
  Synthetic
guuguucccuuuauagagcauagg

SEQ ID NO: 129668 - RNA, 19 nt, Artificial Sequence
  Synthetic
gcauauucucacucauagg

SEQ ID NO: 129669 - RNA, 22 nt, Artificial Sequence
  Synthetic
gcugcacguuagaaucacuagg

SEQ ID NO: 129670 - RNA, 23 nt, Artificial Sequence
  Synthetic
ggcugcacguuagaaucacuagg

SEQ ID NO: 129671 - RNA, 24 nt, Artificial Sequence
  Synthetic
gaacauuccaugcucauggguagg

SEQ ID NO: 129672 - RNA, 20 nt, Artificial Sequence
  Synthetic
gccucauaaaaugaguuagg

SEQ ID NO: 129673 - RNA, 21 nt, Artificial Sequence
  Synthetic
guauauucuauaauuguuagg

SEQ ID NO: 129674 - RNA, 21 nt, Artificial Sequence
  Synthetic
gacuucauagaaugauuuagg

SEQ ID NO: 129675 - RNA, 19 nt, Artificial Sequence
  Synthetic
guaaacuguauagaaccgg

SEQ ID NO: 129676 - RNA, 22 nt, Artificial Sequence
  Synthetic
gcacuuugggaggccaaggcgg

SEQ ID NO: 129677 - RNA, 22 nt, Artificial Sequence
  Synthetic
gcacuuugggaggcagaggcgg

SEQ ID NO: 129678 - RNA, 20 nt, Artificial Sequence
  Synthetic
gcuucaggaggccgaggcgg

SEQ ID NO: 129679 - RNA, 22 nt, Artificial Sequence
  Synthetic
gcgcuucaggaggccgaggcgg

SEQ ID NO: 129680 - RNA, 22 nt, Artificial Sequence
  Synthetic
gcacuuggggaggccgaggcgg

SEQ ID NO: 129681 - RNA, 22 nt, Artificial Sequence
  Synthetic
gcacucugggaggccgaggcgg

SEQ ID NO: 129682 - RNA, 22 nt, Artificial Sequence
  Synthetic
gcacuuugggaggaugaggcgg

SEQ ID NO: 129683 - RNA, 22 nt, Artificial Sequence
  Synthetic
gcacuuugggagccugaggcgg

SEQ ID NO: 129684 - RNA, 20 nt, Artificial Sequence
  Synthetic
gcuuugggaggcugaggcgg

SEQ ID NO: 129685 - RNA, 22 nt, Artificial Sequence
  Synthetic
gugcuuugggaggcugaggcgg

SEQ ID NO: 129686 - RNA, 20 nt, Artificial Sequence
  Synthetic
guuuugggaggcugaggcgg

SEQ ID NO: 129687 - RNA, 18 nt, Artificial Sequence
  Synthetic
guacuauaaagaaaaggg

SEQ ID NO: 129688 - RNA, 20 nt, Artificial Sequence
  Synthetic
gauuauaugcuaaacaaggg

SEQ ID NO: 129689 - RNA, 19 nt, Artificial Sequence
  Synthetic
gcaggauggagaccaaggg

SEQ ID NO: 129690 - RNA, 20 nt, Artificial Sequence
  Synthetic
ggcaggauggagaccaaggg

SEQ ID NO: 129691 - RNA, 24 nt, Artificial Sequence
  Synthetic
gccuggcaggauggagaccaaggg

SEQ ID NO: 129692 - RNA, 22 nt, Artificial Sequence
  Synthetic
gauuacucacaguucucaaggg

SEQ ID NO: 129693 - RNA, 19 nt, Artificial Sequence
  Synthetic
gaugugugugugggaaggg

SEQ ID NO: 129694 - RNA, 20 nt, Artificial Sequence
  Synthetic
ggaugugugugugggaaggg

SEQ ID NO: 129695 - RNA, 18 nt, Artificial Sequence
  Synthetic
ggagaaaugcuugaaggg

SEQ ID NO: 129696 - RNA, 18 nt, Artificial Sequence
  Synthetic
gguugccagggaccaggg

SEQ ID NO: 129697 - RNA, 18 nt, Artificial Sequence
  Synthetic
ggauuggggggcagaggg

SEQ ID NO: 129698 - RNA, 19 nt, Artificial Sequence
  Synthetic
gggauuggggggcagaggg

SEQ ID NO: 129699 - RNA, 20 nt, Artificial Sequence
  Synthetic
ggggauuggggggcagaggg

SEQ ID NO: 129700 - RNA, 18 nt, Artificial Sequence
  Synthetic
gaaggaagcuggagaggg

SEQ ID NO: 129701 - RNA, 21 nt, Artificial Sequence
  Synthetic
gcagaaggaagcuggagaggg

SEQ ID NO: 129702 - RNA, 21 nt, Artificial Sequence
  Synthetic
gccucauaaaaagaguuaggg

SEQ ID NO: 129703 - RNA, 22 nt, Artificial Sequence
  Synthetic
ggccucauaaaaagaguuaggg

SEQ ID NO: 129704 - RNA, 22 nt, Artificial Sequence
  Synthetic
gacuuugaagacucagaagggg

SEQ ID NO: 129705 - RNA, 23 nt, Artificial Sequence
  Synthetic
ggacuuugaagacucagaagggg

SEQ ID NO: 129706 - RNA, 18 nt, Artificial Sequence
  Synthetic
ggggugggagguuagggg

SEQ ID NO: 129707 - RNA, 20 nt, Artificial Sequence
  Synthetic
gaggggugggagguuagggg

SEQ ID NO: 129708 - RNA, 23 nt, Artificial Sequence
  Synthetic
gucgaggggugggagguuagggg

SEQ ID NO: 129709 - RNA, 21 nt, Artificial Sequence
  Synthetic
gucuuucucuguugcccgggg

SEQ ID NO: 129710 - RNA, 23 nt, Artificial Sequence
  Synthetic
gagucuuucucuguugcccgggg

SEQ ID NO: 129711 - RNA, 24 nt, Artificial Sequence
  Synthetic
ggagucuuucucuguugcccgggg

SEQ ID NO: 129712 - RNA, 18 nt, Artificial Sequence
  Synthetic
ggggugggggaagggggg

SEQ ID NO: 129713 - RNA, 20 nt, Artificial Sequence
  Synthetic
guggggugggggaagggggg

SEQ ID NO: 129714 - RNA, 23 nt, Artificial Sequence
  Synthetic
guuguggggugggggaagggggg

SEQ ID NO: 129715 - RNA, 18 nt, Artificial Sequence
  Synthetic
ggggucgggggagggggg

SEQ ID NO: 129716 - RNA, 20 nt, Artificial Sequence
  Synthetic
guggggucgggggagggggg

SEQ ID NO: 129717 - RNA, 21 nt, Artificial Sequence
  Synthetic
gguggggucgggggagggggg

SEQ ID NO: 129718 - RNA, 23 nt, Artificial Sequence
  Synthetic
gugguggggucgggggagggggg

SEQ ID NO: 129719 - RNA, 23 nt, Artificial Sequence
  Synthetic
guuguggggucgggggagggggg

SEQ ID NO: 129720 - RNA, 18 nt, Artificial Sequence
  Synthetic
gggguggggggagggggg

SEQ ID NO: 129721 - RNA, 20 nt, Artificial Sequence
  Synthetic
gugggguggggggagggggg

SEQ ID NO: 129722 - RNA, 23 nt, Artificial Sequence
  Synthetic
gucgugggguggggggagggggg

SEQ ID NO: 129723 - RNA, 21 nt, Artificial Sequence
  Synthetic
ggugggguggggggagggggg

SEQ ID NO: 129724 - RNA, 23 nt, Artificial Sequence
  Synthetic
guggugggguggggggagggggg

SEQ ID NO: 129725 - RNA, 23 nt, Artificial Sequence
  Synthetic
guugugggguggggggagggggg

SEQ ID NO: 129726 - RNA, 18 nt, Artificial Sequence
  Synthetic
guguguguguuggggggg

SEQ ID NO: 129727 - RNA, 19 nt, Artificial Sequence
  Synthetic
gcacugcuugagguggggg

SEQ ID NO: 129728 - RNA, 22 nt, Artificial Sequence
  Synthetic
gcugcacugcuugagguggggg

SEQ ID NO: 129729 - RNA, 23 nt, Artificial Sequence
  Synthetic
ggcugcacugcuugagguggggg

SEQ ID NO: 129730 - RNA, 24 nt, Artificial Sequence
  Synthetic
gggcugcacugcuugagguggggg

SEQ ID NO: 129731 - RNA, 19 nt, Artificial Sequence
  Synthetic
gccuguugugggguggggg

SEQ ID NO: 129732 - RNA, 20 nt, Artificial Sequence
  Synthetic
ggccuguugugggguggggg

SEQ ID NO: 129733 - RNA, 22 nt, Artificial Sequence
  Synthetic
gauuuucuuucuuuuuuggggg

SEQ ID NO: 129734 - RNA, 19 nt, Artificial Sequence
  Synthetic
gagagaguugguggugggg

SEQ ID NO: 129735 - RNA, 21 nt, Artificial Sequence
  Synthetic
gagagagaguugguggugggg

SEQ ID NO: 129736 - RNA, 23 nt, Artificial Sequence
  Synthetic
gagagagagaguugguggugggg

SEQ ID NO: 129737 - RNA, 19 nt, Artificial Sequence
  Synthetic
gcaacauuuuaagaauggg

SEQ ID NO: 129738 - RNA, 18 nt, Artificial Sequence
  Synthetic
guaccugaaagugauggg

SEQ ID NO: 129739 - RNA, 20 nt, Artificial Sequence
  Synthetic
guguaccugaaagugauggg

SEQ ID NO: 129740 - RNA, 21 nt, Artificial Sequence
  Synthetic
gguguaccugaaagugauggg

SEQ ID NO: 129741 - RNA, 20 nt, Artificial Sequence
  Synthetic
gaaggauaaguaaguauggg

SEQ ID NO: 129742 - RNA, 18 nt, Artificial Sequence
  Synthetic
guucaucuaggcacuggg

SEQ ID NO: 129743 - RNA, 20 nt, Artificial Sequence
  Synthetic
gccucauccucuuaaaaugg

SEQ ID NO: 129744 - RNA, 22 nt, Artificial Sequence
  Synthetic
gcacuuugagaggccgaaaugg

SEQ ID NO: 129745 - RNA, 23 nt, Artificial Sequence
  Synthetic
guaacucuguagaaguggaaugg

SEQ ID NO: 129746 - RNA, 19 nt, Artificial Sequence
  Synthetic
gacucacaguuccacaugg

SEQ ID NO: 129747 - RNA, 19 nt, Artificial Sequence
  Synthetic
gugguuuuugguuacaugg

SEQ ID NO: 129748 - RNA, 20 nt, Artificial Sequence
  Synthetic
ggugguuuuugguuacaugg

SEQ ID NO: 129749 - RNA, 19 nt, Artificial Sequence
  Synthetic
gucauuaagugaugcaugg

SEQ ID NO: 129750 - RNA, 20 nt, Artificial Sequence
  Synthetic
guauaguaaaauguucaugg

SEQ ID NO: 129751 - RNA, 22 nt, Artificial Sequence
  Synthetic
gaguauaguaaaauguucaugg

SEQ ID NO: 129752 - RNA, 19 nt, Artificial Sequence
  Synthetic
gaaaagcaaaaaaagaugg

SEQ ID NO: 129753 - RNA, 19 nt, Artificial Sequence
  Synthetic
gaaguggcuggcaagaugg

SEQ ID NO: 129754 - RNA, 22 nt, Artificial Sequence
  Synthetic
gcacuuugggaggccgagaugg

SEQ ID NO: 129755 - RNA, 19 nt, Artificial Sequence
  Synthetic
gaaaauaagaaugagaugg

SEQ ID NO: 129756 - RNA, 22 nt, Artificial Sequence
  Synthetic
gcuacucaggaggcugagaugg

SEQ ID NO: 129757 - RNA, 19 nt, Artificial Sequence
  Synthetic
gcucaaagcaaagggaugg

SEQ ID NO: 129758 - RNA, 20 nt, Artificial Sequence
  Synthetic
ggcucaaagcaaagggaugg

SEQ ID NO: 129759 - RNA, 20 nt, Artificial Sequence
  Synthetic
gaucucaaucuuuucuaugg

SEQ ID NO: 129760 - RNA, 21 nt, Artificial Sequence
  Synthetic
ggaucucaaucuuuucuaugg

SEQ ID NO: 129761 - RNA, 19 nt, Artificial Sequence
  Synthetic
gauuucacccuuuguaugg

SEQ ID NO: 129762 - RNA, 20 nt, Artificial Sequence
  Synthetic
ggauuucacccuuuguaugg

SEQ ID NO: 129763 - RNA, 24 nt, Artificial Sequence
  Synthetic
gacaggauuucacccuuuguaugg

SEQ ID NO: 129764 - RNA, 19 nt, Artificial Sequence
  Synthetic
gcugcaugugucuuuaugg

SEQ ID NO: 129765 - RNA, 23 nt, Artificial Sequence
  Synthetic
gaaaaaaauauaguauuuuaugg

SEQ ID NO: 129766 - RNA, 22 nt, Artificial Sequence
  Synthetic
guuaauucauuccuuuuuaugg

SEQ ID NO: 129767 - RNA, 19 nt, Artificial Sequence
  Synthetic
gaucucauucuuuuuaugg

SEQ ID NO: 129768 - RNA, 20 nt, Artificial Sequence
  Synthetic
ggaucucauucuuuuuaugg

SEQ ID NO: 129769 - RNA, 24 nt, Artificial Sequence
  Synthetic
gaaaggaucucauucuuuuuaugg

SEQ ID NO: 129770 - RNA, 22 nt, Artificial Sequence
  Synthetic
gucccaagcuuuucuuuacugg

SEQ ID NO: 129771 - RNA, 23 nt, Artificial Sequence
  Synthetic
ggucccaagcuuuucuuuacugg

SEQ ID NO: 129772 - RNA, 24 nt, Artificial Sequence
  Synthetic
gggucccaagcuuuucuuuacugg

SEQ ID NO: 129773 - RNA, 20 nt, Artificial Sequence
  Synthetic
guuccucuuugcaccucugg

SEQ ID NO: 129774 - RNA, 20 nt, Artificial Sequence
  Synthetic
guuccuccuuguaccucugg

SEQ ID NO: 129775 - RNA, 18 nt, Artificial Sequence
  Synthetic
gacucaaaguugcucugg

SEQ ID NO: 129776 - RNA, 19 nt, Artificial Sequence
  Synthetic
ggacucaaaguugcucugg

SEQ ID NO: 129777 - RNA, 22 nt, Artificial Sequence
  Synthetic
gcaggacucaaaguugcucugg

SEQ ID NO: 129778 - RNA, 20 nt, Artificial Sequence
  Synthetic
gcuccucuuuguaucucugg

SEQ ID NO: 129779 - RNA, 20 nt, Artificial Sequence
  Synthetic
gccucagccucccaaagugg

SEQ ID NO: 129780 - RNA, 24 nt, Artificial Sequence
  Synthetic
gccugccucagccucccaaagugg

SEQ ID NO: 129781 - RNA, 22 nt, Artificial Sequence
  Synthetic
gagcuuaagugucugaaagugg

SEQ ID NO: 129782 - RNA, 24 nt, Artificial Sequence
  Synthetic
gagagcuuaagugucugaaagugg

SEQ ID NO: 129783 - RNA, 22 nt, Artificial Sequence
  Synthetic
gcacuuugggaggccuacgugg

SEQ ID NO: 129784 - RNA, 22 nt, Artificial Sequence
  Synthetic
gcacuuugagagaccaaggugg

SEQ ID NO: 129785 - RNA, 22 nt, Artificial Sequence
  Synthetic
gcacuucgggaggccaaggugg

SEQ ID NO: 129786 - RNA, 22 nt, Artificial Sequence
  Synthetic
gcacuuugggaggccaaggugg

SEQ ID NO: 129787 - RNA, 22 nt, Artificial Sequence
  Synthetic
gcacuuuggaaggcuaaggugg

SEQ ID NO: 129788 - RNA, 22 nt, Artificial Sequence
  Synthetic
gcucuuugugaggccgaggugg

SEQ ID NO: 129789 - RNA, 22 nt, Artificial Sequence
  Synthetic
gcuacucaggaggcugaggugg

SEQ ID NO: 129790 - RNA, 22 nt, Artificial Sequence
  Synthetic
gcuacuugggaggcugaggugg

SEQ ID NO: 129791 - RNA, 22 nt, Artificial Sequence
  Synthetic
gcuacaugggagucugaggugg

SEQ ID NO: 129792 - RNA, 22 nt, Artificial Sequence
  Synthetic
gcacuuugggagucugaggugg

SEQ ID NO: 129793 - RNA, 20 nt, Artificial Sequence
  Synthetic
gacacagaaaaggagggugg

SEQ ID NO: 129794 - RNA, 18 nt, Artificial Sequence
  Synthetic
gggguggggggagggugg

SEQ ID NO: 129795 - RNA, 20 nt, Artificial Sequence
  Synthetic
gugggguggggggagggugg

SEQ ID NO: 129796 - RNA, 23 nt, Artificial Sequence
  Synthetic
guugugggguggggggagggugg

SEQ ID NO: 129797 - RNA, 19 nt, Artificial Sequence
  Synthetic
gaggccgaggugggggugg

SEQ ID NO: 129798 - RNA, 20 nt, Artificial Sequence
  Synthetic
ggaggccgaggugggggugg

SEQ ID NO: 129799 - RNA, 21 nt, Artificial Sequence
  Synthetic
gggaggccgaggugggggugg

SEQ ID NO: 129800 - RNA, 18 nt, Artificial Sequence
  Synthetic
gcacucuagccugggugg

SEQ ID NO: 129801 - RNA, 24 nt, Artificial Sequence
  Synthetic
gccacugcacucuagccugggugg

SEQ ID NO: 129802 - RNA, 20 nt, Artificial Sequence
  Synthetic
gcuuccccacagcuuggugg

SEQ ID NO: 129803 - RNA, 21 nt, Artificial Sequence
  Synthetic
ggcuuccccacagcuuggugg

SEQ ID NO: 129804 - RNA, 19 nt, Artificial Sequence
  Synthetic
gugugauuggaucaugugg

SEQ ID NO: 129805 - RNA, 20 nt, Artificial Sequence
  Synthetic
ggugugauuggaucaugugg

SEQ ID NO: 129806 - RNA, 18 nt, Artificial Sequence
  Synthetic
gauucuaggaagcugugg

SEQ ID NO: 129807 - RNA, 20 nt, Artificial Sequence
  Synthetic
gugauucuaggaagcugugg

SEQ ID NO: 129808 - RNA, 19 nt, Artificial Sequence
  Synthetic
gcucacuaccugugugugg

SEQ ID NO: 129809 - RNA, 20 nt, Artificial Sequence
  Synthetic
gcaagaucauuuuguugugg

SEQ ID NO: 129810 - RNA, 21 nt, Artificial Sequence
  Synthetic
gaaucucauucuuuuuugugg

SEQ ID NO: 129811 - RNA, 21 nt, Artificial Sequence
  Synthetic
gauuuccuucuuuuuuugugg

SEQ ID NO: 129812 - RNA, 22 nt, Artificial Sequence
  Synthetic
ggauuuccuucuuuuuuugugg

SEQ ID NO: 129813 - RNA, 19 nt, Artificial Sequence
  Synthetic
gaaaaaagaacaacauugg

SEQ ID NO: 129814 - RNA, 19 nt, Artificial Sequence
  Synthetic
guguuuuuuggcaucuugg

SEQ ID NO: 129815 - RNA, 18 nt, Artificial Sequence
  Synthetic
gcaagaacaggcaguugg

SEQ ID NO: 129816 - RNA, 19 nt, Artificial Sequence
  Synthetic
gcucgggaggcugaguugg

SEQ ID NO: 129817 - RNA, 22 nt, Artificial Sequence
  Synthetic
gaugcucgggaggcugaguugg

SEQ ID NO: 129818 - RNA, 20 nt, Artificial Sequence
  Synthetic
gaacacuuuuacacuguugg

SEQ ID NO: 129819 - RNA, 21 nt, Artificial Sequence
  Synthetic
ggaacacuuuuacacuguugg

SEQ ID NO: 129820 - RNA, 20 nt, Artificial Sequence
  Synthetic
gccuuguaaaauaaauuugg

SEQ ID NO: 129821 - RNA, 21 nt, Artificial Sequence
  Synthetic
ggccuuguaaaauaaauuugg

SEQ ID NO: 129822 - RNA, 24 nt, Artificial Sequence
  Synthetic
gcuggccuuguaaaauaaauuugg

SEQ ID NO: 129823 - RNA, 18 nt, Artificial Sequence
  Synthetic
guaaucccagcacuuugg

SEQ ID NO: 129824 - RNA, 22 nt, Artificial Sequence
  Synthetic
gccuguaaucccagcacuuugg

SEQ ID NO: 129825 - RNA, 22 nt, Artificial Sequence
  Synthetic
guauuagaagguggggguuugg

SEQ ID NO: 129826 - RNA, 23 nt, Artificial Sequence
  Synthetic
gguauuagaagguggggguuugg

SEQ ID NO: 129827 - RNA, 18 nt, Artificial Sequence
  Synthetic
ggagcagugauguuuugg

SEQ ID NO: 129828 - RNA, 20 nt, Artificial Sequence
  Synthetic
gacagugcagaaggaaaaug

SEQ ID NO: 129829 - RNA, 21 nt, Artificial Sequence
  Synthetic
ggacagugcagaaggaaaaug

SEQ ID NO: 129830 - RNA, 22 nt, Artificial Sequence
  Synthetic
gggacagugcagaaggaaaaug

SEQ ID NO: 129831 - RNA, 18 nt, Artificial Sequence
  Synthetic
gcaaaauguuaacaaaug

SEQ ID NO: 129832 - RNA, 19 nt, Artificial Sequence
  Synthetic
ggcaaaauguuaacaaaug

SEQ ID NO: 129833 - RNA, 21 nt, Artificial Sequence
  Synthetic
guggcaaaauguuaacaaaug

SEQ ID NO: 129834 - RNA, 18 nt, Artificial Sequence
  Synthetic
gggcuuaaaaccuaaaug

SEQ ID NO: 129835 - RNA, 19 nt, Artificial Sequence
  Synthetic
ggggcuuaaaaccuaaaug

SEQ ID NO: 129836 - RNA, 21 nt, Artificial Sequence
  Synthetic
gcggggcuuaaaaccuaaaug

SEQ ID NO: 129837 - RNA, 19 nt, Artificial Sequence
  Synthetic
gauauaccuaauguaaaug

SEQ ID NO: 129838 - RNA, 21 nt, Artificial Sequence
  Synthetic
gagauauaccuaauguaaaug

SEQ ID NO: 129839 - RNA, 22 nt, Artificial Sequence
  Synthetic
ggagauauaccuaauguaaaug

SEQ ID NO: 129840 - RNA, 18 nt, Artificial Sequence
  Synthetic
gggucucugcuaucaaug

SEQ ID NO: 129841 - RNA, 18 nt, Artificial Sequence
  Synthetic
gucuuguuuuggucaaug

SEQ ID NO: 129842 - RNA, 22 nt, Artificial Sequence
  Synthetic
guauaaggaagaaagaagaaug

SEQ ID NO: 129843 - RNA, 22 nt, Artificial Sequence
  Synthetic
gccuccccagccaugcagaaug

SEQ ID NO: 129844 - RNA, 23 nt, Artificial Sequence
  Synthetic
ggccuccccagccaugcagaaug

SEQ ID NO: 129845 - RNA, 18 nt, Artificial Sequence
  Synthetic
gugugacgucauugaaug

SEQ ID NO: 129846 - RNA, 18 nt, Artificial Sequence
  Synthetic
gaagccuauggucuaaug

SEQ ID NO: 129847 - RNA, 22 nt, Artificial Sequence
  Synthetic
gaaaaacgcacugauuguaaug

SEQ ID NO: 129848 - RNA, 19 nt, Artificial Sequence
  Synthetic
guagggggaaggaaacaug

SEQ ID NO: 129849 - RNA, 20 nt, Artificial Sequence
  Synthetic
gguagggggaaggaaacaug

SEQ ID NO: 129850 - RNA, 24 nt, Artificial Sequence
  Synthetic
gucagguagggggaaggaaacaug

SEQ ID NO: 129851 - RNA, 21 nt, Artificial Sequence
  Synthetic
gacaccauccuggccaacaug

SEQ ID NO: 129852 - RNA, 19 nt, Artificial Sequence
  Synthetic
gaggcccccccccgccaug

SEQ ID NO: 129853 - RNA, 21 nt, Artificial Sequence
  Synthetic
gugaggcccccccccgccaug

SEQ ID NO: 129854 - RNA, 21 nt, Artificial Sequence
  Synthetic
gcucucuucccugcugccaug

SEQ ID NO: 129855 - RNA, 19 nt, Artificial Sequence
  Synthetic
gugaaacaagcacaucaug

SEQ ID NO: 129856 - RNA, 24 nt, Artificial Sequence
  Synthetic
guaaugugaaacaagcacaucaug

SEQ ID NO: 129857 - RNA, 18 nt, Artificial Sequence
  Synthetic
gaagcccacuugaucaug

SEQ ID NO: 129858 - RNA, 21 nt, Artificial Sequence
  Synthetic
gaugaagcccacuugaucaug

SEQ ID NO: 129859 - RNA, 22 nt, Artificial Sequence
  Synthetic
ggaugaagcccacuugaucaug

SEQ ID NO: 129860 - RNA, 23 nt, Artificial Sequence
  Synthetic
gggaugaagcccacuugaucaug

SEQ ID NO: 129861 - RNA, 21 nt, Artificial Sequence
  Synthetic
gauaaaucccucuuggucaug

SEQ ID NO: 129862 - RNA, 22 nt, Artificial Sequence
  Synthetic
ggauaaaucccucuuggucaug

SEQ ID NO: 129863 - RNA, 23 nt, Artificial Sequence
  Synthetic
gggauaaaucccucuuggucaug

SEQ ID NO: 129864 - RNA, 18 nt, Artificial Sequence
  Synthetic
gccauguccuaaaagaug

SEQ ID NO: 129865 - RNA, 19 nt, Artificial Sequence
  Synthetic
guuucaguuuagaaagaug

SEQ ID NO: 129866 - RNA, 21 nt, Artificial Sequence
  Synthetic
gaguuucaguuuagaaagaug

SEQ ID NO: 129867 - RNA, 19 nt, Artificial Sequence
  Synthetic
guuuuuaaaaaugcagaug

SEQ ID NO: 129868 - RNA, 18 nt, Artificial Sequence
  Synthetic
guugaauucauagagaug

SEQ ID NO: 129869 - RNA, 18 nt, Artificial Sequence
  Synthetic
guauuuuuaguagagaug

SEQ ID NO: 129870 - RNA, 23 nt, Artificial Sequence
  Synthetic
gcauuuuuugaugauuagagaug

SEQ ID NO: 129871 - RNA, 21 nt, Artificial Sequence
  Synthetic
guauuaccauuuauugagaug

SEQ ID NO: 129872 - RNA, 22 nt, Artificial Sequence
  Synthetic
gguauuaccauuuauugagaug

SEQ ID NO: 129873 - RNA, 23 nt, Artificial Sequence
  Synthetic
ggguauuaccauuuauugagaug

SEQ ID NO: 129874 - RNA, 19 nt, Artificial Sequence
  Synthetic
guuagucauuuuauagaug

SEQ ID NO: 129875 - RNA, 19 nt, Artificial Sequence
  Synthetic
gaaauaccuaauguagaug

SEQ ID NO: 129876 - RNA, 21 nt, Artificial Sequence
  Synthetic
gagaaauaccuaauguagaug

SEQ ID NO: 129877 - RNA, 22 nt, Artificial Sequence
  Synthetic
ggagaaauaccuaauguagaug

SEQ ID NO: 129878 - RNA, 24 nt, Artificial Sequence
  Synthetic
gcauuuccccgaugauugacgaug

SEQ ID NO: 129879 - RNA, 20 nt, Artificial Sequence
  Synthetic
guuuuucucauaaaaggaug

SEQ ID NO: 129880 - RNA, 22 nt, Artificial Sequence
  Synthetic
gaguuuuucucauaaaaggaug

SEQ ID NO: 129881 - RNA, 20 nt, Artificial Sequence
  Synthetic
gaccuggggggagggggaug

SEQ ID NO: 129882 - RNA, 21 nt, Artificial Sequence
  Synthetic
gcaagggaacaaaacuggaug

SEQ ID NO: 129883 - RNA, 18 nt, Artificial Sequence
  Synthetic
gaugaaauagagaugaug

SEQ ID NO: 129884 - RNA, 20 nt, Artificial Sequence
  Synthetic
gagaugaaauagagaugaug

SEQ ID NO: 129885 - RNA, 21 nt, Artificial Sequence
  Synthetic
gucuuaaucuuuuugcugaug

SEQ ID NO: 129886 - RNA, 23 nt, Artificial Sequence
  Synthetic
gagucuuaaucuuuuugcugaug

SEQ ID NO: 129887 - RNA, 19 nt, Artificial Sequence
  Synthetic
gauuugcauuucucugaug

SEQ ID NO: 129888 - RNA, 20 nt, Artificial Sequence
  Synthetic
gcugauagacuugcuugaug

SEQ ID NO: 129889 - RNA, 23 nt, Artificial Sequence
  Synthetic
guugcugauagacuugcuugaug

SEQ ID NO: 129890 - RNA, 18 nt, Artificial Sequence
  Synthetic
guauuuaaugaaaauaug

SEQ ID NO: 129891 - RNA, 19 nt, Artificial Sequence
  Synthetic
gguauuuaaugaaaauaug

SEQ ID NO: 129892 - RNA, 22 nt, Artificial Sequence
  Synthetic
gcagguauuuaaugaaaauaug

SEQ ID NO: 129893 - RNA, 24 nt, Artificial Sequence
  Synthetic
gagcagguauuuaaugaaaauaug

SEQ ID NO: 129894 - RNA, 18 nt, Artificial Sequence
  Synthetic
gggguacauauauauaug

SEQ ID NO: 129895 - RNA, 20 nt, Artificial Sequence
  Synthetic
gugggguacauauauauaug

SEQ ID NO: 129896 - RNA, 18 nt, Artificial Sequence
  Synthetic
gguacauauauauauaug

SEQ ID NO: 129897 - RNA, 19 nt, Artificial Sequence
  Synthetic
ggguacauauauauauaug

SEQ ID NO: 129898 - RNA, 20 nt, Artificial Sequence
  Synthetic
gggguacauauauauauaug

SEQ ID NO: 129899 - RNA, 22 nt, Artificial Sequence
  Synthetic
gugggguacauauauauauaug

SEQ ID NO: 129900 - RNA, 18 nt, Artificial Sequence
  Synthetic
gugggguauauauauaug

SEQ ID NO: 129901 - RNA, 18 nt, Artificial Sequence
  Synthetic
guugguucuguuuauaug

SEQ ID NO: 129902 - RNA, 21 nt, Artificial Sequence
  Synthetic
gucguugguucuguuuauaug

SEQ ID NO: 129903 - RNA, 21 nt, Artificial Sequence
  Synthetic
gccaggacuuccaauacuaug

SEQ ID NO: 129904 - RNA, 22 nt, Artificial Sequence
  Synthetic
ggccaggacuuccaauacuaug

SEQ ID NO: 129905 - RNA, 19 nt, Artificial Sequence
  Synthetic
gcagagggaacauuguaug

SEQ ID NO: 129906 - RNA, 20 nt, Artificial Sequence
  Synthetic
ggcagagggaacauuguaug

SEQ ID NO: 129907 - RNA, 20 nt, Artificial Sequence
  Synthetic
gaauuguccaaaguuguaug

SEQ ID NO: 129908 - RNA, 22 nt, Artificial Sequence
  Synthetic
gaucaaucuccacagaauuaug

SEQ ID NO: 129909 - RNA, 23 nt, Artificial Sequence
  Synthetic
gcucccacugaaucuacauuaug

SEQ ID NO: 129910 - RNA, 24 nt, Artificial Sequence
  Synthetic
ggcucccacugaaucuacauuaug

SEQ ID NO: 129911 - RNA, 18 nt, Artificial Sequence
  Synthetic
ggccccacuucaaaacug

SEQ ID NO: 129912 - RNA, 18 nt, Artificial Sequence
  Synthetic
guugaaugaacagaacug

SEQ ID NO: 129913 - RNA, 18 nt, Artificial Sequence
  Synthetic
ggccccacuucagaacug

SEQ ID NO: 129914 - RNA, 20 nt, Artificial Sequence
  Synthetic
gauacaccuaauguuaacug

SEQ ID NO: 129915 - RNA, 22 nt, Artificial Sequence
  Synthetic
gagauacaccuaauguuaacug

SEQ ID NO: 129916 - RNA, 23 nt, Artificial Sequence
  Synthetic
ggagauacaccuaauguuaacug

SEQ ID NO: 129917 - RNA, 22 nt, Artificial Sequence
  Synthetic
guuuccugaauacagcacacug

SEQ ID NO: 129918 - RNA, 23 nt, Artificial Sequence
  Synthetic
gguuuccugaauacagcacacug

SEQ ID NO: 129919 - RNA, 24 nt, Artificial Sequence
  Synthetic
ggguuuccugaauacagcacacug

SEQ ID NO: 129920 - RNA, 22 nt, Artificial Sequence
  Synthetic
gcaaccugcuccugaaugacug

SEQ ID NO: 129921 - RNA, 24 nt, Artificial Sequence
  Synthetic
gagcaaccugcuccugaaugacug

SEQ ID NO: 129922 - RNA, 22 nt, Artificial Sequence
  Synthetic
guauaauccuuucaauauacug

SEQ ID NO: 129923 - RNA, 24 nt, Artificial Sequence
  Synthetic
guguauaauccuuucaauauacug

SEQ ID NO: 129924 - RNA, 20 nt, Artificial Sequence
  Synthetic
gaugcaaggcuuguauacug

SEQ ID NO: 129925 - RNA, 22 nt, Artificial Sequence
  Synthetic
gagaugcaaggcuuguauacug

SEQ ID NO: 129926 - RNA, 19 nt, Artificial Sequence
  Synthetic
gcgcccaccgccacaccug

SEQ ID NO: 129927 - RNA, 20 nt, Artificial Sequence
  Synthetic
ggcgcccaccgccacaccug

SEQ ID NO: 129928 - RNA, 24 nt, Artificial Sequence
  Synthetic
gauaggauggaggggcucuaccug

SEQ ID NO: 129929 - RNA, 19 nt, Artificial Sequence
  Synthetic
gagguggguggauuaccug

SEQ ID NO: 129930 - RNA, 23 nt, Artificial Sequence
  Synthetic
gucugagguggguggauuaccug

SEQ ID NO: 129931 - RNA, 19 nt, Artificial Sequence
  Synthetic
gcaaagacaacaaacccug

SEQ ID NO: 129932 - RNA, 23 nt, Artificial Sequence
  Synthetic
guauuucuaguucuaggccccug

SEQ ID NO: 129933 - RNA, 24 nt, Artificial Sequence
  Synthetic
gguauuucuaguucuaggccccug

SEQ ID NO: 129934 - RNA, 18 nt, Artificial Sequence
  Synthetic
ggucacccaagagcccug

SEQ ID NO: 129935 - RNA, 24 nt, Artificial Sequence
  Synthetic
gucccuggucacccaagagcccug

SEQ ID NO: 129936 - RNA, 21 nt, Artificial Sequence
  Synthetic
guucuccuggauaauauccug

SEQ ID NO: 129937 - RNA, 24 nt, Artificial Sequence
  Synthetic
gaaguucuccuggauaauauccug

SEQ ID NO: 129938 - RNA, 22 nt, Artificial Sequence
  Synthetic
gccuaacauaugaucuauccug

SEQ ID NO: 129939 - RNA, 23 nt, Artificial Sequence
  Synthetic
ggccuaacauaugaucuauccug

SEQ ID NO: 129940 - RNA, 18 nt, Artificial Sequence
  Synthetic
gugcugcaaaacuuccug

SEQ ID NO: 129941 - RNA, 22 nt, Artificial Sequence
  Synthetic
gcaagugcugcaaaacuuccug

SEQ ID NO: 129942 - RNA, 24 nt, Artificial Sequence
  Synthetic
gagcaagugcugcaaaacuuccug

SEQ ID NO: 129943 - RNA, 18 nt, Artificial Sequence
  Synthetic
guggugaaguucuuccug

SEQ ID NO: 129944 - RNA, 20 nt, Artificial Sequence
  Synthetic
guuucucuucagaaaagcug

SEQ ID NO: 129945 - RNA, 20 nt, Artificial Sequence
  Synthetic
gucaaccaucacagcagcug

SEQ ID NO: 129946 - RNA, 22 nt, Artificial Sequence
  Synthetic
guacucacgucagaaucagcug

SEQ ID NO: 129947 - RNA, 20 nt, Artificial Sequence
  Synthetic
gccucuuuaguuaguagcug

SEQ ID NO: 129948 - RNA, 21 nt, Artificial Sequence
  Synthetic
ggccucuuuaguuaguagcug

SEQ ID NO: 129949 - RNA, 19 nt, Artificial Sequence
  Synthetic
gugauucugcugcacgcug

SEQ ID NO: 129950 - RNA, 20 nt, Artificial Sequence
  Synthetic
ggugauucugcugcacgcug

SEQ ID NO: 129951 - RNA, 22 nt, Artificial Sequence
  Synthetic
gauacucaggaggccgaggcug

SEQ ID NO: 129952 - RNA, 20 nt, Artificial Sequence
  Synthetic
guuuuuagcaugaagggcug

SEQ ID NO: 129953 - RNA, 22 nt, Artificial Sequence
  Synthetic
gaguuuuuagcaugaagggcug

SEQ ID NO: 129954 - RNA, 24 nt, Artificial Sequence
  Synthetic
gagaguuuuuagcaugaagggcug

SEQ ID NO: 129955 - RNA, 19 nt, Artificial Sequence
  Synthetic
gauggcuugacuggggcug

SEQ ID NO: 129956 - RNA, 23 nt, Artificial Sequence
  Synthetic
gaucucauuccuuuuuauggcug

SEQ ID NO: 129957 - RNA, 18 nt, Artificial Sequence
  Synthetic
gagggauuacucuggcug

SEQ ID NO: 129958 - RNA, 18 nt, Artificial Sequence
  Synthetic
gauuagaaaagacugcug

SEQ ID NO: 129959 - RNA, 19 nt, Artificial Sequence
  Synthetic
ggauuagaaaagacugcug

SEQ ID NO: 129960 - RNA, 19 nt, Artificial Sequence
  Synthetic
gaggaugaagagggugcug

SEQ ID NO: 129961 - RNA, 21 nt, Artificial Sequence
  Synthetic
gauaagcuuuuugaugugcug

SEQ ID NO: 129962 - RNA, 22 nt, Artificial Sequence
  Synthetic
ggauaagcuuuuugaugugcug

SEQ ID NO: 129963 - RNA, 24 nt, Artificial Sequence
  Synthetic
guggauaagcuuuuugaugugcug

SEQ ID NO: 129964 - RNA, 20 nt, Artificial Sequence
  Synthetic
guuguuguuguuuugaucug

SEQ ID NO: 129965 - RNA, 23 nt, Artificial Sequence
  Synthetic
guuguuguuguuguuuugaucug

SEQ ID NO: 129966 - RNA, 21 nt, Artificial Sequence
  Synthetic
guugguucaaaggagagucug

SEQ ID NO: 129967 - RNA, 19 nt, Artificial Sequence
  Synthetic
gcuuuaaaacauuauucug

SEQ ID NO: 129968 - RNA, 20 nt, Artificial Sequence
  Synthetic
ggcuuuaaaacauuauucug

SEQ ID NO: 129969 - RNA, 21 nt, Artificial Sequence
  Synthetic
gggcuuuaaaacauuauucug

SEQ ID NO: 129970 - RNA, 24 nt, Artificial Sequence
  Synthetic
guugggcuuuaaaacauuauucug

SEQ ID NO: 129971 - RNA, 18 nt, Artificial Sequence
  Synthetic
guuauuucuuuucuucug

SEQ ID NO: 129972 - RNA, 21 nt, Artificial Sequence
  Synthetic
gucuguugucuuacaguucug

SEQ ID NO: 129973 - RNA, 24 nt, Artificial Sequence
  Synthetic
gaagucuguugucuuacaguucug

SEQ ID NO: 129974 - RNA, 20 nt, Artificial Sequence
  Synthetic
gucuuuuguauauauuucug

SEQ ID NO: 129975 - RNA, 20 nt, Artificial Sequence
  Synthetic
gaugguaguuuguauuucug

SEQ ID NO: 129976 - RNA, 20 nt, Artificial Sequence
  Synthetic
gaugacaggguugguuucug

SEQ ID NO: 129977 - RNA, 22 nt, Artificial Sequence
  Synthetic
gugaugacaggguugguuucug

SEQ ID NO: 129978 - RNA, 23 nt, Artificial Sequence
  Synthetic
ggugaugacaggguugguuucug

SEQ ID NO: 129979 - RNA, 21 nt, Artificial Sequence
  Synthetic
gaccuauuuuauaguaaagug

SEQ ID NO: 129980 - RNA, 18 nt, Artificial Sequence
  Synthetic
gagugaaaaagagaagug

SEQ ID NO: 129981 - RNA, 19 nt, Artificial Sequence
  Synthetic
ggagugaaaaagagaagug

SEQ ID NO: 129982 - RNA, 20 nt, Artificial Sequence
  Synthetic
gggagugaaaaagagaagug

SEQ ID NO: 129983 - RNA, 21 nt, Artificial Sequence
  Synthetic
gcuugcacacucccuccagug

SEQ ID NO: 129984 - RNA, 24 nt, Artificial Sequence
  Synthetic
guuacauggaugaguucuauagug

SEQ ID NO: 129985 - RNA, 21 nt, Artificial Sequence
  Synthetic
gcuacucaagaggcugaggug

SEQ ID NO: 129986 - RNA, 23 nt, Artificial Sequence
  Synthetic
gucuguguguagcuuuauaggug

SEQ ID NO: 129987 - RNA, 20 nt, Artificial Sequence
  Synthetic
guuuuuaacaugaaagggug

SEQ ID NO: 129988 - RNA, 22 nt, Artificial Sequence
  Synthetic
guguuuuuaacaugaaagggug

SEQ ID NO: 129989 - RNA, 24 nt, Artificial Sequence
  Synthetic
gaguguuuuuaacaugaaagggug

SEQ ID NO: 129990 - RNA, 18 nt, Artificial Sequence
  Synthetic
guugggguggcgggggug

SEQ ID NO: 129991 - RNA, 19 nt, Artificial Sequence
  Synthetic
gguugggguggcgggggug

SEQ ID NO: 129992 - RNA, 23 nt, Artificial Sequence
  Synthetic
guauauucuguugauuuggggug

SEQ ID NO: 129993 - RNA, 24 nt, Artificial Sequence
  Synthetic
gcuacaauguacauaauuugggug

SEQ ID NO: 129994 - RNA, 23 nt, Artificial Sequence
  Synthetic
gauucccuauucaguaaauggug

SEQ ID NO: 129995 - RNA, 24 nt, Artificial Sequence
  Synthetic
ggauucccuauucaguaaauggug

SEQ ID NO: 129996 - RNA, 19 nt, Artificial Sequence
  Synthetic
gccaagaagucuuauggug

SEQ ID NO: 129997 - RNA, 20 nt, Artificial Sequence
  Synthetic
gaaauaagggaaaaaaugug

SEQ ID NO: 129998 - RNA, 21 nt, Artificial Sequence
  Synthetic
gucagugcugaagcaaaugug

SEQ ID NO: 129999 - RNA, 19 nt, Artificial Sequence
  Synthetic
gcgugaucucacuuaugug

SEQ ID NO: 130000 - RNA, 21 nt, Artificial Sequence
  Synthetic
gucauugguucuguuuaugug

SEQ ID NO: 130001 - RNA, 22 nt, Artificial Sequence
  Synthetic
ggucauugguucuguuuaugug

SEQ ID NO: 130002 - RNA, 18 nt, Artificial Sequence
  Synthetic
ggacagcaucaagcugug

SEQ ID NO: 130003 - RNA, 20 nt, Artificial Sequence
  Synthetic
gaggacagcaucaagcugug

SEQ ID NO: 130004 - RNA, 19 nt, Artificial Sequence
  Synthetic
gaaaaaaaauguaugugug

SEQ ID NO: 130005 - RNA, 20 nt, Artificial Sequence
  Synthetic
ggaaaaaaaauguaugugug

SEQ ID NO: 130006 - RNA, 20 nt, Artificial Sequence
  Synthetic
guuguauguguaugugugug

SEQ ID NO: 130007 - RNA, 19 nt, Artificial Sequence
  Synthetic
gugugugugugugugugug

SEQ ID NO: 130008 - RNA, 20 nt, Artificial Sequence
  Synthetic
gaaggcccacccacauugug

SEQ ID NO: 130009 - RNA, 22 nt, Artificial Sequence
  Synthetic
gagaaggcccacccacauugug

SEQ ID NO: 130010 - RNA, 23 nt, Artificial Sequence
  Synthetic
ggagaaggcccacccacauugug

SEQ ID NO: 130011 - RNA, 18 nt, Artificial Sequence
  Synthetic
gaagccuacuugauugug

SEQ ID NO: 130012 - RNA, 21 nt, Artificial Sequence
  Synthetic
gaugaagccuacuugauugug

SEQ ID NO: 130013 - RNA, 22 nt, Artificial Sequence
  Synthetic
ggaugaagccuacuugauugug

SEQ ID NO: 130014 - RNA, 23 nt, Artificial Sequence
  Synthetic
gggaugaagccuacuugauugug

SEQ ID NO: 130015 - RNA, 19 nt, Artificial Sequence
  Synthetic
gccaagaagucuuauugug

SEQ ID NO: 130016 - RNA, 19 nt, Artificial Sequence
  Synthetic
gcucuuccaucagcuugug

SEQ ID NO: 130017 - RNA, 20 nt, Artificial Sequence
  Synthetic
ggcucuuccaucagcuugug

SEQ ID NO: 130018 - RNA, 21 nt, Artificial Sequence
  Synthetic
gggcucuuccaucagcuugug

SEQ ID NO: 130019 - RNA, 18 nt, Artificial Sequence
  Synthetic
guguguguguguguugug

SEQ ID NO: 130020 - RNA, 20 nt, Artificial Sequence
  Synthetic
guguguguguguguguugug

SEQ ID NO: 130021 - RNA, 22 nt, Artificial Sequence
  Synthetic
guguguguguguguguguugug

SEQ ID NO: 130022 - RNA, 24 nt, Artificial Sequence
  Synthetic
guguguguguguguguguguugug

SEQ ID NO: 130023 - RNA, 18 nt, Artificial Sequence
  Synthetic
gagaaauuuauugaauug

SEQ ID NO: 130024 - RNA, 18 nt, Artificial Sequence
  Synthetic
gucugugucuuuuaauug

SEQ ID NO: 130025 - RNA, 22 nt, Artificial Sequence
  Synthetic
gccagucugugucuuuuaauug

SEQ ID NO: 130026 - RNA, 22 nt, Artificial Sequence
  Synthetic
guuuugauauacccauacauug

SEQ ID NO: 130027 - RNA, 22 nt, Artificial Sequence
  Synthetic
guuuugauauauguuuacauug

SEQ ID NO: 130028 - RNA, 23 nt, Artificial Sequence
  Synthetic
guauauacccaguaauggcauug

SEQ ID NO: 130029 - RNA, 24 nt, Artificial Sequence
  Synthetic
gguauauacccaguaauggcauug

SEQ ID NO: 130030 - RNA, 23 nt, Artificial Sequence
  Synthetic
gauuacaauuuaagaugagauug

SEQ ID NO: 130031 - RNA, 24 nt, Artificial Sequence
  Synthetic
ggauuacaauuuaagaugagauug

SEQ ID NO: 130032 - RNA, 23 nt, Artificial Sequence
  Synthetic
guauauaaccaauaaugggauug

SEQ ID NO: 130033 - RNA, 24 nt, Artificial Sequence
  Synthetic
gguauauaaccaauaaugggauug

SEQ ID NO: 130034 - RNA, 23 nt, Artificial Sequence
  Synthetic
guauauauccaguaaugggauug

SEQ ID NO: 130035 - RNA, 24 nt, Artificial Sequence
  Synthetic
gguauauauccaguaaugggauug

SEQ ID NO: 130036 - RNA, 23 nt, Artificial Sequence
  Synthetic
guauauaugcaguaaugggauug

SEQ ID NO: 130037 - RNA, 24 nt, Artificial Sequence
  Synthetic
gguauauaugcaguaaugggauug

SEQ ID NO: 130038 - RNA, 24 nt, Artificial Sequence
  Synthetic
gauauauacccagcagugggauug

SEQ ID NO: 130039 - RNA, 23 nt, Artificial Sequence
  Synthetic
guauauacccagcagugggauug

SEQ ID NO: 130040 - RNA, 24 nt, Artificial Sequence
  Synthetic
gguauauacccagcagugggauug

SEQ ID NO: 130041 - RNA, 18 nt, Artificial Sequence
  Synthetic
gaagccauaaaucuauug

SEQ ID NO: 130042 - RNA, 19 nt, Artificial Sequence
  Synthetic
gcaugaaggaauuuuauug

SEQ ID NO: 130043 - RNA, 24 nt, Artificial Sequence
  Synthetic
gauuagcaugaaggaauuuuauug

SEQ ID NO: 130044 - RNA, 19 nt, Artificial Sequence
  Synthetic
guuugccaguauuuuauug

SEQ ID NO: 130045 - RNA, 20 nt, Artificial Sequence
  Synthetic
gguuugccaguauuuuauug

SEQ ID NO: 130046 - RNA, 19 nt, Artificial Sequence
  Synthetic
gaaacuuccuagagacuug

SEQ ID NO: 130047 - RNA, 19 nt, Artificial Sequence
  Synthetic
guuauuuguuuuugacuug

SEQ ID NO: 130048 - RNA, 20 nt, Artificial Sequence
  Synthetic
gguuauuuguuuuugacuug

SEQ ID NO: 130049 - RNA, 21 nt, Artificial Sequence
  Synthetic
ggguuauuuguuuuugacuug

SEQ ID NO: 130050 - RNA, 22 nt, Artificial Sequence
  Synthetic
gggguuauuuguuuuugacuug

SEQ ID NO: 130051 - RNA, 19 nt, Artificial Sequence
  Synthetic
gaggaaacaaucuaccuug

SEQ ID NO: 130052 - RNA, 20 nt, Artificial Sequence
  Synthetic
ggaggaaacaaucuaccuug

SEQ ID NO: 130053 - RNA, 22 nt, Artificial Sequence
  Synthetic
gaggaggaaacaaucuaccuug

SEQ ID NO: 130054 - RNA, 23 nt, Artificial Sequence
  Synthetic
guauuucuaguucuagauccuug

SEQ ID NO: 130055 - RNA, 24 nt, Artificial Sequence
  Synthetic
gguauuucuaguucuagauccuug

SEQ ID NO: 130056 - RNA, 23 nt, Artificial Sequence
  Synthetic
guauuucugguucuagauccuug

SEQ ID NO: 130057 - RNA, 24 nt, Artificial Sequence
  Synthetic
gguauuucugguucuagauccuug

SEQ ID NO: 130058 - RNA, 23 nt, Artificial Sequence
  Synthetic
guauuucugguucuguauccuug

SEQ ID NO: 130059 - RNA, 24 nt, Artificial Sequence
  Synthetic
gguauuucugguucuguauccuug

SEQ ID NO: 130060 - RNA, 20 nt, Artificial Sequence
  Synthetic
gaagaaguaaaauuuccuug

SEQ ID NO: 130061 - RNA, 20 nt, Artificial Sequence
  Synthetic
gcuuguuaaaacacagcuug

SEQ ID NO: 130062 - RNA, 21 nt, Artificial Sequence
  Synthetic
ggcuuguuaaaacacagcuug

SEQ ID NO: 130063 - RNA, 24 nt, Artificial Sequence
  Synthetic
gaaggcuuguuaaaacacagcuug

SEQ ID NO: 130064 - RNA, 22 nt, Artificial Sequence
  Synthetic
gcuaccauuuauuuagugcuug

SEQ ID NO: 130065 - RNA, 18 nt, Artificial Sequence
  Synthetic
gauuuucugaugugcuug

SEQ ID NO: 130066 - RNA, 19 nt, Artificial Sequence
  Synthetic
ggauuuucugaugugcuug

SEQ ID NO: 130067 - RNA, 24 nt, Artificial Sequence
  Synthetic
guaaaggauuuucugaugugcuug

SEQ ID NO: 130068 - RNA, 20 nt, Artificial Sequence
  Synthetic
guaaauuauuuccacucuug

SEQ ID NO: 130069 - RNA, 18 nt, Artificial Sequence
  Synthetic
gauaguuagcuccucuug

SEQ ID NO: 130070 - RNA, 19 nt, Artificial Sequence
  Synthetic
ggauaguuagcuccucuug

SEQ ID NO: 130071 - RNA, 24 nt, Artificial Sequence
  Synthetic
gaccuacugaaacagaaauucuug

SEQ ID NO: 130072 - RNA, 23 nt, Artificial Sequence
  Synthetic
gucccugaagggacugacaguug

SEQ ID NO: 130073 - RNA, 19 nt, Artificial Sequence
  Synthetic
gaacaucacacaccaguug

SEQ ID NO: 130074 - RNA, 20 nt, Artificial Sequence
  Synthetic
ggaacaucacacaccaguug

SEQ ID NO: 130075 - RNA, 21 nt, Artificial Sequence
  Synthetic
gggaacaucacacaccaguug

SEQ ID NO: 130076 - RNA, 22 nt, Artificial Sequence
  Synthetic
ggggaacaucacacaccaguug

SEQ ID NO: 130077 - RNA, 24 nt, Artificial Sequence
  Synthetic
gaggggaacaucacacaccaguug

SEQ ID NO: 130078 - RNA, 20 nt, Artificial Sequence
  Synthetic
gcuccacuccuuuggcguug

SEQ ID NO: 130079 - RNA, 23 nt, Artificial Sequence
  Synthetic
guagcuccacuccuuuggcguug

SEQ ID NO: 130080 - RNA, 24 nt, Artificial Sequence
  Synthetic
gguagcuccacuccuuuggcguug

SEQ ID NO: 130081 - RNA, 20 nt, Artificial Sequence
  Synthetic
guuuuuagcaugaaggguug

SEQ ID NO: 130082 - RNA, 19 nt, Artificial Sequence
  Synthetic
gaagggcaaagaaaauuug

SEQ ID NO: 130083 - RNA, 20 nt, Artificial Sequence
  Synthetic
gacuuuuaugaccaaauuug

SEQ ID NO: 130084 - RNA, 23 nt, Artificial Sequence
  Synthetic
gaagacuuuuaugaccaaauuug

SEQ ID NO: 130085 - RNA, 23 nt, Artificial Sequence
  Synthetic
gaaaaauuugaaauguuaauuug

SEQ ID NO: 130086 - RNA, 18 nt, Artificial Sequence
  Synthetic
guguucaauaaauauuug

SEQ ID NO: 130087 - RNA, 19 nt, Artificial Sequence
  Synthetic
gguguucaauaaauauuug

SEQ ID NO: 130088 - RNA, 18 nt, Artificial Sequence
  Synthetic
gcaauugauaaauauuug

SEQ ID NO: 130089 - RNA, 20 nt, Artificial Sequence
  Synthetic
gagcaauugauaaauauuug

SEQ ID NO: 130090 - RNA, 21 nt, Artificial Sequence
  Synthetic
ggagcaauugauaaauauuug

SEQ ID NO: 130091 - RNA, 18 nt, Artificial Sequence
  Synthetic
guagguucucaauauuug

SEQ ID NO: 130092 - RNA, 22 nt, Artificial Sequence
  Synthetic
gacuuuguauccugcaacuuug

SEQ ID NO: 130093 - RNA, 22 nt, Artificial Sequence
  Synthetic
gcccauuuauauaucuccuuug

SEQ ID NO: 130094 - RNA, 23 nt, Artificial Sequence
  Synthetic
gccuuuuuaaaguguacaguuug

SEQ ID NO: 130095 - RNA, 18 nt, Artificial Sequence
  Synthetic
ggauggagaaugaguuug

SEQ ID NO: 130096 - RNA, 20 nt, Artificial Sequence
  Synthetic
gcuccaccccuguggguuug

SEQ ID NO: 130097 - RNA, 24 nt, Artificial Sequence
  Synthetic
guaagcuccaccccuguggguuug

SEQ ID NO: 130098 - RNA, 18 nt, Artificial Sequence
  Synthetic
gcacugaauaaauguuug

SEQ ID NO: 130099 - RNA, 22 nt, Artificial Sequence
  Synthetic
guaagcacugaauaaauguuug

SEQ ID NO: 130100 - RNA, 19 nt, Artificial Sequence
  Synthetic
gauguguaauaaauguuug

SEQ ID NO: 130101 - RNA, 22 nt, Artificial Sequence
  Synthetic
guagauguguaauaaauguuug

SEQ ID NO: 130102 - RNA, 23 nt, Artificial Sequence
  Synthetic
gguagauguguaauaaauguuug

SEQ ID NO: 130103 - RNA, 18 nt, Artificial Sequence
  Synthetic
gucuucuuuaaauguuug

SEQ ID NO: 130104 - RNA, 19 nt, Artificial Sequence
  Synthetic
ggucuucuuuaaauguuug

SEQ ID NO: 130105 - RNA, 23 nt, Artificial Sequence
  Synthetic
guuaggucuucuuuaaauguuug

SEQ ID NO: 130106 - RNA, 23 nt, Artificial Sequence
  Synthetic
gauuuucauuuauuuauauuuug

SEQ ID NO: 130107 - RNA, 20 nt, Artificial Sequence
  Synthetic
gauggggucuugcuauuuug

SEQ ID NO: 130108 - RNA, 22 nt, Artificial Sequence
  Synthetic
gagauggggucuugcuauuuug

SEQ ID NO: 130109 - RNA, 18 nt, Artificial Sequence
  Synthetic
ggauucauugauuuuuug

SEQ ID NO: 130110 - RNA, 24 nt, Artificial Sequence
  Synthetic
gcuccuggauucauugauuuuuug

SEQ ID NO: 130111 - RNA, 18 nt, Artificial Sequence
  Synthetic
gauuuucuuucuuuuuug

SEQ ID NO: 130112 - RNA, 18 nt, Artificial Sequence
  Synthetic
gauucauugauuuuuuug

SEQ ID NO: 130113 - RNA, 19 nt, Artificial Sequence
  Synthetic
ggauucauugauuuuuuug

SEQ ID NO: 130114 - RNA, 19 nt, Artificial Sequence
  Synthetic
gccauuagggaaaaaaaau

SEQ ID NO: 130115 - RNA, 19 nt, Artificial Sequence
  Synthetic
guuucaaguugaaaaaaau

SEQ ID NO: 130116 - RNA, 21 nt, Artificial Sequence
  Synthetic
gaccucauuuuuuaaaaaaau

SEQ ID NO: 130117 - RNA, 23 nt, Artificial Sequence
  Synthetic
gagaccucauuuuuuaaaaaaau

SEQ ID NO: 130118 - RNA, 18 nt, Artificial Sequence
  Synthetic
guuuuuuuuuaaaaaaau

SEQ ID NO: 130119 - RNA, 21 nt, Artificial Sequence
  Synthetic
gcuguuuuuuuuuaaaaaaau

SEQ ID NO: 130120 - RNA, 24 nt, Artificial Sequence
  Synthetic
guugcuguuuuuuuuuaaaaaaau

SEQ ID NO: 130121 - RNA, 18 nt, Artificial Sequence
  Synthetic
gaaguuuaggcuaaaaau

SEQ ID NO: 130122 - RNA, 20 nt, Artificial Sequence
  Synthetic
gagaaguuuaggcuaaaaau

SEQ ID NO: 130123 - RNA, 20 nt, Artificial Sequence
  Synthetic
guuaaaaaacaaaacaaaau

SEQ ID NO: 130124 - RNA, 18 nt, Artificial Sequence
  Synthetic
guuagaaaauggcaaaau

SEQ ID NO: 130125 - RNA, 19 nt, Artificial Sequence
  Synthetic
guuuucuccaauggaaaau

SEQ ID NO: 130126 - RNA, 23 nt, Artificial Sequence
  Synthetic
guauuuuuuugugcuuugaaaau

SEQ ID NO: 130127 - RNA, 19 nt, Artificial Sequence
  Synthetic
guuuaucuagcuauaaaau

SEQ ID NO: 130128 - RNA, 19 nt, Artificial Sequence
  Synthetic
guuuucucauguauaaaau

SEQ ID NO: 130129 - RNA, 23 nt, Artificial Sequence
  Synthetic
guuuguuuucucauguauaaaau

SEQ ID NO: 130130 - RNA, 19 nt, Artificial Sequence
  Synthetic
gcauuuauuuuucuaaaau

SEQ ID NO: 130131 - RNA, 18 nt, Artificial Sequence
  Synthetic
gauguaaaauuuuaaaau

SEQ ID NO: 130132 - RNA, 24 nt, Artificial Sequence
  Synthetic
gcauauaauauauaaugaucaaau

SEQ ID NO: 130133 - RNA, 22 nt, Artificial Sequence
  Synthetic
guauaauguguaaugaucaaau

SEQ ID NO: 130134 - RNA, 24 nt, Artificial Sequence
  Synthetic
gcguauaauguguaaugaucaaau

SEQ ID NO: 130135 - RNA, 24 nt, Artificial Sequence
  Synthetic
gcauaccauguguaauuaucaaau

SEQ ID NO: 130136 - RNA, 20 nt, Artificial Sequence
  Synthetic
gcuuuucauccuccagaaau

SEQ ID NO: 130137 - RNA, 22 nt, Artificial Sequence
  Synthetic
gaacaaaauuguugcaugaaau

SEQ ID NO: 130138 - RNA, 23 nt, Artificial Sequence
  Synthetic
gcuauugugaauagugcugaaau

SEQ ID NO: 130139 - RNA, 19 nt, Artificial Sequence
  Synthetic
guggaaaaacuggugaaau

SEQ ID NO: 130140 - RNA, 21 nt, Artificial Sequence
  Synthetic
gaguggaaaaacuggugaaau

SEQ ID NO: 130141 - RNA, 22 nt, Artificial Sequence
  Synthetic
gaucaaaaauaaaaguugaaau

SEQ ID NO: 130142 - RNA, 23 nt, Artificial Sequence
  Synthetic
ggaucaaaaauaaaaguugaaau

SEQ ID NO: 130143 - RNA, 20 nt, Artificial Sequence
  Synthetic
guaaaggaucaagaauaaau

SEQ ID NO: 130144 - RNA, 22 nt, Artificial Sequence
  Synthetic
gaguaaaggaucaagaauaaau

SEQ ID NO: 130145 - RNA, 20 nt, Artificial Sequence
  Synthetic
gaucugauaguuuuauaaau

SEQ ID NO: 130146 - RNA, 23 nt, Artificial Sequence
  Synthetic
gccccaccccaagccuacuaaau

SEQ ID NO: 130147 - RNA, 24 nt, Artificial Sequence
  Synthetic
ggccccaccccaagccuacuaaau

SEQ ID NO: 130148 - RNA, 18 nt, Artificial Sequence
  Synthetic
gagcauacagaaguaaau

SEQ ID NO: 130149 - RNA, 20 nt, Artificial Sequence
  Synthetic
guaaugacacuaauguaaau

SEQ ID NO: 130150 - RNA, 18 nt, Artificial Sequence
  Synthetic
guaaaaauauguuuaaau

SEQ ID NO: 130151 - RNA, 18 nt, Artificial Sequence
  Synthetic
gauuuauuauuuuuaaau

SEQ ID NO: 130152 - RNA, 19 nt, Artificial Sequence
  Synthetic
ggauuuauuauuuuuaaau

SEQ ID NO: 130153 - RNA, 20 nt, Artificial Sequence
  Synthetic
gggauuuauuauuuuuaaau

SEQ ID NO: 130154 - RNA, 22 nt, Artificial Sequence
  Synthetic
gaauaaguucuuucaaaccaau

SEQ ID NO: 130155 - RNA, 21 nt, Artificial Sequence
  Synthetic
gauaaauaaaaauuauccaau

SEQ ID NO: 130156 - RNA, 23 nt, Artificial Sequence
  Synthetic
gaaaauaaugugcacaggucaau

SEQ ID NO: 130157 - RNA, 22 nt, Artificial Sequence
  Synthetic
gauuccaauacaugcccagaau

SEQ ID NO: 130158 - RNA, 23 nt, Artificial Sequence
  Synthetic
gcaaauggaaaccaaaagagaau

SEQ ID NO: 130159 - RNA, 18 nt, Artificial Sequence
  Synthetic
gaagaaauaauagagaau

SEQ ID NO: 130160 - RNA, 19 nt, Artificial Sequence
  Synthetic
ggaagaaauaauagagaau

SEQ ID NO: 130161 - RNA, 20 nt, Artificial Sequence
  Synthetic
gggaagaaauaauagagaau

SEQ ID NO: 130162 - RNA, 20 nt, Artificial Sequence
  Synthetic
guaacuucuucaggcugaau

SEQ ID NO: 130163 - RNA, 23 nt, Artificial Sequence
  Synthetic
gaacuuccaacacuauguugaau

SEQ ID NO: 130164 - RNA, 22 nt, Artificial Sequence
  Synthetic
gacuuccaauacuauguugaau

SEQ ID NO: 130165 - RNA, 23 nt, Artificial Sequence
  Synthetic
ggacuuccaauacuauguugaau

SEQ ID NO: 130166 - RNA, 23 nt, Artificial Sequence
  Synthetic
gccccacuucaaaacuguugaau

SEQ ID NO: 130167 - RNA, 24 nt, Artificial Sequence
  Synthetic
ggccccacuucaaaacuguugaau

SEQ ID NO: 130168 - RNA, 23 nt, Artificial Sequence
  Synthetic
gccccacuucagaacuguugaau

SEQ ID NO: 130169 - RNA, 24 nt, Artificial Sequence
  Synthetic
ggccccacuucagaacuguugaau

SEQ ID NO: 130170 - RNA, 21 nt, Artificial Sequence
  Synthetic
guuugcaaaugcuuuuugaau

SEQ ID NO: 130171 - RNA, 19 nt, Artificial Sequence
  Synthetic
guaauucuuuauaaauaau

SEQ ID NO: 130172 - RNA, 18 nt, Artificial Sequence
  Synthetic
ggcuacaauguacauaau

SEQ ID NO: 130173 - RNA, 18 nt, Artificial Sequence
  Synthetic
guccaauggaaauauaau

SEQ ID NO: 130174 - RNA, 21 nt, Artificial Sequence
  Synthetic
guuguccaauggaaauauaau

SEQ ID NO: 130175 - RNA, 23 nt, Artificial Sequence
  Synthetic
guguuguccaauggaaauauaau

SEQ ID NO: 130176 - RNA, 24 nt, Artificial Sequence
  Synthetic
gguguuguccaauggaaauauaau

SEQ ID NO: 130177 - RNA, 18 nt, Artificial Sequence
  Synthetic
gugacaucacuagguaau

SEQ ID NO: 130178 - RNA, 23 nt, Artificial Sequence
  Synthetic
gcacugugacaucacuagguaau

SEQ ID NO: 130179 - RNA, 22 nt, Artificial Sequence
  Synthetic
guaaugaucaaaucaggguaau

SEQ ID NO: 130180 - RNA, 24 nt, Artificial Sequence
  Synthetic
guguaaugaucaaaucaggguaau

SEQ ID NO: 130181 - RNA, 20 nt, Artificial Sequence
  Synthetic
guuuacuguuuuugauuaau

SEQ ID NO: 130182 - RNA, 21 nt, Artificial Sequence
  Synthetic
gugaauuaugccgcaguuaau

SEQ ID NO: 130183 - RNA, 24 nt, Artificial Sequence
  Synthetic
gucuuuuggauaugucguuuuaau

SEQ ID NO: 130184 - RNA, 22 nt, Artificial Sequence
  Synthetic
guaaaaaugcuacaauaaacau

SEQ ID NO: 130185 - RNA, 21 nt, Artificial Sequence
  Synthetic
gaauagagcugcaauaaacau

SEQ ID NO: 130186 - RNA, 23 nt, Artificial Sequence
  Synthetic
gugaauagagcugcaauaaacau

SEQ ID NO: 130187 - RNA, 21 nt, Artificial Sequence
  Synthetic
gaauagcgcugcaauaaacau

SEQ ID NO: 130188 - RNA, 23 nt, Artificial Sequence
  Synthetic
gugaauagcgcugcaauaaacau

SEQ ID NO: 130189 - RNA, 21 nt, Artificial Sequence
  Synthetic
gaauaaugcugcaauaaacau

SEQ ID NO: 130190 - RNA, 23 nt, Artificial Sequence
  Synthetic
gugaauaaugcugcaauaaacau

SEQ ID NO: 130191 - RNA, 19 nt, Artificial Sequence
  Synthetic
guuuuugaaaauuaaacau

SEQ ID NO: 130192 - RNA, 23 nt, Artificial Sequence
  Synthetic
guaaauauauaugcacccaacau

SEQ ID NO: 130193 - RNA, 18 nt, Artificial Sequence
  Synthetic
ggguuaaaacuucaacau

SEQ ID NO: 130194 - RNA, 19 nt, Artificial Sequence
  Synthetic
gggguuaaaacuucaacau

SEQ ID NO: 130195 - RNA, 18 nt, Artificial Sequence
  Synthetic
gucccucccauaacacau

SEQ ID NO: 130196 - RNA, 19 nt, Artificial Sequence
  Synthetic
ggucccucccauaacacau

SEQ ID NO: 130197 - RNA, 20 nt, Artificial Sequence
  Synthetic
gggucccucccauaacacau

SEQ ID NO: 130198 - RNA, 18 nt, Artificial Sequence
  Synthetic
gucccucacaugacacau

SEQ ID NO: 130199 - RNA, 19 nt, Artificial Sequence
  Synthetic
ggucccucacaugacacau

SEQ ID NO: 130200 - RNA, 20 nt, Artificial Sequence
  Synthetic
gggucccucacaugacacau

SEQ ID NO: 130201 - RNA, 18 nt, Artificial Sequence
  Synthetic
gucacucccaugacacau

SEQ ID NO: 130202 - RNA, 19 nt, Artificial Sequence
  Synthetic
ggucacucccaugacacau

SEQ ID NO: 130203 - RNA, 24 nt, Artificial Sequence
  Synthetic
gauccauguuuuuagcucccacau

SEQ ID NO: 130204 - RNA, 24 nt, Artificial Sequence
  Synthetic
gcauacaauguguaacagucacau

SEQ ID NO: 130205 - RNA, 20 nt, Artificial Sequence
  Synthetic
guuucuggagagauucacau

SEQ ID NO: 130206 - RNA, 23 nt, Artificial Sequence
  Synthetic
gcuguuucuggagagauucacau

SEQ ID NO: 130207 - RNA, 24 nt, Artificial Sequence
  Synthetic
ggcuguuucuggagagauucacau

SEQ ID NO: 130208 - RNA, 19 nt, Artificial Sequence
  Synthetic
gucuaucacugauggacau

SEQ ID NO: 130209 - RNA, 19 nt, Artificial Sequence
  Synthetic
gucuaucauuguuggacau

SEQ ID NO: 130210 - RNA, 20 nt, Artificial Sequence
  Synthetic
gccuguagucccagcuacau

SEQ ID NO: 130211 - RNA, 21 nt, Artificial Sequence
  Synthetic
ggccuguagucccagcuacau

SEQ ID NO: 130212 - RNA, 22 nt, Artificial Sequence
  Synthetic
gggccuguagucccagcuacau

SEQ ID NO: 130213 - RNA, 24 nt, Artificial Sequence
  Synthetic
gugggccuguagucccagcuacau

SEQ ID NO: 130214 - RNA, 21 nt, Artificial Sequence
  Synthetic
gugugucuacauuguccccau

SEQ ID NO: 130215 - RNA, 22 nt, Artificial Sequence
  Synthetic
ggugugucuacauuguccccau

SEQ ID NO: 130216 - RNA, 20 nt, Artificial Sequence
  Synthetic
gauucuccugccucagccau

SEQ ID NO: 130217 - RNA, 22 nt, Artificial Sequence
  Synthetic
gcgauucuccugccucagccau

SEQ ID NO: 130218 - RNA, 20 nt, Artificial Sequence
  Synthetic
guuacuggcagugaauccau

SEQ ID NO: 130219 - RNA, 20 nt, Artificial Sequence
  Synthetic
guccauaucacuaucagcau

SEQ ID NO: 130220 - RNA, 21 nt, Artificial Sequence
  Synthetic
gcuucucagaggcugaggcau

SEQ ID NO: 130221 - RNA, 22 nt, Artificial Sequence
  Synthetic
gcuaccugggaggcugaggcau

SEQ ID NO: 130222 - RNA, 19 nt, Artificial Sequence
  Synthetic
gucuaucacugaugggcau

SEQ ID NO: 130223 - RNA, 19 nt, Artificial Sequence
  Synthetic
guauaucauugaugggcau

SEQ ID NO: 130224 - RNA, 19 nt, Artificial Sequence
  Synthetic
gucuaucauugaugggcau

SEQ ID NO: 130225 - RNA, 19 nt, Artificial Sequence
  Synthetic
gucuaucacuggugggcau

SEQ ID NO: 130226 - RNA, 19 nt, Artificial Sequence
  Synthetic
gucuagauucauucugcau

SEQ ID NO: 130227 - RNA, 20 nt, Artificial Sequence
  Synthetic
ggucuagauucauucugcau

SEQ ID NO: 130228 - RNA, 21 nt, Artificial Sequence
  Synthetic
gggucuagauucauucugcau

SEQ ID NO: 130229 - RNA, 22 nt, Artificial Sequence
  Synthetic
ggggucuagauucauucugcau

SEQ ID NO: 130230 - RNA, 23 nt, Artificial Sequence
  Synthetic
gcuucucaaacuuugaugugcau

SEQ ID NO: 130231 - RNA, 22 nt, Artificial Sequence
  Synthetic
guacacacuaugauguuugcau

SEQ ID NO: 130232 - RNA, 23 nt, Artificial Sequence
  Synthetic
gguacacacuaugauguuugcau

SEQ ID NO: 130233 - RNA, 18 nt, Artificial Sequence
  Synthetic
gaaaaguacacaaaucau

SEQ ID NO: 130234 - RNA, 19 nt, Artificial Sequence
  Synthetic
gcaaaaaaacagaaaucau

SEQ ID NO: 130235 - RNA, 18 nt, Artificial Sequence
  Synthetic
gaacucacucaucaucau

SEQ ID NO: 130236 - RNA, 20 nt, Artificial Sequence
  Synthetic
gagaacucacucaucaucau

SEQ ID NO: 130237 - RNA, 20 nt, Artificial Sequence
  Synthetic
guuuguguuuuuuucaucau

SEQ ID NO: 130238 - RNA, 19 nt, Artificial Sequence
  Synthetic
guaggugugauuggaucau

SEQ ID NO: 130239 - RNA, 20 nt, Artificial Sequence
  Synthetic
gguaggugugauuggaucau

SEQ ID NO: 130240 - RNA, 24 nt, Artificial Sequence
  Synthetic
gccugguaggugugauuggaucau

SEQ ID NO: 130241 - RNA, 22 nt, Artificial Sequence
  Synthetic
gcacagcaaaagaaacuaucau

SEQ ID NO: 130242 - RNA, 18 nt, Artificial Sequence
  Synthetic
guggaauuguuaccucau

SEQ ID NO: 130243 - RNA, 21 nt, Artificial Sequence
  Synthetic
gaaguggaauuguuaccucau

SEQ ID NO: 130244 - RNA, 19 nt, Artificial Sequence
  Synthetic
gugagccaccgcgccucau

SEQ ID NO: 130245 - RNA, 21 nt, Artificial Sequence
  Synthetic
gugugagccaccgcgccucau

SEQ ID NO: 130246 - RNA, 22 nt, Artificial Sequence
  Synthetic
ggugugagccaccgcgccucau

SEQ ID NO: 130247 - RNA, 18 nt, Artificial Sequence
  Synthetic
gcuaccaucgucucucau

SEQ ID NO: 130248 - RNA, 22 nt, Artificial Sequence
  Synthetic
gcaagcuaccaucgucucucau

SEQ ID NO: 130249 - RNA, 24 nt, Artificial Sequence
  Synthetic
gugcaagcuaccaucgucucucau

SEQ ID NO: 130250 - RNA, 18 nt, Artificial Sequence
  Synthetic
ggaauuuauuuuucucau

SEQ ID NO: 130251 - RNA, 18 nt, Artificial Sequence
  Synthetic
gggcauggaaaaagucau

SEQ ID NO: 130252 - RNA, 18 nt, Artificial Sequence
  Synthetic
gauccagugggaggucau

SEQ ID NO: 130253 - RNA, 19 nt, Artificial Sequence
  Synthetic
ggauccagugggaggucau

SEQ ID NO: 130254 - RNA, 20 nt, Artificial Sequence
  Synthetic
gggauccagugggaggucau

SEQ ID NO: 130255 - RNA, 22 nt, Artificial Sequence
  Synthetic
gagggauccagugggaggucau

SEQ ID NO: 130256 - RNA, 23 nt, Artificial Sequence
  Synthetic
ggagggauccagugggaggucau

SEQ ID NO: 130257 - RNA, 24 nt, Artificial Sequence
  Synthetic
gggagggauccagugggaggucau

SEQ ID NO: 130258 - RNA, 18 nt, Artificial Sequence
  Synthetic
ggguaaauugcaugucau

SEQ ID NO: 130259 - RNA, 24 nt, Artificial Sequence
  Synthetic
guuauauagguaaacucaugucau

SEQ ID NO: 130260 - RNA, 24 nt, Artificial Sequence
  Synthetic
guuacauagguaaacuugugucau

SEQ ID NO: 130261 - RNA, 19 nt, Artificial Sequence
  Synthetic
gagucguuugugguuucau

SEQ ID NO: 130262 - RNA, 20 nt, Artificial Sequence
  Synthetic
ggagucguuugugguuucau

SEQ ID NO: 130263 - RNA, 20 nt, Artificial Sequence
  Synthetic
guaauguauagugaucagau

SEQ ID NO: 130264 - RNA, 22 nt, Artificial Sequence
  Synthetic
gaaacagauggcacauucagau

SEQ ID NO: 130265 - RNA, 18 nt, Artificial Sequence
  Synthetic
ggagguagagaaagagau

SEQ ID NO: 130266 - RNA, 18 nt, Artificial Sequence
  Synthetic
ggagggaggaagagagau

SEQ ID NO: 130267 - RNA, 19 nt, Artificial Sequence
  Synthetic
gggagggaggaagagagau

SEQ ID NO: 130268 - RNA, 20 nt, Artificial Sequence
  Synthetic
ggggagggaggaagagagau

SEQ ID NO: 130269 - RNA, 23 nt, Artificial Sequence
  Synthetic
guaggggagggaggaagagagau

SEQ ID NO: 130270 - RNA, 24 nt, Artificial Sequence
  Synthetic
gguaggggagggaggaagagagau

SEQ ID NO: 130271 - RNA, 23 nt, Artificial Sequence
  Synthetic
gauuuuuguauauggugagagau

SEQ ID NO: 130272 - RNA, 19 nt, Artificial Sequence
  Synthetic
guuuuuuuuuuguagagau

SEQ ID NO: 130273 - RNA, 22 nt, Artificial Sequence
  Synthetic
gaacuacaauucagaaugagau

SEQ ID NO: 130274 - RNA, 23 nt, Artificial Sequence
  Synthetic
ggaacuacaauucagaaugagau

SEQ ID NO: 130275 - RNA, 20 nt, Artificial Sequence
  Synthetic
gcuuuuaaucugaaugagau

SEQ ID NO: 130276 - RNA, 18 nt, Artificial Sequence
  Synthetic
gggaauucaacaugagau

SEQ ID NO: 130277 - RNA, 20 nt, Artificial Sequence
  Synthetic
gcuacaauucaagaugagau

SEQ ID NO: 130278 - RNA, 22 nt, Artificial Sequence
  Synthetic
gagcuacaauucaagaugagau

SEQ ID NO: 130279 - RNA, 23 nt, Artificial Sequence
  Synthetic
ggagcuacaauucaagaugagau

SEQ ID NO: 130280 - RNA, 24 nt, Artificial Sequence
  Synthetic
gggagcuacaauucaagaugagau

SEQ ID NO: 130281 - RNA, 21 nt, Artificial Sequence
  Synthetic
gauuacaauucaagaugagau

SEQ ID NO: 130282 - RNA, 22 nt, Artificial Sequence
  Synthetic
ggauuacaauucaagaugagau

SEQ ID NO: 130283 - RNA, 20 nt, Artificial Sequence
  Synthetic
guuacaauucaagaugagau

SEQ ID NO: 130284 - RNA, 22 nt, Artificial Sequence
  Synthetic
gaguuacaauucaagaugagau

SEQ ID NO: 130285 - RNA, 23 nt, Artificial Sequence
  Synthetic
ggaguuacaauucaagaugagau

SEQ ID NO: 130286 - RNA, 20 nt, Artificial Sequence
  Synthetic
guaggaauucaagaugagau

SEQ ID NO: 130287 - RNA, 21 nt, Artificial Sequence
  Synthetic
gauuacaguucuagaugagau

SEQ ID NO: 130288 - RNA, 22 nt, Artificial Sequence
  Synthetic
ggauuacaguucuagaugagau

SEQ ID NO: 130289 - RNA, 21 nt, Artificial Sequence
  Synthetic
gauuacaauuuaauaugagau

SEQ ID NO: 130290 - RNA, 22 nt, Artificial Sequence
  Synthetic
ggauuacaauuuaauaugagau

SEQ ID NO: 130291 - RNA, 23 nt, Artificial Sequence
  Synthetic
gggauuacaauuuaauaugagau

SEQ ID NO: 130292 - RNA, 24 nt, Artificial Sequence
  Synthetic
ggggauuacaauuuaauaugagau

SEQ ID NO: 130293 - RNA, 23 nt, Artificial Sequence
  Synthetic
gauucuuguauaaggggugagau

SEQ ID NO: 130294 - RNA, 22 nt, Artificial Sequence
  Synthetic
gaauuauauuuccacuugagau

SEQ ID NO: 130295 - RNA, 23 nt, Artificial Sequence
  Synthetic
ggaauuauauuuccacuugagau

SEQ ID NO: 130296 - RNA, 24 nt, Artificial Sequence
  Synthetic
gggaauuauauuuccacuugagau

SEQ ID NO: 130297 - RNA, 20 nt, Artificial Sequence
  Synthetic
gcaaauccugagacaaggau

SEQ ID NO: 130298 - RNA, 21 nt, Artificial Sequence
  Synthetic
gaauagugcugaaaugaggau

SEQ ID NO: 130299 - RNA, 23 nt, Artificial Sequence
  Synthetic
gugaauagugcugaaaugaggau

SEQ ID NO: 130300 - RNA, 22 nt, Artificial Sequence
  Synthetic
gaacugcaauucaagacgggau

SEQ ID NO: 130301 - RNA, 23 nt, Artificial Sequence
  Synthetic
ggaacugcaauucaagacgggau

SEQ ID NO: 130302 - RNA, 24 nt, Artificial Sequence
  Synthetic
gggaacugcaauucaagacgggau

SEQ ID NO: 130303 - RNA, 19 nt, Artificial Sequence
  Synthetic
gaacccuugagcuggggau

SEQ ID NO: 130304 - RNA, 20 nt, Artificial Sequence
  Synthetic
ggaacccuugagcuggggau

SEQ ID NO: 130305 - RNA, 18 nt, Artificial Sequence
  Synthetic
gaugcugagauuugggau

SEQ ID NO: 130306 - RNA, 22 nt, Artificial Sequence
  Synthetic
guuugaugcugagauuugggau

SEQ ID NO: 130307 - RNA, 21 nt, Artificial Sequence
  Synthetic
gucuuugccuggcuuugggau

SEQ ID NO: 130308 - RNA, 23 nt, Artificial Sequence
  Synthetic
gugucuuugccuggcuuugggau

SEQ ID NO: 130309 - RNA, 18 nt, Artificial Sequence
  Synthetic
gugaguccacugauggau

SEQ ID NO: 130310 - RNA, 19 nt, Artificial Sequence
  Synthetic
ggugaguccacugauggau

SEQ ID NO: 130311 - RNA, 24 nt, Artificial Sequence
  Synthetic
guuauuucuuuucuucugcuggau

SEQ ID NO: 130312 - RNA, 20 nt, Artificial Sequence
  Synthetic
guuauuagaaauaaaaugau

SEQ ID NO: 130313 - RNA, 18 nt, Artificial Sequence
  Synthetic
gauuguuuuuuuaaugau

SEQ ID NO: 130314 - RNA, 19 nt, Artificial Sequence
  Synthetic
gaaugguccaucugcugau

SEQ ID NO: 130315 - RNA, 21 nt, Artificial Sequence
  Synthetic
gagaaugguccaucugcugau

SEQ ID NO: 130316 - RNA, 22 nt, Artificial Sequence
  Synthetic
ggagaaugguccaucugcugau

SEQ ID NO: 130317 - RNA, 18 nt, Artificial Sequence
  Synthetic
gguuguugugagggugau

SEQ ID NO: 130318 - RNA, 20 nt, Artificial Sequence
  Synthetic
gaaauauaaaauacugugau

SEQ ID NO: 130319 - RNA, 20 nt, Artificial Sequence
  Synthetic
gaaaguaguagaguugugau

SEQ ID NO: 130320 - RNA, 22 nt, Artificial Sequence
  Synthetic
gauucccucuuuuucuauugau

SEQ ID NO: 130321 - RNA, 23 nt, Artificial Sequence
  Synthetic
ggauucccucuuuuucuauugau

SEQ ID NO: 130322 - RNA, 21 nt, Artificial Sequence
  Synthetic
gaaagucaaugguagcuugau

SEQ ID NO: 130323 - RNA, 24 nt, Artificial Sequence
  Synthetic
gaagaaagucaaugguagcuugau

SEQ ID NO: 130324 - RNA, 21 nt, Artificial Sequence
  Synthetic
gaaaggcauugguagcuugau

SEQ ID NO: 130325 - RNA, 24 nt, Artificial Sequence
  Synthetic
gaagaaaggcauugguagcuugau

SEQ ID NO: 130326 - RNA, 21 nt, Artificial Sequence
  Synthetic
gaaagucauugguagcuugau

SEQ ID NO: 130327 - RNA, 24 nt, Artificial Sequence
  Synthetic
gaagaaagucauugguagcuugau

SEQ ID NO: 130328 - RNA, 20 nt, Artificial Sequence
  Synthetic
gcaguauucuauuucuugau

SEQ ID NO: 130329 - RNA, 20 nt, Artificial Sequence
  Synthetic
guaauguuuuguuucuugau

SEQ ID NO: 130330 - RNA, 21 nt, Artificial Sequence
  Synthetic
gguaauguuuuguuucuugau

SEQ ID NO: 130331 - RNA, 22 nt, Artificial Sequence
  Synthetic
ggguaauguuuuguuucuugau

SEQ ID NO: 130332 - RNA, 21 nt, Artificial Sequence
  Synthetic
gcaauagcuagagaagaauau

SEQ ID NO: 130333 - RNA, 22 nt, Artificial Sequence
  Synthetic
ggcaauagcuagagaagaauau

SEQ ID NO: 130334 - RNA, 24 nt, Artificial Sequence
  Synthetic
gaggcaauagcuagagaagaauau

SEQ ID NO: 130335 - RNA, 18 nt, Artificial Sequence
  Synthetic
ggguacuaggcuuaauau

SEQ ID NO: 130336 - RNA, 19 nt, Artificial Sequence
  Synthetic
gauuaauaucaaaacauau

SEQ ID NO: 130337 - RNA, 20 nt, Artificial Sequence
  Synthetic
ggauuaauaucaaaacauau

SEQ ID NO: 130338 - RNA, 22 nt, Artificial Sequence
  Synthetic
gccacuuguaggcagcacauau

SEQ ID NO: 130339 - RNA, 24 nt, Artificial Sequence
  Synthetic
gagccacuuguaggcagcacauau

SEQ ID NO: 130340 - RNA, 18 nt, Artificial Sequence
  Synthetic
gaguagauagcuggauau

SEQ ID NO: 130341 - RNA, 19 nt, Artificial Sequence
  Synthetic
ggaguagauagcuggauau

SEQ ID NO: 130342 - RNA, 18 nt, Artificial Sequence
  Synthetic
gcccauuuugucugauau

SEQ ID NO: 130343 - RNA, 18 nt, Artificial Sequence
  Synthetic
gaggaagaaaucauauau

SEQ ID NO: 130344 - RNA, 20 nt, Artificial Sequence
  Synthetic
guuuucuacuauuauuauau

SEQ ID NO: 130345 - RNA, 19 nt, Artificial Sequence
  Synthetic
gauauuucugccuaacuau

SEQ ID NO: 130346 - RNA, 22 nt, Artificial Sequence
  Synthetic
gaugauauuucugccuaacuau

SEQ ID NO: 130347 - RNA, 24 nt, Artificial Sequence
  Synthetic
gugaugauauuucugccuaacuau

SEQ ID NO: 130348 - RNA, 18 nt, Artificial Sequence
  Synthetic
ggguacuauguucacuau

SEQ ID NO: 130349 - RNA, 21 nt, Artificial Sequence
  Synthetic
guuggguacuauguucacuau

SEQ ID NO: 130350 - RNA, 18 nt, Artificial Sequence
  Synthetic
gagaagcuuuaagacuau

SEQ ID NO: 130351 - RNA, 23 nt, Artificial Sequence
  Synthetic
gucuucuuuugagaaaugccuau

SEQ ID NO: 130352 - RNA, 20 nt, Artificial Sequence
  Synthetic
gccaaaccauaucauccuau

SEQ ID NO: 130353 - RNA, 18 nt, Artificial Sequence
  Synthetic
guuccauuucuguccuau

SEQ ID NO: 130354 - RNA, 18 nt, Artificial Sequence
  Synthetic
gacuuccucucuuccuau

SEQ ID NO: 130355 - RNA, 18 nt, Artificial Sequence
  Synthetic
guauacauggugggcuau

SEQ ID NO: 130356 - RNA, 21 nt, Artificial Sequence
  Synthetic
guuauuuuaauuauaaucuau

SEQ ID NO: 130357 - RNA, 19 nt, Artificial Sequence
  Synthetic
guuaacucauuuucucuau

SEQ ID NO: 130358 - RNA, 20 nt, Artificial Sequence
  Synthetic
gguuaacucauuuucucuau

SEQ ID NO: 130359 - RNA, 18 nt, Artificial Sequence
  Synthetic
gaauuagauguaaaguau

SEQ ID NO: 130360 - RNA, 21 nt, Artificial Sequence
  Synthetic
gaugaauuagauguaaaguau

SEQ ID NO: 130361 - RNA, 23 nt, Artificial Sequence
  Synthetic
gugaugaauuagauguaaaguau

SEQ ID NO: 130362 - RNA, 22 nt, Artificial Sequence
  Synthetic
guucucagcuuugauugcguau

SEQ ID NO: 130363 - RNA, 23 nt, Artificial Sequence
  Synthetic
gguucucagcuuugauugcguau

SEQ ID NO: 130364 - RNA, 18 nt, Artificial Sequence
  Synthetic
gaucugcaugguggguau

SEQ ID NO: 130365 - RNA, 19 nt, Artificial Sequence
  Synthetic
ggaucugcaugguggguau

SEQ ID NO: 130366 - RNA, 20 nt, Artificial Sequence
  Synthetic
gggaucugcaugguggguau

SEQ ID NO: 130367 - RNA, 21 nt, Artificial Sequence
  Synthetic
gucucugccaggcuuugguau

SEQ ID NO: 130368 - RNA, 23 nt, Artificial Sequence
  Synthetic
gugucucugccaggcuuugguau

SEQ ID NO: 130369 - RNA, 21 nt, Artificial Sequence
  Synthetic
gucucugcccggcuuugguau

SEQ ID NO: 130370 - RNA, 23 nt, Artificial Sequence
  Synthetic
gugucucugcccggcuuugguau

SEQ ID NO: 130371 - RNA, 21 nt, Artificial Sequence
  Synthetic
gucuuugccagguuuugguau

SEQ ID NO: 130372 - RNA, 23 nt, Artificial Sequence
  Synthetic
gugucuuugccagguuuugguau

SEQ ID NO: 130373 - RNA, 24 nt, Artificial Sequence
  Synthetic
gaauacaaauuuauuaagcuguau

SEQ ID NO: 130374 - RNA, 18 nt, Artificial Sequence
  Synthetic
ggaaaaugugaaguguau

SEQ ID NO: 130375 - RNA, 21 nt, Artificial Sequence
  Synthetic
gcauucccagcaacaguguau

SEQ ID NO: 130376 - RNA, 21 nt, Artificial Sequence
  Synthetic
guuugucuguuauugguguau

SEQ ID NO: 130377 - RNA, 21 nt, Artificial Sequence
  Synthetic
guuugucuauucuugguguau

SEQ ID NO: 130378 - RNA, 21 nt, Artificial Sequence
  Synthetic
guuugucugucguugguguau

SEQ ID NO: 130379 - RNA, 20 nt, Artificial Sequence
  Synthetic
guucuauaguuugauuguau

SEQ ID NO: 130380 - RNA, 24 nt, Artificial Sequence
  Synthetic
guuccuuaucucccuauuuuguau

SEQ ID NO: 130381 - RNA, 19 nt, Artificial Sequence
  Synthetic
gcuuuuaaauuaaaauuau

SEQ ID NO: 130382 - RNA, 20 nt, Artificial Sequence
  Synthetic
ggcuuuuaaauuaaaauuau

SEQ ID NO: 130383 - RNA, 18 nt, Artificial Sequence
  Synthetic
ggggauuauggggauuau

SEQ ID NO: 130384 - RNA, 23 nt, Artificial Sequence
  Synthetic
gcuauuguaagauuauggauuau

SEQ ID NO: 130385 - RNA, 18 nt, Artificial Sequence
  Synthetic
guuauugauuauuauuau

SEQ ID NO: 130386 - RNA, 23 nt, Artificial Sequence
  Synthetic
gaucuagguugcaugcuccuuau

SEQ ID NO: 130387 - RNA, 24 nt, Artificial Sequence
  Synthetic
ggaucuagguugcaugcuccuuau

SEQ ID NO: 130388 - RNA, 23 nt, Artificial Sequence
  Synthetic
gaucuagguugugugcuccuuau

SEQ ID NO: 130389 - RNA, 24 nt, Artificial Sequence
  Synthetic
ggaucuagguugugugcuccuuau

SEQ ID NO: 130390 - RNA, 23 nt, Artificial Sequence
  Synthetic
guuucauuucuacuugagcuuau

SEQ ID NO: 130391 - RNA, 24 nt, Artificial Sequence
  Synthetic
gaaaauuucuuuguaacaaguuau

SEQ ID NO: 130392 - RNA, 18 nt, Artificial Sequence
  Synthetic
gggaaaaggucagguuau

SEQ ID NO: 130393 - RNA, 18 nt, Artificial Sequence
  Synthetic
ggggauuauggagguuau

SEQ ID NO: 130394 - RNA, 20 nt, Artificial Sequence
  Synthetic
guggggauuauggagguuau

SEQ ID NO: 130395 - RNA, 22 nt, Artificial Sequence
  Synthetic
gucuaugucacaggguuguuau

SEQ ID NO: 130396 - RNA, 24 nt, Artificial Sequence
  Synthetic
gugucuaugucacaggguuguuau

SEQ ID NO: 130397 - RNA, 19 nt, Artificial Sequence
  Synthetic
gaccucauaggguuguuau

SEQ ID NO: 130398 - RNA, 22 nt, Artificial Sequence
  Synthetic
guuaccaguguaauuuuguuau

SEQ ID NO: 130399 - RNA, 23 nt, Artificial Sequence
  Synthetic
gguuaccaguguaauuuuguuau

SEQ ID NO: 130400 - RNA, 24 nt, Artificial Sequence
  Synthetic
ggguuaccaguguaauuuuguuau

SEQ ID NO: 130401 - RNA, 18 nt, Artificial Sequence
  Synthetic
guuaugcuucccauuuau

SEQ ID NO: 130402 - RNA, 18 nt, Artificial Sequence
  Synthetic
gugaauuacacaguuuau

SEQ ID NO: 130403 - RNA, 20 nt, Artificial Sequence
  Synthetic
gugugaauuacacaguuuau

SEQ ID NO: 130404 - RNA, 24 nt, Artificial Sequence
  Synthetic
gcucucugucuguuauugguuuau

SEQ ID NO: 130405 - RNA, 21 nt, Artificial Sequence
  Synthetic
gaaugcuuauacacuguuuau

SEQ ID NO: 130406 - RNA, 22 nt, Artificial Sequence
  Synthetic
ggaaugcuuauacacuguuuau

SEQ ID NO: 130407 - RNA, 23 nt, Artificial Sequence
  Synthetic
gggaaugcuuauacacuguuuau

SEQ ID NO: 130408 - RNA, 18 nt, Artificial Sequence
  Synthetic
gaguuuucguauuuuuau

SEQ ID NO: 130409 - RNA, 21 nt, Artificial Sequence
  Synthetic
gauaaaaacuaugagaaaacu

SEQ ID NO: 130410 - RNA, 19 nt, Artificial Sequence
  Synthetic
gcacauguacccuaaaacu

SEQ ID NO: 130411 - RNA, 21 nt, Artificial Sequence
  Synthetic
gugcacauguacccuaaaacu

SEQ ID NO: 130412 - RNA, 20 nt, Artificial Sequence
  Synthetic
gaacaaagccuuuuuaaacu

SEQ ID NO: 130413 - RNA, 21 nt, Artificial Sequence
  Synthetic
gacuucccagccuccagaacu

SEQ ID NO: 130414 - RNA, 22 nt, Artificial Sequence
  Synthetic
ggacuucccagccuccagaacu

SEQ ID NO: 130415 - RNA, 19 nt, Artificial Sequence
  Synthetic
gucagcaauuccuagaacu

SEQ ID NO: 130416 - RNA, 21 nt, Artificial Sequence
  Synthetic
gagucagcaauuccuagaacu

SEQ ID NO: 130417 - RNA, 22 nt, Artificial Sequence
  Synthetic
ggagucagcaauuccuagaacu

SEQ ID NO: 130418 - RNA, 19 nt, Artificial Sequence
  Synthetic
guacaaucaaauuagaacu

SEQ ID NO: 130419 - RNA, 22 nt, Artificial Sequence
  Synthetic
gccucugaagccaugcggaacu

SEQ ID NO: 130420 - RNA, 23 nt, Artificial Sequence
  Synthetic
ggccucugaagccaugcggaacu

SEQ ID NO: 130421 - RNA, 21 nt, Artificial Sequence
  Synthetic
gggcugggcgaagggggaacu

SEQ ID NO: 130422 - RNA, 22 nt, Artificial Sequence
  Synthetic
ggggcugggcgaagggggaacu

SEQ ID NO: 130423 - RNA, 22 nt, Artificial Sequence
  Synthetic
gucuccccagccaugcugaacu

SEQ ID NO: 130424 - RNA, 23 nt, Artificial Sequence
  Synthetic
ggucuccccagccaugcugaacu

SEQ ID NO: 130425 - RNA, 18 nt, Artificial Sequence
  Synthetic
ggccccaccuccaacacu

SEQ ID NO: 130426 - RNA, 21 nt, Artificial Sequence
  Synthetic
guauuaguccauuuucacacu

SEQ ID NO: 130427 - RNA, 19 nt, Artificial Sequence
  Synthetic
gcaguuucagacauccacu

SEQ ID NO: 130428 - RNA, 24 nt, Artificial Sequence
  Synthetic
gcucaugccuguaaucccagcacu

SEQ ID NO: 130429 - RNA, 19 nt, Artificial Sequence
  Synthetic
gcagagggagggcagcacu

SEQ ID NO: 130430 - RNA, 20 nt, Artificial Sequence
  Synthetic
ggcagagggagggcagcacu

SEQ ID NO: 130431 - RNA, 18 nt, Artificial Sequence
  Synthetic
gacuucgagagaaucacu

SEQ ID NO: 130432 - RNA, 20 nt, Artificial Sequence
  Synthetic
gagacuucgagagaaucacu

SEQ ID NO: 130433 - RNA, 19 nt, Artificial Sequence
  Synthetic
guuucugcauuaauucacu

SEQ ID NO: 130434 - RNA, 21 nt, Artificial Sequence
  Synthetic
guguuucugcauuaauucacu

SEQ ID NO: 130435 - RNA, 19 nt, Artificial Sequence
  Synthetic
guuggaaugaguuaagacu

SEQ ID NO: 130436 - RNA, 19 nt, Artificial Sequence
  Synthetic
guaaaauagacaugagacu

SEQ ID NO: 130437 - RNA, 21 nt, Artificial Sequence
  Synthetic
gaaauucugauucaguagacu

SEQ ID NO: 130438 - RNA, 23 nt, Artificial Sequence
  Synthetic
gccucuuaucucauccugugacu

SEQ ID NO: 130439 - RNA, 24 nt, Artificial Sequence
  Synthetic
ggccucuuaucucauccugugacu

SEQ ID NO: 130440 - RNA, 19 nt, Artificial Sequence
  Synthetic
gacucugauauaauugacu

SEQ ID NO: 130441 - RNA, 18 nt, Artificial Sequence
  Synthetic
ggcaugggcugcuugacu

SEQ ID NO: 130442 - RNA, 20 nt, Artificial Sequence
  Synthetic
guggcaugggcugcuugacu

SEQ ID NO: 130443 - RNA, 23 nt, Artificial Sequence
  Synthetic
gcaguggcaugggcugcuugacu

SEQ ID NO: 130444 - RNA, 23 nt, Artificial Sequence
  Synthetic
gcacauacacaccauggaauacu

SEQ ID NO: 130445 - RNA, 24 nt, Artificial Sequence
  Synthetic
ggcacauacacaccauggaauacu

SEQ ID NO: 130446 - RNA, 19 nt, Artificial Sequence
  Synthetic
gagaaugauuuauaauacu

SEQ ID NO: 130447 - RNA, 20 nt, Artificial Sequence
  Synthetic
ggagaaugauuuauaauacu

SEQ ID NO: 130448 - RNA, 21 nt, Artificial Sequence
  Synthetic
gguuuuguguaguaguauacu

SEQ ID NO: 130449 - RNA, 24 nt, Artificial Sequence
  Synthetic
gaugguuuuguguaguaguauacu

SEQ ID NO: 130450 - RNA, 19 nt, Artificial Sequence
  Synthetic
guuccugaguuacuuuacu

SEQ ID NO: 130451 - RNA, 19 nt, Artificial Sequence
  Synthetic
guccuugcgauaguuuacu

SEQ ID NO: 130452 - RNA, 19 nt, Artificial Sequence
  Synthetic
guucuugcgauaguuuacu

SEQ ID NO: 130453 - RNA, 24 nt, Artificial Sequence
  Synthetic
gccuccagcuuuguucauuuuacu

SEQ ID NO: 130454 - RNA, 20 nt, Artificial Sequence
  Synthetic
gauguuaauccccagaaccu

SEQ ID NO: 130455 - RNA, 21 nt, Artificial Sequence
  Synthetic
gcaagaggauuucuugaaccu

SEQ ID NO: 130456 - RNA, 22 nt, Artificial Sequence
  Synthetic
ggcaagaggauuucuugaaccu

SEQ ID NO: 130457 - RNA, 24 nt, Artificial Sequence
  Synthetic
gaggcaagaggauuucuugaaccu

SEQ ID NO: 130458 - RNA, 23 nt, Artificial Sequence
  Synthetic
gcauuucuguuggauauacaccu

SEQ ID NO: 130459 - RNA, 24 nt, Artificial Sequence
  Synthetic
guuuucauuguucaauucccaccu

SEQ ID NO: 130460 - RNA, 24 nt, Artificial Sequence
  Synthetic
guucucauuguuccauucccaccu

SEQ ID NO: 130461 - RNA, 20 nt, Artificial Sequence
  Synthetic
gaugugcaucagaaucaccu

SEQ ID NO: 130462 - RNA, 18 nt, Artificial Sequence
  Synthetic
gcaaauucuaaaagaccu

SEQ ID NO: 130463 - RNA, 18 nt, Artificial Sequence
  Synthetic
gacacaagagggagaccu

SEQ ID NO: 130464 - RNA, 23 nt, Artificial Sequence
  Synthetic
gcuucaaagagaauaaaauaccu

SEQ ID NO: 130465 - RNA, 24 nt, Artificial Sequence
  Synthetic
guaacaaaccugaacauguacccu

SEQ ID NO: 130466 - RNA, 21 nt, Artificial Sequence
  Synthetic
gucuugguaagcuccaccccu

SEQ ID NO: 130467 - RNA, 22 nt, Artificial Sequence
  Synthetic
ggucuugguaagcuccaccccu

SEQ ID NO: 130468 - RNA, 23 nt, Artificial Sequence
  Synthetic
gaaugcauauacuuacuuccccu

SEQ ID NO: 130469 - RNA, 24 nt, Artificial Sequence
  Synthetic
ggaaugcauauacuuacuuccccu

SEQ ID NO: 130470 - RNA, 21 nt, Artificial Sequence
  Synthetic
gccuguguuuuaaugagcccu

SEQ ID NO: 130471 - RNA, 24 nt, Artificial Sequence
  Synthetic
gcagccuguguuuuaaugagcccu

SEQ ID NO: 130472 - RNA, 19 nt, Artificial Sequence
  Synthetic
guuucuugcaaacugcccu

SEQ ID NO: 130473 - RNA, 19 nt, Artificial Sequence
  Synthetic
gaacaaauuuucacucccu

SEQ ID NO: 130474 - RNA, 18 nt, Artificial Sequence
  Synthetic
guagccacuaaugagccu

SEQ ID NO: 130475 - RNA, 20 nt, Artificial Sequence
  Synthetic
guuggucugggauggggccu

SEQ ID NO: 130476 - RNA, 24 nt, Artificial Sequence
  Synthetic
gucaguuggucugggauggggccu

SEQ ID NO: 130477 - RNA, 20 nt, Artificial Sequence
  Synthetic
gaaagggaaaagacaauccu

SEQ ID NO: 130478 - RNA, 20 nt, Artificial Sequence
  Synthetic
gcagcaggauuuauaauccu

SEQ ID NO: 130479 - RNA, 20 nt, Artificial Sequence
  Synthetic
gcagcaugauuuauaauccu

SEQ ID NO: 130480 - RNA, 20 nt, Artificial Sequence
  Synthetic
guaggaugauuuauaauccu

SEQ ID NO: 130481 - RNA, 20 nt, Artificial Sequence
  Synthetic
gaucaagugggcuucauccu

SEQ ID NO: 130482 - RNA, 22 nt, Artificial Sequence
  Synthetic
gacuaagaaugcccaaccuccu

SEQ ID NO: 130483 - RNA, 24 nt, Artificial Sequence
  Synthetic
gugacuaagaaugcccaaccuccu

SEQ ID NO: 130484 - RNA, 20 nt, Artificial Sequence
  Synthetic
gcagcaugauuuauaguccu

SEQ ID NO: 130485 - RNA, 22 nt, Artificial Sequence
  Synthetic
gucuucuacagaacuagguccu

SEQ ID NO: 130486 - RNA, 19 nt, Artificial Sequence
  Synthetic
guacucucucugauguccu

SEQ ID NO: 130487 - RNA, 21 nt, Artificial Sequence
  Synthetic
gaguacucucucugauguccu

SEQ ID NO: 130488 - RNA, 20 nt, Artificial Sequence
  Synthetic
guagaaugauuuauauuccu

SEQ ID NO: 130489 - RNA, 21 nt, Artificial Sequence
  Synthetic
gguagaaugauuuauauuccu

SEQ ID NO: 130490 - RNA, 19 nt, Artificial Sequence
  Synthetic
guggguccaauuucuuccu

SEQ ID NO: 130491 - RNA, 18 nt, Artificial Sequence
  Synthetic
gaggcuaaauaauuuccu

SEQ ID NO: 130492 - RNA, 20 nt, Artificial Sequence
  Synthetic
gagaggcuaaauaauuuccu

SEQ ID NO: 130493 - RNA, 18 nt, Artificial Sequence
  Synthetic
gcuugacugguuacagcu

SEQ ID NO: 130494 - RNA, 24 nt, Artificial Sequence
  Synthetic
gaaacagcuugacugguuacagcu

SEQ ID NO: 130495 - RNA, 22 nt, Artificial Sequence
  Synthetic
gcaccacggggaaggggcagcu

SEQ ID NO: 130496 - RNA, 24 nt, Artificial Sequence
  Synthetic
gagcaccacggggaaggggcagcu

SEQ ID NO: 130497 - RNA, 22 nt, Artificial Sequence
  Synthetic
guaucucugguagaauucagcu

SEQ ID NO: 130498 - RNA, 18 nt, Artificial Sequence
  Synthetic
gucugguagaauucagcu

SEQ ID NO: 130499 - RNA, 22 nt, Artificial Sequence
  Synthetic
gaaugucugguagaauucagcu

SEQ ID NO: 130500 - RNA, 21 nt, Artificial Sequence
  Synthetic
gaauggugguuaccagaggcu

SEQ ID NO: 130501 - RNA, 24 nt, Artificial Sequence
  Synthetic
guagaauggugguuaccagaggcu

SEQ ID NO: 130502 - RNA, 22 nt, Artificial Sequence
  Synthetic
guuuccauguaguugagcggcu

SEQ ID NO: 130503 - RNA, 22 nt, Artificial Sequence
  Synthetic
gcaccucugguagaauucggcu

SEQ ID NO: 130504 - RNA, 22 nt, Artificial Sequence
  Synthetic
guaccucugguagaauucggcu

SEQ ID NO: 130505 - RNA, 23 nt, Artificial Sequence
  Synthetic
gccacaugcgucccaggauggcu

SEQ ID NO: 130506 - RNA, 23 nt, Artificial Sequence
  Synthetic
gcccauucaguaugauacuggcu

SEQ ID NO: 130507 - RNA, 23 nt, Artificial Sequence
  Synthetic
gcccauucaguaugauauuggcu

SEQ ID NO: 130508 - RNA, 21 nt, Artificial Sequence
  Synthetic
guaaccugucauggcacugcu

SEQ ID NO: 130509 - RNA, 18 nt, Artificial Sequence
  Synthetic
gcugcaagcuucacugcu

SEQ ID NO: 130510 - RNA, 21 nt, Artificial Sequence
  Synthetic
guugcugcaagcuucacugcu

SEQ ID NO: 130511 - RNA, 18 nt, Artificial Sequence
  Synthetic
gcauuucuagcaagugcu

SEQ ID NO: 130512 - RNA, 24 nt, Artificial Sequence
  Synthetic
gauucugcauuucuagcaagugcu

SEQ ID NO: 130513 - RNA, 19 nt, Artificial Sequence
  Synthetic
guuuaauauuagaagugcu

SEQ ID NO: 130514 - RNA, 24 nt, Artificial Sequence
  Synthetic
guuuggacagaguuguuaagugcu

SEQ ID NO: 130515 - RNA, 21 nt, Artificial Sequence
  Synthetic
ggaggaggcugaagcagugcu

SEQ ID NO: 130516 - RNA, 22 nt, Artificial Sequence
  Synthetic
gggaggaggcugaagcagugcu

SEQ ID NO: 130517 - RNA, 19 nt, Artificial Sequence
  Synthetic
guuccugcguuaacgugcu

SEQ ID NO: 130518 - RNA, 23 nt, Artificial Sequence
  Synthetic
gucuguuccugcguuaacgugcu

SEQ ID NO: 130519 - RNA, 18 nt, Artificial Sequence
  Synthetic
ggcucuaugcuaggugcu

SEQ ID NO: 130520 - RNA, 22 nt, Artificial Sequence
  Synthetic
gucaggcucuaugcuaggugcu

SEQ ID NO: 130521 - RNA, 24 nt, Artificial Sequence
  Synthetic
gugucaggcucuaugcuaggugcu

SEQ ID NO: 130522 - RNA, 18 nt, Artificial Sequence
  Synthetic
gagcaucauacuggugcu

SEQ ID NO: 130523 - RNA, 24 nt, Artificial Sequence
  Synthetic
gccuccagcuuuguuauucuugcu

SEQ ID NO: 130524 - RNA, 18 nt, Artificial Sequence
  Synthetic
gcaggacucaaaguugcu

SEQ ID NO: 130525 - RNA, 22 nt, Artificial Sequence
  Synthetic
gcuugcaggacucaaaguugcu

SEQ ID NO: 130526 - RNA, 24 nt, Artificial Sequence
  Synthetic
gagcuugcaggacucaaaguugcu

SEQ ID NO: 130527 - RNA, 19 nt, Artificial Sequence
  Synthetic
guccuugcgauaguuugcu

SEQ ID NO: 130528 - RNA, 19 nt, Artificial Sequence
  Synthetic
guuccucuguuaguuugcu

SEQ ID NO: 130529 - RNA, 20 nt, Artificial Sequence
  Synthetic
gguuccucuguuaguuugcu

SEQ ID NO: 130530 - RNA, 20 nt, Artificial Sequence
  Synthetic
gacaaaaaucaaauaaaucu

SEQ ID NO: 130531 - RNA, 18 nt, Artificial Sequence
  Synthetic
gcacuuacauauaaaucu

SEQ ID NO: 130532 - RNA, 21 nt, Artificial Sequence
  Synthetic
gcaaauaucuucucccaaucu

SEQ ID NO: 130533 - RNA, 19 nt, Artificial Sequence
  Synthetic
gccucaaaagggucaaucu

SEQ ID NO: 130534 - RNA, 19 nt, Artificial Sequence
  Synthetic
gaucccucccaugacaucu

SEQ ID NO: 130535 - RNA, 20 nt, Artificial Sequence
  Synthetic
ggaucccucccaugacaucu

SEQ ID NO: 130536 - RNA, 18 nt, Artificial Sequence
  Synthetic
gcaacaucagcaccaucu

SEQ ID NO: 130537 - RNA, 23 nt, Artificial Sequence
  Synthetic
gaccagcaacaucagcaccaucu

SEQ ID NO: 130538 - RNA, 24 nt, Artificial Sequence
  Synthetic
ggaccagcaacaucagcaccaucu

SEQ ID NO: 130539 - RNA, 19 nt, Artificial Sequence
  Synthetic
guuguacaauuugugaucu

SEQ ID NO: 130540 - RNA, 22 nt, Artificial Sequence
  Synthetic
gaaucugcugaugucuugaucu

SEQ ID NO: 130541 - RNA, 20 nt, Artificial Sequence
  Synthetic
gacuauaaaauaaaauaucu

SEQ ID NO: 130542 - RNA, 18 nt, Artificial Sequence
  Synthetic
guuugcuuuuuuuccucu

SEQ ID NO: 130543 - RNA, 20 nt, Artificial Sequence
  Synthetic
guguuugcuuuuuuuccucu

SEQ ID NO: 130544 - RNA, 22 nt, Artificial Sequence
  Synthetic
gaauuuuauuggagagugcucu

SEQ ID NO: 130545 - RNA, 23 nt, Artificial Sequence
  Synthetic
ggaauuuuauuggagagugcucu

SEQ ID NO: 130546 - RNA, 18 nt, Artificial Sequence
  Synthetic
gaacagacuucuugcucu

SEQ ID NO: 130547 - RNA, 18 nt, Artificial Sequence
  Synthetic
gcaaauccuuucaucucu

SEQ ID NO: 130548 - RNA, 19 nt, Artificial Sequence
  Synthetic
ggcaaauccuuucaucucu

SEQ ID NO: 130549 - RNA, 22 nt, Artificial Sequence
  Synthetic
gacauacagaaucaugaucucu

SEQ ID NO: 130550 - RNA, 18 nt, Artificial Sequence
  Synthetic
guucccaugacccucucu

SEQ ID NO: 130551 - RNA, 19 nt, Artificial Sequence
  Synthetic
gguucccaugacccucucu

SEQ ID NO: 130552 - RNA, 20 nt, Artificial Sequence
  Synthetic
ggguucccaugacccucucu

SEQ ID NO: 130553 - RNA, 21 nt, Artificial Sequence
  Synthetic
gggguucccaugacccucucu

SEQ ID NO: 130554 - RNA, 24 nt, Artificial Sequence
  Synthetic
guugggguucccaugacccucucu

SEQ ID NO: 130555 - RNA, 18 nt, Artificial Sequence
  Synthetic
gcaacuucagcaaagucu

SEQ ID NO: 130556 - RNA, 18 nt, Artificial Sequence
  Synthetic
gacauccacugggagucu

SEQ ID NO: 130557 - RNA, 24 nt, Artificial Sequence
  Synthetic
guuucagacauccacugggagucu

SEQ ID NO: 130558 - RNA, 18 nt, Artificial Sequence
  Synthetic
gguagguuguaugugucu

SEQ ID NO: 130559 - RNA, 21 nt, Artificial Sequence
  Synthetic
gaaucugacaauuaugugucu

SEQ ID NO: 130560 - RNA, 23 nt, Artificial Sequence
  Synthetic
gugaaucugacaauuaugugucu

SEQ ID NO: 130561 - RNA, 24 nt, Artificial Sequence
  Synthetic
ggugaaucugacaauuaugugucu

SEQ ID NO: 130562 - RNA, 18 nt, Artificial Sequence
  Synthetic
guauuuaaauccuugucu

SEQ ID NO: 130563 - RNA, 21 nt, Artificial Sequence
  Synthetic
ggacuaauucucugcaauucu

SEQ ID NO: 130564 - RNA, 23 nt, Artificial Sequence
  Synthetic
guuuuacgauuucucauaauucu

SEQ ID NO: 130565 - RNA, 19 nt, Artificial Sequence
  Synthetic
guauuaucaucuccauucu

SEQ ID NO: 130566 - RNA, 20 nt, Artificial Sequence
  Synthetic
gguauuaucaucuccauucu

SEQ ID NO: 130567 - RNA, 21 nt, Artificial Sequence
  Synthetic
gcacuugcauuuuccucuucu

SEQ ID NO: 130568 - RNA, 19 nt, Artificial Sequence
  Synthetic
gucuauuuaggaguguucu

SEQ ID NO: 130569 - RNA, 20 nt, Artificial Sequence
  Synthetic
gauauaauucuggaauuucu

SEQ ID NO: 130570 - RNA, 18 nt, Artificial Sequence
  Synthetic
gguagauuauguauuucu

SEQ ID NO: 130571 - RNA, 23 nt, Artificial Sequence
  Synthetic
guuuugguagauuauguauuucu

SEQ ID NO: 130572 - RNA, 23 nt, Artificial Sequence
  Synthetic
gucaauauacugauuuccuuucu

SEQ ID NO: 130573 - RNA, 18 nt, Artificial Sequence
  Synthetic
ggacuacuuucuguuucu

SEQ ID NO: 130574 - RNA, 19 nt, Artificial Sequence
  Synthetic
gaaauguuauuuaaaaagu

SEQ ID NO: 130575 - RNA, 19 nt, Artificial Sequence
  Synthetic
guuaccucaccugaaaagu

SEQ ID NO: 130576 - RNA, 19 nt, Artificial Sequence
  Synthetic
guaauauagaaauaaaagu

SEQ ID NO: 130577 - RNA, 19 nt, Artificial Sequence
  Synthetic
gagcaguuguuuucaaagu

SEQ ID NO: 130578 - RNA, 24 nt, Artificial Sequence
  Synthetic
gucuuuuaaaaagguaaauaaagu

SEQ ID NO: 130579 - RNA, 19 nt, Artificial Sequence
  Synthetic
gaauaagagaagguaaagu

SEQ ID NO: 130580 - RNA, 21 nt, Artificial Sequence
  Synthetic
gagaauaagagaagguaaagu

SEQ ID NO: 130581 - RNA, 22 nt, Artificial Sequence
  Synthetic
ggagaauaagagaagguaaagu

SEQ ID NO: 130582 - RNA, 23 nt, Artificial Sequence
  Synthetic
gggagaauaagagaagguaaagu

SEQ ID NO: 130583 - RNA, 19 nt, Artificial Sequence
  Synthetic
gagcucaggagccacaagu

SEQ ID NO: 130584 - RNA, 24 nt, Artificial Sequence
  Synthetic
gacaagagcucaggagccacaagu

SEQ ID NO: 130585 - RNA, 19 nt, Artificial Sequence
  Synthetic
guagagcaugaaaccaagu

SEQ ID NO: 130586 - RNA, 19 nt, Artificial Sequence
  Synthetic
guucucagugucaccaagu

SEQ ID NO: 130587 - RNA, 18 nt, Artificial Sequence
  Synthetic
gacccaugggcuucaagu

SEQ ID NO: 130588 - RNA, 21 nt, Artificial Sequence
  Synthetic
guauugcuugagcccagaagu

SEQ ID NO: 130589 - RNA, 23 nt, Artificial Sequence
  Synthetic
gaguauugcuugagcccagaagu

SEQ ID NO: 130590 - RNA, 18 nt, Artificial Sequence
  Synthetic
gaaaaagaaaagugaagu

SEQ ID NO: 130591 - RNA, 20 nt, Artificial Sequence
  Synthetic
gugaaaaagaaaagugaagu

SEQ ID NO: 130592 - RNA, 18 nt, Artificial Sequence
  Synthetic
guaugauagugaauaagu

SEQ ID NO: 130593 - RNA, 20 nt, Artificial Sequence
  Synthetic
guguaugauagugaauaagu

SEQ ID NO: 130594 - RNA, 20 nt, Artificial Sequence
  Synthetic
gcauguucucacucauaagu

SEQ ID NO: 130595 - RNA, 20 nt, Artificial Sequence
  Synthetic
guuuagcuccacuuauaagu

SEQ ID NO: 130596 - RNA, 22 nt, Artificial Sequence
  Synthetic
guguuuagcuccacuuauaagu

SEQ ID NO: 130597 - RNA, 20 nt, Artificial Sequence
  Synthetic
gcauguucucacucguaagu

SEQ ID NO: 130598 - RNA, 19 nt, Artificial Sequence
  Synthetic
gaauguauaaugauuaagu

SEQ ID NO: 130599 - RNA, 24 nt, Artificial Sequence
  Synthetic
gcauagaauguauaaugauuaagu

SEQ ID NO: 130600 - RNA, 19 nt, Artificial Sequence
  Synthetic
gauaucaucucacaccagu

SEQ ID NO: 130601 - RNA, 21 nt, Artificial Sequence
  Synthetic
gagauaucaucucacaccagu

SEQ ID NO: 130602 - RNA, 21 nt, Artificial Sequence
  Synthetic
gacuuuuuaauaauagccagu

SEQ ID NO: 130603 - RNA, 18 nt, Artificial Sequence
  Synthetic
guaccaucucacgccagu

SEQ ID NO: 130604 - RNA, 19 nt, Artificial Sequence
  Synthetic
gguaccaucucacgccagu

SEQ ID NO: 130605 - RNA, 21 nt, Artificial Sequence
  Synthetic
gagguaccaucucacgccagu

SEQ ID NO: 130606 - RNA, 24 nt, Artificial Sequence
  Synthetic
gcuauuuguuuuauucuuugcagu

SEQ ID NO: 130607 - RNA, 20 nt, Artificial Sequence
  Synthetic
gaaaauggaagcaggagagu

SEQ ID NO: 130608 - RNA, 22 nt, Artificial Sequence
  Synthetic
gugaaaauggaagcaggagagu

SEQ ID NO: 130609 - RNA, 18 nt, Artificial Sequence
  Synthetic
gaaggagggagaaggagu

SEQ ID NO: 130610 - RNA, 22 nt, Artificial Sequence
  Synthetic
gcaagaaggagggagaaggagu

SEQ ID NO: 130611 - RNA, 23 nt, Artificial Sequence
  Synthetic
ggcaagaaggagggagaaggagu

SEQ ID NO: 130612 - RNA, 23 nt, Artificial Sequence
  Synthetic
gcagaucacuugaggccaggagu

SEQ ID NO: 130613 - RNA, 24 nt, Artificial Sequence
  Synthetic
ggcagaucacuugaggccaggagu

SEQ ID NO: 130614 - RNA, 23 nt, Artificial Sequence
  Synthetic
gcuuuuacacuguuggugggagu

SEQ ID NO: 130615 - RNA, 18 nt, Artificial Sequence
  Synthetic
gaugcugagguuuggagu

SEQ ID NO: 130616 - RNA, 22 nt, Artificial Sequence
  Synthetic
gcaugaugcugagguuuggagu

SEQ ID NO: 130617 - RNA, 20 nt, Artificial Sequence
  Synthetic
gauugauugauugauugagu

SEQ ID NO: 130618 - RNA, 24 nt, Artificial Sequence
  Synthetic
gauugauugauugauugauugagu

SEQ ID NO: 130619 - RNA, 23 nt, Artificial Sequence
  Synthetic
gaaucuaggauauuaaaaauagu

SEQ ID NO: 130620 - RNA, 18 nt, Artificial Sequence
  Synthetic
gaggagaaacagaauagu

SEQ ID NO: 130621 - RNA, 19 nt, Artificial Sequence
  Synthetic
ggaggagaaacagaauagu

SEQ ID NO: 130622 - RNA, 24 nt, Artificial Sequence
  Synthetic
guauaaugauuaagucaggauagu

SEQ ID NO: 130623 - RNA, 20 nt, Artificial Sequence
  Synthetic
gaacuugaaaugugcuuagu

SEQ ID NO: 130624 - RNA, 22 nt, Artificial Sequence
  Synthetic
gagaacuugaaaugugcuuagu

SEQ ID NO: 130625 - RNA, 22 nt, Artificial Sequence
  Synthetic
gagaugaagcuagaaaguuagu

SEQ ID NO: 130626 - RNA, 24 nt, Artificial Sequence
  Synthetic
gagagaugaagcuagaaaguuagu

SEQ ID NO: 130627 - RNA, 21 nt, Artificial Sequence
  Synthetic
gaacagugcuucaacaaacgu

SEQ ID NO: 130628 - RNA, 18 nt, Artificial Sequence
  Synthetic
gucccucccacaacacgu

SEQ ID NO: 130629 - RNA, 19 nt, Artificial Sequence
  Synthetic
ggucccucccacaacacgu

SEQ ID NO: 130630 - RNA, 18 nt, Artificial Sequence
  Synthetic
gucucucccuugacacgu

SEQ ID NO: 130631 - RNA, 19 nt, Artificial Sequence
  Synthetic
ggucucucccuugacacgu

SEQ ID NO: 130632 - RNA, 24 nt, Artificial Sequence
  Synthetic
gacuacaggcggccgccaccacgu

SEQ ID NO: 130633 - RNA, 22 nt, Artificial Sequence
  Synthetic
guucucaucccuggcugcacgu

SEQ ID NO: 130634 - RNA, 23 nt, Artificial Sequence
  Synthetic
gguucucaucccuggcugcacgu

SEQ ID NO: 130635 - RNA, 21 nt, Artificial Sequence
  Synthetic
gcaugugcagauuugucacgu

SEQ ID NO: 130636 - RNA, 23 nt, Artificial Sequence
  Synthetic
gugcaugugcagauuugucacgu

SEQ ID NO: 130637 - RNA, 24 nt, Artificial Sequence
  Synthetic
ggugcaugugcagauuugucacgu

SEQ ID NO: 130638 - RNA, 20 nt, Artificial Sequence
  Synthetic
guuucuguguguguauacgu

SEQ ID NO: 130639 - RNA, 18 nt, Artificial Sequence
  Synthetic
gugaugguauuagaaggu

SEQ ID NO: 130640 - RNA, 19 nt, Artificial Sequence
  Synthetic
ggugaugguauuagaaggu

SEQ ID NO: 130641 - RNA, 19 nt, Artificial Sequence
  Synthetic
gaagggggaaggggaaggu

SEQ ID NO: 130642 - RNA, 21 nt, Artificial Sequence
  Synthetic
gagaagggggaaggggaaggu

SEQ ID NO: 130643 - RNA, 22 nt, Artificial Sequence
  Synthetic
ggagaagggggaaggggaaggu

SEQ ID NO: 130644 - RNA, 23 nt, Artificial Sequence
  Synthetic
gggagaagggggaaggggaaggu

SEQ ID NO: 130645 - RNA, 24 nt, Artificial Sequence
  Synthetic
ggggagaagggggaaggggaaggu

SEQ ID NO: 130646 - RNA, 20 nt, Artificial Sequence
  Synthetic
gcacuuugggaggccgaggu

SEQ ID NO: 130647 - RNA, 18 nt, Artificial Sequence
  Synthetic
guucuaagaaacggaggu

SEQ ID NO: 130648 - RNA, 24 nt, Artificial Sequence
  Synthetic
guaaauguucuaagaaacggaggu

SEQ ID NO: 130649 - RNA, 18 nt, Artificial Sequence
  Synthetic
ggguggaucaccugaggu

SEQ ID NO: 130650 - RNA, 21 nt, Artificial Sequence
  Synthetic
gauggguggaucaccugaggu

SEQ ID NO: 130651 - RNA, 23 nt, Artificial Sequence
  Synthetic
gagauggguggaucaccugaggu

SEQ ID NO: 130652 - RNA, 19 nt, Artificial Sequence
  Synthetic
guacuuggaaugcugaggu

SEQ ID NO: 130653 - RNA, 20 nt, Artificial Sequence
  Synthetic
gguacuuggaaugcugaggu

SEQ ID NO: 130654 - RNA, 18 nt, Artificial Sequence
  Synthetic
gggcaggccacuugaggu

SEQ ID NO: 130655 - RNA, 20 nt, Artificial Sequence
  Synthetic
gagggcaggccacuugaggu

SEQ ID NO: 130656 - RNA, 21 nt, Artificial Sequence
  Synthetic
ggagggcaggccacuugaggu

SEQ ID NO: 130657 - RNA, 20 nt, Artificial Sequence
  Synthetic
gcauauucucacucauaggu

SEQ ID NO: 130658 - RNA, 20 nt, Artificial Sequence
  Synthetic
gcauguucucacucauaggu

SEQ ID NO: 130659 - RNA, 20 nt, Artificial Sequence
  Synthetic
gcauauucucauucauaggu

SEQ ID NO: 130660 - RNA, 19 nt, Artificial Sequence
  Synthetic
guuccacagaucucuaggu

SEQ ID NO: 130661 - RNA, 18 nt, Artificial Sequence
  Synthetic
gaaagugaauauguaggu

SEQ ID NO: 130662 - RNA, 24 nt, Artificial Sequence
  Synthetic
gccaugaaaauaagaauacucggu

SEQ ID NO: 130663 - RNA, 24 nt, Artificial Sequence
  Synthetic
gaauuaaacagugguuaccagggu

SEQ ID NO: 130664 - RNA, 19 nt, Artificial Sequence
  Synthetic
guuaccucugggugagggu

SEQ ID NO: 130665 - RNA, 20 nt, Artificial Sequence
  Synthetic
gguuaccucugggugagggu

SEQ ID NO: 130666 - RNA, 22 nt, Artificial Sequence
  Synthetic
gugguuaccucugggugagggu

SEQ ID NO: 130667 - RNA, 21 nt, Artificial Sequence
  Synthetic
guuucgcucuguugcccgggu

SEQ ID NO: 130668 - RNA, 23 nt, Artificial Sequence
  Synthetic
gaguuucgcucuguugcccgggu

SEQ ID NO: 130669 - RNA, 24 nt, Artificial Sequence
  Synthetic
ggaguuucgcucuguugcccgggu

SEQ ID NO: 130670 - RNA, 21 nt, Artificial Sequence
  Synthetic
guucaacucccacuuaugggu

SEQ ID NO: 130671 - RNA, 20 nt, Artificial Sequence
  Synthetic
gaaagugguuaccucugggu

SEQ ID NO: 130672 - RNA, 19 nt, Artificial Sequence
  Synthetic
gcauagggugagguauggu

SEQ ID NO: 130673 - RNA, 22 nt, Artificial Sequence
  Synthetic
gaugcauagggugagguauggu

SEQ ID NO: 130674 - RNA, 24 nt, Artificial Sequence
  Synthetic
gagaugcauagggugagguauggu

SEQ ID NO: 130675 - RNA, 22 nt, Artificial Sequence
  Synthetic
gucuugagccaccccaccuggu

SEQ ID NO: 130676 - RNA, 19 nt, Artificial Sequence
  Synthetic
guugccugacauuccuggu

SEQ ID NO: 130677 - RNA, 20 nt, Artificial Sequence
  Synthetic
gguugccugacauuccuggu

SEQ ID NO: 130678 - RNA, 23 nt, Artificial Sequence
  Synthetic
gaugguugccugacauuccuggu

SEQ ID NO: 130679 - RNA, 18 nt, Artificial Sequence
  Synthetic
gaaacaacaggugcuggu

SEQ ID NO: 130680 - RNA, 19 nt, Artificial Sequence
  Synthetic
ggaaacaacaggugcuggu

SEQ ID NO: 130681 - RNA, 18 nt, Artificial Sequence
  Synthetic
ggagaaugucuuaguggu

SEQ ID NO: 130682 - RNA, 18 nt, Artificial Sequence
  Synthetic
guaacucaaagggguggu

SEQ ID NO: 130683 - RNA, 20 nt, Artificial Sequence
  Synthetic
gaguaacucaaagggguggu

SEQ ID NO: 130684 - RNA, 23 nt, Artificial Sequence
  Synthetic
gaugaguaacucaaagggguggu

SEQ ID NO: 130685 - RNA, 19 nt, Artificial Sequence
  Synthetic
gagagagagaguugguggu

SEQ ID NO: 130686 - RNA, 22 nt, Artificial Sequence
  Synthetic
guaacacuuguauaucauuggu

SEQ ID NO: 130687 - RNA, 23 nt, Artificial Sequence
  Synthetic
gguaacacuuguauaucauuggu

SEQ ID NO: 130688 - RNA, 21 nt, Artificial Sequence
  Synthetic
gaacgcuuuuacacuguuggu

SEQ ID NO: 130689 - RNA, 22 nt, Artificial Sequence
  Synthetic
ggaacgcuuuuacacuguuggu

SEQ ID NO: 130690 - RNA, 19 nt, Artificial Sequence
  Synthetic
gugcuuuuacacuguuggu

SEQ ID NO: 130691 - RNA, 21 nt, Artificial Sequence
  Synthetic
gugugcuuuuacacuguuggu

SEQ ID NO: 130692 - RNA, 22 nt, Artificial Sequence
  Synthetic
ggugugcuuuuacacuguuggu

SEQ ID NO: 130693 - RNA, 20 nt, Artificial Sequence
  Synthetic
gaacauuauacgcuguuggu

SEQ ID NO: 130694 - RNA, 21 nt, Artificial Sequence
  Synthetic
ggaacauuauacgcuguuggu

SEQ ID NO: 130695 - RNA, 22 nt, Artificial Sequence
  Synthetic
gggaacauuauacgcuguuggu

SEQ ID NO: 130696 - RNA, 19 nt, Artificial Sequence
  Synthetic
guugacccucaaacaaugu

SEQ ID NO: 130697 - RNA, 22 nt, Artificial Sequence
  Synthetic
gugaacagugcuacaacaaugu

SEQ ID NO: 130698 - RNA, 18 nt, Artificial Sequence
  Synthetic
gauuaagaaaaauaaugu

SEQ ID NO: 130699 - RNA, 18 nt, Artificial Sequence
  Synthetic
ggacuuuuggguuaaugu

SEQ ID NO: 130700 - RNA, 23 nt, Artificial Sequence
  Synthetic
gacuuggacuuuuggguuaaugu

SEQ ID NO: 130701 - RNA, 24 nt, Artificial Sequence
  Synthetic
ggacuuggacuuuuggguuaaugu

SEQ ID NO: 130702 - RNA, 18 nt, Artificial Sequence
  Synthetic
guccuucccacaacaugu

SEQ ID NO: 130703 - RNA, 19 nt, Artificial Sequence
  Synthetic
gguccuucccacaacaugu

SEQ ID NO: 130704 - RNA, 21 nt, Artificial Sequence
  Synthetic
gagguccuucccacaacaugu

SEQ ID NO: 130705 - RNA, 20 nt, Artificial Sequence
  Synthetic
gaauuacaggaaaaccaugu

SEQ ID NO: 130706 - RNA, 24 nt, Artificial Sequence
  Synthetic
gaauuuugcucucguuguccaugu

SEQ ID NO: 130707 - RNA, 19 nt, Artificial Sequence
  Synthetic
guucuuuuaauugugaugu

SEQ ID NO: 130708 - RNA, 22 nt, Artificial Sequence
  Synthetic
gauauuucuucuuuuuugaugu

SEQ ID NO: 130709 - RNA, 24 nt, Artificial Sequence
  Synthetic
gagauauuucuucuuuuuugaugu

SEQ ID NO: 130710 - RNA, 18 nt, Artificial Sequence
  Synthetic
gucaaagaaacgcuaugu

SEQ ID NO: 130711 - RNA, 20 nt, Artificial Sequence
  Synthetic
guuccaaauuccaaaacugu

SEQ ID NO: 130712 - RNA, 20 nt, Artificial Sequence
  Synthetic
guuuuuguguuuuuaacugu

SEQ ID NO: 130713 - RNA, 18 nt, Artificial Sequence
  Synthetic
guuuggaaagaagacugu

SEQ ID NO: 130714 - RNA, 20 nt, Artificial Sequence
  Synthetic
gaguuuggaaagaagacugu

SEQ ID NO: 130715 - RNA, 19 nt, Artificial Sequence
  Synthetic
gaugucaccuuacaccugu

SEQ ID NO: 130716 - RNA, 21 nt, Artificial Sequence
  Synthetic
gagaugucaccuuacaccugu

SEQ ID NO: 130717 - RNA, 23 nt, Artificial Sequence
  Synthetic
gugagaugucaccuuacaccugu

SEQ ID NO: 130718 - RNA, 21 nt, Artificial Sequence
  Synthetic
gcaacuauucaacucugcugu

SEQ ID NO: 130719 - RNA, 24 nt, Artificial Sequence
  Synthetic
guugcaacuauucaacucugcugu

SEQ ID NO: 130720 - RNA, 23 nt, Artificial Sequence
  Synthetic
gauucaaaugguuauuacucugu

SEQ ID NO: 130721 - RNA, 20 nt, Artificial Sequence
  Synthetic
gcaaaugcuguucucucugu

SEQ ID NO: 130722 - RNA, 20 nt, Artificial Sequence
  Synthetic
guauauuaaaauaagucugu

SEQ ID NO: 130723 - RNA, 20 nt, Artificial Sequence
  Synthetic
gacucagccucccaaagugu

SEQ ID NO: 130724 - RNA, 19 nt, Artificial Sequence
  Synthetic
guugacccucaaacagugu

SEQ ID NO: 130725 - RNA, 24 nt, Artificial Sequence
  Synthetic
gaauuuauagccaaggagcagugu

SEQ ID NO: 130726 - RNA, 19 nt, Artificial Sequence
  Synthetic
gaucccucccaggacgugu

SEQ ID NO: 130727 - RNA, 20 nt, Artificial Sequence
  Synthetic
guuggggggggggggggugu

SEQ ID NO: 130728 - RNA, 21 nt, Artificial Sequence
  Synthetic
gcagaauuucagagugggugu

SEQ ID NO: 130729 - RNA, 20 nt, Artificial Sequence
  Synthetic
gucucccauuauuaaugugu

SEQ ID NO: 130730 - RNA, 20 nt, Artificial Sequence
  Synthetic
guauaaaaaugugucugugu

SEQ ID NO: 130731 - RNA, 18 nt, Artificial Sequence
  Synthetic
guuuugaaguuacauugu

SEQ ID NO: 130732 - RNA, 19 nt, Artificial Sequence
  Synthetic
gguuuugaaguuacauugu

SEQ ID NO: 130733 - RNA, 18 nt, Artificial Sequence
  Synthetic
gcauguuugggucauugu

SEQ ID NO: 130734 - RNA, 20 nt, Artificial Sequence
  Synthetic
gaaaaagcuugaaauauugu

SEQ ID NO: 130735 - RNA, 21 nt, Artificial Sequence
  Synthetic
guuuucuugcuauugaguugu

SEQ ID NO: 130736 - RNA, 23 nt, Artificial Sequence
  Synthetic
guuaacauuguaaaaguuguugu

SEQ ID NO: 130737 - RNA, 18 nt, Artificial Sequence
  Synthetic
gaauguuuuuccauuugu

SEQ ID NO: 130738 - RNA, 19 nt, Artificial Sequence
  Synthetic
ggaauguuuuuccauuugu

SEQ ID NO: 130739 - RNA, 23 nt, Artificial Sequence
  Synthetic
gcauggaauguuuuuccauuugu

SEQ ID NO: 130740 - RNA, 22 nt, Artificial Sequence
  Synthetic
gucuuuuuuucuacugauuugu

SEQ ID NO: 130741 - RNA, 20 nt, Artificial Sequence
  Synthetic
guuuuuucuuguaaguuugu

SEQ ID NO: 130742 - RNA, 24 nt, Artificial Sequence
  Synthetic
guuuguuuuuucuuguaaguuugu

SEQ ID NO: 130743 - RNA, 21 nt, Artificial Sequence
  Synthetic
guuuuuuucuuguacguuugu

SEQ ID NO: 130744 - RNA, 18 nt, Artificial Sequence
  Synthetic
gucuugggccucuuuugu

SEQ ID NO: 130745 - RNA, 23 nt, Artificial Sequence
  Synthetic
gaacugucuugggccucuuuugu

SEQ ID NO: 130746 - RNA, 24 nt, Artificial Sequence
  Synthetic
ggaacugucuugggccucuuuugu

SEQ ID NO: 130747 - RNA, 20 nt, Artificial Sequence
  Synthetic
guuuccugccuuguuuuugu

SEQ ID NO: 130748 - RNA, 19 nt, Artificial Sequence
  Synthetic
guggcaauugucaaaaauu

SEQ ID NO: 130749 - RNA, 20 nt, Artificial Sequence
  Synthetic
gaaaaaaaaaacccaaaauu

SEQ ID NO: 130750 - RNA, 18 nt, Artificial Sequence
  Synthetic
gaucacugaagcaaaauu

SEQ ID NO: 130751 - RNA, 19 nt, Artificial Sequence
  Synthetic
gaacauuauuuagaaaauu

SEQ ID NO: 130752 - RNA, 20 nt, Artificial Sequence
  Synthetic
guuuggcuggauaugaaauu

SEQ ID NO: 130753 - RNA, 19 nt, Artificial Sequence
  Synthetic
gcugugugagucugaaauu

SEQ ID NO: 130754 - RNA, 20 nt, Artificial Sequence
  Synthetic
ggcugugugagucugaaauu

SEQ ID NO: 130755 - RNA, 23 nt, Artificial Sequence
  Synthetic
guuggcugugugagucugaaauu

SEQ ID NO: 130756 - RNA, 19 nt, Artificial Sequence
  Synthetic
gauuacaggaacuacaauu

SEQ ID NO: 130757 - RNA, 20 nt, Artificial Sequence
  Synthetic
ggauuacaggaacuacaauu

SEQ ID NO: 130758 - RNA, 21 nt, Artificial Sequence
  Synthetic
gggauuacaggaacuacaauu

SEQ ID NO: 130759 - RNA, 22 nt, Artificial Sequence
  Synthetic
ggggauuacaggaacuacaauu

SEQ ID NO: 130760 - RNA, 18 nt, Artificial Sequence
  Synthetic
gauguuagggugucaauu

SEQ ID NO: 130761 - RNA, 20 nt, Artificial Sequence
  Synthetic
gugauguuagggugucaauu

SEQ ID NO: 130762 - RNA, 18 nt, Artificial Sequence
  Synthetic
guaaaaaggaaaagaauu

SEQ ID NO: 130763 - RNA, 19 nt, Artificial Sequence
  Synthetic
guaaaguaugagaauaauu

SEQ ID NO: 130764 - RNA, 20 nt, Artificial Sequence
  Synthetic
gcauuuucucacucauaauu

SEQ ID NO: 130765 - RNA, 18 nt, Artificial Sequence
  Synthetic
gaaaauuauuuuauaauu

SEQ ID NO: 130766 - RNA, 19 nt, Artificial Sequence
  Synthetic
ggaaaauuauuuuauaauu

SEQ ID NO: 130767 - RNA, 18 nt, Artificial Sequence
  Synthetic
gaaaaaaaaucaguaauu

SEQ ID NO: 130768 - RNA, 18 nt, Artificial Sequence
  Synthetic
ggccccaccaccaacauu

SEQ ID NO: 130769 - RNA, 22 nt, Artificial Sequence
  Synthetic
gccaggccccaccaccaacauu

SEQ ID NO: 130770 - RNA, 18 nt, Artificial Sequence
  Synthetic
ggccccaccuccaacauu

SEQ ID NO: 130771 - RNA, 18 nt, Artificial Sequence
  Synthetic
gacuauaugccagacauu

SEQ ID NO: 130772 - RNA, 19 nt, Artificial Sequence
  Synthetic
gagaaggaaaggagacauu

SEQ ID NO: 130773 - RNA, 20 nt, Artificial Sequence
  Synthetic
gauugcaugucuuugccauu

SEQ ID NO: 130774 - RNA, 23 nt, Artificial Sequence
  Synthetic
guugauugcaugucuuugccauu

SEQ ID NO: 130775 - RNA, 24 nt, Artificial Sequence
  Synthetic
gguugauugcaugucuuugccauu

SEQ ID NO: 130776 - RNA, 21 nt, Artificial Sequence
  Synthetic
gccucaccucucaauagcauu

SEQ ID NO: 130777 - RNA, 22 nt, Artificial Sequence
  Synthetic
ggccucaccucucaauagcauu

SEQ ID NO: 130778 - RNA, 23 nt, Artificial Sequence
  Synthetic
guccuuugucagaucuaugcauu

SEQ ID NO: 130779 - RNA, 20 nt, Artificial Sequence
  Synthetic
guccccacccaaaucucauu

SEQ ID NO: 130780 - RNA, 22 nt, Artificial Sequence
  Synthetic
guguccccacccaaaucucauu

SEQ ID NO: 130781 - RNA, 20 nt, Artificial Sequence
  Synthetic
guccccacucaaaucucauu

SEQ ID NO: 130782 - RNA, 18 nt, Artificial Sequence
  Synthetic
guucacuaguauuucauu

SEQ ID NO: 130783 - RNA, 19 nt, Artificial Sequence
  Synthetic
gguucacuaguauuucauu

SEQ ID NO: 130784 - RNA, 19 nt, Artificial Sequence
  Synthetic
gauuuuggauuuucagauu

SEQ ID NO: 130785 - RNA, 20 nt, Artificial Sequence
  Synthetic
ggauuuuggauuuucagauu

SEQ ID NO: 130786 - RNA, 21 nt, Artificial Sequence
  Synthetic
gauuucagauuuuuucagauu

SEQ ID NO: 130787 - RNA, 22 nt, Artificial Sequence
  Synthetic
ggauuucagauuuuuucagauu

SEQ ID NO: 130788 - RNA, 24 nt, Artificial Sequence
  Synthetic
gauauauuguuugaugcugagauu

SEQ ID NO: 130789 - RNA, 20 nt, Artificial Sequence
  Synthetic
guuuaaguucccuauagauu

SEQ ID NO: 130790 - RNA, 20 nt, Artificial Sequence
  Synthetic
guuugaguucauuguagauu

SEQ ID NO: 130791 - RNA, 24 nt, Artificial Sequence
  Synthetic
guuuguuugaguucauuguagauu

SEQ ID NO: 130792 - RNA, 20 nt, Artificial Sequence
  Synthetic
guuugaguucuuuguagauu

SEQ ID NO: 130793 - RNA, 24 nt, Artificial Sequence
  Synthetic
guuuguuugaguucuuuguagauu

SEQ ID NO: 130794 - RNA, 19 nt, Artificial Sequence
  Synthetic
gaaaugacaacaaaggauu

SEQ ID NO: 130795 - RNA, 22 nt, Artificial Sequence
  Synthetic
guugaaaugacaacaaaggauu

SEQ ID NO: 130796 - RNA, 23 nt, Artificial Sequence
  Synthetic
gaaauuguaccaggaaguggauu

SEQ ID NO: 130797 - RNA, 21 nt, Artificial Sequence
  Synthetic
gcuuuuagaguuuuuuggauu

SEQ ID NO: 130798 - RNA, 22 nt, Artificial Sequence
  Synthetic
gucauuucuuagcugugugauu

SEQ ID NO: 130799 - RNA, 19 nt, Artificial Sequence
  Synthetic
guuuuguuuugauuugauu

SEQ ID NO: 130800 - RNA, 20 nt, Artificial Sequence
  Synthetic
gguuuuguuuugauuugauu

SEQ ID NO: 130801 - RNA, 20 nt, Artificial Sequence
  Synthetic
guauugggugcauaaauauu

SEQ ID NO: 130802 - RNA, 24 nt, Artificial Sequence
  Synthetic
guaaaaagccagauaguaaauauu

SEQ ID NO: 130803 - RNA, 22 nt, Artificial Sequence
  Synthetic
guuaagccccaccuccaauauu

SEQ ID NO: 130804 - RNA, 20 nt, Artificial Sequence
  Synthetic
gcuugaguuccuuguauauu

SEQ ID NO: 130805 - RNA, 23 nt, Artificial Sequence
  Synthetic
guagcuugaguuccuuguauauu

SEQ ID NO: 130806 - RNA, 18 nt, Artificial Sequence
  Synthetic
gucaucaguuuuuauauu

SEQ ID NO: 130807 - RNA, 19 nt, Artificial Sequence
  Synthetic
ggucaucaguuuuuauauu

SEQ ID NO: 130808 - RNA, 20 nt, Artificial Sequence
  Synthetic
guuucugcaucuuagcuauu

SEQ ID NO: 130809 - RNA, 23 nt, Artificial Sequence
  Synthetic
guuguuucugcaucuuagcuauu

SEQ ID NO: 130810 - RNA, 24 nt, Artificial Sequence
  Synthetic
gguuguuucugcaucuuagcuauu

SEQ ID NO: 130811 - RNA, 19 nt, Artificial Sequence
  Synthetic
gaucuguacuuuagcuauu

SEQ ID NO: 130812 - RNA, 20 nt, Artificial Sequence
  Synthetic
gauucuauaucuuggcuauu

SEQ ID NO: 130813 - RNA, 23 nt, Artificial Sequence
  Synthetic
guugauucuauaucuuggcuauu

SEQ ID NO: 130814 - RNA, 20 nt, Artificial Sequence
  Synthetic
gacuucauaccuuugcuauu

SEQ ID NO: 130815 - RNA, 23 nt, Artificial Sequence
  Synthetic
gcugacuucauaccuuugcuauu

SEQ ID NO: 130816 - RNA, 24 nt, Artificial Sequence
  Synthetic
ggcugacuucauaccuuugcuauu

SEQ ID NO: 130817 - RNA, 19 nt, Artificial Sequence
  Synthetic
guuccacgccuuugcuauu

SEQ ID NO: 130818 - RNA, 20 nt, Artificial Sequence
  Synthetic
gguuccacgccuuugcuauu

SEQ ID NO: 130819 - RNA, 23 nt, Artificial Sequence
  Synthetic
guugguuccacgccuuugcuauu

SEQ ID NO: 130820 - RNA, 24 nt, Artificial Sequence
  Synthetic
gguugguuccacgccuuugcuauu

SEQ ID NO: 130821 - RNA, 19 nt, Artificial Sequence
  Synthetic
guuccaagucuuugcuauu

SEQ ID NO: 130822 - RNA, 20 nt, Artificial Sequence
  Synthetic
gguuccaagucuuugcuauu

SEQ ID NO: 130823 - RNA, 19 nt, Artificial Sequence
  Synthetic
guuccaggucuuugcuauu

SEQ ID NO: 130824 - RNA, 20 nt, Artificial Sequence
  Synthetic
gguuccaggucuuugcuauu

SEQ ID NO: 130825 - RNA, 24 nt, Artificial Sequence
  Synthetic
gauugguuccaggucuuugcuauu

SEQ ID NO: 130826 - RNA, 20 nt, Artificial Sequence
  Synthetic
gauuccaugucuuugcuauu

SEQ ID NO: 130827 - RNA, 21 nt, Artificial Sequence
  Synthetic
ggauuccaugucuuugcuauu

SEQ ID NO: 130828 - RNA, 24 nt, Artificial Sequence
  Synthetic
gauggauuccaugucuuugcuauu

SEQ ID NO: 130829 - RNA, 23 nt, Artificial Sequence
  Synthetic
guugauuccaugucuuugcuauu

SEQ ID NO: 130830 - RNA, 24 nt, Artificial Sequence
  Synthetic
gguugauuccaugucuuugcuauu

SEQ ID NO: 130831 - RNA, 20 nt, Artificial Sequence
  Synthetic
gaugucauaaaagcaguauu

SEQ ID NO: 130832 - RNA, 20 nt, Artificial Sequence
  Synthetic
gauuccaugucuuugguauu

SEQ ID NO: 130833 - RNA, 23 nt, Artificial Sequence
  Synthetic
guugauuccaugucuuugguauu

SEQ ID NO: 130834 - RNA, 24 nt, Artificial Sequence
  Synthetic
gguugauuccaugucuuugguauu

SEQ ID NO: 130835 - RNA, 20 nt, Artificial Sequence
  Synthetic
guaggaguuccuuguguauu

SEQ ID NO: 130836 - RNA, 23 nt, Artificial Sequence
  Synthetic
guuguaggaguuccuuguguauu

SEQ ID NO: 130837 - RNA, 21 nt, Artificial Sequence
  Synthetic
gacauuuggucaaacauuauu

SEQ ID NO: 130838 - RNA, 23 nt, Artificial Sequence
  Synthetic
gagacauuuggucaaacauuauu

SEQ ID NO: 130839 - RNA, 21 nt, Artificial Sequence
  Synthetic
gauauuuggucaaacauuauu

SEQ ID NO: 130840 - RNA, 20 nt, Artificial Sequence
  Synthetic
guagccuccagcauauuauu

SEQ ID NO: 130841 - RNA, 18 nt, Artificial Sequence
  Synthetic
guuuuuagcaaauuuauu

SEQ ID NO: 130842 - RNA, 23 nt, Artificial Sequence
  Synthetic
gaauuuauuuuuauauauuuauu

SEQ ID NO: 130843 - RNA, 24 nt, Artificial Sequence
  Synthetic
ggaauuuauuuuuauauauuuauu

SEQ ID NO: 130844 - RNA, 18 nt, Artificial Sequence
  Synthetic
guuuuaaaaguauuuauu

SEQ ID NO: 130845 - RNA, 18 nt, Artificial Sequence
  Synthetic
gguaaggaagacuuuauu

SEQ ID NO: 130846 - RNA, 20 nt, Artificial Sequence
  Synthetic
gugguaaggaagacuuuauu

SEQ ID NO: 130847 - RNA, 22 nt, Artificial Sequence
  Synthetic
gugugguaaggaagacuuuauu

SEQ ID NO: 130848 - RNA, 18 nt, Artificial Sequence
  Synthetic
guuugccaguauuuuauu

SEQ ID NO: 130849 - RNA, 19 nt, Artificial Sequence
  Synthetic
gguuugccaguauuuuauu

SEQ ID NO: 130850 - RNA, 24 nt, Artificial Sequence
  Synthetic
gauuugguuugccaguauuuuauu

SEQ ID NO: 130851 - RNA, 18 nt, Artificial Sequence
  Synthetic
gaaaaauauuucacacuu

SEQ ID NO: 130852 - RNA, 18 nt, Artificial Sequence
  Synthetic
gauccagcaaucccacuu

SEQ ID NO: 130853 - RNA, 19 nt, Artificial Sequence
  Synthetic
ggauccagcaaucccacuu

SEQ ID NO: 130854 - RNA, 24 nt, Artificial Sequence
  Synthetic
guucucaucguucaacucccacuu

SEQ ID NO: 130855 - RNA, 24 nt, Artificial Sequence
  Synthetic
guucucacuguuccacucccacuu

SEQ ID NO: 130856 - RNA, 24 nt, Artificial Sequence
  Synthetic
guuuucauuguuuaucucccacuu

SEQ ID NO: 130857 - RNA, 24 nt, Artificial Sequence
  Synthetic
guucucauuguucaauucccacuu

SEQ ID NO: 130858 - RNA, 18 nt, Artificial Sequence
  Synthetic
gauccaauaauuccacuu

SEQ ID NO: 130859 - RNA, 18 nt, Artificial Sequence
  Synthetic
guauuauuaauuccacuu

SEQ ID NO: 130860 - RNA, 19 nt, Artificial Sequence
  Synthetic
gguauuauuaauuccacuu

SEQ ID NO: 130861 - RNA, 19 nt, Artificial Sequence
  Synthetic
gccuguaaucucagcacuu

SEQ ID NO: 130862 - RNA, 20 nt, Artificial Sequence
  Synthetic
gaaacuuuggacuuggacuu

SEQ ID NO: 130863 - RNA, 23 nt, Artificial Sequence
  Synthetic
gaugaaacuuuggacuuggacuu

SEQ ID NO: 130864 - RNA, 21 nt, Artificial Sequence
  Synthetic
gcaucuguuguugccugacuu

SEQ ID NO: 130865 - RNA, 20 nt, Artificial Sequence
  Synthetic
gaaaucagggagucugacuu

SEQ ID NO: 130866 - RNA, 19 nt, Artificial Sequence
  Synthetic
guauguagagaaaauacuu

SEQ ID NO: 130867 - RNA, 21 nt, Artificial Sequence
  Synthetic
gaucgcuuuccagauauacuu

SEQ ID NO: 130868 - RNA, 24 nt, Artificial Sequence
  Synthetic
gcagaucgcuuuccagauauacuu

SEQ ID NO: 130869 - RNA, 20 nt, Artificial Sequence
  Synthetic
guuuauuucauuuuauacuu

SEQ ID NO: 130870 - RNA, 18 nt, Artificial Sequence
  Synthetic
guacuuccuuaugaccuu

SEQ ID NO: 130871 - RNA, 19 nt, Artificial Sequence
  Synthetic
gcaauugaauaaauaccuu

SEQ ID NO: 130872 - RNA, 20 nt, Artificial Sequence
  Synthetic
ggcaauugaauaaauaccuu

SEQ ID NO: 130873 - RNA, 18 nt, Artificial Sequence
  Synthetic
gggauaaaaaauuaccuu

SEQ ID NO: 130874 - RNA, 20 nt, Artificial Sequence
  Synthetic
gagggauaaaaaauuaccuu

SEQ ID NO: 130875 - RNA, 22 nt, Artificial Sequence
  Synthetic
gugagggauaaaaaauuaccuu

SEQ ID NO: 130876 - RNA, 22 nt, Artificial Sequence
  Synthetic
gucucacuguaauuuccgccuu

SEQ ID NO: 130877 - RNA, 20 nt, Artificial Sequence
  Synthetic
gcuacagagcaauaugccuu

SEQ ID NO: 130878 - RNA, 19 nt, Artificial Sequence
  Synthetic
guagaaaaagagagagcuu

SEQ ID NO: 130879 - RNA, 20 nt, Artificial Sequence
  Synthetic
gguagaaaaagagagagcuu

SEQ ID NO: 130880 - RNA, 18 nt, Artificial Sequence
  Synthetic
gguggauugccugagcuu

SEQ ID NO: 130881 - RNA, 21 nt, Artificial Sequence
  Synthetic
gcagguggauugccugagcuu

SEQ ID NO: 130882 - RNA, 23 nt, Artificial Sequence
  Synthetic
gaaauuaaaaaaaaaaaacgcuu

SEQ ID NO: 130883 - RNA, 20 nt, Artificial Sequence
  Synthetic
guagugucuuugccuggcuu

SEQ ID NO: 130884 - RNA, 18 nt, Artificial Sequence
  Synthetic
gcauaaaaauucaugcuu

SEQ ID NO: 130885 - RNA, 21 nt, Artificial Sequence
  Synthetic
guagcauaaaaauucaugcuu

SEQ ID NO: 130886 - RNA, 18 nt, Artificial Sequence
  Synthetic
guauguaugaaucugcuu

SEQ ID NO: 130887 - RNA, 20 nt, Artificial Sequence
  Synthetic
gcauuauuuuuuguuugcuu

SEQ ID NO: 130888 - RNA, 18 nt, Artificial Sequence
  Synthetic
guuuuaaaagguaaucuu

SEQ ID NO: 130889 - RNA, 19 nt, Artificial Sequence
  Synthetic
guggaggcaauuggaucuu

SEQ ID NO: 130890 - RNA, 20 nt, Artificial Sequence
  Synthetic
gguggaggcaauuggaucuu

SEQ ID NO: 130891 - RNA, 20 nt, Artificial Sequence
  Synthetic
guuuuuaaauuaauuaucuu

SEQ ID NO: 130892 - RNA, 21 nt, Artificial Sequence
  Synthetic
gcauuuguaauugccugucuu

SEQ ID NO: 130893 - RNA, 18 nt, Artificial Sequence
  Synthetic
gguagauuauucugucuu

SEQ ID NO: 130894 - RNA, 19 nt, Artificial Sequence
  Synthetic
gauccuguuuuuaauucuu

SEQ ID NO: 130895 - RNA, 19 nt, Artificial Sequence
  Synthetic
gccacuuguaugucuucuu

SEQ ID NO: 130896 - RNA, 20 nt, Artificial Sequence
  Synthetic
ggccacuuguaugucuucuu

SEQ ID NO: 130897 - RNA, 23 nt, Artificial Sequence
  Synthetic
guuggccacuuguaugucuucuu

SEQ ID NO: 130898 - RNA, 19 nt, Artificial Sequence
  Synthetic
guuuuaaauauaauuucuu

SEQ ID NO: 130899 - RNA, 24 nt, Artificial Sequence
  Synthetic
guuuaguuuuaaauauaauuucuu

SEQ ID NO: 130900 - RNA, 21 nt, Artificial Sequence
  Synthetic
gauauacugauuugcuuucuu

SEQ ID NO: 130901 - RNA, 18 nt, Artificial Sequence
  Synthetic
gugccaguuggccaaguu

SEQ ID NO: 130902 - RNA, 23 nt, Artificial Sequence
  Synthetic
gaaaacugaaggcuagagaaguu

SEQ ID NO: 130903 - RNA, 19 nt, Artificial Sequence
  Synthetic
gacucugauucaguaaguu

SEQ ID NO: 130904 - RNA, 19 nt, Artificial Sequence
  Synthetic
gauaaacccauuguaaguu

SEQ ID NO: 130905 - RNA, 18 nt, Artificial Sequence
  Synthetic
guugaugaacaggcaguu

SEQ ID NO: 130906 - RNA, 19 nt, Artificial Sequence
  Synthetic
guugaacgguaguucaguu

SEQ ID NO: 130907 - RNA, 20 nt, Artificial Sequence
  Synthetic
gguugaacgguaguucaguu

SEQ ID NO: 130908 - RNA, 21 nt, Artificial Sequence
  Synthetic
ggguugaacgguaguucaguu

SEQ ID NO: 130909 - RNA, 24 nt, Artificial Sequence
  Synthetic
gcuggguugaacgguaguucaguu

SEQ ID NO: 130910 - RNA, 21 nt, Artificial Sequence
  Synthetic
gccaaaccauaucauagaguu

SEQ ID NO: 130911 - RNA, 18 nt, Artificial Sequence
  Synthetic
gaugaggauaugggaguu

SEQ ID NO: 130912 - RNA, 20 nt, Artificial Sequence
  Synthetic
gagaugaggauaugggaguu

SEQ ID NO: 130913 - RNA, 18 nt, Artificial Sequence
  Synthetic
gucuuauuguggugaguu

SEQ ID NO: 130914 - RNA, 21 nt, Artificial Sequence
  Synthetic
gaagucuuauuguggugaguu

SEQ ID NO: 130915 - RNA, 20 nt, Artificial Sequence
  Synthetic
guuagaugaagaagguaguu

SEQ ID NO: 130916 - RNA, 21 nt, Artificial Sequence
  Synthetic
gucucuggugccgaaaagguu

SEQ ID NO: 130917 - RNA, 18 nt, Artificial Sequence
  Synthetic
ggugggucacauaagguu

SEQ ID NO: 130918 - RNA, 21 nt, Artificial Sequence
  Synthetic
gcaggugggucacauaagguu

SEQ ID NO: 130919 - RNA, 22 nt, Artificial Sequence
  Synthetic
ggcaggugggucacauaagguu

SEQ ID NO: 130920 - RNA, 24 nt, Artificial Sequence
  Synthetic
gaggcaggugggucacauaagguu

SEQ ID NO: 130921 - RNA, 20 nt, Artificial Sequence
  Synthetic
guuacugguccguucagguu

SEQ ID NO: 130922 - RNA, 23 nt, Artificial Sequence
  Synthetic
gcuuuugcuguaucccagagguu

SEQ ID NO: 130923 - RNA, 24 nt, Artificial Sequence
  Synthetic
gauauauuacaugaugccgagguu

SEQ ID NO: 130924 - RNA, 18 nt, Artificial Sequence
  Synthetic
gcgcaugaugcugagguu

SEQ ID NO: 130925 - RNA, 23 nt, Artificial Sequence
  Synthetic
gaauagcgcaugaugcugagguu

SEQ ID NO: 130926 - RNA, 24 nt, Artificial Sequence
  Synthetic
ggaauagcgcaugaugcugagguu

SEQ ID NO: 130927 - RNA, 21 nt, Artificial Sequence
  Synthetic
guauugcaugaugcugagguu

SEQ ID NO: 130928 - RNA, 23 nt, Artificial Sequence
  Synthetic
gaguauugcaugaugcugagguu

SEQ ID NO: 130929 - RNA, 24 nt, Artificial Sequence
  Synthetic
ggaguauugcaugaugcugagguu

SEQ ID NO: 130930 - RNA, 19 nt, Artificial Sequence
  Synthetic
gaucuugguguugacgguu

SEQ ID NO: 130931 - RNA, 18 nt, Artificial Sequence
  Synthetic
gggaguuauuggaggguu

SEQ ID NO: 130932 - RNA, 21 nt, Artificial Sequence
  Synthetic
gaugggaguuauuggaggguu

SEQ ID NO: 130933 - RNA, 23 nt, Artificial Sequence
  Synthetic
gagaugggaguuauuggaggguu

SEQ ID NO: 130934 - RNA, 21 nt, Artificial Sequence
  Synthetic
gaucacacuggcuucuggguu

SEQ ID NO: 130935 - RNA, 22 nt, Artificial Sequence
  Synthetic
ggaucacacuggcuucuggguu

SEQ ID NO: 130936 - RNA, 19 nt, Artificial Sequence
  Synthetic
gcaaggguuugaaaugguu

SEQ ID NO: 130937 - RNA, 18 nt, Artificial Sequence
  Synthetic
gcucguuacugguauguu

SEQ ID NO: 130938 - RNA, 21 nt, Artificial Sequence
  Synthetic
gcugcucguuacugguauguu

SEQ ID NO: 130939 - RNA, 20 nt, Artificial Sequence
  Synthetic
guaaauaaggcaccccuguu

SEQ ID NO: 130940 - RNA, 21 nt, Artificial Sequence
  Synthetic
gaaagucagugguagccuguu

SEQ ID NO: 130941 - RNA, 20 nt, Artificial Sequence
  Synthetic
guauuuauugaaugccuguu

SEQ ID NO: 130942 - RNA, 19 nt, Artificial Sequence
  Synthetic
gcaaccuccaccuccuguu

SEQ ID NO: 130943 - RNA, 20 nt, Artificial Sequence
  Synthetic
guuuucaguuuuuggcuguu

SEQ ID NO: 130944 - RNA, 21 nt, Artificial Sequence
  Synthetic
gguuuucaguuuuuggcuguu

SEQ ID NO: 130945 - RNA, 23 nt, Artificial Sequence
  Synthetic
gugguuuucaguuuuuggcuguu

SEQ ID NO: 130946 - RNA, 24 nt, Artificial Sequence
  Synthetic
ggugguuuucaguuuuuggcuguu

SEQ ID NO: 130947 - RNA, 18 nt, Artificial Sequence
  Synthetic
gucuuuuuauuuucuguu

SEQ ID NO: 130948 - RNA, 19 nt, Artificial Sequence
  Synthetic
guccaugaguucaauuguu

SEQ ID NO: 130949 - RNA, 19 nt, Artificial Sequence
  Synthetic
guuuuuaugcuuuauuguu

SEQ ID NO: 130950 - RNA, 18 nt, Artificial Sequence
  Synthetic
ggaaguaacuaacuuguu

SEQ ID NO: 130951 - RNA, 18 nt, Artificial Sequence
  Synthetic
gagauaagaaauguuguu

SEQ ID NO: 130952 - RNA, 20 nt, Artificial Sequence
  Synthetic
gaugcuuauacacuguuguu

SEQ ID NO: 130953 - RNA, 21 nt, Artificial Sequence
  Synthetic
ggaugcuuauacacuguuguu

SEQ ID NO: 130954 - RNA, 22 nt, Artificial Sequence
  Synthetic
gggaugcuuauacacuguuguu

SEQ ID NO: 130955 - RNA, 23 nt, Artificial Sequence
  Synthetic
ggggaugcuuauacacuguuguu

SEQ ID NO: 130956 - RNA, 18 nt, Artificial Sequence
  Synthetic
gugguuccaugcaaauuu

SEQ ID NO: 130957 - RNA, 23 nt, Artificial Sequence
  Synthetic
gucaaauauuuuaacagaaauuu

SEQ ID NO: 130958 - RNA, 21 nt, Artificial Sequence
  Synthetic
gugaaugaguucgagaaauuu

SEQ ID NO: 130959 - RNA, 22 nt, Artificial Sequence
  Synthetic
ggugaaugaguucgagaaauuu

SEQ ID NO: 130960 - RNA, 24 nt, Artificial Sequence
  Synthetic
guggugaaugaguucgagaaauuu

SEQ ID NO: 130961 - RNA, 20 nt, Artificial Sequence
  Synthetic
guuuuuaagcugcuaaauuu

SEQ ID NO: 130962 - RNA, 18 nt, Artificial Sequence
  Synthetic
gcgccuggccaggaauuu

SEQ ID NO: 130963 - RNA, 24 nt, Artificial Sequence
  Synthetic
gccacugcgccuggccaggaauuu

SEQ ID NO: 130964 - RNA, 24 nt, Artificial Sequence
  Synthetic
gauaacccauuaaccuauuaauuu

SEQ ID NO: 130965 - RNA, 19 nt, Artificial Sequence
  Synthetic
guugguuugguuuuaauuu

SEQ ID NO: 130966 - RNA, 18 nt, Artificial Sequence
  Synthetic
gaacauauucaaacauuu

SEQ ID NO: 130967 - RNA, 23 nt, Artificial Sequence
  Synthetic
guuccaaaguugcuuccacauuu

SEQ ID NO: 130968 - RNA, 18 nt, Artificial Sequence
  Synthetic
gaucacugagugccauuu

SEQ ID NO: 130969 - RNA, 20 nt, Artificial Sequence
  Synthetic
gagaucacugagugccauuu

SEQ ID NO: 130970 - RNA, 20 nt, Artificial Sequence
  Synthetic
gauguauguuuuacucauuu

SEQ ID NO: 130971 - RNA, 18 nt, Artificial Sequence
  Synthetic
guauuaaaaagaagauuu

SEQ ID NO: 130972 - RNA, 19 nt, Artificial Sequence
  Synthetic
gugcuagagaugcagauuu

SEQ ID NO: 130973 - RNA, 21 nt, Artificial Sequence
  Synthetic
guuaccagaggcuguggauuu

SEQ ID NO: 130974 - RNA, 22 nt, Artificial Sequence
  Synthetic
gguuaccagaggcuguggauuu

SEQ ID NO: 130975 - RNA, 24 nt, Artificial Sequence
  Synthetic
gugguuaccagaggcuguggauuu

SEQ ID NO: 130976 - RNA, 20 nt, Artificial Sequence
  Synthetic
guagaaaaaaauacauauuu

SEQ ID NO: 130977 - RNA, 20 nt, Artificial Sequence
  Synthetic
gaauauuuaaaauuauauuu

SEQ ID NO: 130978 - RNA, 23 nt, Artificial Sequence
  Synthetic
guauaacauaaucacauuuauuu

SEQ ID NO: 130979 - RNA, 19 nt, Artificial Sequence
  Synthetic
guauaucucacauuuauuu

SEQ ID NO: 130980 - RNA, 20 nt, Artificial Sequence
  Synthetic
gauuaaaaaaaauuuuauuu

SEQ ID NO: 130981 - RNA, 22 nt, Artificial Sequence
  Synthetic
gagauuaaaaaaaauuuuauuu

SEQ ID NO: 130982 - RNA, 18 nt, Artificial Sequence
  Synthetic
ggggcaugagcaaacuuu

SEQ ID NO: 130983 - RNA, 19 nt, Artificial Sequence
  Synthetic
gggggcaugagcaaacuuu

SEQ ID NO: 130984 - RNA, 24 nt, Artificial Sequence
  Synthetic
gcaugccuguaaucccagcacuuu

SEQ ID NO: 130985 - RNA, 20 nt, Artificial Sequence
  Synthetic
gucuguaaucccagcacuuu

SEQ ID NO: 130986 - RNA, 22 nt, Artificial Sequence
  Synthetic
guaauggucacgucaggccuuu

SEQ ID NO: 130987 - RNA, 24 nt, Artificial Sequence
  Synthetic
guguaauggucacgucaggccuuu

SEQ ID NO: 130988 - RNA, 22 nt, Artificial Sequence
  Synthetic
guauaguuuugaggguuccuuu

SEQ ID NO: 130989 - RNA, 19 nt, Artificial Sequence
  Synthetic
gucugaugggcuuuccuuu

SEQ ID NO: 130990 - RNA, 23 nt, Artificial Sequence
  Synthetic
guuagucugaugggcuuuccuuu

SEQ ID NO: 130991 - RNA, 20 nt, Artificial Sequence
  Synthetic
gcucaaaaauuuucagcuuu

SEQ ID NO: 130992 - RNA, 22 nt, Artificial Sequence
  Synthetic
gcgcucaaaaauuuucagcuuu

SEQ ID NO: 130993 - RNA, 23 nt, Artificial Sequence
  Synthetic
ggcgcucaaaaauuuucagcuuu

SEQ ID NO: 130994 - RNA, 18 nt, Artificial Sequence
  Synthetic
gcauuucuagugagcuuu

SEQ ID NO: 130995 - RNA, 19 nt, Artificial Sequence
  Synthetic
gucacucaggacuugcuuu

SEQ ID NO: 130996 - RNA, 20 nt, Artificial Sequence
  Synthetic
ggucacucaggacuugcuuu

SEQ ID NO: 130997 - RNA, 23 nt, Artificial Sequence
  Synthetic
guaggucacucaggacuugcuuu

SEQ ID NO: 130998 - RNA, 21 nt, Artificial Sequence
  Synthetic
gaauuuugucaaaugcucuuu

SEQ ID NO: 130999 - RNA, 24 nt, Artificial Sequence
  Synthetic
guugaauuuugucaaaugcucuuu

SEQ ID NO: 131000 - RNA, 20 nt, Artificial Sequence
  Synthetic
guugucaauuugugcucuuu

SEQ ID NO: 131001 - RNA, 21 nt, Artificial Sequence
  Synthetic
gguugucaauuugugcucuuu

SEQ ID NO: 131002 - RNA, 20 nt, Artificial Sequence
  Synthetic
gaccuucuuucucucucuuu

SEQ ID NO: 131003 - RNA, 20 nt, Artificial Sequence
  Synthetic
gcucuucacaccaagucuuu

SEQ ID NO: 131004 - RNA, 22 nt, Artificial Sequence
  Synthetic
gagcucuucacaccaagucuuu

SEQ ID NO: 131005 - RNA, 18 nt, Artificial Sequence
  Synthetic
ggagcugggauggucuuu

SEQ ID NO: 131006 - RNA, 24 nt, Artificial Sequence
  Synthetic
gacacuggagcugggauggucuuu

SEQ ID NO: 131007 - RNA, 19 nt, Artificial Sequence
  Synthetic
guugaaaauucuuuucuuu

SEQ ID NO: 131008 - RNA, 20 nt, Artificial Sequence
  Synthetic
gguugaaaauucuuuucuuu

SEQ ID NO: 131009 - RNA, 21 nt, Artificial Sequence
  Synthetic
ggguugaaaauucuuuucuuu

SEQ ID NO: 131010 - RNA, 20 nt, Artificial Sequence
  Synthetic
gcaaagggaaaaggaaguuu

SEQ ID NO: 131011 - RNA, 18 nt, Artificial Sequence
  Synthetic
gauuaauuuugccaguuu

SEQ ID NO: 131012 - RNA, 20 nt, Artificial Sequence
  Synthetic
gcagacugcaaacucaguuu

SEQ ID NO: 131013 - RNA, 19 nt, Artificial Sequence
  Synthetic
gacgaauaauuuugaguuu

SEQ ID NO: 131014 - RNA, 23 nt, Artificial Sequence
  Synthetic
gcauggggaauucuucauaguuu

SEQ ID NO: 131015 - RNA, 24 nt, Artificial Sequence
  Synthetic
ggcauggggaauucuucauaguuu

SEQ ID NO: 131016 - RNA, 20 nt, Artificial Sequence
  Synthetic
guagguguguggauucguuu

SEQ ID NO: 131017 - RNA, 19 nt, Artificial Sequence
  Synthetic
gagagaauaaagcagguuu

SEQ ID NO: 131018 - RNA, 20 nt, Artificial Sequence
  Synthetic
ggagagaauaaagcagguuu

SEQ ID NO: 131019 - RNA, 23 nt, Artificial Sequence
  Synthetic
gaaacagaauauaaaguggguuu

SEQ ID NO: 131020 - RNA, 19 nt, Artificial Sequence
  Synthetic
gaaugguaucagaugguuu

SEQ ID NO: 131021 - RNA, 21 nt, Artificial Sequence
  Synthetic
gcaauauuugacuuucuguuu

SEQ ID NO: 131022 - RNA, 18 nt, Artificial Sequence
  Synthetic
gaagcaauaauuuuguuu

SEQ ID NO: 131023 - RNA, 19 nt, Artificial Sequence
  Synthetic
ggaagcaauaauuuuguuu

SEQ ID NO: 131024 - RNA, 21 nt, Artificial Sequence
  Synthetic
gacuacauauuguuccauuuu

SEQ ID NO: 131025 - RNA, 18 nt, Artificial Sequence
  Synthetic
gaauucuuuauucauuuu

SEQ ID NO: 131026 - RNA, 18 nt, Artificial Sequence
  Synthetic
guucaaaauaaauauuuu

SEQ ID NO: 131027 - RNA, 19 nt, Artificial Sequence
  Synthetic
gguucaaaauaaauauuuu

SEQ ID NO: 131028 - RNA, 18 nt, Artificial Sequence
  Synthetic
guuuuuguuuuuccuuuu

SEQ ID NO: 131029 - RNA, 23 nt, Artificial Sequence
  Synthetic
guuuuguuuuuguuuuuccuuuu

SEQ ID NO: 131030 - RNA, 18 nt, Artificial Sequence
  Synthetic
gaaacaauuugaucuuuu

SEQ ID NO: 131031 - RNA, 19 nt, Artificial Sequence
  Synthetic
ggaaacaauuugaucuuuu

SEQ ID NO: 131032 - RNA, 23 nt, Artificial Sequence
  Synthetic
gccuucaugguggcgaugguuuu

SEQ ID NO: 131033 - RNA, 19 nt, Artificial Sequence
  Synthetic
guucuauuuuuaauguuuu

SEQ ID NO: 131034 - RNA, 22 nt, Artificial Sequence
  Synthetic
guaguucuauuuuuaauguuuu

SEQ ID NO: 131035 - RNA, 23 nt, Artificial Sequence
  Synthetic
gguaguucuauuuuuaauguuuu

SEQ ID NO: 131036 - RNA, 23 nt, Artificial Sequence
  Synthetic
gaacuagguccuuuggguguuuu

SEQ ID NO: 131037 - RNA, 19 nt, Artificial Sequence
  Synthetic
gaaaauauacuauauuuuu

SEQ ID NO: 131038 - RNA, 20 nt, Artificial Sequence
  Synthetic
ggaaaauauacuauauuuuu

SEQ ID NO: 131039 - RNA, 23 nt, Artificial Sequence
  Synthetic
gauuucguuuccuuuuuauuuuu

SEQ ID NO: 131040 - RNA, 18 nt, Artificial Sequence
  Synthetic
guaagccaauuuguuuuu

SEQ ID NO: 131041 - RNA, 19 nt, Artificial Sequence
  Synthetic
guuuauuuuaucuuuuuuu

SEQ ID NO: 131042 - RNA, 19 nt, Artificial Sequence
  Synthetic
gauuguuaccauuuuuuuu

SEQ ID NO: 131043 - RNA, 22 nt, Artificial Sequence
  Synthetic
gaugauuguuaccauuuuuuuu

SEQ ID NO: 131044 - RNA, 19 nt, Artificial Sequence
  Synthetic
guuucuuuguuuuuuuuuu

SEQ ID NO: 131045 - RNA, 19 nt, Artificial Sequence
  Synthetic
guaauccauuuuuuuuuuu

SEQ ID NO: 131046 - RNA, 19 nt, Artificial Sequence
  Synthetic
gcuaauuuuuuuuuuuuuu

SEQ ID NO: 131047 - RNA, 20 nt, Artificial Sequence
  Synthetic
ggcuaauuuuuuuuuuuuuu

SEQ ID NO: 131048 - RNA, 24 nt, Artificial Sequence
  Synthetic
gccuggcuaauuuuuuuuuuuuuu

SEQ ID NO: 131049 - RNA, 23 nt, Artificial Sequence
  Synthetic
gcaaaucaaaaaaaaaaaaaaaa

SEQ ID NO: 131050 - RNA, 21 nt, Artificial Sequence
  Synthetic
gucucaaaaaaaaaaaaaaaa

SEQ ID NO: 131051 - RNA, 22 nt, Artificial Sequence
  Synthetic
gauuucuuuaaaaaaaaaaaaa

SEQ ID NO: 131052 - RNA, 18 nt, Artificial Sequence
  Synthetic
guacuuuaaaaaaaaaaa

SEQ ID NO: 131053 - RNA, 23 nt, Artificial Sequence
  Synthetic
gaaacguacuuuaaaaaaaaaaa

SEQ ID NO: 131054 - RNA, 20 nt, Artificial Sequence
  Synthetic
gcauaguacugaaaaaaaaa

SEQ ID NO: 131055 - RNA, 20 nt, Artificial Sequence
  Synthetic
gcagagacacaacaaaaaaa

SEQ ID NO: 131056 - RNA, 21 nt, Artificial Sequence
  Synthetic
ggcagagacacaacaaaaaaa

SEQ ID NO: 131057 - RNA, 20 nt, Artificial Sequence
  Synthetic
gaagagagcaaagaaaaaaa

SEQ ID NO: 131058 - RNA, 22 nt, Artificial Sequence
  Synthetic
gagaagagagcaaagaaaaaaa

SEQ ID NO: 131059 - RNA, 21 nt, Artificial Sequence
  Synthetic
ggcagagacacaaccaaaaaa

SEQ ID NO: 131060 - RNA, 22 nt, Artificial Sequence
  Synthetic
gggcagagacacaaccaaaaaa

SEQ ID NO: 131061 - RNA, 20 nt, Artificial Sequence
  Synthetic
gaaacugaaaaagcaaaaaa

SEQ ID NO: 131062 - RNA, 21 nt, Artificial Sequence
  Synthetic
ggguaagcuuagaugaaaaaa

SEQ ID NO: 131063 - RNA, 23 nt, Artificial Sequence
  Synthetic
guaaccagaguuccuugaaaaaa

SEQ ID NO: 131064 - RNA, 18 nt, Artificial Sequence
  Synthetic
guaauuugaaaacaaaaa

SEQ ID NO: 131065 - RNA, 22 nt, Artificial Sequence
  Synthetic
gacaauagaauacaaacaaaaa

SEQ ID NO: 131066 - RNA, 23 nt, Artificial Sequence
  Synthetic
ggacaauagaauacaaacaaaaa

SEQ ID NO: 131067 - RNA, 21 nt, Artificial Sequence
  Synthetic
gauuguaacgugcaacaaaaa

SEQ ID NO: 131068 - RNA, 22 nt, Artificial Sequence
  Synthetic
ggauuguaacgugcaacaaaaa

SEQ ID NO: 131069 - RNA, 19 nt, Artificial Sequence
  Synthetic
gcucucagcaaaccaaaaa

SEQ ID NO: 131070 - RNA, 18 nt, Artificial Sequence
  Synthetic
gcccucuggacucaaaaa

SEQ ID NO: 131071 - RNA, 21 nt, Artificial Sequence
  Synthetic
gcugcccucuggacucaaaaa

SEQ ID NO: 131072 - RNA, 20 nt, Artificial Sequence
  Synthetic
gcaaaaaagaugcagaaaaa

SEQ ID NO: 131073 - RNA, 18 nt, Artificial Sequence
  Synthetic
gaauuuuuaagagaaaaa

SEQ ID NO: 131074 - RNA, 18 nt, Artificial Sequence
  Synthetic
guuuuuguuaaggaaaaa

SEQ ID NO: 131075 - RNA, 20 nt, Artificial Sequence
  Synthetic
guguuuuuguuaaggaaaaa

SEQ ID NO: 131076 - RNA, 23 nt, Artificial Sequence
  Synthetic
gauguguuuuuguuaaggaaaaa

SEQ ID NO: 131077 - RNA, 24 nt, Artificial Sequence
  Synthetic
ggauguguuuuuguuaaggaaaaa

SEQ ID NO: 131078 - RNA, 20 nt, Artificial Sequence
  Synthetic
gaaagaaaacuugugaaaaa

SEQ ID NO: 131079 - RNA, 18 nt, Artificial Sequence
  Synthetic
guccucaaaaaauaaaaa

SEQ ID NO: 131080 - RNA, 18 nt, Artificial Sequence
  Synthetic
ggauuuuuaaaauaaaaa

SEQ ID NO: 131081 - RNA, 19 nt, Artificial Sequence
  Synthetic
gggauuuuuaaaauaaaaa

SEQ ID NO: 131082 - RNA, 20 nt, Artificial Sequence
  Synthetic
guuucucaaaauaauaaaaa

SEQ ID NO: 131083 - RNA, 24 nt, Artificial Sequence
  Synthetic
gaauguuucucaaaauaauaaaaa

SEQ ID NO: 131084 - RNA, 19 nt, Artificial Sequence
  Synthetic
guuccucaaaacauaaaaa

SEQ ID NO: 131085 - RNA, 22 nt, Artificial Sequence
  Synthetic
gaaguuccucaaaacauaaaaa

SEQ ID NO: 131086 - RNA, 23 nt, Artificial Sequence
  Synthetic
ggaaguuccucaaaacauaaaaa

SEQ ID NO: 131087 - RNA, 22 nt, Artificial Sequence
  Synthetic
gaauacuacguagccauaaaaa

SEQ ID NO: 131088 - RNA, 23 nt, Artificial Sequence
  Synthetic
ggaauacuacguagccauaaaaa

SEQ ID NO: 131089 - RNA, 18 nt, Artificial Sequence
  Synthetic
gaauuuagaauauaaaaa

SEQ ID NO: 131090 - RNA, 22 nt, Artificial Sequence
  Synthetic
guauauccaaaagaauuaaaaa

SEQ ID NO: 131091 - RNA, 18 nt, Artificial Sequence
  Synthetic
ggaaugauuucuuaaaaa

SEQ ID NO: 131092 - RNA, 18 nt, Artificial Sequence
  Synthetic
ggaaauuguuuuuaaaaa

SEQ ID NO: 131093 - RNA, 21 nt, Artificial Sequence
  Synthetic
gaauacuacucagccacaaaa

SEQ ID NO: 131094 - RNA, 22 nt, Artificial Sequence
  Synthetic
ggaauacuacucagccacaaaa

SEQ ID NO: 131095 - RNA, 21 nt, Artificial Sequence
  Synthetic
gaaauacauaaucuaccaaaa

SEQ ID NO: 131096 - RNA, 22 nt, Artificial Sequence
  Synthetic
gaaaagacuagagaacccaaaa

SEQ ID NO: 131097 - RNA, 23 nt, Artificial Sequence
  Synthetic
ggaaaagacuagagaacccaaaa

SEQ ID NO: 131098 - RNA, 19 nt, Artificial Sequence
  Synthetic
gacacacccugggccaaaa

SEQ ID NO: 131099 - RNA, 18 nt, Artificial Sequence
  Synthetic
gguugaauaagagcaaaa

SEQ ID NO: 131100 - RNA, 21 nt, Artificial Sequence
  Synthetic
gcucaaauaaacucugcaaaa

SEQ ID NO: 131101 - RNA, 19 nt, Artificial Sequence
  Synthetic
gcaaggcuuuaucucaaaa

SEQ ID NO: 131102 - RNA, 18 nt, Artificial Sequence
  Synthetic
gauggcauuuacagaaaa

SEQ ID NO: 131103 - RNA, 21 nt, Artificial Sequence
  Synthetic
gaauacugugcagccagaaaa

SEQ ID NO: 131104 - RNA, 22 nt, Artificial Sequence
  Synthetic
ggaauacugugcagccagaaaa

SEQ ID NO: 131105 - RNA, 23 nt, Artificial Sequence
  Synthetic
gggaauacugugcagccagaaaa

SEQ ID NO: 131106 - RNA, 18 nt, Artificial Sequence
  Synthetic
ggcaaaauguucagaaaa

SEQ ID NO: 131107 - RNA, 21 nt, Artificial Sequence
  Synthetic
gaaauaacaacucagagaaaa

SEQ ID NO: 131108 - RNA, 20 nt, Artificial Sequence
  Synthetic
gaagggaaguuuagagaaaa

SEQ ID NO: 131109 - RNA, 22 nt, Artificial Sequence
  Synthetic
gagaagggaaguuuagagaaaa

SEQ ID NO: 131110 - RNA, 24 nt, Artificial Sequence
  Synthetic
gcgagaagggaaguuuagagaaaa

SEQ ID NO: 131111 - RNA, 22 nt, Artificial Sequence
  Synthetic
guacaaaaaauacuuaggaaaa

SEQ ID NO: 131112 - RNA, 23 nt, Artificial Sequence
  Synthetic
gguacaaaaaauacuuaggaaaa

SEQ ID NO: 131113 - RNA, 24 nt, Artificial Sequence
  Synthetic
ggguacaaaaaauacuuaggaaaa

SEQ ID NO: 131114 - RNA, 18 nt, Artificial Sequence
  Synthetic
gaaaaaucuacuggaaaa

SEQ ID NO: 131115 - RNA, 19 nt, Artificial Sequence
  Synthetic
ggaaaaaucuacuggaaaa

SEQ ID NO: 131116 - RNA, 18 nt, Artificial Sequence
  Synthetic
gggaaggggagcugaaaa

SEQ ID NO: 131117 - RNA, 20 nt, Artificial Sequence
  Synthetic
gugggaaggggagcugaaaa

SEQ ID NO: 131118 - RNA, 19 nt, Artificial Sequence
  Synthetic
guacuauuuagcaauaaaa

SEQ ID NO: 131119 - RNA, 20 nt, Artificial Sequence
  Synthetic
gguacuauuuagcaauaaaa

SEQ ID NO: 131120 - RNA, 22 nt, Artificial Sequence
  Synthetic
gcgguacuauuuagcaauaaaa

SEQ ID NO: 131121 - RNA, 19 nt, Artificial Sequence
  Synthetic
guugguuaaaauaauaaaa

SEQ ID NO: 131122 - RNA, 21 nt, Artificial Sequence
  Synthetic
gaauacuacgcaaccauaaaa

SEQ ID NO: 131123 - RNA, 22 nt, Artificial Sequence
  Synthetic
ggaauacuacgcaaccauaaaa

SEQ ID NO: 131124 - RNA, 21 nt, Artificial Sequence
  Synthetic
gaauacuaugcaaccauaaaa

SEQ ID NO: 131125 - RNA, 22 nt, Artificial Sequence
  Synthetic
ggaauacuaugcaaccauaaaa

SEQ ID NO: 131126 - RNA, 21 nt, Artificial Sequence
  Synthetic
gaauacugugaagccauaaaa

SEQ ID NO: 131127 - RNA, 22 nt, Artificial Sequence
  Synthetic
ggaauacugugaagccauaaaa

SEQ ID NO: 131128 - RNA, 20 nt, Artificial Sequence
  Synthetic
gacacuaugcagccauaaaa

SEQ ID NO: 131129 - RNA, 21 nt, Artificial Sequence
  Synthetic
ggacacuaugcagccauaaaa

SEQ ID NO: 131130 - RNA, 22 nt, Artificial Sequence
  Synthetic
gggacacuaugcagccauaaaa

SEQ ID NO: 131131 - RNA, 21 nt, Artificial Sequence
  Synthetic
gaauacucugcagccauaaaa

SEQ ID NO: 131132 - RNA, 22 nt, Artificial Sequence
  Synthetic
ggaauacucugcagccauaaaa

SEQ ID NO: 131133 - RNA, 24 nt, Artificial Sequence
  Synthetic
guggaauacucugcagccauaaaa

SEQ ID NO: 131134 - RNA, 21 nt, Artificial Sequence
  Synthetic
gaauacuacucagccauaaaa

SEQ ID NO: 131135 - RNA, 21 nt, Artificial Sequence
  Synthetic
gaauauuacucagccauaaaa

SEQ ID NO: 131136 - RNA, 22 nt, Artificial Sequence
  Synthetic
ggaauauuacucagccauaaaa

SEQ ID NO: 131137 - RNA, 21 nt, Artificial Sequence
  Synthetic
gaauauuauucagucauaaaa

SEQ ID NO: 131138 - RNA, 22 nt, Artificial Sequence
  Synthetic
ggaauauuauucagucauaaaa

SEQ ID NO: 131139 - RNA, 20 nt, Artificial Sequence
  Synthetic
gauuuauuauuaugauaaaa

SEQ ID NO: 131140 - RNA, 23 nt, Artificial Sequence
  Synthetic
guauaaaucaauaaaacuuaaaa

SEQ ID NO: 131141 - RNA, 24 nt, Artificial Sequence
  Synthetic
gguauaaaucaauaaaacuuaaaa

SEQ ID NO: 131142 - RNA, 23 nt, Artificial Sequence
  Synthetic
gaacuuccagaacuauguuaaaa

SEQ ID NO: 131143 - RNA, 24 nt, Artificial Sequence
  Synthetic
ggaacuuccagaacuauguuaaaa

SEQ ID NO: 131144 - RNA, 21 nt, Artificial Sequence
  Synthetic
gacucuuauuucucuuuaaaa

SEQ ID NO: 131145 - RNA, 20 nt, Artificial Sequence
  Synthetic
guauuugaaaaauuuuaaaa

SEQ ID NO: 131146 - RNA, 20 nt, Artificial Sequence
  Synthetic
guuuauucaauuuuuuaaaa

SEQ ID NO: 131147 - RNA, 21 nt, Artificial Sequence
  Synthetic
gccucagccucccaaaacaaa

SEQ ID NO: 131148 - RNA, 20 nt, Artificial Sequence
  Synthetic
gaaacaaacaaacaaacaaa

SEQ ID NO: 131149 - RNA, 23 nt, Artificial Sequence
  Synthetic
gaagaaacaaacaaacaaacaaa

SEQ ID NO: 131150 - RNA, 18 nt, Artificial Sequence
  Synthetic
gugguacauauacacaaa

SEQ ID NO: 131151 - RNA, 24 nt, Artificial Sequence
  Synthetic
gaaaacgugguacauauacacaaa

SEQ ID NO: 131152 - RNA, 24 nt, Artificial Sequence
  Synthetic
gcaacaaaagccaaaacggacaaa

SEQ ID NO: 131153 - RNA, 24 nt, Artificial Sequence
  Synthetic
gcaacaaaagccaaaauugacaaa

SEQ ID NO: 131154 - RNA, 18 nt, Artificial Sequence
  Synthetic
gaagccaaaauugacaaa

SEQ ID NO: 131155 - RNA, 24 nt, Artificial Sequence
  Synthetic
gcaacagaagccaaaauugacaaa

SEQ ID NO: 131156 - RNA, 18 nt, Artificial Sequence
  Synthetic
ggucucugggaggccaaa

SEQ ID NO: 131157 - RNA, 19 nt, Artificial Sequence
  Synthetic
gaaaggccagaauuccaaa

SEQ ID NO: 131158 - RNA, 19 nt, Artificial Sequence
  Synthetic
gaggaaucuauacagcaaa

SEQ ID NO: 131159 - RNA, 18 nt, Artificial Sequence
  Synthetic
gauggggaaaagagcaaa

SEQ ID NO: 131160 - RNA, 20 nt, Artificial Sequence
  Synthetic
gagauggggaaaagagcaaa

SEQ ID NO: 131161 - RNA, 18 nt, Artificial Sequence
  Synthetic
gcaguuugccuuaucaaa

SEQ ID NO: 131162 - RNA, 19 nt, Artificial Sequence
  Synthetic
ggcaguuugccuuaucaaa

SEQ ID NO: 131163 - RNA, 22 nt, Artificial Sequence
  Synthetic
guuuuucuuauucgaguucaaa

SEQ ID NO: 131164 - RNA, 24 nt, Artificial Sequence
  Synthetic
gcguuuuucuuauucgaguucaaa

SEQ ID NO: 131165 - RNA, 18 nt, Artificial Sequence
  Synthetic
gggugcuuuaaaaagaaa

SEQ ID NO: 131166 - RNA, 24 nt, Artificial Sequence
  Synthetic
gaaacugggugcuuuaaaaagaaa

SEQ ID NO: 131167 - RNA, 18 nt, Artificial Sequence
  Synthetic
gauguguaaugaaagaaa

SEQ ID NO: 131168 - RNA, 19 nt, Artificial Sequence
  Synthetic
ggauguguaaugaaagaaa

SEQ ID NO: 131169 - RNA, 18 nt, Artificial Sequence
  Synthetic
gcaaaaagaaagaagaaa

SEQ ID NO: 131170 - RNA, 20 nt, Artificial Sequence
  Synthetic
gagcaaaaagaaagaagaaa

SEQ ID NO: 131171 - RNA, 21 nt, Artificial Sequence
  Synthetic
ggagcaaaaagaaagaagaaa

SEQ ID NO: 131172 - RNA, 23 nt, Artificial Sequence
  Synthetic
gaggagcaaaaagaaagaagaaa

SEQ ID NO: 131173 - RNA, 24 nt, Artificial Sequence
  Synthetic
ggaggagcaaaaagaaagaagaaa

SEQ ID NO: 131174 - RNA, 20 nt, Artificial Sequence
  Synthetic
gaaugugacaaaugaagaaa

SEQ ID NO: 131175 - RNA, 20 nt, Artificial Sequence
  Synthetic
guauuugagaagaacagaaa

SEQ ID NO: 131176 - RNA, 18 nt, Artificial Sequence
  Synthetic
guggagcucaggcagaaa

SEQ ID NO: 131177 - RNA, 19 nt, Artificial Sequence
  Synthetic
gguggagcucaggcagaaa

SEQ ID NO: 131178 - RNA, 21 nt, Artificial Sequence
  Synthetic
gagguggagcucaggcagaaa

SEQ ID NO: 131179 - RNA, 22 nt, Artificial Sequence
  Synthetic
ggagguggagcucaggcagaaa

SEQ ID NO: 131180 - RNA, 18 nt, Artificial Sequence
  Synthetic
gcuuguauuucucagaaa

SEQ ID NO: 131181 - RNA, 22 nt, Artificial Sequence
  Synthetic
gccagcuuguauuucucagaaa

SEQ ID NO: 131182 - RNA, 19 nt, Artificial Sequence
  Synthetic
gcaggguuuuucagagaaa

SEQ ID NO: 131183 - RNA, 18 nt, Artificial Sequence
  Synthetic
gagacagagagagagaaa

SEQ ID NO: 131184 - RNA, 20 nt, Artificial Sequence
  Synthetic
gagagacagagagagagaaa

SEQ ID NO: 131185 - RNA, 22 nt, Artificial Sequence
  Synthetic
gagagagacagagagagagaaa

SEQ ID NO: 131186 - RNA, 24 nt, Artificial Sequence
  Synthetic
gagagagagacagagagagagaaa

SEQ ID NO: 131187 - RNA, 19 nt, Artificial Sequence
  Synthetic
gaauauucuaauagagaaa

SEQ ID NO: 131188 - RNA, 19 nt, Artificial Sequence
  Synthetic
guuaccuggaugugagaaa

SEQ ID NO: 131189 - RNA, 21 nt, Artificial Sequence
  Synthetic
guguuaccuggaugugagaaa

SEQ ID NO: 131190 - RNA, 20 nt, Artificial Sequence
  Synthetic
gucaaaaucagcaaaggaaa

SEQ ID NO: 131191 - RNA, 20 nt, Artificial Sequence
  Synthetic
gcacagaaagaggaaggaaa

SEQ ID NO: 131192 - RNA, 24 nt, Artificial Sequence
  Synthetic
guauucagauuuauagacaggaaa

SEQ ID NO: 131193 - RNA, 18 nt, Artificial Sequence
  Synthetic
gaaccacaguuuaggaaa

SEQ ID NO: 131194 - RNA, 20 nt, Artificial Sequence
  Synthetic
gagaaccacaguuuaggaaa

SEQ ID NO: 131195 - RNA, 19 nt, Artificial Sequence
  Synthetic
gaauagaacagaagggaaa

SEQ ID NO: 131196 - RNA, 19 nt, Artificial Sequence
  Synthetic
gaaaaaaaauaaggggaaa

SEQ ID NO: 131197 - RNA, 20 nt, Artificial Sequence
  Synthetic
ggaaaaaaaauaaggggaaa

SEQ ID NO: 131198 - RNA, 18 nt, Artificial Sequence
  Synthetic
guauuauugaaauggaaa

SEQ ID NO: 131199 - RNA, 23 nt, Artificial Sequence
  Synthetic
guuucccagggcaacauuggaaa

SEQ ID NO: 131200 - RNA, 24 nt, Artificial Sequence
  Synthetic
gguuucccagggcaacauuggaaa

SEQ ID NO: 131201 - RNA, 18 nt, Artificial Sequence
  Synthetic
gguacuguccucaugaaa

SEQ ID NO: 131202 - RNA, 20 nt, Artificial Sequence
  Synthetic
gcaagaaacaaaauaugaaa

SEQ ID NO: 131203 - RNA, 21 nt, Artificial Sequence
  Synthetic
gcuauaaagaaauaccugaaa

SEQ ID NO: 131204 - RNA, 21 nt, Artificial Sequence
  Synthetic
gccauacguagaaagcugaaa

SEQ ID NO: 131205 - RNA, 21 nt, Artificial Sequence
  Synthetic
gccauauguagagagcugaaa

SEQ ID NO: 131206 - RNA, 21 nt, Artificial Sequence
  Synthetic
guauauuucaaaauagugaaa

SEQ ID NO: 131207 - RNA, 24 nt, Artificial Sequence
  Synthetic
gcuguauauuucaaaauagugaaa

SEQ ID NO: 131208 - RNA, 24 nt, Artificial Sequence
  Synthetic
gcaaauuauaauugauaaaauaaa

SEQ ID NO: 131209 - RNA, 23 nt, Artificial Sequence
  Synthetic
guauuauuaauaaugauaauaaa

SEQ ID NO: 131210 - RNA, 18 nt, Artificial Sequence
  Synthetic
guacuauucagccauaaa

SEQ ID NO: 131211 - RNA, 20 nt, Artificial Sequence
  Synthetic
gaguacuauucagccauaaa

SEQ ID NO: 131212 - RNA, 21 nt, Artificial Sequence
  Synthetic
gaaugaugcuggccucauaaa

SEQ ID NO: 131213 - RNA, 21 nt, Artificial Sequence
  Synthetic
ggaugaugcuggccucauaaa

SEQ ID NO: 131214 - RNA, 21 nt, Artificial Sequence
  Synthetic
gaaauacuacauagucauaaa

SEQ ID NO: 131215 - RNA, 21 nt, Artificial Sequence
  Synthetic
gacacaauaaaaaaugauaaa

SEQ ID NO: 131216 - RNA, 20 nt, Artificial Sequence
  Synthetic
gcacaauaaaaaaugauaaa

SEQ ID NO: 131217 - RNA, 21 nt, Artificial Sequence
  Synthetic
ggcacaauaaaaaaugauaaa

SEQ ID NO: 131218 - RNA, 23 nt, Artificial Sequence
  Synthetic
gaggcacaauaaaaaaugauaaa

SEQ ID NO: 131219 - RNA, 18 nt, Artificial Sequence
  Synthetic
gcaauaaaaaaugauaaa

SEQ ID NO: 131220 - RNA, 21 nt, Artificial Sequence
  Synthetic
gaugcaauaaaaaaugauaaa

SEQ ID NO: 131221 - RNA, 21 nt, Artificial Sequence
  Synthetic
gccaaagcugucuuuacuaaa

SEQ ID NO: 131222 - RNA, 18 nt, Artificial Sequence
  Synthetic
gagagagagaauucuaaa

SEQ ID NO: 131223 - RNA, 20 nt, Artificial Sequence
  Synthetic
gagagagagagaauucuaaa

SEQ ID NO: 131224 - RNA, 23 nt, Artificial Sequence
  Synthetic
gaauuugaauuauccauucuaaa

SEQ ID NO: 131225 - RNA, 19 nt, Artificial Sequence
  Synthetic
gaggagagugaaaaguaaa

SEQ ID NO: 131226 - RNA, 21 nt, Artificial Sequence
  Synthetic
gagaggagagugaaaaguaaa

SEQ ID NO: 131227 - RNA, 22 nt, Artificial Sequence
  Synthetic
ggagaggagagugaaaaguaaa

SEQ ID NO: 131228 - RNA, 18 nt, Artificial Sequence
  Synthetic
gaaaauauuccagguaaa

SEQ ID NO: 131229 - RNA, 23 nt, Artificial Sequence
  Synthetic
gccucacuuucuucaaauguaaa

SEQ ID NO: 131230 - RNA, 19 nt, Artificial Sequence
  Synthetic
gcuaugaagaaagauuaaa

SEQ ID NO: 131231 - RNA, 19 nt, Artificial Sequence
  Synthetic
gugaauuauaagccuuaaa

SEQ ID NO: 131232 - RNA, 19 nt, Artificial Sequence
  Synthetic
guaacauuuauagcuuaaa

SEQ ID NO: 131233 - RNA, 18 nt, Artificial Sequence
  Synthetic
guacuggagcauuuuaaa

SEQ ID NO: 131234 - RNA, 19 nt, Artificial Sequence
  Synthetic
gguacuggagcauuuuaaa

SEQ ID NO: 131235 - RNA, 19 nt, Artificial Sequence
  Synthetic
guuuaaauaucuuuuuaaa

SEQ ID NO: 131236 - RNA, 20 nt, Artificial Sequence
  Synthetic
gucuugugccgguuuuuaaa

SEQ ID NO: 131237 - RNA, 19 nt, Artificial Sequence
  Synthetic
guucucaaagagaaaacaa

SEQ ID NO: 131238 - RNA, 24 nt, Artificial Sequence
  Synthetic
guucauccacgcugucauaaacaa

SEQ ID NO: 131239 - RNA, 21 nt, Artificial Sequence
  Synthetic
gacuggguaauuuauaaacaa

SEQ ID NO: 131240 - RNA, 18 nt, Artificial Sequence
  Synthetic
guucuguucauucaacaa

SEQ ID NO: 131241 - RNA, 19 nt, Artificial Sequence
  Synthetic
gagcacauucagagaacaa

SEQ ID NO: 131242 - RNA, 24 nt, Artificial Sequence
  Synthetic
gauaaaugugguauauauacacaa

SEQ ID NO: 131243 - RNA, 19 nt, Artificial Sequence
  Synthetic
gcaucuucucugaccacaa

SEQ ID NO: 131244 - RNA, 18 nt, Artificial Sequence
  Synthetic
gugcuagcuuagccacaa

SEQ ID NO: 131245 - RNA, 20 nt, Artificial Sequence
  Synthetic
gagugcuagcuuagccacaa

SEQ ID NO: 131246 - RNA, 22 nt, Artificial Sequence
  Synthetic
gugagugcuagcuuagccacaa

SEQ ID NO: 131247 - RNA, 24 nt, Artificial Sequence
  Synthetic
gugugagugcuagcuuagccacaa

SEQ ID NO: 131248 - RNA, 22 nt, Artificial Sequence
  Synthetic
gaucuacuguuucauagcacaa

SEQ ID NO: 131249 - RNA, 22 nt, Artificial Sequence
  Synthetic
gaucuaguauuugauagcacaa

SEQ ID NO: 131250 - RNA, 23 nt, Artificial Sequence
  Synthetic
gaacaugugguaccuaugcacaa

SEQ ID NO: 131251 - RNA, 19 nt, Artificial Sequence
  Synthetic
guccucaagaagcucacaa

SEQ ID NO: 131252 - RNA, 18 nt, Artificial Sequence
  Synthetic
gaauuaagucauucacaa

SEQ ID NO: 131253 - RNA, 20 nt, Artificial Sequence
  Synthetic
gugaauuaagucauucacaa

SEQ ID NO: 131254 - RNA, 18 nt, Artificial Sequence
  Synthetic
ggaaggaaacugagacaa

SEQ ID NO: 131255 - RNA, 23 nt, Artificial Sequence
  Synthetic
gcaacaaaagcaaaaauagacaa

SEQ ID NO: 131256 - RNA, 24 nt, Artificial Sequence
  Synthetic
ggcaacaaaagcaaaaauagacaa

SEQ ID NO: 131257 - RNA, 18 nt, Artificial Sequence
  Synthetic
gucauuauauaaugacaa

SEQ ID NO: 131258 - RNA, 19 nt, Artificial Sequence
  Synthetic
ggucauuauauaaugacaa

SEQ ID NO: 131259 - RNA, 22 nt, Artificial Sequence
  Synthetic
gaaggucauuauauaaugacaa

SEQ ID NO: 131260 - RNA, 20 nt, Artificial Sequence
  Synthetic
gcuauguuauauacauacaa

SEQ ID NO: 131261 - RNA, 20 nt, Artificial Sequence
  Synthetic
gcuuuucuucucuuauacaa

SEQ ID NO: 131262 - RNA, 22 nt, Artificial Sequence
  Synthetic
gaaauacaaagcaaaacuacaa

SEQ ID NO: 131263 - RNA, 20 nt, Artificial Sequence
  Synthetic
gacaaacaaaaggucuacaa

SEQ ID NO: 131264 - RNA, 18 nt, Artificial Sequence
  Synthetic
gugcuccucaacguacaa

SEQ ID NO: 131265 - RNA, 19 nt, Artificial Sequence
  Synthetic
ggugcuccucaacguacaa

SEQ ID NO: 131266 - RNA, 19 nt, Artificial Sequence
  Synthetic
gaaccuucccgucuuacaa

SEQ ID NO: 131267 - RNA, 20 nt, Artificial Sequence
  Synthetic
ggaaccuucccgucuuacaa

SEQ ID NO: 131268 - RNA, 19 nt, Artificial Sequence
  Synthetic
gaacuuuucugucuuacaa

SEQ ID NO: 131269 - RNA, 20 nt, Artificial Sequence
  Synthetic
ggaacuuuucugucuuacaa

SEQ ID NO: 131270 - RNA, 21 nt, Artificial Sequence
  Synthetic
gggaacuuuucugucuuacaa

SEQ ID NO: 131271 - RNA, 22 nt, Artificial Sequence
  Synthetic
ggggaacuuuucugucuuacaa

SEQ ID NO: 131272 - RNA, 18 nt, Artificial Sequence
  Synthetic
gcaagaaugaaaaaccaa

SEQ ID NO: 131273 - RNA, 18 nt, Artificial Sequence
  Synthetic
gaacuaacuugucaccaa

SEQ ID NO: 131274 - RNA, 18 nt, Artificial Sequence
  Synthetic
gaggaagagggugaccaa

SEQ ID NO: 131275 - RNA, 20 nt, Artificial Sequence
  Synthetic
gagaggaagagggugaccaa

SEQ ID NO: 131276 - RNA, 19 nt, Artificial Sequence
  Synthetic
gauuagcagaguugaccaa

SEQ ID NO: 131277 - RNA, 24 nt, Artificial Sequence
  Synthetic
guuuugauuagcagaguugaccaa

SEQ ID NO: 131278 - RNA, 23 nt, Artificial Sequence
  Synthetic
gccauuacuggguauauacccaa

SEQ ID NO: 131279 - RNA, 23 nt, Artificial Sequence
  Synthetic
gaaucaucugaaauccuccccaa

SEQ ID NO: 131280 - RNA, 23 nt, Artificial Sequence
  Synthetic
guuacugagucagaacugcccaa

SEQ ID NO: 131281 - RNA, 24 nt, Artificial Sequence
  Synthetic
gcuacaugacugaguucgagccaa

SEQ ID NO: 131282 - RNA, 20 nt, Artificial Sequence
  Synthetic
gcuguacccugcaacgccaa

SEQ ID NO: 131283 - RNA, 21 nt, Artificial Sequence
  Synthetic
ggcuguacccugcaacgccaa

SEQ ID NO: 131284 - RNA, 22 nt, Artificial Sequence
  Synthetic
gggcuguacccugcaacgccaa

SEQ ID NO: 131285 - RNA, 23 nt, Artificial Sequence
  Synthetic
ggggcuguacccugcaacgccaa

SEQ ID NO: 131286 - RNA, 24 nt, Artificial Sequence
  Synthetic
gggggcuguacccugcaacgccaa

SEQ ID NO: 131287 - RNA, 23 nt, Artificial Sequence
  Synthetic
gccauaugccuggcuuuggccaa

SEQ ID NO: 131288 - RNA, 24 nt, Artificial Sequence
  Synthetic
ggccauaugccuggcuuuggccaa

SEQ ID NO: 131289 - RNA, 21 nt, Artificial Sequence
  Synthetic
gaaaauaaaggaguucuccaa

SEQ ID NO: 131290 - RNA, 23 nt, Artificial Sequence
  Synthetic
gagaaaauaaaggaguucuccaa

SEQ ID NO: 131291 - RNA, 22 nt, Artificial Sequence
  Synthetic
gacaaaagggucaauucagcaa

SEQ ID NO: 131292 - RNA, 22 nt, Artificial Sequence
  Synthetic
gccacuaaagaggcugaggcaa

SEQ ID NO: 131293 - RNA, 22 nt, Artificial Sequence
  Synthetic
gcuacucgguaggcugaggcaa

SEQ ID NO: 131294 - RNA, 18 nt, Artificial Sequence
  Synthetic
gcacuccagccuaggcaa

SEQ ID NO: 131295 - RNA, 18 nt, Artificial Sequence
  Synthetic
gcacaccagcuuaggcaa

SEQ ID NO: 131296 - RNA, 24 nt, Artificial Sequence
  Synthetic
gucacugcacaccagcuuaggcaa

SEQ ID NO: 131297 - RNA, 24 nt, Artificial Sequence
  Synthetic
gucacagcacuccagccugggcaa

SEQ ID NO: 131298 - RNA, 24 nt, Artificial Sequence
  Synthetic
gccacugcacuccagccugggcaa

SEQ ID NO: 131299 - RNA, 24 nt, Artificial Sequence
  Synthetic
gucacugcacuccagccugggcaa

SEQ ID NO: 131300 - RNA, 23 nt, Artificial Sequence
  Synthetic
gaaaauauugcauauauaugcaa

SEQ ID NO: 131301 - RNA, 20 nt, Artificial Sequence
  Synthetic
gcagaguugaauaguugcaa

SEQ ID NO: 131302 - RNA, 19 nt, Artificial Sequence
  Synthetic
gagcacagaaaaaaaucaa

SEQ ID NO: 131303 - RNA, 21 nt, Artificial Sequence
  Synthetic
gaacucuccaccccaaaucaa

SEQ ID NO: 131304 - RNA, 18 nt, Artificial Sequence
  Synthetic
guuuuguuguuuaaucaa

SEQ ID NO: 131305 - RNA, 18 nt, Artificial Sequence
  Synthetic
guuuuuugaaaagaucaa

SEQ ID NO: 131306 - RNA, 22 nt, Artificial Sequence
  Synthetic
gccaguuuuuugaaaagaucaa

SEQ ID NO: 131307 - RNA, 24 nt, Artificial Sequence
  Synthetic
gagccaguuuuuugaaaagaucaa

SEQ ID NO: 131308 - RNA, 21 nt, Artificial Sequence
  Synthetic
guucucauacuuuaggaucaa

SEQ ID NO: 131309 - RNA, 24 nt, Artificial Sequence
  Synthetic
guuguucucauacuuuaggaucaa

SEQ ID NO: 131310 - RNA, 18 nt, Artificial Sequence
  Synthetic
guggcccagagaggucaa

SEQ ID NO: 131311 - RNA, 19 nt, Artificial Sequence
  Synthetic
gaggaaaagacaaaaagaa

SEQ ID NO: 131312 - RNA, 18 nt, Artificial Sequence
  Synthetic
gguauguaugugaaagaa

SEQ ID NO: 131313 - RNA, 19 nt, Artificial Sequence
  Synthetic
ggguauguaugugaaagaa

SEQ ID NO: 131314 - RNA, 18 nt, Artificial Sequence
  Synthetic
gaugagaagaaggaagaa

SEQ ID NO: 131315 - RNA, 19 nt, Artificial Sequence
  Synthetic
ggaugagaagaaggaagaa

SEQ ID NO: 131316 - RNA, 21 nt, Artificial Sequence
  Synthetic
gaaauggaaugaagugaagaa

SEQ ID NO: 131317 - RNA, 22 nt, Artificial Sequence
  Synthetic
ggaaauggaaugaagugaagaa

SEQ ID NO: 131318 - RNA, 18 nt, Artificial Sequence
  Synthetic
gggaagugaagugaagaa

SEQ ID NO: 131319 - RNA, 20 nt, Artificial Sequence
  Synthetic
gaauuuauauucuaacagaa

SEQ ID NO: 131320 - RNA, 19 nt, Artificial Sequence
  Synthetic
gccuuuuauuucagcagaa

SEQ ID NO: 131321 - RNA, 20 nt, Artificial Sequence
  Synthetic
gucagggaaggagagcagaa

SEQ ID NO: 131322 - RNA, 19 nt, Artificial Sequence
  Synthetic
guaguaugguauagcagaa

SEQ ID NO: 131323 - RNA, 20 nt, Artificial Sequence
  Synthetic
gguaguaugguauagcagaa

SEQ ID NO: 131324 - RNA, 18 nt, Artificial Sequence
  Synthetic
gcacuuugggaggcagaa

SEQ ID NO: 131325 - RNA, 23 nt, Artificial Sequence
  Synthetic
gacuaauaaagaagaaaagagaa

SEQ ID NO: 131326 - RNA, 22 nt, Artificial Sequence
  Synthetic
guaauaaucacaucauggagaa

SEQ ID NO: 131327 - RNA, 23 nt, Artificial Sequence
  Synthetic
gguaauaaucacaucauggagaa

SEQ ID NO: 131328 - RNA, 24 nt, Artificial Sequence
  Synthetic
ggguaauaaucacaucauggagaa

SEQ ID NO: 131329 - RNA, 20 nt, Artificial Sequence
  Synthetic
guuaaaaaaauguguuagaa

SEQ ID NO: 131330 - RNA, 21 nt, Artificial Sequence
  Synthetic
gguuaaaaaaauguguuagaa

SEQ ID NO: 131331 - RNA, 18 nt, Artificial Sequence
  Synthetic
guggaagcaacuuuagaa

SEQ ID NO: 131332 - RNA, 24 nt, Artificial Sequence
  Synthetic
gaaaauguggaagcaacuuuagaa

SEQ ID NO: 131333 - RNA, 18 nt, Artificial Sequence
  Synthetic
ggguaauuuauaaaggaa

SEQ ID NO: 131334 - RNA, 22 nt, Artificial Sequence
  Synthetic
gacuggguaauuuauaaaggaa

SEQ ID NO: 131335 - RNA, 24 nt, Artificial Sequence
  Synthetic
gagacuggguaauuuauaaaggaa

SEQ ID NO: 131336 - RNA, 18 nt, Artificial Sequence
  Synthetic
gugagaaacacagaggaa

SEQ ID NO: 131337 - RNA, 19 nt, Artificial Sequence
  Synthetic
gugagaauuuugagaggaa

SEQ ID NO: 131338 - RNA, 20 nt, Artificial Sequence
  Synthetic
gccaccacgcccggccggaa

SEQ ID NO: 131339 - RNA, 22 nt, Artificial Sequence
  Synthetic
gagccaccacgcccggccggaa

SEQ ID NO: 131340 - RNA, 24 nt, Artificial Sequence
  Synthetic
gugagccaccacgcccggccggaa

SEQ ID NO: 131341 - RNA, 19 nt, Artificial Sequence
  Synthetic
gagggagagggaaagggaa

SEQ ID NO: 131342 - RNA, 21 nt, Artificial Sequence
  Synthetic
gagagggagagggaaagggaa

SEQ ID NO: 131343 - RNA, 22 nt, Artificial Sequence
  Synthetic
ggagagggagagggaaagggaa

SEQ ID NO: 131344 - RNA, 23 nt, Artificial Sequence
  Synthetic
gggagagggagagggaaagggaa

SEQ ID NO: 131345 - RNA, 19 nt, Artificial Sequence
  Synthetic
gacauauagaccaauggaa

SEQ ID NO: 131346 - RNA, 22 nt, Artificial Sequence
  Synthetic
gcagacauauagaccaauggaa

SEQ ID NO: 131347 - RNA, 23 nt, Artificial Sequence
  Synthetic
ggcagacauauagaccaauggaa

SEQ ID NO: 131348 - RNA, 19 nt, Artificial Sequence
  Synthetic
gaacaaacagauaauggaa

SEQ ID NO: 131349 - RNA, 20 nt, Artificial Sequence
  Synthetic
guaaaacaguggccauggaa

SEQ ID NO: 131350 - RNA, 18 nt, Artificial Sequence
  Synthetic
gcaggcucagagauggaa

SEQ ID NO: 131351 - RNA, 24 nt, Artificial Sequence
  Synthetic
gauuuugcaggcucagagauggaa

SEQ ID NO: 131352 - RNA, 18 nt, Artificial Sequence
  Synthetic
gagggagguucucuggaa

SEQ ID NO: 131353 - RNA, 20 nt, Artificial Sequence
  Synthetic
gaaaguucauguuauuggaa

SEQ ID NO: 131354 - RNA, 21 nt, Artificial Sequence
  Synthetic
ggaaaguucauguuauuggaa

SEQ ID NO: 131355 - RNA, 18 nt, Artificial Sequence
  Synthetic
gagugagcccucuuggaa

SEQ ID NO: 131356 - RNA, 20 nt, Artificial Sequence
  Synthetic
gugagugagcccucuuggaa

SEQ ID NO: 131357 - RNA, 24 nt, Artificial Sequence
  Synthetic
gcaugugagugagcccucuuggaa

SEQ ID NO: 131358 - RNA, 18 nt, Artificial Sequence
  Synthetic
gugucacuuaaguuggaa

SEQ ID NO: 131359 - RNA, 19 nt, Artificial Sequence
  Synthetic
ggugucacuuaaguuggaa

SEQ ID NO: 131360 - RNA, 18 nt, Artificial Sequence
  Synthetic
guggaagcaacuuuggaa

SEQ ID NO: 131361 - RNA, 19 nt, Artificial Sequence
  Synthetic
gaggcauuagacaaaugaa

SEQ ID NO: 131362 - RNA, 20 nt, Artificial Sequence
  Synthetic
ggaggcauuagacaaaugaa

SEQ ID NO: 131363 - RNA, 19 nt, Artificial Sequence
  Synthetic
gagaaaucagagacaugaa

SEQ ID NO: 131364 - RNA, 21 nt, Artificial Sequence
  Synthetic
guaucagcaauggaagaugaa

SEQ ID NO: 131365 - RNA, 22 nt, Artificial Sequence
  Synthetic
gguaucagcaauggaagaugaa

SEQ ID NO: 131366 - RNA, 23 nt, Artificial Sequence
  Synthetic
ggguaucagcaauggaagaugaa

SEQ ID NO: 131367 - RNA, 23 nt, Artificial Sequence
  Synthetic
gcuucaauguuuuggaggaugaa

SEQ ID NO: 131368 - RNA, 24 nt, Artificial Sequence
  Synthetic
gauuuuuggggcuuuggggaugaa

SEQ ID NO: 131369 - RNA, 21 nt, Artificial Sequence
  Synthetic
gugugaagaugcucugaugaa

SEQ ID NO: 131370 - RNA, 24 nt, Artificial Sequence
  Synthetic
gaugugugaagaugcucugaugaa

SEQ ID NO: 131371 - RNA, 24 nt, Artificial Sequence
  Synthetic
gaaucaauuuuaaauauauaugaa

SEQ ID NO: 131372 - RNA, 24 nt, Artificial Sequence
  Synthetic
gaaauaaaaggcaaccaaacugaa

SEQ ID NO: 131373 - RNA, 23 nt, Artificial Sequence
  Synthetic
guuuaagcaacauaaguacugaa

SEQ ID NO: 131374 - RNA, 21 nt, Artificial Sequence
  Synthetic
gacuuuuggguuaaugcugaa

SEQ ID NO: 131375 - RNA, 22 nt, Artificial Sequence
  Synthetic
ggacuuuuggguuaaugcugaa

SEQ ID NO: 131376 - RNA, 19 nt, Artificial Sequence
  Synthetic
gaaauguggcugaucugaa

SEQ ID NO: 131377 - RNA, 20 nt, Artificial Sequence
  Synthetic
guucaguaaauauuucugaa

SEQ ID NO: 131378 - RNA, 22 nt, Artificial Sequence
  Synthetic
gaguucaguaaauauuucugaa

SEQ ID NO: 131379 - RNA, 23 nt, Artificial Sequence
  Synthetic
ggaguucaguaaauauuucugaa

SEQ ID NO: 131380 - RNA, 19 nt, Artificial Sequence
  Synthetic
guuuucuuuaauuauugaa

SEQ ID NO: 131381 - RNA, 20 nt, Artificial Sequence
  Synthetic
guuuuguuuucuuucuugaa

SEQ ID NO: 131382 - RNA, 22 nt, Artificial Sequence
  Synthetic
gaauauuucguguacaguugaa

SEQ ID NO: 131383 - RNA, 24 nt, Artificial Sequence
  Synthetic
gagaauauuucguguacaguugaa

SEQ ID NO: 131384 - RNA, 23 nt, Artificial Sequence
  Synthetic
gaaucugggaggcagagguugaa

SEQ ID NO: 131385 - RNA, 18 nt, Artificial Sequence
  Synthetic
ggaagucagaaguuugaa

SEQ ID NO: 131386 - RNA, 23 nt, Artificial Sequence
  Synthetic
guuuuggaagucagaaguuugaa

SEQ ID NO: 131387 - RNA, 19 nt, Artificial Sequence
  Synthetic
gagaaauuggccaaaauaa

SEQ ID NO: 131388 - RNA, 20 nt, Artificial Sequence
  Synthetic
ggagaaauuggccaaaauaa

SEQ ID NO: 131389 - RNA, 21 nt, Artificial Sequence
  Synthetic
gggagaaauuggccaaaauaa

SEQ ID NO: 131390 - RNA, 24 nt, Artificial Sequence
  Synthetic
gagacacacauaggcucaaaauaa

SEQ ID NO: 131391 - RNA, 22 nt, Artificial Sequence
  Synthetic
gcuacacacagacuggaaauaa

SEQ ID NO: 131392 - RNA, 19 nt, Artificial Sequence
  Synthetic
gagaagcagagauaaauaa

SEQ ID NO: 131393 - RNA, 20 nt, Artificial Sequence
  Synthetic
ggagaagcagagauaaauaa

SEQ ID NO: 131394 - RNA, 19 nt, Artificial Sequence
  Synthetic
gaauauuaaucaucaauaa

SEQ ID NO: 131395 - RNA, 21 nt, Artificial Sequence
  Synthetic
gaacucauggagacagaauaa

SEQ ID NO: 131396 - RNA, 24 nt, Artificial Sequence
  Synthetic
guaaacagacagucuacagaauaa

SEQ ID NO: 131397 - RNA, 24 nt, Artificial Sequence
  Synthetic
gacuuaaucugcacuauagaauaa

SEQ ID NO: 131398 - RNA, 18 nt, Artificial Sequence
  Synthetic
gagaaacaaaaggaauaa

SEQ ID NO: 131399 - RNA, 19 nt, Artificial Sequence
  Synthetic
gaaagauagacaugaauaa

SEQ ID NO: 131400 - RNA, 18 nt, Artificial Sequence
  Synthetic
ggauggguagaugaauaa

SEQ ID NO: 131401 - RNA, 21 nt, Artificial Sequence
  Synthetic
gauggauggguagaugaauaa

SEQ ID NO: 131402 - RNA, 22 nt, Artificial Sequence
  Synthetic
ggauggauggguagaugaauaa

SEQ ID NO: 131403 - RNA, 24 nt, Artificial Sequence
  Synthetic
guggauggauggguagaugaauaa

SEQ ID NO: 131404 - RNA, 21 nt, Artificial Sequence
  Synthetic
gaaaaaagaaaaaaauaauaa

SEQ ID NO: 131405 - RNA, 19 nt, Artificial Sequence
  Synthetic
guugaauacauuuuaauaa

SEQ ID NO: 131406 - RNA, 20 nt, Artificial Sequence
  Synthetic
gcaaaaucuuccaaacauaa

SEQ ID NO: 131407 - RNA, 18 nt, Artificial Sequence
  Synthetic
gauacaaaugaaucauaa

SEQ ID NO: 131408 - RNA, 18 nt, Artificial Sequence
  Synthetic
gggaucagguggagauaa

SEQ ID NO: 131409 - RNA, 20 nt, Artificial Sequence
  Synthetic
gagggaucagguggagauaa

SEQ ID NO: 131410 - RNA, 21 nt, Artificial Sequence
  Synthetic
ggagggaucagguggagauaa

SEQ ID NO: 131411 - RNA, 22 nt, Artificial Sequence
  Synthetic
gggagggaucagguggagauaa

SEQ ID NO: 131412 - RNA, 18 nt, Artificial Sequence
  Synthetic
ggcgaaaaaacucgauaa

SEQ ID NO: 131413 - RNA, 22 nt, Artificial Sequence
  Synthetic
gaaaggcgaaaaaacucgauaa

SEQ ID NO: 131414 - RNA, 23 nt, Artificial Sequence
  Synthetic
ggaaaggcgaaaaaacucgauaa

SEQ ID NO: 131415 - RNA, 21 nt, Artificial Sequence
  Synthetic
guaauaaucacaucaggauaa

SEQ ID NO: 131416 - RNA, 23 nt, Artificial Sequence
  Synthetic
guguaauaaucacaucaggauaa

SEQ ID NO: 131417 - RNA, 18 nt, Artificial Sequence
  Synthetic
gacauuguauaaugauaa

SEQ ID NO: 131418 - RNA, 22 nt, Artificial Sequence
  Synthetic
gaaagacauuguauaaugauaa

SEQ ID NO: 131419 - RNA, 23 nt, Artificial Sequence
  Synthetic
gaauuaaaauaauucaaauauaa

SEQ ID NO: 131420 - RNA, 19 nt, Artificial Sequence
  Synthetic
guuauauaaauuaauauaa

SEQ ID NO: 131421 - RNA, 20 nt, Artificial Sequence
  Synthetic
gauauuauugagucauauaa

SEQ ID NO: 131422 - RNA, 21 nt, Artificial Sequence
  Synthetic
ggauauuauugagucauauaa

SEQ ID NO: 131423 - RNA, 22 nt, Artificial Sequence
  Synthetic
gggauauuauugagucauauaa

SEQ ID NO: 131424 - RNA, 20 nt, Artificial Sequence
  Synthetic
guacauuuuaaaauaacuaa

SEQ ID NO: 131425 - RNA, 21 nt, Artificial Sequence
  Synthetic
gguacauuuuaaaauaacuaa

SEQ ID NO: 131426 - RNA, 21 nt, Artificial Sequence
  Synthetic
gacaccagcuggcauggcuaa

SEQ ID NO: 131427 - RNA, 23 nt, Artificial Sequence
  Synthetic
gagacaccagcuggcauggcuaa

SEQ ID NO: 131428 - RNA, 24 nt, Artificial Sequence
  Synthetic
ggagacaccagcuggcauggcuaa

SEQ ID NO: 131429 - RNA, 20 nt, Artificial Sequence
  Synthetic
gcuggaggccauuauucuaa

SEQ ID NO: 131430 - RNA, 23 nt, Artificial Sequence
  Synthetic
gcagcuggaggccauuauucuaa

SEQ ID NO: 131431 - RNA, 21 nt, Artificial Sequence
  Synthetic
guucuuuuucucuuuuucuaa

SEQ ID NO: 131432 - RNA, 18 nt, Artificial Sequence
  Synthetic
gaaaaggaaaaaaaguaa

SEQ ID NO: 131433 - RNA, 20 nt, Artificial Sequence
  Synthetic
gaauauuacuuuaaaaguaa

SEQ ID NO: 131434 - RNA, 22 nt, Artificial Sequence
  Synthetic
gacaugcauagacugaaaguaa

SEQ ID NO: 131435 - RNA, 23 nt, Artificial Sequence
  Synthetic
ggacaugcauagacugaaaguaa

SEQ ID NO: 131436 - RNA, 19 nt, Artificial Sequence
  Synthetic
gugggagagagagaaguaa

SEQ ID NO: 131437 - RNA, 20 nt, Artificial Sequence
  Synthetic
ggugggagagagagaaguaa

SEQ ID NO: 131438 - RNA, 21 nt, Artificial Sequence
  Synthetic
gaacaugggaggggacaguaa

SEQ ID NO: 131439 - RNA, 22 nt, Artificial Sequence
  Synthetic
ggaacaugggaggggacaguaa

SEQ ID NO: 131440 - RNA, 24 nt, Artificial Sequence
  Synthetic
guccuuuggguauauacccaguaa

SEQ ID NO: 131441 - RNA, 22 nt, Artificial Sequence
  Synthetic
gacuuuuagcuggaugcaguaa

SEQ ID NO: 131442 - RNA, 23 nt, Artificial Sequence
  Synthetic
ggacuuuuagcuggaugcaguaa

SEQ ID NO: 131443 - RNA, 23 nt, Artificial Sequence
  Synthetic
gaaaaugugauacauauacguaa

SEQ ID NO: 131444 - RNA, 18 nt, Artificial Sequence
  Synthetic
ggauccagugggagguaa

SEQ ID NO: 131445 - RNA, 19 nt, Artificial Sequence
  Synthetic
gggauccagugggagguaa

SEQ ID NO: 131446 - RNA, 21 nt, Artificial Sequence
  Synthetic
gagggauccagugggagguaa

SEQ ID NO: 131447 - RNA, 22 nt, Artificial Sequence
  Synthetic
ggagggauccagugggagguaa

SEQ ID NO: 131448 - RNA, 23 nt, Artificial Sequence
  Synthetic
gggagggauccagugggagguaa

SEQ ID NO: 131449 - RNA, 18 nt, Artificial Sequence
  Synthetic
ggaccucgugggagguaa

SEQ ID NO: 131450 - RNA, 21 nt, Artificial Sequence
  Synthetic
gaaggaccucgugggagguaa

SEQ ID NO: 131451 - RNA, 22 nt, Artificial Sequence
  Synthetic
ggaaggaccucgugggagguaa

SEQ ID NO: 131452 - RNA, 23 nt, Artificial Sequence
  Synthetic
gggaaggaccucgugggagguaa

SEQ ID NO: 131453 - RNA, 19 nt, Artificial Sequence
  Synthetic
gugaccuggugggagguaa

SEQ ID NO: 131454 - RNA, 21 nt, Artificial Sequence
  Synthetic
gagugaccuggugggagguaa

SEQ ID NO: 131455 - RNA, 22 nt, Artificial Sequence
  Synthetic
ggagugaccuggugggagguaa

SEQ ID NO: 131456 - RNA, 23 nt, Artificial Sequence
  Synthetic
gggagugaccuggugggagguaa

SEQ ID NO: 131457 - RNA, 18 nt, Artificial Sequence
  Synthetic
ggaccaugugggagguaa

SEQ ID NO: 131458 - RNA, 19 nt, Artificial Sequence
  Synthetic
gggaccaugugggagguaa

SEQ ID NO: 131459 - RNA, 21 nt, Artificial Sequence
  Synthetic
gagggaccaugugggagguaa

SEQ ID NO: 131460 - RNA, 22 nt, Artificial Sequence
  Synthetic
ggagggaccaugugggagguaa

SEQ ID NO: 131461 - RNA, 23 nt, Artificial Sequence
  Synthetic
gggagggaccaugugggagguaa

SEQ ID NO: 131462 - RNA, 21 nt, Artificial Sequence
  Synthetic
ggagagaccagguggagguaa

SEQ ID NO: 131463 - RNA, 22 nt, Artificial Sequence
  Synthetic
gggagagaccagguggagguaa

SEQ ID NO: 131464 - RNA, 18 nt, Artificial Sequence
  Synthetic
gaggcuauguggagguaa

SEQ ID NO: 131465 - RNA, 20 nt, Artificial Sequence
  Synthetic
gagaggcuauguggagguaa

SEQ ID NO: 131466 - RNA, 21 nt, Artificial Sequence
  Synthetic
ggagaggcuauguggagguaa

SEQ ID NO: 131467 - RNA, 18 nt, Artificial Sequence
  Synthetic
ggacccaguuggagguaa

SEQ ID NO: 131468 - RNA, 19 nt, Artificial Sequence
  Synthetic
gggacccaguuggagguaa

SEQ ID NO: 131469 - RNA, 21 nt, Artificial Sequence
  Synthetic
gagggacccaguuggagguaa

SEQ ID NO: 131470 - RNA, 23 nt, Artificial Sequence
  Synthetic
gugagggacccaguuggagguaa

SEQ ID NO: 131471 - RNA, 18 nt, Artificial Sequence
  Synthetic
gcacucuagccuggguaa

SEQ ID NO: 131472 - RNA, 18 nt, Artificial Sequence
  Synthetic
gccauuacauaaugguaa

SEQ ID NO: 131473 - RNA, 19 nt, Artificial Sequence
  Synthetic
ggccauuacauaaugguaa

SEQ ID NO: 131474 - RNA, 22 nt, Artificial Sequence
  Synthetic
gaaggccauuacauaaugguaa

SEQ ID NO: 131475 - RNA, 21 nt, Artificial Sequence
  Synthetic
gcacuguuggugggaauguaa

SEQ ID NO: 131476 - RNA, 19 nt, Artificial Sequence
  Synthetic
guggagccugaagguguaa

SEQ ID NO: 131477 - RNA, 21 nt, Artificial Sequence
  Synthetic
guuuauuauacugaaaauuaa

SEQ ID NO: 131478 - RNA, 20 nt, Artificial Sequence
  Synthetic
guagauagagaagaaauuaa

SEQ ID NO: 131479 - RNA, 22 nt, Artificial Sequence
  Synthetic
gaauuaacaaauuugaaauuaa

SEQ ID NO: 131480 - RNA, 22 nt, Artificial Sequence
  Synthetic
gcacagcaaaggaaacaauuaa

SEQ ID NO: 131481 - RNA, 20 nt, Artificial Sequence
  Synthetic
guugagcaugucucaauuaa

SEQ ID NO: 131482 - RNA, 19 nt, Artificial Sequence
  Synthetic
gauucauuaugagaauuaa

SEQ ID NO: 131483 - RNA, 20 nt, Artificial Sequence
  Synthetic
guacauuuuacauuaauuaa

SEQ ID NO: 131484 - RNA, 20 nt, Artificial Sequence
  Synthetic
guucguugaacaaauauuaa

SEQ ID NO: 131485 - RNA, 18 nt, Artificial Sequence
  Synthetic
gcacuuaaaauuuauuaa

SEQ ID NO: 131486 - RNA, 20 nt, Artificial Sequence
  Synthetic
gugcacuuaaaauuuauuaa

SEQ ID NO: 131487 - RNA, 18 nt, Artificial Sequence
  Synthetic
gcaaugaauauuuauuaa

SEQ ID NO: 131488 - RNA, 19 nt, Artificial Sequence
  Synthetic
ggcaaugaauauuuauuaa

SEQ ID NO: 131489 - RNA, 23 nt, Artificial Sequence
  Synthetic
gcuugaaguaauaugggaguuaa

SEQ ID NO: 131490 - RNA, 23 nt, Artificial Sequence
  Synthetic
gauauuauaaaaacagugguuaa

SEQ ID NO: 131491 - RNA, 20 nt, Artificial Sequence
  Synthetic
gcuuuguguuuauauguuaa

SEQ ID NO: 131492 - RNA, 20 nt, Artificial Sequence
  Synthetic
gcucaaaacauguuuguuaa

SEQ ID NO: 131493 - RNA, 22 nt, Artificial Sequence
  Synthetic
gugcucaaaacauguuuguuaa

SEQ ID NO: 131494 - RNA, 19 nt, Artificial Sequence
  Synthetic
gcugcugaaacaaauuuaa

SEQ ID NO: 131495 - RNA, 18 nt, Artificial Sequence
  Synthetic
guuuauauugcaauuuaa

SEQ ID NO: 131496 - RNA, 19 nt, Artificial Sequence
  Synthetic
gguuuauauugcaauuuaa

SEQ ID NO: 131497 - RNA, 20 nt, Artificial Sequence
  Synthetic
gauugaauuguucacuuuaa

SEQ ID NO: 131498 - RNA, 18 nt, Artificial Sequence
  Synthetic
guaaucccaccauuuuaa

SEQ ID NO: 131499 - RNA, 20 nt, Artificial Sequence
  Synthetic
guaacauuuaauauuuuuaa

SEQ ID NO: 131500 - RNA, 18 nt, Artificial Sequence
  Synthetic
ggauauccaaaacaaaca

SEQ ID NO: 131501 - RNA, 22 nt, Artificial Sequence
  Synthetic
gcuuaaaagugggagcuaaaca

SEQ ID NO: 131502 - RNA, 18 nt, Artificial Sequence
  Synthetic
gagggcauuuuaacaaca

SEQ ID NO: 131503 - RNA, 19 nt, Artificial Sequence
  Synthetic
ggagggcauuuuaacaaca

SEQ ID NO: 131504 - RNA, 24 nt, Artificial Sequence
  Synthetic
guaaacaauguugaaaugacaaca

SEQ ID NO: 131505 - RNA, 18 nt, Artificial Sequence
  Synthetic
gggguuggagccccaaca

SEQ ID NO: 131506 - RNA, 20 nt, Artificial Sequence
  Synthetic
gugggguuggagccccaaca

SEQ ID NO: 131507 - RNA, 18 nt, Artificial Sequence
  Synthetic
gaacaaauggaaagaaca

SEQ ID NO: 131508 - RNA, 24 nt, Artificial Sequence
  Synthetic
gucuuucacuuauaagugagaaca

SEQ ID NO: 131509 - RNA, 22 nt, Artificial Sequence
  Synthetic
gcaauagaggaagaaaggaaca

SEQ ID NO: 131510 - RNA, 19 nt, Artificial Sequence
  Synthetic
gucuuccaauucaugaaca

SEQ ID NO: 131511 - RNA, 21 nt, Artificial Sequence
  Synthetic
gagucuuccaauucaugaaca

SEQ ID NO: 131512 - RNA, 21 nt, Artificial Sequence
  Synthetic
ggaaagcccaucagacuaaca

SEQ ID NO: 131513 - RNA, 21 nt, Artificial Sequence
  Synthetic
gauucuuccuuuccauuaaca

SEQ ID NO: 131514 - RNA, 22 nt, Artificial Sequence
  Synthetic
gaucaaaaagguugauaacaca

SEQ ID NO: 131515 - RNA, 19 nt, Artificial Sequence
  Synthetic
gauggagauaacagacaca

SEQ ID NO: 131516 - RNA, 22 nt, Artificial Sequence
  Synthetic
gcuguauauucucaccaccaca

SEQ ID NO: 131517 - RNA, 18 nt, Artificial Sequence
  Synthetic
guauaugaaaaacccaca

SEQ ID NO: 131518 - RNA, 18 nt, Artificial Sequence
  Synthetic
gggguuggagcccccaca

SEQ ID NO: 131519 - RNA, 20 nt, Artificial Sequence
  Synthetic
gugggguuggagcccccaca

SEQ ID NO: 131520 - RNA, 22 nt, Artificial Sequence
  Synthetic
guauccauuggcuuuggccaca

SEQ ID NO: 131521 - RNA, 18 nt, Artificial Sequence
  Synthetic
guggaauggaauuccaca

SEQ ID NO: 131522 - RNA, 24 nt, Artificial Sequence
  Synthetic
gaaauccccaaacugcuuuccaca

SEQ ID NO: 131523 - RNA, 21 nt, Artificial Sequence
  Synthetic
gucuuuuuuuuuuuuuccaca

SEQ ID NO: 131524 - RNA, 23 nt, Artificial Sequence
  Synthetic
guauccaccauuauaguaucaca

SEQ ID NO: 131525 - RNA, 24 nt, Artificial Sequence
  Synthetic
gguauccaccauuauaguaucaca

SEQ ID NO: 131526 - RNA, 19 nt, Artificial Sequence
  Synthetic
gcaaauuacccaucucaca

SEQ ID NO: 131527 - RNA, 19 nt, Artificial Sequence
  Synthetic
guuaaaaaagaaaaagaca

SEQ ID NO: 131528 - RNA, 24 nt, Artificial Sequence
  Synthetic
gcacuauucccaauaccaaagaca

SEQ ID NO: 131529 - RNA, 24 nt, Artificial Sequence
  Synthetic
gcacuauucacaauagcaaagaca

SEQ ID NO: 131530 - RNA, 22 nt, Artificial Sequence
  Synthetic
gcuauucacaauagcaaagaca

SEQ ID NO: 131531 - RNA, 24 nt, Artificial Sequence
  Synthetic
gugcuauucacaauagcaaagaca

SEQ ID NO: 131532 - RNA, 19 nt, Artificial Sequence
  Synthetic
gaggaaaaggaggaagaca

SEQ ID NO: 131533 - RNA, 19 nt, Artificial Sequence
  Synthetic
guggaaaggagaagagaca

SEQ ID NO: 131534 - RNA, 23 nt, Artificial Sequence
  Synthetic
gaaucacuugaaccugggagaca

SEQ ID NO: 131535 - RNA, 21 nt, Artificial Sequence
  Synthetic
gccacucgggaggcugagaca

SEQ ID NO: 131536 - RNA, 19 nt, Artificial Sequence
  Synthetic
gugaccuggaugugagaca

SEQ ID NO: 131537 - RNA, 21 nt, Artificial Sequence
  Synthetic
gcgugaccuggaugugagaca

SEQ ID NO: 131538 - RNA, 20 nt, Artificial Sequence
  Synthetic
gaauuauaaaauuauagaca

SEQ ID NO: 131539 - RNA, 23 nt, Artificial Sequence
  Synthetic
gaugaauuauaaaauuauagaca

SEQ ID NO: 131540 - RNA, 18 nt, Artificial Sequence
  Synthetic
gacagaaaacaaaauaca

SEQ ID NO: 131541 - RNA, 21 nt, Artificial Sequence
  Synthetic
guucacagaaaagaaaauaca

SEQ ID NO: 131542 - RNA, 21 nt, Artificial Sequence
  Synthetic
gacugauaacacagaaauaca

SEQ ID NO: 131543 - RNA, 20 nt, Artificial Sequence
  Synthetic
guuauauuuaaaauaauaca

SEQ ID NO: 131544 - RNA, 18 nt, Artificial Sequence
  Synthetic
ggaaaaugaacuaauaca

SEQ ID NO: 131545 - RNA, 21 nt, Artificial Sequence
  Synthetic
guaggaaaaugaacuaauaca

SEQ ID NO: 131546 - RNA, 24 nt, Artificial Sequence
  Synthetic
gcaguaggaaaaugaacuaauaca

SEQ ID NO: 131547 - RNA, 19 nt, Artificial Sequence
  Synthetic
gauauuauucagccauaca

SEQ ID NO: 131548 - RNA, 20 nt, Artificial Sequence
  Synthetic
ggauauuauucagccauaca

SEQ ID NO: 131549 - RNA, 21 nt, Artificial Sequence
  Synthetic
gggauauuauucagccauaca

SEQ ID NO: 131550 - RNA, 23 nt, Artificial Sequence
  Synthetic
gaaauuauaauaaaagagauaca

SEQ ID NO: 131551 - RNA, 18 nt, Artificial Sequence
  Synthetic
gauacaauuuuagauaca

SEQ ID NO: 131552 - RNA, 18 nt, Artificial Sequence
  Synthetic
guugagucuguggauaca

SEQ ID NO: 131553 - RNA, 20 nt, Artificial Sequence
  Synthetic
guguugagucuguggauaca

SEQ ID NO: 131554 - RNA, 21 nt, Artificial Sequence
  Synthetic
gguguugagucuguggauaca

SEQ ID NO: 131555 - RNA, 23 nt, Artificial Sequence
  Synthetic
gugguguugagucuguggauaca

SEQ ID NO: 131556 - RNA, 20 nt, Artificial Sequence
  Synthetic
gaugguuaccagaggcuaca

SEQ ID NO: 131557 - RNA, 21 nt, Artificial Sequence
  Synthetic
ggaugguuaccagaggcuaca

SEQ ID NO: 131558 - RNA, 18 nt, Artificial Sequence
  Synthetic
gcucagcccauggcuaca

SEQ ID NO: 131559 - RNA, 20 nt, Artificial Sequence
  Synthetic
gagcucagcccauggcuaca

SEQ ID NO: 131560 - RNA, 24 nt, Artificial Sequence
  Synthetic
gauagagcucagcccauggcuaca

SEQ ID NO: 131561 - RNA, 19 nt, Artificial Sequence
  Synthetic
gaauuuuuugaauauuaca

SEQ ID NO: 131562 - RNA, 20 nt, Artificial Sequence
  Synthetic
gccuaggaauacaacuuaca

SEQ ID NO: 131563 - RNA, 22 nt, Artificial Sequence
  Synthetic
gugccuaggaauacaacuuaca

SEQ ID NO: 131564 - RNA, 20 nt, Artificial Sequence
  Synthetic
gccuaggaauccaacuuaca

SEQ ID NO: 131565 - RNA, 18 nt, Artificial Sequence
  Synthetic
gauuucucucucuuuaca

SEQ ID NO: 131566 - RNA, 21 nt, Artificial Sequence
  Synthetic
gucuuuugcccacuuuuuaca

SEQ ID NO: 131567 - RNA, 19 nt, Artificial Sequence
  Synthetic
gaaaaaccaaaccaaacca

SEQ ID NO: 131568 - RNA, 18 nt, Artificial Sequence
  Synthetic
ggacacaaagccaaacca

SEQ ID NO: 131569 - RNA, 19 nt, Artificial Sequence
  Synthetic
gggacacaaagccaaacca

SEQ ID NO: 131570 - RNA, 20 nt, Artificial Sequence
  Synthetic
ggggacacaaagccaaacca

SEQ ID NO: 131571 - RNA, 22 nt, Artificial Sequence
  Synthetic
guggggacacaaagccaaacca

SEQ ID NO: 131572 - RNA, 23 nt, Artificial Sequence
  Synthetic
gguggggacacaaagccaaacca

SEQ ID NO: 131573 - RNA, 24 nt, Artificial Sequence
  Synthetic
ggguggggacacaaagccaaacca

SEQ ID NO: 131574 - RNA, 22 nt, Artificial Sequence
  Synthetic
gccuccccagccaugcaaacca

SEQ ID NO: 131575 - RNA, 23 nt, Artificial Sequence
  Synthetic
ggccuccccagccaugcaaacca

SEQ ID NO: 131576 - RNA, 18 nt, Artificial Sequence
  Synthetic
ggagaaucccuugaacca

SEQ ID NO: 131577 - RNA, 21 nt, Artificial Sequence
  Synthetic
gcaggagaaucccuugaacca

SEQ ID NO: 131578 - RNA, 22 nt, Artificial Sequence
  Synthetic
ggcaggagaaucccuugaacca

SEQ ID NO: 131579 - RNA, 24 nt, Artificial Sequence
  Synthetic
gaggcaggagaaucccuugaacca

SEQ ID NO: 131580 - RNA, 19 nt, Artificial Sequence
  Synthetic
gugaauauacuaaacacca

SEQ ID NO: 131581 - RNA, 23 nt, Artificial Sequence
  Synthetic
gaaaauguggcacauacacacca

SEQ ID NO: 131582 - RNA, 23 nt, Artificial Sequence
  Synthetic
gaaaauguggcacauauacacca

SEQ ID NO: 131583 - RNA, 22 nt, Artificial Sequence
  Synthetic
gaaaauuggcacauauacacca

SEQ ID NO: 131584 - RNA, 23 nt, Artificial Sequence
  Synthetic
gaaaaugugguacauauacacca

SEQ ID NO: 131585 - RNA, 23 nt, Artificial Sequence
  Synthetic
gaaaauacggugcauauacacca

SEQ ID NO: 131586 - RNA, 21 nt, Artificial Sequence
  Synthetic
gaauguggcgcguauacacca

SEQ ID NO: 131587 - RNA, 23 nt, Artificial Sequence
  Synthetic
gaaaauguggcacauguacacca

SEQ ID NO: 131588 - RNA, 19 nt, Artificial Sequence
  Synthetic
gauauauauauaugcacca

SEQ ID NO: 131589 - RNA, 21 nt, Artificial Sequence
  Synthetic
gugauauauauauaugcacca

SEQ ID NO: 131590 - RNA, 20 nt, Artificial Sequence
  Synthetic
guuuauuuuuguuaugacca

SEQ ID NO: 131591 - RNA, 23 nt, Artificial Sequence
  Synthetic
gaaaaugugguaucuauauacca

SEQ ID NO: 131592 - RNA, 19 nt, Artificial Sequence
  Synthetic
guugaagugcuaaccccca

SEQ ID NO: 131593 - RNA, 23 nt, Artificial Sequence
  Synthetic
guauguugaagugcuaaccccca

SEQ ID NO: 131594 - RNA, 18 nt, Artificial Sequence
  Synthetic
gcgaccccugaagcccca

SEQ ID NO: 131595 - RNA, 22 nt, Artificial Sequence
  Synthetic
gucugcgaccccugaagcccca

SEQ ID NO: 131596 - RNA, 24 nt, Artificial Sequence
  Synthetic
gcgucugcgaccccugaagcccca

SEQ ID NO: 131597 - RNA, 18 nt, Artificial Sequence
  Synthetic
gaggauugcuugagccca

SEQ ID NO: 131598 - RNA, 19 nt, Artificial Sequence
  Synthetic
ggaggauugcuugagccca

SEQ ID NO: 131599 - RNA, 20 nt, Artificial Sequence
  Synthetic
gggaggauugcuugagccca

SEQ ID NO: 131600 - RNA, 22 nt, Artificial Sequence
  Synthetic
gcuguuacuacaucuaggccca

SEQ ID NO: 131601 - RNA, 24 nt, Artificial Sequence
  Synthetic
gagcuguuacuacaucuaggccca

SEQ ID NO: 131602 - RNA, 20 nt, Artificial Sequence
  Synthetic
gauacauuccaagacuccca

SEQ ID NO: 131603 - RNA, 21 nt, Artificial Sequence
  Synthetic
ggauacauuccaagacuccca

SEQ ID NO: 131604 - RNA, 22 nt, Artificial Sequence
  Synthetic
gggauacauuccaagacuccca

SEQ ID NO: 131605 - RNA, 23 nt, Artificial Sequence
  Synthetic
ggggauacauuccaagacuccca

SEQ ID NO: 131606 - RNA, 18 nt, Artificial Sequence
  Synthetic
gauucaaaugaccuccca

SEQ ID NO: 131607 - RNA, 18 nt, Artificial Sequence
  Synthetic
gauuauuaugucuuccca

SEQ ID NO: 131608 - RNA, 19 nt, Artificial Sequence
  Synthetic
ggauuauuaugucuuccca

SEQ ID NO: 131609 - RNA, 20 nt, Artificial Sequence
  Synthetic
gcagcgagaauuucaagcca

SEQ ID NO: 131610 - RNA, 21 nt, Artificial Sequence
  Synthetic
ggcagcgagaauuucaagcca

SEQ ID NO: 131611 - RNA, 24 nt, Artificial Sequence
  Synthetic
gcuggcagcgagaauuucaagcca

SEQ ID NO: 131612 - RNA, 20 nt, Artificial Sequence
  Synthetic
gaagaggugaaaggcagcca

SEQ ID NO: 131613 - RNA, 19 nt, Artificial Sequence
  Synthetic
gucaguaaaacaguggcca

SEQ ID NO: 131614 - RNA, 19 nt, Artificial Sequence
  Synthetic
gucucagagacuguugcca

SEQ ID NO: 131615 - RNA, 18 nt, Artificial Sequence
  Synthetic
gaguucagaaauuugcca

SEQ ID NO: 131616 - RNA, 19 nt, Artificial Sequence
  Synthetic
ggaguucagaaauuugcca

SEQ ID NO: 131617 - RNA, 18 nt, Artificial Sequence
  Synthetic
ggaggauuacuucaucca

SEQ ID NO: 131618 - RNA, 19 nt, Artificial Sequence
  Synthetic
gggaggauuacuucaucca

SEQ ID NO: 131619 - RNA, 21 nt, Artificial Sequence
  Synthetic
gugggaggauuacuucaucca

SEQ ID NO: 131620 - RNA, 22 nt, Artificial Sequence
  Synthetic
ggugggaggauuacuucaucca

SEQ ID NO: 131621 - RNA, 24 nt, Artificial Sequence
  Synthetic
gaggugggaggauuacuucaucca

SEQ ID NO: 131622 - RNA, 18 nt, Artificial Sequence
  Synthetic
guaaucuuccuuuaucca

SEQ ID NO: 131623 - RNA, 19 nt, Artificial Sequence
  Synthetic
gauuuugauaaugauucca

SEQ ID NO: 131624 - RNA, 21 nt, Artificial Sequence
  Synthetic
gugauuuugauaaugauucca

SEQ ID NO: 131625 - RNA, 24 nt, Artificial Sequence
  Synthetic
guugugauuuugauaaugauucca

SEQ ID NO: 131626 - RNA, 20 nt, Artificial Sequence
  Synthetic
gaaagacuauucuuuuucca

SEQ ID NO: 131627 - RNA, 22 nt, Artificial Sequence
  Synthetic
gugaaagacuauucuuuuucca

SEQ ID NO: 131628 - RNA, 18 nt, Artificial Sequence
  Synthetic
gaaaaguggccaaaagca

SEQ ID NO: 131629 - RNA, 19 nt, Artificial Sequence
  Synthetic
ggaaaaguggccaaaagca

SEQ ID NO: 131630 - RNA, 20 nt, Artificial Sequence
  Synthetic
gggaaaaguggccaaaagca

SEQ ID NO: 131631 - RNA, 19 nt, Artificial Sequence
  Synthetic
gagaaaauaaacacaagca

SEQ ID NO: 131632 - RNA, 24 nt, Artificial Sequence
  Synthetic
gacaaaaggguaaaauaagaagca

SEQ ID NO: 131633 - RNA, 18 nt, Artificial Sequence
  Synthetic
gugagagaccccgaagca

SEQ ID NO: 131634 - RNA, 24 nt, Artificial Sequence
  Synthetic
gccuuugugagagaccccgaagca

SEQ ID NO: 131635 - RNA, 18 nt, Artificial Sequence
  Synthetic
gacaaggaaaaugaagca

SEQ ID NO: 131636 - RNA, 19 nt, Artificial Sequence
  Synthetic
guggagagugagaacagca

SEQ ID NO: 131637 - RNA, 21 nt, Artificial Sequence
  Synthetic
gauucuuccuacccaugagca

SEQ ID NO: 131638 - RNA, 18 nt, Artificial Sequence
  Synthetic
gcacuguucacaauagca

SEQ ID NO: 131639 - RNA, 21 nt, Artificial Sequence
  Synthetic
gcagcacuguucacaauagca

SEQ ID NO: 131640 - RNA, 21 nt, Artificial Sequence
  Synthetic
gcuaguuugauaggaauagca

SEQ ID NO: 131641 - RNA, 19 nt, Artificial Sequence
  Synthetic
gcugcuaucauggcuagca

SEQ ID NO: 131642 - RNA, 22 nt, Artificial Sequence
  Synthetic
gauacaaugggggguacaggca

SEQ ID NO: 131643 - RNA, 23 nt, Artificial Sequence
  Synthetic
ggauacaaugggggguacaggca

SEQ ID NO: 131644 - RNA, 19 nt, Artificial Sequence
  Synthetic
guuuugacacaggcaggca

SEQ ID NO: 131645 - RNA, 22 nt, Artificial Sequence
  Synthetic
gauguuuugacacaggcaggca

SEQ ID NO: 131646 - RNA, 24 nt, Artificial Sequence
  Synthetic
gagauguuuugacacaggcaggca

SEQ ID NO: 131647 - RNA, 22 nt, Artificial Sequence
  Synthetic
gcacauuguugaagcagaggca

SEQ ID NO: 131648 - RNA, 21 nt, Artificial Sequence
  Synthetic
gcuacucaggaggcugaggca

SEQ ID NO: 131649 - RNA, 21 nt, Artificial Sequence
  Synthetic
gcuacucgggaggcugaggca

SEQ ID NO: 131650 - RNA, 20 nt, Artificial Sequence
  Synthetic
gucugggguuuuuauaggca

SEQ ID NO: 131651 - RNA, 22 nt, Artificial Sequence
  Synthetic
gagucugggguuuuuauaggca

SEQ ID NO: 131652 - RNA, 19 nt, Artificial Sequence
  Synthetic
gaaagaaaacaauagggca

SEQ ID NO: 131653 - RNA, 21 nt, Artificial Sequence
  Synthetic
gucaguuuaggggcuggggca

SEQ ID NO: 131654 - RNA, 22 nt, Artificial Sequence
  Synthetic
ggucaguuuaggggcuggggca

SEQ ID NO: 131655 - RNA, 21 nt, Artificial Sequence
  Synthetic
gaccccaucagaaagugggca

SEQ ID NO: 131656 - RNA, 18 nt, Artificial Sequence
  Synthetic
gcugugcaaucuugggca

SEQ ID NO: 131657 - RNA, 19 nt, Artificial Sequence
  Synthetic
ggcugugcaaucuugggca

SEQ ID NO: 131658 - RNA, 21 nt, Artificial Sequence
  Synthetic
gguagcuugauggggauggca

SEQ ID NO: 131659 - RNA, 20 nt, Artificial Sequence
  Synthetic
guagcuugauggagacugca

SEQ ID NO: 131660 - RNA, 21 nt, Artificial Sequence
  Synthetic
gguagcuugauggagacugca

SEQ ID NO: 131661 - RNA, 22 nt, Artificial Sequence
  Synthetic
guaacaaucaucugagccugca

SEQ ID NO: 131662 - RNA, 23 nt, Artificial Sequence
  Synthetic
gguaacaaucaucugagccugca

SEQ ID NO: 131663 - RNA, 18 nt, Artificial Sequence
  Synthetic
gaaaugcugcuuccugca

SEQ ID NO: 131664 - RNA, 19 nt, Artificial Sequence
  Synthetic
gccacugugcccggcugca

SEQ ID NO: 131665 - RNA, 21 nt, Artificial Sequence
  Synthetic
gagccacugugcccggcugca

SEQ ID NO: 131666 - RNA, 23 nt, Artificial Sequence
  Synthetic
gugagccacugugcccggcugca

SEQ ID NO: 131667 - RNA, 20 nt, Artificial Sequence
  Synthetic
gcugcaucuauguugcugca

SEQ ID NO: 131668 - RNA, 23 nt, Artificial Sequence
  Synthetic
gucauauuugagaauuaagugca

SEQ ID NO: 131669 - RNA, 18 nt, Artificial Sequence
  Synthetic
ggcauucacagaauugca

SEQ ID NO: 131670 - RNA, 23 nt, Artificial Sequence
  Synthetic
gaaaacuggauauacacauugca

SEQ ID NO: 131671 - RNA, 24 nt, Artificial Sequence
  Synthetic
ggaaaacuggauauacacauugca

SEQ ID NO: 131672 - RNA, 18 nt, Artificial Sequence
  Synthetic
guucuuagcuuccuugca

SEQ ID NO: 131673 - RNA, 19 nt, Artificial Sequence
  Synthetic
gguucuuagcuuccuugca

SEQ ID NO: 131674 - RNA, 23 nt, Artificial Sequence
  Synthetic
gaacccgggaggcggagcuugca

SEQ ID NO: 131675 - RNA, 23 nt, Artificial Sequence
  Synthetic
gaacccaggagacagagguugca

SEQ ID NO: 131676 - RNA, 23 nt, Artificial Sequence
  Synthetic
gaaccagggagucagagguugca

SEQ ID NO: 131677 - RNA, 20 nt, Artificial Sequence
  Synthetic
gaauaaaaauguucaaauca

SEQ ID NO: 131678 - RNA, 18 nt, Artificial Sequence
  Synthetic
guggagguaauugaauca

SEQ ID NO: 131679 - RNA, 23 nt, Artificial Sequence
  Synthetic
gcuauguggagguaauugaauca

SEQ ID NO: 131680 - RNA, 24 nt, Artificial Sequence
  Synthetic
ggcuauguggagguaauugaauca

SEQ ID NO: 131681 - RNA, 19 nt, Artificial Sequence
  Synthetic
gaaaaggugcucaacauca

SEQ ID NO: 131682 - RNA, 18 nt, Artificial Sequence
  Synthetic
gucuuccaccuuccauca

SEQ ID NO: 131683 - RNA, 19 nt, Artificial Sequence
  Synthetic
ggucuuccaccuuccauca

SEQ ID NO: 131684 - RNA, 19 nt, Artificial Sequence
  Synthetic
gaagugugggugaagauca

SEQ ID NO: 131685 - RNA, 19 nt, Artificial Sequence
  Synthetic
gugagguaauugaggauca

SEQ ID NO: 131686 - RNA, 20 nt, Artificial Sequence
  Synthetic
ggugagguaauugaggauca

SEQ ID NO: 131687 - RNA, 20 nt, Artificial Sequence
  Synthetic
gauaaauauacauuauauca

SEQ ID NO: 131688 - RNA, 23 nt, Artificial Sequence
  Synthetic
gaugauaaauauacauuauauca

SEQ ID NO: 131689 - RNA, 21 nt, Artificial Sequence
  Synthetic
gcucuugaacuucuggccuca

SEQ ID NO: 131690 - RNA, 24 nt, Artificial Sequence
  Synthetic
guugcucuugaacuucuggccuca

SEQ ID NO: 131691 - RNA, 18 nt, Artificial Sequence
  Synthetic
gauuuaauuacugccuca

SEQ ID NO: 131692 - RNA, 18 nt, Artificial Sequence
  Synthetic
gagugaaacaccgucuca

SEQ ID NO: 131693 - RNA, 20 nt, Artificial Sequence
  Synthetic
gucagaaacuuugggucuca

SEQ ID NO: 131694 - RNA, 20 nt, Artificial Sequence
  Synthetic
gucuuggguugcucuucuca

SEQ ID NO: 131695 - RNA, 22 nt, Artificial Sequence
  Synthetic
gugucuuggguugcucuucuca

SEQ ID NO: 131696 - RNA, 18 nt, Artificial Sequence
  Synthetic
gaauacauuuauuucuca

SEQ ID NO: 131697 - RNA, 19 nt, Artificial Sequence
  Synthetic
ggaauacauuuauuucuca

SEQ ID NO: 131698 - RNA, 20 nt, Artificial Sequence
  Synthetic
gacuuuaguaggggaaguca

SEQ ID NO: 131699 - RNA, 18 nt, Artificial Sequence
  Synthetic
guugggcauucuuaguca

SEQ ID NO: 131700 - RNA, 19 nt, Artificial Sequence
  Synthetic
gguugggcauucuuaguca

SEQ ID NO: 131701 - RNA, 21 nt, Artificial Sequence
  Synthetic
gagguugggcauucuuaguca

SEQ ID NO: 131702 - RNA, 22 nt, Artificial Sequence
  Synthetic
ggagguugggcauucuuaguca

SEQ ID NO: 131703 - RNA, 18 nt, Artificial Sequence
  Synthetic
gcaagggagagaagguca

SEQ ID NO: 131704 - RNA, 20 nt, Artificial Sequence
  Synthetic
gagcaagggagagaagguca

SEQ ID NO: 131705 - RNA, 18 nt, Artificial Sequence
  Synthetic
gcaacuaacuugauguca

SEQ ID NO: 131706 - RNA, 19 nt, Artificial Sequence
  Synthetic
guuucuaaaauagaauuca

SEQ ID NO: 131707 - RNA, 20 nt, Artificial Sequence
  Synthetic
gcauuucauuuauucauuca

SEQ ID NO: 131708 - RNA, 22 nt, Artificial Sequence
  Synthetic
gacaaugauagcaccugcuuca

SEQ ID NO: 131709 - RNA, 23 nt, Artificial Sequence
  Synthetic
ggacaaugauagcaccugcuuca

SEQ ID NO: 131710 - RNA, 24 nt, Artificial Sequence
  Synthetic
gggacaaugauagcaccugcuuca

SEQ ID NO: 131711 - RNA, 18 nt, Artificial Sequence
  Synthetic
gcagaaggcaccucuuca

SEQ ID NO: 131712 - RNA, 19 nt, Artificial Sequence
  Synthetic
ggcagaaggcaccucuuca

SEQ ID NO: 131713 - RNA, 20 nt, Artificial Sequence
  Synthetic
gcuaccaaugacuuucuuca

SEQ ID NO: 131714 - RNA, 20 nt, Artificial Sequence
  Synthetic
gcuaccauugacuuucuuca

SEQ ID NO: 131715 - RNA, 18 nt, Artificial Sequence
  Synthetic
guugaggcaguuucuuca

SEQ ID NO: 131716 - RNA, 22 nt, Artificial Sequence
  Synthetic
guuaguugaggcaguuucuuca

SEQ ID NO: 131717 - RNA, 22 nt, Artificial Sequence
  Synthetic
gaaaaugcuuuccaagaguuca

SEQ ID NO: 131718 - RNA, 22 nt, Artificial Sequence
  Synthetic
gcaaccuccgccuccagguuca

SEQ ID NO: 131719 - RNA, 20 nt, Artificial Sequence
  Synthetic
gccucugccuccuggguuca

SEQ ID NO: 131720 - RNA, 23 nt, Artificial Sequence
  Synthetic
gcagccucugccuccuggguuca

SEQ ID NO: 131721 - RNA, 23 nt, Artificial Sequence
  Synthetic
gcuuccuccaguuccuggguuca

SEQ ID NO: 131722 - RNA, 18 nt, Artificial Sequence
  Synthetic
guuggagguggaauuuca

SEQ ID NO: 131723 - RNA, 20 nt, Artificial Sequence
  Synthetic
gaacuucuaccuagauuuca

SEQ ID NO: 131724 - RNA, 21 nt, Artificial Sequence
  Synthetic
ggaacuucuaccuagauuuca

SEQ ID NO: 131725 - RNA, 22 nt, Artificial Sequence
  Synthetic
gggaacuucuaccuagauuuca

SEQ ID NO: 131726 - RNA, 20 nt, Artificial Sequence
  Synthetic
gaaccucugccuagauuuca

SEQ ID NO: 131727 - RNA, 21 nt, Artificial Sequence
  Synthetic
ggaaccucugccuagauuuca

SEQ ID NO: 131728 - RNA, 22 nt, Artificial Sequence
  Synthetic
gggaaccucugccuagauuuca

SEQ ID NO: 131729 - RNA, 18 nt, Artificial Sequence
  Synthetic
ggcauaauauauauuuca

SEQ ID NO: 131730 - RNA, 24 nt, Artificial Sequence
  Synthetic
gaaauaggcauaauauauauuuca

SEQ ID NO: 131731 - RNA, 18 nt, Artificial Sequence
  Synthetic
gaggaaggcaccuuuuca

SEQ ID NO: 131732 - RNA, 19 nt, Artificial Sequence
  Synthetic
ggaggaaggcaccuuuuca

SEQ ID NO: 131733 - RNA, 24 nt, Artificial Sequence
  Synthetic
gacacuaugcagccauaaaaaaga

SEQ ID NO: 131734 - RNA, 22 nt, Artificial Sequence
  Synthetic
gauuuaaaaaauuuaaaaaaga

SEQ ID NO: 131735 - RNA, 22 nt, Artificial Sequence
  Synthetic
gcaaaaaaagaauauaaaaaga

SEQ ID NO: 131736 - RNA, 18 nt, Artificial Sequence
  Synthetic
gaacacagcuggaaaaga

SEQ ID NO: 131737 - RNA, 20 nt, Artificial Sequence
  Synthetic
gagaacacagcuggaaaaga

SEQ ID NO: 131738 - RNA, 18 nt, Artificial Sequence
  Synthetic
guuaguugaacccaaaga

SEQ ID NO: 131739 - RNA, 22 nt, Artificial Sequence
  Synthetic
gcaaguuaguugaacccaaaga

SEQ ID NO: 131740 - RNA, 21 nt, Artificial Sequence
  Synthetic
guugaguaguugcagcaaaga

SEQ ID NO: 131741 - RNA, 23 nt, Artificial Sequence
  Synthetic
gaguugaguaguugcagcaaaga

SEQ ID NO: 131742 - RNA, 23 nt, Artificial Sequence
  Synthetic
gcuacaaaaaauaguuagaaaga

SEQ ID NO: 131743 - RNA, 24 nt, Artificial Sequence
  Synthetic
ggcuacaaaaaauaguuagaaaga

SEQ ID NO: 131744 - RNA, 23 nt, Artificial Sequence
  Synthetic
guacaaaaaauuaguuagaaaga

SEQ ID NO: 131745 - RNA, 24 nt, Artificial Sequence
  Synthetic
gguacaaaaaauuaguuagaaaga

SEQ ID NO: 131746 - RNA, 20 nt, Artificial Sequence
  Synthetic
gaauuguacacuuugaaaga

SEQ ID NO: 131747 - RNA, 23 nt, Artificial Sequence
  Synthetic
gaaacuauuucaaaagauaaaga

SEQ ID NO: 131748 - RNA, 21 nt, Artificial Sequence
  Synthetic
gcuaugaagaaauacccaaga

SEQ ID NO: 131749 - RNA, 24 nt, Artificial Sequence
  Synthetic
gcugcuaugaagaaauacccaaga

SEQ ID NO: 131750 - RNA, 18 nt, Artificial Sequence
  Synthetic
gaaacuacaaaaagaaga

SEQ ID NO: 131751 - RNA, 19 nt, Artificial Sequence
  Synthetic
ggaaacuacaaaaagaaga

SEQ ID NO: 131752 - RNA, 18 nt, Artificial Sequence
  Synthetic
gggaguggaagaagaaga

SEQ ID NO: 131753 - RNA, 19 nt, Artificial Sequence
  Synthetic
gaguagacaagagagaaga

SEQ ID NO: 131754 - RNA, 23 nt, Artificial Sequence
  Synthetic
gaaagaguagacaagagagaaga

SEQ ID NO: 131755 - RNA, 19 nt, Artificial Sequence
  Synthetic
gaaggguauuccaggaaga

SEQ ID NO: 131756 - RNA, 22 nt, Artificial Sequence
  Synthetic
gacgaaggguauuccaggaaga

SEQ ID NO: 131757 - RNA, 18 nt, Artificial Sequence
  Synthetic
ggagagaggaagggaaga

SEQ ID NO: 131758 - RNA, 19 nt, Artificial Sequence
  Synthetic
gggagagaggaagggaaga

SEQ ID NO: 131759 - RNA, 22 nt, Artificial Sequence
  Synthetic
guagggagagaggaagggaaga

SEQ ID NO: 131760 - RNA, 24 nt, Artificial Sequence
  Synthetic
gaguagggagagaggaagggaaga

SEQ ID NO: 131761 - RNA, 18 nt, Artificial Sequence
  Synthetic
ggaaaagaaaggggaaga

SEQ ID NO: 131762 - RNA, 23 nt, Artificial Sequence
  Synthetic
gucuccuguucucugugggaaga

SEQ ID NO: 131763 - RNA, 21 nt, Artificial Sequence
  Synthetic
gaaaagaaaguggauggaaga

SEQ ID NO: 131764 - RNA, 19 nt, Artificial Sequence
  Synthetic
gaugcgaucaacuggaaga

SEQ ID NO: 131765 - RNA, 22 nt, Artificial Sequence
  Synthetic
gccgaugcgaucaacuggaaga

SEQ ID NO: 131766 - RNA, 24 nt, Artificial Sequence
  Synthetic
gagccgaugcgaucaacuggaaga

SEQ ID NO: 131767 - RNA, 21 nt, Artificial Sequence
  Synthetic
gaaugaaugaaggaaugaaga

SEQ ID NO: 131768 - RNA, 23 nt, Artificial Sequence
  Synthetic
gugaaugaaugaaggaaugaaga

SEQ ID NO: 131769 - RNA, 20 nt, Artificial Sequence
  Synthetic
guuuuuugcuuuuuugaaga

SEQ ID NO: 131770 - RNA, 24 nt, Artificial Sequence
  Synthetic
guuuguuuuuugcuuuuuugaaga

SEQ ID NO: 131771 - RNA, 18 nt, Artificial Sequence
  Synthetic
ggguauaauaaauuaaga

SEQ ID NO: 131772 - RNA, 18 nt, Artificial Sequence
  Synthetic
ggcuuugucuuacacaga

SEQ ID NO: 131773 - RNA, 18 nt, Artificial Sequence
  Synthetic
gauuuguugggagacaga

SEQ ID NO: 131774 - RNA, 20 nt, Artificial Sequence
  Synthetic
gagauuuguugggagacaga

SEQ ID NO: 131775 - RNA, 19 nt, Artificial Sequence
  Synthetic
gauguuggugaccuucaga

SEQ ID NO: 131776 - RNA, 18 nt, Artificial Sequence
  Synthetic
guuuagaauaguuucaga

SEQ ID NO: 131777 - RNA, 19 nt, Artificial Sequence
  Synthetic
gauuuuuaugagaaagaga

SEQ ID NO: 131778 - RNA, 20 nt, Artificial Sequence
  Synthetic
gccaaaggaggggaaagaga

SEQ ID NO: 131779 - RNA, 21 nt, Artificial Sequence
  Synthetic
gugacaauagggauaaagaga

SEQ ID NO: 131780 - RNA, 22 nt, Artificial Sequence
  Synthetic
ggugacaauagggauaaagaga

SEQ ID NO: 131781 - RNA, 24 nt, Artificial Sequence
  Synthetic
gaggugacaauagggauaaagaga

SEQ ID NO: 131782 - RNA, 20 nt, Artificial Sequence
  Synthetic
gaaaagagaggaggaagaga

SEQ ID NO: 131783 - RNA, 23 nt, Artificial Sequence
  Synthetic
guagaaaagagaggaggaagaga

SEQ ID NO: 131784 - RNA, 24 nt, Artificial Sequence
  Synthetic
gguagaaaagagaggaggaagaga

SEQ ID NO: 131785 - RNA, 18 nt, Artificial Sequence
  Synthetic
gugaaaggcagccagaga

SEQ ID NO: 131786 - RNA, 19 nt, Artificial Sequence
  Synthetic
ggugaaaggcagccagaga

SEQ ID NO: 131787 - RNA, 19 nt, Artificial Sequence
  Synthetic
gaugcccugcccagagaga

SEQ ID NO: 131788 - RNA, 21 nt, Artificial Sequence
  Synthetic
gagaugcccugcccagagaga

SEQ ID NO: 131789 - RNA, 20 nt, Artificial Sequence
  Synthetic
gaaaaagaaaaugagagaga

SEQ ID NO: 131790 - RNA, 23 nt, Artificial Sequence
  Synthetic
gaagaaaaagaaaaugagagaga

SEQ ID NO: 131791 - RNA, 20 nt, Artificial Sequence
  Synthetic
gacaaagaaagucauagaga

SEQ ID NO: 131792 - RNA, 24 nt, Artificial Sequence
  Synthetic
gauuuuuuguauuuucaguagaga

SEQ ID NO: 131793 - RNA, 22 nt, Artificial Sequence
  Synthetic
guuuuuguauuuuuaguagaga

SEQ ID NO: 131794 - RNA, 22 nt, Artificial Sequence
  Synthetic
guuuuuuuauuuuuaguagaga

SEQ ID NO: 131795 - RNA, 24 nt, Artificial Sequence
  Synthetic
gcugcuaugaagaaauacccgaga

SEQ ID NO: 131796 - RNA, 18 nt, Artificial Sequence
  Synthetic
gccaguaacaggaggaga

SEQ ID NO: 131797 - RNA, 20 nt, Artificial Sequence
  Synthetic
gcuuuuuguuuuucuggaga

SEQ ID NO: 131798 - RNA, 23 nt, Artificial Sequence
  Synthetic
gcugcuuuuuguuuuucuggaga

SEQ ID NO: 131799 - RNA, 21 nt, Artificial Sequence
  Synthetic
gaaugugacccuauuuggaga

SEQ ID NO: 131800 - RNA, 20 nt, Artificial Sequence
  Synthetic
gacugcuuuuccccaugaga

SEQ ID NO: 131801 - RNA, 19 nt, Artificial Sequence
  Synthetic
gagacagaagagcaugaga

SEQ ID NO: 131802 - RNA, 20 nt, Artificial Sequence
  Synthetic
ggagacagaagagcaugaga

SEQ ID NO: 131803 - RNA, 24 nt, Artificial Sequence
  Synthetic
guauuuauuuauuuauuuaugaga

SEQ ID NO: 131804 - RNA, 21 nt, Artificial Sequence
  Synthetic
guuauaacaaaaugccugaga

SEQ ID NO: 131805 - RNA, 24 nt, Artificial Sequence
  Synthetic
gcuguuauaacaaaaugccugaga

SEQ ID NO: 131806 - RNA, 21 nt, Artificial Sequence
  Synthetic
gcaauaaagaacugccugaga

SEQ ID NO: 131807 - RNA, 23 nt, Artificial Sequence
  Synthetic
gugcaauaaagaacugccugaga

SEQ ID NO: 131808 - RNA, 21 nt, Artificial Sequence
  Synthetic
gcuauaaagaacugccugaga

SEQ ID NO: 131809 - RNA, 22 nt, Artificial Sequence
  Synthetic
guuaacaaagacauaucugaga

SEQ ID NO: 131810 - RNA, 20 nt, Artificial Sequence
  Synthetic
guuuuguuuuuuuucugaga

SEQ ID NO: 131811 - RNA, 24 nt, Artificial Sequence
  Synthetic
guuuguuuuguuuuuuuucugaga

SEQ ID NO: 131812 - RNA, 20 nt, Artificial Sequence
  Synthetic
gauuaugauuauuauugaga

SEQ ID NO: 131813 - RNA, 20 nt, Artificial Sequence
  Synthetic
gauauauauauauuuugaga

SEQ ID NO: 131814 - RNA, 23 nt, Artificial Sequence
  Synthetic
gcuucuauuuauuuauuuugaga

SEQ ID NO: 131815 - RNA, 20 nt, Artificial Sequence
  Synthetic
gcuuauuuuuucuuuugaga

SEQ ID NO: 131816 - RNA, 21 nt, Artificial Sequence
  Synthetic
ggcuuauuuuuucuuuugaga

SEQ ID NO: 131817 - RNA, 18 nt, Artificial Sequence
  Synthetic
guuuuguuauuuuugaga

SEQ ID NO: 131818 - RNA, 23 nt, Artificial Sequence
  Synthetic
guuuuguuuuguuauuuuugaga

SEQ ID NO: 131819 - RNA, 20 nt, Artificial Sequence
  Synthetic
guuuguuuguuuuuuugaga

SEQ ID NO: 131820 - RNA, 20 nt, Artificial Sequence
  Synthetic
guuuuacuuuuuuuuugaga

SEQ ID NO: 131821 - RNA, 23 nt, Artificial Sequence
  Synthetic
gaaguuuuacuuuuuuuuugaga

SEQ ID NO: 131822 - RNA, 21 nt, Artificial Sequence
  Synthetic
gacuuuuuuuuuuuuuugaga

SEQ ID NO: 131823 - RNA, 18 nt, Artificial Sequence
  Synthetic
gauggauagaaagauaga

SEQ ID NO: 131824 - RNA, 19 nt, Artificial Sequence
  Synthetic
ggauggauagaaagauaga

SEQ ID NO: 131825 - RNA, 21 nt, Artificial Sequence
  Synthetic
gacuccuggguuaaugcuaga

SEQ ID NO: 131826 - RNA, 22 nt, Artificial Sequence
  Synthetic
ggacuccuggguuaaugcuaga

SEQ ID NO: 131827 - RNA, 23 nt, Artificial Sequence
  Synthetic
gcuaauuuuguauuuuaaguaga

SEQ ID NO: 131828 - RNA, 24 nt, Artificial Sequence
  Synthetic
ggcuaauuuuguauuuuaaguaga

SEQ ID NO: 131829 - RNA, 23 nt, Artificial Sequence
  Synthetic
guuacacaaggaucugcauuaga

SEQ ID NO: 131830 - RNA, 21 nt, Artificial Sequence
  Synthetic
gcuauagcuaaauaccuuaga

SEQ ID NO: 131831 - RNA, 24 nt, Artificial Sequence
  Synthetic
gccgcuauagcuaaauaccuuaga

SEQ ID NO: 131832 - RNA, 19 nt, Artificial Sequence
  Synthetic
gcuacaaaaaauaguuaga

SEQ ID NO: 131833 - RNA, 20 nt, Artificial Sequence
  Synthetic
ggcuacaaaaaauaguuaga

SEQ ID NO: 131834 - RNA, 22 nt, Artificial Sequence
  Synthetic
gcggcuacaaaaaauaguuaga

SEQ ID NO: 131835 - RNA, 18 nt, Artificial Sequence
  Synthetic
guacaaaaaauaguuaga

SEQ ID NO: 131836 - RNA, 19 nt, Artificial Sequence
  Synthetic
gguacaaaaaauaguuaga

SEQ ID NO: 131837 - RNA, 19 nt, Artificial Sequence
  Synthetic
guacaaaaaauuaguuaga

SEQ ID NO: 131838 - RNA, 20 nt, Artificial Sequence
  Synthetic
gguacaaaaaauuaguuaga

SEQ ID NO: 131839 - RNA, 21 nt, Artificial Sequence
  Synthetic
ggguacaaaaaauuaguuaga

SEQ ID NO: 131840 - RNA, 22 nt, Artificial Sequence
  Synthetic
guagagaaaaaacacgguuaga

SEQ ID NO: 131841 - RNA, 24 nt, Artificial Sequence
  Synthetic
gaguagagaaaaaacacgguuaga

SEQ ID NO: 131842 - RNA, 19 nt, Artificial Sequence
  Synthetic
gagggcuccacccucacga

SEQ ID NO: 131843 - RNA, 18 nt, Artificial Sequence
  Synthetic
gauuuuggguugagacga

SEQ ID NO: 131844 - RNA, 21 nt, Artificial Sequence
  Synthetic
gaagauuuuggguugagacga

SEQ ID NO: 131845 - RNA, 18 nt, Artificial Sequence
  Synthetic
gguggcguaggcacccga

SEQ ID NO: 131846 - RNA, 23 nt, Artificial Sequence
  Synthetic
gcccugguggcguaggcacccga

SEQ ID NO: 131847 - RNA, 24 nt, Artificial Sequence
  Synthetic
ggcccugguggcguaggcacccga

SEQ ID NO: 131848 - RNA, 18 nt, Artificial Sequence
  Synthetic
ggagggugggaggagcga

SEQ ID NO: 131849 - RNA, 20 nt, Artificial Sequence
  Synthetic
guggagggugggaggagcga

SEQ ID NO: 131850 - RNA, 22 nt, Artificial Sequence
  Synthetic
guguggagggugggaggagcga

SEQ ID NO: 131851 - RNA, 24 nt, Artificial Sequence
  Synthetic
gaguguggagggugggaggagcga

SEQ ID NO: 131852 - RNA, 18 nt, Artificial Sequence
  Synthetic
ggagacucagaagggcga

SEQ ID NO: 131853 - RNA, 24 nt, Artificial Sequence
  Synthetic
gacacuggagacucagaagggcga

SEQ ID NO: 131854 - RNA, 19 nt, Artificial Sequence
  Synthetic
guagaaaaaccaaaaagga

SEQ ID NO: 131855 - RNA, 20 nt, Artificial Sequence
  Synthetic
gguagaaaaaccaaaaagga

SEQ ID NO: 131856 - RNA, 18 nt, Artificial Sequence
  Synthetic
gaaauuuaaggaaaagga

SEQ ID NO: 131857 - RNA, 20 nt, Artificial Sequence
  Synthetic
gaaauuuauauuucaaagga

SEQ ID NO: 131858 - RNA, 18 nt, Artificial Sequence
  Synthetic
guguagaaauuucaagga

SEQ ID NO: 131859 - RNA, 20 nt, Artificial Sequence
  Synthetic
gaguguagaaauuucaagga

SEQ ID NO: 131860 - RNA, 20 nt, Artificial Sequence
  Synthetic
gaagaaagaaagaggaagga

SEQ ID NO: 131861 - RNA, 18 nt, Artificial Sequence
  Synthetic
ggagacagaaaugaagga

SEQ ID NO: 131862 - RNA, 23 nt, Artificial Sequence
  Synthetic
gauuuuuguauaagguguaagga

SEQ ID NO: 131863 - RNA, 18 nt, Artificial Sequence
  Synthetic
guuuuuauaggcacagga

SEQ ID NO: 131864 - RNA, 19 nt, Artificial Sequence
  Synthetic
gguuuuuauaggcacagga

SEQ ID NO: 131865 - RNA, 20 nt, Artificial Sequence
  Synthetic
ggguuuuuauaggcacagga

SEQ ID NO: 131866 - RNA, 21 nt, Artificial Sequence
  Synthetic
gggguuuuuauaggcacagga

SEQ ID NO: 131867 - RNA, 18 nt, Artificial Sequence
  Synthetic
ggguggauagugucagga

SEQ ID NO: 131868 - RNA, 23 nt, Artificial Sequence
  Synthetic
gcuuccauaaaaaacaaagagga

SEQ ID NO: 131869 - RNA, 18 nt, Artificial Sequence
  Synthetic
ggagggaggaagagagga

SEQ ID NO: 131870 - RNA, 20 nt, Artificial Sequence
  Synthetic
gcggagggaggaagagagga

SEQ ID NO: 131871 - RNA, 23 nt, Artificial Sequence
  Synthetic
gaagcggagggaggaagagagga

SEQ ID NO: 131872 - RNA, 19 nt, Artificial Sequence
  Synthetic
guaagggaaggaaggagga

SEQ ID NO: 131873 - RNA, 22 nt, Artificial Sequence
  Synthetic
gcaguaagggaaggaaggagga

SEQ ID NO: 131874 - RNA, 23 nt, Artificial Sequence
  Synthetic
ggcaguaagggaaggaaggagga

SEQ ID NO: 131875 - RNA, 18 nt, Artificial Sequence
  Synthetic
guagugagggaaggagga

SEQ ID NO: 131876 - RNA, 19 nt, Artificial Sequence
  Synthetic
gguagugagggaaggagga

SEQ ID NO: 131877 - RNA, 21 nt, Artificial Sequence
  Synthetic
gagguagugagggaaggagga

SEQ ID NO: 131878 - RNA, 23 nt, Artificial Sequence
  Synthetic
gugagguagugagggaaggagga

SEQ ID NO: 131879 - RNA, 18 nt, Artificial Sequence
  Synthetic
gucaucuguaaacuagga

SEQ ID NO: 131880 - RNA, 23 nt, Artificial Sequence
  Synthetic
guuuugucaucuguaaacuagga

SEQ ID NO: 131881 - RNA, 21 nt, Artificial Sequence
  Synthetic
gcccaguucaggacuguagga

SEQ ID NO: 131882 - RNA, 20 nt, Artificial Sequence
  Synthetic
gaaaaagaaaagagaaggga

SEQ ID NO: 131883 - RNA, 23 nt, Artificial Sequence
  Synthetic
gcagaaaaagaaaagagaaggga

SEQ ID NO: 131884 - RNA, 24 nt, Artificial Sequence
  Synthetic
ggcagaaaaagaaaagagaaggga

SEQ ID NO: 131885 - RNA, 18 nt, Artificial Sequence
  Synthetic
ggcuggaggacacaggga

SEQ ID NO: 131886 - RNA, 19 nt, Artificial Sequence
  Synthetic
gggcuggaggacacaggga

SEQ ID NO: 131887 - RNA, 19 nt, Artificial Sequence
  Synthetic
guggugagggccacaggga

SEQ ID NO: 131888 - RNA, 20 nt, Artificial Sequence
  Synthetic
gguggugagggccacaggga

SEQ ID NO: 131889 - RNA, 18 nt, Artificial Sequence
  Synthetic
gagaaccagaaggaggga

SEQ ID NO: 131890 - RNA, 18 nt, Artificial Sequence
  Synthetic
ggagggugggaggaggga

SEQ ID NO: 131891 - RNA, 19 nt, Artificial Sequence
  Synthetic
gggagggugggaggaggga

SEQ ID NO: 131892 - RNA, 20 nt, Artificial Sequence
  Synthetic
ggggagggugggaggaggga

SEQ ID NO: 131893 - RNA, 22 nt, Artificial Sequence
  Synthetic
guggggagggugggaggaggga

SEQ ID NO: 131894 - RNA, 24 nt, Artificial Sequence
  Synthetic
gaguggggagggugggaggaggga

SEQ ID NO: 131895 - RNA, 18 nt, Artificial Sequence
  Synthetic
gagggagggagggaggga

SEQ ID NO: 131896 - RNA, 19 nt, Artificial Sequence
  Synthetic
ggagggagggagggaggga

SEQ ID NO: 131897 - RNA, 22 nt, Artificial Sequence
  Synthetic
gaaggagggagggagggaggga

SEQ ID NO: 131898 - RNA, 23 nt, Artificial Sequence
  Synthetic
ggaaggagggagggagggaggga

SEQ ID NO: 131899 - RNA, 20 nt, Artificial Sequence
  Synthetic
guauuguauuuauuuaggga

SEQ ID NO: 131900 - RNA, 24 nt, Artificial Sequence
  Synthetic
gacuucaguccccuuuccagggga

SEQ ID NO: 131901 - RNA, 18 nt, Artificial Sequence
  Synthetic
gagggaggagggagggga

SEQ ID NO: 131902 - RNA, 19 nt, Artificial Sequence
  Synthetic
gaggugaguggugagggga

SEQ ID NO: 131903 - RNA, 19 nt, Artificial Sequence
  Synthetic
gcuucuguuggcuagggga

SEQ ID NO: 131904 - RNA, 20 nt, Artificial Sequence
  Synthetic
ggcuucuguuggcuagggga

SEQ ID NO: 131905 - RNA, 21 nt, Artificial Sequence
  Synthetic
gacaaaaacaagcaacgggga

SEQ ID NO: 131906 - RNA, 22 nt, Artificial Sequence
  Synthetic
gacaaaaaacaagaaaugggga

SEQ ID NO: 131907 - RNA, 21 nt, Artificial Sequence
  Synthetic
gacaaaaacaagaaaugggga

SEQ ID NO: 131908 - RNA, 19 nt, Artificial Sequence
  Synthetic
gaaucaggaacucugggga

SEQ ID NO: 131909 - RNA, 23 nt, Artificial Sequence
  Synthetic
gucccaccauauacccuugggga

SEQ ID NO: 131910 - RNA, 24 nt, Artificial Sequence
  Synthetic
ggucccaccauauacccuugggga

SEQ ID NO: 131911 - RNA, 21 nt, Artificial Sequence
  Synthetic
gccaagaauacacaacuggga

SEQ ID NO: 131912 - RNA, 23 nt, Artificial Sequence
  Synthetic
gugccaagaauacacaacuggga

SEQ ID NO: 131913 - RNA, 24 nt, Artificial Sequence
  Synthetic
ggugccaagaauacacaacuggga

SEQ ID NO: 131914 - RNA, 19 nt, Artificial Sequence
  Synthetic
gcccuauugccauuuggga

SEQ ID NO: 131915 - RNA, 18 nt, Artificial Sequence
  Synthetic
gagugcuuaucuuuggga

SEQ ID NO: 131916 - RNA, 19 nt, Artificial Sequence
  Synthetic
gcuaagaaaagggaaugga

SEQ ID NO: 131917 - RNA, 20 nt, Artificial Sequence
  Synthetic
gcucucaacuccucacugga

SEQ ID NO: 131918 - RNA, 18 nt, Artificial Sequence
  Synthetic
gcaauuacaaaugcugga

SEQ ID NO: 131919 - RNA, 19 nt, Artificial Sequence
  Synthetic
ggcaauuacaaaugcugga

SEQ ID NO: 131920 - RNA, 23 nt, Artificial Sequence
  Synthetic
gacaggcaauuacaaaugcugga

SEQ ID NO: 131921 - RNA, 24 nt, Artificial Sequence
  Synthetic
guaacacaaaagauuaaugcugga

SEQ ID NO: 131922 - RNA, 23 nt, Artificial Sequence
  Synthetic
gucaggaaacaacagaugcugga

SEQ ID NO: 131923 - RNA, 18 nt, Artificial Sequence
  Synthetic
gcaacaacagaugcugga

SEQ ID NO: 131924 - RNA, 19 nt, Artificial Sequence
  Synthetic
ggcaacaacagaugcugga

SEQ ID NO: 131925 - RNA, 23 nt, Artificial Sequence
  Synthetic
gucaggcaacaacagaugcugga

SEQ ID NO: 131926 - RNA, 23 nt, Artificial Sequence
  Synthetic
gucaggaaacaacaggugcugga

SEQ ID NO: 131927 - RNA, 20 nt, Artificial Sequence
  Synthetic
gccaauuucucccaucugga

SEQ ID NO: 131928 - RNA, 21 nt, Artificial Sequence
  Synthetic
ggccaauuucucccaucugga

SEQ ID NO: 131929 - RNA, 22 nt, Artificial Sequence
  Synthetic
gggccaauuucucccaucugga

SEQ ID NO: 131930 - RNA, 20 nt, Artificial Sequence
  Synthetic
gaagacaauuuuuccgugga

SEQ ID NO: 131931 - RNA, 21 nt, Artificial Sequence
  Synthetic
ggaagacaauuuuuccgugga

SEQ ID NO: 131932 - RNA, 23 nt, Artificial Sequence
  Synthetic
guggaagacaauuuuuccgugga

SEQ ID NO: 131933 - RNA, 18 nt, Artificial Sequence
  Synthetic
gugcccauuaauggugga

SEQ ID NO: 131934 - RNA, 19 nt, Artificial Sequence
  Synthetic
ggugcccauuaauggugga

SEQ ID NO: 131935 - RNA, 20 nt, Artificial Sequence
  Synthetic
gauuuagggcaucuggugga

SEQ ID NO: 131936 - RNA, 23 nt, Artificial Sequence
  Synthetic
gaugauuuagggcaucuggugga

SEQ ID NO: 131937 - RNA, 18 nt, Artificial Sequence
  Synthetic
gauucugauuuaguugga

SEQ ID NO: 131938 - RNA, 20 nt, Artificial Sequence
  Synthetic
gagauucugauuuaguugga

SEQ ID NO: 131939 - RNA, 18 nt, Artificial Sequence
  Synthetic
ggacaaaaugauuuugga

SEQ ID NO: 131940 - RNA, 20 nt, Artificial Sequence
  Synthetic
guccuucgcccacuuuugga

SEQ ID NO: 131941 - RNA, 23 nt, Artificial Sequence
  Synthetic
gauuaaauaaaggguaaaaauga

SEQ ID NO: 131942 - RNA, 21 nt, Artificial Sequence
  Synthetic
guacuguccucaugaaaauga

SEQ ID NO: 131943 - RNA, 22 nt, Artificial Sequence
  Synthetic
gguacuguccucaugaaaauga

SEQ ID NO: 131944 - RNA, 18 nt, Artificial Sequence
  Synthetic
guguccaucaacaaauga

SEQ ID NO: 131945 - RNA, 22 nt, Artificial Sequence
  Synthetic
gaauacaugaaggaacaaauga

SEQ ID NO: 131946 - RNA, 18 nt, Artificial Sequence
  Synthetic
guguccaucgaccaauga

SEQ ID NO: 131947 - RNA, 21 nt, Artificial Sequence
  Synthetic
ggagaagggugguggcaauga

SEQ ID NO: 131948 - RNA, 21 nt, Artificial Sequence
  Synthetic
guuaaauuaacacgugaauga

SEQ ID NO: 131949 - RNA, 20 nt, Artificial Sequence
  Synthetic
gcugaucugcagacacauga

SEQ ID NO: 131950 - RNA, 19 nt, Artificial Sequence
  Synthetic
gugauuuuugguuacauga

SEQ ID NO: 131951 - RNA, 24 nt, Artificial Sequence
  Synthetic
guuuucucauaguuuuuaucauga

SEQ ID NO: 131952 - RNA, 18 nt, Artificial Sequence
  Synthetic
gaauucugcaacucauga

SEQ ID NO: 131953 - RNA, 19 nt, Artificial Sequence
  Synthetic
gaaggcucugccuucauga

SEQ ID NO: 131954 - RNA, 24 nt, Artificial Sequence
  Synthetic
gacaugaaggcucugccuucauga

SEQ ID NO: 131955 - RNA, 22 nt, Artificial Sequence
  Synthetic
gcacugugggaggcuaagauga

SEQ ID NO: 131956 - RNA, 18 nt, Artificial Sequence
  Synthetic
ggagaggaagagagauga

SEQ ID NO: 131957 - RNA, 24 nt, Artificial Sequence
  Synthetic
gcccaaggagaggaagagagauga

SEQ ID NO: 131958 - RNA, 19 nt, Artificial Sequence
  Synthetic
gccauccucaugaugauga

SEQ ID NO: 131959 - RNA, 21 nt, Artificial Sequence
  Synthetic
gugccauccucaugaugauga

SEQ ID NO: 131960 - RNA, 22 nt, Artificial Sequence
  Synthetic
ggugccauccucaugaugauga

SEQ ID NO: 131961 - RNA, 19 nt, Artificial Sequence
  Synthetic
gucuuaauccuuuugauga

SEQ ID NO: 131962 - RNA, 19 nt, Artificial Sequence
  Synthetic
gagcuauuaaaaauuauga

SEQ ID NO: 131963 - RNA, 20 nt, Artificial Sequence
  Synthetic
ggagcuauuaaaaauuauga

SEQ ID NO: 131964 - RNA, 19 nt, Artificial Sequence
  Synthetic
gagggcucugcccuuauga

SEQ ID NO: 131965 - RNA, 20 nt, Artificial Sequence
  Synthetic
gaauacauuuuaauaacuga

SEQ ID NO: 131966 - RNA, 23 nt, Artificial Sequence
  Synthetic
guugaauacauuuuaauaacuga

SEQ ID NO: 131967 - RNA, 19 nt, Artificial Sequence
  Synthetic
gagagagagaaguaacuga

SEQ ID NO: 131968 - RNA, 20 nt, Artificial Sequence
  Synthetic
ggagagagagaaguaacuga

SEQ ID NO: 131969 - RNA, 19 nt, Artificial Sequence
  Synthetic
gaauuaugauuauugcuga

SEQ ID NO: 131970 - RNA, 18 nt, Artificial Sequence
  Synthetic
gacauagcuagucaguga

SEQ ID NO: 131971 - RNA, 20 nt, Artificial Sequence
  Synthetic
gugacauagcuagucaguga

SEQ ID NO: 131972 - RNA, 21 nt, Artificial Sequence
  Synthetic
ggugacauagcuagucaguga

SEQ ID NO: 131973 - RNA, 19 nt, Artificial Sequence
  Synthetic
gaaaaaaguaagagaguga

SEQ ID NO: 131974 - RNA, 20 nt, Artificial Sequence
  Synthetic
ggaaaaaaguaagagaguga

SEQ ID NO: 131975 - RNA, 19 nt, Artificial Sequence
  Synthetic
gcuguucucaugauaguga

SEQ ID NO: 131976 - RNA, 22 nt, Artificial Sequence
  Synthetic
gcacuuugggaggccaagguga

SEQ ID NO: 131977 - RNA, 18 nt, Artificial Sequence
  Synthetic
gggccuggugagagguga

SEQ ID NO: 131978 - RNA, 19 nt, Artificial Sequence
  Synthetic
ggggccuggugagagguga

SEQ ID NO: 131979 - RNA, 21 nt, Artificial Sequence
  Synthetic
guggggccuggugagagguga

SEQ ID NO: 131980 - RNA, 22 nt, Artificial Sequence
  Synthetic
gguggggccuggugagagguga

SEQ ID NO: 131981 - RNA, 24 nt, Artificial Sequence
  Synthetic
gagguggggccuggugagagguga

SEQ ID NO: 131982 - RNA, 22 nt, Artificial Sequence
  Synthetic
gcacuuugggaggccgagguga

SEQ ID NO: 131983 - RNA, 18 nt, Artificial Sequence
  Synthetic
gaaccuggugggagguga

SEQ ID NO: 131984 - RNA, 19 nt, Artificial Sequence
  Synthetic
ggaaccuggugggagguga

SEQ ID NO: 131985 - RNA, 20 nt, Artificial Sequence
  Synthetic
gggaaccuggugggagguga

SEQ ID NO: 131986 - RNA, 21 nt, Artificial Sequence
  Synthetic
ggggaaccuggugggagguga

SEQ ID NO: 131987 - RNA, 22 nt, Artificial Sequence
  Synthetic
gggggaaccuggugggagguga

SEQ ID NO: 131988 - RNA, 18 nt, Artificial Sequence
  Synthetic
gggccuggugggagguga

SEQ ID NO: 131989 - RNA, 19 nt, Artificial Sequence
  Synthetic
ggggccuggugggagguga

SEQ ID NO: 131990 - RNA, 21 nt, Artificial Sequence
  Synthetic
guggggccuggugggagguga

SEQ ID NO: 131991 - RNA, 22 nt, Artificial Sequence
  Synthetic
gguggggccuggugggagguga

SEQ ID NO: 131992 - RNA, 24 nt, Artificial Sequence
  Synthetic
gagguggggccuggugggagguga

SEQ ID NO: 131993 - RNA, 18 nt, Artificial Sequence
  Synthetic
gcuaaauaugugagguga

SEQ ID NO: 131994 - RNA, 18 nt, Artificial Sequence
  Synthetic
gggaaggguaggggguga

SEQ ID NO: 131995 - RNA, 24 nt, Artificial Sequence
  Synthetic
gccacuacacucuagccuggguga

SEQ ID NO: 131996 - RNA, 18 nt, Artificial Sequence
  Synthetic
gauuacuuuagaauguga

SEQ ID NO: 131997 - RNA, 19 nt, Artificial Sequence
  Synthetic
ggauuacuuuagaauguga

SEQ ID NO: 131998 - RNA, 24 nt, Artificial Sequence
  Synthetic
guucaucccuauuuuaggauguga

SEQ ID NO: 131999 - RNA, 18 nt, Artificial Sequence
  Synthetic
guuuucugucuccuguga

SEQ ID NO: 132000 - RNA, 20 nt, Artificial Sequence
  Synthetic
guuuuccuaauauuuuguga

SEQ ID NO: 132001 - RNA, 19 nt, Artificial Sequence
  Synthetic
gaaagaggaaggaaauuga

SEQ ID NO: 132002 - RNA, 18 nt, Artificial Sequence
  Synthetic
guuuucaucuuuaauuga

SEQ ID NO: 132003 - RNA, 19 nt, Artificial Sequence
  Synthetic
gguuuucaucuuuaauuga

SEQ ID NO: 132004 - RNA, 19 nt, Artificial Sequence
  Synthetic
gaacucaacaguauauuga

SEQ ID NO: 132005 - RNA, 20 nt, Artificial Sequence
  Synthetic
gaagaagaggaagaacuuga

SEQ ID NO: 132006 - RNA, 24 nt, Artificial Sequence
  Synthetic
guaauacaaagcacaaaugcuuga

SEQ ID NO: 132007 - RNA, 21 nt, Artificial Sequence
  Synthetic
gcacaaaggauaaaugcuuga

SEQ ID NO: 132008 - RNA, 24 nt, Artificial Sequence
  Synthetic
guagcacaaaggauaaaugcuuga

SEQ ID NO: 132009 - RNA, 24 nt, Artificial Sequence
  Synthetic
guaaaacaaagaauaauugcuuga

SEQ ID NO: 132010 - RNA, 24 nt, Artificial Sequence
  Synthetic
gaaaagaugguaauuaagauuuga

SEQ ID NO: 132011 - RNA, 18 nt, Artificial Sequence
  Synthetic
ggacaaaagucauuuuga

SEQ ID NO: 132012 - RNA, 19 nt, Artificial Sequence
  Synthetic
gggacaaaagucauuuuga

SEQ ID NO: 132013 - RNA, 18 nt, Artificial Sequence
  Synthetic
guaguugugugguuuuga

SEQ ID NO: 132014 - RNA, 19 nt, Artificial Sequence
  Synthetic
gcucaauaaauauuuuuga

SEQ ID NO: 132015 - RNA, 22 nt, Artificial Sequence
  Synthetic
gaugcucaauaaauauuuuuga

SEQ ID NO: 132016 - RNA, 20 nt, Artificial Sequence
  Synthetic
guccuucgcccacuuuuuga

SEQ ID NO: 132017 - RNA, 20 nt, Artificial Sequence
  Synthetic
guccuucgcucacuuuuuga

SEQ ID NO: 132018 - RNA, 23 nt, Artificial Sequence
  Synthetic
gaauccaggagcugguuuuuuga

SEQ ID NO: 132019 - RNA, 18 nt, Artificial Sequence
  Synthetic
gagguuguuuuuuuuuga

SEQ ID NO: 132020 - RNA, 18 nt, Artificial Sequence
  Synthetic
gcaacauuuuaaaaaaua

SEQ ID NO: 132021 - RNA, 21 nt, Artificial Sequence
  Synthetic
gaagcaacauuuuaaaaaaua

SEQ ID NO: 132022 - RNA, 24 nt, Artificial Sequence
  Synthetic
gcagaagcaacauuuuaaaaaaua

SEQ ID NO: 132023 - RNA, 18 nt, Artificial Sequence
  Synthetic
gcauaagaaagaaaaaua

SEQ ID NO: 132024 - RNA, 24 nt, Artificial Sequence
  Synthetic
gauaaagcauaagaaagaaaaaua

SEQ ID NO: 132025 - RNA, 18 nt, Artificial Sequence
  Synthetic
guuuucucuuugaaaaua

SEQ ID NO: 132026 - RNA, 18 nt, Artificial Sequence
  Synthetic
ggguugccuuauaaaaua

SEQ ID NO: 132027 - RNA, 22 nt, Artificial Sequence
  Synthetic
gaucaggcaggaaaaagaaaua

SEQ ID NO: 132028 - RNA, 24 nt, Artificial Sequence
  Synthetic
gcgaucaggcaggaaaaagaaaua

SEQ ID NO: 132029 - RNA, 24 nt, Artificial Sequence
  Synthetic
gcaaucaggcaggagaaggaaaua

SEQ ID NO: 132030 - RNA, 18 nt, Artificial Sequence
  Synthetic
gugccaucuucugaaaua

SEQ ID NO: 132031 - RNA, 19 nt, Artificial Sequence
  Synthetic
ggugccaucuucugaaaua

SEQ ID NO: 132032 - RNA, 21 nt, Artificial Sequence
  Synthetic
guggugccaucuucugaaaua

SEQ ID NO: 132033 - RNA, 22 nt, Artificial Sequence
  Synthetic
gguggugccaucuucugaaaua

SEQ ID NO: 132034 - RNA, 18 nt, Artificial Sequence
  Synthetic
gaaauaaccauauaaaua

SEQ ID NO: 132035 - RNA, 19 nt, Artificial Sequence
  Synthetic
gcuuuuguggaaaacaaua

SEQ ID NO: 132036 - RNA, 22 nt, Artificial Sequence
  Synthetic
gcagcuuuuguggaaaacaaua

SEQ ID NO: 132037 - RNA, 24 nt, Artificial Sequence
  Synthetic
gugcagcuuuuguggaaaacaaua

SEQ ID NO: 132038 - RNA, 21 nt, Artificial Sequence
  Synthetic
gccugaacuuccaguacaaua

SEQ ID NO: 132039 - RNA, 22 nt, Artificial Sequence
  Synthetic
ggccugaacuuccaguacaaua

SEQ ID NO: 132040 - RNA, 21 nt, Artificial Sequence
  Synthetic
gaaacaugcaaucuaccaaua

SEQ ID NO: 132041 - RNA, 19 nt, Artificial Sequence
  Synthetic
gugaagauaaaauucaaua

SEQ ID NO: 132042 - RNA, 18 nt, Artificial Sequence
  Synthetic
ggcugauacagaagaaua

SEQ ID NO: 132043 - RNA, 20 nt, Artificial Sequence
  Synthetic
gaggcugauacagaagaaua

SEQ ID NO: 132044 - RNA, 18 nt, Artificial Sequence
  Synthetic
gaauguauaacuagaaua

SEQ ID NO: 132045 - RNA, 21 nt, Artificial Sequence
  Synthetic
gaagaauguauaacuagaaua

SEQ ID NO: 132046 - RNA, 22 nt, Artificial Sequence
  Synthetic
gaaucaacuuaaguguuuaaua

SEQ ID NO: 132047 - RNA, 20 nt, Artificial Sequence
  Synthetic
gaaaacugaauguucacaua

SEQ ID NO: 132048 - RNA, 21 nt, Artificial Sequence
  Synthetic
ggaaaacugaauguucacaua

SEQ ID NO: 132049 - RNA, 22 nt, Artificial Sequence
  Synthetic
gggaaaacugaauguucacaua

SEQ ID NO: 132050 - RNA, 22 nt, Artificial Sequence
  Synthetic
gcuaugaggauacaaagacaua

SEQ ID NO: 132051 - RNA, 24 nt, Artificial Sequence
  Synthetic
gacaaacccacagccaauaucaua

SEQ ID NO: 132052 - RNA, 19 nt, Artificial Sequence
  Synthetic
guaaaauaauaauaucaua

SEQ ID NO: 132053 - RNA, 24 nt, Artificial Sequence
  Synthetic
gacaaacccacagccaguaucaua

SEQ ID NO: 132054 - RNA, 24 nt, Artificial Sequence
  Synthetic
gcauuauucacaauagccaagaua

SEQ ID NO: 132055 - RNA, 24 nt, Artificial Sequence
  Synthetic
gcacuauuugcaauagccaagaua

SEQ ID NO: 132056 - RNA, 19 nt, Artificial Sequence
  Synthetic
guagcuggggaggaagaua

SEQ ID NO: 132057 - RNA, 23 nt, Artificial Sequence
  Synthetic
gcccauuaaugguggacaggaua

SEQ ID NO: 132058 - RNA, 23 nt, Artificial Sequence
  Synthetic
gacacagacuggcaaguuggaua

SEQ ID NO: 132059 - RNA, 19 nt, Artificial Sequence
  Synthetic
gucccaaguguuuuggaua

SEQ ID NO: 132060 - RNA, 20 nt, Artificial Sequence
  Synthetic
ggucccaaguguuuuggaua

SEQ ID NO: 132061 - RNA, 22 nt, Artificial Sequence
  Synthetic
guggucccaaguguuuuggaua

SEQ ID NO: 132062 - RNA, 18 nt, Artificial Sequence
  Synthetic
ggugcuguucuugugaua

SEQ ID NO: 132063 - RNA, 18 nt, Artificial Sequence
  Synthetic
guauuuucauuuuugaua

SEQ ID NO: 132064 - RNA, 21 nt, Artificial Sequence
  Synthetic
gauguauuuucauuuuugaua

SEQ ID NO: 132065 - RNA, 20 nt, Artificial Sequence
  Synthetic
gcaagugucuuuuugauaua

SEQ ID NO: 132066 - RNA, 22 nt, Artificial Sequence
  Synthetic
gugcaagugucuuuuugauaua

SEQ ID NO: 132067 - RNA, 24 nt, Artificial Sequence
  Synthetic
gcgugcaagugucuuuuugauaua

SEQ ID NO: 132068 - RNA, 21 nt, Artificial Sequence
  Synthetic
gauuaauaaccagaauauaua

SEQ ID NO: 132069 - RNA, 22 nt, Artificial Sequence
  Synthetic
ggauuaauaaccagaauauaua

SEQ ID NO: 132070 - RNA, 23 nt, Artificial Sequence
  Synthetic
gggauuaauaaccagaauauaua

SEQ ID NO: 132071 - RNA, 19 nt, Artificial Sequence
  Synthetic
gaagacaaaaacauauaua

SEQ ID NO: 132072 - RNA, 19 nt, Artificial Sequence
  Synthetic
gaauccgggugcuccuaua

SEQ ID NO: 132073 - RNA, 23 nt, Artificial Sequence
  Synthetic
guucuuuccaguuuuuggcuaua

SEQ ID NO: 132074 - RNA, 24 nt, Artificial Sequence
  Synthetic
gguucuuuccaguuuuuggcuaua

SEQ ID NO: 132075 - RNA, 19 nt, Artificial Sequence
  Synthetic
gucagauaaaauaucuaua

SEQ ID NO: 132076 - RNA, 18 nt, Artificial Sequence
  Synthetic
gacaauguuuuggguaua

SEQ ID NO: 132077 - RNA, 18 nt, Artificial Sequence
  Synthetic
gacauuaauauuuguaua

SEQ ID NO: 132078 - RNA, 19 nt, Artificial Sequence
  Synthetic
gcuuucauuuuuuauuaua

SEQ ID NO: 132079 - RNA, 23 nt, Artificial Sequence
  Synthetic
guuugcuuucauuuuuuauuaua

SEQ ID NO: 132080 - RNA, 18 nt, Artificial Sequence
  Synthetic
gaucaggaaagucaacua

SEQ ID NO: 132081 - RNA, 19 nt, Artificial Sequence
  Synthetic
ggaucaggaaagucaacua

SEQ ID NO: 132082 - RNA, 21 nt, Artificial Sequence
  Synthetic
gaggaucaggaaagucaacua

SEQ ID NO: 132083 - RNA, 23 nt, Artificial Sequence
  Synthetic
gagaggaucaggaaagucaacua

SEQ ID NO: 132084 - RNA, 18 nt, Artificial Sequence
  Synthetic
gagcagaaaagauaacua

SEQ ID NO: 132085 - RNA, 19 nt, Artificial Sequence
  Synthetic
ggagcagaaaagauaacua

SEQ ID NO: 132086 - RNA, 21 nt, Artificial Sequence
  Synthetic
gaggagcagaaaagauaacua

SEQ ID NO: 132087 - RNA, 23 nt, Artificial Sequence
  Synthetic
gagaggagcagaaaagauaacua

SEQ ID NO: 132088 - RNA, 18 nt, Artificial Sequence
  Synthetic
gcuagaaaauuaagacua

SEQ ID NO: 132089 - RNA, 24 nt, Artificial Sequence
  Synthetic
gaacaaccugcuccugaaugacua

SEQ ID NO: 132090 - RNA, 24 nt, Artificial Sequence
  Synthetic
gcuaccugacuucaaacuauacua

SEQ ID NO: 132091 - RNA, 23 nt, Artificial Sequence
  Synthetic
gaaaaaccacauaccaaaaccua

SEQ ID NO: 132092 - RNA, 18 nt, Artificial Sequence
  Synthetic
gagucaacaggcaaccua

SEQ ID NO: 132093 - RNA, 20 nt, Artificial Sequence
  Synthetic
gagagucaacaggcaaccua

SEQ ID NO: 132094 - RNA, 19 nt, Artificial Sequence
  Synthetic
gcaaaauaacugagaccua

SEQ ID NO: 132095 - RNA, 20 nt, Artificial Sequence
  Synthetic
gcagcaucaccugggaccua

SEQ ID NO: 132096 - RNA, 23 nt, Artificial Sequence
  Synthetic
gcagcagcaucaccugggaccua

SEQ ID NO: 132097 - RNA, 18 nt, Artificial Sequence
  Synthetic
gagugaacaggcagccua

SEQ ID NO: 132098 - RNA, 22 nt, Artificial Sequence
  Synthetic
gcccaugccacugcacugccua

SEQ ID NO: 132099 - RNA, 24 nt, Artificial Sequence
  Synthetic
guauuuuuuguauuagccauccua

SEQ ID NO: 132100 - RNA, 22 nt, Artificial Sequence
  Synthetic
gcugaacagguggggauuccua

SEQ ID NO: 132101 - RNA, 19 nt, Artificial Sequence
  Synthetic
gaaacucuggaacuuccua

SEQ ID NO: 132102 - RNA, 20 nt, Artificial Sequence
  Synthetic
ggaaacucuggaacuuccua

SEQ ID NO: 132103 - RNA, 21 nt, Artificial Sequence
  Synthetic
gggaaacucuggaacuuccua

SEQ ID NO: 132104 - RNA, 18 nt, Artificial Sequence
  Synthetic
ggcuccacucuagagcua

SEQ ID NO: 132105 - RNA, 18 nt, Artificial Sequence
  Synthetic
gaaagggggggauggcua

SEQ ID NO: 132106 - RNA, 19 nt, Artificial Sequence
  Synthetic
ggaaagggggggauggcua

SEQ ID NO: 132107 - RNA, 20 nt, Artificial Sequence
  Synthetic
gggaaagggggggauggcua

SEQ ID NO: 132108 - RNA, 21 nt, Artificial Sequence
  Synthetic
gcuacuggcaacaucuggcua

SEQ ID NO: 132109 - RNA, 24 nt, Artificial Sequence
  Synthetic
guagcuacuggcaacaucuggcua

SEQ ID NO: 132110 - RNA, 19 nt, Artificial Sequence
  Synthetic
guacugagcccucaaucua

SEQ ID NO: 132111 - RNA, 20 nt, Artificial Sequence
  Synthetic
gguacugagcccucaaucua

SEQ ID NO: 132112 - RNA, 18 nt, Artificial Sequence
  Synthetic
ggccccaucccagaucua

SEQ ID NO: 132113 - RNA, 18 nt, Artificial Sequence
  Synthetic
gaguaaacagacagucua

SEQ ID NO: 132114 - RNA, 18 nt, Artificial Sequence
  Synthetic
ggaaccuuuuaauuucua

SEQ ID NO: 132115 - RNA, 21 nt, Artificial Sequence
  Synthetic
guacuugaaguaugauuucua

SEQ ID NO: 132116 - RNA, 23 nt, Artificial Sequence
  Synthetic
gaguacuugaaguaugauuucua

SEQ ID NO: 132117 - RNA, 20 nt, Artificial Sequence
  Synthetic
gaacuuuucccauuuuucua

SEQ ID NO: 132118 - RNA, 20 nt, Artificial Sequence
  Synthetic
guucuucccauuuuuuucua

SEQ ID NO: 132119 - RNA, 19 nt, Artificial Sequence
  Synthetic
guggagagggagagaagua

SEQ ID NO: 132120 - RNA, 21 nt, Artificial Sequence
  Synthetic
guguggagagggagagaagua

SEQ ID NO: 132121 - RNA, 22 nt, Artificial Sequence
  Synthetic
gguguggagagggagagaagua

SEQ ID NO: 132122 - RNA, 23 nt, Artificial Sequence
  Synthetic
ggguguggagagggagagaagua

SEQ ID NO: 132123 - RNA, 24 nt, Artificial Sequence
  Synthetic
gggguguggagagggagagaagua

SEQ ID NO: 132124 - RNA, 20 nt, Artificial Sequence
  Synthetic
gcuucuaaauauuuuaagua

SEQ ID NO: 132125 - RNA, 19 nt, Artificial Sequence
  Synthetic
guacuugggaauuaaggua

SEQ ID NO: 132126 - RNA, 19 nt, Artificial Sequence
  Synthetic
gcaaaccauacacccggua

SEQ ID NO: 132127 - RNA, 23 nt, Artificial Sequence
  Synthetic
guuaccugaugcugggaagggua

SEQ ID NO: 132128 - RNA, 24 nt, Artificial Sequence
  Synthetic
gguuaccugaugcugggaagggua

SEQ ID NO: 132129 - RNA, 20 nt, Artificial Sequence
  Synthetic
guuuuauuccauuguuggua

SEQ ID NO: 132130 - RNA, 20 nt, Artificial Sequence
  Synthetic
guauguuguuuguacaugua

SEQ ID NO: 132131 - RNA, 22 nt, Artificial Sequence
  Synthetic
guguauguuguuuguacaugua

SEQ ID NO: 132132 - RNA, 24 nt, Artificial Sequence
  Synthetic
guguguauguuguuuguacaugua

SEQ ID NO: 132133 - RNA, 19 nt, Artificial Sequence
  Synthetic
gcuugguuuuaaggaugua

SEQ ID NO: 132134 - RNA, 18 nt, Artificial Sequence
  Synthetic
gugcagcacgugacugua

SEQ ID NO: 132135 - RNA, 18 nt, Artificial Sequence
  Synthetic
gaggaaccuggaugugua

SEQ ID NO: 132136 - RNA, 19 nt, Artificial Sequence
  Synthetic
ggaggaaccuggaugugua

SEQ ID NO: 132137 - RNA, 20 nt, Artificial Sequence
  Synthetic
gcuaauuucucccauuugua

SEQ ID NO: 132138 - RNA, 21 nt, Artificial Sequence
  Synthetic
ggcuaauuucucccauuugua

SEQ ID NO: 132139 - RNA, 20 nt, Artificial Sequence
  Synthetic
gacaauuauccuaaaaauua

SEQ ID NO: 132140 - RNA, 19 nt, Artificial Sequence
  Synthetic
gaagacauuuuaaaaauua

SEQ ID NO: 132141 - RNA, 21 nt, Artificial Sequence
  Synthetic
gaacauucuuccuaacaauua

SEQ ID NO: 132142 - RNA, 23 nt, Artificial Sequence
  Synthetic
guauauacccagaaguggaauua

SEQ ID NO: 132143 - RNA, 24 nt, Artificial Sequence
  Synthetic
gguauauacccagaaguggaauua

SEQ ID NO: 132144 - RNA, 18 nt, Artificial Sequence
  Synthetic
gacccggccaucccauua

SEQ ID NO: 132145 - RNA, 18 nt, Artificial Sequence
  Synthetic
gacccagcuaucccauua

SEQ ID NO: 132146 - RNA, 22 nt, Artificial Sequence
  Synthetic
guucaacccagcaaugccauua

SEQ ID NO: 132147 - RNA, 20 nt, Artificial Sequence
  Synthetic
gaaugaguauucugcuauua

SEQ ID NO: 132148 - RNA, 18 nt, Artificial Sequence
  Synthetic
gccauugugacaguauua

SEQ ID NO: 132149 - RNA, 21 nt, Artificial Sequence
  Synthetic
guuuuaagcuaaguguuauua

SEQ ID NO: 132150 - RNA, 19 nt, Artificial Sequence
  Synthetic
gagagugagaaauuacuua

SEQ ID NO: 132151 - RNA, 18 nt, Artificial Sequence
  Synthetic
gucccgguaccuggcuua

SEQ ID NO: 132152 - RNA, 18 nt, Artificial Sequence
  Synthetic
gugcucaauuaaugcuua

SEQ ID NO: 132153 - RNA, 22 nt, Artificial Sequence
  Synthetic
gcaagugcucaauuaaugcuua

SEQ ID NO: 132154 - RNA, 22 nt, Artificial Sequence
  Synthetic
gauaacaagaguaccuaucuua

SEQ ID NO: 132155 - RNA, 23 nt, Artificial Sequence
  Synthetic
ggauaacaagaguaccuaucuua

SEQ ID NO: 132156 - RNA, 21 nt, Artificial Sequence
  Synthetic
gccuuauauauauuucucuua

SEQ ID NO: 132157 - RNA, 21 nt, Artificial Sequence
  Synthetic
gcuaauguaaaugacgaguua

SEQ ID NO: 132158 - RNA, 18 nt, Artificial Sequence
  Synthetic
gugguguagguauaguua

SEQ ID NO: 132159 - RNA, 19 nt, Artificial Sequence
  Synthetic
ggugguguagguauaguua

SEQ ID NO: 132160 - RNA, 20 nt, Artificial Sequence
  Synthetic
gggugguguagguauaguua

SEQ ID NO: 132161 - RNA, 18 nt, Artificial Sequence
  Synthetic
gcacuccagccuggguua

SEQ ID NO: 132162 - RNA, 24 nt, Artificial Sequence
  Synthetic
gccauugcacuccagccuggguua

SEQ ID NO: 132163 - RNA, 18 nt, Artificial Sequence
  Synthetic
gugaagagagauugguua

SEQ ID NO: 132164 - RNA, 19 nt, Artificial Sequence
  Synthetic
ggugaagagagauugguua

SEQ ID NO: 132165 - RNA, 20 nt, Artificial Sequence
  Synthetic
gggugaagagagauugguua

SEQ ID NO: 132166 - RNA, 24 nt, Artificial Sequence
  Synthetic
gaaugggugaagagagauugguua

SEQ ID NO: 132167 - RNA, 20 nt, Artificial Sequence
  Synthetic
gaaaaaaaucugucuuguua

SEQ ID NO: 132168 - RNA, 19 nt, Artificial Sequence
  Synthetic
gaaauaaaucauguuguua

SEQ ID NO: 132169 - RNA, 20 nt, Artificial Sequence
  Synthetic
ggaaauaaaucauguuguua

SEQ ID NO: 132170 - RNA, 19 nt, Artificial Sequence
  Synthetic
gaaaagaaaagauuuguua

SEQ ID NO: 132171 - RNA, 19 nt, Artificial Sequence
  Synthetic
gaacaucucauguaauuua

SEQ ID NO: 132172 - RNA, 22 nt, Artificial Sequence
  Synthetic
guugaacaucucauguaauuua

SEQ ID NO: 132173 - RNA, 24 nt, Artificial Sequence
  Synthetic
guguugaacaucucauguaauuua

SEQ ID NO: 132174 - RNA, 22 nt, Artificial Sequence
  Synthetic
gacaaauaauuauauacauuua

SEQ ID NO: 132175 - RNA, 19 nt, Artificial Sequence
  Synthetic
guuuacccagcaccauuua

SEQ ID NO: 132176 - RNA, 20 nt, Artificial Sequence
  Synthetic
gguuuacccagcaccauuua

SEQ ID NO: 132177 - RNA, 23 nt, Artificial Sequence
  Synthetic
gccgguuuacccagcaccauuua

SEQ ID NO: 132178 - RNA, 18 nt, Artificial Sequence
  Synthetic
gauauuuuaucauauuua

SEQ ID NO: 132179 - RNA, 24 nt, Artificial Sequence
  Synthetic
guacauaguaggugcauauauuua

SEQ ID NO: 132180 - RNA, 18 nt, Artificial Sequence
  Synthetic
guuacauuuauauauuua

SEQ ID NO: 132181 - RNA, 18 nt, Artificial Sequence
  Synthetic
gggauaaaagacuauuua

SEQ ID NO: 132182 - RNA, 22 nt, Artificial Sequence
  Synthetic
guaagggauaaaagacuauuua

SEQ ID NO: 132183 - RNA, 23 nt, Artificial Sequence
  Synthetic
gguaagggauaaaagacuauuua

SEQ ID NO: 132184 - RNA, 20 nt, Artificial Sequence
  Synthetic
guuuauucuacagcuauuua

SEQ ID NO: 132185 - RNA, 20 nt, Artificial Sequence
  Synthetic
gcuaccacugacuuucuuua

SEQ ID NO: 132186 - RNA, 21 nt, Artificial Sequence
  Synthetic
ggcuaccacugacuuucuuua

SEQ ID NO: 132187 - RNA, 22 nt, Artificial Sequence
  Synthetic
gcuaauuuaucaacuaaguuua

SEQ ID NO: 132188 - RNA, 19 nt, Artificial Sequence
  Synthetic
gcuaucccagcaccguuua

SEQ ID NO: 132189 - RNA, 23 nt, Artificial Sequence
  Synthetic
gccagcuaucccagcaccguuua

SEQ ID NO: 132190 - RNA, 18 nt, Artificial Sequence
  Synthetic
gaagggaaaaaauguuua

SEQ ID NO: 132191 - RNA, 22 nt, Artificial Sequence
  Synthetic
guuauaauuuccuuucuguuua

SEQ ID NO: 132192 - RNA, 18 nt, Artificial Sequence
  Synthetic
gugcuccauauuuguuua

SEQ ID NO: 132193 - RNA, 19 nt, Artificial Sequence
  Synthetic
guuauaacauaacauuuua

SEQ ID NO: 132194 - RNA, 24 nt, Artificial Sequence
  Synthetic
gccauuuuuguaaauaaaguuuua

SEQ ID NO: 132195 - RNA, 19 nt, Artificial Sequence
  Synthetic
gauuuucauuuucuuuuua

SEQ ID NO: 132196 - RNA, 18 nt, Artificial Sequence
  Synthetic
guuaucauuuuuuuuuua

SEQ ID NO: 132197 - RNA, 23 nt, Artificial Sequence
  Synthetic
gacaaaaaauacaaauaaaaaac

SEQ ID NO: 132198 - RNA, 18 nt, Artificial Sequence
  Synthetic
gauggguaauauaaaaac

SEQ ID NO: 132199 - RNA, 19 nt, Artificial Sequence
  Synthetic
ggauggguaauauaaaaac

SEQ ID NO: 132200 - RNA, 22 nt, Artificial Sequence
  Synthetic
gaaggauggguaauauaaaaac

SEQ ID NO: 132201 - RNA, 18 nt, Artificial Sequence
  Synthetic
gaaaaacaaaaacaaaac

SEQ ID NO: 132202 - RNA, 19 nt, Artificial Sequence
  Synthetic
ggaaaaacaaaaacaaaac

SEQ ID NO: 132203 - RNA, 21 nt, Artificial Sequence
  Synthetic
gcaacauucgagcaggaaaac

SEQ ID NO: 132204 - RNA, 22 nt, Artificial Sequence
  Synthetic
ggcaacauucgagcaggaaaac

SEQ ID NO: 132205 - RNA, 24 nt, Artificial Sequence
  Synthetic
gccucuaaauguucaagggaaaac

SEQ ID NO: 132206 - RNA, 21 nt, Artificial Sequence
  Synthetic
gaauagucacugaaugaaaac

SEQ ID NO: 132207 - RNA, 18 nt, Artificial Sequence
  Synthetic
guguauucaaaauaaaac

SEQ ID NO: 132208 - RNA, 20 nt, Artificial Sequence
  Synthetic
gacuaguauuuaucuaaaac

SEQ ID NO: 132209 - RNA, 18 nt, Artificial Sequence
  Synthetic
gcauugggggcuuaaaac

SEQ ID NO: 132210 - RNA, 18 nt, Artificial Sequence
  Synthetic
gacuuucgauguuaaaac

SEQ ID NO: 132211 - RNA, 20 nt, Artificial Sequence
  Synthetic
gagacuuucgauguuaaaac

SEQ ID NO: 132212 - RNA, 18 nt, Artificial Sequence
  Synthetic
guacagugguucucaaac

SEQ ID NO: 132213 - RNA, 18 nt, Artificial Sequence
  Synthetic
gaagagagaaaaagaaac

SEQ ID NO: 132214 - RNA, 20 nt, Artificial Sequence
  Synthetic
gagaagagagaaaaagaaac

SEQ ID NO: 132215 - RNA, 19 nt, Artificial Sequence
  Synthetic
gauaaagcaggaaagaaac

SEQ ID NO: 132216 - RNA, 20 nt, Artificial Sequence
  Synthetic
ggauaaagcaggaaagaaac

SEQ ID NO: 132217 - RNA, 18 nt, Artificial Sequence
  Synthetic
gaagggaacaacagaaac

SEQ ID NO: 132218 - RNA, 21 nt, Artificial Sequence
  Synthetic
guuugggacaugugaggaaac

SEQ ID NO: 132219 - RNA, 18 nt, Artificial Sequence
  Synthetic
guggggagggagggaaac

SEQ ID NO: 132220 - RNA, 20 nt, Artificial Sequence
  Synthetic
gaguggggagggagggaaac

SEQ ID NO: 132221 - RNA, 18 nt, Artificial Sequence
  Synthetic
guuuugucaucuguaaac

SEQ ID NO: 132222 - RNA, 24 nt, Artificial Sequence
  Synthetic
gucccaguuuugucaucuguaaac

SEQ ID NO: 132223 - RNA, 23 nt, Artificial Sequence
  Synthetic
gaaauccugucauuugcaacaac

SEQ ID NO: 132224 - RNA, 21 nt, Artificial Sequence
  Synthetic
gauccugucauuugcaacaac

SEQ ID NO: 132225 - RNA, 23 nt, Artificial Sequence
  Synthetic
gagauccugucauuugcaacaac

SEQ ID NO: 132226 - RNA, 23 nt, Artificial Sequence
  Synthetic
gaaauccuuuccuaugcuacaac

SEQ ID NO: 132227 - RNA, 24 nt, Artificial Sequence
  Synthetic
ggaaauccuuuccuaugcuacaac

SEQ ID NO: 132228 - RNA, 23 nt, Artificial Sequence
  Synthetic
guucaagagaccuauuguacaac

SEQ ID NO: 132229 - RNA, 23 nt, Artificial Sequence
  Synthetic
gaaauccugucauuugcagcaac

SEQ ID NO: 132230 - RNA, 21 nt, Artificial Sequence
  Synthetic
gauuauguucuuugcagcaac

SEQ ID NO: 132231 - RNA, 23 nt, Artificial Sequence
  Synthetic
gagauuauguucuuugcagcaac

SEQ ID NO: 132232 - RNA, 19 nt, Artificial Sequence
  Synthetic
gaaucucuuuugcagcaac

SEQ ID NO: 132233 - RNA, 23 nt, Artificial Sequence
  Synthetic
gaaaucaugucuuuugcagcaac

SEQ ID NO: 132234 - RNA, 23 nt, Artificial Sequence
  Synthetic
gaccccuuuguggaacucgcaac

SEQ ID NO: 132235 - RNA, 19 nt, Artificial Sequence
  Synthetic
gcaccccagccugggcaac

SEQ ID NO: 132236 - RNA, 19 nt, Artificial Sequence
  Synthetic
gcacuccagccugggcaac

SEQ ID NO: 132237 - RNA, 19 nt, Artificial Sequence
  Synthetic
gcaggagacugacugcaac

SEQ ID NO: 132238 - RNA, 20 nt, Artificial Sequence
  Synthetic
ggcaggagacugacugcaac

SEQ ID NO: 132239 - RNA, 23 nt, Artificial Sequence
  Synthetic
gaucaacgagacagaaagucaac

SEQ ID NO: 132240 - RNA, 22 nt, Artificial Sequence
  Synthetic
guauuuugucuuugagaagaac

SEQ ID NO: 132241 - RNA, 18 nt, Artificial Sequence
  Synthetic
gugaagaagaggaagaac

SEQ ID NO: 132242 - RNA, 19 nt, Artificial Sequence
  Synthetic
ggugaagaagaggaagaac

SEQ ID NO: 132243 - RNA, 20 nt, Artificial Sequence
  Synthetic
gggugaagaagaggaagaac

SEQ ID NO: 132244 - RNA, 19 nt, Artificial Sequence
  Synthetic
gagaaaauugcaagagaac

SEQ ID NO: 132245 - RNA, 20 nt, Artificial Sequence
  Synthetic
ggagaaaauugcaagagaac

SEQ ID NO: 132246 - RNA, 22 nt, Artificial Sequence
  Synthetic
guggagaaaauugcaagagaac

SEQ ID NO: 132247 - RNA, 21 nt, Artificial Sequence
  Synthetic
guucguguccuuugcaggaac

SEQ ID NO: 132248 - RNA, 23 nt, Artificial Sequence
  Synthetic
gaguucguguccuuugcaggaac

SEQ ID NO: 132249 - RNA, 18 nt, Artificial Sequence
  Synthetic
ggaaaaaaagaaaauaac

SEQ ID NO: 132250 - RNA, 23 nt, Artificial Sequence
  Synthetic
guuuuuauaguagccauccuaac

SEQ ID NO: 132251 - RNA, 22 nt, Artificial Sequence
  Synthetic
gacuaaaaaaugagcaaguaac

SEQ ID NO: 132252 - RNA, 18 nt, Artificial Sequence
  Synthetic
gaagaacuuauugguaac

SEQ ID NO: 132253 - RNA, 21 nt, Artificial Sequence
  Synthetic
gaugaagaacuuauugguaac

SEQ ID NO: 132254 - RNA, 23 nt, Artificial Sequence
  Synthetic
gagaugaagaacuuauugguaac

SEQ ID NO: 132255 - RNA, 24 nt, Artificial Sequence
  Synthetic
ggagaugaagaacuuauugguaac

SEQ ID NO: 132256 - RNA, 20 nt, Artificial Sequence
  Synthetic
guuauguagcaaaaguuaac

SEQ ID NO: 132257 - RNA, 24 nt, Artificial Sequence
  Synthetic
gcuuguuauguagcaaaaguuaac

SEQ ID NO: 132258 - RNA, 21 nt, Artificial Sequence
  Synthetic
gacuaaugcugcaauaaacac

SEQ ID NO: 132259 - RNA, 23 nt, Artificial Sequence
  Synthetic
gugacuaaugcugcaauaaacac

SEQ ID NO: 132260 - RNA, 20 nt, Artificial Sequence
  Synthetic
guauuccaauaauggaacac

SEQ ID NO: 132261 - RNA, 20 nt, Artificial Sequence
  Synthetic
gauuuuaaaaaauugaacac

SEQ ID NO: 132262 - RNA, 21 nt, Artificial Sequence
  Synthetic
ggauuuuaaaaaauugaacac

SEQ ID NO: 132263 - RNA, 18 nt, Artificial Sequence
  Synthetic
gucucucccuugacacac

SEQ ID NO: 132264 - RNA, 19 nt, Artificial Sequence
  Synthetic
ggucucucccuugacacac

SEQ ID NO: 132265 - RNA, 24 nt, Artificial Sequence
  Synthetic
gauuacaggcucgcaccaccacac

SEQ ID NO: 132266 - RNA, 18 nt, Artificial Sequence
  Synthetic
gcuaucaacaucccacac

SEQ ID NO: 132267 - RNA, 22 nt, Artificial Sequence
  Synthetic
gcugcagcugaucugcagacac

SEQ ID NO: 132268 - RNA, 19 nt, Artificial Sequence
  Synthetic
gccaaaaacugaaaaccac

SEQ ID NO: 132269 - RNA, 20 nt, Artificial Sequence
  Synthetic
gcucuacccugcaaacccac

SEQ ID NO: 132270 - RNA, 21 nt, Artificial Sequence
  Synthetic
ggcucuacccugcaaacccac

SEQ ID NO: 132271 - RNA, 22 nt, Artificial Sequence
  Synthetic
gggcucuacccugcaaacccac

SEQ ID NO: 132272 - RNA, 23 nt, Artificial Sequence
  Synthetic
ggggcucuacccugcaaacccac

SEQ ID NO: 132273 - RNA, 19 nt, Artificial Sequence
  Synthetic
gugauuacauugggcgcac

SEQ ID NO: 132274 - RNA, 22 nt, Artificial Sequence
  Synthetic
gccucuuggggggcuaaggcac

SEQ ID NO: 132275 - RNA, 19 nt, Artificial Sequence
  Synthetic
gcuugggaggccgaggcac

SEQ ID NO: 132276 - RNA, 22 nt, Artificial Sequence
  Synthetic
gcugcuugggaggccgaggcac

SEQ ID NO: 132277 - RNA, 20 nt, Artificial Sequence
  Synthetic
gucucccagucaggaggcac

SEQ ID NO: 132278 - RNA, 22 nt, Artificial Sequence
  Synthetic
gugucucccagucaggaggcac

SEQ ID NO: 132279 - RNA, 23 nt, Artificial Sequence
  Synthetic
ggugucucccagucaggaggcac

SEQ ID NO: 132280 - RNA, 23 nt, Artificial Sequence
  Synthetic
gauacccaauauucaugaggcac

SEQ ID NO: 132281 - RNA, 21 nt, Artificial Sequence
  Synthetic
gucauucuggcuggagggcac

SEQ ID NO: 132282 - RNA, 18 nt, Artificial Sequence
  Synthetic
gacgaugguagcuugcac

SEQ ID NO: 132283 - RNA, 20 nt, Artificial Sequence
  Synthetic
gagacgaugguagcuugcac

SEQ ID NO: 132284 - RNA, 22 nt, Artificial Sequence
  Synthetic
gagagacgaugguagcuugcac

SEQ ID NO: 132285 - RNA, 18 nt, Artificial Sequence
  Synthetic
gggagguaauugaaucac

SEQ ID NO: 132286 - RNA, 20 nt, Artificial Sequence
  Synthetic
gugggagguaauugaaucac

SEQ ID NO: 132287 - RNA, 21 nt, Artificial Sequence
  Synthetic
ggugggagguaauugaaucac

SEQ ID NO: 132288 - RNA, 18 nt, Artificial Sequence
  Synthetic
gaauauuuucaucaucac

SEQ ID NO: 132289 - RNA, 21 nt, Artificial Sequence
  Synthetic
gcagaauauuuucaucaucac

SEQ ID NO: 132290 - RNA, 24 nt, Artificial Sequence
  Synthetic
gaugcagaauauuuucaucaucac

SEQ ID NO: 132291 - RNA, 20 nt, Artificial Sequence
  Synthetic
gaacaaggcagacagaucac

SEQ ID NO: 132292 - RNA, 21 nt, Artificial Sequence
  Synthetic
ggaacaaggcagacagaucac

SEQ ID NO: 132293 - RNA, 22 nt, Artificial Sequence
  Synthetic
gggaacaaggcagacagaucac

SEQ ID NO: 132294 - RNA, 23 nt, Artificial Sequence
  Synthetic
ggggaacaaggcagacagaucac

SEQ ID NO: 132295 - RNA, 24 nt, Artificial Sequence
  Synthetic
gggggaacaaggcagacagaucac

SEQ ID NO: 132296 - RNA, 19 nt, Artificial Sequence
  Synthetic
gcuuguaucaaaauaucac

SEQ ID NO: 132297 - RNA, 18 nt, Artificial Sequence
  Synthetic
ggguuucaccauguucac

SEQ ID NO: 132298 - RNA, 22 nt, Artificial Sequence
  Synthetic
gacaggguuucaccauguucac

SEQ ID NO: 132299 - RNA, 24 nt, Artificial Sequence
  Synthetic
gagacaggguuucaccauguucac

SEQ ID NO: 132300 - RNA, 18 nt, Artificial Sequence
  Synthetic
gaggacauaggagaagac

SEQ ID NO: 132301 - RNA, 19 nt, Artificial Sequence
  Synthetic
ggaggacauaggagaagac

SEQ ID NO: 132302 - RNA, 18 nt, Artificial Sequence
  Synthetic
gacaucugaugggaagac

SEQ ID NO: 132303 - RNA, 19 nt, Artificial Sequence
  Synthetic
gcuuuaaagucaaacagac

SEQ ID NO: 132304 - RNA, 20 nt, Artificial Sequence
  Synthetic
ggcuuuaaagucaaacagac

SEQ ID NO: 132305 - RNA, 19 nt, Artificial Sequence
  Synthetic
gaagagcaagaagagagac

SEQ ID NO: 132306 - RNA, 21 nt, Artificial Sequence
  Synthetic
guucauguucuuuguagagac

SEQ ID NO: 132307 - RNA, 23 nt, Artificial Sequence
  Synthetic
gaguucauguucuuuguagagac

SEQ ID NO: 132308 - RNA, 20 nt, Artificial Sequence
  Synthetic
gcagaugagagcacugagac

SEQ ID NO: 132309 - RNA, 22 nt, Artificial Sequence
  Synthetic
gcucagaaguagacccugagac

SEQ ID NO: 132310 - RNA, 18 nt, Artificial Sequence
  Synthetic
gucuguuuugucugagac

SEQ ID NO: 132311 - RNA, 21 nt, Artificial Sequence
  Synthetic
gucucauucugucaccuagac

SEQ ID NO: 132312 - RNA, 22 nt, Artificial Sequence
  Synthetic
ggucucauucugucaccuagac

SEQ ID NO: 132313 - RNA, 23 nt, Artificial Sequence
  Synthetic
gggucucauucugucaccuagac

SEQ ID NO: 132314 - RNA, 23 nt, Artificial Sequence
  Synthetic
gucaacaccaagaucaaaaggac

SEQ ID NO: 132315 - RNA, 18 nt, Artificial Sequence
  Synthetic
gcucagaaugagaaggac

SEQ ID NO: 132316 - RNA, 20 nt, Artificial Sequence
  Synthetic
gagcucagaaugagaaggac

SEQ ID NO: 132317 - RNA, 18 nt, Artificial Sequence
  Synthetic
ggcuaagagcuagaggac

SEQ ID NO: 132318 - RNA, 19 nt, Artificial Sequence
  Synthetic
gggcuaagagcuagaggac

SEQ ID NO: 132319 - RNA, 18 nt, Artificial Sequence
  Synthetic
gguggaucacuuuaggac

SEQ ID NO: 132320 - RNA, 21 nt, Artificial Sequence
  Synthetic
guagguggaucacuuuaggac

SEQ ID NO: 132321 - RNA, 22 nt, Artificial Sequence
  Synthetic
gguagguggaucacuuuaggac

SEQ ID NO: 132322 - RNA, 24 nt, Artificial Sequence
  Synthetic
gagguagguggaucacuuuaggac

SEQ ID NO: 132323 - RNA, 21 nt, Artificial Sequence
  Synthetic
guucauguccuuugcacggac

SEQ ID NO: 132324 - RNA, 23 nt, Artificial Sequence
  Synthetic
gaguucauguccuuugcacggac

SEQ ID NO: 132325 - RNA, 21 nt, Artificial Sequence
  Synthetic
guuuauguccuuugaagggac

SEQ ID NO: 132326 - RNA, 24 nt, Artificial Sequence
  Synthetic
guuguuuauguccuuugaagggac

SEQ ID NO: 132327 - RNA, 21 nt, Artificial Sequence
  Synthetic
gaucauguccuuugcagggac

SEQ ID NO: 132328 - RNA, 23 nt, Artificial Sequence
  Synthetic
gagaucauguccuuugcagggac

SEQ ID NO: 132329 - RNA, 23 nt, Artificial Sequence
  Synthetic
gacuucauguccuuugcagggac

SEQ ID NO: 132330 - RNA, 21 nt, Artificial Sequence
  Synthetic
guucacauccuuuguagggac

SEQ ID NO: 132331 - RNA, 23 nt, Artificial Sequence
  Synthetic
gaguucacauccuuuguagggac

SEQ ID NO: 132332 - RNA, 23 nt, Artificial Sequence
  Synthetic
gaauuaacagcauuugcaaugac

SEQ ID NO: 132333 - RNA, 20 nt, Artificial Sequence
  Synthetic
guacaacaaacccccaugac

SEQ ID NO: 132334 - RNA, 21 nt, Artificial Sequence
  Synthetic
gguacaacaaacccccaugac

SEQ ID NO: 132335 - RNA, 24 nt, Artificial Sequence
  Synthetic
gcaaacccuccagcugauucugac

SEQ ID NO: 132336 - RNA, 20 nt, Artificial Sequence
  Synthetic
gccaaguccuugaaggugac

SEQ ID NO: 132337 - RNA, 21 nt, Artificial Sequence
  Synthetic
gcaaaguguucaagauuugac

SEQ ID NO: 132338 - RNA, 18 nt, Artificial Sequence
  Synthetic
guguacuacgcuuaauac

SEQ ID NO: 132339 - RNA, 19 nt, Artificial Sequence
  Synthetic
gaacaaagacaccacauac

SEQ ID NO: 132340 - RNA, 21 nt, Artificial Sequence
  Synthetic
gagaacaaagacaccacauac

SEQ ID NO: 132341 - RNA, 18 nt, Artificial Sequence
  Synthetic
gaauacuuaauaauauac

SEQ ID NO: 132342 - RNA, 18 nt, Artificial Sequence
  Synthetic
guacugcagauaauauac

SEQ ID NO: 132343 - RNA, 23 nt, Artificial Sequence
  Synthetic
gacccuuaucucaccccuuauac

SEQ ID NO: 132344 - RNA, 24 nt, Artificial Sequence
  Synthetic
ggacccuuaucucaccccuuauac

SEQ ID NO: 132345 - RNA, 23 nt, Artificial Sequence
  Synthetic
guaaagaacaguuccaacacuac

SEQ ID NO: 132346 - RNA, 24 nt, Artificial Sequence
  Synthetic
gguaaagaacaguuccaacacuac

SEQ ID NO: 132347 - RNA, 24 nt, Artificial Sequence
  Synthetic
gcaacaauagaaacggaggacuac

SEQ ID NO: 132348 - RNA, 23 nt, Artificial Sequence
  Synthetic
gaacaacagacguggaagccuac

SEQ ID NO: 132349 - RNA, 24 nt, Artificial Sequence
  Synthetic
ggaacaacagacguggaagccuac

SEQ ID NO: 132350 - RNA, 18 nt, Artificial Sequence
  Synthetic
gguuaccaugcucgcuac

SEQ ID NO: 132351 - RNA, 20 nt, Artificial Sequence
  Synthetic
gugguuaccaugcucgcuac

SEQ ID NO: 132352 - RNA, 19 nt, Artificial Sequence
  Synthetic
gcaugaauuuuuaugcuac

SEQ ID NO: 132353 - RNA, 24 nt, Artificial Sequence
  Synthetic
gcccuccucagccucccaaaguac

SEQ ID NO: 132354 - RNA, 20 nt, Artificial Sequence
  Synthetic
gccucggccucccaaaguac

SEQ ID NO: 132355 - RNA, 24 nt, Artificial Sequence
  Synthetic
gcccgccucggccucccaaaguac

SEQ ID NO: 132356 - RNA, 18 nt, Artificial Sequence
  Synthetic
gguuacuaugcucaguac

SEQ ID NO: 132357 - RNA, 20 nt, Artificial Sequence
  Synthetic
guucuauaacuuugucguac

SEQ ID NO: 132358 - RNA, 22 nt, Artificial Sequence
  Synthetic
guguucuauaacuuugucguac

SEQ ID NO: 132359 - RNA, 23 nt, Artificial Sequence
  Synthetic
gguguucuauaacuuugucguac

SEQ ID NO: 132360 - RNA, 20 nt, Artificial Sequence
  Synthetic
gaaaaaaggaagagcuguac

SEQ ID NO: 132361 - RNA, 23 nt, Artificial Sequence
  Synthetic
gccucccaaagugcuggaauuac

SEQ ID NO: 132362 - RNA, 23 nt, Artificial Sequence
  Synthetic
gccucccaaguagcugggauuac

SEQ ID NO: 132363 - RNA, 19 nt, Artificial Sequence
  Synthetic
guaauuuuuguauucuuac

SEQ ID NO: 132364 - RNA, 23 nt, Artificial Sequence
  Synthetic
gaauacaagugauuuuugguuac

SEQ ID NO: 132365 - RNA, 24 nt, Artificial Sequence
  Synthetic
ggaauacaagugauuuuugguuac

SEQ ID NO: 132366 - RNA, 21 nt, Artificial Sequence
  Synthetic
guaccuaugcaggauuguuac

SEQ ID NO: 132367 - RNA, 23 nt, Artificial Sequence
  Synthetic
gaguaccuaugcaggauuguuac

SEQ ID NO: 132368 - RNA, 24 nt, Artificial Sequence
  Synthetic
ggaguaccuaugcaggauuguuac

SEQ ID NO: 132369 - RNA, 21 nt, Artificial Sequence
  Synthetic
guauacguacagguuuguuac

SEQ ID NO: 132370 - RNA, 24 nt, Artificial Sequence
  Synthetic
guaguauacguacagguuuguuac

SEQ ID NO: 132371 - RNA, 21 nt, Artificial Sequence
  Synthetic
guacauguucagguuuguuac

SEQ ID NO: 132372 - RNA, 22 nt, Artificial Sequence
  Synthetic
gguacauguucagguuuguuac

SEQ ID NO: 132373 - RNA, 23 nt, Artificial Sequence
  Synthetic
ggguacauguucagguuuguuac

SEQ ID NO: 132374 - RNA, 21 nt, Artificial Sequence
  Synthetic
guacauguguugguuuguuac

SEQ ID NO: 132375 - RNA, 22 nt, Artificial Sequence
  Synthetic
gguacauguguugguuuguuac

SEQ ID NO: 132376 - RNA, 23 nt, Artificial Sequence
  Synthetic
ggguacauguguugguuuguuac

SEQ ID NO: 132377 - RNA, 24 nt, Artificial Sequence
  Synthetic
gggguacauguguugguuuguuac

SEQ ID NO: 132378 - RNA, 23 nt, Artificial Sequence
  Synthetic
guuuuuguuuuguuuuguuuuac

SEQ ID NO: 132379 - RNA, 23 nt, Artificial Sequence
  Synthetic
gaaaagucaagaaaauacaaacc

SEQ ID NO: 132380 - RNA, 20 nt, Artificial Sequence
  Synthetic
gcauaggaaugauuugaacc

SEQ ID NO: 132381 - RNA, 19 nt, Artificial Sequence
  Synthetic
gcaaccaaaacuaauaacc

SEQ ID NO: 132382 - RNA, 22 nt, Artificial Sequence
  Synthetic
gaaacagccucauaaacacacc

SEQ ID NO: 132383 - RNA, 23 nt, Artificial Sequence
  Synthetic
gaucacaagcauuccuauacacc

SEQ ID NO: 132384 - RNA, 18 nt, Artificial Sequence
  Synthetic
guucacagcaucaucacc

SEQ ID NO: 132385 - RNA, 20 nt, Artificial Sequence
  Synthetic
gcuccccuuugcccuucacc

SEQ ID NO: 132386 - RNA, 20 nt, Artificial Sequence
  Synthetic
gcauggaaccacaaaagacc

SEQ ID NO: 132387 - RNA, 20 nt, Artificial Sequence
  Synthetic
guagagguagaaagaagacc

SEQ ID NO: 132388 - RNA, 18 nt, Artificial Sequence
  Synthetic
ggcagacugcuugagacc

SEQ ID NO: 132389 - RNA, 19 nt, Artificial Sequence
  Synthetic
gggcagacugcuugagacc

SEQ ID NO: 132390 - RNA, 22 nt, Artificial Sequence
  Synthetic
guagggcagacugcuugagacc

SEQ ID NO: 132391 - RNA, 24 nt, Artificial Sequence
  Synthetic
gaguagggcagacugcuugagacc

SEQ ID NO: 132392 - RNA, 19 nt, Artificial Sequence
  Synthetic
gcuaccuuccaaaaauacc

SEQ ID NO: 132393 - RNA, 19 nt, Artificial Sequence
  Synthetic
gacugagcuccucucuacc

SEQ ID NO: 132394 - RNA, 22 nt, Artificial Sequence
  Synthetic
gcugacugagcuccucucuacc

SEQ ID NO: 132395 - RNA, 23 nt, Artificial Sequence
  Synthetic
gaucugcuguccaacauucuacc

SEQ ID NO: 132396 - RNA, 20 nt, Artificial Sequence
  Synthetic
gccucagccucccaaguacc

SEQ ID NO: 132397 - RNA, 20 nt, Artificial Sequence
  Synthetic
gaaagucaacaaggauaccc

SEQ ID NO: 132398 - RNA, 24 nt, Artificial Sequence
  Synthetic
gacagaaagucaacaaggauaccc

SEQ ID NO: 132399 - RNA, 19 nt, Artificial Sequence
  Synthetic
gauugguuccaggaucccc

SEQ ID NO: 132400 - RNA, 20 nt, Artificial Sequence
  Synthetic
ggauugguuccaggaucccc

SEQ ID NO: 132401 - RNA, 21 nt, Artificial Sequence
  Synthetic
gggauugguuccaggaucccc

SEQ ID NO: 132402 - RNA, 22 nt, Artificial Sequence
  Synthetic
ggggauugguuccaggaucccc

SEQ ID NO: 132403 - RNA, 23 nt, Artificial Sequence
  Synthetic
gggggauugguuccaggaucccc

SEQ ID NO: 132404 - RNA, 19 nt, Artificial Sequence
  Synthetic
gaaccccaacuugaagccc

SEQ ID NO: 132405 - RNA, 20 nt, Artificial Sequence
  Synthetic
ggaaccccaacuugaagccc

SEQ ID NO: 132406 - RNA, 21 nt, Artificial Sequence
  Synthetic
gggaaccccaacuugaagccc

SEQ ID NO: 132407 - RNA, 18 nt, Artificial Sequence
  Synthetic
gguggaucacuucagccc

SEQ ID NO: 132408 - RNA, 19 nt, Artificial Sequence
  Synthetic
ggguggaucacuucagccc

SEQ ID NO: 132409 - RNA, 21 nt, Artificial Sequence
  Synthetic
guggguggaucacuucagccc

SEQ ID NO: 132410 - RNA, 22 nt, Artificial Sequence
  Synthetic
gguggguggaucacuucagccc

SEQ ID NO: 132411 - RNA, 18 nt, Artificial Sequence
  Synthetic
ggaggaucaccugagccc

SEQ ID NO: 132412 - RNA, 19 nt, Artificial Sequence
  Synthetic
gggaggaucaccugagccc

SEQ ID NO: 132413 - RNA, 21 nt, Artificial Sequence
  Synthetic
gagggaggaucaccugagccc

SEQ ID NO: 132414 - RNA, 22 nt, Artificial Sequence
  Synthetic
ggagggaggaucaccugagccc

SEQ ID NO: 132415 - RNA, 23 nt, Artificial Sequence
  Synthetic
gggagggaggaucaccugagccc

SEQ ID NO: 132416 - RNA, 18 nt, Artificial Sequence
  Synthetic
ggaggacugcuugagccc

SEQ ID NO: 132417 - RNA, 21 nt, Artificial Sequence
  Synthetic
gaaggaggacugcuugagccc

SEQ ID NO: 132418 - RNA, 22 nt, Artificial Sequence
  Synthetic
ggaaggaggacugcuugagccc

SEQ ID NO: 132419 - RNA, 24 nt, Artificial Sequence
  Synthetic
gaggaaggaggacugcuugagccc

SEQ ID NO: 132420 - RNA, 21 nt, Artificial Sequence
  Synthetic
gcaggaggacugcuugagccc

SEQ ID NO: 132421 - RNA, 22 nt, Artificial Sequence
  Synthetic
ggcaggaggacugcuugagccc

SEQ ID NO: 132422 - RNA, 24 nt, Artificial Sequence
  Synthetic
gaggcaggaggacugcuugagccc

SEQ ID NO: 132423 - RNA, 18 nt, Artificial Sequence
  Synthetic
gguggacugcuugagccc

SEQ ID NO: 132424 - RNA, 19 nt, Artificial Sequence
  Synthetic
ggguggacugcuugagccc

SEQ ID NO: 132425 - RNA, 21 nt, Artificial Sequence
  Synthetic
guggguggacugcuugagccc

SEQ ID NO: 132426 - RNA, 24 nt, Artificial Sequence
  Synthetic
gauguggguggacugcuugagccc

SEQ ID NO: 132427 - RNA, 18 nt, Artificial Sequence
  Synthetic
ggaggauugcuugagccc

SEQ ID NO: 132428 - RNA, 21 nt, Artificial Sequence
  Synthetic
gcaggaggauugcuugagccc

SEQ ID NO: 132429 - RNA, 22 nt, Artificial Sequence
  Synthetic
ggcaggaggauugcuugagccc

SEQ ID NO: 132430 - RNA, 24 nt, Artificial Sequence
  Synthetic
gaggcaggaggauugcuugagccc

SEQ ID NO: 132431 - RNA, 18 nt, Artificial Sequence
  Synthetic
gcauaaccugaagggccc

SEQ ID NO: 132432 - RNA, 24 nt, Artificial Sequence
  Synthetic
gaucuagcauaaccugaagggccc

SEQ ID NO: 132433 - RNA, 23 nt, Artificial Sequence
  Synthetic
gcuucucaaacuuuaaugugccc

SEQ ID NO: 132434 - RNA, 18 nt, Artificial Sequence
  Synthetic
gaaccagccuggcauccc

SEQ ID NO: 132435 - RNA, 21 nt, Artificial Sequence
  Synthetic
guugaaccagccuggcauccc

SEQ ID NO: 132436 - RNA, 20 nt, Artificial Sequence
  Synthetic
gaucaagugggcuucauccc

SEQ ID NO: 132437 - RNA, 20 nt, Artificial Sequence
  Synthetic
gaccaagagggauuuauccc

SEQ ID NO: 132438 - RNA, 20 nt, Artificial Sequence
  Synthetic
gccccagaaggccauguccc

SEQ ID NO: 132439 - RNA, 18 nt, Artificial Sequence
  Synthetic
guagaaaaauauguuccc

SEQ ID NO: 132440 - RNA, 18 nt, Artificial Sequence
  Synthetic
ggaguauugcuugaagcc

SEQ ID NO: 132441 - RNA, 21 nt, Artificial Sequence
  Synthetic
guaggaguauugcuugaagcc

SEQ ID NO: 132442 - RNA, 22 nt, Artificial Sequence
  Synthetic
gguaggaguauugcuugaagcc

SEQ ID NO: 132443 - RNA, 24 nt, Artificial Sequence
  Synthetic
gagguaggaguauugcuugaagcc

SEQ ID NO: 132444 - RNA, 20 nt, Artificial Sequence
  Synthetic
guaagcuaccacacccagcc

SEQ ID NO: 132445 - RNA, 22 nt, Artificial Sequence
  Synthetic
gcguaagcuaccacacccagcc

SEQ ID NO: 132446 - RNA, 23 nt, Artificial Sequence
  Synthetic
ggcguaagcuaccacacccagcc

SEQ ID NO: 132447 - RNA, 18 nt, Artificial Sequence
  Synthetic
gucccagccacuccagcc

SEQ ID NO: 132448 - RNA, 20 nt, Artificial Sequence
  Synthetic
gugucccagccacuccagcc

SEQ ID NO: 132449 - RNA, 19 nt, Artificial Sequence
  Synthetic
gcgccacuguacuccagcc

SEQ ID NO: 132450 - RNA, 23 nt, Artificial Sequence
  Synthetic
gaucgcgccacuguacuccagcc

SEQ ID NO: 132451 - RNA, 24 nt, Artificial Sequence
  Synthetic
gcacaaucauggcucguggcagcc

SEQ ID NO: 132452 - RNA, 19 nt, Artificial Sequence
  Synthetic
gugauucuaacgugcagcc

SEQ ID NO: 132453 - RNA, 21 nt, Artificial Sequence
  Synthetic
gucuugcuuugucacucagcc

SEQ ID NO: 132454 - RNA, 22 nt, Artificial Sequence
  Synthetic
ggucuugcuuugucacucagcc

SEQ ID NO: 132455 - RNA, 18 nt, Artificial Sequence
  Synthetic
gaggugaagaaacaggcc

SEQ ID NO: 132456 - RNA, 18 nt, Artificial Sequence
  Synthetic
gcauguggcucacaggcc

SEQ ID NO: 132457 - RNA, 21 nt, Artificial Sequence
  Synthetic
gacgcauguggcucacaggcc

SEQ ID NO: 132458 - RNA, 22 nt, Artificial Sequence
  Synthetic
ggacgcauguggcucacaggcc

SEQ ID NO: 132459 - RNA, 23 nt, Artificial Sequence
  Synthetic
gggacgcauguggcucacaggcc

SEQ ID NO: 132460 - RNA, 18 nt, Artificial Sequence
  Synthetic
ggagaauugcuugaggcc

SEQ ID NO: 132461 - RNA, 21 nt, Artificial Sequence
  Synthetic
gaaggagaauugcuugaggcc

SEQ ID NO: 132462 - RNA, 22 nt, Artificial Sequence
  Synthetic
ggaaggagaauugcuugaggcc

SEQ ID NO: 132463 - RNA, 18 nt, Artificial Sequence
  Synthetic
gagccacugcgcccggcc

SEQ ID NO: 132464 - RNA, 22 nt, Artificial Sequence
  Synthetic
gcaugagccacugcgcccggcc

SEQ ID NO: 132465 - RNA, 23 nt, Artificial Sequence
  Synthetic
ggcaugagccacugcgcccggcc

SEQ ID NO: 132466 - RNA, 18 nt, Artificial Sequence
  Synthetic
gagcuaccaugcccggcc

SEQ ID NO: 132467 - RNA, 20 nt, Artificial Sequence
  Synthetic
gugagcuaccaugcccggcc

SEQ ID NO: 132468 - RNA, 22 nt, Artificial Sequence
  Synthetic
gcgugagcuaccaugcccggcc

SEQ ID NO: 132469 - RNA, 23 nt, Artificial Sequence
  Synthetic
ggcgugagcuaccaugcccggcc

SEQ ID NO: 132470 - RNA, 19 nt, Artificial Sequence
  Synthetic
gugccauuugggaggggcc

SEQ ID NO: 132471 - RNA, 22 nt, Artificial Sequence
  Synthetic
gacgugccauuugggaggggcc

SEQ ID NO: 132472 - RNA, 19 nt, Artificial Sequence
  Synthetic
gauggggugggguggggcc

SEQ ID NO: 132473 - RNA, 20 nt, Artificial Sequence
  Synthetic
ggauggggugggguggggcc

SEQ ID NO: 132474 - RNA, 18 nt, Artificial Sequence
  Synthetic
gagccaccaugccuggcc

SEQ ID NO: 132475 - RNA, 20 nt, Artificial Sequence
  Synthetic
gugagccaccaugccuggcc

SEQ ID NO: 132476 - RNA, 22 nt, Artificial Sequence
  Synthetic
gcgugagccaccaugccuggcc

SEQ ID NO: 132477 - RNA, 23 nt, Artificial Sequence
  Synthetic
ggcgugagccaccaugccuggcc

SEQ ID NO: 132478 - RNA, 18 nt, Artificial Sequence
  Synthetic
gggaugguguggguggcc

SEQ ID NO: 132479 - RNA, 19 nt, Artificial Sequence
  Synthetic
ggggaugguguggguggcc

SEQ ID NO: 132480 - RNA, 24 nt, Artificial Sequence
  Synthetic
gaaauauuuuauguaacaaaugcc

SEQ ID NO: 132481 - RNA, 18 nt, Artificial Sequence
  Synthetic
gaauugucuuuuccugcc

SEQ ID NO: 132482 - RNA, 19 nt, Artificial Sequence
  Synthetic
ggaauugucuuuuccugcc

SEQ ID NO: 132483 - RNA, 21 nt, Artificial Sequence
  Synthetic
gcccaaguucuucccucugcc

SEQ ID NO: 132484 - RNA, 18 nt, Artificial Sequence
  Synthetic
gcccuuguuuccucugcc

SEQ ID NO: 132485 - RNA, 24 nt, Artificial Sequence
  Synthetic
gcccuugcccuuguuuccucugcc

SEQ ID NO: 132486 - RNA, 20 nt, Artificial Sequence
  Synthetic
gccucacgaugaauugugcc

SEQ ID NO: 132487 - RNA, 20 nt, Artificial Sequence
  Synthetic
guuguccagauuccauugcc

SEQ ID NO: 132488 - RNA, 18 nt, Artificial Sequence
  Synthetic
gagauuaaauaauuugcc

SEQ ID NO: 132489 - RNA, 20 nt, Artificial Sequence
  Synthetic
gagagauuaaauaauuugcc

SEQ ID NO: 132490 - RNA, 21 nt, Artificial Sequence
  Synthetic
gcacuuucugcacauguaucc

SEQ ID NO: 132491 - RNA, 22 nt, Artificial Sequence
  Synthetic
guacaguuggcccucuguaucc

SEQ ID NO: 132492 - RNA, 24 nt, Artificial Sequence
  Synthetic
guaauaaaccuacacauguacucc

SEQ ID NO: 132493 - RNA, 19 nt, Artificial Sequence
  Synthetic
guguguguuguuccccucc

SEQ ID NO: 132494 - RNA, 21 nt, Artificial Sequence
  Synthetic
gauccgcccgccucggccucc

SEQ ID NO: 132495 - RNA, 23 nt, Artificial Sequence
  Synthetic
gugauccgcccgccucggccucc

SEQ ID NO: 132496 - RNA, 22 nt, Artificial Sequence
  Synthetic
gcucacaaaaucugugggcucc

SEQ ID NO: 132497 - RNA, 18 nt, Artificial Sequence
  Synthetic
gaaugaauaaaaaagucc

SEQ ID NO: 132498 - RNA, 22 nt, Artificial Sequence
  Synthetic
gaaugaaugaauaaaaaagucc

SEQ ID NO: 132499 - RNA, 20 nt, Artificial Sequence
  Synthetic
gcuuuggccucccaaagucc

SEQ ID NO: 132500 - RNA, 19 nt, Artificial Sequence
  Synthetic
gaguggaucgcuugagucc

SEQ ID NO: 132501 - RNA, 22 nt, Artificial Sequence
  Synthetic
gaugaguggaucgcuugagucc

SEQ ID NO: 132502 - RNA, 23 nt, Artificial Sequence
  Synthetic
gacagcucugcugcugcuagucc

SEQ ID NO: 132503 - RNA, 22 nt, Artificial Sequence
  Synthetic
gagauaccaucagccauggucc

SEQ ID NO: 132504 - RNA, 23 nt, Artificial Sequence
  Synthetic
ggagauaccaucagccauggucc

SEQ ID NO: 132505 - RNA, 18 nt, Artificial Sequence
  Synthetic
guugccaucuuuaugucc

SEQ ID NO: 132506 - RNA, 23 nt, Artificial Sequence
  Synthetic
guacuguugccaucuuuaugucc

SEQ ID NO: 132507 - RNA, 20 nt, Artificial Sequence
  Synthetic
gccagccuuugguuaauucc

SEQ ID NO: 132508 - RNA, 23 nt, Artificial Sequence
  Synthetic
guugccagccuuugguuaauucc

SEQ ID NO: 132509 - RNA, 19 nt, Artificial Sequence
  Synthetic
gagaagauuacuugauucc

SEQ ID NO: 132510 - RNA, 21 nt, Artificial Sequence
  Synthetic
gugagaagauuacuugauucc

SEQ ID NO: 132511 - RNA, 22 nt, Artificial Sequence
  Synthetic
ggugagaagauuacuugauucc

SEQ ID NO: 132512 - RNA, 24 nt, Artificial Sequence
  Synthetic
gaggugagaagauuacuugauucc

SEQ ID NO: 132513 - RNA, 20 nt, Artificial Sequence
  Synthetic
guaacauauucacagguucc

SEQ ID NO: 132514 - RNA, 21 nt, Artificial Sequence
  Synthetic
gguaacauauucacagguucc

SEQ ID NO: 132515 - RNA, 19 nt, Artificial Sequence
  Synthetic
gaugaagaaaaugcuuucc

SEQ ID NO: 132516 - RNA, 20 nt, Artificial Sequence
  Synthetic
ggaugaagaaaaugcuuucc

SEQ ID NO: 132517 - RNA, 23 nt, Artificial Sequence
  Synthetic
gcaggaugaagaaaaugcuuucc

SEQ ID NO: 132518 - RNA, 18 nt, Artificial Sequence
  Synthetic
gaggaagacaauuuuucc

SEQ ID NO: 132519 - RNA, 23 nt, Artificial Sequence
  Synthetic
guuuagaggaagacaauuuuucc

SEQ ID NO: 132520 - RNA, 24 nt, Artificial Sequence
  Synthetic
gguuuagaggaagacaauuuuucc

SEQ ID NO: 132521 - RNA, 24 nt, Artificial Sequence
  Synthetic
gcucuauaaagggaacaacaaagc

SEQ ID NO: 132522 - RNA, 24 nt, Artificial Sequence
  Synthetic
gcacuccagccugggagacaaagc

SEQ ID NO: 132523 - RNA, 19 nt, Artificial Sequence
  Synthetic
guucauugaaucccaaagc

SEQ ID NO: 132524 - RNA, 21 nt, Artificial Sequence
  Synthetic
gaguucauugaaucccaaagc

SEQ ID NO: 132525 - RNA, 20 nt, Artificial Sequence
  Synthetic
gaaaaauaaaugaggaaagc

SEQ ID NO: 132526 - RNA, 21 nt, Artificial Sequence
  Synthetic
gucucacccugcugcccaagc

SEQ ID NO: 132527 - RNA, 22 nt, Artificial Sequence
  Synthetic
ggucucacccugcugcccaagc

SEQ ID NO: 132528 - RNA, 23 nt, Artificial Sequence
  Synthetic
gggucucacccugcugcccaagc

SEQ ID NO: 132529 - RNA, 23 nt, Artificial Sequence
  Synthetic
gcaaaugggaaccaaaagcaagc

SEQ ID NO: 132530 - RNA, 19 nt, Artificial Sequence
  Synthetic
gccucagccucugagaagc

SEQ ID NO: 132531 - RNA, 23 nt, Artificial Sequence
  Synthetic
gaaaucauguccuuugcggaagc

SEQ ID NO: 132532 - RNA, 19 nt, Artificial Sequence
  Synthetic
gccccuccccacacuaagc

SEQ ID NO: 132533 - RNA, 21 nt, Artificial Sequence
  Synthetic
gugccccuccccacacuaagc

SEQ ID NO: 132534 - RNA, 22 nt, Artificial Sequence
  Synthetic
ggugccccuccccacacuaagc

SEQ ID NO: 132535 - RNA, 18 nt, Artificial Sequence
  Synthetic
gccaagaaaauccuaagc

SEQ ID NO: 132536 - RNA, 19 nt, Artificial Sequence
  Synthetic
gacuccucucucuguaagc

SEQ ID NO: 132537 - RNA, 22 nt, Artificial Sequence
  Synthetic
gcuucgcucuuguugccccagc

SEQ ID NO: 132538 - RNA, 24 nt, Artificial Sequence
  Synthetic
gagcuucgcucuuguugccccagc

SEQ ID NO: 132539 - RNA, 19 nt, Artificial Sequence
  Synthetic
gagaucaugccacuccagc

SEQ ID NO: 132540 - RNA, 22 nt, Artificial Sequence
  Synthetic
gcugagaucaugccacuccagc

SEQ ID NO: 132541 - RNA, 24 nt, Artificial Sequence
  Synthetic
gagcugagaucaugccacuccagc

SEQ ID NO: 132542 - RNA, 22 nt, Artificial Sequence
  Synthetic
gaucaugccacuccacuccagc

SEQ ID NO: 132543 - RNA, 18 nt, Artificial Sequence
  Synthetic
gcaccacugcacuccagc

SEQ ID NO: 132544 - RNA, 22 nt, Artificial Sequence
  Synthetic
gacagcaccacugcacuccagc

SEQ ID NO: 132545 - RNA, 24 nt, Artificial Sequence
  Synthetic
gagacagcaccacugcacuccagc

SEQ ID NO: 132546 - RNA, 22 nt, Artificial Sequence
  Synthetic
gauagcaccacugcacuccagc

SEQ ID NO: 132547 - RNA, 24 nt, Artificial Sequence
  Synthetic
gagauagcaccacugcacuccagc

SEQ ID NO: 132548 - RNA, 22 nt, Artificial Sequence
  Synthetic
gauugcaccacugcacuccagc

SEQ ID NO: 132549 - RNA, 24 nt, Artificial Sequence
  Synthetic
gagauugcaccacugcacuccagc

SEQ ID NO: 132550 - RNA, 22 nt, Artificial Sequence
  Synthetic
gaucaugccacugcacuccagc

SEQ ID NO: 132551 - RNA, 24 nt, Artificial Sequence
  Synthetic
gagaucaugccacugcacuccagc

SEQ ID NO: 132552 - RNA, 18 nt, Artificial Sequence
  Synthetic
gugccacugcacuccagc

SEQ ID NO: 132553 - RNA, 22 nt, Artificial Sequence
  Synthetic
gacugugccacugcacuccagc

SEQ ID NO: 132554 - RNA, 24 nt, Artificial Sequence
  Synthetic
gagacugugccacugcacuccagc

SEQ ID NO: 132555 - RNA, 22 nt, Artificial Sequence
  Synthetic
gauugugccacugcacuccagc

SEQ ID NO: 132556 - RNA, 24 nt, Artificial Sequence
  Synthetic
gagauugugccacugcacuccagc

SEQ ID NO: 132557 - RNA, 18 nt, Artificial Sequence
  Synthetic
gcagcacugcacuccagc

SEQ ID NO: 132558 - RNA, 22 nt, Artificial Sequence
  Synthetic
gaucgcagcacugcacuccagc

SEQ ID NO: 132559 - RNA, 24 nt, Artificial Sequence
  Synthetic
gagaucgcagcacugcacuccagc

SEQ ID NO: 132560 - RNA, 21 nt, Artificial Sequence
  Synthetic
gccauugcacugcacuccagc

SEQ ID NO: 132561 - RNA, 22 nt, Artificial Sequence
  Synthetic
gaucaugccgcugcacuccagc

SEQ ID NO: 132562 - RNA, 24 nt, Artificial Sequence
  Synthetic
gagaucaugccgcugcacuccagc

SEQ ID NO: 132563 - RNA, 18 nt, Artificial Sequence
  Synthetic
gugccauugcacuccagc

SEQ ID NO: 132564 - RNA, 22 nt, Artificial Sequence
  Synthetic
gauugugccauugcacuccagc

SEQ ID NO: 132565 - RNA, 24 nt, Artificial Sequence
  Synthetic
gagauugugccauugcacuccagc

SEQ ID NO: 132566 - RNA, 22 nt, Artificial Sequence
  Synthetic
gcaccacugcacucacuccagc

SEQ ID NO: 132567 - RNA, 23 nt, Artificial Sequence
  Synthetic
ggcaccacugcacucacuccagc

SEQ ID NO: 132568 - RNA, 22 nt, Artificial Sequence
  Synthetic
gaucaugccacugcauuccagc

SEQ ID NO: 132569 - RNA, 24 nt, Artificial Sequence
  Synthetic
gugaucaugccacugcauuccagc

SEQ ID NO: 132570 - RNA, 18 nt, Artificial Sequence
  Synthetic
gacugcugugcuggcagc

SEQ ID NO: 132571 - RNA, 18 nt, Artificial Sequence
  Synthetic
gcaccacugcacugcagc

SEQ ID NO: 132572 - RNA, 22 nt, Artificial Sequence
  Synthetic
gaucgcaccacugcacugcagc

SEQ ID NO: 132573 - RNA, 24 nt, Artificial Sequence
  Synthetic
gagaucgcaccacugcacugcagc

SEQ ID NO: 132574 - RNA, 18 nt, Artificial Sequence
  Synthetic
gugccacugcacugcagc

SEQ ID NO: 132575 - RNA, 22 nt, Artificial Sequence
  Synthetic
gaucgugccacugcacugcagc

SEQ ID NO: 132576 - RNA, 24 nt, Artificial Sequence
  Synthetic
gagaucgugccacugcacugcagc

SEQ ID NO: 132577 - RNA, 18 nt, Artificial Sequence
  Synthetic
gauucuuucuuuugcagc

SEQ ID NO: 132578 - RNA, 21 nt, Artificial Sequence
  Synthetic
gcugauucuuucuuuugcagc

SEQ ID NO: 132579 - RNA, 22 nt, Artificial Sequence
  Synthetic
gaucauaccacugcacuucagc

SEQ ID NO: 132580 - RNA, 24 nt, Artificial Sequence
  Synthetic
gagaucauaccacugcacuucagc

SEQ ID NO: 132581 - RNA, 23 nt, Artificial Sequence
  Synthetic
gauaacccuggccuaucuucagc

SEQ ID NO: 132582 - RNA, 24 nt, Artificial Sequence
  Synthetic
gcccaccucggccucacaaagagc

SEQ ID NO: 132583 - RNA, 19 nt, Artificial Sequence
  Synthetic
gucugucccuuagcagagc

SEQ ID NO: 132584 - RNA, 22 nt, Artificial Sequence
  Synthetic
gcagucugucccuuagcagagc

SEQ ID NO: 132585 - RNA, 23 nt, Artificial Sequence
  Synthetic
ggcagucugucccuuagcagagc

SEQ ID NO: 132586 - RNA, 18 nt, Artificial Sequence
  Synthetic
guaaaaaagcuuuagagc

SEQ ID NO: 132587 - RNA, 19 nt, Artificial Sequence
  Synthetic
gugggaggaucaccugagc

SEQ ID NO: 132588 - RNA, 20 nt, Artificial Sequence
  Synthetic
ggugggaggaucaccugagc

SEQ ID NO: 132589 - RNA, 22 nt, Artificial Sequence
  Synthetic
gaggugggaggaucaccugagc

SEQ ID NO: 132590 - RNA, 19 nt, Artificial Sequence
  Synthetic
gcugaggcaagagaauagc

SEQ ID NO: 132591 - RNA, 20 nt, Artificial Sequence
  Synthetic
ggcugaggcaagagaauagc

SEQ ID NO: 132592 - RNA, 23 nt, Artificial Sequence
  Synthetic
guaggcugaggcaagagaauagc

SEQ ID NO: 132593 - RNA, 24 nt, Artificial Sequence
  Synthetic
gguaggcugaggcaagagaauagc

SEQ ID NO: 132594 - RNA, 22 nt, Artificial Sequence
  Synthetic
gcaauaugcuguaccauauagc

SEQ ID NO: 132595 - RNA, 24 nt, Artificial Sequence
  Synthetic
gagcaauaugcuguaccauauagc

SEQ ID NO: 132596 - RNA, 18 nt, Artificial Sequence
  Synthetic
gagccacuacacucuagc

SEQ ID NO: 132597 - RNA, 22 nt, Artificial Sequence
  Synthetic
gauugagccacuacacucuagc

SEQ ID NO: 132598 - RNA, 24 nt, Artificial Sequence
  Synthetic
gagauugagccacuacacucuagc

SEQ ID NO: 132599 - RNA, 22 nt, Artificial Sequence
  Synthetic
gaucacaccacugcacucuagc

SEQ ID NO: 132600 - RNA, 24 nt, Artificial Sequence
  Synthetic
gagaucacaccacugcacucuagc

SEQ ID NO: 132601 - RNA, 20 nt, Artificial Sequence
  Synthetic
gcuucaaccucccaaguagc

SEQ ID NO: 132602 - RNA, 23 nt, Artificial Sequence
  Synthetic
gcugccucagccucccaaguagc

SEQ ID NO: 132603 - RNA, 20 nt, Artificial Sequence
  Synthetic
gcuucagccucccaaguagc

SEQ ID NO: 132604 - RNA, 20 nt, Artificial Sequence
  Synthetic
gccucagccugcuaaguagc

SEQ ID NO: 132605 - RNA, 19 nt, Artificial Sequence
  Synthetic
gccucagccuccgaguagc

SEQ ID NO: 132606 - RNA, 20 nt, Artificial Sequence
  Synthetic
gccuuagccuccugaguagc

SEQ ID NO: 132607 - RNA, 20 nt, Artificial Sequence
  Synthetic
gccucaggcuccugaguagc

SEQ ID NO: 132608 - RNA, 22 nt, Artificial Sequence
  Synthetic
gugccucaggcuccugaguagc

SEQ ID NO: 132609 - RNA, 20 nt, Artificial Sequence
  Synthetic
gccucagcguccugaguagc

SEQ ID NO: 132610 - RNA, 19 nt, Artificial Sequence
  Synthetic
gccucagccucccgguagc

SEQ ID NO: 132611 - RNA, 18 nt, Artificial Sequence
  Synthetic
gggugucaccauguuagc

SEQ ID NO: 132612 - RNA, 19 nt, Artificial Sequence
  Synthetic
ggggugucaccauguuagc

SEQ ID NO: 132613 - RNA, 24 nt, Artificial Sequence
  Synthetic
gauacggggugucaccauguuagc

SEQ ID NO: 132614 - RNA, 18 nt, Artificial Sequence
  Synthetic
ggguuucaccauguuagc

SEQ ID NO: 132615 - RNA, 24 nt, Artificial Sequence
  Synthetic
gaaacaggguuucaccauguuagc

SEQ ID NO: 132616 - RNA, 19 nt, Artificial Sequence
  Synthetic
gggguuucaccauguuagc

SEQ ID NO: 132617 - RNA, 22 nt, Artificial Sequence
  Synthetic
gaugggguuucaccauguuagc

SEQ ID NO: 132618 - RNA, 24 nt, Artificial Sequence
  Synthetic
gagaugggguuucaccauguuagc

SEQ ID NO: 132619 - RNA, 18 nt, Artificial Sequence
  Synthetic
gaguuucaccguguuagc

SEQ ID NO: 132620 - RNA, 19 nt, Artificial Sequence
  Synthetic
ggaguuucaccguguuagc

SEQ ID NO: 132621 - RNA, 22 nt, Artificial Sequence
  Synthetic
gacggaguuucaccguguuagc

SEQ ID NO: 132622 - RNA, 24 nt, Artificial Sequence
  Synthetic
gagacggaguuucaccguguuagc

SEQ ID NO: 132623 - RNA, 19 nt, Artificial Sequence
  Synthetic
gagguuucaccguguuagc

SEQ ID NO: 132624 - RNA, 22 nt, Artificial Sequence
  Synthetic
gacgagguuucaccguguuagc

SEQ ID NO: 132625 - RNA, 24 nt, Artificial Sequence
  Synthetic
gagacgagguuucaccguguuagc

SEQ ID NO: 132626 - RNA, 22 nt, Artificial Sequence
  Synthetic
gacaggguuucaccguguuagc

SEQ ID NO: 132627 - RNA, 24 nt, Artificial Sequence
  Synthetic
gagacaggguuucaccguguuagc

SEQ ID NO: 132628 - RNA, 22 nt, Artificial Sequence
  Synthetic
gacgggguuucaccguguuagc

SEQ ID NO: 132629 - RNA, 24 nt, Artificial Sequence
  Synthetic
gagacgggguuucaccguguuagc

SEQ ID NO: 132630 - RNA, 19 nt, Artificial Sequence
  Synthetic
gugguuucaccguguuagc

SEQ ID NO: 132631 - RNA, 22 nt, Artificial Sequence
  Synthetic
gacgugguuucaccguguuagc

SEQ ID NO: 132632 - RNA, 24 nt, Artificial Sequence
  Synthetic
gagacgugguuucaccguguuagc

SEQ ID NO: 132633 - RNA, 18 nt, Artificial Sequence
  Synthetic
gguuuucaccguguuagc

SEQ ID NO: 132634 - RNA, 19 nt, Artificial Sequence
  Synthetic
ggguuuucaccguguuagc

SEQ ID NO: 132635 - RNA, 21 nt, Artificial Sequence
  Synthetic
guggguuuucaccguguuagc

SEQ ID NO: 132636 - RNA, 22 nt, Artificial Sequence
  Synthetic
gguggguuuucaccguguuagc

SEQ ID NO: 132637 - RNA, 24 nt, Artificial Sequence
  Synthetic
gagguggguuuucaccguguuagc

SEQ ID NO: 132638 - RNA, 18 nt, Artificial Sequence
  Synthetic
ggguuuuaccguguuagc

SEQ ID NO: 132639 - RNA, 19 nt, Artificial Sequence
  Synthetic
gggguuuuaccguguuagc

SEQ ID NO: 132640 - RNA, 22 nt, Artificial Sequence
  Synthetic
gacgggguuuuaccguguuagc

SEQ ID NO: 132641 - RNA, 24 nt, Artificial Sequence
  Synthetic
gagacgggguuuuaccguguuagc

SEQ ID NO: 132642 - RNA, 22 nt, Artificial Sequence
  Synthetic
gacgggguuucacuguguuagc

SEQ ID NO: 132643 - RNA, 24 nt, Artificial Sequence
  Synthetic
gagacgggguuucacuguguuagc

SEQ ID NO: 132644 - RNA, 18 nt, Artificial Sequence
  Synthetic
gugccacugcacuuuagc

SEQ ID NO: 132645 - RNA, 22 nt, Artificial Sequence
  Synthetic
gauugugccacugcacuuuagc

SEQ ID NO: 132646 - RNA, 23 nt, Artificial Sequence
  Synthetic
gaauccugugagguugguuuagc

SEQ ID NO: 132647 - RNA, 20 nt, Artificial Sequence
  Synthetic
gcugguguuccaggugacgc

SEQ ID NO: 132648 - RNA, 24 nt, Artificial Sequence
  Synthetic
gcccaucccagccucccaaagcgc

SEQ ID NO: 132649 - RNA, 21 nt, Artificial Sequence
  Synthetic
gcaagcagaucgcuugagcgc

SEQ ID NO: 132650 - RNA, 22 nt, Artificial Sequence
  Synthetic
ggcaagcagaucgcuugagcgc

SEQ ID NO: 132651 - RNA, 24 nt, Artificial Sequence
  Synthetic
gaggcaagcagaucgcuugagcgc

SEQ ID NO: 132652 - RNA, 22 nt, Artificial Sequence
  Synthetic
gaggcugaggcaggagaaucgc

SEQ ID NO: 132653 - RNA, 23 nt, Artificial Sequence
  Synthetic
ggaggcugaggcaggagaaucgc

SEQ ID NO: 132654 - RNA, 18 nt, Artificial Sequence
  Synthetic
gcuucccgauaagaucgc

SEQ ID NO: 132655 - RNA, 21 nt, Artificial Sequence
  Synthetic
gcagcuucccgauaagaucgc

SEQ ID NO: 132656 - RNA, 19 nt, Artificial Sequence
  Synthetic
gcuaagaugaguggaucgc

SEQ ID NO: 132657 - RNA, 20 nt, Artificial Sequence
  Synthetic
ggcuaagaugaguggaucgc

SEQ ID NO: 132658 - RNA, 22 nt, Artificial Sequence
  Synthetic
gaggcuaagaugaguggaucgc

SEQ ID NO: 132659 - RNA, 23 nt, Artificial Sequence
  Synthetic
ggaggcuaagaugaguggaucgc

SEQ ID NO: 132660 - RNA, 24 nt, Artificial Sequence
  Synthetic
gggaggcuaagaugaguggaucgc

SEQ ID NO: 132661 - RNA, 18 nt, Artificial Sequence
  Synthetic
ggguuucaccguguucgc

SEQ ID NO: 132662 - RNA, 19 nt, Artificial Sequence
  Synthetic
gggguuucaccguguucgc

SEQ ID NO: 132663 - RNA, 22 nt, Artificial Sequence
  Synthetic
gacgggguuucaccguguucgc

SEQ ID NO: 132664 - RNA, 24 nt, Artificial Sequence
  Synthetic
gagacgggguuucaccguguucgc

SEQ ID NO: 132665 - RNA, 23 nt, Artificial Sequence
  Synthetic
gcaaauggaaaacaaaaaaaggc

SEQ ID NO: 132666 - RNA, 19 nt, Artificial Sequence
  Synthetic
gagaggaaaucaggaaggc

SEQ ID NO: 132667 - RNA, 21 nt, Artificial Sequence
  Synthetic
gaaaguauuaagagauaaggc

SEQ ID NO: 132668 - RNA, 22 nt, Artificial Sequence
  Synthetic
ggaaaguauuaagagauaaggc

SEQ ID NO: 132669 - RNA, 24 nt, Artificial Sequence
  Synthetic
gaggaaaguauuaagagauaaggc

SEQ ID NO: 132670 - RNA, 18 nt, Artificial Sequence
  Synthetic
gggaggaagggaacaggc

SEQ ID NO: 132671 - RNA, 20 nt, Artificial Sequence
  Synthetic
gagggaggaagggaacaggc

SEQ ID NO: 132672 - RNA, 21 nt, Artificial Sequence
  Synthetic
ggagggaggaagggaacaggc

SEQ ID NO: 132673 - RNA, 24 nt, Artificial Sequence
  Synthetic
gaaggagggaggaagggaacaggc

SEQ ID NO: 132674 - RNA, 20 nt, Artificial Sequence
  Synthetic
gaagugauagugcuacaggc

SEQ ID NO: 132675 - RNA, 21 nt, Artificial Sequence
  Synthetic
gucucgcucugucaaccaggc

SEQ ID NO: 132676 - RNA, 23 nt, Artificial Sequence
  Synthetic
gagucucgcucugucaaccaggc

SEQ ID NO: 132677 - RNA, 24 nt, Artificial Sequence
  Synthetic
ggagucucgcucugucaaccaggc

SEQ ID NO: 132678 - RNA, 20 nt, Artificial Sequence
  Synthetic
gucuagcucugucaccaggc

SEQ ID NO: 132679 - RNA, 22 nt, Artificial Sequence
  Synthetic
gagucuagcucugucaccaggc

SEQ ID NO: 132680 - RNA, 23 nt, Artificial Sequence
  Synthetic
ggagucuagcucugucaccaggc

SEQ ID NO: 132681 - RNA, 20 nt, Artificial Sequence
  Synthetic
gucucgcucugucaccaggc

SEQ ID NO: 132682 - RNA, 22 nt, Artificial Sequence
  Synthetic
gagucucgcucugucaccaggc

SEQ ID NO: 132683 - RNA, 19 nt, Artificial Sequence
  Synthetic
gucugcucuuucaccaggc

SEQ ID NO: 132684 - RNA, 21 nt, Artificial Sequence
  Synthetic
gagucugcucuuucaccaggc

SEQ ID NO: 132685 - RNA, 22 nt, Artificial Sequence
  Synthetic
guuuugcucuuguaacccaggc

SEQ ID NO: 132686 - RNA, 24 nt, Artificial Sequence
  Synthetic
gaguuuugcucuuguaacccaggc

SEQ ID NO: 132687 - RNA, 21 nt, Artificial Sequence
  Synthetic
gucucacucugccacccaggc

SEQ ID NO: 132688 - RNA, 22 nt, Artificial Sequence
  Synthetic
ggucucacucugccacccaggc

SEQ ID NO: 132689 - RNA, 23 nt, Artificial Sequence
  Synthetic
gggucucacucugccacccaggc

SEQ ID NO: 132690 - RNA, 21 nt, Artificial Sequence
  Synthetic
gucuugaucuaucacccaggc

SEQ ID NO: 132691 - RNA, 23 nt, Artificial Sequence
  Synthetic
gagucuugaucuaucacccaggc

SEQ ID NO: 132692 - RNA, 21 nt, Artificial Sequence
  Synthetic
gucucacuacgucacccaggc

SEQ ID NO: 132693 - RNA, 23 nt, Artificial Sequence
  Synthetic
gagucucacuacgucacccaggc

SEQ ID NO: 132694 - RNA, 24 nt, Artificial Sequence
  Synthetic
ggagucucacuacgucacccaggc

SEQ ID NO: 132695 - RNA, 22 nt, Artificial Sequence
  Synthetic
gaucucacucugucacccaggc

SEQ ID NO: 132696 - RNA, 23 nt, Artificial Sequence
  Synthetic
ggaucucacucugucacccaggc

SEQ ID NO: 132697 - RNA, 21 nt, Artificial Sequence
  Synthetic
gucuagcucugucacccaggc

SEQ ID NO: 132698 - RNA, 23 nt, Artificial Sequence
  Synthetic
gagucuagcucugucacccaggc

SEQ ID NO: 132699 - RNA, 24 nt, Artificial Sequence
  Synthetic
ggagucuagcucugucacccaggc

SEQ ID NO: 132700 - RNA, 21 nt, Artificial Sequence
  Synthetic
gucucgcucugucacccaggc

SEQ ID NO: 132701 - RNA, 23 nt, Artificial Sequence
  Synthetic
gagucucgcucugucacccaggc

SEQ ID NO: 132702 - RNA, 24 nt, Artificial Sequence
  Synthetic
guagucucgcucugucacccaggc

SEQ ID NO: 132703 - RNA, 21 nt, Artificial Sequence
  Synthetic
gccuugcucugucacccaggc

SEQ ID NO: 132704 - RNA, 23 nt, Artificial Sequence
  Synthetic
gagccuugcucugucacccaggc

SEQ ID NO: 132705 - RNA, 24 nt, Artificial Sequence
  Synthetic
ggagccuugcucugucacccaggc

SEQ ID NO: 132706 - RNA, 21 nt, Artificial Sequence
  Synthetic
gucuugcucugucacccaggc

SEQ ID NO: 132707 - RNA, 23 nt, Artificial Sequence
  Synthetic
gagucuugcucugucacccaggc

SEQ ID NO: 132708 - RNA, 24 nt, Artificial Sequence
  Synthetic
ggagucuugcucugucacccaggc

SEQ ID NO: 132709 - RNA, 21 nt, Artificial Sequence
  Synthetic
gucucacugugucacccaggc

SEQ ID NO: 132710 - RNA, 23 nt, Artificial Sequence
  Synthetic
gagucucacugugucacccaggc

SEQ ID NO: 132711 - RNA, 24 nt, Artificial Sequence
  Synthetic
ggagucucacugugucacccaggc

SEQ ID NO: 132712 - RNA, 21 nt, Artificial Sequence
  Synthetic
gucucacuuugucacccaggc

SEQ ID NO: 132713 - RNA, 24 nt, Artificial Sequence
  Synthetic
gaagucucacuuugucacccaggc

SEQ ID NO: 132714 - RNA, 21 nt, Artificial Sequence
  Synthetic
gucucccucugucgcccaggc

SEQ ID NO: 132715 - RNA, 23 nt, Artificial Sequence
  Synthetic
gagucucccucugucgcccaggc

SEQ ID NO: 132716 - RNA, 24 nt, Artificial Sequence
  Synthetic
ggagucucccucugucgcccaggc

SEQ ID NO: 132717 - RNA, 21 nt, Artificial Sequence
  Synthetic
gucucgcucugucgcccaggc

SEQ ID NO: 132718 - RNA, 24 nt, Artificial Sequence
  Synthetic
gcagucucgcucugucgcccaggc

SEQ ID NO: 132719 - RNA, 24 nt, Artificial Sequence
  Synthetic
ggagucucgcucugucgcccaggc

SEQ ID NO: 132720 - RNA, 21 nt, Artificial Sequence
  Synthetic
gucuggcucugucgcccaggc

SEQ ID NO: 132721 - RNA, 23 nt, Artificial Sequence
  Synthetic
gagucuggcucugucgcccaggc

SEQ ID NO: 132722 - RNA, 24 nt, Artificial Sequence
  Synthetic
ggagucuggcucugucgcccaggc

SEQ ID NO: 132723 - RNA, 21 nt, Artificial Sequence
  Synthetic
gucuugcucugucgcccaggc

SEQ ID NO: 132724 - RNA, 23 nt, Artificial Sequence
  Synthetic
gagucuugcucugucgcccaggc

SEQ ID NO: 132725 - RNA, 24 nt, Artificial Sequence
  Synthetic
ggagucuugcucugucgcccaggc

SEQ ID NO: 132726 - RNA, 21 nt, Artificial Sequence
  Synthetic
gccucuuucugucgcccaggc

SEQ ID NO: 132727 - RNA, 22 nt, Artificial Sequence
  Synthetic
ggccucuuucugucgcccaggc

SEQ ID NO: 132728 - RNA, 23 nt, Artificial Sequence
  Synthetic
gggccucuuucugucgcccaggc

SEQ ID NO: 132729 - RNA, 22 nt, Artificial Sequence
  Synthetic
guuucgcucgugucgcccaggc

SEQ ID NO: 132730 - RNA, 24 nt, Artificial Sequence
  Synthetic
gaguuucgcucgugucgcccaggc

SEQ ID NO: 132731 - RNA, 22 nt, Artificial Sequence
  Synthetic
guuuugcucuugucgcccaggc

SEQ ID NO: 132732 - RNA, 24 nt, Artificial Sequence
  Synthetic
gaguuuugcucuugucgcccaggc

SEQ ID NO: 132733 - RNA, 22 nt, Artificial Sequence
  Synthetic
guuucacucuugcugcccaggc

SEQ ID NO: 132734 - RNA, 24 nt, Artificial Sequence
  Synthetic
gaguuucacucuugcugcccaggc

SEQ ID NO: 132735 - RNA, 21 nt, Artificial Sequence
  Synthetic
gucucacucgguugcccaggc

SEQ ID NO: 132736 - RNA, 23 nt, Artificial Sequence
  Synthetic
gagucucacucgguugcccaggc

SEQ ID NO: 132737 - RNA, 21 nt, Artificial Sequence
  Synthetic
gaaucuugcuguugcccaggc

SEQ ID NO: 132738 - RNA, 22 nt, Artificial Sequence
  Synthetic
ggaaucuugcuguugcccaggc

SEQ ID NO: 132739 - RNA, 21 nt, Artificial Sequence
  Synthetic
gucucacucuguugcccaggc

SEQ ID NO: 132740 - RNA, 22 nt, Artificial Sequence
  Synthetic
ggucucacucuguugcccaggc

SEQ ID NO: 132741 - RNA, 23 nt, Artificial Sequence
  Synthetic
gggucucacucuguugcccaggc

SEQ ID NO: 132742 - RNA, 21 nt, Artificial Sequence
  Synthetic
gucucgcucuguugcccaggc

SEQ ID NO: 132743 - RNA, 23 nt, Artificial Sequence
  Synthetic
gagucucgcucuguugcccaggc

SEQ ID NO: 132744 - RNA, 24 nt, Artificial Sequence
  Synthetic
ggagucucgcucuguugcccaggc

SEQ ID NO: 132745 - RNA, 21 nt, Artificial Sequence
  Synthetic
gucuugcucuguugcccaggc

SEQ ID NO: 132746 - RNA, 23 nt, Artificial Sequence
  Synthetic
gagucuugcucuguugcccaggc

SEQ ID NO: 132747 - RNA, 24 nt, Artificial Sequence
  Synthetic
ggagucuugcucuguugcccaggc

SEQ ID NO: 132748 - RNA, 22 nt, Artificial Sequence
  Synthetic
guuuugcucuuguugcccaggc

SEQ ID NO: 132749 - RNA, 24 nt, Artificial Sequence
  Synthetic
gaguuuugcucuuguugcccaggc

SEQ ID NO: 132750 - RNA, 20 nt, Artificial Sequence
  Synthetic
gucucacucugucgccaggc

SEQ ID NO: 132751 - RNA, 22 nt, Artificial Sequence
  Synthetic
gagucucacucugucgccaggc

SEQ ID NO: 132752 - RNA, 20 nt, Artificial Sequence
  Synthetic
gucuugcucugucgccaggc

SEQ ID NO: 132753 - RNA, 22 nt, Artificial Sequence
  Synthetic
gagucuugcucugucgccaggc

SEQ ID NO: 132754 - RNA, 18 nt, Artificial Sequence
  Synthetic
guugcucuguugccaggc

SEQ ID NO: 132755 - RNA, 20 nt, Artificial Sequence
  Synthetic
guguugcucuguugccaggc

SEQ ID NO: 132756 - RNA, 22 nt, Artificial Sequence
  Synthetic
gaguguugcucuguugccaggc

SEQ ID NO: 132757 - RNA, 21 nt, Artificial Sequence
  Synthetic
gucucacucugucauccaggc

SEQ ID NO: 132758 - RNA, 22 nt, Artificial Sequence
  Synthetic
ggucucacucugucauccaggc

SEQ ID NO: 132759 - RNA, 23 nt, Artificial Sequence
  Synthetic
gggucucacucugucauccaggc

SEQ ID NO: 132760 - RNA, 21 nt, Artificial Sequence
  Synthetic
gucucgcucugucacucaggc

SEQ ID NO: 132761 - RNA, 23 nt, Artificial Sequence
  Synthetic
gagucucgcucugucacucaggc

SEQ ID NO: 132762 - RNA, 24 nt, Artificial Sequence
  Synthetic
ggagucucgcucugucacucaggc

SEQ ID NO: 132763 - RNA, 22 nt, Artificial Sequence
  Synthetic
gaauucuuucuucugaggaggc

SEQ ID NO: 132764 - RNA, 18 nt, Artificial Sequence
  Synthetic
guacaaaggccuugaggc

SEQ ID NO: 132765 - RNA, 19 nt, Artificial Sequence
  Synthetic
gacacagagagagauaggc

SEQ ID NO: 132766 - RNA, 21 nt, Artificial Sequence
  Synthetic
gagacacagagagagauaggc

SEQ ID NO: 132767 - RNA, 23 nt, Artificial Sequence
  Synthetic
gagagacacagagagagauaggc

SEQ ID NO: 132768 - RNA, 18 nt, Artificial Sequence
  Synthetic
ggaaugggagagauaggc

SEQ ID NO: 132769 - RNA, 21 nt, Artificial Sequence
  Synthetic
guaggaaugggagagauaggc

SEQ ID NO: 132770 - RNA, 21 nt, Artificial Sequence
  Synthetic
gucucacucuguccccuaggc

SEQ ID NO: 132771 - RNA, 23 nt, Artificial Sequence
  Synthetic
gagucucacucuguccccuaggc

SEQ ID NO: 132772 - RNA, 22 nt, Artificial Sequence
  Synthetic
guuuugcucuugucgccccggc

SEQ ID NO: 132773 - RNA, 24 nt, Artificial Sequence
  Synthetic
gaguuuugcucuugucgccccggc

SEQ ID NO: 132774 - RNA, 20 nt, Artificial Sequence
  Synthetic
gucucacucugucgcccggc

SEQ ID NO: 132775 - RNA, 22 nt, Artificial Sequence
  Synthetic
gagucucacucugucgcccggc

SEQ ID NO: 132776 - RNA, 23 nt, Artificial Sequence
  Synthetic
ggagucucacucugucgcccggc

SEQ ID NO: 132777 - RNA, 24 nt, Artificial Sequence
  Synthetic
gccacugcgaauagagggcagggc

SEQ ID NO: 132778 - RNA, 21 nt, Artificial Sequence
  Synthetic
gucuggcucuguugcccgggc

SEQ ID NO: 132779 - RNA, 23 nt, Artificial Sequence
  Synthetic
gagucuggcucuguugcccgggc

SEQ ID NO: 132780 - RNA, 20 nt, Artificial Sequence
  Synthetic
gccuguuggggguggggggc

SEQ ID NO: 132781 - RNA, 22 nt, Artificial Sequence
  Synthetic
gugccuguuggggguggggggc

SEQ ID NO: 132782 - RNA, 23 nt, Artificial Sequence
  Synthetic
ggugccuguuggggguggggggc

SEQ ID NO: 132783 - RNA, 18 nt, Artificial Sequence
  Synthetic
gugcaaaggcccuggggc

SEQ ID NO: 132784 - RNA, 22 nt, Artificial Sequence
  Synthetic
gcaagugcaaaggcccuggggc

SEQ ID NO: 132785 - RNA, 22 nt, Artificial Sequence
  Synthetic
gacaagaauuaacuacaugggc

SEQ ID NO: 132786 - RNA, 18 nt, Artificial Sequence
  Synthetic
gagcaggaagcucugggc

SEQ ID NO: 132787 - RNA, 20 nt, Artificial Sequence
  Synthetic
gaaaagcauagugucugggc

SEQ ID NO: 132788 - RNA, 21 nt, Artificial Sequence
  Synthetic
ggaaaagcauagugucugggc

SEQ ID NO: 132789 - RNA, 22 nt, Artificial Sequence
  Synthetic
gggaaaagcauagugucugggc

SEQ ID NO: 132790 - RNA, 24 nt, Artificial Sequence
  Synthetic
gugggaaaagcauagugucugggc

SEQ ID NO: 132791 - RNA, 21 nt, Artificial Sequence
  Synthetic
gucucacucugucaugugggc

SEQ ID NO: 132792 - RNA, 22 nt, Artificial Sequence
  Synthetic
ggucucacucugucaugugggc

SEQ ID NO: 132793 - RNA, 23 nt, Artificial Sequence
  Synthetic
gggucucacucugucaugugggc

SEQ ID NO: 132794 - RNA, 18 nt, Artificial Sequence
  Synthetic
gaggucauuugguugggc

SEQ ID NO: 132795 - RNA, 18 nt, Artificial Sequence
  Synthetic
ggaggaagugauuauggc

SEQ ID NO: 132796 - RNA, 22 nt, Artificial Sequence
  Synthetic
guuucacuguuguugcccuggc

SEQ ID NO: 132797 - RNA, 24 nt, Artificial Sequence
  Synthetic
gaguuucacuguuguugcccuggc

SEQ ID NO: 132798 - RNA, 19 nt, Artificial Sequence
  Synthetic
gaaaauaacaugugcuggc

SEQ ID NO: 132799 - RNA, 20 nt, Artificial Sequence
  Synthetic
gcaucagccucccaaguggc

SEQ ID NO: 132800 - RNA, 22 nt, Artificial Sequence
  Synthetic
gacggggguuucaccuuguggc

SEQ ID NO: 132801 - RNA, 24 nt, Artificial Sequence
  Synthetic
gagacggggguuucaccuuguggc

SEQ ID NO: 132802 - RNA, 18 nt, Artificial Sequence
  Synthetic
gggucucaccauguuggc

SEQ ID NO: 132803 - RNA, 19 nt, Artificial Sequence
  Synthetic
ggggucucaccauguuggc

SEQ ID NO: 132804 - RNA, 22 nt, Artificial Sequence
  Synthetic
gacggggucucaccauguuggc

SEQ ID NO: 132805 - RNA, 18 nt, Artificial Sequence
  Synthetic
gggauucaccauguuggc

SEQ ID NO: 132806 - RNA, 21 nt, Artificial Sequence
  Synthetic
gacgggauucaccauguuggc

SEQ ID NO: 132807 - RNA, 23 nt, Artificial Sequence
  Synthetic
gagacgggauucaccauguuggc

SEQ ID NO: 132808 - RNA, 18 nt, Artificial Sequence
  Synthetic
ggauuucaccauguuggc

SEQ ID NO: 132809 - RNA, 19 nt, Artificial Sequence
  Synthetic
gggauuucaccauguuggc

SEQ ID NO: 132810 - RNA, 22 nt, Artificial Sequence
  Synthetic
gacgggauuucaccauguuggc

SEQ ID NO: 132811 - RNA, 24 nt, Artificial Sequence
  Synthetic
gagacgggauuucaccauguuggc

SEQ ID NO: 132812 - RNA, 18 nt, Artificial Sequence
  Synthetic
gaguuucaccauguuggc

SEQ ID NO: 132813 - RNA, 22 nt, Artificial Sequence
  Synthetic
gauagaguuucaccauguuggc

SEQ ID NO: 132814 - RNA, 24 nt, Artificial Sequence
  Synthetic
gagauagaguuucaccauguuggc

SEQ ID NO: 132815 - RNA, 22 nt, Artificial Sequence
  Synthetic
gacgggguuucaccauguuggc

SEQ ID NO: 132816 - RNA, 24 nt, Artificial Sequence
  Synthetic
gagacgggguuucaccauguuggc

SEQ ID NO: 132817 - RNA, 18 nt, Artificial Sequence
  Synthetic
ggguuucgccauguuggc

SEQ ID NO: 132818 - RNA, 19 nt, Artificial Sequence
  Synthetic
gggguuucgccauguuggc

SEQ ID NO: 132819 - RNA, 22 nt, Artificial Sequence
  Synthetic
gaugggguuucgccauguuggc

SEQ ID NO: 132820 - RNA, 24 nt, Artificial Sequence
  Synthetic
gagaugggguuucgccauguuggc

SEQ ID NO: 132821 - RNA, 18 nt, Artificial Sequence
  Synthetic
gaguuuugccauguuggc

SEQ ID NO: 132822 - RNA, 19 nt, Artificial Sequence
  Synthetic
ggaguuuugccauguuggc

SEQ ID NO: 132823 - RNA, 22 nt, Artificial Sequence
  Synthetic
gacggaguuuugccauguuggc

SEQ ID NO: 132824 - RNA, 24 nt, Artificial Sequence
  Synthetic
gagacggaguuuugccauguuggc

SEQ ID NO: 132825 - RNA, 18 nt, Artificial Sequence
  Synthetic
ggguuucaucauguuggc

SEQ ID NO: 132826 - RNA, 19 nt, Artificial Sequence
  Synthetic
gggguuucaucauguuggc

SEQ ID NO: 132827 - RNA, 22 nt, Artificial Sequence
  Synthetic
gaugggguuucaucauguuggc

SEQ ID NO: 132828 - RNA, 24 nt, Artificial Sequence
  Synthetic
gagaugggguuucaucauguuggc

SEQ ID NO: 132829 - RNA, 20 nt, Artificial Sequence
  Synthetic
gacuccuguacacuguuggc

SEQ ID NO: 132830 - RNA, 21 nt, Artificial Sequence
  Synthetic
ggacuccuguacacuguuggc

SEQ ID NO: 132831 - RNA, 22 nt, Artificial Sequence
  Synthetic
gggacuccuguacacuguuggc

SEQ ID NO: 132832 - RNA, 23 nt, Artificial Sequence
  Synthetic
ggggacuccuguacacuguuggc

SEQ ID NO: 132833 - RNA, 20 nt, Artificial Sequence
  Synthetic
gacaaaagaaaaguguuggc

SEQ ID NO: 132834 - RNA, 21 nt, Artificial Sequence
  Synthetic
gguauuucuuuauagcaaugc

SEQ ID NO: 132835 - RNA, 18 nt, Artificial Sequence
  Synthetic
ggacuccuggguuaaugc

SEQ ID NO: 132836 - RNA, 23 nt, Artificial Sequence
  Synthetic
gacuuggacuccuggguuaaugc

SEQ ID NO: 132837 - RNA, 24 nt, Artificial Sequence
  Synthetic
ggacuuggacuccuggguuaaugc

SEQ ID NO: 132838 - RNA, 21 nt, Artificial Sequence
  Synthetic
gucuugcucuauuccccaugc

SEQ ID NO: 132839 - RNA, 24 nt, Artificial Sequence
  Synthetic
gaagucuugcucuauuccccaugc

SEQ ID NO: 132840 - RNA, 20 nt, Artificial Sequence
  Synthetic
gucuggaagaaagaagaugc

SEQ ID NO: 132841 - RNA, 24 nt, Artificial Sequence
  Synthetic
gacucuguauuuaagacaugaugc

SEQ ID NO: 132842 - RNA, 19 nt, Artificial Sequence
  Synthetic
gacucuggaaccaaacugc

SEQ ID NO: 132843 - RNA, 20 nt, Artificial Sequence
  Synthetic
ggacucuggaaccaaacugc

SEQ ID NO: 132844 - RNA, 22 nt, Artificial Sequence
  Synthetic
gaggacucuggaaccaaacugc

SEQ ID NO: 132845 - RNA, 24 nt, Artificial Sequence
  Synthetic
gagaggacucuggaaccaaacugc

SEQ ID NO: 132846 - RNA, 18 nt, Artificial Sequence
  Synthetic
ggauacuaugcucacugc

SEQ ID NO: 132847 - RNA, 21 nt, Artificial Sequence
  Synthetic
guuggauacuaugcucacugc

SEQ ID NO: 132848 - RNA, 19 nt, Artificial Sequence
  Synthetic
gccagcagcggcaaccugc

SEQ ID NO: 132849 - RNA, 18 nt, Artificial Sequence
  Synthetic
gugaagagaaagagcugc

SEQ ID NO: 132850 - RNA, 20 nt, Artificial Sequence
  Synthetic
gugugaagagaaagagcugc

SEQ ID NO: 132851 - RNA, 21 nt, Artificial Sequence
  Synthetic
guccaggcagaagucugcugc

SEQ ID NO: 132852 - RNA, 24 nt, Artificial Sequence
  Synthetic
gauguccaggcagaagucugcugc

SEQ ID NO: 132853 - RNA, 20 nt, Artificial Sequence
  Synthetic
gcacagucuguucccucugc

SEQ ID NO: 132854 - RNA, 22 nt, Artificial Sequence
  Synthetic
gaacccucugcugcaggucugc

SEQ ID NO: 132855 - RNA, 23 nt, Artificial Sequence
  Synthetic
ggaacccucugcugcaggucugc

SEQ ID NO: 132856 - RNA, 20 nt, Artificial Sequence
  Synthetic
guuucagccacccaaagugc

SEQ ID NO: 132857 - RNA, 24 nt, Artificial Sequence
  Synthetic
gccuguuucagccacccaaagugc

SEQ ID NO: 132858 - RNA, 20 nt, Artificial Sequence
  Synthetic
gccuuggacucccaaagugc

SEQ ID NO: 132859 - RNA, 24 nt, Artificial Sequence
  Synthetic
gcccgccuuggacucccaaagugc

SEQ ID NO: 132860 - RNA, 18 nt, Artificial Sequence
  Synthetic
guaggccucccaaagugc

SEQ ID NO: 132861 - RNA, 24 nt, Artificial Sequence
  Synthetic
gcccaccucggccucccaaagugc

SEQ ID NO: 132862 - RNA, 24 nt, Artificial Sequence
  Synthetic
gcccgccucggccucccaaagugc

SEQ ID NO: 132863 - RNA, 24 nt, Artificial Sequence
  Synthetic
gccugccucggccucccaaagugc

SEQ ID NO: 132864 - RNA, 20 nt, Artificial Sequence
  Synthetic
gccugggccucccaaagugc

SEQ ID NO: 132865 - RNA, 24 nt, Artificial Sequence
  Synthetic
gcccgccugggccucccaaagugc

SEQ ID NO: 132866 - RNA, 24 nt, Artificial Sequence
  Synthetic
gcccgccuuggccucccaaagugc

SEQ ID NO: 132867 - RNA, 24 nt, Artificial Sequence
  Synthetic
gcccuccuuggccucccaaagugc

SEQ ID NO: 132868 - RNA, 20 nt, Artificial Sequence
  Synthetic
gccucugccucccaaagugc

SEQ ID NO: 132869 - RNA, 24 nt, Artificial Sequence
  Synthetic
gcccgccucugccucccaaagugc

SEQ ID NO: 132870 - RNA, 20 nt, Artificial Sequence
  Synthetic
gccucauccucccaaagugc

SEQ ID NO: 132871 - RNA, 24 nt, Artificial Sequence
  Synthetic
gcccgccucauccucccaaagugc

SEQ ID NO: 132872 - RNA, 20 nt, Artificial Sequence
  Synthetic
gccucaggcucccaaagugc

SEQ ID NO: 132873 - RNA, 24 nt, Artificial Sequence
  Synthetic
gcccgccucaggcucccaaagugc

SEQ ID NO: 132874 - RNA, 20 nt, Artificial Sequence
  Synthetic
gccccagcuucccaaagugc

SEQ ID NO: 132875 - RNA, 20 nt, Artificial Sequence
  Synthetic
gccucagcuucccaaagugc

SEQ ID NO: 132876 - RNA, 20 nt, Artificial Sequence
  Synthetic
gccucggccucgcaaagugc

SEQ ID NO: 132877 - RNA, 24 nt, Artificial Sequence
  Synthetic
gccugccucggccucgcaaagugc

SEQ ID NO: 132878 - RNA, 24 nt, Artificial Sequence
  Synthetic
guuugccucggccucgcaaagugc

SEQ ID NO: 132879 - RNA, 24 nt, Artificial Sequence
  Synthetic
gcccaccuuggucucucaaagugc

SEQ ID NO: 132880 - RNA, 20 nt, Artificial Sequence
  Synthetic
gccucggccuccccaagugc

SEQ ID NO: 132881 - RNA, 24 nt, Artificial Sequence
  Synthetic
gcccgccucggccuccccaagugc

SEQ ID NO: 132882 - RNA, 24 nt, Artificial Sequence
  Synthetic
gcccaucuuggccucccaaugugc

SEQ ID NO: 132883 - RNA, 20 nt, Artificial Sequence
  Synthetic
gccuuagccucccaaauugc

SEQ ID NO: 132884 - RNA, 24 nt, Artificial Sequence
  Synthetic
gcccaccucggccucucaaauugc

SEQ ID NO: 132885 - RNA, 18 nt, Artificial Sequence
  Synthetic
gaagucccacuagauugc

SEQ ID NO: 132886 - RNA, 21 nt, Artificial Sequence
  Synthetic
gaugaagucccacuagauugc

SEQ ID NO: 132887 - RNA, 23 nt, Artificial Sequence
  Synthetic
gagaugaagucccacuagauugc

SEQ ID NO: 132888 - RNA, 18 nt, Artificial Sequence
  Synthetic
gauuguugugaugauugc

SEQ ID NO: 132889 - RNA, 19 nt, Artificial Sequence
  Synthetic
ggauuguugugaugauugc

SEQ ID NO: 132890 - RNA, 20 nt, Artificial Sequence
  Synthetic
gggauuguugugaugauugc

SEQ ID NO: 132891 - RNA, 22 nt, Artificial Sequence
  Synthetic
gugggauuguugugaugauugc

SEQ ID NO: 132892 - RNA, 18 nt, Artificial Sequence
  Synthetic
gcaaccuagaucccuugc

SEQ ID NO: 132893 - RNA, 22 nt, Artificial Sequence
  Synthetic
gcaugcaaccuagaucccuugc

SEQ ID NO: 132894 - RNA, 24 nt, Artificial Sequence
  Synthetic
gagcaugcaaccuagaucccuugc

SEQ ID NO: 132895 - RNA, 20 nt, Artificial Sequence
  Synthetic
gcauucauucucccaguugc

SEQ ID NO: 132896 - RNA, 23 nt, Artificial Sequence
  Synthetic
gaagcauucauucucccaguugc

SEQ ID NO: 132897 - RNA, 22 nt, Artificial Sequence
  Synthetic
guccacuccagacccuguuugc

SEQ ID NO: 132898 - RNA, 23 nt, Artificial Sequence
  Synthetic
gguccacuccagacccuguuugc

SEQ ID NO: 132899 - RNA, 24 nt, Artificial Sequence
  Synthetic
gacagacaaacagagagccaaauc

SEQ ID NO: 132900 - RNA, 18 nt, Artificial Sequence
  Synthetic
gaaaaggaagaaacaauc

SEQ ID NO: 132901 - RNA, 19 nt, Artificial Sequence
  Synthetic
ggaaaaggaagaaacaauc

SEQ ID NO: 132902 - RNA, 24 nt, Artificial Sequence
  Synthetic
gaaccaaaaguagccaaggcaauc

SEQ ID NO: 132903 - RNA, 18 nt, Artificial Sequence
  Synthetic
gaccuccuccccucaauc

SEQ ID NO: 132904 - RNA, 22 nt, Artificial Sequence
  Synthetic
gaaccaagccccaagcagaauc

SEQ ID NO: 132905 - RNA, 24 nt, Artificial Sequence
  Synthetic
gcuuccuguacaaccugcagaauc

SEQ ID NO: 132906 - RNA, 22 nt, Artificial Sequence
  Synthetic
guuuugagugaguuucuuaauc

SEQ ID NO: 132907 - RNA, 23 nt, Artificial Sequence
  Synthetic
gguuuugagugaguuucuuaauc

SEQ ID NO: 132908 - RNA, 19 nt, Artificial Sequence
  Synthetic
gacaucugagugcaacauc

SEQ ID NO: 132909 - RNA, 21 nt, Artificial Sequence
  Synthetic
gauccuuucauuugcaacauc

SEQ ID NO: 132910 - RNA, 23 nt, Artificial Sequence
  Synthetic
gagauccuuucauuugcaacauc

SEQ ID NO: 132911 - RNA, 18 nt, Artificial Sequence
  Synthetic
gggccaauuucucccauc

SEQ ID NO: 132912 - RNA, 22 nt, Artificial Sequence
  Synthetic
guuugggccaauuucucccauc

SEQ ID NO: 132913 - RNA, 21 nt, Artificial Sequence
  Synthetic
ggucauaaggccaaagccauc

SEQ ID NO: 132914 - RNA, 19 nt, Artificial Sequence
  Synthetic
gaacuagaacaacuccauc

SEQ ID NO: 132915 - RNA, 23 nt, Artificial Sequence
  Synthetic
guucgaacuagaacaacuccauc

SEQ ID NO: 132916 - RNA, 19 nt, Artificial Sequence
  Synthetic
gaauuuucuucauggcauc

SEQ ID NO: 132917 - RNA, 19 nt, Artificial Sequence
  Synthetic
gaggauucugucuugcauc

SEQ ID NO: 132918 - RNA, 24 nt, Artificial Sequence
  Synthetic
guaaagaggauucugucuugcauc

SEQ ID NO: 132919 - RNA, 19 nt, Artificial Sequence
  Synthetic
gaagacuuugucuugcauc

SEQ ID NO: 132920 - RNA, 24 nt, Artificial Sequence
  Synthetic
guaaagaagacuuugucuugcauc

SEQ ID NO: 132921 - RNA, 20 nt, Artificial Sequence
  Synthetic
guucucacccaaaucucauc

SEQ ID NO: 132922 - RNA, 22 nt, Artificial Sequence
  Synthetic
guguucucacccaaaucucauc

SEQ ID NO: 132923 - RNA, 20 nt, Artificial Sequence
  Synthetic
guccccauccaaaucucauc

SEQ ID NO: 132924 - RNA, 22 nt, Artificial Sequence
  Synthetic
guguccccauccaaaucucauc

SEQ ID NO: 132925 - RNA, 22 nt, Artificial Sequence
  Synthetic
gauuuuugcaucaauguucauc

SEQ ID NO: 132926 - RNA, 23 nt, Artificial Sequence
  Synthetic
ggauuuuugcaucaauguucauc

SEQ ID NO: 132927 - RNA, 22 nt, Artificial Sequence
  Synthetic
gauuuucgcauugauguucauc

SEQ ID NO: 132928 - RNA, 23 nt, Artificial Sequence
  Synthetic
ggauuuucgcauugauguucauc

SEQ ID NO: 132929 - RNA, 18 nt, Artificial Sequence
  Synthetic
ggagauucuucagagauc

SEQ ID NO: 132930 - RNA, 20 nt, Artificial Sequence
  Synthetic
guggagauucuucagagauc

SEQ ID NO: 132931 - RNA, 22 nt, Artificial Sequence
  Synthetic
guguggagauucuucagagauc

SEQ ID NO: 132932 - RNA, 18 nt, Artificial Sequence
  Synthetic
ggcggaucacuugagauc

SEQ ID NO: 132933 - RNA, 19 nt, Artificial Sequence
  Synthetic
gggcggaucacuugagauc

SEQ ID NO: 132934 - RNA, 21 nt, Artificial Sequence
  Synthetic
gcgggcggaucacuugagauc

SEQ ID NO: 132935 - RNA, 22 nt, Artificial Sequence
  Synthetic
ggcgggcggaucacuugagauc

SEQ ID NO: 132936 - RNA, 19 nt, Artificial Sequence
  Synthetic
gauuucagguuuuuggauc

SEQ ID NO: 132937 - RNA, 20 nt, Artificial Sequence
  Synthetic
ggauuucagguuuuuggauc

SEQ ID NO: 132938 - RNA, 20 nt, Artificial Sequence
  Synthetic
gaaaacuauaggccaauauc

SEQ ID NO: 132939 - RNA, 24 nt, Artificial Sequence
  Synthetic
gaaagaaaacuauaggccaauauc

SEQ ID NO: 132940 - RNA, 21 nt, Artificial Sequence
  Synthetic
gucuuugcccaugccuauauc

SEQ ID NO: 132941 - RNA, 24 nt, Artificial Sequence
  Synthetic
gaagucuuugcccaugccuauauc

SEQ ID NO: 132942 - RNA, 20 nt, Artificial Sequence
  Synthetic
guuuucucauaguuuuuauc

SEQ ID NO: 132943 - RNA, 19 nt, Artificial Sequence
  Synthetic
gcuaguaaaucagaaacuc

SEQ ID NO: 132944 - RNA, 21 nt, Artificial Sequence
  Synthetic
gagcuaguaaaucagaaacuc

SEQ ID NO: 132945 - RNA, 18 nt, Artificial Sequence
  Synthetic
gaggauguauggaaacuc

SEQ ID NO: 132946 - RNA, 19 nt, Artificial Sequence
  Synthetic
gagacagcagagauaacuc

SEQ ID NO: 132947 - RNA, 23 nt, Artificial Sequence
  Synthetic
guuucucaaccuuagcuacacuc

SEQ ID NO: 132948 - RNA, 18 nt, Artificial Sequence
  Synthetic
gacuuuggacuuggacuc

SEQ ID NO: 132949 - RNA, 20 nt, Artificial Sequence
  Synthetic
gagacuuuggacuuggacuc

SEQ ID NO: 132950 - RNA, 23 nt, Artificial Sequence
  Synthetic
gaugagacuuuggacuuggacuc

SEQ ID NO: 132951 - RNA, 22 nt, Artificial Sequence
  Synthetic
gccauucuccugccuuaaccuc

SEQ ID NO: 132952 - RNA, 21 nt, Artificial Sequence
  Synthetic
gcucacagcaaccuccaccuc

SEQ ID NO: 132953 - RNA, 22 nt, Artificial Sequence
  Synthetic
ggcucacagcaaccuccaccuc

SEQ ID NO: 132954 - RNA, 21 nt, Artificial Sequence
  Synthetic
gcucaccgcaaccuccaccuc

SEQ ID NO: 132955 - RNA, 22 nt, Artificial Sequence
  Synthetic
ggcucaccgcaaccuccaccuc

SEQ ID NO: 132956 - RNA, 20 nt, Artificial Sequence
  Synthetic
gcucacugcaccuccaccuc

SEQ ID NO: 132957 - RNA, 21 nt, Artificial Sequence
  Synthetic
ggcucacugcaccuccaccuc

SEQ ID NO: 132958 - RNA, 21 nt, Artificial Sequence
  Synthetic
gcucacugcaagcuccaccuc

SEQ ID NO: 132959 - RNA, 22 nt, Artificial Sequence
  Synthetic
ggcucacugcaagcuccaccuc

SEQ ID NO: 132960 - RNA, 18 nt, Artificial Sequence
  Synthetic
gguggaucacuugaccuc

SEQ ID NO: 132961 - RNA, 19 nt, Artificial Sequence
  Synthetic
ggguggaucacuugaccuc

SEQ ID NO: 132962 - RNA, 21 nt, Artificial Sequence
  Synthetic
guggguggaucacuugaccuc

SEQ ID NO: 132963 - RNA, 22 nt, Artificial Sequence
  Synthetic
gguggguggaucacuugaccuc

SEQ ID NO: 132964 - RNA, 24 nt, Artificial Sequence
  Synthetic
gagguggguggaucacuugaccuc

SEQ ID NO: 132965 - RNA, 23 nt, Artificial Sequence
  Synthetic
gccucuugccacuuuuauaccuc

SEQ ID NO: 132966 - RNA, 21 nt, Artificial Sequence
  Synthetic
gcucacugcaacuucuaccuc

SEQ ID NO: 132967 - RNA, 22 nt, Artificial Sequence
  Synthetic
ggcucacugcaacuucuaccuc

SEQ ID NO: 132968 - RNA, 19 nt, Artificial Sequence
  Synthetic
gaaguuuauuccaacccuc

SEQ ID NO: 132969 - RNA, 22 nt, Artificial Sequence
  Synthetic
gaagaaguuuauuccaacccuc

SEQ ID NO: 132970 - RNA, 23 nt, Artificial Sequence
  Synthetic
ggaagaaguuuauuccaacccuc

SEQ ID NO: 132971 - RNA, 19 nt, Artificial Sequence
  Synthetic
gauugagggcuccacccuc

SEQ ID NO: 132972 - RNA, 20 nt, Artificial Sequence
  Synthetic
ggauugagggcuccacccuc

SEQ ID NO: 132973 - RNA, 18 nt, Artificial Sequence
  Synthetic
gcaaccucugucccccuc

SEQ ID NO: 132974 - RNA, 22 nt, Artificial Sequence
  Synthetic
gcaauccucccaccucagccuc

SEQ ID NO: 132975 - RNA, 23 nt, Artificial Sequence
  Synthetic
ggcaauccucccaccucagccuc

SEQ ID NO: 132976 - RNA, 19 nt, Artificial Sequence
  Synthetic
gauccuccaccucagccuc

SEQ ID NO: 132977 - RNA, 21 nt, Artificial Sequence
  Synthetic
gugauccuccaccucagccuc

SEQ ID NO: 132978 - RNA, 22 nt, Artificial Sequence
  Synthetic
ggugauccuccaccucagccuc

SEQ ID NO: 132979 - RNA, 20 nt, Artificial Sequence
  Synthetic
gaucaugucaccucagccuc

SEQ ID NO: 132980 - RNA, 22 nt, Artificial Sequence
  Synthetic
gagaucaugucaccucagccuc

SEQ ID NO: 132981 - RNA, 22 nt, Artificial Sequence
  Synthetic
gugauucuccuaccucagccuc

SEQ ID NO: 132982 - RNA, 20 nt, Artificial Sequence
  Synthetic
gauucugguaccucagccuc

SEQ ID NO: 132983 - RNA, 22 nt, Artificial Sequence
  Synthetic
gcgauucugguaccucagccuc

SEQ ID NO: 132984 - RNA, 22 nt, Artificial Sequence
  Synthetic
gcaaucuucccgccucagccuc

SEQ ID NO: 132985 - RNA, 20 nt, Artificial Sequence
  Synthetic
gauuccccugccucagccuc

SEQ ID NO: 132986 - RNA, 22 nt, Artificial Sequence
  Synthetic
gcgauuccccugccucagccuc

SEQ ID NO: 132987 - RNA, 22 nt, Artificial Sequence
  Synthetic
gccauccuccugccucagccuc

SEQ ID NO: 132988 - RNA, 22 nt, Artificial Sequence
  Synthetic
gccauucuccugccucagccuc

SEQ ID NO: 132989 - RNA, 24 nt, Artificial Sequence
  Synthetic
gcgccauucuccugccucagccuc

SEQ ID NO: 132990 - RNA, 21 nt, Artificial Sequence
  Synthetic
ggauucuccugccucagccuc

SEQ ID NO: 132991 - RNA, 22 nt, Artificial Sequence
  Synthetic
gggauucuccugccucagccuc

SEQ ID NO: 132992 - RNA, 22 nt, Artificial Sequence
  Synthetic
gcuauucuccugccucagccuc

SEQ ID NO: 132993 - RNA, 19 nt, Artificial Sequence
  Synthetic
guucuugugccucagccuc

SEQ ID NO: 132994 - RNA, 20 nt, Artificial Sequence
  Synthetic
gguucuugugccucagccuc

SEQ ID NO: 132995 - RNA, 22 nt, Artificial Sequence
  Synthetic
gcgguucuugugccucagccuc

SEQ ID NO: 132996 - RNA, 20 nt, Artificial Sequence
  Synthetic
gauucucccaucucagccuc

SEQ ID NO: 132997 - RNA, 22 nt, Artificial Sequence
  Synthetic
gcuauccuccugucucagccuc

SEQ ID NO: 132998 - RNA, 22 nt, Artificial Sequence
  Synthetic
gcaauucuucugcuucagccuc

SEQ ID NO: 132999 - RNA, 24 nt, Artificial Sequence
  Synthetic
gagcaauucuucugcuucagccuc

SEQ ID NO: 133000 - RNA, 19 nt, Artificial Sequence
  Synthetic
gcuggagugcaguagccuc

SEQ ID NO: 133001 - RNA, 20 nt, Artificial Sequence
  Synthetic
ggcuggagugcaguagccuc

SEQ ID NO: 133002 - RNA, 20 nt, Artificial Sequence
  Synthetic
gauucucuugccuuagccuc

SEQ ID NO: 133003 - RNA, 22 nt, Artificial Sequence
  Synthetic
gagauucucuugccuuagccuc

SEQ ID NO: 133004 - RNA, 21 nt, Artificial Sequence
  Synthetic
gcucacugcaaacuccgccuc

SEQ ID NO: 133005 - RNA, 22 nt, Artificial Sequence
  Synthetic
ggcucacugcaaacuccgccuc

SEQ ID NO: 133006 - RNA, 21 nt, Artificial Sequence
  Synthetic
gcucacugcaaccuccgccuc

SEQ ID NO: 133007 - RNA, 22 nt, Artificial Sequence
  Synthetic
ggcucacugcaaccuccgccuc

SEQ ID NO: 133008 - RNA, 23 nt, Artificial Sequence
  Synthetic
gggcucacugcaaccuccgccuc

SEQ ID NO: 133009 - RNA, 22 nt, Artificial Sequence
  Synthetic
gucucacugcaaccuccgccuc

SEQ ID NO: 133010 - RNA, 21 nt, Artificial Sequence
  Synthetic
gcucagugcaaccuccgccuc

SEQ ID NO: 133011 - RNA, 22 nt, Artificial Sequence
  Synthetic
ggcucagugcaaccuccgccuc

SEQ ID NO: 133012 - RNA, 21 nt, Artificial Sequence
  Synthetic
gcucacugcgaccuccgccuc

SEQ ID NO: 133013 - RNA, 22 nt, Artificial Sequence
  Synthetic
ggcucacugcgaccuccgccuc

SEQ ID NO: 133014 - RNA, 22 nt, Artificial Sequence
  Synthetic
ggcucacugcaagcuccgccuc

SEQ ID NO: 133015 - RNA, 20 nt, Artificial Sequence
  Synthetic
gauccuucagccucggccuc

SEQ ID NO: 133016 - RNA, 22 nt, Artificial Sequence
  Synthetic
gugauccuucagccucggccuc

SEQ ID NO: 133017 - RNA, 21 nt, Artificial Sequence
  Synthetic
gcucacugcaacaucugccuc

SEQ ID NO: 133018 - RNA, 22 nt, Artificial Sequence
  Synthetic
ggcucacugcaacaucugccuc

SEQ ID NO: 133019 - RNA, 21 nt, Artificial Sequence
  Synthetic
gcucacugcaaacucugccuc

SEQ ID NO: 133020 - RNA, 22 nt, Artificial Sequence
  Synthetic
ggcucacugcaaacucugccuc

SEQ ID NO: 133021 - RNA, 21 nt, Artificial Sequence
  Synthetic
gcuuacugcaaccucugccuc

SEQ ID NO: 133022 - RNA, 22 nt, Artificial Sequence
  Synthetic
ggcuuacugcaaccucugccuc

SEQ ID NO: 133023 - RNA, 21 nt, Artificial Sequence
  Synthetic
gcucacugccaccucugccuc

SEQ ID NO: 133024 - RNA, 22 nt, Artificial Sequence
  Synthetic
ggcucacugccaccucugccuc

SEQ ID NO: 133025 - RNA, 21 nt, Artificial Sequence
  Synthetic
gcucacugcagccucugccuc

SEQ ID NO: 133026 - RNA, 22 nt, Artificial Sequence
  Synthetic
ggcucacugcagccucugccuc

SEQ ID NO: 133027 - RNA, 23 nt, Artificial Sequence
  Synthetic
gggcucacugcagccucugccuc

SEQ ID NO: 133028 - RNA, 20 nt, Artificial Sequence
  Synthetic
gauucuccugccucugccuc

SEQ ID NO: 133029 - RNA, 22 nt, Artificial Sequence
  Synthetic
gcgauucuccugccucugccuc

SEQ ID NO: 133030 - RNA, 21 nt, Artificial Sequence
  Synthetic
gcucacugcaaucucugccuc

SEQ ID NO: 133031 - RNA, 21 nt, Artificial Sequence
  Synthetic
gcucacugcaacuucugccuc

SEQ ID NO: 133032 - RNA, 22 nt, Artificial Sequence
  Synthetic
ggcucacugcaacuucugccuc

SEQ ID NO: 133033 - RNA, 21 nt, Artificial Sequence
  Synthetic
gcucacugcaaccuuugccuc

SEQ ID NO: 133034 - RNA, 22 nt, Artificial Sequence
  Synthetic
ggcucacugcaaccuuugccuc

SEQ ID NO: 133035 - RNA, 19 nt, Artificial Sequence
  Synthetic
gacagugugcagauuccuc

SEQ ID NO: 133036 - RNA, 22 nt, Artificial Sequence
  Synthetic
gaagacagugugcagauuccuc

SEQ ID NO: 133037 - RNA, 23 nt, Artificial Sequence
  Synthetic
ggaagacagugugcagauuccuc

SEQ ID NO: 133038 - RNA, 19 nt, Artificial Sequence
  Synthetic
gacaguguggcgauuccuc

SEQ ID NO: 133039 - RNA, 22 nt, Artificial Sequence
  Synthetic
gaagacaguguggcgauuccuc

SEQ ID NO: 133040 - RNA, 23 nt, Artificial Sequence
  Synthetic
ggaagacaguguggcgauuccuc

SEQ ID NO: 133041 - RNA, 24 nt, Artificial Sequence
  Synthetic
guuucuuuugcugugcagaagcuc

SEQ ID NO: 133042 - RNA, 18 nt, Artificial Sequence
  Synthetic
gaugagaauuuccagcuc

SEQ ID NO: 133043 - RNA, 18 nt, Artificial Sequence
  Synthetic
ggcagauugcuugagcuc

SEQ ID NO: 133044 - RNA, 19 nt, Artificial Sequence
  Synthetic
gggcagauugcuugagcuc

SEQ ID NO: 133045 - RNA, 21 nt, Artificial Sequence
  Synthetic
gugggcagauugcuugagcuc

SEQ ID NO: 133046 - RNA, 22 nt, Artificial Sequence
  Synthetic
ggugggcagauugcuugagcuc

SEQ ID NO: 133047 - RNA, 18 nt, Artificial Sequence
  Synthetic
ggaggauugcuugagcuc

SEQ ID NO: 133048 - RNA, 20 nt, Artificial Sequence
  Synthetic
gaggaggauugcuugagcuc

SEQ ID NO: 133049 - RNA, 21 nt, Artificial Sequence
  Synthetic
ggaggaggauugcuugagcuc

SEQ ID NO: 133050 - RNA, 24 nt, Artificial Sequence
  Synthetic
gaaggaggaggauugcuugagcuc

SEQ ID NO: 133051 - RNA, 18 nt, Artificial Sequence
  Synthetic
ggaggaucauuugagcuc

SEQ ID NO: 133052 - RNA, 19 nt, Artificial Sequence
  Synthetic
gggaggaucauuugagcuc

SEQ ID NO: 133053 - RNA, 21 nt, Artificial Sequence
  Synthetic
gugggaggaucauuugagcuc

SEQ ID NO: 133054 - RNA, 22 nt, Artificial Sequence
  Synthetic
ggugggaggaucauuugagcuc

SEQ ID NO: 133055 - RNA, 24 nt, Artificial Sequence
  Synthetic
gaggugggaggaucauuugagcuc

SEQ ID NO: 133056 - RNA, 20 nt, Artificial Sequence
  Synthetic
gauccuucuaccucaggcuc

SEQ ID NO: 133057 - RNA, 22 nt, Artificial Sequence
  Synthetic
gugauccuucuaccucaggcuc

SEQ ID NO: 133058 - RNA, 20 nt, Artificial Sequence
  Synthetic
gauucucgugccucaggcuc

SEQ ID NO: 133059 - RNA, 22 nt, Artificial Sequence
  Synthetic
gugauucucgugccucaggcuc

SEQ ID NO: 133060 - RNA, 18 nt, Artificial Sequence
  Synthetic
ggugaagaguaugggcuc

SEQ ID NO: 133061 - RNA, 20 nt, Artificial Sequence
  Synthetic
guucagauucugcugggcuc

SEQ ID NO: 133062 - RNA, 18 nt, Artificial Sequence
  Synthetic
gaagaauauuccaugcuc

SEQ ID NO: 133063 - RNA, 19 nt, Artificial Sequence
  Synthetic
ggaagaauauuccaugcuc

SEQ ID NO: 133064 - RNA, 19 nt, Artificial Sequence
  Synthetic
gaaacugaacaaccugcuc

SEQ ID NO: 133065 - RNA, 20 nt, Artificial Sequence
  Synthetic
ggaaacugaacaaccugcuc

SEQ ID NO: 133066 - RNA, 19 nt, Artificial Sequence
  Synthetic
gaaauuaagaaaucugcuc

SEQ ID NO: 133067 - RNA, 20 nt, Artificial Sequence
  Synthetic
ggaaauuaagaaaucugcuc

SEQ ID NO: 133068 - RNA, 18 nt, Artificial Sequence
  Synthetic
gaagaacauuccgugcuc

SEQ ID NO: 133069 - RNA, 19 nt, Artificial Sequence
  Synthetic
ggaagaacauuccgugcuc

SEQ ID NO: 133070 - RNA, 19 nt, Artificial Sequence
  Synthetic
gaacacugagaaaaaucuc

SEQ ID NO: 133071 - RNA, 21 nt, Artificial Sequence
  Synthetic
gagaacacugagaaaaaucuc

SEQ ID NO: 133072 - RNA, 23 nt, Artificial Sequence
  Synthetic
gaaccaucaccacuauccaucuc

SEQ ID NO: 133073 - RNA, 21 nt, Artificial Sequence
  Synthetic
gaccuacugaaucagcaucuc

SEQ ID NO: 133074 - RNA, 22 nt, Artificial Sequence
  Synthetic
ggaccuacugaaucagcaucuc

SEQ ID NO: 133075 - RNA, 23 nt, Artificial Sequence
  Synthetic
gggaccuacugaaucagcaucuc

SEQ ID NO: 133076 - RNA, 24 nt, Artificial Sequence
  Synthetic
gcacuaugcuguauaauagaucuc

SEQ ID NO: 133077 - RNA, 20 nt, Artificial Sequence
  Synthetic
gaaacauuggagaaacucuc

SEQ ID NO: 133078 - RNA, 21 nt, Artificial Sequence
  Synthetic
ggaaacauuggagaaacucuc

SEQ ID NO: 133079 - RNA, 18 nt, Artificial Sequence
  Synthetic
gcaugugagaugggucuc

SEQ ID NO: 133080 - RNA, 22 nt, Artificial Sequence
  Synthetic
guuugcaugugagaugggucuc

SEQ ID NO: 133081 - RNA, 24 nt, Artificial Sequence
  Synthetic
guguuugcaugugagaugggucuc

SEQ ID NO: 133082 - RNA, 19 nt, Artificial Sequence
  Synthetic
guacacauguaacauucuc

SEQ ID NO: 133083 - RNA, 20 nt, Artificial Sequence
  Synthetic
gcuagguuggggaaguucuc

SEQ ID NO: 133084 - RNA, 21 nt, Artificial Sequence
  Synthetic
gaucauguguguggauuucuc

SEQ ID NO: 133085 - RNA, 22 nt, Artificial Sequence
  Synthetic
ggaucauguguguggauuucuc

SEQ ID NO: 133086 - RNA, 24 nt, Artificial Sequence
  Synthetic
gcacccagauucauaaagcaaguc

SEQ ID NO: 133087 - RNA, 21 nt, Artificial Sequence
  Synthetic
gcggguggaucaccugaaguc

SEQ ID NO: 133088 - RNA, 22 nt, Artificial Sequence
  Synthetic
ggcggguggaucaccugaaguc

SEQ ID NO: 133089 - RNA, 24 nt, Artificial Sequence
  Synthetic
gaggcggguggaucaccugaaguc

SEQ ID NO: 133090 - RNA, 21 nt, Artificial Sequence
  Synthetic
guccagagcugaguuuaaguc

SEQ ID NO: 133091 - RNA, 22 nt, Artificial Sequence
  Synthetic
gguccagagcugaguuuaaguc

SEQ ID NO: 133092 - RNA, 23 nt, Artificial Sequence
  Synthetic
guuuuagguuuuauguuuaaguc

SEQ ID NO: 133093 - RNA, 24 nt, Artificial Sequence
  Synthetic
gguuuuagguuuuauguuuaaguc

SEQ ID NO: 133094 - RNA, 20 nt, Artificial Sequence
  Synthetic
gaaaggcaggagacacaguc

SEQ ID NO: 133095 - RNA, 21 nt, Artificial Sequence
  Synthetic
gucucgcucugucacccaguc

SEQ ID NO: 133096 - RNA, 23 nt, Artificial Sequence
  Synthetic
gagucucgcucugucacccaguc

SEQ ID NO: 133097 - RNA, 24 nt, Artificial Sequence
  Synthetic
ggagucucgcucugucacccaguc

SEQ ID NO: 133098 - RNA, 21 nt, Artificial Sequence
  Synthetic
gucucacucugucacucaguc

SEQ ID NO: 133099 - RNA, 23 nt, Artificial Sequence
  Synthetic
gagucucacucugucacucaguc

SEQ ID NO: 133100 - RNA, 24 nt, Artificial Sequence
  Synthetic
ggagucucacucugucacucaguc

SEQ ID NO: 133101 - RNA, 18 nt, Artificial Sequence
  Synthetic
ggcuccaagccuggaguc

SEQ ID NO: 133102 - RNA, 21 nt, Artificial Sequence
  Synthetic
guccugucuaccagcugaguc

SEQ ID NO: 133103 - RNA, 24 nt, Artificial Sequence
  Synthetic
guaguccugucuaccagcugaguc

SEQ ID NO: 133104 - RNA, 18 nt, Artificial Sequence
  Synthetic
gcuuuuaaggacuuaguc

SEQ ID NO: 133105 - RNA, 18 nt, Artificial Sequence
  Synthetic
ggcgcgguggcucacguc

SEQ ID NO: 133106 - RNA, 19 nt, Artificial Sequence
  Synthetic
gggcgcgguggcucacguc

SEQ ID NO: 133107 - RNA, 22 nt, Artificial Sequence
  Synthetic
gcugggcgcgguggcucacguc

SEQ ID NO: 133108 - RNA, 23 nt, Artificial Sequence
  Synthetic
ggcugggcgcgguggcucacguc

SEQ ID NO: 133109 - RNA, 24 nt, Artificial Sequence
  Synthetic
gggcugggcgcgguggcucacguc

SEQ ID NO: 133110 - RNA, 20 nt, Artificial Sequence
  Synthetic
guccccacccaaaucccguc

SEQ ID NO: 133111 - RNA, 22 nt, Artificial Sequence
  Synthetic
guguccccacccaaaucccguc

SEQ ID NO: 133112 - RNA, 22 nt, Artificial Sequence
  Synthetic
gcuuagcaaccuuaauuccguc

SEQ ID NO: 133113 - RNA, 22 nt, Artificial Sequence
  Synthetic
gcaauccuccugccucagcguc

SEQ ID NO: 133114 - RNA, 22 nt, Artificial Sequence
  Synthetic
guacaggggcaggacuugcguc

SEQ ID NO: 133115 - RNA, 23 nt, Artificial Sequence
  Synthetic
gguacaggggcaggacuugcguc

SEQ ID NO: 133116 - RNA, 24 nt, Artificial Sequence
  Synthetic
ggguacaggggcaggacuugcguc

SEQ ID NO: 133117 - RNA, 19 nt, Artificial Sequence
  Synthetic
gugggcggaccacgagguc

SEQ ID NO: 133118 - RNA, 22 nt, Artificial Sequence
  Synthetic
gaagugggcggaccacgagguc

SEQ ID NO: 133119 - RNA, 18 nt, Artificial Sequence
  Synthetic
ggcggaacacucgagguc

SEQ ID NO: 133120 - RNA, 19 nt, Artificial Sequence
  Synthetic
gggcggaacacucgagguc

SEQ ID NO: 133121 - RNA, 21 nt, Artificial Sequence
  Synthetic
gugggcggaacacucgagguc

SEQ ID NO: 133122 - RNA, 24 nt, Artificial Sequence
  Synthetic
gaagugggcggaacacucgagguc

SEQ ID NO: 133123 - RNA, 19 nt, Artificial Sequence
  Synthetic
gugagcagaucaugagguc

SEQ ID NO: 133124 - RNA, 20 nt, Artificial Sequence
  Synthetic
ggugagcagaucaugagguc

SEQ ID NO: 133125 - RNA, 22 nt, Artificial Sequence
  Synthetic
gaggugagcagaucaugagguc

SEQ ID NO: 133126 - RNA, 19 nt, Artificial Sequence
  Synthetic
gcggguggaucaugagguc

SEQ ID NO: 133127 - RNA, 18 nt, Artificial Sequence
  Synthetic
gguagaacaccugagguc

SEQ ID NO: 133128 - RNA, 20 nt, Artificial Sequence
  Synthetic
gugguagaacaccugagguc

SEQ ID NO: 133129 - RNA, 21 nt, Artificial Sequence
  Synthetic
ggugguagaacaccugagguc

SEQ ID NO: 133130 - RNA, 23 nt, Artificial Sequence
  Synthetic
gaggugguagaacaccugagguc

SEQ ID NO: 133131 - RNA, 18 nt, Artificial Sequence
  Synthetic
ggcgcaucaccugagguc

SEQ ID NO: 133132 - RNA, 19 nt, Artificial Sequence
  Synthetic
gggcgcaucaccugagguc

SEQ ID NO: 133133 - RNA, 21 nt, Artificial Sequence
  Synthetic
gcgggcgcaucaccugagguc

SEQ ID NO: 133134 - RNA, 22 nt, Artificial Sequence
  Synthetic
ggcgggcgcaucaccugagguc

SEQ ID NO: 133135 - RNA, 23 nt, Artificial Sequence
  Synthetic
gggcgggcgcaucaccugagguc

SEQ ID NO: 133136 - RNA, 24 nt, Artificial Sequence
  Synthetic
ggggcgggcgcaucaccugagguc

SEQ ID NO: 133137 - RNA, 21 nt, Artificial Sequence
  Synthetic
gugggcggaucaccugagguc

SEQ ID NO: 133138 - RNA, 22 nt, Artificial Sequence
  Synthetic
ggugggcggaucaccugagguc

SEQ ID NO: 133139 - RNA, 18 nt, Artificial Sequence
  Synthetic
gguggaucaccugagguc

SEQ ID NO: 133140 - RNA, 21 nt, Artificial Sequence
  Synthetic
gcagguggaucaccugagguc

SEQ ID NO: 133141 - RNA, 22 nt, Artificial Sequence
  Synthetic
ggcagguggaucaccugagguc

SEQ ID NO: 133142 - RNA, 24 nt, Artificial Sequence
  Synthetic
gaggcagguggaucaccugagguc

SEQ ID NO: 133143 - RNA, 19 nt, Artificial Sequence
  Synthetic
ggguggaucaccugagguc

SEQ ID NO: 133144 - RNA, 21 nt, Artificial Sequence
  Synthetic
gaggguggaucaccugagguc

SEQ ID NO: 133145 - RNA, 22 nt, Artificial Sequence
  Synthetic
ggaggguggaucaccugagguc

SEQ ID NO: 133146 - RNA, 24 nt, Artificial Sequence
  Synthetic
gaggaggguggaucaccugagguc

SEQ ID NO: 133147 - RNA, 24 nt, Artificial Sequence
  Synthetic
gagguggguggaucaccugagguc

SEQ ID NO: 133148 - RNA, 18 nt, Artificial Sequence
  Synthetic
gccugaucaccugagguc

SEQ ID NO: 133149 - RNA, 21 nt, Artificial Sequence
  Synthetic
gcagccugaucaccugagguc

SEQ ID NO: 133150 - RNA, 22 nt, Artificial Sequence
  Synthetic
ggcagccugaucaccugagguc

SEQ ID NO: 133151 - RNA, 24 nt, Artificial Sequence
  Synthetic
gaggcagccugaucaccugagguc

SEQ ID NO: 133152 - RNA, 18 nt, Artificial Sequence
  Synthetic
gauggaucaucugagguc

SEQ ID NO: 133153 - RNA, 19 nt, Artificial Sequence
  Synthetic
ggauggaucaucugagguc

SEQ ID NO: 133154 - RNA, 21 nt, Artificial Sequence
  Synthetic
guggauggaucaucugagguc

SEQ ID NO: 133155 - RNA, 22 nt, Artificial Sequence
  Synthetic
gguggauggaucaucugagguc

SEQ ID NO: 133156 - RNA, 24 nt, Artificial Sequence
  Synthetic
gagguggauggaucaucugagguc

SEQ ID NO: 133157 - RNA, 18 nt, Artificial Sequence
  Synthetic
gacggaucacuugagguc

SEQ ID NO: 133158 - RNA, 21 nt, Artificial Sequence
  Synthetic
gcugacggaucacuugagguc

SEQ ID NO: 133159 - RNA, 22 nt, Artificial Sequence
  Synthetic
ggcugacggaucacuugagguc

SEQ ID NO: 133160 - RNA, 24 nt, Artificial Sequence
  Synthetic
gaggcugacggaucacuugagguc

SEQ ID NO: 133161 - RNA, 18 nt, Artificial Sequence
  Synthetic
ggcggaucacuugagguc

SEQ ID NO: 133162 - RNA, 21 nt, Artificial Sequence
  Synthetic
gcaggcggaucacuugagguc

SEQ ID NO: 133163 - RNA, 22 nt, Artificial Sequence
  Synthetic
ggcaggcggaucacuugagguc

SEQ ID NO: 133164 - RNA, 24 nt, Artificial Sequence
  Synthetic
gaggcaggcggaucacuugagguc

SEQ ID NO: 133165 - RNA, 19 nt, Artificial Sequence
  Synthetic
gggcggaucacuugagguc

SEQ ID NO: 133166 - RNA, 21 nt, Artificial Sequence
  Synthetic
gugggcggaucacuugagguc

SEQ ID NO: 133167 - RNA, 24 nt, Artificial Sequence
  Synthetic
gaugugggcggaucacuugagguc

SEQ ID NO: 133168 - RNA, 21 nt, Artificial Sequence
  Synthetic
guagguggaucacuugagguc

SEQ ID NO: 133169 - RNA, 24 nt, Artificial Sequence
  Synthetic
gaaguagguggaucacuugagguc

SEQ ID NO: 133170 - RNA, 18 nt, Artificial Sequence
  Synthetic
ggcagaucauuugagguc

SEQ ID NO: 133171 - RNA, 21 nt, Artificial Sequence
  Synthetic
gcaggcagaucauuugagguc

SEQ ID NO: 133172 - RNA, 22 nt, Artificial Sequence
  Synthetic
ggcaggcagaucauuugagguc

SEQ ID NO: 133173 - RNA, 24 nt, Artificial Sequence
  Synthetic
gaggcaggcagaucauuugagguc

SEQ ID NO: 133174 - RNA, 19 nt, Artificial Sequence
  Synthetic
gcagguggaucacuagguc

SEQ ID NO: 133175 - RNA, 20 nt, Artificial Sequence
  Synthetic
ggcagguggaucacuagguc

SEQ ID NO: 133176 - RNA, 22 nt, Artificial Sequence
  Synthetic
gaggcagguggaucacuagguc

SEQ ID NO: 133177 - RNA, 22 nt, Artificial Sequence
  Synthetic
gaauacagcacacugauggguc

SEQ ID NO: 133178 - RNA, 19 nt, Artificial Sequence
  Synthetic
gauugugauucaguggguc

SEQ ID NO: 133179 - RNA, 22 nt, Artificial Sequence
  Synthetic
gcagauugugauucaguggguc

SEQ ID NO: 133180 - RNA, 23 nt, Artificial Sequence
  Synthetic
gaaaaauaaagaagggagauguc

SEQ ID NO: 133181 - RNA, 24 nt, Artificial Sequence
  Synthetic
gaauucuuucugaaggcugauguc

SEQ ID NO: 133182 - RNA, 21 nt, Artificial Sequence
  Synthetic
guccuugcccaugccuauguc

SEQ ID NO: 133183 - RNA, 24 nt, Artificial Sequence
  Synthetic
gaaguccuugcccaugccuauguc

SEQ ID NO: 133184 - RNA, 20 nt, Artificial Sequence
  Synthetic
gaauccgauuauuauguguc

SEQ ID NO: 133185 - RNA, 22 nt, Artificial Sequence
  Synthetic
gugaauccgauuauuauguguc

SEQ ID NO: 133186 - RNA, 23 nt, Artificial Sequence
  Synthetic
ggugaauccgauuauuauguguc

SEQ ID NO: 133187 - RNA, 18 nt, Artificial Sequence
  Synthetic
gaaguuaaacaauuuguc

SEQ ID NO: 133188 - RNA, 20 nt, Artificial Sequence
  Synthetic
guugcucaggcuaaaaauuc

SEQ ID NO: 133189 - RNA, 18 nt, Artificial Sequence
  Synthetic
ggagcaagacugaaauuc

SEQ ID NO: 133190 - RNA, 20 nt, Artificial Sequence
  Synthetic
gaggagcaagacugaaauuc

SEQ ID NO: 133191 - RNA, 22 nt, Artificial Sequence
  Synthetic
gagaggagcaagacugaaauuc

SEQ ID NO: 133192 - RNA, 23 nt, Artificial Sequence
  Synthetic
ggagaggagcaagacugaaauuc

SEQ ID NO: 133193 - RNA, 19 nt, Artificial Sequence
  Synthetic
gaucugaauauuuaaauuc

SEQ ID NO: 133194 - RNA, 20 nt, Artificial Sequence
  Synthetic
guuauucuacuuuccaauuc

SEQ ID NO: 133195 - RNA, 21 nt, Artificial Sequence
  Synthetic
gucuguggauacacagaauuc

SEQ ID NO: 133196 - RNA, 23 nt, Artificial Sequence
  Synthetic
gagucuguggauacacagaauuc

SEQ ID NO: 133197 - RNA, 18 nt, Artificial Sequence
  Synthetic
gacagaucacuugaauuc

SEQ ID NO: 133198 - RNA, 21 nt, Artificial Sequence
  Synthetic
gcagacagaucacuugaauuc

SEQ ID NO: 133199 - RNA, 22 nt, Artificial Sequence
  Synthetic
ggcagacagaucacuugaauuc

SEQ ID NO: 133200 - RNA, 18 nt, Artificial Sequence
  Synthetic
gcucaaauggagacauuc

SEQ ID NO: 133201 - RNA, 19 nt, Artificial Sequence
  Synthetic
ggcucaaauggagacauuc

SEQ ID NO: 133202 - RNA, 18 nt, Artificial Sequence
  Synthetic
guauuugguuuuccauuc

SEQ ID NO: 133203 - RNA, 18 nt, Artificial Sequence
  Synthetic
gaaaauucuuaaagauuc

SEQ ID NO: 133204 - RNA, 22 nt, Artificial Sequence
  Synthetic
guucucacugaacaauagauuc

SEQ ID NO: 133205 - RNA, 23 nt, Artificial Sequence
  Synthetic
gguucucacugaacaauagauuc

SEQ ID NO: 133206 - RNA, 22 nt, Artificial Sequence
  Synthetic
guucucacuggacaauagauuc

SEQ ID NO: 133207 - RNA, 23 nt, Artificial Sequence
  Synthetic
gguucucacuggacaauagauuc

SEQ ID NO: 133208 - RNA, 19 nt, Artificial Sequence
  Synthetic
gaauacagaaauuauauuc

SEQ ID NO: 133209 - RNA, 21 nt, Artificial Sequence
  Synthetic
gaacucguuauuggucuauuc

SEQ ID NO: 133210 - RNA, 23 nt, Artificial Sequence
  Synthetic
guaacaaaccugcacauguauuc

SEQ ID NO: 133211 - RNA, 20 nt, Artificial Sequence
  Synthetic
guauuucccagauuuuauuc

SEQ ID NO: 133212 - RNA, 21 nt, Artificial Sequence
  Synthetic
gguauuucccagauuuuauuc

SEQ ID NO: 133213 - RNA, 21 nt, Artificial Sequence
  Synthetic
gcucacugcagccucgacuuc

SEQ ID NO: 133214 - RNA, 22 nt, Artificial Sequence
  Synthetic
ggcucacugcagccucgacuuc

SEQ ID NO: 133215 - RNA, 18 nt, Artificial Sequence
  Synthetic
gcaaguuucucaaccuuc

SEQ ID NO: 133216 - RNA, 19 nt, Artificial Sequence
  Synthetic
ggcaaguuucucaaccuuc

SEQ ID NO: 133217 - RNA, 20 nt, Artificial Sequence
  Synthetic
gucauggggguggauccuuc

SEQ ID NO: 133218 - RNA, 21 nt, Artificial Sequence
  Synthetic
ggucauggggguggauccuuc

SEQ ID NO: 133219 - RNA, 22 nt, Artificial Sequence
  Synthetic
gggucauggggguggauccuuc

SEQ ID NO: 133220 - RNA, 23 nt, Artificial Sequence
  Synthetic
ggggucauggggguggauccuuc

SEQ ID NO: 133221 - RNA, 22 nt, Artificial Sequence
  Synthetic
gccuuucucccgccucagcuuc

SEQ ID NO: 133222 - RNA, 18 nt, Artificial Sequence
  Synthetic
guacauggcaggugcuuc

SEQ ID NO: 133223 - RNA, 19 nt, Artificial Sequence
  Synthetic
gguacauggcaggugcuuc

SEQ ID NO: 133224 - RNA, 24 nt, Artificial Sequence
  Synthetic
gaauucccugaccccuugugcuuc

SEQ ID NO: 133225 - RNA, 20 nt, Artificial Sequence
  Synthetic
gcugguuuuuccucaucuuc

SEQ ID NO: 133226 - RNA, 22 nt, Artificial Sequence
  Synthetic
gugcugguuuuuccucaucuuc

SEQ ID NO: 133227 - RNA, 21 nt, Artificial Sequence
  Synthetic
gguaaugccuagguuuucuuc

SEQ ID NO: 133228 - RNA, 21 nt, Artificial Sequence
  Synthetic
gguauugccuagguuuucuuc

SEQ ID NO: 133229 - RNA, 18 nt, Artificial Sequence
  Synthetic
ggggucauuaaaaaguuc

SEQ ID NO: 133230 - RNA, 19 nt, Artificial Sequence
  Synthetic
guuuucagucagcaaguuc

SEQ ID NO: 133231 - RNA, 20 nt, Artificial Sequence
  Synthetic
gcuuuagccucccacaguuc

SEQ ID NO: 133232 - RNA, 23 nt, Artificial Sequence
  Synthetic
gcccccauuccaggcccuaguuc

SEQ ID NO: 133233 - RNA, 24 nt, Artificial Sequence
  Synthetic
ggcccccauuccaggcccuaguuc

SEQ ID NO: 133234 - RNA, 20 nt, Artificial Sequence
  Synthetic
gauggaaggagcuuggguuc

SEQ ID NO: 133235 - RNA, 21 nt, Artificial Sequence
  Synthetic
guauccaugggggauugguuc

SEQ ID NO: 133236 - RNA, 18 nt, Artificial Sequence
  Synthetic
gggaucaaggucaauuuc

SEQ ID NO: 133237 - RNA, 18 nt, Artificial Sequence
  Synthetic
gcauuugggacugauuuc

SEQ ID NO: 133238 - RNA, 19 nt, Artificial Sequence
  Synthetic
ggcauuugggacugauuuc

SEQ ID NO: 133239 - RNA, 19 nt, Artificial Sequence
  Synthetic
gugguguucuccauauuuc

SEQ ID NO: 133240 - RNA, 19 nt, Artificial Sequence
  Synthetic
gaaguuugaaauggguuuc

SEQ ID NO: 133241 - RNA, 23 nt, Artificial Sequence
  Synthetic
gucagaaguuugaaauggguuuc

SEQ ID NO: 133242 - RNA, 20 nt, Artificial Sequence
  Synthetic
guaaucucuuggcaauuuuc

SEQ ID NO: 133243 - RNA, 18 nt, Artificial Sequence
  Synthetic
gcaaacaaaauaaaaaag

SEQ ID NO: 133244 - RNA, 24 nt, Artificial Sequence
  Synthetic
guauauuuccaaauagcuaaaaag

SEQ ID NO: 133245 - RNA, 19 nt, Artificial Sequence
  Synthetic
guuauuuaaaaaagaaaag

SEQ ID NO: 133246 - RNA, 18 nt, Artificial Sequence
  Synthetic
gcaaaagccagagaaaag

SEQ ID NO: 133247 - RNA, 18 nt, Artificial Sequence
  Synthetic
gcucaaaggcaggaaaag

SEQ ID NO: 133248 - RNA, 20 nt, Artificial Sequence
  Synthetic
gaucugaugguuuugaaaag

SEQ ID NO: 133249 - RNA, 22 nt, Artificial Sequence
  Synthetic
gagaucugaugguuuugaaaag

SEQ ID NO: 133250 - RNA, 19 nt, Artificial Sequence
  Synthetic
gcuucuacaucuauaaaag

SEQ ID NO: 133251 - RNA, 19 nt, Artificial Sequence
  Synthetic
guaaauagaaaaguaaaag

SEQ ID NO: 133252 - RNA, 20 nt, Artificial Sequence
  Synthetic
gcaauauagcagaaacaaag

SEQ ID NO: 133253 - RNA, 18 nt, Artificial Sequence
  Synthetic
gaaacuggaaauacaaag

SEQ ID NO: 133254 - RNA, 21 nt, Artificial Sequence
  Synthetic
gaaugaaauuuaagagcaaag

SEQ ID NO: 133255 - RNA, 18 nt, Artificial Sequence
  Synthetic
gauuggaagaaggcaaag

SEQ ID NO: 133256 - RNA, 20 nt, Artificial Sequence
  Synthetic
gagauuggaagaaggcaaag

SEQ ID NO: 133257 - RNA, 18 nt, Artificial Sequence
  Synthetic
gagaaaguggggucaaag

SEQ ID NO: 133258 - RNA, 19 nt, Artificial Sequence
  Synthetic
ggagaaaguggggucaaag

SEQ ID NO: 133259 - RNA, 22 nt, Artificial Sequence
  Synthetic
gaauucuaccagacauucaaag

SEQ ID NO: 133260 - RNA, 18 nt, Artificial Sequence
  Synthetic
gugagguugugaagaaag

SEQ ID NO: 133261 - RNA, 19 nt, Artificial Sequence
  Synthetic
ggugagguugugaagaaag

SEQ ID NO: 133262 - RNA, 22 nt, Artificial Sequence
  Synthetic
gcuggugagguugugaagaaag

SEQ ID NO: 133263 - RNA, 18 nt, Artificial Sequence
  Synthetic
gcaggcaaauucagaaag

SEQ ID NO: 133264 - RNA, 19 nt, Artificial Sequence
  Synthetic
ggcaggcaaauucagaaag

SEQ ID NO: 133265 - RNA, 21 nt, Artificial Sequence
  Synthetic
ggggacauaguuucaggaaag

SEQ ID NO: 133266 - RNA, 18 nt, Artificial Sequence
  Synthetic
gaauugggguugggaaag

SEQ ID NO: 133267 - RNA, 18 nt, Artificial Sequence
  Synthetic
guacccuaaaacuuaaag

SEQ ID NO: 133268 - RNA, 24 nt, Artificial Sequence
  Synthetic
gcacauguacccuaaaacuuaaag

SEQ ID NO: 133269 - RNA, 21 nt, Artificial Sequence
  Synthetic
gaauuucauuccuuuuuaaag

SEQ ID NO: 133270 - RNA, 19 nt, Artificial Sequence
  Synthetic
gcaccucagaagaaacaag

SEQ ID NO: 133271 - RNA, 23 nt, Artificial Sequence
  Synthetic
gacugcaccucagaagaaacaag

SEQ ID NO: 133272 - RNA, 21 nt, Artificial Sequence
  Synthetic
gcacaaccaacgcuucacaag

SEQ ID NO: 133273 - RNA, 24 nt, Artificial Sequence
  Synthetic
gucgcacaaccaacgcuucacaag

SEQ ID NO: 133274 - RNA, 24 nt, Artificial Sequence
  Synthetic
gacuuuugacuugcuucugacaag

SEQ ID NO: 133275 - RNA, 20 nt, Artificial Sequence
  Synthetic
gauuauucaccaugaccaag

SEQ ID NO: 133276 - RNA, 21 nt, Artificial Sequence
  Synthetic
ggauuauucaccaugaccaag

SEQ ID NO: 133277 - RNA, 24 nt, Artificial Sequence
  Synthetic
gaaggauuauucaccaugaccaag

SEQ ID NO: 133278 - RNA, 18 nt, Artificial Sequence
  Synthetic
gcauuaaaaaaagccaag

SEQ ID NO: 133279 - RNA, 18 nt, Artificial Sequence
  Synthetic
gcacguugucaggccaag

SEQ ID NO: 133280 - RNA, 18 nt, Artificial Sequence
  Synthetic
gcacuuagggaggccaag

SEQ ID NO: 133281 - RNA, 23 nt, Artificial Sequence
  Synthetic
guaauccacuuugggaggccaag

SEQ ID NO: 133282 - RNA, 20 nt, Artificial Sequence
  Synthetic
gauugauauggagaaucaag

SEQ ID NO: 133283 - RNA, 23 nt, Artificial Sequence
  Synthetic
gcucccggaggccuccccagaag

SEQ ID NO: 133284 - RNA, 19 nt, Artificial Sequence
  Synthetic
gaagcccugcaagcagaag

SEQ ID NO: 133285 - RNA, 22 nt, Artificial Sequence
  Synthetic
guauuugagaagacagcagaag

SEQ ID NO: 133286 - RNA, 23 nt, Artificial Sequence
  Synthetic
gguauuugagaagacagcagaag

SEQ ID NO: 133287 - RNA, 18 nt, Artificial Sequence
  Synthetic
gucacaugaggucagaag

SEQ ID NO: 133288 - RNA, 23 nt, Artificial Sequence
  Synthetic
gacuugucacaugaggucagaag

SEQ ID NO: 133289 - RNA, 18 nt, Artificial Sequence
  Synthetic
gaaaauuacaaggagaag

SEQ ID NO: 133290 - RNA, 20 nt, Artificial Sequence
  Synthetic
gagaaaauuacaaggagaag

SEQ ID NO: 133291 - RNA, 22 nt, Artificial Sequence
  Synthetic
gucccagcugaggcaggagaag

SEQ ID NO: 133292 - RNA, 18 nt, Artificial Sequence
  Synthetic
ggagccagggaggagaag

SEQ ID NO: 133293 - RNA, 19 nt, Artificial Sequence
  Synthetic
gggagccagggaggagaag

SEQ ID NO: 133294 - RNA, 20 nt, Artificial Sequence
  Synthetic
gcuuugggaggccaaggaag

SEQ ID NO: 133295 - RNA, 22 nt, Artificial Sequence
  Synthetic
gugcuuugggaggccaaggaag

SEQ ID NO: 133296 - RNA, 21 nt, Artificial Sequence
  Synthetic
gccaaaacagucuugaggaag

SEQ ID NO: 133297 - RNA, 21 nt, Artificial Sequence
  Synthetic
gucuccaaaaaaaaggggaag

SEQ ID NO: 133298 - RNA, 23 nt, Artificial Sequence
  Synthetic
gcuucccugggccacacuggaag

SEQ ID NO: 133299 - RNA, 24 nt, Artificial Sequence
  Synthetic
ggcuucccugggccacacuggaag

SEQ ID NO: 133300 - RNA, 18 nt, Artificial Sequence
  Synthetic
ggagccccuugaaugaag

SEQ ID NO: 133301 - RNA, 21 nt, Artificial Sequence
  Synthetic
gaaaauacaucucuuaauaag

SEQ ID NO: 133302 - RNA, 23 nt, Artificial Sequence
  Synthetic
gcuucaacuuccacauccauaag

SEQ ID NO: 133303 - RNA, 24 nt, Artificial Sequence
  Synthetic
ggcuucaacuuccacauccauaag

SEQ ID NO: 133304 - RNA, 18 nt, Artificial Sequence
  Synthetic
gcacugugggaggcuaag

SEQ ID NO: 133305 - RNA, 19 nt, Artificial Sequence
  Synthetic
gcacuuugggaaauguaag

SEQ ID NO: 133306 - RNA, 21 nt, Artificial Sequence
  Synthetic
gacaaagaugaucacuuuaag

SEQ ID NO: 133307 - RNA, 24 nt, Artificial Sequence
  Synthetic
gccgacaaagaugaucacuuuaag

SEQ ID NO: 133308 - RNA, 18 nt, Artificial Sequence
  Synthetic
ggugaggaccuugaacag

SEQ ID NO: 133309 - RNA, 24 nt, Artificial Sequence
  Synthetic
gaccuuggugaggaccuugaacag

SEQ ID NO: 133310 - RNA, 18 nt, Artificial Sequence
  Synthetic
guguucaauaaauaacag

SEQ ID NO: 133311 - RNA, 19 nt, Artificial Sequence
  Synthetic
guaucuucucagaccacag

SEQ ID NO: 133312 - RNA, 19 nt, Artificial Sequence
  Synthetic
gauaccagcucagccacag

SEQ ID NO: 133313 - RNA, 20 nt, Artificial Sequence
  Synthetic
ggauaccagcucagccacag

SEQ ID NO: 133314 - RNA, 19 nt, Artificial Sequence
  Synthetic
gauaccagcuuagucacag

SEQ ID NO: 133315 - RNA, 20 nt, Artificial Sequence
  Synthetic
ggauaccagcuuagucacag

SEQ ID NO: 133316 - RNA, 24 nt, Artificial Sequence
  Synthetic
gcccaggaccagacggauucacag

SEQ ID NO: 133317 - RNA, 24 nt, Artificial Sequence
  Synthetic
guccaggaccagacggauucacag

SEQ ID NO: 133318 - RNA, 19 nt, Artificial Sequence
  Synthetic
guuaaucuaauauugacag

SEQ ID NO: 133319 - RNA, 24 nt, Artificial Sequence
  Synthetic
gucucguuaaucuaauauugacag

SEQ ID NO: 133320 - RNA, 20 nt, Artificial Sequence
  Synthetic
gauccgucuaauauugacag

SEQ ID NO: 133321 - RNA, 23 nt, Artificial Sequence
  Synthetic
guugauccgucuaauauugacag

SEQ ID NO: 133322 - RNA, 18 nt, Artificial Sequence
  Synthetic
ggauauguguauauacag

SEQ ID NO: 133323 - RNA, 20 nt, Artificial Sequence
  Synthetic
gaccauuuuuaaguauacag

SEQ ID NO: 133324 - RNA, 18 nt, Artificial Sequence
  Synthetic
gaaucucaccuucuacag

SEQ ID NO: 133325 - RNA, 19 nt, Artificial Sequence
  Synthetic
ggaaucucaccuucuacag

SEQ ID NO: 133326 - RNA, 21 nt, Artificial Sequence
  Synthetic
gucacucagccuggaguacag

SEQ ID NO: 133327 - RNA, 18 nt, Artificial Sequence
  Synthetic
gugcaugugucuuuacag

SEQ ID NO: 133328 - RNA, 20 nt, Artificial Sequence
  Synthetic
gugugcaugugucuuuacag

SEQ ID NO: 133329 - RNA, 24 nt, Artificial Sequence
  Synthetic
guacgugugcaugugucuuuacag

SEQ ID NO: 133330 - RNA, 23 nt, Artificial Sequence
  Synthetic
gccaaaaaaaaguccaggaccag

SEQ ID NO: 133331 - RNA, 20 nt, Artificial Sequence
  Synthetic
gcuguaguccugucuaccag

SEQ ID NO: 133332 - RNA, 19 nt, Artificial Sequence
  Synthetic
gagacagguagacagccag

SEQ ID NO: 133333 - RNA, 20 nt, Artificial Sequence
  Synthetic
ggagacagguagacagccag

SEQ ID NO: 133334 - RNA, 22 nt, Artificial Sequence
  Synthetic
guaaucuuccccugaaguccag

SEQ ID NO: 133335 - RNA, 20 nt, Artificial Sequence
  Synthetic
gacuucaguccccuuuccag

SEQ ID NO: 133336 - RNA, 22 nt, Artificial Sequence
  Synthetic
gcuacucaggaggcugaagcag

SEQ ID NO: 133337 - RNA, 19 nt, Artificial Sequence
  Synthetic
gcuguccucaugauagcag

SEQ ID NO: 133338 - RNA, 22 nt, Artificial Sequence
  Synthetic
gaugcuguccucaugauagcag

SEQ ID NO: 133339 - RNA, 19 nt, Artificial Sequence
  Synthetic
gcucgggaggaugacgcag

SEQ ID NO: 133340 - RNA, 22 nt, Artificial Sequence
  Synthetic
gcugcucgggaggaugacgcag

SEQ ID NO: 133341 - RNA, 22 nt, Artificial Sequence
  Synthetic
gcacuuugggaggccaaggcag

SEQ ID NO: 133342 - RNA, 22 nt, Artificial Sequence
  Synthetic
gcuacucgggaggcuaaggcag

SEQ ID NO: 133343 - RNA, 21 nt, Artificial Sequence
  Synthetic
gcuacuggaagacagaggcag

SEQ ID NO: 133344 - RNA, 22 nt, Artificial Sequence
  Synthetic
gcuacucgggaagcugaggcag

SEQ ID NO: 133345 - RNA, 22 nt, Artificial Sequence
  Synthetic
gcuacuuggaaggcugaggcag

SEQ ID NO: 133346 - RNA, 22 nt, Artificial Sequence
  Synthetic
gcuacucaagaggcugaggcag

SEQ ID NO: 133347 - RNA, 22 nt, Artificial Sequence
  Synthetic
gcuacucgagaggcugaggcag

SEQ ID NO: 133348 - RNA, 22 nt, Artificial Sequence
  Synthetic
gcacuuugagaggcugaggcag

SEQ ID NO: 133349 - RNA, 22 nt, Artificial Sequence
  Synthetic
gcuacucaggaggcugaggcag

SEQ ID NO: 133350 - RNA, 22 nt, Artificial Sequence
  Synthetic
gcuauucaggaggcugaggcag

SEQ ID NO: 133351 - RNA, 21 nt, Artificial Sequence
  Synthetic
guacuucggaggcugaggcag

SEQ ID NO: 133352 - RNA, 22 nt, Artificial Sequence
  Synthetic
gguacuucggaggcugaggcag

SEQ ID NO: 133353 - RNA, 22 nt, Artificial Sequence
  Synthetic
gcuacacgggaggcugaggcag

SEQ ID NO: 133354 - RNA, 22 nt, Artificial Sequence
  Synthetic
guuacucgggaggcugaggcag

SEQ ID NO: 133355 - RNA, 19 nt, Artificial Sequence
  Synthetic
gcucgggaggcugaggcag

SEQ ID NO: 133356 - RNA, 22 nt, Artificial Sequence
  Synthetic
gcugcucgggaggcugaggcag

SEQ ID NO: 133357 - RNA, 22 nt, Artificial Sequence
  Synthetic
gcuacgggggaggcugaggcag

SEQ ID NO: 133358 - RNA, 22 nt, Artificial Sequence
  Synthetic
gcacuaugggaggcugaggcag

SEQ ID NO: 133359 - RNA, 22 nt, Artificial Sequence
  Synthetic
gcuacuugggaggcugaggcag

SEQ ID NO: 133360 - RNA, 22 nt, Artificial Sequence
  Synthetic
gcacuuugggaggcugaggcag

SEQ ID NO: 133361 - RNA, 22 nt, Artificial Sequence
  Synthetic
gccacucuggaggcugaggcag

SEQ ID NO: 133362 - RNA, 22 nt, Artificial Sequence
  Synthetic
gcuacucuggaggcugaggcag

SEQ ID NO: 133363 - RNA, 22 nt, Artificial Sequence
  Synthetic
gcuacucgguaggcugaggcag

SEQ ID NO: 133364 - RNA, 22 nt, Artificial Sequence
  Synthetic
gcuacucagauggcugaggcag

SEQ ID NO: 133365 - RNA, 22 nt, Artificial Sequence
  Synthetic
gcuacuuggcagucugaggcag

SEQ ID NO: 133366 - RNA, 22 nt, Artificial Sequence
  Synthetic
gcaacucuggagguugaggcag

SEQ ID NO: 133367 - RNA, 22 nt, Artificial Sequence
  Synthetic
gauacuugggaguuugaggcag

SEQ ID NO: 133368 - RNA, 18 nt, Artificial Sequence
  Synthetic
gagaugucaauuaggcag

SEQ ID NO: 133369 - RNA, 19 nt, Artificial Sequence
  Synthetic
ggagaugucaauuaggcag

SEQ ID NO: 133370 - RNA, 21 nt, Artificial Sequence
  Synthetic
guggagaugucaauuaggcag

SEQ ID NO: 133371 - RNA, 18 nt, Artificial Sequence
  Synthetic
gagucggggagggggcag

SEQ ID NO: 133372 - RNA, 19 nt, Artificial Sequence
  Synthetic
ggagucggggagggggcag

SEQ ID NO: 133373 - RNA, 19 nt, Artificial Sequence
  Synthetic
gcugguuagccauaugcag

SEQ ID NO: 133374 - RNA, 20 nt, Artificial Sequence
  Synthetic
ggcugguuagccauaugcag

SEQ ID NO: 133375 - RNA, 23 nt, Artificial Sequence
  Synthetic
gauggcugguuagccauaugcag

SEQ ID NO: 133376 - RNA, 24 nt, Artificial Sequence
  Synthetic
ggauggcugguuagccauaugcag

SEQ ID NO: 133377 - RNA, 20 nt, Artificial Sequence
  Synthetic
guauuuuuaauuaaaaucag

SEQ ID NO: 133378 - RNA, 18 nt, Artificial Sequence
  Synthetic
guaaaaugcaccaaucag

SEQ ID NO: 133379 - RNA, 23 nt, Artificial Sequence
  Synthetic
gcucuguaaaaugcaccaaucag

SEQ ID NO: 133380 - RNA, 18 nt, Artificial Sequence
  Synthetic
gagggaauggcugaucag

SEQ ID NO: 133381 - RNA, 21 nt, Artificial Sequence
  Synthetic
gaugagggaauggcugaucag

SEQ ID NO: 133382 - RNA, 23 nt, Artificial Sequence
  Synthetic
gagaugagggaauggcugaucag

SEQ ID NO: 133383 - RNA, 19 nt, Artificial Sequence
  Synthetic
gauauuagcccuuuaucag

SEQ ID NO: 133384 - RNA, 20 nt, Artificial Sequence
  Synthetic
ggauauuagcccuuuaucag

SEQ ID NO: 133385 - RNA, 21 nt, Artificial Sequence
  Synthetic
gacaucagagagaguacucag

SEQ ID NO: 133386 - RNA, 22 nt, Artificial Sequence
  Synthetic
ggacaucagagagaguacucag

SEQ ID NO: 133387 - RNA, 19 nt, Artificial Sequence
  Synthetic
gauaucagcccuuugucag

SEQ ID NO: 133388 - RNA, 20 nt, Artificial Sequence
  Synthetic
ggauaucagcccuuugucag

SEQ ID NO: 133389 - RNA, 23 nt, Artificial Sequence
  Synthetic
gaauucuuccccagagccuucag

SEQ ID NO: 133390 - RNA, 21 nt, Artificial Sequence
  Synthetic
gagaugauaugaaguguucag

SEQ ID NO: 133391 - RNA, 22 nt, Artificial Sequence
  Synthetic
gcucuccugccuuuuauuucag

SEQ ID NO: 133392 - RNA, 23 nt, Artificial Sequence
  Synthetic
ggcucuccugccuuuuauuucag

SEQ ID NO: 133393 - RNA, 23 nt, Artificial Sequence
  Synthetic
guucacagcaucaucaccaagag

SEQ ID NO: 133394 - RNA, 20 nt, Artificial Sequence
  Synthetic
gaaggaucaggacccaagag

SEQ ID NO: 133395 - RNA, 23 nt, Artificial Sequence
  Synthetic
gcaaccugagcguccaucaagag

SEQ ID NO: 133396 - RNA, 19 nt, Artificial Sequence
  Synthetic
gaggaaagagaaagaagag

SEQ ID NO: 133397 - RNA, 20 nt, Artificial Sequence
  Synthetic
gcuaauguuugaaagaagag

SEQ ID NO: 133398 - RNA, 22 nt, Artificial Sequence
  Synthetic
gugcuaauguuugaaagaagag

SEQ ID NO: 133399 - RNA, 19 nt, Artificial Sequence
  Synthetic
gagcagagggugagaagag

SEQ ID NO: 133400 - RNA, 18 nt, Artificial Sequence
  Synthetic
gagcaugagaaugaagag

SEQ ID NO: 133401 - RNA, 19 nt, Artificial Sequence
  Synthetic
ggagcaugagaaugaagag

SEQ ID NO: 133402 - RNA, 19 nt, Artificial Sequence
  Synthetic
gagaccauauggagcagag

SEQ ID NO: 133403 - RNA, 21 nt, Artificial Sequence
  Synthetic
gagagaccauauggagcagag

SEQ ID NO: 133404 - RNA, 24 nt, Artificial Sequence
  Synthetic
gaugagagaccauauggagcagag

SEQ ID NO: 133405 - RNA, 23 nt, Artificial Sequence
  Synthetic
gacuaauaaagaaaaaaagagag

SEQ ID NO: 133406 - RNA, 23 nt, Artificial Sequence
  Synthetic
gacuaauaaagaagaaaagagag

SEQ ID NO: 133407 - RNA, 23 nt, Artificial Sequence
  Synthetic
guaguucuaucaacugaagagag

SEQ ID NO: 133408 - RNA, 18 nt, Artificial Sequence
  Synthetic
guaacaaauaacagagag

SEQ ID NO: 133409 - RNA, 21 nt, Artificial Sequence
  Synthetic
guaaauugguaccacagagag

SEQ ID NO: 133410 - RNA, 19 nt, Artificial Sequence
  Synthetic
gagacaggaggcaggagag

SEQ ID NO: 133411 - RNA, 18 nt, Artificial Sequence
  Synthetic
gggaggagggagggagag

SEQ ID NO: 133412 - RNA, 22 nt, Artificial Sequence
  Synthetic
gaaagggaggagggagggagag

SEQ ID NO: 133413 - RNA, 23 nt, Artificial Sequence
  Synthetic
ggaaagggaggagggagggagag

SEQ ID NO: 133414 - RNA, 21 nt, Artificial Sequence
  Synthetic
gcaggugggaagaugauagag

SEQ ID NO: 133415 - RNA, 23 nt, Artificial Sequence
  Synthetic
gauuuuuuguauuuguaguagag

SEQ ID NO: 133416 - RNA, 19 nt, Artificial Sequence
  Synthetic
gaugauaaaauuaguagag

SEQ ID NO: 133417 - RNA, 19 nt, Artificial Sequence
  Synthetic
gcaugggcagaggaaggag

SEQ ID NO: 133418 - RNA, 22 nt, Artificial Sequence
  Synthetic
gcuacucaguaggcugaaggag

SEQ ID NO: 133419 - RNA, 23 nt, Artificial Sequence
  Synthetic
ggcuacucaguaggcugaaggag

SEQ ID NO: 133420 - RNA, 18 nt, Artificial Sequence
  Synthetic
gccugaaagcuuaaggag

SEQ ID NO: 133421 - RNA, 19 nt, Artificial Sequence
  Synthetic
ggccugaaagcuuaaggag

SEQ ID NO: 133422 - RNA, 20 nt, Artificial Sequence
  Synthetic
gggccugaaagcuuaaggag

SEQ ID NO: 133423 - RNA, 19 nt, Artificial Sequence
  Synthetic
gucagaagacgaacaggag

SEQ ID NO: 133424 - RNA, 21 nt, Artificial Sequence
  Synthetic
gagucagaagacgaacaggag

SEQ ID NO: 133425 - RNA, 19 nt, Artificial Sequence
  Synthetic
gacugcuugagcccaggag

SEQ ID NO: 133426 - RNA, 20 nt, Artificial Sequence
  Synthetic
ggacugcuugagcccaggag

SEQ ID NO: 133427 - RNA, 22 nt, Artificial Sequence
  Synthetic
gaggacugcuugagcccaggag

SEQ ID NO: 133428 - RNA, 23 nt, Artificial Sequence
  Synthetic
ggaggacugcuugagcccaggag

SEQ ID NO: 133429 - RNA, 18 nt, Artificial Sequence
  Synthetic
gauguuugagucacggag

SEQ ID NO: 133430 - RNA, 20 nt, Artificial Sequence
  Synthetic
gagauguuugagucacggag

SEQ ID NO: 133431 - RNA, 18 nt, Artificial Sequence
  Synthetic
gggguaggaggaagggag

SEQ ID NO: 133432 - RNA, 23 nt, Artificial Sequence
  Synthetic
gauuugggguaggaggaagggag

SEQ ID NO: 133433 - RNA, 24 nt, Artificial Sequence
  Synthetic
ggauuugggguaggaggaagggag

SEQ ID NO: 133434 - RNA, 22 nt, Artificial Sequence
  Synthetic
gacuacuagagggaggagggag

SEQ ID NO: 133435 - RNA, 23 nt, Artificial Sequence
  Synthetic
ggacuacuagagggaggagggag

SEQ ID NO: 133436 - RNA, 24 nt, Artificial Sequence
  Synthetic
gggacuacuagagggaggagggag

SEQ ID NO: 133437 - RNA, 18 nt, Artificial Sequence
  Synthetic
ggcuugggagugggggag

SEQ ID NO: 133438 - RNA, 19 nt, Artificial Sequence
  Synthetic
gggcuugggagugggggag

SEQ ID NO: 133439 - RNA, 21 nt, Artificial Sequence
  Synthetic
guuaauggguuaucaugggag

SEQ ID NO: 133440 - RNA, 22 nt, Artificial Sequence
  Synthetic
gguuaauggguuaucaugggag

SEQ ID NO: 133441 - RNA, 21 nt, Artificial Sequence
  Synthetic
gcucugucgcccaggcuggag

SEQ ID NO: 133442 - RNA, 22 nt, Artificial Sequence
  Synthetic
ggcucugucgcccaggcuggag

SEQ ID NO: 133443 - RNA, 20 nt, Artificial Sequence
  Synthetic
guuuuguucccuugcuggag

SEQ ID NO: 133444 - RNA, 19 nt, Artificial Sequence
  Synthetic
gaugagaagaguucuggag

SEQ ID NO: 133445 - RNA, 23 nt, Artificial Sequence
  Synthetic
gcaagaugagaagaguucuggag

SEQ ID NO: 133446 - RNA, 19 nt, Artificial Sequence
  Synthetic
gugugucucugcacaugag

SEQ ID NO: 133447 - RNA, 21 nt, Artificial Sequence
  Synthetic
guuucaguuuugcaagaugag

SEQ ID NO: 133448 - RNA, 23 nt, Artificial Sequence
  Synthetic
gaguuucaguuuugcaagaugag

SEQ ID NO: 133449 - RNA, 20 nt, Artificial Sequence
  Synthetic
gauagcuagucagauaugag

SEQ ID NO: 133450 - RNA, 23 nt, Artificial Sequence
  Synthetic
guagauagcuagucagauaugag

SEQ ID NO: 133451 - RNA, 18 nt, Artificial Sequence
  Synthetic
gugcuuugggaagcugag

SEQ ID NO: 133452 - RNA, 18 nt, Artificial Sequence
  Synthetic
gcacuuugggaggcugag

SEQ ID NO: 133453 - RNA, 19 nt, Artificial Sequence
  Synthetic
guguguguuugcaugugag

SEQ ID NO: 133454 - RNA, 24 nt, Artificial Sequence
  Synthetic
gccacauaaaugucuucuuuugag

SEQ ID NO: 133455 - RNA, 19 nt, Artificial Sequence
  Synthetic
gagcuggagagagaaauag

SEQ ID NO: 133456 - RNA, 20 nt, Artificial Sequence
  Synthetic
ggagcuggagagagaaauag

SEQ ID NO: 133457 - RNA, 18 nt, Artificial Sequence
  Synthetic
guuuuauuaauuaaauag

SEQ ID NO: 133458 - RNA, 21 nt, Artificial Sequence
  Synthetic
guuacuuucaugcuacaauag

SEQ ID NO: 133459 - RNA, 22 nt, Artificial Sequence
  Synthetic
gguuacuuucaugcuacaauag

SEQ ID NO: 133460 - RNA, 19 nt, Artificial Sequence
  Synthetic
gugaggggaaggagaauag

SEQ ID NO: 133461 - RNA, 19 nt, Artificial Sequence
  Synthetic
guccuuugcagggacauag

SEQ ID NO: 133462 - RNA, 19 nt, Artificial Sequence
  Synthetic
gcugcuaaugcugcuauag

SEQ ID NO: 133463 - RNA, 20 nt, Artificial Sequence
  Synthetic
ggcugcuaaugcugcuauag

SEQ ID NO: 133464 - RNA, 18 nt, Artificial Sequence
  Synthetic
gaugaaauaaacuuauag

SEQ ID NO: 133465 - RNA, 18 nt, Artificial Sequence
  Synthetic
gugcaugugucuuuauag

SEQ ID NO: 133466 - RNA, 23 nt, Artificial Sequence
  Synthetic
gccaacaaaccaucagaaacuag

SEQ ID NO: 133467 - RNA, 20 nt, Artificial Sequence
  Synthetic
gaaaaugcuuccacaacuag

SEQ ID NO: 133468 - RNA, 21 nt, Artificial Sequence
  Synthetic
ggaaaaugcuuccacaacuag

SEQ ID NO: 133469 - RNA, 22 nt, Artificial Sequence
  Synthetic
gggaaaaugcuuccacaacuag

SEQ ID NO: 133470 - RNA, 22 nt, Artificial Sequence
  Synthetic
gcacuuugggaggccgaaguag

SEQ ID NO: 133471 - RNA, 23 nt, Artificial Sequence
  Synthetic
gcaaccuaaguguccaucaguag

SEQ ID NO: 133472 - RNA, 23 nt, Artificial Sequence
  Synthetic
gaacucauggacauagagaguag

SEQ ID NO: 133473 - RNA, 23 nt, Artificial Sequence
  Synthetic
gcuuucauacuacaacagcguag

SEQ ID NO: 133474 - RNA, 22 nt, Artificial Sequence
  Synthetic
gcuacuugggaggcuaagguag

SEQ ID NO: 133475 - RNA, 22 nt, Artificial Sequence
  Synthetic
gcacuuugggaggccgagguag

SEQ ID NO: 133476 - RNA, 22 nt, Artificial Sequence
  Synthetic
gcuacccaggaagcugagguag

SEQ ID NO: 133477 - RNA, 22 nt, Artificial Sequence
  Synthetic
gcuacucgggaggcugagguag

SEQ ID NO: 133478 - RNA, 18 nt, Artificial Sequence
  Synthetic
gggguggggguaggguag

SEQ ID NO: 133479 - RNA, 20 nt, Artificial Sequence
  Synthetic
gagggguggggguaggguag

SEQ ID NO: 133480 - RNA, 18 nt, Artificial Sequence
  Synthetic
gaguggauggauggguag

SEQ ID NO: 133481 - RNA, 22 nt, Artificial Sequence
  Synthetic
gucucuuaugggcagcauguag

SEQ ID NO: 133482 - RNA, 24 nt, Artificial Sequence
  Synthetic
gagucucuuaugggcagcauguag

SEQ ID NO: 133483 - RNA, 22 nt, Artificial Sequence
  Synthetic
gcucauuaucacuggucauuag

SEQ ID NO: 133484 - RNA, 19 nt, Artificial Sequence
  Synthetic
gaaucugagaguggcuuag

SEQ ID NO: 133485 - RNA, 24 nt, Artificial Sequence
  Synthetic
gucaagaaucugagaguggcuuag

SEQ ID NO: 133486 - RNA, 18 nt, Artificial Sequence
  Synthetic
gaaaagaaaacguguuag

SEQ ID NO: 133487 - RNA, 23 nt, Artificial Sequence
  Synthetic
gaaaaacuuugaaaaaaauuuag

SEQ ID NO: 133488 - RNA, 19 nt, Artificial Sequence
  Synthetic
gaagggaauuugccucacg

SEQ ID NO: 133489 - RNA, 20 nt, Artificial Sequence
  Synthetic
ggaagggaauuugccucacg

SEQ ID NO: 133490 - RNA, 23 nt, Artificial Sequence
  Synthetic
gauggaagggaauuugccucacg

SEQ ID NO: 133491 - RNA, 19 nt, Artificial Sequence
  Synthetic
gagccaccgcgcccggccg

SEQ ID NO: 133492 - RNA, 21 nt, Artificial Sequence
  Synthetic
gugagccaccgcgcccggccg

SEQ ID NO: 133493 - RNA, 23 nt, Artificial Sequence
  Synthetic
gcgugagccaccgcgcccggccg

SEQ ID NO: 133494 - RNA, 24 nt, Artificial Sequence
  Synthetic
ggcgugagccaccgcgcccggccg

SEQ ID NO: 133495 - RNA, 21 nt, Artificial Sequence
  Synthetic
gccucagccaugaaccuagcg

SEQ ID NO: 133496 - RNA, 23 nt, Artificial Sequence
  Synthetic
gugccucagccaugaaccuagcg

SEQ ID NO: 133497 - RNA, 24 nt, Artificial Sequence
  Synthetic
ggugccucagccaugaaccuagcg

SEQ ID NO: 133498 - RNA, 18 nt, Artificial Sequence
  Synthetic
gagggugggaugggggcg

SEQ ID NO: 133499 - RNA, 20 nt, Artificial Sequence
  Synthetic
gagagggugggaugggggcg

SEQ ID NO: 133500 - RNA, 18 nt, Artificial Sequence
  Synthetic
guuauaauguugguugcg

SEQ ID NO: 133501 - RNA, 23 nt, Artificial Sequence
  Synthetic
gccagaaaaugggcucaaaaagg

SEQ ID NO: 133502 - RNA, 19 nt, Artificial Sequence
  Synthetic
gcuugaaagaaaagaaagg

SEQ ID NO: 133503 - RNA, 18 nt, Artificial Sequence
  Synthetic
ggcagccagagagaaagg

SEQ ID NO: 133504 - RNA, 19 nt, Artificial Sequence
  Synthetic
gggcagccagagagaaagg

SEQ ID NO: 133505 - RNA, 24 nt, Artificial Sequence
  Synthetic
guuaagggcagccagagagaaagg

SEQ ID NO: 133506 - RNA, 20 nt, Artificial Sequence
  Synthetic
gauaagaaaaugaagcaagg

SEQ ID NO: 133507 - RNA, 19 nt, Artificial Sequence
  Synthetic
gaagcuggaagaggcaagg

SEQ ID NO: 133508 - RNA, 23 nt, Artificial Sequence
  Synthetic
gcaccucagaagaaacaagaagg

SEQ ID NO: 133509 - RNA, 19 nt, Artificial Sequence
  Synthetic
gagauaaaaagaaauaagg

SEQ ID NO: 133510 - RNA, 18 nt, Artificial Sequence
  Synthetic
gauauucuuuauuuaagg

SEQ ID NO: 133511 - RNA, 19 nt, Artificial Sequence
  Synthetic
ggauauucuuuauuuaagg

SEQ ID NO: 133512 - RNA, 20 nt, Artificial Sequence
  Synthetic
guaaaaaaaugagaaacagg

SEQ ID NO: 133513 - RNA, 24 nt, Artificial Sequence
  Synthetic
gaaacacaauuucaauuagacagg

SEQ ID NO: 133514 - RNA, 23 nt, Artificial Sequence
  Synthetic
guacaaaguuccaguuagacagg

SEQ ID NO: 133515 - RNA, 24 nt, Artificial Sequence
  Synthetic
gguacaaaguuccaguuagacagg

SEQ ID NO: 133516 - RNA, 18 nt, Artificial Sequence
  Synthetic
ggauaaaugcuugacagg

SEQ ID NO: 133517 - RNA, 24 nt, Artificial Sequence
  Synthetic
gauacacaauuucaguuugacagg

SEQ ID NO: 133518 - RNA, 22 nt, Artificial Sequence
  Synthetic
gcacuuaaaauuuauuaagagg

SEQ ID NO: 133519 - RNA, 24 nt, Artificial Sequence
  Synthetic
gugcacuuaaaauuuauuaagagg

SEQ ID NO: 133520 - RNA, 18 nt, Artificial Sequence
  Synthetic
guguauuuuuaguagagg

SEQ ID NO: 133521 - RNA, 20 nt, Artificial Sequence
  Synthetic
guguguauuuuuaguagagg

SEQ ID NO: 133522 - RNA, 22 nt, Artificial Sequence
  Synthetic
guguguguauuuuuaguagagg

SEQ ID NO: 133523 - RNA, 24 nt, Artificial Sequence
  Synthetic
guguguguguauuuuuaguagagg

SEQ ID NO: 133524 - RNA, 19 nt, Artificial Sequence
  Synthetic
gaaagacuagagaaggagg

SEQ ID NO: 133525 - RNA, 18 nt, Artificial Sequence
  Synthetic
guagaugugggaaggagg

SEQ ID NO: 133526 - RNA, 23 nt, Artificial Sequence
  Synthetic
gacuaguagaugugggaaggagg

SEQ ID NO: 133527 - RNA, 24 nt, Artificial Sequence
  Synthetic
ggacuaguagaugugggaaggagg

SEQ ID NO: 133528 - RNA, 18 nt, Artificial Sequence
  Synthetic
ggaggggugugaaggagg

SEQ ID NO: 133529 - RNA, 19 nt, Artificial Sequence
  Synthetic
gggaggggugugaaggagg

SEQ ID NO: 133530 - RNA, 20 nt, Artificial Sequence
  Synthetic
ggggaggggugugaaggagg

SEQ ID NO: 133531 - RNA, 21 nt, Artificial Sequence
  Synthetic
gggggaggggugugaaggagg

SEQ ID NO: 133532 - RNA, 24 nt, Artificial Sequence
  Synthetic
gaagggggaggggugugaaggagg

SEQ ID NO: 133533 - RNA, 20 nt, Artificial Sequence
  Synthetic
gcuuugggaagcugaggagg

SEQ ID NO: 133534 - RNA, 22 nt, Artificial Sequence
  Synthetic
gugcuuugggaagcugaggagg

SEQ ID NO: 133535 - RNA, 18 nt, Artificial Sequence
  Synthetic
gaacaagaaaguaggagg

SEQ ID NO: 133536 - RNA, 20 nt, Artificial Sequence
  Synthetic
gagaacaagaaaguaggagg

SEQ ID NO: 133537 - RNA, 21 nt, Artificial Sequence
  Synthetic
gaauggugugaacuuaggagg

SEQ ID NO: 133538 - RNA, 23 nt, Artificial Sequence
  Synthetic
gagaauggugugaacuuaggagg

SEQ ID NO: 133539 - RNA, 24 nt, Artificial Sequence
  Synthetic
ggagaauggugugaacuuaggagg

SEQ ID NO: 133540 - RNA, 21 nt, Artificial Sequence
  Synthetic
gaauagcuugaaucugggagg

SEQ ID NO: 133541 - RNA, 23 nt, Artificial Sequence
  Synthetic
gagaauagcuugaaucugggagg

SEQ ID NO: 133542 - RNA, 18 nt, Artificial Sequence
  Synthetic
ggaggcugaggugggagg

SEQ ID NO: 133543 - RNA, 19 nt, Artificial Sequence
  Synthetic
gggaggcugaggugggagg

SEQ ID NO: 133544 - RNA, 22 nt, Artificial Sequence
  Synthetic
guaaucucagcacuuugggagg

SEQ ID NO: 133545 - RNA, 19 nt, Artificial Sequence
  Synthetic
guggguggaucaccugagg

SEQ ID NO: 133546 - RNA, 22 nt, Artificial Sequence
  Synthetic
gaaguggguggaucaccugagg

SEQ ID NO: 133547 - RNA, 21 nt, Artificial Sequence
  Synthetic
gacuacuuuuuuuucuugagg

SEQ ID NO: 133548 - RNA, 22 nt, Artificial Sequence
  Synthetic
ggacuacuuuuuuuucuugagg

SEQ ID NO: 133549 - RNA, 20 nt, Artificial Sequence
  Synthetic
guuuuuuuuuuuuuuugagg

SEQ ID NO: 133550 - RNA, 19 nt, Artificial Sequence
  Synthetic
gaagagaaaaagaaauagg

SEQ ID NO: 133551 - RNA, 20 nt, Artificial Sequence
  Synthetic
ggaagagaaaaagaaauagg

SEQ ID NO: 133552 - RNA, 24 nt, Artificial Sequence
  Synthetic
gacaggaagagaaaaagaaauagg

SEQ ID NO: 133553 - RNA, 24 nt, Artificial Sequence
  Synthetic
gaacauuccaugcucauggauagg

SEQ ID NO: 133554 - RNA, 18 nt, Artificial Sequence
  Synthetic
gaauuuaacuacucuagg

SEQ ID NO: 133555 - RNA, 24 nt, Artificial Sequence
  Synthetic
gaauauuccaugcucauggguagg

SEQ ID NO: 133556 - RNA, 24 nt, Artificial Sequence
  Synthetic
gaacauuccgugcucauggguagg

SEQ ID NO: 133557 - RNA, 18 nt, Artificial Sequence
  Synthetic
gaaguuauaaaaauuagg

SEQ ID NO: 133558 - RNA, 21 nt, Artificial Sequence
  Synthetic
ggccucauaaaaugaguuagg

SEQ ID NO: 133559 - RNA, 24 nt, Artificial Sequence
  Synthetic
gcuggccucauaaaaugaguuagg

SEQ ID NO: 133560 - RNA, 22 nt, Artificial Sequence
  Synthetic
gcacuuugggaggccgagacgg

SEQ ID NO: 133561 - RNA, 21 nt, Artificial Sequence
  Synthetic
ggcgugagccaccgcgcccgg

SEQ ID NO: 133562 - RNA, 21 nt, Artificial Sequence
  Synthetic
gucucugggaggccaaagcgg

SEQ ID NO: 133563 - RNA, 22 nt, Artificial Sequence
  Synthetic
ggucucugggaggccaaagcgg

SEQ ID NO: 133564 - RNA, 22 nt, Artificial Sequence
  Synthetic
gcacuuagggaggccaaggcgg

SEQ ID NO: 133565 - RNA, 21 nt, Artificial Sequence
  Synthetic
gacuuugggaggccaaggcgg

SEQ ID NO: 133566 - RNA, 22 nt, Artificial Sequence
  Synthetic
ggacuuugggaggccaaggcgg

SEQ ID NO: 133567 - RNA, 22 nt, Artificial Sequence
  Synthetic
gcacuuuggaaggccgaggcgg

SEQ ID NO: 133568 - RNA, 23 nt, Artificial Sequence
  Synthetic
gcacuuuggggaggccgaggcgg

SEQ ID NO: 133569 - RNA, 22 nt, Artificial Sequence
  Synthetic
gcacuuugggaggccgaggcgg

SEQ ID NO: 133570 - RNA, 22 nt, Artificial Sequence
  Synthetic
gcuacucgggaggcugaggcgg

SEQ ID NO: 133571 - RNA, 22 nt, Artificial Sequence
  Synthetic
gcacuuugggaggcugaggcgg

SEQ ID NO: 133572 - RNA, 24 nt, Artificial Sequence
  Synthetic
gcucauuaaaacagcauguugcgg

SEQ ID NO: 133573 - RNA, 18 nt, Artificial Sequence
  Synthetic
guagucccagcugcucgg

SEQ ID NO: 133574 - RNA, 22 nt, Artificial Sequence
  Synthetic
gccuguagucccagcugcucgg

SEQ ID NO: 133575 - RNA, 24 nt, Artificial Sequence
  Synthetic
gcgccuguagucccagcugcucgg

SEQ ID NO: 133576 - RNA, 18 nt, Artificial Sequence
  Synthetic
ggaaagaaaaaaaaaggg

SEQ ID NO: 133577 - RNA, 18 nt, Artificial Sequence
  Synthetic
gaggggaaagagaaaggg

SEQ ID NO: 133578 - RNA, 19 nt, Artificial Sequence
  Synthetic
ggaggggaaagagaaaggg

SEQ ID NO: 133579 - RNA, 18 nt, Artificial Sequence
  Synthetic
gaaggaaaagggaaaggg

SEQ ID NO: 133580 - RNA, 19 nt, Artificial Sequence
  Synthetic
ggaaggaaaagggaaaggg

SEQ ID NO: 133581 - RNA, 20 nt, Artificial Sequence
  Synthetic
gggaaggaaaagggaaaggg

SEQ ID NO: 133582 - RNA, 21 nt, Artificial Sequence
  Synthetic
gaaaugaugagaugagaaggg

SEQ ID NO: 133583 - RNA, 18 nt, Artificial Sequence
  Synthetic
ggccugaaaggcuaaggg

SEQ ID NO: 133584 - RNA, 19 nt, Artificial Sequence
  Synthetic
gaucagaguggaggcaggg

SEQ ID NO: 133585 - RNA, 20 nt, Artificial Sequence
  Synthetic
ggaucagaguggaggcaggg

SEQ ID NO: 133586 - RNA, 23 nt, Artificial Sequence
  Synthetic
gacaauuuuuccauggaucaggg

SEQ ID NO: 133587 - RNA, 20 nt, Artificial Sequence
  Synthetic
gacucagaagggcgagaggg

SEQ ID NO: 133588 - RNA, 22 nt, Artificial Sequence
  Synthetic
gagacucagaagggcgagaggg

SEQ ID NO: 133589 - RNA, 23 nt, Artificial Sequence
  Synthetic
ggagacucagaagggcgagaggg

SEQ ID NO: 133590 - RNA, 18 nt, Artificial Sequence
  Synthetic
gugaagaagugcugaggg

SEQ ID NO: 133591 - RNA, 18 nt, Artificial Sequence
  Synthetic
ggcuuuuuggcuugaggg

SEQ ID NO: 133592 - RNA, 24 nt, Artificial Sequence
  Synthetic
guuucaggcuuuuuggcuugaggg

SEQ ID NO: 133593 - RNA, 24 nt, Artificial Sequence
  Synthetic
gauauuugaucagggucuugaggg

SEQ ID NO: 133594 - RNA, 19 nt, Artificial Sequence
  Synthetic
gcggguggggggcaagggg

SEQ ID NO: 133595 - RNA, 20 nt, Artificial Sequence
  Synthetic
ggcggguggggggcaagggg

SEQ ID NO: 133596 - RNA, 23 nt, Artificial Sequence
  Synthetic
guuggcggguggggggcaagggg

SEQ ID NO: 133597 - RNA, 18 nt, Artificial Sequence
  Synthetic
gaauaaaugcuugagggg

SEQ ID NO: 133598 - RNA, 24 nt, Artificial Sequence
  Synthetic
gaacaacuccaucuugaauagggg

SEQ ID NO: 133599 - RNA, 18 nt, Artificial Sequence
  Synthetic
gggguggggggcuagggg

SEQ ID NO: 133600 - RNA, 19 nt, Artificial Sequence
  Synthetic
ggggguggggggcuagggg

SEQ ID NO: 133601 - RNA, 23 nt, Artificial Sequence
  Synthetic
gucaggggguggggggcuagggg

SEQ ID NO: 133602 - RNA, 18 nt, Artificial Sequence
  Synthetic
gggaugggggguuagggg

SEQ ID NO: 133603 - RNA, 19 nt, Artificial Sequence
  Synthetic
ggggaugggggguuagggg

SEQ ID NO: 133604 - RNA, 18 nt, Artificial Sequence
  Synthetic
gggguggggggaaggggg

SEQ ID NO: 133605 - RNA, 20 nt, Artificial Sequence
  Synthetic
gugggguggggggaaggggg

SEQ ID NO: 133606 - RNA, 23 nt, Artificial Sequence
  Synthetic
gcugugggguggggggaaggggg

SEQ ID NO: 133607 - RNA, 18 nt, Artificial Sequence
  Synthetic
ggaggggugugaaggggg

SEQ ID NO: 133608 - RNA, 19 nt, Artificial Sequence
  Synthetic
gggaggggugugaaggggg

SEQ ID NO: 133609 - RNA, 20 nt, Artificial Sequence
  Synthetic
ggggaggggugugaaggggg

SEQ ID NO: 133610 - RNA, 21 nt, Artificial Sequence
  Synthetic
gggggaggggugugaaggggg

SEQ ID NO: 133611 - RNA, 24 nt, Artificial Sequence
  Synthetic
gaagggggaggggugugaaggggg

SEQ ID NO: 133612 - RNA, 18 nt, Artificial Sequence
  Synthetic
ggggugaggggacggggg

SEQ ID NO: 133613 - RNA, 20 nt, Artificial Sequence
  Synthetic
guggggugaggggacggggg

SEQ ID NO: 133614 - RNA, 23 nt, Artificial Sequence
  Synthetic
gucguggggugaggggacggggg

SEQ ID NO: 133615 - RNA, 18 nt, Artificial Sequence
  Synthetic
ggacaucuuuggcggggg

SEQ ID NO: 133616 - RNA, 23 nt, Artificial Sequence
  Synthetic
gauauggacaucuuuggcggggg

SEQ ID NO: 133617 - RNA, 24 nt, Artificial Sequence
  Synthetic
ggauauggacaucuuuggcggggg

SEQ ID NO: 133618 - RNA, 23 nt, Artificial Sequence
  Synthetic
gcugugggguggggggagggggg

SEQ ID NO: 133619 - RNA, 18 nt, Artificial Sequence
  Synthetic
ggguggggggaggggggg

SEQ ID NO: 133620 - RNA, 19 nt, Artificial Sequence
  Synthetic
gggguggggggaggggggg

SEQ ID NO: 133621 - RNA, 21 nt, Artificial Sequence
  Synthetic
gugggguggggggaggggggg

SEQ ID NO: 133622 - RNA, 24 nt, Artificial Sequence
  Synthetic
guugugggguggggggaggggggg

SEQ ID NO: 133623 - RNA, 18 nt, Artificial Sequence
  Synthetic
guaacugaaucauggggg

SEQ ID NO: 133624 - RNA, 19 nt, Artificial Sequence
  Synthetic
gguaacugaaucauggggg

SEQ ID NO: 133625 - RNA, 21 nt, Artificial Sequence
  Synthetic
gagguaacugaaucauggggg

SEQ ID NO: 133626 - RNA, 22 nt, Artificial Sequence
  Synthetic
ggagguaacugaaucauggggg

SEQ ID NO: 133627 - RNA, 23 nt, Artificial Sequence
  Synthetic
gggagguaacugaaucauggggg

SEQ ID NO: 133628 - RNA, 20 nt, Artificial Sequence
  Synthetic
gccaugaugagggguggggg

SEQ ID NO: 133629 - RNA, 22 nt, Artificial Sequence
  Synthetic
gagccaugaugagggguggggg

SEQ ID NO: 133630 - RNA, 19 nt, Artificial Sequence
  Synthetic
guuggggguuguguggggg

SEQ ID NO: 133631 - RNA, 20 nt, Artificial Sequence
  Synthetic
gguuggggguuguguggggg

SEQ ID NO: 133632 - RNA, 22 nt, Artificial Sequence
  Synthetic
gcuggcugggcuccguuggggg

SEQ ID NO: 133633 - RNA, 19 nt, Artificial Sequence
  Synthetic
gaaguguggggucaugggg

SEQ ID NO: 133634 - RNA, 20 nt, Artificial Sequence
  Synthetic
ggaaguguggggucaugggg

SEQ ID NO: 133635 - RNA, 23 nt, Artificial Sequence
  Synthetic
guuuuuauaggcacaggaugggg

SEQ ID NO: 133636 - RNA, 24 nt, Artificial Sequence
  Synthetic
gguuuuuauaggcacaggaugggg

SEQ ID NO: 133637 - RNA, 18 nt, Artificial Sequence
  Synthetic
guaauaauacaacugggg

SEQ ID NO: 133638 - RNA, 19 nt, Artificial Sequence
  Synthetic
gugggguggggggcugggg

SEQ ID NO: 133639 - RNA, 22 nt, Artificial Sequence
  Synthetic
gucgugggguggggggcugggg

SEQ ID NO: 133640 - RNA, 18 nt, Artificial Sequence
  Synthetic
gcaaaaaaaaaugugggg

SEQ ID NO: 133641 - RNA, 19 nt, Artificial Sequence
  Synthetic
ggcaaaaaaaaaugugggg

SEQ ID NO: 133642 - RNA, 18 nt, Artificial Sequence
  Synthetic
gauuuaacugguuugggg

SEQ ID NO: 133643 - RNA, 19 nt, Artificial Sequence
  Synthetic
gaaguuacagguuuugggg

SEQ ID NO: 133644 - RNA, 19 nt, Artificial Sequence
  Synthetic
guaauauaccaacaauggg

SEQ ID NO: 133645 - RNA, 20 nt, Artificial Sequence
  Synthetic
gaugguuaccugaggauggg

SEQ ID NO: 133646 - RNA, 21 nt, Artificial Sequence
  Synthetic
ggaugguuaccugaggauggg

SEQ ID NO: 133647 - RNA, 24 nt, Artificial Sequence
  Synthetic
gaaggaugguuaccugaggauggg

SEQ ID NO: 133648 - RNA, 19 nt, Artificial Sequence
  Synthetic
guaguugccagaggcuggg

SEQ ID NO: 133649 - RNA, 20 nt, Artificial Sequence
  Synthetic
gguaguugccagaggcuggg

SEQ ID NO: 133650 - RNA, 24 nt, Artificial Sequence
  Synthetic
gaaagguaguugccagaggcuggg

SEQ ID NO: 133651 - RNA, 19 nt, Artificial Sequence
  Synthetic
gugguuaccugaugcuggg

SEQ ID NO: 133652 - RNA, 20 nt, Artificial Sequence
  Synthetic
ggugguuaccugaugcuggg

SEQ ID NO: 133653 - RNA, 24 nt, Artificial Sequence
  Synthetic
gauuggugguuaccugaugcuggg

SEQ ID NO: 133654 - RNA, 19 nt, Artificial Sequence
  Synthetic
gccagcuggacuuucuggg

SEQ ID NO: 133655 - RNA, 20 nt, Artificial Sequence
  Synthetic
ggccagcuggacuuucuggg

SEQ ID NO: 133656 - RNA, 22 nt, Artificial Sequence
  Synthetic
gaggccagcuggacuuucuggg

SEQ ID NO: 133657 - RNA, 24 nt, Artificial Sequence
  Synthetic
gugaggccagcuggacuuucuggg

SEQ ID NO: 133658 - RNA, 21 nt, Artificial Sequence
  Synthetic
gcugggaagaguguagguggg

SEQ ID NO: 133659 - RNA, 22 nt, Artificial Sequence
  Synthetic
ggcugggaagaguguagguggg

SEQ ID NO: 133660 - RNA, 24 nt, Artificial Sequence
  Synthetic
gaggcugggaagaguguagguggg

SEQ ID NO: 133661 - RNA, 18 nt, Artificial Sequence
  Synthetic
gaacuucuuagggguggg

SEQ ID NO: 133662 - RNA, 19 nt, Artificial Sequence
  Synthetic
ggaacuucuuagggguggg

SEQ ID NO: 133663 - RNA, 19 nt, Artificial Sequence
  Synthetic
guguguguguguguguggg

SEQ ID NO: 133664 - RNA, 21 nt, Artificial Sequence
  Synthetic
guguguguguguguguguggg

SEQ ID NO: 133665 - RNA, 22 nt, Artificial Sequence
  Synthetic
gguguguguguguguguguggg

SEQ ID NO: 133666 - RNA, 19 nt, Artificial Sequence
  Synthetic
guauucugcuacuguuggg

SEQ ID NO: 133667 - RNA, 21 nt, Artificial Sequence
  Synthetic
guguauucugcuacuguuggg

SEQ ID NO: 133668 - RNA, 20 nt, Artificial Sequence
  Synthetic
gcaaaaaaaaaaaaaaaugg

SEQ ID NO: 133669 - RNA, 18 nt, Artificial Sequence
  Synthetic
gcugauacacuuacaugg

SEQ ID NO: 133670 - RNA, 20 nt, Artificial Sequence
  Synthetic
gccacugcgcccggccaugg

SEQ ID NO: 133671 - RNA, 22 nt, Artificial Sequence
  Synthetic
gagccacugcgcccggccaugg

SEQ ID NO: 133672 - RNA, 18 nt, Artificial Sequence
  Synthetic
guggacagugaagcaugg

SEQ ID NO: 133673 - RNA, 18 nt, Artificial Sequence
  Synthetic
gaccagauggcuucaugg

SEQ ID NO: 133674 - RNA, 24 nt, Artificial Sequence
  Synthetic
gcucaagaccagauggcuucaugg

SEQ ID NO: 133675 - RNA, 18 nt, Artificial Sequence
  Synthetic
ggaaaauauauuagaugg

SEQ ID NO: 133676 - RNA, 20 nt, Artificial Sequence
  Synthetic
guggaaaauauauuagaugg

SEQ ID NO: 133677 - RNA, 22 nt, Artificial Sequence
  Synthetic
gcguggaaaauauauuagaugg

SEQ ID NO: 133678 - RNA, 20 nt, Artificial Sequence
  Synthetic
guagaugaauaaguggaugg

SEQ ID NO: 133679 - RNA, 21 nt, Artificial Sequence
  Synthetic
gguagaugaauaaguggaugg

SEQ ID NO: 133680 - RNA, 22 nt, Artificial Sequence
  Synthetic
ggguagaugaauaaguggaugg

SEQ ID NO: 133681 - RNA, 18 nt, Artificial Sequence
  Synthetic
gcugagguggguggaugg

SEQ ID NO: 133682 - RNA, 19 nt, Artificial Sequence
  Synthetic
ggcugagguggguggaugg

SEQ ID NO: 133683 - RNA, 21 nt, Artificial Sequence
  Synthetic
gaggcugagguggguggaugg

SEQ ID NO: 133684 - RNA, 22 nt, Artificial Sequence
  Synthetic
ggaggcugagguggguggaugg

SEQ ID NO: 133685 - RNA, 23 nt, Artificial Sequence
  Synthetic
gggaggcugagguggguggaugg

SEQ ID NO: 133686 - RNA, 22 nt, Artificial Sequence
  Synthetic
gcucccuaggagauucugaugg

SEQ ID NO: 133687 - RNA, 20 nt, Artificial Sequence
  Synthetic
gaauuuaacuacuuauaugg

SEQ ID NO: 133688 - RNA, 18 nt, Artificial Sequence
  Synthetic
gugcauaugucuuuaugg

SEQ ID NO: 133689 - RNA, 20 nt, Artificial Sequence
  Synthetic
gcuccucuuuguaccucugg

SEQ ID NO: 133690 - RNA, 22 nt, Artificial Sequence
  Synthetic
gcacuuugggaggcagaagugg

SEQ ID NO: 133691 - RNA, 18 nt, Artificial Sequence
  Synthetic
ggguagaugaauaagugg

SEQ ID NO: 133692 - RNA, 21 nt, Artificial Sequence
  Synthetic
gauggguagaugaauaagugg

SEQ ID NO: 133693 - RNA, 22 nt, Artificial Sequence
  Synthetic
ggauggguagaugaauaagugg

SEQ ID NO: 133694 - RNA, 21 nt, Artificial Sequence
  Synthetic
gcccaggcuggaguggagugg

SEQ ID NO: 133695 - RNA, 24 nt, Artificial Sequence
  Synthetic
gucgcccaggcuggaguggagugg

SEQ ID NO: 133696 - RNA, 18 nt, Artificial Sequence
  Synthetic
ggcugggaaggauagugg

SEQ ID NO: 133697 - RNA, 20 nt, Artificial Sequence
  Synthetic
gaggcugggaaggauagugg

SEQ ID NO: 133698 - RNA, 24 nt, Artificial Sequence
  Synthetic
gccagaggcugggaaggauagugg

SEQ ID NO: 133699 - RNA, 18 nt, Artificial Sequence
  Synthetic
ggcugugaaggguagugg

SEQ ID NO: 133700 - RNA, 20 nt, Artificial Sequence
  Synthetic
gaggcugugaaggguagugg

SEQ ID NO: 133701 - RNA, 18 nt, Artificial Sequence
  Synthetic
guugucaggccaaggugg

SEQ ID NO: 133702 - RNA, 22 nt, Artificial Sequence
  Synthetic
gcacguugucaggccaaggugg

SEQ ID NO: 133703 - RNA, 21 nt, Artificial Sequence
  Synthetic
gacuuugggaguccaaggugg

SEQ ID NO: 133704 - RNA, 22 nt, Artificial Sequence
  Synthetic
ggacuuugggaguccaaggugg

SEQ ID NO: 133705 - RNA, 22 nt, Artificial Sequence
  Synthetic
gcacuuugggaggccgaggugg

SEQ ID NO: 133706 - RNA, 22 nt, Artificial Sequence
  Synthetic
gcuacuuaggaggcugaggugg

SEQ ID NO: 133707 - RNA, 22 nt, Artificial Sequence
  Synthetic
gcuacccgggaggcugaggugg

SEQ ID NO: 133708 - RNA, 22 nt, Artificial Sequence
  Synthetic
gcacuuugggaggcugaggugg

SEQ ID NO: 133709 - RNA, 18 nt, Artificial Sequence
  Synthetic
gucauuuuugcacggugg

SEQ ID NO: 133710 - RNA, 23 nt, Artificial Sequence
  Synthetic
gaacacuuggagauagagggugg

SEQ ID NO: 133711 - RNA, 24 nt, Artificial Sequence
  Synthetic
gaucuacucuaggguggagggugg

SEQ ID NO: 133712 - RNA, 18 nt, Artificial Sequence
  Synthetic
ggaggcugaggugggugg

SEQ ID NO: 133713 - RNA, 19 nt, Artificial Sequence
  Synthetic
gggaggcugaggugggugg

SEQ ID NO: 133714 - RNA, 20 nt, Artificial Sequence
  Synthetic
gcuuagggaggccgaugugg

SEQ ID NO: 133715 - RNA, 22 nt, Artificial Sequence
  Synthetic
gcgcuuagggaggccgaugugg

SEQ ID NO: 133716 - RNA, 22 nt, Artificial Sequence
  Synthetic
gcuacuugggaggcugaugugg

SEQ ID NO: 133717 - RNA, 23 nt, Artificial Sequence
  Synthetic
ggcuacuugggaggcugaugugg

SEQ ID NO: 133718 - RNA, 21 nt, Artificial Sequence
  Synthetic
gcuaaaucagaaucucugugg

SEQ ID NO: 133719 - RNA, 19 nt, Artificial Sequence
  Synthetic
gagucuguagaucaauugg

SEQ ID NO: 133720 - RNA, 19 nt, Artificial Sequence
  Synthetic
gaacuuccuagagaauugg

SEQ ID NO: 133721 - RNA, 20 nt, Artificial Sequence
  Synthetic
ggaacuuccuagagaauugg

SEQ ID NO: 133722 - RNA, 23 nt, Artificial Sequence
  Synthetic
guucauaugugaaagaaacuugg

SEQ ID NO: 133723 - RNA, 24 nt, Artificial Sequence
  Synthetic
gauuucuuccugguuuagucuugg

SEQ ID NO: 133724 - RNA, 23 nt, Artificial Sequence
  Synthetic
gcuacuugggaggcugagguugg

SEQ ID NO: 133725 - RNA, 20 nt, Artificial Sequence
  Synthetic
gcuaaauacuuauuuguugg

SEQ ID NO: 133726 - RNA, 22 nt, Artificial Sequence
  Synthetic
gagcuaaauacuuauuuguugg

SEQ ID NO: 133727 - RNA, 23 nt, Artificial Sequence
  Synthetic
ggagcuaaauacuuauuuguugg

SEQ ID NO: 133728 - RNA, 24 nt, Artificial Sequence
  Synthetic
gggagcuaaauacuuauuuguugg

SEQ ID NO: 133729 - RNA, 19 nt, Artificial Sequence
  Synthetic
guaauaaaaugaaauuugg

SEQ ID NO: 133730 - RNA, 20 nt, Artificial Sequence
  Synthetic
gcuuaugaaacuuaguuugg

SEQ ID NO: 133731 - RNA, 20 nt, Artificial Sequence
  Synthetic
gcuuaugaagcuuaguuugg

SEQ ID NO: 133732 - RNA, 23 nt, Artificial Sequence
  Synthetic
gccuauuaguaguuacguuuugg

SEQ ID NO: 133733 - RNA, 18 nt, Artificial Sequence
  Synthetic
gugcaugugucuuuuugg

SEQ ID NO: 133734 - RNA, 24 nt, Artificial Sequence
  Synthetic
guuccuuucucuucuauuuuuugg

SEQ ID NO: 133735 - RNA, 22 nt, Artificial Sequence
  Synthetic
guaaauuaguacaaccaaaaug

SEQ ID NO: 133736 - RNA, 18 nt, Artificial Sequence
  Synthetic
gcagggaaggaagaaaug

SEQ ID NO: 133737 - RNA, 20 nt, Artificial Sequence
  Synthetic
gucagugcagaagagaaaug

SEQ ID NO: 133738 - RNA, 21 nt, Artificial Sequence
  Synthetic
ggucagugcagaagagaaaug

SEQ ID NO: 133739 - RNA, 18 nt, Artificial Sequence
  Synthetic
guugaacucauagaaaug

SEQ ID NO: 133740 - RNA, 18 nt, Artificial Sequence
  Synthetic
gagcacuugcuagaaaug

SEQ ID NO: 133741 - RNA, 18 nt, Artificial Sequence
  Synthetic
gauaacuuguuagaaaug

SEQ ID NO: 133742 - RNA, 20 nt, Artificial Sequence
  Synthetic
gacaguguggaagggaaaug

SEQ ID NO: 133743 - RNA, 21 nt, Artificial Sequence
  Synthetic
ggacaguguggaagggaaaug

SEQ ID NO: 133744 - RNA, 18 nt, Artificial Sequence
  Synthetic
gagagauuaggggaaaug

SEQ ID NO: 133745 - RNA, 19 nt, Artificial Sequence
  Synthetic
ggagagauuaggggaaaug

SEQ ID NO: 133746 - RNA, 19 nt, Artificial Sequence
  Synthetic
guggucagacauggaaaug

SEQ ID NO: 133747 - RNA, 22 nt, Artificial Sequence
  Synthetic
gcaguggucagacauggaaaug

SEQ ID NO: 133748 - RNA, 19 nt, Artificial Sequence
  Synthetic
gcaacaaggaaaauaaaug

SEQ ID NO: 133749 - RNA, 19 nt, Artificial Sequence
  Synthetic
gaaauagcuaauguaaaug

SEQ ID NO: 133750 - RNA, 21 nt, Artificial Sequence
  Synthetic
gagaaauagcuaauguaaaug

SEQ ID NO: 133751 - RNA, 22 nt, Artificial Sequence
  Synthetic
ggagaaauagcuaauguaaaug

SEQ ID NO: 133752 - RNA, 20 nt, Artificial Sequence
  Synthetic
gauauaccuaauguuaaaug

SEQ ID NO: 133753 - RNA, 22 nt, Artificial Sequence
  Synthetic
gagauauaccuaauguuaaaug

SEQ ID NO: 133754 - RNA, 23 nt, Artificial Sequence
  Synthetic
ggagauauaccuaauguuaaaug

SEQ ID NO: 133755 - RNA, 18 nt, Artificial Sequence
  Synthetic
gacuagaaaucaacaaug

SEQ ID NO: 133756 - RNA, 20 nt, Artificial Sequence
  Synthetic
gagacuagaaaucaacaaug

SEQ ID NO: 133757 - RNA, 24 nt, Artificial Sequence
  Synthetic
gaaugagacuagaaaucaacaaug

SEQ ID NO: 133758 - RNA, 20 nt, Artificial Sequence
  Synthetic
guuacuuccaggauacaaug

SEQ ID NO: 133759 - RNA, 24 nt, Artificial Sequence
  Synthetic
guuaguuacuuccaggauacaaug

SEQ ID NO: 133760 - RNA, 20 nt, Artificial Sequence
  Synthetic
guaguaaaaaaaaagcaaug

SEQ ID NO: 133761 - RNA, 20 nt, Artificial Sequence
  Synthetic
gcugggggcaggaagcaaug

SEQ ID NO: 133762 - RNA, 21 nt, Artificial Sequence
  Synthetic
ggcugggggcaggaagcaaug

SEQ ID NO: 133763 - RNA, 22 nt, Artificial Sequence
  Synthetic
gggcugggggcaggaagcaaug

SEQ ID NO: 133764 - RNA, 23 nt, Artificial Sequence
  Synthetic
ggggcugggggcaggaagcaaug

SEQ ID NO: 133765 - RNA, 18 nt, Artificial Sequence
  Synthetic
gggagcugguuagcaaug

SEQ ID NO: 133766 - RNA, 23 nt, Artificial Sequence
  Synthetic
gcucaaaugucaccuucucaaug

SEQ ID NO: 133767 - RNA, 18 nt, Artificial Sequence
  Synthetic
gaguugcagaugucaaug

SEQ ID NO: 133768 - RNA, 19 nt, Artificial Sequence
  Synthetic
ggaguugcagaugucaaug

SEQ ID NO: 133769 - RNA, 20 nt, Artificial Sequence
  Synthetic
gggaguugcagaugucaaug

SEQ ID NO: 133770 - RNA, 20 nt, Artificial Sequence
  Synthetic
gauauaccuaauguucaaug

SEQ ID NO: 133771 - RNA, 22 nt, Artificial Sequence
  Synthetic
gagauauaccuaauguucaaug

SEQ ID NO: 133772 - RNA, 23 nt, Artificial Sequence
  Synthetic
ggagauauaccuaauguucaaug

SEQ ID NO: 133773 - RNA, 23 nt, Artificial Sequence
  Synthetic
gaaaauucuuuucuuuaagaaug

SEQ ID NO: 133774 - RNA, 19 nt, Artificial Sequence
  Synthetic
gugaaugaaugaaggaaug

SEQ ID NO: 133775 - RNA, 23 nt, Artificial Sequence
  Synthetic
guuuuacuuuuuguauaggaaug

SEQ ID NO: 133776 - RNA, 19 nt, Artificial Sequence
  Synthetic
gaaauuuaauaaaauaaug

SEQ ID NO: 133777 - RNA, 20 nt, Artificial Sequence
  Synthetic
ggaaauuuaauaaaauaaug

SEQ ID NO: 133778 - RNA, 18 nt, Artificial Sequence
  Synthetic
gcugucguuuugauaaug

SEQ ID NO: 133779 - RNA, 19 nt, Artificial Sequence
  Synthetic
ggcugucguuuugauaaug

SEQ ID NO: 133780 - RNA, 19 nt, Artificial Sequence
  Synthetic
gauuugcauuucucuaaug

SEQ ID NO: 133781 - RNA, 24 nt, Artificial Sequence
  Synthetic
guuuugauuugcauuucucuaaug

SEQ ID NO: 133782 - RNA, 20 nt, Artificial Sequence
  Synthetic
gaaaguaaagacugaacaug

SEQ ID NO: 133783 - RNA, 22 nt, Artificial Sequence
  Synthetic
gacuuuggaagugcguaacaug

SEQ ID NO: 133784 - RNA, 24 nt, Artificial Sequence
  Synthetic
gcgacuuuggaagugcguaacaug

SEQ ID NO: 133785 - RNA, 18 nt, Artificial Sequence
  Synthetic
gcugcauaguauuccaug

SEQ ID NO: 133786 - RNA, 19 nt, Artificial Sequence
  Synthetic
ggcugcauaguauuccaug

SEQ ID NO: 133787 - RNA, 19 nt, Artificial Sequence
  Synthetic
gcuuuucauccacagcaug

SEQ ID NO: 133788 - RNA, 18 nt, Artificial Sequence
  Synthetic
ggagguaacugaaucaug

SEQ ID NO: 133789 - RNA, 19 nt, Artificial Sequence
  Synthetic
gggagguaacugaaucaug

SEQ ID NO: 133790 - RNA, 21 nt, Artificial Sequence
  Synthetic
gugggagguaacugaaucaug

SEQ ID NO: 133791 - RNA, 18 nt, Artificial Sequence
  Synthetic
gaagccaacuugaucaug

SEQ ID NO: 133792 - RNA, 21 nt, Artificial Sequence
  Synthetic
gaugaagccaacuugaucaug

SEQ ID NO: 133793 - RNA, 22 nt, Artificial Sequence
  Synthetic
ggaugaagccaacuugaucaug

SEQ ID NO: 133794 - RNA, 23 nt, Artificial Sequence
  Synthetic
gggaugaagccaacuugaucaug

SEQ ID NO: 133795 - RNA, 20 nt, Artificial Sequence
  Synthetic
gucuccacccaaaucucaug

SEQ ID NO: 133796 - RNA, 22 nt, Artificial Sequence
  Synthetic
gugucuccacccaaaucucaug

SEQ ID NO: 133797 - RNA, 21 nt, Artificial Sequence
  Synthetic
gaccaaauauugacaaagaug

SEQ ID NO: 133798 - RNA, 23 nt, Artificial Sequence
  Synthetic
gauaugauuuacaagacaagaug

SEQ ID NO: 133799 - RNA, 19 nt, Artificial Sequence
  Synthetic
gagugcagugaagaagaug

SEQ ID NO: 133800 - RNA, 22 nt, Artificial Sequence
  Synthetic
gaaaugauaaguguuucagaug

SEQ ID NO: 133801 - RNA, 20 nt, Artificial Sequence
  Synthetic
gaaaucaaacucaggagaug

SEQ ID NO: 133802 - RNA, 24 nt, Artificial Sequence
  Synthetic
gacugaaaucaaacucaggagaug

SEQ ID NO: 133803 - RNA, 20 nt, Artificial Sequence
  Synthetic
gaaauuaaacucaggagaug

SEQ ID NO: 133804 - RNA, 18 nt, Artificial Sequence
  Synthetic
gggcuuaaaaccuagaug

SEQ ID NO: 133805 - RNA, 19 nt, Artificial Sequence
  Synthetic
ggggcuuaaaaccuagaug

SEQ ID NO: 133806 - RNA, 21 nt, Artificial Sequence
  Synthetic
guggggcuuaaaaccuagaug

SEQ ID NO: 133807 - RNA, 20 nt, Artificial Sequence
  Synthetic
gauuuaccuuaagcuagaug

SEQ ID NO: 133808 - RNA, 22 nt, Artificial Sequence
  Synthetic
gagauuuaccuuaagcuagaug

SEQ ID NO: 133809 - RNA, 23 nt, Artificial Sequence
  Synthetic
ggagauuuaccuuaagcuagaug

SEQ ID NO: 133810 - RNA, 24 nt, Artificial Sequence
  Synthetic
gggagauuuaccuuaagcuagaug

SEQ ID NO: 133811 - RNA, 18 nt, Artificial Sequence
  Synthetic
ggaaaaagagccaggaug

SEQ ID NO: 133812 - RNA, 18 nt, Artificial Sequence
  Synthetic
ggggccucucaggggaug

SEQ ID NO: 133813 - RNA, 22 nt, Artificial Sequence
  Synthetic
gaucuuucuucccuuggggaug

SEQ ID NO: 133814 - RNA, 23 nt, Artificial Sequence
  Synthetic
ggaucuuucuucccuuggggaug

SEQ ID NO: 133815 - RNA, 20 nt, Artificial Sequence
  Synthetic
gauucaauagguuugggaug

SEQ ID NO: 133816 - RNA, 20 nt, Artificial Sequence
  Synthetic
guuuuuaucaugaauggaug

SEQ ID NO: 133817 - RNA, 18 nt, Artificial Sequence
  Synthetic
gggcuuaaaaccuggaug

SEQ ID NO: 133818 - RNA, 19 nt, Artificial Sequence
  Synthetic
ggggcuuaaaaccuggaug

SEQ ID NO: 133819 - RNA, 20 nt, Artificial Sequence
  Synthetic
gggggcuuaaaaccuggaug

SEQ ID NO: 133820 - RNA, 18 nt, Artificial Sequence
  Synthetic
ggugccauccucaugaug

SEQ ID NO: 133821 - RNA, 19 nt, Artificial Sequence
  Synthetic
guccaggcacagccugaug

SEQ ID NO: 133822 - RNA, 24 nt, Artificial Sequence
  Synthetic
guuuugauuugcauuucucugaug

SEQ ID NO: 133823 - RNA, 20 nt, Artificial Sequence
  Synthetic
gucaccuggaaauuuugaug

SEQ ID NO: 133824 - RNA, 22 nt, Artificial Sequence
  Synthetic
gaacagccuuauuguuaauaug

SEQ ID NO: 133825 - RNA, 21 nt, Artificial Sequence
  Synthetic
gaaaaacuggauauccauaug

SEQ ID NO: 133826 - RNA, 22 nt, Artificial Sequence
  Synthetic
ggaaaaacuggauauccauaug

SEQ ID NO: 133827 - RNA, 24 nt, Artificial Sequence
  Synthetic
gcggaaaaacuggauauccauaug

SEQ ID NO: 133828 - RNA, 20 nt, Artificial Sequence
  Synthetic
gacucauauauauguauaug

SEQ ID NO: 133829 - RNA, 21 nt, Artificial Sequence
  Synthetic
gucuuuggcucuguuuauaug

SEQ ID NO: 133830 - RNA, 21 nt, Artificial Sequence
  Synthetic
gccagaacuuccaacacuaug

SEQ ID NO: 133831 - RNA, 22 nt, Artificial Sequence
  Synthetic
ggccagaacuuccaacacuaug

SEQ ID NO: 133832 - RNA, 18 nt, Artificial Sequence
  Synthetic
guguguguguuuucuaug

SEQ ID NO: 133833 - RNA, 22 nt, Artificial Sequence
  Synthetic
guauguguguguguuuucuaug

SEQ ID NO: 133834 - RNA, 24 nt, Artificial Sequence
  Synthetic
guguauguguguguguuuucuaug

SEQ ID NO: 133835 - RNA, 21 nt, Artificial Sequence
  Synthetic
gauuaucaggagaacaguaug

SEQ ID NO: 133836 - RNA, 21 nt, Artificial Sequence
  Synthetic
gauacugagguuuggaguaug

SEQ ID NO: 133837 - RNA, 23 nt, Artificial Sequence
  Synthetic
gugauacugagguuuggaguaug

SEQ ID NO: 133838 - RNA, 24 nt, Artificial Sequence
  Synthetic
ggugauacugagguuuggaguaug

SEQ ID NO: 133839 - RNA, 19 nt, Artificial Sequence
  Synthetic
gcaaaauauacaagguaug

SEQ ID NO: 133840 - RNA, 23 nt, Artificial Sequence
  Synthetic
guaugcaaaauauacaagguaug

SEQ ID NO: 133841 - RNA, 21 nt, Artificial Sequence
  Synthetic
gccaaaacuuccaauauuaug

SEQ ID NO: 133842 - RNA, 22 nt, Artificial Sequence
  Synthetic
ggccaaaacuuccaauauuaug

SEQ ID NO: 133843 - RNA, 24 nt, Artificial Sequence
  Synthetic
gaaaacaauaaauuccuacuuaug

SEQ ID NO: 133844 - RNA, 24 nt, Artificial Sequence
  Synthetic
gacucauaacauuuucaauuuaug

SEQ ID NO: 133845 - RNA, 24 nt, Artificial Sequence
  Synthetic
gccuuaugauuuuuugacuuuaug

SEQ ID NO: 133846 - RNA, 21 nt, Artificial Sequence
  Synthetic
gaaggauaguuuuguuuuaug

SEQ ID NO: 133847 - RNA, 22 nt, Artificial Sequence
  Synthetic
gucuucugaauacagcacacug

SEQ ID NO: 133848 - RNA, 23 nt, Artificial Sequence
  Synthetic
ggucuucugaauacagcacacug

SEQ ID NO: 133849 - RNA, 24 nt, Artificial Sequence
  Synthetic
gggucuucugaauacagcacacug

SEQ ID NO: 133850 - RNA, 24 nt, Artificial Sequence
  Synthetic
gaaaccagugccccacagacacug

SEQ ID NO: 133851 - RNA, 22 nt, Artificial Sequence
  Synthetic
guuuugaaauaugcauacacug

SEQ ID NO: 133852 - RNA, 23 nt, Artificial Sequence
  Synthetic
gaaaaugugguacauauacacug

SEQ ID NO: 133853 - RNA, 22 nt, Artificial Sequence
  Synthetic
guucugauauauguauacacug

SEQ ID NO: 133854 - RNA, 18 nt, Artificial Sequence
  Synthetic
gauccagcaaucccacug

SEQ ID NO: 133855 - RNA, 20 nt, Artificial Sequence
  Synthetic
gcuuguuaacacagagacug

SEQ ID NO: 133856 - RNA, 21 nt, Artificial Sequence
  Synthetic
ggcuuguuaacacagagacug

SEQ ID NO: 133857 - RNA, 24 nt, Artificial Sequence
  Synthetic
gaaggcuuguuaacacagagacug

SEQ ID NO: 133858 - RNA, 18 nt, Artificial Sequence
  Synthetic
ggaagaaacaguagacug

SEQ ID NO: 133859 - RNA, 19 nt, Artificial Sequence
  Synthetic
gggaagaaacaguagacug

SEQ ID NO: 133860 - RNA, 20 nt, Artificial Sequence
  Synthetic
gccacucuaucuuuagacug

SEQ ID NO: 133861 - RNA, 21 nt, Artificial Sequence
  Synthetic
gacuucuugauccaaggacug

SEQ ID NO: 133862 - RNA, 23 nt, Artificial Sequence
  Synthetic
gugacuucuugauccaaggacug

SEQ ID NO: 133863 - RNA, 18 nt, Artificial Sequence
  Synthetic
gagcuacccuguguacug

SEQ ID NO: 133864 - RNA, 19 nt, Artificial Sequence
  Synthetic
ggagcuacccuguguacug

SEQ ID NO: 133865 - RNA, 20 nt, Artificial Sequence
  Synthetic
gggagcuacccuguguacug

SEQ ID NO: 133866 - RNA, 22 nt, Artificial Sequence
  Synthetic
guccugcuuccuguacaaccug

SEQ ID NO: 133867 - RNA, 24 nt, Artificial Sequence
  Synthetic
guguccugcuuccuguacaaccug

SEQ ID NO: 133868 - RNA, 21 nt, Artificial Sequence
  Synthetic
guucuccuggauaauaaccug

SEQ ID NO: 133869 - RNA, 24 nt, Artificial Sequence
  Synthetic
gaaguucuccuggauaauaaccug

SEQ ID NO: 133870 - RNA, 20 nt, Artificial Sequence
  Synthetic
gaaauaauaauacauaccug

SEQ ID NO: 133871 - RNA, 22 nt, Artificial Sequence
  Synthetic
gccuaacauaugaucuacccug

SEQ ID NO: 133872 - RNA, 23 nt, Artificial Sequence
  Synthetic
ggccuaacauaugaucuacccug

SEQ ID NO: 133873 - RNA, 23 nt, Artificial Sequence
  Synthetic
guauuucuaguucuagaucccug

SEQ ID NO: 133874 - RNA, 24 nt, Artificial Sequence
  Synthetic
gguauuucuaguucuagaucccug

SEQ ID NO: 133875 - RNA, 22 nt, Artificial Sequence
  Synthetic
gcuaugcuuccuguagagccug

SEQ ID NO: 133876 - RNA, 19 nt, Artificial Sequence
  Synthetic
gagcaauacaaugagccug

SEQ ID NO: 133877 - RNA, 21 nt, Artificial Sequence
  Synthetic
gcucacugcaaccuccgccug

SEQ ID NO: 133878 - RNA, 22 nt, Artificial Sequence
  Synthetic
ggcucacugcaaccuccgccug

SEQ ID NO: 133879 - RNA, 23 nt, Artificial Sequence
  Synthetic
guaauucuaguucuagaugccug

SEQ ID NO: 133880 - RNA, 24 nt, Artificial Sequence
  Synthetic
gguaauucuaguucuagaugccug

SEQ ID NO: 133881 - RNA, 19 nt, Artificial Sequence
  Synthetic
guuauuugccuuuuuccug

SEQ ID NO: 133882 - RNA, 22 nt, Artificial Sequence
  Synthetic
gcacuuucggaugcugaggcug

SEQ ID NO: 133883 - RNA, 18 nt, Artificial Sequence
  Synthetic
gucuuggugcagcugcug

SEQ ID NO: 133884 - RNA, 21 nt, Artificial Sequence
  Synthetic
gauaagcuuuuucaugugcug

SEQ ID NO: 133885 - RNA, 22 nt, Artificial Sequence
  Synthetic
ggauaagcuuuuucaugugcug

SEQ ID NO: 133886 - RNA, 18 nt, Artificial Sequence
  Synthetic
guuuuuuugcauuugcug

SEQ ID NO: 133887 - RNA, 20 nt, Artificial Sequence
  Synthetic
gaagaaaaaaauaccaucug

SEQ ID NO: 133888 - RNA, 18 nt, Artificial Sequence
  Synthetic
gcuagauggucccaucug

SEQ ID NO: 133889 - RNA, 21 nt, Artificial Sequence
  Synthetic
gcagcuagauggucccaucug

SEQ ID NO: 133890 - RNA, 20 nt, Artificial Sequence
  Synthetic
gccccuguccgagagaucug

SEQ ID NO: 133891 - RNA, 20 nt, Artificial Sequence
  Synthetic
gaaaacauucuagagaucug

SEQ ID NO: 133892 - RNA, 23 nt, Artificial Sequence
  Synthetic
gaugaaaacauucuagagaucug

SEQ ID NO: 133893 - RNA, 23 nt, Artificial Sequence
  Synthetic
gaaccaaguuggaaaacacucug

SEQ ID NO: 133894 - RNA, 24 nt, Artificial Sequence
  Synthetic
ggaaccaaguuggaaaacacucug

SEQ ID NO: 133895 - RNA, 22 nt, Artificial Sequence
  Synthetic
gcccuagguagcgauuccucug

SEQ ID NO: 133896 - RNA, 23 nt, Artificial Sequence
  Synthetic
gacuuuuuaacaaagccagucug

SEQ ID NO: 133897 - RNA, 18 nt, Artificial Sequence
  Synthetic
gguccccaaauaugucug

SEQ ID NO: 133898 - RNA, 19 nt, Artificial Sequence
  Synthetic
gauauuagaucuuugucug

SEQ ID NO: 133899 - RNA, 20 nt, Artificial Sequence
  Synthetic
ggauauuagaucuuugucug

SEQ ID NO: 133900 - RNA, 19 nt, Artificial Sequence
  Synthetic
gagcaaauucuuucuucug

SEQ ID NO: 133901 - RNA, 20 nt, Artificial Sequence
  Synthetic
gacgguaguuuguauuucug

SEQ ID NO: 133902 - RNA, 21 nt, Artificial Sequence
  Synthetic
ggaggagggagagucaaagug

SEQ ID NO: 133903 - RNA, 22 nt, Artificial Sequence
  Synthetic
gggaggagggagagucaaagug

SEQ ID NO: 133904 - RNA, 24 nt, Artificial Sequence
  Synthetic
gugggaggagggagagucaaagug

SEQ ID NO: 133905 - RNA, 18 nt, Artificial Sequence
  Synthetic
gagaaaacaaggaaagug

SEQ ID NO: 133906 - RNA, 19 nt, Artificial Sequence
  Synthetic
gaagaggaaaaugcaagug

SEQ ID NO: 133907 - RNA, 18 nt, Artificial Sequence
  Synthetic
ggggcuuaacgggaagug

SEQ ID NO: 133908 - RNA, 20 nt, Artificial Sequence
  Synthetic
guggggcuuaacgggaagug

SEQ ID NO: 133909 - RNA, 21 nt, Artificial Sequence
  Synthetic
gguggggcuuaacgggaagug

SEQ ID NO: 133910 - RNA, 23 nt, Artificial Sequence
  Synthetic
gagguggggcuuaacgggaagug

SEQ ID NO: 133911 - RNA, 24 nt, Artificial Sequence
  Synthetic
ggagguggggcuuaacgggaagug

SEQ ID NO: 133912 - RNA, 21 nt, Artificial Sequence
  Synthetic
gucauugguucuguuuaagug

SEQ ID NO: 133913 - RNA, 23 nt, Artificial Sequence
  Synthetic
gucacccaggcuggaaugcagug

SEQ ID NO: 133914 - RNA, 20 nt, Artificial Sequence
  Synthetic
guacacaugcgcacagagug

SEQ ID NO: 133915 - RNA, 22 nt, Artificial Sequence
  Synthetic
guguacacaugcgcacagagug

SEQ ID NO: 133916 - RNA, 19 nt, Artificial Sequence
  Synthetic
gaaaacucagaauggagug

SEQ ID NO: 133917 - RNA, 20 nt, Artificial Sequence
  Synthetic
gacauuuaauucaaugagug

SEQ ID NO: 133918 - RNA, 23 nt, Artificial Sequence
  Synthetic
guacaaugcaucuuauuaaggug

SEQ ID NO: 133919 - RNA, 24 nt, Artificial Sequence
  Synthetic
gguacaaugcaucuuauuaaggug

SEQ ID NO: 133920 - RNA, 22 nt, Artificial Sequence
  Synthetic
gaaaagauaauugcuugaggug

SEQ ID NO: 133921 - RNA, 22 nt, Artificial Sequence
  Synthetic
gcaaugguaaauguuugaggug

SEQ ID NO: 133922 - RNA, 23 nt, Artificial Sequence
  Synthetic
gccacugcacuccagccagggug

SEQ ID NO: 133923 - RNA, 20 nt, Artificial Sequence
  Synthetic
guuuuuagcaugaaggggug

SEQ ID NO: 133924 - RNA, 22 nt, Artificial Sequence
  Synthetic
gaguuuuuagcaugaaggggug

SEQ ID NO: 133925 - RNA, 24 nt, Artificial Sequence
  Synthetic
gagaguuuuuagcaugaaggggug

SEQ ID NO: 133926 - RNA, 18 nt, Artificial Sequence
  Synthetic
ggcaacugccacguggug

SEQ ID NO: 133927 - RNA, 23 nt, Artificial Sequence
  Synthetic
gcuuuggcaacugccacguggug

SEQ ID NO: 133928 - RNA, 20 nt, Artificial Sequence
  Synthetic
gaaagaaggaaaacaaugug

SEQ ID NO: 133929 - RNA, 18 nt, Artificial Sequence
  Synthetic
guaccugaaagugaugug

SEQ ID NO: 133930 - RNA, 20 nt, Artificial Sequence
  Synthetic
guguaccugaaagugaugug

SEQ ID NO: 133931 - RNA, 21 nt, Artificial Sequence
  Synthetic
gguguaccugaaagugaugug

SEQ ID NO: 133932 - RNA, 19 nt, Artificial Sequence
  Synthetic
gcaggaagaagaauaugug

SEQ ID NO: 133933 - RNA, 21 nt, Artificial Sequence
  Synthetic
gccaaguucaugaauuaugug

SEQ ID NO: 133934 - RNA, 24 nt, Artificial Sequence
  Synthetic
gaagccaaguucaugaauuaugug

SEQ ID NO: 133935 - RNA, 20 nt, Artificial Sequence
  Synthetic
gaugguuaccagaggcugug

SEQ ID NO: 133936 - RNA, 21 nt, Artificial Sequence
  Synthetic
ggaugguuaccagaggcugug

SEQ ID NO: 133937 - RNA, 24 nt, Artificial Sequence
  Synthetic
gaaggaugguuaccagaggcugug

SEQ ID NO: 133938 - RNA, 18 nt, Artificial Sequence
  Synthetic
guguauacuacucgugug

SEQ ID NO: 133939 - RNA, 21 nt, Artificial Sequence
  Synthetic
gcaguguauacuacucgugug

SEQ ID NO: 133940 - RNA, 23 nt, Artificial Sequence
  Synthetic
gugcaguguauacuacucgugug

SEQ ID NO: 133941 - RNA, 24 nt, Artificial Sequence
  Synthetic
ggugcaguguauacuacucgugug

SEQ ID NO: 133942 - RNA, 19 nt, Artificial Sequence
  Synthetic
guaaaaggaaaaaaaauug

SEQ ID NO: 133943 - RNA, 18 nt, Artificial Sequence
  Synthetic
ggucacaugaacaaauug

SEQ ID NO: 133944 - RNA, 20 nt, Artificial Sequence
  Synthetic
gaggucacaugaacaaauug

SEQ ID NO: 133945 - RNA, 24 nt, Artificial Sequence
  Synthetic
gauaaauguccaagagugcaauug

SEQ ID NO: 133946 - RNA, 20 nt, Artificial Sequence
  Synthetic
gaagucuccaauaauaauug

SEQ ID NO: 133947 - RNA, 24 nt, Artificial Sequence
  Synthetic
guuugaagucuccaauaauaauug

SEQ ID NO: 133948 - RNA, 19 nt, Artificial Sequence
  Synthetic
gaacacuuagaggacauug

SEQ ID NO: 133949 - RNA, 24 nt, Artificial Sequence
  Synthetic
guuuuggccccaugcuggacauug

SEQ ID NO: 133950 - RNA, 18 nt, Artificial Sequence
  Synthetic
gggcuauccuaugcauug

SEQ ID NO: 133951 - RNA, 20 nt, Artificial Sequence
  Synthetic
gagggcuauccuaugcauug

SEQ ID NO: 133952 - RNA, 21 nt, Artificial Sequence
  Synthetic
ggagggcuauccuaugcauug

SEQ ID NO: 133953 - RNA, 23 nt, Artificial Sequence
  Synthetic
guggagggcuauccuaugcauug

SEQ ID NO: 133954 - RNA, 21 nt, Artificial Sequence
  Synthetic
gagcagcuauccucugcauug

SEQ ID NO: 133955 - RNA, 23 nt, Artificial Sequence
  Synthetic
gugagcagcuauccucugcauug

SEQ ID NO: 133956 - RNA, 19 nt, Artificial Sequence
  Synthetic
guggcuguccugugcauug

SEQ ID NO: 133957 - RNA, 21 nt, Artificial Sequence
  Synthetic
gaguggcuguccugugcauug

SEQ ID NO: 133958 - RNA, 23 nt, Artificial Sequence
  Synthetic
gugaguggcuguccugugcauug

SEQ ID NO: 133959 - RNA, 23 nt, Artificial Sequence
  Synthetic
guauaugcccaauaaugggauug

SEQ ID NO: 133960 - RNA, 24 nt, Artificial Sequence
  Synthetic
gguauaugcccaauaaugggauug

SEQ ID NO: 133961 - RNA, 23 nt, Artificial Sequence
  Synthetic
guauauaaccaguaaugggauug

SEQ ID NO: 133962 - RNA, 24 nt, Artificial Sequence
  Synthetic
gguauauaaccaguaaugggauug

SEQ ID NO: 133963 - RNA, 24 nt, Artificial Sequence
  Synthetic
gauauauacucaguaaugggauug

SEQ ID NO: 133964 - RNA, 24 nt, Artificial Sequence
  Synthetic
gauaucuacucaguaaugggauug

SEQ ID NO: 133965 - RNA, 24 nt, Artificial Sequence
  Synthetic
gauauauacccggaagugggauug

SEQ ID NO: 133966 - RNA, 24 nt, Artificial Sequence
  Synthetic
gauaaaugcccaguagugggauug

SEQ ID NO: 133967 - RNA, 19 nt, Artificial Sequence
  Synthetic
guugaaaauucccuuauug

SEQ ID NO: 133968 - RNA, 20 nt, Artificial Sequence
  Synthetic
gguugaaaauucccuuauug

SEQ ID NO: 133969 - RNA, 21 nt, Artificial Sequence
  Synthetic
ggguugaaaauucccuuauug

SEQ ID NO: 133970 - RNA, 18 nt, Artificial Sequence
  Synthetic
gagcagcagaaucacuug

SEQ ID NO: 133971 - RNA, 19 nt, Artificial Sequence
  Synthetic
ggagcagcagaaucacuug

SEQ ID NO: 133972 - RNA, 20 nt, Artificial Sequence
  Synthetic
gggagcagcagaaucacuug

SEQ ID NO: 133973 - RNA, 18 nt, Artificial Sequence
  Synthetic
gaacuuccuagagacuug

SEQ ID NO: 133974 - RNA, 19 nt, Artificial Sequence
  Synthetic
ggaacuuccuagagacuug

SEQ ID NO: 133975 - RNA, 23 nt, Artificial Sequence
  Synthetic
guuuggaacuuccuagagacuug

SEQ ID NO: 133976 - RNA, 24 nt, Artificial Sequence
  Synthetic
gauacaaugggcuuuggagacuug

SEQ ID NO: 133977 - RNA, 23 nt, Artificial Sequence
  Synthetic
guacuucugguucuagauccuug

SEQ ID NO: 133978 - RNA, 24 nt, Artificial Sequence
  Synthetic
gguacuucugguucuagauccuug

SEQ ID NO: 133979 - RNA, 23 nt, Artificial Sequence
  Synthetic
guauuucugguuguagauccuug

SEQ ID NO: 133980 - RNA, 24 nt, Artificial Sequence
  Synthetic
gguauuucugguuguagauccuug

SEQ ID NO: 133981 - RNA, 22 nt, Artificial Sequence
  Synthetic
gcacccacucucuucuagcuug

SEQ ID NO: 133982 - RNA, 23 nt, Artificial Sequence
  Synthetic
ggcacccacucucuucuagcuug

SEQ ID NO: 133983 - RNA, 22 nt, Artificial Sequence
  Synthetic
gcccccacucucuucuggcuug

SEQ ID NO: 133984 - RNA, 23 nt, Artificial Sequence
  Synthetic
ggcccccacucucuucuggcuug

SEQ ID NO: 133985 - RNA, 22 nt, Artificial Sequence
  Synthetic
gaacauaaagaauaaaugcuug

SEQ ID NO: 133986 - RNA, 23 nt, Artificial Sequence
  Synthetic
ggaacauaaagaauaaaugcuug

SEQ ID NO: 133987 - RNA, 20 nt, Artificial Sequence
  Synthetic
gauauuugaucagggucuug

SEQ ID NO: 133988 - RNA, 23 nt, Artificial Sequence
  Synthetic
gaugauauuugaucagggucuug

SEQ ID NO: 133989 - RNA, 19 nt, Artificial Sequence
  Synthetic
gcacagagacucugucuug

SEQ ID NO: 133990 - RNA, 19 nt, Artificial Sequence
  Synthetic
guucuucuuuggcuucuug

SEQ ID NO: 133991 - RNA, 18 nt, Artificial Sequence
  Synthetic
gaaaaaaaaaauuucuug

SEQ ID NO: 133992 - RNA, 19 nt, Artificial Sequence
  Synthetic
ggaaaaaaaaaauuucuug

SEQ ID NO: 133993 - RNA, 20 nt, Artificial Sequence
  Synthetic
gggaaaaaaaaaauuucuug

SEQ ID NO: 133994 - RNA, 22 nt, Artificial Sequence
  Synthetic
gcuacucaggaggcugagguug

SEQ ID NO: 133995 - RNA, 24 nt, Artificial Sequence
  Synthetic
gauauauacccaggagugagguug

SEQ ID NO: 133996 - RNA, 22 nt, Artificial Sequence
  Synthetic
gaguuuuuagcaugaaggguug

SEQ ID NO: 133997 - RNA, 24 nt, Artificial Sequence
  Synthetic
gagaguuuuuagcaugaaggguug

SEQ ID NO: 133998 - RNA, 24 nt, Artificial Sequence
  Synthetic
gcuuaaaaccuagaugacggguug

SEQ ID NO: 133999 - RNA, 24 nt, Artificial Sequence
  Synthetic
gcuuaaaaccuggauguuggguug

SEQ ID NO: 134000 - RNA, 22 nt, Artificial Sequence
  Synthetic
gucaagcugguugauaguguug

SEQ ID NO: 134001 - RNA, 23 nt, Artificial Sequence
  Synthetic
ggucaagcugguugauaguguug

SEQ ID NO: 134002 - RNA, 18 nt, Artificial Sequence
  Synthetic
gugccuguguguguguug

SEQ ID NO: 134003 - RNA, 22 nt, Artificial Sequence
  Synthetic
guaugugccuguguguguguug

SEQ ID NO: 134004 - RNA, 24 nt, Artificial Sequence
  Synthetic
guguaugugccuguguguguguug

SEQ ID NO: 134005 - RNA, 19 nt, Artificial Sequence
  Synthetic
gagagugaggaaauuguug

SEQ ID NO: 134006 - RNA, 20 nt, Artificial Sequence
  Synthetic
ggagagugaggaaauuguug

SEQ ID NO: 134007 - RNA, 22 nt, Artificial Sequence
  Synthetic
gaucuuguauccuacaaauuug

SEQ ID NO: 134008 - RNA, 18 nt, Artificial Sequence
  Synthetic
gucaaaucaugcaauuug

SEQ ID NO: 134009 - RNA, 18 nt, Artificial Sequence
  Synthetic
gguuucaguaagcauuug

SEQ ID NO: 134010 - RNA, 21 nt, Artificial Sequence
  Synthetic
gcuuauaugcauauagauuug

SEQ ID NO: 134011 - RNA, 19 nt, Artificial Sequence
  Synthetic
gucacucuacaaauauuug

SEQ ID NO: 134012 - RNA, 18 nt, Artificial Sequence
  Synthetic
gcauucauuaaauauuug

SEQ ID NO: 134013 - RNA, 19 nt, Artificial Sequence
  Synthetic
ggcauucauuaaauauuug

SEQ ID NO: 134014 - RNA, 22 nt, Artificial Sequence
  Synthetic
guaggcauucauuaaauauuug

SEQ ID NO: 134015 - RNA, 23 nt, Artificial Sequence
  Synthetic
gcuaggcuaaaccaugauauuug

SEQ ID NO: 134016 - RNA, 24 nt, Artificial Sequence
  Synthetic
guacaucguaggaguauauauuug

SEQ ID NO: 134017 - RNA, 19 nt, Artificial Sequence
  Synthetic
gcauguucucacuuauuug

SEQ ID NO: 134018 - RNA, 20 nt, Artificial Sequence
  Synthetic
gcucugcccuuguggcuuug

SEQ ID NO: 134019 - RNA, 23 nt, Artificial Sequence
  Synthetic
gcagcucugcccuuguggcuuug

SEQ ID NO: 134020 - RNA, 24 nt, Artificial Sequence
  Synthetic
ggcagcucugcccuuguggcuuug

SEQ ID NO: 134021 - RNA, 19 nt, Artificial Sequence
  Synthetic
gaaauaccuuaacuguuug

SEQ ID NO: 134022 - RNA, 18 nt, Artificial Sequence
  Synthetic
guguuugauaaacuuuug

SEQ ID NO: 134023 - RNA, 19 nt, Artificial Sequence
  Synthetic
gguguuugauaaacuuuug

SEQ ID NO: 134024 - RNA, 20 nt, Artificial Sequence
  Synthetic
gaagucuccaacuauuuuug

SEQ ID NO: 134025 - RNA, 23 nt, Artificial Sequence
  Synthetic
guugaagucuccaacuauuuuug

SEQ ID NO: 134026 - RNA, 23 nt, Artificial Sequence
  Synthetic
gaaaauuauuuacccaguuuuug

SEQ ID NO: 134027 - RNA, 24 nt, Artificial Sequence
  Synthetic
ggaaaauuauuuacccaguuuuug

SEQ ID NO: 134028 - RNA, 22 nt, Artificial Sequence
  Synthetic
guuauuuuugcuuuuguuuuug

SEQ ID NO: 134029 - RNA, 23 nt, Artificial Sequence
  Synthetic
gguuauuuuugcuuuuguuuuug

SEQ ID NO: 134030 - RNA, 18 nt, Artificial Sequence
  Synthetic
ggcuucauugauuuuuug

SEQ ID NO: 134031 - RNA, 24 nt, Artificial Sequence
  Synthetic
gccccuggcuucauugauuuuuug

SEQ ID NO: 134032 - RNA, 19 nt, Artificial Sequence
  Synthetic
guagauuuaagaaaaaaau

SEQ ID NO: 134033 - RNA, 20 nt, Artificial Sequence
  Synthetic
gaaaauauuuagaaaaaaau

SEQ ID NO: 134034 - RNA, 18 nt, Artificial Sequence
  Synthetic
gucauuguauuaaaaaau

SEQ ID NO: 134035 - RNA, 20 nt, Artificial Sequence
  Synthetic
gauaaguaaaauguaaaaau

SEQ ID NO: 134036 - RNA, 21 nt, Artificial Sequence
  Synthetic
gaggaagguauaggacaaaau

SEQ ID NO: 134037 - RNA, 24 nt, Artificial Sequence
  Synthetic
gaagaggaagguauaggacaaaau

SEQ ID NO: 134038 - RNA, 19 nt, Artificial Sequence
  Synthetic
guagaacuucuuucaaaau

SEQ ID NO: 134039 - RNA, 22 nt, Artificial Sequence
  Synthetic
gaaucuugaagaaauagaaaau

SEQ ID NO: 134040 - RNA, 18 nt, Artificial Sequence
  Synthetic
guacaaaaaagggaaaau

SEQ ID NO: 134041 - RNA, 19 nt, Artificial Sequence
  Synthetic
gguacaaaaaagggaaaau

SEQ ID NO: 134042 - RNA, 21 nt, Artificial Sequence
  Synthetic
gaucauggcuaaaaauaaaau

SEQ ID NO: 134043 - RNA, 19 nt, Artificial Sequence
  Synthetic
guuaucucaucuauaaaau

SEQ ID NO: 134044 - RNA, 20 nt, Artificial Sequence
  Synthetic
gguuaucucaucuauaaaau

SEQ ID NO: 134045 - RNA, 19 nt, Artificial Sequence
  Synthetic
guuuucucgucuauaaaau

SEQ ID NO: 134046 - RNA, 18 nt, Artificial Sequence
  Synthetic
guuuucugucucuaaaau

SEQ ID NO: 134047 - RNA, 19 nt, Artificial Sequence
  Synthetic
gguuuucugucucuaaaau

SEQ ID NO: 134048 - RNA, 24 nt, Artificial Sequence
  Synthetic
gucucgguuuucugucucuaaaau

SEQ ID NO: 134049 - RNA, 18 nt, Artificial Sequence
  Synthetic
gauuuauauuucuaaaau

SEQ ID NO: 134050 - RNA, 20 nt, Artificial Sequence
  Synthetic
gaaaauaaagacuuuaaaau

SEQ ID NO: 134051 - RNA, 20 nt, Artificial Sequence
  Synthetic
gcaauauuaaguuuacaaau

SEQ ID NO: 134052 - RNA, 22 nt, Artificial Sequence
  Synthetic
gacuuaaagaaaacugccaaau

SEQ ID NO: 134053 - RNA, 24 nt, Artificial Sequence
  Synthetic
gccaaaaaugcacaaaagucaaau

SEQ ID NO: 134054 - RNA, 21 nt, Artificial Sequence
  Synthetic
gcucccucuacugauucaaau

SEQ ID NO: 134055 - RNA, 20 nt, Artificial Sequence
  Synthetic
guauauauaaauacagaaau

SEQ ID NO: 134056 - RNA, 19 nt, Artificial Sequence
  Synthetic
guuaccagagaucagaaau

SEQ ID NO: 134057 - RNA, 20 nt, Artificial Sequence
  Synthetic
gguuaccagagaucagaaau

SEQ ID NO: 134058 - RNA, 22 nt, Artificial Sequence
  Synthetic
gugguuaccagagaucagaaau

SEQ ID NO: 134059 - RNA, 23 nt, Artificial Sequence
  Synthetic
ggugguuaccagagaucagaaau

SEQ ID NO: 134060 - RNA, 19 nt, Artificial Sequence
  Synthetic
gaaaacuugaaagagaaau

SEQ ID NO: 134061 - RNA, 18 nt, Artificial Sequence
  Synthetic
gaaaacaaauauagaaau

SEQ ID NO: 134062 - RNA, 19 nt, Artificial Sequence
  Synthetic
ggaaaacaaauauagaaau

SEQ ID NO: 134063 - RNA, 19 nt, Artificial Sequence
  Synthetic
guaugagaaaaauggaaau

SEQ ID NO: 134064 - RNA, 18 nt, Artificial Sequence
  Synthetic
gcacauuuaaaaauaaau

SEQ ID NO: 134065 - RNA, 22 nt, Artificial Sequence
  Synthetic
gauuuuagauaaggaaauaaau

SEQ ID NO: 134066 - RNA, 19 nt, Artificial Sequence
  Synthetic
gaaagaaaauuauauaaau

SEQ ID NO: 134067 - RNA, 23 nt, Artificial Sequence
  Synthetic
gccuugccacagaccugcuaaau

SEQ ID NO: 134068 - RNA, 24 nt, Artificial Sequence
  Synthetic
ggccuugccacagaccugcuaaau

SEQ ID NO: 134069 - RNA, 19 nt, Artificial Sequence
  Synthetic
guuuccuccuuugcuaaau

SEQ ID NO: 134070 - RNA, 23 nt, Artificial Sequence
  Synthetic
gaaauucugcaauaugaaacaau

SEQ ID NO: 134071 - RNA, 24 nt, Artificial Sequence
  Synthetic
ggaaauucugcaauaugaaacaau

SEQ ID NO: 134072 - RNA, 19 nt, Artificial Sequence
  Synthetic
gcagauuacccuccacaau

SEQ ID NO: 134073 - RNA, 24 nt, Artificial Sequence
  Synthetic
guaaagcagauuacccuccacaau

SEQ ID NO: 134074 - RNA, 18 nt, Artificial Sequence
  Synthetic
gcauguugaaaugacaau

SEQ ID NO: 134075 - RNA, 22 nt, Artificial Sequence
  Synthetic
gauugcauguugaaaugacaau

SEQ ID NO: 134076 - RNA, 23 nt, Artificial Sequence
  Synthetic
gaaaucuuaccauaugcuacaau

SEQ ID NO: 134077 - RNA, 24 nt, Artificial Sequence
  Synthetic
ggaaaucuuaccauaugcuacaau

SEQ ID NO: 134078 - RNA, 20 nt, Artificial Sequence
  Synthetic
guuaaaaaaaugaaaagaau

SEQ ID NO: 134079 - RNA, 20 nt, Artificial Sequence
  Synthetic
guuauuuuuaaagaaagaau

SEQ ID NO: 134080 - RNA, 20 nt, Artificial Sequence
  Synthetic
guuauguauuagacaagaau

SEQ ID NO: 134081 - RNA, 23 nt, Artificial Sequence
  Synthetic
gaaaauauauuagauggcagaau

SEQ ID NO: 134082 - RNA, 24 nt, Artificial Sequence
  Synthetic
ggaaaauauauuagauggcagaau

SEQ ID NO: 134083 - RNA, 19 nt, Artificial Sequence
  Synthetic
gcaaagaaaaaaagagaau

SEQ ID NO: 134084 - RNA, 21 nt, Artificial Sequence
  Synthetic
gagcaaagaaaaaaagagaau

SEQ ID NO: 134085 - RNA, 23 nt, Artificial Sequence
  Synthetic
gagagcaaagaaaaaaagagaau

SEQ ID NO: 134086 - RNA, 18 nt, Artificial Sequence
  Synthetic
ggaacuugcuuuacgaau

SEQ ID NO: 134087 - RNA, 20 nt, Artificial Sequence
  Synthetic
guuuggaacaacuuaggaau

SEQ ID NO: 134088 - RNA, 24 nt, Artificial Sequence
  Synthetic
guauguuuggaacaacuuaggaau

SEQ ID NO: 134089 - RNA, 20 nt, Artificial Sequence
  Synthetic
gaaaagauuuguuauggaau

SEQ ID NO: 134090 - RNA, 18 nt, Artificial Sequence
  Synthetic
guauacaaugugaugaau

SEQ ID NO: 134091 - RNA, 21 nt, Artificial Sequence
  Synthetic
guucaauucccaccuaugaau

SEQ ID NO: 134092 - RNA, 20 nt, Artificial Sequence
  Synthetic
guucuccauauuuccugaau

SEQ ID NO: 134093 - RNA, 22 nt, Artificial Sequence
  Synthetic
guguucuccauauuuccugaau

SEQ ID NO: 134094 - RNA, 23 nt, Artificial Sequence
  Synthetic
gguguucuccauauuuccugaau

SEQ ID NO: 134095 - RNA, 19 nt, Artificial Sequence
  Synthetic
guuucuccacuccuugaau

SEQ ID NO: 134096 - RNA, 23 nt, Artificial Sequence
  Synthetic
gucuguuucuccacuccuugaau

SEQ ID NO: 134097 - RNA, 20 nt, Artificial Sequence
  Synthetic
gaaucaacaauaaaaauaau

SEQ ID NO: 134098 - RNA, 18 nt, Artificial Sequence
  Synthetic
gggccuuugagaaauaau

SEQ ID NO: 134099 - RNA, 19 nt, Artificial Sequence
  Synthetic
ggggccuuugagaaauaau

SEQ ID NO: 134100 - RNA, 21 nt, Artificial Sequence
  Synthetic
guggggccuuugagaaauaau

SEQ ID NO: 134101 - RNA, 22 nt, Artificial Sequence
  Synthetic
gguggggccuuugagaaauaau

SEQ ID NO: 134102 - RNA, 24 nt, Artificial Sequence
  Synthetic
gagguggggccuuugagaaauaau

SEQ ID NO: 134103 - RNA, 19 nt, Artificial Sequence
  Synthetic
gccauuuuauauaaauaau

SEQ ID NO: 134104 - RNA, 23 nt, Artificial Sequence
  Synthetic
gaaauucugucauuuggaauaau

SEQ ID NO: 134105 - RNA, 24 nt, Artificial Sequence
  Synthetic
ggaaauucugucauuuggaauaau

SEQ ID NO: 134106 - RNA, 19 nt, Artificial Sequence
  Synthetic
gauucuuuuaaaacauaau

SEQ ID NO: 134107 - RNA, 22 nt, Artificial Sequence
  Synthetic
gccuacuuaacgugaagauaau

SEQ ID NO: 134108 - RNA, 19 nt, Artificial Sequence
  Synthetic
gcauguucucacugauaau

SEQ ID NO: 134109 - RNA, 18 nt, Artificial Sequence
  Synthetic
gaaaucucugccuauaau

SEQ ID NO: 134110 - RNA, 18 nt, Artificial Sequence
  Synthetic
gcuuuguuuuguuauaau

SEQ ID NO: 134111 - RNA, 22 nt, Artificial Sequence
  Synthetic
gagaaaaauaaugguuacuaau

SEQ ID NO: 134112 - RNA, 20 nt, Artificial Sequence
  Synthetic
gucauuaaauaaaucuuaau

SEQ ID NO: 134113 - RNA, 20 nt, Artificial Sequence
  Synthetic
gacauggggucauaaaacau

SEQ ID NO: 134114 - RNA, 21 nt, Artificial Sequence
  Synthetic
gcauagugcugugacaaacau

SEQ ID NO: 134115 - RNA, 23 nt, Artificial Sequence
  Synthetic
gugcauagugcugugacaaacau

SEQ ID NO: 134116 - RNA, 24 nt, Artificial Sequence
  Synthetic
gcaaaaaaaugucaguauaaacau

SEQ ID NO: 134117 - RNA, 21 nt, Artificial Sequence
  Synthetic
gagcacucacacagacaacau

SEQ ID NO: 134118 - RNA, 23 nt, Artificial Sequence
  Synthetic
gugagcacucacacagacaacau

SEQ ID NO: 134119 - RNA, 19 nt, Artificial Sequence
  Synthetic
gagcuccaucuugcaacau

SEQ ID NO: 134120 - RNA, 19 nt, Artificial Sequence
  Synthetic
gcuaacuguccaucaacau

SEQ ID NO: 134121 - RNA, 23 nt, Artificial Sequence
  Synthetic
gcaagcuaacuguccaucaacau

SEQ ID NO: 134122 - RNA, 18 nt, Artificial Sequence
  Synthetic
gagaaguaaaaagaacau

SEQ ID NO: 134123 - RNA, 19 nt, Artificial Sequence
  Synthetic
guuuuggaauuuggaacau

SEQ ID NO: 134124 - RNA, 18 nt, Artificial Sequence
  Synthetic
gucccucccacaacacau

SEQ ID NO: 134125 - RNA, 19 nt, Artificial Sequence
  Synthetic
ggucccucccacaacacau

SEQ ID NO: 134126 - RNA, 20 nt, Artificial Sequence
  Synthetic
gggucccucccacaacacau

SEQ ID NO: 134127 - RNA, 24 nt, Artificial Sequence
  Synthetic
gccuacaauguguaauaaucacau

SEQ ID NO: 134128 - RNA, 19 nt, Artificial Sequence
  Synthetic
gucuaucauugucggacau

SEQ ID NO: 134129 - RNA, 19 nt, Artificial Sequence
  Synthetic
gucuaucauugauggacau

SEQ ID NO: 134130 - RNA, 20 nt, Artificial Sequence
  Synthetic
ggucuaucauugauggacau

SEQ ID NO: 134131 - RNA, 19 nt, Artificial Sequence
  Synthetic
gucuauuauugauggacau

SEQ ID NO: 134132 - RNA, 19 nt, Artificial Sequence
  Synthetic
gucuaucacuguuggacau

SEQ ID NO: 134133 - RNA, 20 nt, Artificial Sequence
  Synthetic
guauauauacaggcauacau

SEQ ID NO: 134134 - RNA, 18 nt, Artificial Sequence
  Synthetic
gaaguccauaguuuacau

SEQ ID NO: 134135 - RNA, 19 nt, Artificial Sequence
  Synthetic
gauauuaccucacaaccau

SEQ ID NO: 134136 - RNA, 21 nt, Artificial Sequence
  Synthetic
gagauauuaccucacaaccau

SEQ ID NO: 134137 - RNA, 22 nt, Artificial Sequence
  Synthetic
gcacagcaaaagaaacuaccau

SEQ ID NO: 134138 - RNA, 22 nt, Artificial Sequence
  Synthetic
gcacagcaaaagaaaguaccau

SEQ ID NO: 134139 - RNA, 19 nt, Artificial Sequence
  Synthetic
gugguuagauuaggcccau

SEQ ID NO: 134140 - RNA, 18 nt, Artificial Sequence
  Synthetic
gaucgagaaagaggccau

SEQ ID NO: 134141 - RNA, 21 nt, Artificial Sequence
  Synthetic
gaagaucgagaaagaggccau

SEQ ID NO: 134142 - RNA, 19 nt, Artificial Sequence
  Synthetic
guucuuguuuuuuuuccau

SEQ ID NO: 134143 - RNA, 19 nt, Artificial Sequence
  Synthetic
gucuaucauugaugagcau

SEQ ID NO: 134144 - RNA, 21 nt, Artificial Sequence
  Synthetic
gcuaugaggaugcaaaggcau

SEQ ID NO: 134145 - RNA, 23 nt, Artificial Sequence
  Synthetic
gauuugggacauggccagggcau

SEQ ID NO: 134146 - RNA, 20 nt, Artificial Sequence
  Synthetic
gcaagagagagagagggcau

SEQ ID NO: 134147 - RNA, 22 nt, Artificial Sequence
  Synthetic
gagcaagagagagagagggcau

SEQ ID NO: 134148 - RNA, 19 nt, Artificial Sequence
  Synthetic
guccaucacugaugggcau

SEQ ID NO: 134149 - RNA, 22 nt, Artificial Sequence
  Synthetic
gcuacuugggaggcuguggcau

SEQ ID NO: 134150 - RNA, 23 nt, Artificial Sequence
  Synthetic
gacuuuucagcucccacaaucau

SEQ ID NO: 134151 - RNA, 18 nt, Artificial Sequence
  Synthetic
gggagguaacugaaucau

SEQ ID NO: 134152 - RNA, 20 nt, Artificial Sequence
  Synthetic
gugggagguaacugaaucau

SEQ ID NO: 134153 - RNA, 18 nt, Artificial Sequence
  Synthetic
gagaggugacuggaucau

SEQ ID NO: 134154 - RNA, 20 nt, Artificial Sequence
  Synthetic
gugagaggugacuggaucau

SEQ ID NO: 134155 - RNA, 21 nt, Artificial Sequence
  Synthetic
ggugagaggugacuggaucau

SEQ ID NO: 134156 - RNA, 18 nt, Artificial Sequence
  Synthetic
gggaggugauuggaucau

SEQ ID NO: 134157 - RNA, 20 nt, Artificial Sequence
  Synthetic
gugggaggugauuggaucau

SEQ ID NO: 134158 - RNA, 21 nt, Artificial Sequence
  Synthetic
ggugggaggugauuggaucau

SEQ ID NO: 134159 - RNA, 18 nt, Artificial Sequence
  Synthetic
gaaaucacccacuaucau

SEQ ID NO: 134160 - RNA, 20 nt, Artificial Sequence
  Synthetic
gugaaaucacccacuaucau

SEQ ID NO: 134161 - RNA, 22 nt, Artificial Sequence
  Synthetic
gcacagcaaaagacccuaucau

SEQ ID NO: 134162 - RNA, 24 nt, Artificial Sequence
  Synthetic
gagcacagcaaaagacccuaucau

SEQ ID NO: 134163 - RNA, 22 nt, Artificial Sequence
  Synthetic
gauucucaaaguaaaugcucau

SEQ ID NO: 134164 - RNA, 20 nt, Artificial Sequence
  Synthetic
gaaucaccauuauuucucau

SEQ ID NO: 134165 - RNA, 18 nt, Artificial Sequence
  Synthetic
gcaccaacugccagucau

SEQ ID NO: 134166 - RNA, 21 nt, Artificial Sequence
  Synthetic
gcagcaccaacugccagucau

SEQ ID NO: 134167 - RNA, 22 nt, Artificial Sequence
  Synthetic
ggcagcaccaacugccagucau

SEQ ID NO: 134168 - RNA, 18 nt, Artificial Sequence
  Synthetic
guuuuuuuuaagugucau

SEQ ID NO: 134169 - RNA, 24 nt, Artificial Sequence
  Synthetic
gcucccauaauccccaugugucau

SEQ ID NO: 134170 - RNA, 19 nt, Artificial Sequence
  Synthetic
gacauuuuaauuucuucau

SEQ ID NO: 134171 - RNA, 24 nt, Artificial Sequence
  Synthetic
guaauuaagguuaaaugaguucau

SEQ ID NO: 134172 - RNA, 20 nt, Artificial Sequence
  Synthetic
gaaagauaacaaguguucau

SEQ ID NO: 134173 - RNA, 23 nt, Artificial Sequence
  Synthetic
guugaaagauaacaaguguucau

SEQ ID NO: 134174 - RNA, 21 nt, Artificial Sequence
  Synthetic
guauaauaaugaaaaaaagau

SEQ ID NO: 134175 - RNA, 21 nt, Artificial Sequence
  Synthetic
gauaagaggccagaacaagau

SEQ ID NO: 134176 - RNA, 23 nt, Artificial Sequence
  Synthetic
gagauaagaggccagaacaagau

SEQ ID NO: 134177 - RNA, 21 nt, Artificial Sequence
  Synthetic
gaauaaugcuucagagaagau

SEQ ID NO: 134178 - RNA, 23 nt, Artificial Sequence
  Synthetic
gugaauaaugcuucagagaagau

SEQ ID NO: 134179 - RNA, 20 nt, Artificial Sequence
  Synthetic
guuauauguaaaaauaagau

SEQ ID NO: 134180 - RNA, 21 nt, Artificial Sequence
  Synthetic
ggcccugaggggaaggcagau

SEQ ID NO: 134181 - RNA, 19 nt, Artificial Sequence
  Synthetic
gaaguuuuucaaaggagau

SEQ ID NO: 134182 - RNA, 18 nt, Artificial Sequence
  Synthetic
gcucugucccagggagau

SEQ ID NO: 134183 - RNA, 20 nt, Artificial Sequence
  Synthetic
gugcucugucccagggagau

SEQ ID NO: 134184 - RNA, 21 nt, Artificial Sequence
  Synthetic
ggugcucugucccagggagau

SEQ ID NO: 134185 - RNA, 23 nt, Artificial Sequence
  Synthetic
guggugcucugucccagggagau

SEQ ID NO: 134186 - RNA, 21 nt, Artificial Sequence
  Synthetic
gauuacaauucaaaaugagau

SEQ ID NO: 134187 - RNA, 22 nt, Artificial Sequence
  Synthetic
ggauuacaauucaaaaugagau

SEQ ID NO: 134188 - RNA, 23 nt, Artificial Sequence
  Synthetic
gggauuacaauucaaaaugagau

SEQ ID NO: 134189 - RNA, 24 nt, Artificial Sequence
  Synthetic
ggggauuacaauucaaaaugagau

SEQ ID NO: 134190 - RNA, 21 nt, Artificial Sequence
  Synthetic
gauuauaauucaaaaugagau

SEQ ID NO: 134191 - RNA, 22 nt, Artificial Sequence
  Synthetic
ggauuauaauucaaaaugagau

SEQ ID NO: 134192 - RNA, 23 nt, Artificial Sequence
  Synthetic
gggauuauaauucaaaaugagau

SEQ ID NO: 134193 - RNA, 24 nt, Artificial Sequence
  Synthetic
ggggauuauaauucaaaaugagau

SEQ ID NO: 134194 - RNA, 19 nt, Artificial Sequence
  Synthetic
guagaauucaagaugagau

SEQ ID NO: 134195 - RNA, 21 nt, Artificial Sequence
  Synthetic
gaguagaauucaagaugagau

SEQ ID NO: 134196 - RNA, 22 nt, Artificial Sequence
  Synthetic
ggaguagaauucaagaugagau

SEQ ID NO: 134197 - RNA, 23 nt, Artificial Sequence
  Synthetic
gggaguagaauucaagaugagau

SEQ ID NO: 134198 - RNA, 21 nt, Artificial Sequence
  Synthetic
gauuacaauucaaggugagau

SEQ ID NO: 134199 - RNA, 23 nt, Artificial Sequence
  Synthetic
gagauuacaauucaaggugagau

SEQ ID NO: 134200 - RNA, 24 nt, Artificial Sequence
  Synthetic
ggagauuacaauucaaggugagau

SEQ ID NO: 134201 - RNA, 22 nt, Artificial Sequence
  Synthetic
ggauuacaauucaaggugagau

SEQ ID NO: 134202 - RNA, 23 nt, Artificial Sequence
  Synthetic
gggauuacaauucaaggugagau

SEQ ID NO: 134203 - RNA, 24 nt, Artificial Sequence
  Synthetic
gauuaccauaauucaaggugagau

SEQ ID NO: 134204 - RNA, 21 nt, Artificial Sequence
  Synthetic
gcauguaaaagcuggugagau

SEQ ID NO: 134205 - RNA, 23 nt, Artificial Sequence
  Synthetic
gugcauguaaaagcuggugagau

SEQ ID NO: 134206 - RNA, 18 nt, Artificial Sequence
  Synthetic
gcaccuuaggagguagau

SEQ ID NO: 134207 - RNA, 23 nt, Artificial Sequence
  Synthetic
guuuucuucuuaaaacuuuagau

SEQ ID NO: 134208 - RNA, 19 nt, Artificial Sequence
  Synthetic
gagaaaaagauagaaggau

SEQ ID NO: 134209 - RNA, 20 nt, Artificial Sequence
  Synthetic
ggagaaaaagauagaaggau

SEQ ID NO: 134210 - RNA, 19 nt, Artificial Sequence
  Synthetic
guccugugcauuguaggau

SEQ ID NO: 134211 - RNA, 22 nt, Artificial Sequence
  Synthetic
gcuguccugugcauuguaggau

SEQ ID NO: 134212 - RNA, 23 nt, Artificial Sequence
  Synthetic
ggcuguccugugcauuguaggau

SEQ ID NO: 134213 - RNA, 21 nt, Artificial Sequence
  Synthetic
guucauguccuuuguagggau

SEQ ID NO: 134214 - RNA, 23 nt, Artificial Sequence
  Synthetic
gaguucauguccuuuguagggau

SEQ ID NO: 134215 - RNA, 18 nt, Artificial Sequence
  Synthetic
gggagcugaaaaggggau

SEQ ID NO: 134216 - RNA, 19 nt, Artificial Sequence
  Synthetic
ggggagcugaaaaggggau

SEQ ID NO: 134217 - RNA, 22 nt, Artificial Sequence
  Synthetic
gaaggggagcugaaaaggggau

SEQ ID NO: 134218 - RNA, 23 nt, Artificial Sequence
  Synthetic
ggaaggggagcugaaaaggggau

SEQ ID NO: 134219 - RNA, 24 nt, Artificial Sequence
  Synthetic
gggaaggggagcugaaaaggggau

SEQ ID NO: 134220 - RNA, 18 nt, Artificial Sequence
  Synthetic
gcgauuccucugauggau

SEQ ID NO: 134221 - RNA, 21 nt, Artificial Sequence
  Synthetic
guagcgauuccucugauggau

SEQ ID NO: 134222 - RNA, 22 nt, Artificial Sequence
  Synthetic
gguagcgauuccucugauggau

SEQ ID NO: 134223 - RNA, 19 nt, Artificial Sequence
  Synthetic
gaaucaaauggacuuggau

SEQ ID NO: 134224 - RNA, 20 nt, Artificial Sequence
  Synthetic
ggaaucaaauggacuuggau

SEQ ID NO: 134225 - RNA, 18 nt, Artificial Sequence
  Synthetic
gaugauggugcuuuggau

SEQ ID NO: 134226 - RNA, 20 nt, Artificial Sequence
  Synthetic
gagaugauggugcuuuggau

SEQ ID NO: 134227 - RNA, 22 nt, Artificial Sequence
  Synthetic
gccaccacgccuggcccaugau

SEQ ID NO: 134228 - RNA, 24 nt, Artificial Sequence
  Synthetic
gagccaccacgccuggcccaugau

SEQ ID NO: 134229 - RNA, 24 nt, Artificial Sequence
  Synthetic
gcaaacccuccagcugauucugau

SEQ ID NO: 134230 - RNA, 18 nt, Artificial Sequence
  Synthetic
ggauggcugcugauugau

SEQ ID NO: 134231 - RNA, 20 nt, Artificial Sequence
  Synthetic
gaggauggcugcugauugau

SEQ ID NO: 134232 - RNA, 22 nt, Artificial Sequence
  Synthetic
gugaggauggcugcugauugau

SEQ ID NO: 134233 - RNA, 21 nt, Artificial Sequence
  Synthetic
gaacccuuguacaauguugau

SEQ ID NO: 134234 - RNA, 23 nt, Artificial Sequence
  Synthetic
gagaacccuuguacaauguugau

SEQ ID NO: 134235 - RNA, 24 nt, Artificial Sequence
  Synthetic
gaaaaaugacauugcuaguuugau

SEQ ID NO: 134236 - RNA, 18 nt, Artificial Sequence
  Synthetic
gaaaaaaagucaaaauau

SEQ ID NO: 134237 - RNA, 18 nt, Artificial Sequence
  Synthetic
gcaauuuuaccuaaauau

SEQ ID NO: 134238 - RNA, 20 nt, Artificial Sequence
  Synthetic
gucucucuuuucuuaaauau

SEQ ID NO: 134239 - RNA, 20 nt, Artificial Sequence
  Synthetic
gaauauuacauuuucaauau

SEQ ID NO: 134240 - RNA, 18 nt, Artificial Sequence
  Synthetic
guucuguaaguagaauau

SEQ ID NO: 134241 - RNA, 20 nt, Artificial Sequence
  Synthetic
gaguucuguaaguagaauau

SEQ ID NO: 134242 - RNA, 20 nt, Artificial Sequence
  Synthetic
guauaagugguaaauaauau

SEQ ID NO: 134243 - RNA, 18 nt, Artificial Sequence
  Synthetic
gauuaaaaacaaugauau

SEQ ID NO: 134244 - RNA, 18 nt, Artificial Sequence
  Synthetic
guuuauauauaaauauau

SEQ ID NO: 134245 - RNA, 20 nt, Artificial Sequence
  Synthetic
gaguuuauauauaaauauau

SEQ ID NO: 134246 - RNA, 20 nt, Artificial Sequence
  Synthetic
gaauauuuauuucaauauau

SEQ ID NO: 134247 - RNA, 18 nt, Artificial Sequence
  Synthetic
guacaauaguagauauau

SEQ ID NO: 134248 - RNA, 18 nt, Artificial Sequence
  Synthetic
gugucuauauauauauau

SEQ ID NO: 134249 - RNA, 20 nt, Artificial Sequence
  Synthetic
gugugucuauauauauauau

SEQ ID NO: 134250 - RNA, 24 nt, Artificial Sequence
  Synthetic
guacgugugucuauauauauauau

SEQ ID NO: 134251 - RNA, 22 nt, Artificial Sequence
  Synthetic
guuaguaauguuuuaauuauau

SEQ ID NO: 134252 - RNA, 19 nt, Artificial Sequence
  Synthetic
gauauuuuaucuauuauau

SEQ ID NO: 134253 - RNA, 20 nt, Artificial Sequence
  Synthetic
ggauauuuuaucuauuauau

SEQ ID NO: 134254 - RNA, 20 nt, Artificial Sequence
  Synthetic
gaaauuaaugaaauuuauau

SEQ ID NO: 134255 - RNA, 19 nt, Artificial Sequence
  Synthetic
gagauaaacauguuuauau

SEQ ID NO: 134256 - RNA, 23 nt, Artificial Sequence
  Synthetic
gaacaacacaugcuagggacuau

SEQ ID NO: 134257 - RNA, 24 nt, Artificial Sequence
  Synthetic
ggaacaacacaugcuagggacuau

SEQ ID NO: 134258 - RNA, 18 nt, Artificial Sequence
  Synthetic
ggaaggacucaguccuau

SEQ ID NO: 134259 - RNA, 19 nt, Artificial Sequence
  Synthetic
gggaaggacucaguccuau

SEQ ID NO: 134260 - RNA, 20 nt, Artificial Sequence
  Synthetic
guaagugggagcuaagcuau

SEQ ID NO: 134261 - RNA, 21 nt, Artificial Sequence
  Synthetic
gauacgugggagcuaagcuau

SEQ ID NO: 134262 - RNA, 19 nt, Artificial Sequence
  Synthetic
gauuuuuuuuaaaggcuau

SEQ ID NO: 134263 - RNA, 18 nt, Artificial Sequence
  Synthetic
gagugaauuuuaaaguau

SEQ ID NO: 134264 - RNA, 22 nt, Artificial Sequence
  Synthetic
gaaagagugaauuuuaaaguau

SEQ ID NO: 134265 - RNA, 18 nt, Artificial Sequence
  Synthetic
gcuuuuuuuccccaguau

SEQ ID NO: 134266 - RNA, 22 nt, Artificial Sequence
  Synthetic
gcaagcuuuuuuuccccaguau

SEQ ID NO: 134267 - RNA, 24 nt, Artificial Sequence
  Synthetic
gugcaagcuuuuuuuccccaguau

SEQ ID NO: 134268 - RNA, 19 nt, Artificial Sequence
  Synthetic
gaucucugucuccuaguau

SEQ ID NO: 134269 - RNA, 18 nt, Artificial Sequence
  Synthetic
gaauggagugguggguau

SEQ ID NO: 134270 - RNA, 21 nt, Artificial Sequence
  Synthetic
gucucugccagguuuugguau

SEQ ID NO: 134271 - RNA, 23 nt, Artificial Sequence
  Synthetic
gugucucugccagguuuugguau

SEQ ID NO: 134272 - RNA, 23 nt, Artificial Sequence
  Synthetic
guauucuaauucugggcauguau

SEQ ID NO: 134273 - RNA, 18 nt, Artificial Sequence
  Synthetic
gccagagcucuccuguau

SEQ ID NO: 134274 - RNA, 22 nt, Artificial Sequence
  Synthetic
gccagccagagcucuccuguau

SEQ ID NO: 134275 - RNA, 21 nt, Artificial Sequence
  Synthetic
guuugucuguuguugguguau

SEQ ID NO: 134276 - RNA, 19 nt, Artificial Sequence
  Synthetic
gcuguuuuacuuuuuguau

SEQ ID NO: 134277 - RNA, 19 nt, Artificial Sequence
  Synthetic
gaaacaaaccuaaaauuau

SEQ ID NO: 134278 - RNA, 19 nt, Artificial Sequence
  Synthetic
gaaggaaauagaauauuau

SEQ ID NO: 134279 - RNA, 18 nt, Artificial Sequence
  Synthetic
gagaaaacacauuauuau

SEQ ID NO: 134280 - RNA, 21 nt, Artificial Sequence
  Synthetic
guacaagugcaauuuuauuau

SEQ ID NO: 134281 - RNA, 22 nt, Artificial Sequence
  Synthetic
gguacaagugcaauuuuauuau

SEQ ID NO: 134282 - RNA, 23 nt, Artificial Sequence
  Synthetic
ggguacaagugcaauuuuauuau

SEQ ID NO: 134283 - RNA, 24 nt, Artificial Sequence
  Synthetic
gggguacaagugcaauuuuauuau

SEQ ID NO: 134284 - RNA, 23 nt, Artificial Sequence
  Synthetic
gcaaauucgagcguuuuucuuau

SEQ ID NO: 134285 - RNA, 21 nt, Artificial Sequence
  Synthetic
gcugcgugaagccuuguuuau

SEQ ID NO: 134286 - RNA, 20 nt, Artificial Sequence
  Synthetic
guuuaaaaauaaaguuuuau

SEQ ID NO: 134287 - RNA, 23 nt, Artificial Sequence
  Synthetic
guaguuuaaaaauaaaguuuuau

SEQ ID NO: 134288 - RNA, 21 nt, Artificial Sequence
  Synthetic
gaaacuggggaaagcaaaacu

SEQ ID NO: 134289 - RNA, 21 nt, Artificial Sequence
  Synthetic
gauaaaaacacacaacaaacu

SEQ ID NO: 134290 - RNA, 19 nt, Artificial Sequence
  Synthetic
guuuucuucucugcaaacu

SEQ ID NO: 134291 - RNA, 20 nt, Artificial Sequence
  Synthetic
gaaagagcgagagagaaacu

SEQ ID NO: 134292 - RNA, 21 nt, Artificial Sequence
  Synthetic
gcucauccauaagcagcaacu

SEQ ID NO: 134293 - RNA, 18 nt, Artificial Sequence
  Synthetic
gacucacccagagcaacu

SEQ ID NO: 134294 - RNA, 19 nt, Artificial Sequence
  Synthetic
guuccauaucuuugcaacu

SEQ ID NO: 134295 - RNA, 20 nt, Artificial Sequence
  Synthetic
gguuccauaucuuugcaacu

SEQ ID NO: 134296 - RNA, 23 nt, Artificial Sequence
  Synthetic
gaugguuccauaucuuugcaacu

SEQ ID NO: 134297 - RNA, 24 nt, Artificial Sequence
  Synthetic
ggaugguuccauaucuuugcaacu

SEQ ID NO: 134298 - RNA, 18 nt, Artificial Sequence
  Synthetic
gaccagugauuuucaacu

SEQ ID NO: 134299 - RNA, 23 nt, Artificial Sequence
  Synthetic
guuuuuuuuuuuuuuuuucaacu

SEQ ID NO: 134300 - RNA, 22 nt, Artificial Sequence
  Synthetic
gccuccccagccacacagaacu

SEQ ID NO: 134301 - RNA, 23 nt, Artificial Sequence
  Synthetic
ggccuccccagccacacagaacu

SEQ ID NO: 134302 - RNA, 19 nt, Artificial Sequence
  Synthetic
gugcaaucaaacuagaacu

SEQ ID NO: 134303 - RNA, 20 nt, Artificial Sequence
  Synthetic
gcaaaacugaaauaggaacu

SEQ ID NO: 134304 - RNA, 24 nt, Artificial Sequence
  Synthetic
gaaagcaaaacugaaauaggaacu

SEQ ID NO: 134305 - RNA, 22 nt, Artificial Sequence
  Synthetic
gccuacccagccauguggaacu

SEQ ID NO: 134306 - RNA, 23 nt, Artificial Sequence
  Synthetic
ggccuacccagccauguggaacu

SEQ ID NO: 134307 - RNA, 22 nt, Artificial Sequence
  Synthetic
gccuccccagccauguggaacu

SEQ ID NO: 134308 - RNA, 23 nt, Artificial Sequence
  Synthetic
ggccuccccagccauguggaacu

SEQ ID NO: 134309 - RNA, 22 nt, Artificial Sequence
  Synthetic
gccucuccagccauguggaacu

SEQ ID NO: 134310 - RNA, 23 nt, Artificial Sequence
  Synthetic
ggccucuccagccauguggaacu

SEQ ID NO: 134311 - RNA, 22 nt, Artificial Sequence
  Synthetic
gccuccccagccaugcugaacu

SEQ ID NO: 134312 - RNA, 23 nt, Artificial Sequence
  Synthetic
ggccuccccagccaugcugaacu

SEQ ID NO: 134313 - RNA, 18 nt, Artificial Sequence
  Synthetic
guuggauaguggugaacu

SEQ ID NO: 134314 - RNA, 22 nt, Artificial Sequence
  Synthetic
gccuccccagccauauugaacu

SEQ ID NO: 134315 - RNA, 23 nt, Artificial Sequence
  Synthetic
ggccuccccagccauauugaacu

SEQ ID NO: 134316 - RNA, 18 nt, Artificial Sequence
  Synthetic
ggcaccauucuaggcacu

SEQ ID NO: 134317 - RNA, 19 nt, Artificial Sequence
  Synthetic
gggcaccauucuaggcacu

SEQ ID NO: 134318 - RNA, 21 nt, Artificial Sequence
  Synthetic
gauauaaauuugagagucacu

SEQ ID NO: 134319 - RNA, 23 nt, Artificial Sequence
  Synthetic
gagauauaaauuugagagucacu

SEQ ID NO: 134320 - RNA, 19 nt, Artificial Sequence
  Synthetic
guuccugcauuaauucacu

SEQ ID NO: 134321 - RNA, 24 nt, Artificial Sequence
  Synthetic
gacacaugccagauuucaaagacu

SEQ ID NO: 134322 - RNA, 18 nt, Artificial Sequence
  Synthetic
gugauguugaauaagacu

SEQ ID NO: 134323 - RNA, 20 nt, Artificial Sequence
  Synthetic
gugugauguugaauaagacu

SEQ ID NO: 134324 - RNA, 19 nt, Artificial Sequence
  Synthetic
gcuagagugaguuaagacu

SEQ ID NO: 134325 - RNA, 24 nt, Artificial Sequence
  Synthetic
gauuaacauuucaaucagcagacu

SEQ ID NO: 134326 - RNA, 22 nt, Artificial Sequence
  Synthetic
gccucccuagucaugugagacu

SEQ ID NO: 134327 - RNA, 23 nt, Artificial Sequence
  Synthetic
ggccucccuagucaugugagacu

SEQ ID NO: 134328 - RNA, 20 nt, Artificial Sequence
  Synthetic
gacaaauccuuagcuagacu

SEQ ID NO: 134329 - RNA, 19 nt, Artificial Sequence
  Synthetic
guuagaagaaaaauggacu

SEQ ID NO: 134330 - RNA, 23 nt, Artificial Sequence
  Synthetic
gcugccagucagaggaccauacu

SEQ ID NO: 134331 - RNA, 22 nt, Artificial Sequence
  Synthetic
guuucauuucuucuucuauacu

SEQ ID NO: 134332 - RNA, 24 nt, Artificial Sequence
  Synthetic
gaguuucauuucuucuucuauacu

SEQ ID NO: 134333 - RNA, 20 nt, Artificial Sequence
  Synthetic
guauugauaucuuggcuacu

SEQ ID NO: 134334 - RNA, 19 nt, Artificial Sequence
  Synthetic
gccuguaguuccaucuacu

SEQ ID NO: 134335 - RNA, 21 nt, Artificial Sequence
  Synthetic
gugccuguaguuccaucuacu

SEQ ID NO: 134336 - RNA, 20 nt, Artificial Sequence
  Synthetic
gaacugccuaaauauuuacu

SEQ ID NO: 134337 - RNA, 19 nt, Artificial Sequence
  Synthetic
guucuugcaauaguuuacu

SEQ ID NO: 134338 - RNA, 19 nt, Artificial Sequence
  Synthetic
guucuugugauaguuuacu

SEQ ID NO: 134339 - RNA, 24 nt, Artificial Sequence
  Synthetic
guucuguucuugugauaguuuacu

SEQ ID NO: 134340 - RNA, 20 nt, Artificial Sequence
  Synthetic
gccuucuaauuuaguuuacu

SEQ ID NO: 134341 - RNA, 24 nt, Artificial Sequence
  Synthetic
gaaagccuucuaauuuaguuuacu

SEQ ID NO: 134342 - RNA, 22 nt, Artificial Sequence
  Synthetic
gaaacagagaaauauuuuuacu

SEQ ID NO: 134343 - RNA, 18 nt, Artificial Sequence
  Synthetic
gacaacauggaugaaccu

SEQ ID NO: 134344 - RNA, 18 nt, Artificial Sequence
  Synthetic
gucccucccaugacaccu

SEQ ID NO: 134345 - RNA, 19 nt, Artificial Sequence
  Synthetic
ggucccucccaugacaccu

SEQ ID NO: 134346 - RNA, 20 nt, Artificial Sequence
  Synthetic
gggucccucccaugacaccu

SEQ ID NO: 134347 - RNA, 24 nt, Artificial Sequence
  Synthetic
gaucucauuguucaauucccaccu

SEQ ID NO: 134348 - RNA, 19 nt, Artificial Sequence
  Synthetic
gaagauguuuuaugcaccu

SEQ ID NO: 134349 - RNA, 20 nt, Artificial Sequence
  Synthetic
ggaagauguuuuaugcaccu

SEQ ID NO: 134350 - RNA, 19 nt, Artificial Sequence
  Synthetic
gugugcacaggauucaccu

SEQ ID NO: 134351 - RNA, 18 nt, Artificial Sequence
  Synthetic
gaagaugagaaaggaccu

SEQ ID NO: 134352 - RNA, 23 nt, Artificial Sequence
  Synthetic
gcuacaaagagaauaaaauaccu

SEQ ID NO: 134353 - RNA, 19 nt, Artificial Sequence
  Synthetic
guccuaaccccugguaccu

SEQ ID NO: 134354 - RNA, 22 nt, Artificial Sequence
  Synthetic
gaaguccuaaccccugguaccu

SEQ ID NO: 134355 - RNA, 18 nt, Artificial Sequence
  Synthetic
guagaaggaugguuaccu

SEQ ID NO: 134356 - RNA, 20 nt, Artificial Sequence
  Synthetic
gaguagaaggaugguuaccu

SEQ ID NO: 134357 - RNA, 22 nt, Artificial Sequence
  Synthetic
gagaguagaaggaugguuaccu

SEQ ID NO: 134358 - RNA, 18 nt, Artificial Sequence
  Synthetic
gaauauuugcauuacccu

SEQ ID NO: 134359 - RNA, 19 nt, Artificial Sequence
  Synthetic
ggaauauuugcauuacccu

SEQ ID NO: 134360 - RNA, 24 nt, Artificial Sequence
  Synthetic
guuuuggaauauuugcauuacccu

SEQ ID NO: 134361 - RNA, 21 nt, Artificial Sequence
  Synthetic
gcaauaggaucuccugagccu

SEQ ID NO: 134362 - RNA, 22 nt, Artificial Sequence
  Synthetic
ggcaauaggaucuccugagccu

SEQ ID NO: 134363 - RNA, 24 nt, Artificial Sequence
  Synthetic
gaggcaauaggaucuccugagccu

SEQ ID NO: 134364 - RNA, 22 nt, Artificial Sequence
  Synthetic
gcuuccaugugguguugagccu

SEQ ID NO: 134365 - RNA, 24 nt, Artificial Sequence
  Synthetic
guucucauugcucaauucccgccu

SEQ ID NO: 134366 - RNA, 23 nt, Artificial Sequence
  Synthetic
guuccacaugacuggggaggccu

SEQ ID NO: 134367 - RNA, 20 nt, Artificial Sequence
  Synthetic
gcaggucugagaugaggccu

SEQ ID NO: 134368 - RNA, 23 nt, Artificial Sequence
  Synthetic
gcuacaaagagaauaaagugccu

SEQ ID NO: 134369 - RNA, 20 nt, Artificial Sequence
  Synthetic
gcauuaugacuuaugugccu

SEQ ID NO: 134370 - RNA, 20 nt, Artificial Sequence
  Synthetic
gccucagcuucccaaauccu

SEQ ID NO: 134371 - RNA, 24 nt, Artificial Sequence
  Synthetic
gccugccucagcuucccaaauccu

SEQ ID NO: 134372 - RNA, 20 nt, Artificial Sequence
  Synthetic
guagaaugauuuauaauccu

SEQ ID NO: 134373 - RNA, 18 nt, Artificial Sequence
  Synthetic
ggcuuuuccauacauccu

SEQ ID NO: 134374 - RNA, 21 nt, Artificial Sequence
  Synthetic
guugaauugucuaguucuccu

SEQ ID NO: 134375 - RNA, 20 nt, Artificial Sequence
  Synthetic
gucaaaaccagaaaaguccu

SEQ ID NO: 134376 - RNA, 20 nt, Artificial Sequence
  Synthetic
guucgaguguucaauguccu

SEQ ID NO: 134377 - RNA, 18 nt, Artificial Sequence
  Synthetic
gaguccaguuucauuccu

SEQ ID NO: 134378 - RNA, 19 nt, Artificial Sequence
  Synthetic
ggaguccaguuucauuccu

SEQ ID NO: 134379 - RNA, 22 nt, Artificial Sequence
  Synthetic
guaggaguccaguuucauuccu

SEQ ID NO: 134380 - RNA, 23 nt, Artificial Sequence
  Synthetic
gguaggaguccaguuucauuccu

SEQ ID NO: 134381 - RNA, 20 nt, Artificial Sequence
  Synthetic
guagaaugauuucuauuccu

SEQ ID NO: 134382 - RNA, 21 nt, Artificial Sequence
  Synthetic
gguagaaugauuucuauuccu

SEQ ID NO: 134383 - RNA, 21 nt, Artificial Sequence
  Synthetic
ggcaugaccacgugacuuccu

SEQ ID NO: 134384 - RNA, 22 nt, Artificial Sequence
  Synthetic
guaccucugguagaauucagcu

SEQ ID NO: 134385 - RNA, 21 nt, Artificial Sequence
  Synthetic
gccucagccucccaaagcgcu

SEQ ID NO: 134386 - RNA, 19 nt, Artificial Sequence
  Synthetic
gcuuauaguucuggaggcu

SEQ ID NO: 134387 - RNA, 18 nt, Artificial Sequence
  Synthetic
gguggaugacuugaggcu

SEQ ID NO: 134388 - RNA, 19 nt, Artificial Sequence
  Synthetic
ggguggaugacuugaggcu

SEQ ID NO: 134389 - RNA, 22 nt, Artificial Sequence
  Synthetic
gucggguggaugacuugaggcu

SEQ ID NO: 134390 - RNA, 24 nt, Artificial Sequence
  Synthetic
gagucggguggaugacuugaggcu

SEQ ID NO: 134391 - RNA, 22 nt, Artificial Sequence
  Synthetic
gaaauuauaaauguuugaggcu

SEQ ID NO: 134392 - RNA, 24 nt, Artificial Sequence
  Synthetic
gagaaauuauaaauguuugaggcu

SEQ ID NO: 134393 - RNA, 21 nt, Artificial Sequence
  Synthetic
gacuggugguugccaggggcu

SEQ ID NO: 134394 - RNA, 22 nt, Artificial Sequence
  Synthetic
ggacuggugguugccaggggcu

SEQ ID NO: 134395 - RNA, 23 nt, Artificial Sequence
  Synthetic
gcccauucaguaugauaauggcu

SEQ ID NO: 134396 - RNA, 21 nt, Artificial Sequence
  Synthetic
guaucccauauccaaaaugcu

SEQ ID NO: 134397 - RNA, 23 nt, Artificial Sequence
  Synthetic
gaguaucccauauccaaaaugcu

SEQ ID NO: 134398 - RNA, 20 nt, Artificial Sequence
  Synthetic
gacuuaguuccccagcugcu

SEQ ID NO: 134399 - RNA, 21 nt, Artificial Sequence
  Synthetic
ggacuuaguuccccagcugcu

SEQ ID NO: 134400 - RNA, 24 nt, Artificial Sequence
  Synthetic
gaaggacuuaguuccccagcugcu

SEQ ID NO: 134401 - RNA, 21 nt, Artificial Sequence
  Synthetic
gccucagccucccaaagugcu

SEQ ID NO: 134402 - RNA, 19 nt, Artificial Sequence
  Synthetic
gaguuuuaaaagaugugcu

SEQ ID NO: 134403 - RNA, 19 nt, Artificial Sequence
  Synthetic
guggaagauaguuugugcu

SEQ ID NO: 134404 - RNA, 23 nt, Artificial Sequence
  Synthetic
guauuauauacuugauacuugcu

SEQ ID NO: 134405 - RNA, 21 nt, Artificial Sequence
  Synthetic
gaacucugauacacuguugcu

SEQ ID NO: 134406 - RNA, 22 nt, Artificial Sequence
  Synthetic
ggaacucugauacacuguugcu

SEQ ID NO: 134407 - RNA, 23 nt, Artificial Sequence
  Synthetic
gggaacucugauacacuguugcu

SEQ ID NO: 134408 - RNA, 19 nt, Artificial Sequence
  Synthetic
guucuuauguuaauuugcu

SEQ ID NO: 134409 - RNA, 19 nt, Artificial Sequence
  Synthetic
gaaguaaaauugcuuugcu

SEQ ID NO: 134410 - RNA, 22 nt, Artificial Sequence
  Synthetic
gcagaaguaaaauugcuuugcu

SEQ ID NO: 134411 - RNA, 24 nt, Artificial Sequence
  Synthetic
gugcagaaguaaaauugcuuugcu

SEQ ID NO: 134412 - RNA, 19 nt, Artificial Sequence
  Synthetic
gauuaaaucauucuuugcu

SEQ ID NO: 134413 - RNA, 19 nt, Artificial Sequence
  Synthetic
guuuccauauaaguuugcu

SEQ ID NO: 134414 - RNA, 19 nt, Artificial Sequence
  Synthetic
guccuugccauaguuugcu

SEQ ID NO: 134415 - RNA, 24 nt, Artificial Sequence
  Synthetic
gccuccagcuuuguucuuuuugcu

SEQ ID NO: 134416 - RNA, 21 nt, Artificial Sequence
  Synthetic
guuucugaaggucaagaaucu

SEQ ID NO: 134417 - RNA, 24 nt, Artificial Sequence
  Synthetic
gcaguuucugaaggucaagaaucu

SEQ ID NO: 134418 - RNA, 24 nt, Artificial Sequence
  Synthetic
gaaauucuuuguuuuccuuaaucu

SEQ ID NO: 134419 - RNA, 21 nt, Artificial Sequence
  Synthetic
gccauccucacucuaccaucu

SEQ ID NO: 134420 - RNA, 18 nt, Artificial Sequence
  Synthetic
ggcccucagacagcaucu

SEQ ID NO: 134421 - RNA, 22 nt, Artificial Sequence
  Synthetic
gaccaacugacacagaaacucu

SEQ ID NO: 134422 - RNA, 22 nt, Artificial Sequence
  Synthetic
gcucuacugaaucagagacucu

SEQ ID NO: 134423 - RNA, 19 nt, Artificial Sequence
  Synthetic
guuaacaauuguugacucu

SEQ ID NO: 134424 - RNA, 18 nt, Artificial Sequence
  Synthetic
gcaagucacuuaaccucu

SEQ ID NO: 134425 - RNA, 19 nt, Artificial Sequence
  Synthetic
ggcaagucacuuaaccucu

SEQ ID NO: 134426 - RNA, 20 nt, Artificial Sequence
  Synthetic
gggcaagucacuuaaccucu

SEQ ID NO: 134427 - RNA, 19 nt, Artificial Sequence
  Synthetic
gucagaugacuuaaccucu

SEQ ID NO: 134428 - RNA, 20 nt, Artificial Sequence
  Synthetic
gcccccaguggcauagcucu

SEQ ID NO: 134429 - RNA, 19 nt, Artificial Sequence
  Synthetic
gauacacauaauuggcucu

SEQ ID NO: 134430 - RNA, 21 nt, Artificial Sequence
  Synthetic
gagauacacauaauuggcucu

SEQ ID NO: 134431 - RNA, 18 nt, Artificial Sequence
  Synthetic
gucuuuucauaugucucu

SEQ ID NO: 134432 - RNA, 20 nt, Artificial Sequence
  Synthetic
gauacugucaaauguucucu

SEQ ID NO: 134433 - RNA, 23 nt, Artificial Sequence
  Synthetic
gauaagcaacuucagcaaagucu

SEQ ID NO: 134434 - RNA, 18 nt, Artificial Sequence
  Synthetic
gcaacuucagccaagucu

SEQ ID NO: 134435 - RNA, 20 nt, Artificial Sequence
  Synthetic
gagcaacuucagccaagucu

SEQ ID NO: 134436 - RNA, 19 nt, Artificial Sequence
  Synthetic
gccacgugguguugagucu

SEQ ID NO: 134437 - RNA, 18 nt, Artificial Sequence
  Synthetic
gcauggaaaucucugucu

SEQ ID NO: 134438 - RNA, 18 nt, Artificial Sequence
  Synthetic
gcauuuuucccauugucu

SEQ ID NO: 134439 - RNA, 19 nt, Artificial Sequence
  Synthetic
ggcauuuuucccauugucu

SEQ ID NO: 134440 - RNA, 22 nt, Artificial Sequence
  Synthetic
gaaggcauuuuucccauugucu

SEQ ID NO: 134441 - RNA, 24 nt, Artificial Sequence
  Synthetic
gugaaggcauuuuucccauugucu

SEQ ID NO: 134442 - RNA, 18 nt, Artificial Sequence
  Synthetic
gaacucacauccuugucu

SEQ ID NO: 134443 - RNA, 18 nt, Artificial Sequence
  Synthetic
gcuauuauaauuuugucu

SEQ ID NO: 134444 - RNA, 18 nt, Artificial Sequence
  Synthetic
guuguuauuuuuacuucu

SEQ ID NO: 134445 - RNA, 18 nt, Artificial Sequence
  Synthetic
gagauggcuucugcuucu

SEQ ID NO: 134446 - RNA, 19 nt, Artificial Sequence
  Synthetic
ggagauggcuucugcuucu

SEQ ID NO: 134447 - RNA, 18 nt, Artificial Sequence
  Synthetic
ggagaaacccucaguucu

SEQ ID NO: 134448 - RNA, 19 nt, Artificial Sequence
  Synthetic
gggagaaacccucaguucu

SEQ ID NO: 134449 - RNA, 22 nt, Artificial Sequence
  Synthetic
gcacagcauauucacagguucu

SEQ ID NO: 134450 - RNA, 24 nt, Artificial Sequence
  Synthetic
gagcacagcauauucacagguucu

SEQ ID NO: 134451 - RNA, 20 nt, Artificial Sequence
  Synthetic
guuuguuuuuuaaugguucu

SEQ ID NO: 134452 - RNA, 24 nt, Artificial Sequence
  Synthetic
guuuguuuguuuuuuaaugguucu

SEQ ID NO: 134453 - RNA, 19 nt, Artificial Sequence
  Synthetic
guacaauuacugugguucu

SEQ ID NO: 134454 - RNA, 21 nt, Artificial Sequence
  Synthetic
gaaauaauggugguauguucu

SEQ ID NO: 134455 - RNA, 19 nt, Artificial Sequence
  Synthetic
gauuuuauucaucuguucu

SEQ ID NO: 134456 - RNA, 18 nt, Artificial Sequence
  Synthetic
guuaauuuaugucuuucu

SEQ ID NO: 134457 - RNA, 23 nt, Artificial Sequence
  Synthetic
guuuuguuaauuuaugucuuucu

SEQ ID NO: 134458 - RNA, 19 nt, Artificial Sequence
  Synthetic
guuucugauuugauuuucu

SEQ ID NO: 134459 - RNA, 21 nt, Artificial Sequence
  Synthetic
gaacaauauacaguauuuucu

SEQ ID NO: 134460 - RNA, 22 nt, Artificial Sequence
  Synthetic
ggaacaauauacaguauuuucu

SEQ ID NO: 134461 - RNA, 23 nt, Artificial Sequence
  Synthetic
gggaacaauauacaguauuuucu

SEQ ID NO: 134462 - RNA, 19 nt, Artificial Sequence
  Synthetic
gauacugauuuccuuuucu

SEQ ID NO: 134463 - RNA, 19 nt, Artificial Sequence
  Synthetic
gcaaaaagggagacaaagu

SEQ ID NO: 134464 - RNA, 24 nt, Artificial Sequence
  Synthetic
gauucugacuuguacuuucaaagu

SEQ ID NO: 134465 - RNA, 19 nt, Artificial Sequence
  Synthetic
gagaauggggggagaaagu

SEQ ID NO: 134466 - RNA, 20 nt, Artificial Sequence
  Synthetic
gaaauauuguuuuagaaagu

SEQ ID NO: 134467 - RNA, 19 nt, Artificial Sequence
  Synthetic
gaucccucccacaacaagu

SEQ ID NO: 134468 - RNA, 20 nt, Artificial Sequence
  Synthetic
ggaucccucccacaacaagu

SEQ ID NO: 134469 - RNA, 20 nt, Artificial Sequence
  Synthetic
gauucuuugaucucagaagu

SEQ ID NO: 134470 - RNA, 20 nt, Artificial Sequence
  Synthetic
gcauggacucacucguaagu

SEQ ID NO: 134471 - RNA, 21 nt, Artificial Sequence
  Synthetic
gagauaccaucucacaccagu

SEQ ID NO: 134472 - RNA, 19 nt, Artificial Sequence
  Synthetic
gauagcaucucacaccagu

SEQ ID NO: 134473 - RNA, 21 nt, Artificial Sequence
  Synthetic
gagauagcaucucacaccagu

SEQ ID NO: 134474 - RNA, 19 nt, Artificial Sequence
  Synthetic
gauaccaucacauaccagu

SEQ ID NO: 134475 - RNA, 21 nt, Artificial Sequence
  Synthetic
gagauaccaucacauaccagu

SEQ ID NO: 134476 - RNA, 22 nt, Artificial Sequence
  Synthetic
ggagauaccaucacauaccagu

SEQ ID NO: 134477 - RNA, 19 nt, Artificial Sequence
  Synthetic
gauaccaucucacuccagu

SEQ ID NO: 134478 - RNA, 21 nt, Artificial Sequence
  Synthetic
gagauaccaucucacuccagu

SEQ ID NO: 134479 - RNA, 19 nt, Artificial Sequence
  Synthetic
gauaucaucucauuccagu

SEQ ID NO: 134480 - RNA, 21 nt, Artificial Sequence
  Synthetic
gagauaucaucucauuccagu

SEQ ID NO: 134481 - RNA, 21 nt, Artificial Sequence
  Synthetic
gguacaggcucuugccucagu

SEQ ID NO: 134482 - RNA, 24 nt, Artificial Sequence
  Synthetic
gcugguacaggcucuugccucagu

SEQ ID NO: 134483 - RNA, 19 nt, Artificial Sequence
  Synthetic
gccaaugauggauaagagu

SEQ ID NO: 134484 - RNA, 21 nt, Artificial Sequence
  Synthetic
guucaauucccaccuaugagu

SEQ ID NO: 134485 - RNA, 18 nt, Artificial Sequence
  Synthetic
gagcaaggggagaguagu

SEQ ID NO: 134486 - RNA, 20 nt, Artificial Sequence
  Synthetic
gugagcaaggggagaguagu

SEQ ID NO: 134487 - RNA, 20 nt, Artificial Sequence
  Synthetic
gccucugccucccgaguagu

SEQ ID NO: 134488 - RNA, 18 nt, Artificial Sequence
  Synthetic
ggcacaugugcacaacgu

SEQ ID NO: 134489 - RNA, 19 nt, Artificial Sequence
  Synthetic
gggcacaugugcacaacgu

SEQ ID NO: 134490 - RNA, 24 nt, Artificial Sequence
  Synthetic
gaauuaagguugcugaagacccgu

SEQ ID NO: 134491 - RNA, 22 nt, Artificial Sequence
  Synthetic
guucuuuaacuugagugugcgu

SEQ ID NO: 134492 - RNA, 23 nt, Artificial Sequence
  Synthetic
gguucuuuaacuugagugugcgu

SEQ ID NO: 134493 - RNA, 21 nt, Artificial Sequence
  Synthetic
gaacacgcuccuuuagcucgu

SEQ ID NO: 134494 - RNA, 18 nt, Artificial Sequence
  Synthetic
guggcgguugcugaaggu

SEQ ID NO: 134495 - RNA, 19 nt, Artificial Sequence
  Synthetic
gguggcgguugcugaaggu

SEQ ID NO: 134496 - RNA, 20 nt, Artificial Sequence
  Synthetic
ggguggcgguugcugaaggu

SEQ ID NO: 134497 - RNA, 20 nt, Artificial Sequence
  Synthetic
gcauacucucacucacaggu

SEQ ID NO: 134498 - RNA, 20 nt, Artificial Sequence
  Synthetic
gcauauucucacucacaggu

SEQ ID NO: 134499 - RNA, 21 nt, Artificial Sequence
  Synthetic
gucuuacucugucacccaggu

SEQ ID NO: 134500 - RNA, 21 nt, Artificial Sequence
  Synthetic
gucucgcucugucgcccaggu

SEQ ID NO: 134501 - RNA, 24 nt, Artificial Sequence
  Synthetic
gaagucucgcucugucgcccaggu

SEQ ID NO: 134502 - RNA, 21 nt, Artificial Sequence
  Synthetic
guuuuguuccauugcccaggu

SEQ ID NO: 134503 - RNA, 23 nt, Artificial Sequence
  Synthetic
gaguuuuguuccauugcccaggu

SEQ ID NO: 134504 - RNA, 24 nt, Artificial Sequence
  Synthetic
ggaguuuuguuccauugcccaggu

SEQ ID NO: 134505 - RNA, 22 nt, Artificial Sequence
  Synthetic
guuucacucuuguugcccaggu

SEQ ID NO: 134506 - RNA, 24 nt, Artificial Sequence
  Synthetic
gaguuucacucuuguugcccaggu

SEQ ID NO: 134507 - RNA, 20 nt, Artificial Sequence
  Synthetic
gaaacagaaaugccucaggu

SEQ ID NO: 134508 - RNA, 18 nt, Artificial Sequence
  Synthetic
ggaauuacauagagaggu

SEQ ID NO: 134509 - RNA, 18 nt, Artificial Sequence
  Synthetic
gcuuugggaggccgaggu

SEQ ID NO: 134510 - RNA, 20 nt, Artificial Sequence
  Synthetic
gugcuuugggaggccgaggu

SEQ ID NO: 134511 - RNA, 21 nt, Artificial Sequence
  Synthetic
ggugcuuugggaggccgaggu
